United States Patent Application Publication US 2018/0126003 A1 - sequence listing, part 128

SEQ ID NO: 224228 - DNA, 996 bp, Artificial Sequence
  derived and/or modified sequence
atgtcctcttcagtagaacaaaagaagggcccgacgcggcagcgaaagtgtgggttttgcaaaagcaaccgcgacaaggagtgcggccagctccttatcagcgagaaccagaaagtggcggcccaccacaagtgtatgatgtgcagtctgtgccactgccccggggccacaattggatgcgacgtaaaaacgtgccacaggacgtatcattaccattgcgccctgcacgataaggcacagatccgtgagaaaccctctcagggcatttatatggtgtactgccgaaagcataaaaagacagctcacaactctgaagcggacctagaagagtcattcaatgaacatgagctcgagccatcatctcctaagtcgaaaaagaagtcccgtaagggacggccccgcaaaactaattttaagggcctctctgaagacactcgctccaccagtagtcatggaaccgacgaaatggaatcctcttcatacagagacagaagtccccacaggtcctctccaagtgatacaaggcccaagtgcgggttttgccatgttggagaggaagaaaatgaagctcgcggaaagctccacattttcaacgctaaaaaagcagcagctcactataagtgcatgctgtttagttccggcaccgtgcagctcaccacaacatcccgagcagaattcggcgactttgacatcaaaacagtgcttcaggagattaagaggggcaagagaatgaaatgcacgctgtgttcacagcccggagcaactattggctgcgagattaaggcatgtgttaaaacttaccattaccactgcggggttcaagacaaagctaagtacatcgaaaatatgtccagaggaatctataagttatactgtaagaatcacagcgggaatgacgagcgcgatgaagaggatgaggaaagagaatccaagagtcgcggcaaggttgagatcgaccagcagcagctcactcagcaacaattaaatggaaattag

SEQ ID NO: 224229 - DNA, 1098 bp, Artificial Sequence
  derived and/or modified sequence
atgagcagctctgtggagcagaagaagggccccacccggcagaggaaatgtggcttctgcaagagcaacagagacaaggaatgtggccagctgctgatcagcgagaaccagaaggtggccgcccaccacaagtgcatgctgttcagcagcgccctggtgagcagccacagcgacaatgaaagcctgggcggcttcagcattgaagatgtgcagaaggagatcaagaggggcaccaagctgatgtgcagcctgtgccactgccctggggccaccatcggctgtgatgtgaagacctgccacaggacctaccactaccactgtgccctgcatgacaaggcccagatccgggagaagcccagccagggcatctacatggtgtactgcaggaagcacaagaagacagcccacaacagcgaggccgacctggaggagagcttcaatgaacatgagctggagcccagcagccccaagagcaagaagaagagcaggaagggccggcccaggaagaccaacttcaagggcctgtctgaggacaccaggagcaccagcagccatggaacagatgagatggagagcagcagctacagagacaggagcccccacaggagcagccccagcgacacccggcccaagtgtggcttctgccacgtgggggaggaggagaatgaggcccggggcaagctgcacatcttcaatgccaagaaggctgctgcccactacaagtgcatgctgttcagcagcggcaccgtgcagctgaccaccaccagcagagctgagtttggagactttgacatcaagacagtgctgcaggagatcaagaggggcaagaggatgaagtgcaccctgtgcagccagcccggggccaccatcggctgtgagatcaaggcctgtgtgaagacctaccactaccactgcggcgtgcaggacaaggccaagtacatcgagaacatgagccggggcatctacaagctgtactgcaagaaccacagcggaaatgatgaaagagatgaggaggatgaggagcgggagagcaagagccggggcaaggtggagattgaccagcagcagctgacccagcagcagctgaatggaaattag

SEQ ID NO: 224230 - DNA, 975 bp, Artificial Sequence
  derived and/or modified sequence
atgagcagctctgtggagcagaagaagggccccacccggcagaggaaatgtggcttctgcaagagcaacagagacaaggaatgtggccagctgctgatcagcgagaaccagaaggtggccgcccaccacaagtgcatgctgttcagcagcgccctggtgagcagccacagcgacaatgaaagcctgggcggcttcagcattgaagatgtgcagaaggagatcaagaggggcaccaagctgatgtgcagcctgtgccactgccctggggccaccatcggctgtgatgtgaagacctgccacaggacctaccactaccactgtgccctgcatgacaaggcccagatccgggagaagcccagccagggcatctacatggtgtactgcaggaagcacaagaagacagcccacaacagcgaggccgctgacctggaggagagcttcaatgagcacgagctggagcccagcagccccaagagcaagaagaagagcaggaagggccggcccaggaagaccaacttcaagggcctgtctgaggacaccaggagcaccagcagccacggcacagatgagatggagagcagcagctacagagacaggagcccccacaggagcagccccagcgacacccggcccaagtgtggcttctgccacgtgggggaggaggagaatgaggcccggggcaagctgcacatcttcaatgccaagaaggccgccgcccactacaagtgcatgctgttcagcagcggcaccgtgcagctgaccaccaccagcagagctgagtttggagactttgacatcaagacagtgctgcaggagatcaagaggggcaagaggatgaagtgcaccctgtgcagccagcccggggccaccatcggctgtgagatcaaggcctgtgtgaagacctaccactaccactgcggcgtgcaggacaaggccaagtacatcgagaacatgagccggggcatctacaagtag

SEQ ID NO: 224231 - DNA, 1101 bp, Artificial Sequence
  derived and/or modified sequence
atgagcagctctgtggagcagaagaagggccccacccggcagaggaaatgtggcttctgcaagagcaacagagacaaggaatgtggccagctgctgatcagcgagaaccagaaggtggccgcccaccacaagtgcatgctgttcagcagcgccctggtgagcagccacagcgacaatgaaagcctgggcggcttcagcattgaagatgtgcagaaggagatcaagaggggcaccaagctgatgtgcagcctgtgccactgccctggggccaccatcggctgtgatgtgaagacctgccacaggacctaccactaccactgtgccctgcatgacaaggcccagatccgggagaagcccagccagggcatctacatggtgtactgcaggaagcacaagaagacagcccacaacagcgaggccgctgacctggaggagagcttcaatgagcacgagctggagcccagcagccccaagagcaagaagaagagcaggaagggccggcccaggaagaccaacttcaagggcctgtctgaggacaccaggagcaccagcagccacggcacagatgagatggagagcagcagctacagagacaggagcccccacaggagcagccccagcgacacccggcccaagtgtggcttctgccacgtgggggaggaggagaatgaggcccggggcaagctgcacatcttcaatgccaagaaggccgccgcccactacaagtgcatgctgttcagcagcggcaccgtgcagctgaccaccaccagcagagctgagtttggagactttgacatcaagacagtgctgcaggagatcaagaggggcaagaggatgaagtgcaccctgtgcagccagcccggggccaccatcggctgtgagatcaaggcctgtgtgaagacctaccactaccactgcggcgtgcaggacaaggccaagtacatcgagaacatgagccggggcatctacaagctgtactgcaagaaccacagcggaaatgatgaaagagatgaagaagatgaggagcgggagagcaagagccggggcaaggtggagattgaccagcagcagctgacccagcagcagctgaatggaaattag

SEQ ID NO: 224232 - DNA, 996 bp, Artificial Sequence
  derived and/or modified sequence
atgagcagctctgtggagcagaagaagggccccacccggcagaggaaatgtggcttctgcaagagcaacagagacaaggaatgtggccagctgctgatcagcgagaaccagaaggtggccgcccaccacaagtgcatgatgtgcagcctgtgccactgccctggggccaccatcggctgtgatgtgaagacctgccacaggacctaccactaccactgtgccctgcatgacaaggcccagatccgggagaagcccagccagggcatctacatggtgtactgcaggaagcacaagaagacagcccacaacagcgaggccgacctggaggagagcttcaatgaacatgagctggagcccagcagccccaagagcaagaagaagagcaggaagggccggcccaggaagaccaacttcaagggcctgtctgaggacaccaggagcaccagcagccatggaacagatgagatggagagcagcagctacagagacaggagcccccacaggagcagccccagcgacacccggcccaagtgtggcttctgccacgtgggggaggaggagaatgaggcccggggcaagctgcacatcttcaatgccaagaaggctgctgcccactacaagtgcatgctgttcagcagcggcaccgtgcagctgaccaccaccagcagagctgagtttggagactttgacatcaagacagtgctgcaggagatcaagaggggcaagaggatgaagtgcaccctgtgcagccagcccggggccaccatcggctgtgagatcaaggcctgtgtgaagacctaccactaccactgcggcgtgcaggacaaggccaagtacatcgagaacatgagccggggcatctacaagctgtactgcaagaaccacagcggaaatgatgaaagagatgaggaggatgaggagcgggagagcaagagccggggcaaggtggagattgaccagcagcagctgacccagcagcagctgaatggaaattag

SEQ ID NO: 224233 - DNA, 1098 bp, Artificial Sequence
  derived and/or modified sequence
atgagcagcagcgtggagcagaagaagggccccacccggcagcggaaatgcgggttttgtaagagcaaccgcgacaaagaatgtggacagctcttgatttccgaaaaccaaaaggtggccgcacaccacaagtgcatgctcttcagttctgcgcttgtgagcagccacagtgataacgagtccctggggggattcagcattgaggatgtgcagaaagagatcaagcgaggaacaaaattgatgtgctccttgtgccactgcccgggcgctaccataggctgtgatgtcaagacatgtcatagaacttatcattaccattgcgccctgcatgataaagcccaaattagggagaaacctagccagggcatatatatggtctactgcagaaagcacaagaaaacagctcacaactccgaagctgaccttgaggagtcgttcaacgagcatgaattggagccttctagtccgaagtctaagaagaaatcacgcaagggaaggcctcggaaaaccaacttcaagggattgagtgaagacactcggtcaacatcatcacacggtactgatgagatggagtcctcttcttaccgagaccgaagcccacaccggtcctccccttccgacaccagacccaaatgcgggttttgtcatgtaggagaagaggaaaacgaagcgaggggcaaacttcacatcttcaacgcaaaaaaggctgctgctcactacaagtgtatgcttttcagcagtggaactgtgcagctgactaccacctcaagggccgagttcggcgatttcgatatcaagaccgtactgcaggagataaaaagaggaaaacggatgaagtgtactctctgtagccaaccaggcgcaactataggttgtgaaatcaaagcatgcgtaaaaacctatcattaccactgtggagttcaggacaaggctaaatatatcgagaatatgtctagaggaatttataagctgtactgcaagaatcactctgggaatgatgaaagagatgaagaggacgaagagagggaaagtaagtctcgcggtaaggttgagattgaccagcaacagctgacccaacagcagctgaacggaaattag

SEQ ID NO: 224234 - DNA, 975 bp, Artificial Sequence
  derived and/or modified sequence
atgagcagcagcgtggagcagaagaagggccccacccggcagcggaaatgcgggttctgtaagtcaaatcgcgataaggagtgcggccagctcctcatttccgagaaccagaaggtagcagctcaccacaaatgcatgctatttagcagcgctctggtctcctcccacagcgataacgagagcctcgggggcttttctattgaggacgttcagaaagagattaagagaggcacaaaactgatgtgctcactgtgccactgcccaggggccaccatcgggtgcgatgtgaagacatgtcaccgaacctaccattatcactgtgcccttcacgataaagctcagatcagagagaaaccttcacagggcatctacatggtgtattgccgcaagcacaaaaagacggcccacaattctgaggctgcggacctcgaggagtcttttaacgagcacgaattggagcctagttccccaaaatccaagaagaagtctagaaagggtagaccgaggaagacaaattttaaaggactgtccgaagatactagaagcacgtcatcacacggtactgacgaaatggaatctagctcttacagagaccgcagtcctcaccgctcgagccctagcgatacgcggcccaaatgcggattctgccatgtgggtgaagaggagaatgaggcgcgggggaaactccacatcttcaacgccaagaaggccgctgcccattacaagtgcatgctgttctcttctggcacggtgcagttgactactacaagcagagctgagttcggggacttcgatattaaaaccgttctgcaggagattaaacgcgggaagcgcatgaaatgtacactctgttcacaaccaggcgcaacaattggctgcgagattaaggcctgcgtaaaaacttaccactaccattgcggtgtgcaggacaaggccaagtacattgagaacatgtcccgcggtatctataagtag

SEQ ID NO: 224235 - DNA, 1098 bp, Artificial Sequence
  derived and/or modified sequence
atgagcagcagcgtggagcagaagaagggccccacccggcagcggaagtgcggcttttgcaagagtaacagagacaaggaatgtggccagctcctcatttctgaaaatcagaaggtggctgcccaccacaagtgcatgctttttagctctgccctggtctcatcccacagcgataacgagtctttgggcggcttcagtattgaagacgttcagaaagaaatcaaaaggggaaccaagctaatgtgttcattgtgccactgtcccggggctactatcgggtgtgatgtgaaaacctgtcataggacgtaccactatcactgcgcactgcatgataaggcccagatacgtgaaaaaccaagccaaggaatctacatggtatattgccgaaagcataagaaaaccgcacataactccgaggcggatctggaggaaagcttcaatgaacacgaactggagcccagttcacccaaatcaaaaaaaaagagccgcaagggaagaccaagaaagaccaatttcaaaggtctaagcgaggatacccgatctacctctagccatgggaccgacgaaatggaatcatcttcgtatcgagacaggtctccccatcgatcctccccttccgatacaaggcctaagtgtgggttctgccatgtgggagaagaggagaacgaggctcggggaaaacttcatatatttaacgccaagaaggccgcggcccactataagtgtatgctcttttcctccggcacagtgcaactgaccacgactagtcgcgcagagttcggagactttgacatcaaaacagtacttcaggaaattaagcgcggaaagaggatgaagtgcactctttgtagccagcccggagcaacaataggatgcgaaataaaagcctgcgtgaagacctaccactatcactgtggtgtccaagacaaagctaaatacattgagaatatgtctcgaggcatttataagctatactgtaaaaatcactccggtaatgacgagcgcgacgaggaggacgaggagcgcgaatctaagagccgcggaaaagtggagattgatcaacagcaactcactcaacaacagctgaacgggaattag

SEQ ID NO: 224236 - DNA, 1101 bp, Artificial Sequence
  derived and/or modified sequence
atgagcagcagcgtggagcagaagaagggccccacccggcagcggaagtgcggattctgtaaaagtaacagggacaaggaatgcgggcagttattgattagcgagaatcagaaagtggcggctcatcacaaatgcatgctctttagttcggccctagtttctagccactcagacaacgagtccctgggaggcttctcaatcgaggacgtgcagaaagagatcaagcggggcacgaaactaatgtgtagtctgtgtcactgtcctggagcaacgatcgggtgcgacgttaaaacctgtcaccgtacgtatcactaccattgcgctcttcatgacaaagctcaaatccgggaaaaaccctcccaagggatttacatggtgtactgcagaaagcacaagaagaccgcccacaatagtgaagcagcggatcttgaagagagcttcaacgaacatgaacttgagcctagtagccccaagtccaagaagaaaagcagaaaaggcaggcccaggaagaccaatttcaaaggcctttcagaagacactcggtcgacaagtagtcatgggacagatgaaatggaaagttcttcatacagagaccgctccccgcaccgaagctcaccctctgacacacggcccaagtgcgggttctgccacgttggagaagaggaaaacgaagctaggggaaagctgcacatctttaacgccaagaaggccgccgcacactataagtgcatgctgttttcatccgggactgttcagttaactactactagtcgagccgaatttggcgactttgatatcaaaaccgtgctgcaagagatcaagcgcggaaaacgcatgaaatgcaccttgtgttcccagccaggcgccacaataggatgtgagatcaaggcttgtgtgaaaacgtaccactaccattgtggcgttcaggataaagctaagtacatcgaaaatatgagcagagggatctataagctgtactgcaagaatcacagtggaaacgatgaaagagacgaagaggacgaagagcgggagtctaagagccgcggtaaggttgaaatcgaccagcagcagttgacccagcaacaactgaacggaaattag

SEQ ID NO: 224237 - DNA, 996 bp, Artificial Sequence
  derived and/or modified sequence
atgagcagcagcgtggagcagaagaagggccccacccggcagcggaagtgcggattctgtaaatcgaatcgcgataaggaatgtggtcagctgttaatctctgagaatcagaaggtggccgcccatcataaatgcatgatgtgctcactgtgccactgccctggcgccacaattggctgtgacgtcaagacttgccacagaacatatcattatcattgcgcccttcacgacaaggcacagatccgagagaagccttcacaagggatatacatggtgtactgccgaaagcacaagaagactgctcataatagcgaggccgacctcgaggaatcatttaacgaacatgagttggagccttcctccccaaagagcaagaaaaagtccaggaaggggcgtcctcggaagacgaactttaagggtctgtcagaggacacacgaagcacttctagtcacggaacagacgaaatggaatcctcctcttacagggatcggtctcctcatagaagttccccatcagatacccgacccaagtgcggtttctgtcacgtgggcgaggaggaaaatgaggctcggggaaaactgcacatctttaacgcgaaaaaagccgctgctcattacaagtgtatgctgtttagctctgggacggtgcagctgaccacaacctcccgcgccgagtttggggattttgatatcaagactgtgctccaggagattaagcggggtaagcgcatgaaatgcacactctgttcacagccaggggcgacgattgggtgtgagatcaaagcctgcgttaagacctaccactatcattgtggggtgcaggacaaagccaaatatattgagaacatgtcacgcgggatctataagctgtattgcaagaaccattccgggaatgacgaacgcgacgaggaagatgaggaacgcgagtcaaaaagtcgcggaaaagttgagatcgaccagcagcagttaacccaacaacagctgaacggaaactag

SEQ ID NO: 224238 - DNA, 4759 bp, Artificial Sequence
  derived and/or modified sequence
aagggcgctccgcgagcccgtctctcctcgaatgaaaggaaacaacctccggcgacagagccccgctctcaggcactgctggagaaccgagaccgacttctttctctttaccctcattggcgcttctctcctgcagtccgcctctgggccctgccgcatttcttgagacttaaagtggcattctaaaggcaatttaaaaatcatgtcaagctcagttgaacagaaaaaagggcctacaagacagcgcaaatgtggcttttgtaagtcaaatagagacaaggaatgtggacagttactaatatctgaaaaccagaaggtggcagcgcaccataagtgcatgctcttttcatctgctttggtatcatcacactctgataatgaaagtcttggtggattttctattgaagatgtccaaaaggaaattaaaagaggcacgaagctgatgtgttctttgtgccattgtcctggagcaacaattggttgtgatgtgaaaacatgtcacaggacataccactaccactgtgcattgcatgataaagctcaaatacgagagaaaccttcacaaggaatttacatggtctattgccgaaaacacaagaaaactgcacataactccgaagctgatttagaagaaagttttaatgaacatgaactggagccctcatcacctaaaagtaaaaagaaaagtcgcaaaggaaggccaagaaaaactaattttaaagggctgtcagaagataccaggtccacatcctcccatggaacagatgaaatggaaagtagttcctatagagataggtctccacacagaagcagccctagtgacaccaggcctaaatgtggattttgccatgtaggggaggaagaaaatgaagcacgaggaaaactgcatatatttaatgccaagaaggcagctgcccattataagtgcatgttgttttcttctggcacagtccagctcacaacaacatcaagagcagaatttggagactttgatattaaaactgtacttcaggagattaaacgaggaaaaagaatgaaatgtacactttgcagtcagcctggtgctactattggatgtgaaataaaagcctgtgttaagacttaccattaccactgtggagtacaagacaaagctaaatacattgaaaatatgtcacgaggaatttacaaactatactgtaaaaatcatagtggaaatgatgagagagatgaagaagatgaggaacgagagagtaaaagccgaggaaaagtagaaattgatcagcaacaactaactcagcagcaacttaatggaaactaggtatgaaagttaattatatgggatctgttgtcaggatacaatacacactgatatatacatgttgaagtaatggtatgcagtaagattttttttaatcctattatgtttagttaagagcatgttactaaaatgctgaggattttgtaggcttgcatagtagttgttttttaactagctgattttgtaaccataaaaacaagctatctgctttatcaataagtgtagttgtaatgtcaaatcaataagatattcacactcctcaataacattatattgattgtgttcccctcaagcatcatattttacatttttttatcatcttttaaacaggttcatgggacagagttagaaaactgggaatgaataagacatccataactactattcttttttcactgttttctaaaatcaaaaagggtttgtaactttttactgcccaactcttagatccttcattgaactgcctaaaaatgtcttgtttgttttatgagccctcactagaaggctgagtttgacatgttgatattacgtagctatagtttgcagtttctgggaagcaattgaaacactattaaccctgtgtatagtgtcaacagttaaagcagacgaaacgaagtaagctatatttctggactgaacaaagctctgctgtttagagcatttaagtttgtttagtggatccatactcaaaggaaagcataagcaaattttcctttacaatgcaaacatgccactggtggcagcacatggtaatttgtggatttttttttcatactcaagtaatggaggctagaaatgaagagaaccttctttttctcttgactttgacagcacatgctaaaaatctcttccaagaagtatgctaaagcttttcatttggttcctgttaaagttgttctcactgaccagcatggactcaggcaactggtaatgataagctatgagctccagtgcttttgccaaaattctcttgacagcacacctcctctctttccatgttatacaaaggacttctggcaaaatgattgagtccttcaagtttaaactaacatttggcaacagcaaattaaacgtttttaagatgtaaagaaagggttaccgcttgctaaggacttcagacaccatgtccgaaacctgttcctctcaagtgccctgttgtgtggaacacttcacatattggcgcacagtacgtaaggaggtctcatgtgctgtaggagtaaaaaagtctttgcataaaacagtatttatttttacttttgtgaccactattttagaaactttatttaatattttaatgttttcagtcattgctttggttatctataaaataggcttttgtgccctacttttcttcttgtagggcttggtggtgttttatcgattgtcagaattgtttttgaaagcctaagaacccagctttttagaaaggattttcacactggcatttctaggtagtgatattttcttccacttacctgctgaagcacatttatgcatttctttatggcaaaaccaaataactttagttgtggtctgcctgatactaccatagcacctcagtaccaaggggagggattttgactagttgaattattaagccaccacaataaagcagatttttaaataagaaataataatgttaacttgactgtacattgagatattctgcagctgatagagcagcattttaaaaatgtaacaggtggaaaattacactgtgcttaatgactgatttttttttaaactgcgagtcccttaagatcacgtttgtcaagtgtgtattcacacatttacttaaatcaagggactcaatgcttgcttttattttaaccatcttttactatttttagaaggaaactagctttagtagtgggttgccctgtatgttttctctttttgctcttaatatgccattgggtttttgtgtgtatgtgattttcaaaattcatgacttgaagtgcaaggacagatctagatgtttgtttaccaagctatgtgacttctcccaaaggatctgtactttctttccttacaacagcttgaaaatcattattttaaaatccttaaatcactgtgtctagatcattttttacattgtgtgccatagacttacccatgggacaacagagctccttcatttttggacaactactgtaatcattttttttttaggaaaaatggaaggtgccgggggtaatcatggccagtcaataattatataaaggagttcaaatactatagctgtcagttgatgaatttgttatgtagtaaaatgtatgactttgtatgggtttcttcagccctttttctgccactagcaaccagaatagcactttaccttttggttggctagataagtggctgactacctgtttttctcactgtggtgtgattggctaaacaatctcgcattaaaaattcaaatgtaaattgaattcacatgaaaaatcatgtttggttgtaaacctccaatgttttgattctctaatcatgttttcgtcacatgctgagtaaaagtgccttacaatgtaaaaattgtacagtacttatgttcccaagtagcatcatcatcttctgggtagtaattacattgtggtattaatatttagaaaaatggacctcagcagtgtatttactgtacatctcttaagtccttaactgtagttttaataagcatgacattatttgataagtatataacatttacatcatttcaaaaaatactgccgttactgtcttttatgcatattttagcctgaaattttgaagcgtcttttttctttcttttttctttttttgttttgttttttgttattgatattaaacagtgtaatctttgcaagcgtatattgaagattattctggagcatttattgccttaccagaaatgttagtaggaaatgttctttagagtagaaagatagacttgagtttctatacttttaagaagagctctttgttcctgggggaggggggcagggggtgaattttactttcatctcaagttattaaaaacccacaactgaagtaaattttatttcaagaatcagcagttttagaatttcagatagtacttgctcagaagtacatgctactcaagatattaagagataacaagatctgtagatctgctattgaatcagaatctgtgtacttgaacaaatgtgtgaatctcaaatatctcaaagcaaaagaaaaagtgttctagagtgttgttgcttttttaaaaaaagcgctgaagttagaccaaggtatacagttttgttctaacagacatttaggttaattgtaaagataaggaatgcattatgggtcaaaaatcaaacattcctctcatgttatgtatattttgttcctgttatattggctttattttcaaaattgtagtttgtagtattagtttccttttattggtattcttgcatatactattcattcaataaatgacttatgactttc

SEQ ID NO: 224239 - DNA, 4186 bp, Artificial Sequence
  derived and/or modified sequence
tccgcgagcccgtctctcctcgaatgaaaggaaacaacctccggcgacagagccccgctctcaggcactgctggagaaccgagaccgacttctttctctttaccctcattggcgcttctctcctgcagtccgcctctgggccctgccgcatttcttgagacttaaagtggcattctaaaggcaatttaaaaatcatgtcaagctcagttgaacagaaaaaagggcctacaagacagcgcaaatgtggcttttgtaagtcaaatagagacaaggaatgtggacagttactaatatctgaaaaccagaaggtggcagcgcaccataagtgcatgctcttttcatctgctttggtatcatcacactctgataatgaaagtcttggtggattttctattgaagatgtccaaaaggaaattaaaagaggcacgaagctgatgtgttctttgtgccattgtcctggagcaacaattggttgtgatgtgaaaacatgtcacaggacataccactaccactgtgcattgcatgataaagctcaaatacgagagaaaccttcacaaggaatttacatggtctattgccgaaaacacaagaaaactgcacataactccgaagcagctgatttagaagaaagttttaatgaacatgaactggagccctcatcacctaaaagtaaaaagaaaagtcgcaaaggaaggccaagaaaaactaattttaaagggctgtcagaagataccaggtccacatcctcccatggaacagatgaaatggaaagtagttcctatagagataggtctccacacagaagcagccctagtgacaccaggcctaaatgtggattttgccatgtaggggaggaagaaaatgaagcacgaggaaaactgcatatatttaatgccaagaaggcagctgcccattataagtgcatgttgttttcttctggcacagtccagctcacaacaacatcaagagcagaatttggagactttgatattaaaactgtacttcaggagattaaacgaggaaaaagaatgaaatgtacactttgcagtcagcctggtgctactattggatgtgaaataaaagcctgtgttaagacttaccattaccactgtggagtacaagacaaagctaaatacattgaaaatatgtcacgaggaatttacaagtaagaaaacaacagttgtctatttccctaaacatgttagtaaccgtccttaaatagatgacattagtttactcagtctctgttcttaaatggtgtttagttaagtatagaatactgagcacattatgtaaggaatgagtactacaattggcattttcctctgactacatatccctggattagcattcatccatccaatattagttaggcttcctatgtgccagccattgtgcttgaagctgggcatatgccagtgatcaaaactacatacactgggccgggtgcggtggctcacatctgtaatcccagcactttgggaggccgaggcgggtgaatcacctgaggtcagaagttcgagaccagcctgaccaacatggtgaaaccccgtctctactaaaatacaaaaattacccaggtgtggtggcaggcacctgtaatcccagctactcgggaggctgaggcaggagaatcgcttgaacccaggaggcagaggttgcagtgagccaagattgcgccattgcactccagcctgagcaacaagagtgaaattccatctcaaacaaacaaaaaaaaaacactacatatactctcctcatgaagcttacagtctattgggagagacctattatttaagtggccaaatatgcaattacaacatagcagcgtaagtgttctaaagaagttacaaagtgttatgagagcgtataagaaggaagagctaacctagtctgtagtggggagtatttaaaatgttctgaaggaaatagtgctcagctttaagctgagatattaaggacaaaggtgagccttggttgggggaggtattctgggcagagagaagagcatatgcaagagccccgggtgagacagaagcagaggtggaaatggggagatgtgttaggaggctagtgctggtggtccaggtgagaattattggtagcttagaataggatatggtagacagaaggcaaaagattctcttgagaagatggtgaaaaagtaaagtatgaagatttgggattgggggtcaccctcttttttatgggtcttccacttacctgtgctgccttgtgctaggtggtgttaatgtatatctgtaatggttccatttgtttaatcgactggagtataagttggtagggactcttgaagttttgatttgccatccagagttgtaaagcacttccttactctcacatgcctagaatgcaataaaccaatgacttccgggtctagtattctgtgtaaaagacaatgtacacaagcagtcaccaagtcatttgggtgcctacataaggcgctatgctgtataataaaatttgccaaattctgtttaataataaaggcacaaatgttttcaagtgagttctataaagcctttaaggaacaaataatcccaatgttatttaagaggtccagcacatagcaagagatggaaaacttattgattcattctgtaaagcttacataactgtggtaccaaacctaacaaagatacgttaaaagaaaaacaaacaaactgtagaccaatctccccttttttttttttttttactttgagacaggatctgactctgttgtccaggctggagtgcagtagtgtgatcatgactcactgcagccttgaccttctgccctcacgtgatcctcccaactcagcctcccgagtagctgggactataggcgcatgccatcatgcccagctaattttttttgttttgttttttgaggaggaggaagggttttgttttgttgcccagactggtctcaaactcctgggctcaagcgttctccctgcctcagtcttctaaagtgctaggattacaggcatgagccatgcccagccacaatctcacttttataaatatacaaaaattctaaataaaatattagtaaatcaaatccagctctgtattctaagaattgaaagactgttcaggctgggcacagtggctcacacttataatctcaacactttgggaggcttaggtgggaggattgcttgaggccaggagttccagatcagtgtgggcaacaaagcgagactctcatctctatataattttaaaaatagaaagaaaaaagactgttcaaaattaggaaatatattaatataatttattagaattagtagagtaaataatcttatcaccttccttatagatggtgaaaagacatttgataacattcaacatcaatttctgaattttaaagtaacgagtgctcttggtaagctaggaatcttaataggtgtttatgagaaaaacaacagcaaataacttatttattattaaagtgaaggagcaatggttcttaaccaggagtgagcctcagaatcactgtggggtggataaggccctcttttaaaatgttcatgtctaagccctacctgtagagatttaaatttagtaggtctgggttggtgcccaaaccatgcacttttctgactccccaggtgattcttatgttcccctctaattgagaaccattagactatactttaattcagattaggaagaagacaaggatgccaactactagcatgacttttaacattcttctagagggttaagctgatgcaagacaaaaagaaagaggcccagtgcattgactcacgtctataatcccacacttgggaggccaaagcgagaggattgcttgaggccaggaattcgagaccaacctgggcaacatagtgagaccccatctctacacaacatttaaaaattagccaggcaaagtggcacacgcctgtagccccagctatacaggaggcccagactggaggattgcctgagccctggaggtagagaccagcctgggcaacatagtgagaccctgtctcaatttaaaaaataaaagaaggccgggcgcagtggctcacgcctgtaatctcaacactttgggaggccgaggctggcagatcacgaggtcaggagtttgagaccagcttcgagatcgccccactgcactccagcctgggcgacagagcgaaactctgtctcaaaaaaaaaaaaaaaa

SEQ ID NO: 224240 - DNA, 4489 bp, Artificial Sequence
  derived and/or modified sequence
cggcgcgctcgggacgtatcaacgctctgtgggtcgtgtgcgtgcgaggggggcgacgtaagggcgctccgcgagcccgtctctcctcgaatgaaaggaaacaacctccggcgacagagccccgctctcaggcactgctggagaaccgagaccgacttctttctctttaccctcattggcgcttctctcctgcagtccgcctctgggccctgccgcatttcttgagacttaaagtggcattctaaaggcaatttaaaaatcatgtcaagctcagttgaacagaaaaaagggcctacaagacagcgcaaatgtggcttttgtaagtcaaatagagacaaggaatgtggacagttactaatatctgaaaaccagaaggtggcagcgcaccataagtgcatgctcttttcatctgctttggtatcatcacactctgataatgaaagtcttggtggattttctattgaagatgtccaaaaggaaattaaaagaggcacgaagctgatgtgttctttgtgccattgtcctggagcaacaattggttgtgatgtgaaaacatgtcacaggacataccactaccactgtgcattgcatgataaagctcaaatacgagagaaaccttcacaaggaatttacatggtctattgccgaaaacacaagaaaactgcacataactccgaagctgatttagaagaaagttttaatgaacatgaactggagccctcatcacctaaaagtaaaaagaaaagtcgcaaaggaaggccaagaaaaactaattttaaagggctgtcagaagataccaggtccacatcctcccatggaacagatgaaatggaaagtagttcctatagagataggtctccacacagaagcagccctagtgacaccaggcctaaatgtggattttgccatgtaggggaggaagaaaatgaagcacgaggaaaactgcatatatttaatgccaagaaggcagctgcccattataagtgcatgttgttttcttctggcacagtccagctcacaacaacatcaagagcagaatttggagactttgatattaaaactgtacttcaggagattaaacgaggaaaaagaatgaaatgtacactttgcagtcagcctggtgctactattggatgtgaaataaaagcctgtgttaagacttaccattaccactgtggagtacaagacaaagctaaatacattgaaaatatgtcacgaggaatttacaaactatactgtaaaaatcatagtggaaatgatgagagagatgaagaagatgaggaacgagagagtaaaagccgaggaaaagtagaaattgatcagcaacaactaactcagcagcaacttaatggaaactaggttcatgggacagagttagaaaactgggaatgaataagacatccataactactattcttttttcactgttttctaaaatcaaaaagggtttgtaactttttactgcccaactcttagatccttcattgaactgcctaaaaatgtcttgtttgttttatgagccctcactagaaggctgagtttgacatgttgatattacgtagctatagtttgcagtttctgggaagcaattgaaacactattaaccctgtgtatagtgtcaacagttaaagcagacgaaacgaagtaagctatatttctggactgaacaaagctctgctgtttagagcatttaagtttgtttagtggatccatactcaaaggaaagcataagcaaattttcctttacaatgcaaacatgccactggtggcagcacatggtaatttgtggatttttttttcatactcaagtaatggaggctagaaatgaagagaaccttctttttctcttgactttgacagcacatgctaaaaatctcttccaagaagtatgctaaagcttttcatttggttcctgttaaagttgttctcactgaccagcatggactcaggcaactggtaatgataagctatgagctccagtgcttttgccaaaattctcttgacagcacacctcctctctttccatgttatacaaaggacttctggcaaaatgattgagtccttcaagtttaaactaacatttggcaacagcaaattaaacgtttttaagatgtaaagaaagggttaccgcttgctaaggacttcagacaccatgtccgaaacctgttcctctcaagtgccctgttgtgtggaacacttcacatattggcgcacagtacgtaaggaggtctcatgtgctgtaggagtaaaaaagtctttgcataaaacagtatttatttttacttttgtgaccactattttagaaactttatttaatattttaatgttttcagtcattgctttggttatctataaaataggcttttgtgccctacttttcttcttgtagggcttggtggtgttttatcgattgtcagaattgtttttgaaagcctaagaacccagctttttagaaaggattttcacactggcatttctaggtagtgatattttcttccacttacctgctgaagcacatttatgcatttctttatggcaaaaccaaataactttagttgtggtctgcctgatactaccatagcacctcagtaccaaggggagggattttgactagttgaattattaagccaccacaataaagcagatttttaaataagaaataataatgttaacttgactgtacattgagatattctgcagctgatagagcagcattttaaaaatgtaacaggtggaaaattacactgtgcttaatgactgatttttttttaaactgcgagtcccttaagatcacgtttgtcaagtgtgtattcacacatttacttaaatcaagggactcaatgcttgcttttattttaaccatcttttactatttttagaaggaaactagctttagtagtgggttgccctgtatgttttctctttttgctcttaatatgccattgggtttttgtgtgtatgtgattttcaaaattcatgacttgaagtgcaaggacagatctagatgtttgtttaccaagctatgtgacttctcccaaaggatctgtactttctttccttacaacagcttgaaaatcattattttaaaatccttaaatcactgtgtctagatcattttttacattgtgtgccatagacttacccatgggacaacagagctccttcatttttggacaactactgtaatcattttttttttaggaaaaatggaaggtgccgggggtaatcatggccagtcaataattatataaaggagttcaaatactatagctgtcagttgatgaatttgttatgtagtaaaatgtatgactttgtatgggtttcttcagccctttttctgccactagcaaccagaatagcactttaccttttggttggctagataagtggctgactacctgtttttctcactgtggtgtgattggctaaacaatctcgcattaaaaattcaaatgtaaattgaattcacatgaaaaatcatgtttggttgtaaacctccaatgttttgattctctaatcatgttttcgtcacatgctgagtaaaagtgccttacaatgtaaaaattgtacagtacttatgttcccaagtagcatcatcatcttctgggtagtaattacattgtggtattaatatttagaaaaatggacctcagcagtgtatttactgtacatctcttaagtccttaactgtagttttaataagcatgacattatttgataagtatataacatttacatcatttcaaaaaatactgccgttactgtcttttatgcatattttagcctgaaattttgaagcgtcttttttctttcttttttctttttttgttttgttttttgttattgatattaaacagtgtaatctttgcaagcgtatattgaagattattctggagcatttattgccttaccagaaatgttagtaggaaatgttctttagagtagaaagatagacttgagtttctatacttttaagaagagctctttgttcctgggggaggggggcagggggtgaattttactttcatctcaagttattaaaaacccacaactgaagtaaattttatttcaagaatcagcagttttagaatttcagatagtacttgctcagaagtacatgctactcaagatattaagagataacaagatctgtagatctgctattgaatcagaatctgtgtacttgaacaaatgtgtgaatctcaaatatctcaaagcaaaagaaaaagtgttctagagtgttgttgcttttttaaaaaaagcgctgaagttagaccaaggtatacagttttgttctaacagacatttaggttaattgtaaagataaggaatgcattatgggtcaaaaatcaaacattcctctcatgttatgtatattttgttcctgttatattggctttattttcaaaattgtagtttgtagtattagtttccttttattggtattcttgcatatactattcattcaataaatgacttatgactttca

SEQ ID NO: 224241 - DNA, 4432 bp, Artificial Sequence
  derived and/or modified sequence
aagggcgctccgcgagcccgtctctcctcgaatgaaaggaaacaacctccggcgacagagccccgctctcaggcactgctggagaaccgagaccgacttctttctctttaccctcattggcgcttctctcctgcagtccgcctctgggccctgccgcatttcttgagacttaaagtggcattctaaaggcaatttaaaaatcatgtcaagctcagttgaacagaaaaaagggcctacaagacagcgcaaatgtggcttttgtaagtcaaatagagacaaggaatgtggacagttactaatatctgaaaaccagaaggtggcagcgcaccataagtgcatgctcttttcatctgctttggtatcatcacactctgataatgaaagtcttggtggattttctattgaagatgtccaaaaggaaattaaaagaggcacgaagctgatgtgttctttgtgccattgtcctggagcaacaattggttgtgatgtgaaaacatgtcacaggacataccactaccactgtgcattgcatgataaagctcaaatacgagagaaaccttcacaaggaatttacatggtctattgccgaaaacacaagaaaactgcacataactccgaagcagctgatttagaagaaagttttaatgaacatgaactggagccctcatcacctaaaagtaaaaagaaaagtcgcaaaggaaggccaagaaaaactaattttaaagggctgtcagaagataccaggtccacatcctcccatggaacagatgaaatggaaagtagttcctatagagataggtctccacacagaagcagccctagtgacaccaggcctaaatgtggattttgccatgtaggggaggaagaaaatgaagcacgaggaaaactgcatatatttaatgccaagaaggcagctgcccattataagtgcatgttgttttcttctggcacagtccagctcacaacaacatcaagagcagaatttggagactttgatattaaaactgtacttcaggagattaaacgaggaaaaagaatgaaatgtacactttgcagtcagcctggtgctactattggatgtgaaataaaagcctgtgttaagacttaccattaccactgtggagtacaagacaaagctaaatacattgaaaatatgtcacgaggaatttacaaactatactgtaaaaatcatagtggaaatgatgagagagatgaagaagatgaggaacgagagagtaaaagccgaggaaaagtagaaattgatcagcaacaactaactcagcagcaacttaatggaaactaggttcatgggacagagttagaaaactgggaatgaataagacatccataactactattcttttttcactgttttctaaaatcaaaaagggtttgtaactttttactgcccaactcttagatccttcattgaactgcctaaaaatgtcttgtttgttttatgagccctcactagaaggctgagtttgacatgttgatattacgtagctatagtttgcagtttctgggaagcaattgaaacactattaaccctgtgtatagtgtcaacagttaaagcagacgaaacgaagtaagctatatttctggactgaacaaagctctgctgtttagagcatttaagtttgtttagtggatccatactcaaaggaaagcataagcaaattttcctttacaatgcaaacatgccactggtggcagcacatggtaatttgtggatttttttttcatactcaagtaatggaggctagaaatgaagagaaccttctttttctcttgactttgacagcacatgctaaaaatctcttccaagaagtatgctaaagcttttcatttggttcctgttaaagttgttctcactgaccagcatggactcaggcaactggtaatgataagctatgagctccagtgcttttgccaaaattctcttgacagcacacctcctctctttccatgttatacaaaggacttctggcaaaatgattgagtccttcaagtttaaactaacatttggcaacagcaaattaaacgtttttaagatgtaaagaaagggttaccgcttgctaaggacttcagacaccatgtccgaaacctgttcctctcaagtgccctgttgtgtggaacacttcacatattggcgcacagtacgtaaggaggtctcatgtgctgtaggagtaaaaaagtctttgcataaaacagtatttatttttacttttgtgaccactattttagaaactttatttaatattttaatgttttcagtcattgctttggttatctataaaataggcttttgtgccctacttttcttcttgtagggcttggtggtgttttatcgattgtcagaattgtttttgaaagcctaagaacccagctttttagaaaggattttcacactggcatttctaggtagtgatattttcttccacttacctgctgaagcacatttatgcatttctttatggcaaaaccaaataactttagttgtggtctgcctgatactaccatagcacctcagtaccaaggggagggattttgactagttgaattattaagccaccacaataaagcagatttttaaataagaaataataatgttaacttgactgtacattgagatattctgcagctgatagagcagcattttaaaaatgtaacaggtggaaaattacactgtgcttaatgactgatttttttttaaactgcgagtcccttaagatcacgtttgtcaagtgtgtattcacacatttacttaaatcaagggactcaatgcttgcttttattttaaccatcttttactatttttagaaggaaactagctttagtagtgggttgccctgtatgttttctctttttgctcttaatatgccattgggtttttgtgtgtatgtgattttcaaaattcatgacttgaagtgcaaggacagatctagatgtttgtttaccaagctatgtgacttctcccaaaggatctgtactttctttccttacaacagcttgaaaatcattattttaaaatccttaaatcactgtgtctagatcattttttacattgtgtgccatagacttacccatgggacaacagagctccttcatttttggacaactactgtaatcattttttttttaggaaaaatggaaggtgccgggggtaatcatggccagtcaataattatataaaggagttcaaatactatagctgtcagttgatgaatttgttatgtagtaaaatgtatgactttgtatgggtttcttcagccctttttctgccactagcaaccagaatagcactttaccttttggttggctagataagtggctgactacctgtttttctcactgtggtgtgattggctaaacaatctcgcattaaaaattcaaatgtaaattgaattcacatgaaaaatcatgtttggttgtaaacctccaatgttttgattctctaatcatgttttcgtcacatgctgagtaaaagtgccttacaatgtaaaaattgtacagtacttatgttcccaagtagcatcatcatcttctgggtagtaattacattgtggtattaatatttagaaaaatggacctcagcagtgtatttactgtacatctcttaagtccttaactgtagttttaataagcatgacattatttgataagtatataacatttacatcatttcaaaaaatactgccgttactgtcttttatgcatattttagcctgaaattttgaagcgtcttttttctttcttttttctttttttgttttgttttttgttattgatattaaacagtgtaatctttgcaagcgtatattgaagattattctggagcatttattgccttaccagaaatgttagtaggaaatgttctttagagtagaaagatagacttgagtttctatacttttaagaagagctctttgttcctgggggaggggggcagggggtgaattttactttcatctcaagttattaaaaacccacaactgaagtaaattttatttcaagaatcagcagttttagaatttcagatagtacttgctcagaagtacatgctactcaagatattaagagataacaagatctgtagatctgctattgaatcagaatctgtgtacttgaacaaatgtgtgaatctcaaatatctcaaagcaaaagaaaaagtgttctagagtgttgttgcttttttaaaaaaagcgctgaagttagaccaaggtatacagttttgttctaacagacatttaggttaattgtaaagataaggaatgcattatgggtcaaaaatcaaacattcctctcatgttatgtatattttgttcctgttatattggctttattttcaaaattgtagtttgtagtattagtttccttttattggtattcttgcatatactattcattcaataaatgacttatgactttc

SEQ ID NO: 224242 - DNA, 1626 bp, Artificial Sequence
  derived and/or modified sequence
aaggaaacaacctccggcgacagagccccgctctcaggcactgctggagaaccgagaccgacttctttctctttaccctcattggcgcttctctcctgcagtccgcctctgggccctgccgcatttcttgagacttaaagtggcattctaaaggcaatttaaaaatcatgtcaagctcagttgaacagaaaaaagggcctacaagacagcgcaaatgtggcttttgtaagtcaaatagagacaaggaatgtggacagttactaatatctgaaaaccagaaggtggcagcgcaccataagtgcatgatgtgttctttgtgccattgtcctggagcaacaattggttgtgatgtgaaaacatgtcacaggacataccactaccactgtgcattgcatgataaagctcaaatacgagagaaaccttcacaaggaatttacatggtctattgccgaaaacacaagaaaactgcacataactccgaagctgatttagaagaaagttttaatgaacatgaactggagccctcatcacctaaaagtaaaaagaaaagtcgcaaaggaaggccaagaaaaactaattttaaagggctgtcagaagataccaggtccacatcctcccatggaacagatgaaatggaaagtagttcctatagagataggtctccacacagaagcagccctagtgacaccaggcctaaatgtggattttgccatgtaggggaggaagaaaatgaagcacgaggaaaactgcatatatttaatgccaagaaggcagctgcccattataagtgcatgttgttttcttctggcacagtccagctcacaacaacatcaagagcagaatttggagactttgatattaaaactgtacttcaggagattaaacgaggaaaaagaatgaaatgtacactttgcagtcagcctggtgctactattggatgtgaaataaaagcctgtgttaagacttaccattaccactgtggagtacaagacaaagctaaatacattgaaaatatgtcacgaggaatttacaaactatactgtaaaaatcatagtggaaatgatgagagagatgaagaagatgaggaacgagagagtaaaagccgaggaaaagtagaaattgatcagcaacaactaactcagcagcaacttaatggaaactaggttcatgggacagagttagaaaactgggaatgaataagacatccataactactattcttttttcactgttttctaaaatcaaaaagggtttgtaactttttactgcccaactcttagatccttcattgaactgcctaaaaatgtcttgtttgttttatgagccctcactagaaggctgagtttgacatgttgatattacgtagctatagtttgcagtttctgggaagcaattgaaacactattaaccctgtgtatagtgtcaacagttaaagcagacgaaacgaagtaagctatatttctggactgaacaaagctctgctgtttagagcatttaagtttgtttagtggatccatactcaaaggaaagcataagcaaattttcctttacaatgcaaacatgccactggtggcagcacatggtaatttgtggatttttttttcatactcaagtaatggaggctag

SEQ ID NO: 224243 - DNA, 1098 bp, Artificial Sequence
  derived and/or modified sequence
atgtccagctcggttgaacagaagaaagggccaacaagacagagaaaatgtgggttttgcaagtccaacagggacaaagaatgcggacaactgctcatatccgagaatcagaaggttgcagcacaccacaagtgcatgttatttagtagtgccctggtgtcctcacacagtgacaacgagtcactcggaggtttctctatcgaggacgtgcaaaaggaaattaaaaggggcaccaagctgatgtgctctctgtgccactgccctggagccactatcggctgcgatgtgaagacgtgtcaccgtacataccactaccactgcgcccttcatgataaagcccagatcagggaaaagccatcacaggggatctatatggtctattgtcgcaagcacaagaagacagcgcataacagcgaagcagatcttgaagagtctttcaacgaacacgaacttgaaccttctagcccaaagtctaagaagaagagccggaagggcagaccccgaaagaccaatttcaaaggactatctgaagatactcgctcaacgtccagccatggaaccgacgagatggagtctagctcttaccgggacagaagtccacatcgctcttccccaagcgacactagacctaagtgcggattctgccacgtaggcgaggaggaaaatgaggcaagaggcaagctgcacatcttcaatgcaaagaaggctgccgctcattataagtgcatgctcttctcttctggcactgtgcagctgactactacctccagggcagaatttggggacttcgatatcaaaactgtgctccaggagatcaagcggggaaaaaggatgaaatgcaccttatgcagtcaaccaggggctacgattggctgcgagattaaggcctgcgtgaaaacataccattaccattgtggcgtccaagataaggccaaatacattgagaatatgagccggggtatatacaagctgtactgcaagaaccatagcggcaatgatgagagggatgaggaggacgaagagcgcgagagtaaatcccggggtaaggtagaaattgatcagcagcagctgacccagcaacaacttaatggcaactag

SEQ ID NO: 224244 - DNA, 975 bp, Artificial Sequence
  derived and/or modified sequence
atgagctctagcgttgaacaaaaaaagggaccaacacgacaaagaaaatgcgggttttgcaagagcaacagggataaggagtgcggacaactattgatcagtgagaatcagaaggtggcggctcatcataagtgtatgctcttttccagcgcgctcgtatcctctcattccgataatgaatcactggggggttttagtatcgaggatgtgcagaaggagatcaagagagggaccaaattgatgtgcagcctatgccactgccctggagctactatcggatgcgatgtgaaaacttgtcaccgcacttatcattatcactgtgccctccatgataaagcacaaatccgcgaaaagccgagccagggaatatatatggtgtattgtcgtaaacataagaagactgcccacaattccgaagcggctgacctcgaggagtcatttaacgagcacgaacttgaacccagttccccaaagtccaagaagaaaagccggaaaggtcgccctaggaaaactaactttaagggacttagtgaagatacccgctctacctccagccacggaacagacgagatggaaagttccagttaccgtgaccgcagcccgcaccggtcctctccctctgatacaagacccaagtgtggattctgccatgttggggaagaagagaacgaggctaggggcaagctgcatatttttaacgcaaaaaaggcagctgcacactacaaatgtatgctcttcagctctggcaccgtacagctgactaccacgagccgcgctgaattcggagacttcgacatcaagacggtgctgcaggaaataaaacggggaaagcggatgaagtgtaccctctgttcacaaccaggcgctactatcgggtgcgagatcaaggcatgtgtcaagacttatcactaccactgtggcgtccaggacaaggctaagtatattgaaaatatgtcgcggggaatctacaaatag

SEQ ID NO: 224245 - DNA, 1098 bp, Artificial Sequence
  derived and/or modified sequence
atgtcctcaagtgtggaacagaagaagggtcccactaggcagcgcaagtgtggattctgcaaatcaaatcgggataaagaatgtggccagctgctgattagcgaaaatcaaaaagtagcagcccaccacaagtgcatgttgtttagttctgccctcgtctcctcccactctgacaatgagtctttgggtgggttctcgatcgaagacgtacaaaaagaaataaaacgcggtactaaactcatgtgcagcttgtgccactgtccgggagctaccattggctgcgacgtcaagacctgccaccgcacttatcactatcactgcgctctccatgataaagcccagatcagggagaagccttcacagggcatctacatggtttattgtcgtaaacataagaaaacagcacacaacagtgaggccgatctcgaggagtcctttaacgagcacgaacttgaaccatcttctcctaaatccaagaaaaagagccggaaaggccgtccgaggaagaccaactttaaaggactgtccgaggatactaggagcaccagcagtcacgggacagacgaaatggagtcttcctcttacagggacagatctccacaccgctccagtccttctgacacccgccctaagtgtggcttctgccatgttggcgaagaggagaacgaagcaagggggaagttacatattttcaatgccaaaaaagctgccgcacattacaagtgtatgttattctcctcagggactgtgcagctgacaactactagtcgggctgaattcggggatttcgatataaaaactgtcctgcaggagatcaagcgaggcaaacgcatgaagtgcacgctgtgcagtcagccaggcgctacgattggatgcgagatcaaagcctgcgttaaaacatatcattaccattgcggcgtccaggataaggccaaatatatcgaaaacatgagccgtgggatctacaagttgtattgtaaaaatcacagtggcaacgacgaacgagacgaggaggacgaagagagagaatctaaatctcggggaaaggtggagatagaccagcagcaactaactcagcagcagctgaacggcaattag

SEQ ID NO: 224246 - DNA, 1101 bp, Artificial Sequence
  derived and/or modified sequence
atgtcttcatctgttgagcagaagaagggacccaccaggcagaggaaatgtggcttttgtaaatcaaatcgcgacaaggagtgcggtcaactgcttatcagtgaaaaccagaaggtggccgcacatcacaaatgcatgcttttctcaagtgctctggtgtcttcccacagtgacaacgaatctctcggcggtttttctattgaggatgtgcagaaagagatcaaacggggtacaaagctcatgtgcagtttatgccactgccccggtgccaccatcggctgcgatgtcaaaacatgccaccgcacttaccactaccattgtgccctgcatgataaggcccagattcgggaaaagcccagtcaaggtatatacatggtctattgtagaaaacataagaagactgcccacaattccgaggcggctgatctggaagaaagttttaatgaacacgaactcgaaccaagttctcccaagtccaagaagaagtccaggaaaggcagacccaggaaaaccaattttaaggggctttccgaggacaccagaagtacatcaagccacgggaccgatgagatggagtcttcctcttatcgagatagaagtccacacaggagtagtccatccgacacgcggccaaagtgtgggttttgtcatgtgggcgaggaggagaacgaggctaggggcaagctccacatcttcaacgctaaaaaggctgcagcacactataagtgtatgctcttctcttccgggacagtccagttgacaacgaccagcagagccgagtttggggatttcgatatcaagaccgtcctgcaggaaatcaaacgcggtaaacgaatgaaatgtacactgtgctcccagcctggcgctaccattgggtgtgaaataaaggcttgcgtgaagacttatcactatcattgcggggtgcaggacaaggccaagtacatcgagaacatgtcccgtggcatctataagctttactgcaaaaatcattcaggcaatgacgaacgggacgaggaggatgaggaaagggagtccaaatcccgcggtaaagtggagattgatcagcagcagctaactcaacaacagttgaacggaaattag

SEQ ID NO: 224247 - DNA, 996 bp, Artificial Sequence
  derived and/or modified sequence
atgtcgtccagtgtggagcagaagaaagggcctacccgccaaagaaaatgcggattttgcaagagcaaccgcgacaaggaatgtggacagctcttaatttctgagaaccagaaagtggccgcacatcataaatgtatgatgtgcagtctgtgtcactgccccggtgcaactattggctgcgacgtgaaaacttgtcacaggacttatcattaccattgcgccctccatgacaaagcccagattagagagaaacccagtcaggggatctatatggtctactgccgtaaacacaaaaaaactgcccacaatagtgaggccgacctggaagagtccttcaatgaacacgaactggagcctagcagcccaaaaagcaagaaaaagagtaggaaaggtcgcccacgtaagacaaactttaaagggctgtccgaggatacaaggtcaacatccagccacggaacggatgagatggaatcatcgtcttaccgcgatcgtagccctcaccgtagttcacccagcgacacaaggccaaaatgcggattttgtcacgtaggggaagaagagaatgaagcaagaggtaaactacacatttttaacgcaaagaaagcagctgctcattataagtgcatgctgttttcatccgggaccgtgcagctgaccaccaccagtagagcggagttcggtgactttgacataaaaactgtgctccaggagatcaaacgagggaagagaatgaagtgcactttgtgctcacagccgggagcgaccattggttgtgagattaaagcctgcgtgaaaacgtatcactaccattgtggtgttcaagataaggccaaatacatcgaaaacatgagccggggaatatacaagctatactgtaagaatcacagcgggaacgacgagagagatgaggaggatgaggagcgggagagcaaatcgaggggtaaggtggaaatcgaccagcagcagctgacacagcagcaactcaatggtaattag

SEQ ID NO: 224248 - DNA, 1098 bp, Artificial Sequence
  derived and/or modified sequence
atgagcagcagcgtggagcagaagaagggccccaccagacagagaaagtgcggcttctgcaagagcaacagagacaaggagtgcggccagctgctgatcagcgagaaccagaaggtggccgcccaccacaagtgcatgctgttcagcagcgccctggtgagcagccacagcgacaacgagagcctgggcggcttcagcatcgaggacgtgcagaaggagatcaagagaggcaccaagctgatgtgcagcctgtgccactgccccggcgccaccatcggctgcgacgtgaagacctgccacagaacctaccactaccactgcgccctgcacgacaaggcccagatcagagagaagcccagccagggcatctacatggtgtactgcagaaagcacaagaagaccgcccacaacagcgaggccgacctggaggagagcttcaacgagcacgagctggagcccagcagccccaagagcaagaagaagagcagaaagggcagacccagaaagaccaacttcaagggcctgagcgaggacaccagaagcaccagcagccacggcaccgacgagatggagagcagcagctacagagacagaagcccccacagaagcagccccagcgacaccagacccaagtgcggcttctgccacgtgggcgaggaggagaacgaggccagaggcaagctgcacatcttcaacgccaagaaggccgccgcccactacaagtgcatgctgttcagcagcggcaccgtgcagctgaccaccaccagcagagccgagttcggcgacttcgacatcaagaccgtgctgcaggagatcaagagaggcaagagaatgaagtgcaccctgtgcagccagcccggcgccaccatcggctgcgagatcaaggcctgcgtgaagacctaccactaccactgcggcgtgcaggacaaggccaagtacatcgagaacatgagcagaggcatctacaagctgtactgcaagaaccacagcggcaacgacgagagagacgaggaggacgaggagagagagagcaagagcagaggcaaggtggagatcgaccagcagcagctgacccagcagcagctgaacggcaactag

SEQ ID NO: 224249 - DNA, 975 bp, Artificial Sequence
  derived and/or modified sequence
atgagcagcagcgtggagcagaagaagggccccaccagacagagaaagtgcggcttctgcaagagcaacagagacaaggagtgcggccagctgctgatcagcgagaaccagaaggtggccgcccaccacaagtgcatgctgttcagcagcgccctggtgagcagccacagcgacaacgagagcctgggcggcttcagcatcgaggacgtgcagaaggagatcaagagaggcaccaagctgatgtgcagcctgtgccactgccccggcgccaccatcggctgcgacgtgaagacctgccacagaacctaccactaccactgcgccctgcacgacaaggcccagatcagagagaagcccagccagggcatctacatggtgtactgcagaaagcacaagaagaccgcccacaacagcgaggccgccgacctggaggagagcttcaacgagcacgagctggagcccagcagccccaagagcaagaagaagagcagaaagggcagacccagaaagaccaacttcaagggcctgagcgaggacaccagaagcaccagcagccacggcaccgacgagatggagagcagcagctacagagacagaagcccccacagaagcagccccagcgacaccagacccaagtgcggcttctgccacgtgggcgaggaggagaacgaggccagaggcaagctgcacatcttcaacgccaagaaggccgccgcccactacaagtgcatgctgttcagcagcggcaccgtgcagctgaccaccaccagcagagccgagttcggcgacttcgacatcaagaccgtgctgcaggagatcaagagaggcaagagaatgaagtgcaccctgtgcagccagcccggcgccaccatcggctgcgagatcaaggcctgcgtgaagacctaccactaccactgcggcgtgcaggacaaggccaagtacatcgagaacatgagcagaggcatctacaagtag

SEQ ID NO: 224250 - DNA, 1101 bp, Artificial Sequence
  derived and/or modified sequence
atgagcagcagcgtggagcagaagaagggccccaccagacagagaaagtgcggcttctgcaagagcaacagagacaaggagtgcggccagctgctgatcagcgagaaccagaaggtggccgcccaccacaagtgcatgctgttcagcagcgccctggtgagcagccacagcgacaacgagagcctgggcggcttcagcatcgaggacgtgcagaaggagatcaagagaggcaccaagctgatgtgcagcctgtgccactgccccggcgccaccatcggctgcgacgtgaagacctgccacagaacctaccactaccactgcgccctgcacgacaaggcccagatcagagagaagcccagccagggcatctacatggtgtactgcagaaagcacaagaagaccgcccacaacagcgaggccgccgacctggaggagagcttcaacgagcacgagctggagcccagcagccccaagagcaagaagaagagcagaaagggcagacccagaaagaccaacttcaagggcctgagcgaggacaccagaagcaccagcagccacggcaccgacgagatggagagcagcagctacagagacagaagcccccacagaagcagccccagcgacaccagacccaagtgcggcttctgccacgtgggcgaggaggagaacgaggccagaggcaagctgcacatcttcaacgccaagaaggccgccgcccactacaagtgcatgctgttcagcagcggcaccgtgcagctgaccaccaccagcagagccgagttcggcgacttcgacatcaagaccgtgctgcaggagatcaagagaggcaagagaatgaagtgcaccctgtgcagccagcccggcgccaccatcggctgcgagatcaaggcctgcgtgaagacctaccactaccactgcggcgtgcaggacaaggccaagtacatcgagaacatgagcagaggcatctacaagctgtactgcaagaaccacagcggcaacgacgagagagacgaggaggacgaggagagagagagcaagagcagaggcaaggtggagatcgaccagcagcagctgacccagcagcagctgaacggcaactag

SEQ ID NO: 224251 - DNA, 996 bp, Artificial Sequence
  derived and/or modified sequence
atgagcagcagcgtggagcagaagaagggccccaccagacagagaaagtgcggcttctgcaagagcaacagagacaaggagtgcggccagctgctgatcagcgagaaccagaaggtggccgcccaccacaagtgcatgatgtgcagcctgtgccactgccccggcgccaccatcggctgcgacgtgaagacctgccacagaacctaccactaccactgcgccctgcacgacaaggcccagatcagagagaagcccagccagggcatctacatggtgtactgcagaaagcacaagaagaccgcccacaacagcgaggccgacctggaggagagcttcaacgagcacgagctggagcccagcagccccaagagcaagaagaagagcagaaagggcagacccagaaagaccaacttcaagggcctgagcgaggacaccagaagcaccagcagccacggcaccgacgagatggagagcagcagctacagagacagaagcccccacagaagcagccccagcgacaccagacccaagtgcggcttctgccacgtgggcgaggaggagaacgaggccagaggcaagctgcacatcttcaacgccaagaaggccgccgcccactacaagtgcatgctgttcagcagcggcaccgtgcagctgaccaccaccagcagagccgagttcggcgacttcgacatcaagaccgtgctgcaggagatcaagagaggcaagagaatgaagtgcaccctgtgcagccagcccggcgccaccatcggctgcgagatcaaggcctgcgtgaagacctaccactaccactgcggcgtgcaggacaaggccaagtacatcgagaacatgagcagaggcatctacaagctgtactgcaagaaccacagcggcaacgacgagagagacgaggaggacgaggagagagagagcaagagcagaggcaaggtggagatcgaccagcagcagctgacccagcagcagctgaacggcaactag

SEQ ID NO: 224252 - protein, 468 aa, Artificial Sequence
  derived and/or modified sequence
MAIATSVYVVPPPARPCPTSGPPAGPCPPSPDLIYKIPRASGTQLAAPRDALEVYDVPPTALRVPSSGPYDCPASFSHPLTRVAPQPPGEDDAPYDVPLTPKPPAELEPDLEWEGGREPGPPIYAAPSNLKRASALLNLYEAPEELLADGEGGGTDEGIYDVPLLGPEAPPSPEPPGALASHDQDTLAQLLARSPPPPHRPRLPSAESLSRRPLPALPVPEAPSPSPVPSPAPGRKGSIQDRPLPPPPPRLPGYGGPKVEGDPEGREMEDDPAGHHNEYEGIPMAEEYDYVHLKGMDKAQGSRPPDQACTGDPELPERGMPAPQEALSPGEPLVVSTGDLQLLYFYAGQCQSHYSALQAAVAALMSSTQANQPPRLFVPHSKRVVVAAHRLVFVGDTLGRLAASAPLRAQVRAAGTALGQALRATVLAVKGAALGYPSSPAIQEMVQCVTELAGQALQFTTLLTSLAP

SEQ ID NO: 224253 - DNA, 1407 bp, Artificial Sequence
  derived and/or modified sequence
atggcaattgctacgagtgtctatgtagtgccaccccccgcgaggccctgccccactagcggacctcctgctggcccctgccctcccagccctgatcttatatacaagataccacgggcctctggcacacaactcgccgctcctcgcgatgcactagaggtgtacgacgtgccccccaccgccctacgggttccatcttcaggaccgtatgactgccccgcttcatttagtcaccctctgacaagagtggcgccacaaccccccggcgaagacgatgctccttacgacgtccctctcacccctaagcctcccgccgagctcgagcctgacctggagtgggaagggggccgtgaaccgggaccacctatttatgcagccccatccaacctgaagagggcgagcgcactcctcaacctgtacgaagctccagaagaactgctcgcagacggagaaggaggaggcaccgacgaaggcatttacgatgtgcccctgttgggtccagaggcaccaccatccccggaacctccgggcgcactcgcatctcacgaccaggacacgctggcacaactgctagctaggtcacctccaccaccacatagacccaggttgcccagtgcagagagcctgagtcgcaggcccctgcccgcgctgccggtgcctgaggcccccagcccaagtcccgtgcctagcccagcccctggcaggaaaggaagcatccaagaccggccactaccgccccctcctcctcggctccccggttacggcgggcctaaagttgagggcgaccccgagggaagagaaatggaggatgaccctgctgggcatcacaatgaatatgaaggcatcccaatggcagaggagtacgactacgtacaccttaagggcatggacaaagcacaagggagtcgtcctcctgaccaggcctgcacaggggacccagaactgccagaaagagggatgccagcaccgcaggaagcactgagccctggtgagccattggtcgtaagcacaggggatctgcagctgctttatttctatgccggacagtgccagtcccattactcagcccttcaagctgctgtggccgccctcatgagctctacccaggccaaccagcctccacggctgttcgtgcctcattctaagagggtggttgtagccgcccacaggcttgtattcgtaggggatacactagggcgcttggctgcctccgcaccactacgtgctcaggtcagagccgcaggcaccgccctaggtcaagccttacgggcaacagtgctagcggtcaaaggagccgcgctgggatacccttcctccccggcgattcaggagatggtccagtgtgtgaccgaattggcgggccaggcgctacaatttactactttgctgacctccctagccccctag

SEQ ID NO: 224254 - DNA, 1407 bp, Artificial Sequence
  derived and/or modified sequence
atggccatcgccacctctgtgtatgtggtgcccccaccagcccggccctgccccaccagcggccccccagctggcccctgcccccccagcccagacctgatctacaagatcccccgggccagcggcacccagctggccgcccccagagatgccctggaggtgtatgatgtgcccccaacagccctgcgggtgcccagcagcggcccctatgactgcccagccagcttcagccaccccctgaccagggtggccccccagcccccaggagaagatgatgccccctatgatgtgcccctgacccccaagcccccagctgagctggagccagacctggagtgggagggcggccgggagcccggcccccccatctatgctgcccccagcaacctgaagagggccagcgccctgctgaacctgtatgaggcccctgaggagctgctggctgatggagagggcggcggcacagatgagggcatctatgatgtgcccctgctgggccctgaggccccacccagccctgagcccccaggggccctggccagccatgaccaggacaccctggcccagctgctggcccggagccccccaccaccccaccggccccggctgcccagcgctgagagcctgagcagaagacccctgcctgccctgcctgtgcctgaggcccccagccccagccctgtgcccagccctgcccctggcaggaagggcagcatccaggaccggcccctgcccccacctccaccccggctgcccggctacggcggccccaaggtggagggggaccctgagggccgggagatggaggatgatcctgctggccaccacaatgaatatgagggcatccccatggccgaggagtatgactatgtgcacctgaagggcatggacaaggcccagggcagccggcccccagaccaggcctgcaccggggaccctgagctgcctgagcggggcatgcctgccccccaggaggccctgagccctggagagcccctggtggtgtccactggagacctgcagctgctgtacttctacgccggccagtgccagagccactacagcgccctgcaggccgctgtggccgccctgatgagcagcacccaggccaaccagcccccccggctgtttgtgccccacagcaagagggtggtggtggccgcccaccggctggtgtttgtgggggacaccctgggccgcctggccgccagcgcccccctgcgggcccaggtgcgggccgccggcacagccctgggccaggccctgcgggccaccgtgctggccgtgaagggggccgccctgggctaccccagcagccctgccatccaggagatggtgcagtgtgtgacagagctggccggccaggccctgcagttcaccaccctgctgaccagcctggccccctag

SEQ ID NO: 224255 - DNA, 1407 bp, Artificial Sequence
  derived and/or modified sequence
atggccatcgccaccagcgtgtacgtggtgcccccccccgcccggccttgcccaacctcgggccccccagcaggtccttgtcctccctctcccgatctcatctataagatacccagagccagcggtacccaattggctgcccctcgcgacgcccttgaagtctacgatgtccctccaacagcactccgcgttccctcttctggtccgtatgactgtcctgctagcttcagccaccccttgactagggtcgcgcctcagccccccggagaggacgacgccccatatgatgtacccctgacgcccaaaccacccgcagagttggagcctgatctggagtgggaaggtggacgggagcccggaccgcctatttacgcagcacctagtaatctcaaacgggcttctgccctgctgaatctttatgaagcccccgaggagctcctcgctgacggagaagggggcggaaccgacgaaggtatctatgacgtccccttgctgggaccggaagcccctccgtcgccagagccacccggggcattagccagtcatgaccaggacactctggctcaactgctggcccggtccccgccgccccctcatcgtcccaggctcccttccgccgagtccttgtcacgtagacccctgcccgccctgcccgtgccagaagcaccgtcgccatccccagtgcccagtcccgcaccaggccgcaaaggatctatccaagataggcccttgccccctcccccaccccgcctgcctggatacgggggtcccaaggttgagggcgacccggaagggcgagagatggaagatgaccccgccgggcaccacaacgaatatgagggaatcccgatggccgaggaatacgactacgtgcacctcaaggggatggataaggcgcaaggatcccgcccccccgaccaggcatgtacaggggaccctgagctacccgagcggggcatgccagccccccaggaggctttatcccccggggagcccctggttgtgtccacaggcgaccttcagctgctttacttctacgcaggtcagtgccaatcgcactatagcgcccttcaggccgccgtggctgcacttatgagtagcacacaggctaatcagcctcccagactgttcgtacctcactctaagagggtggtggtagccgctcaccggctcgtgtttgtgggtgacaccctggggcgccttgctgcatcggcacctctgcgcgcacaggtgcgcgctgcaggtacggctctcggccaggccctgcgggccaccgtgcttgctgtcaagggggccgccttggggtatccaagtagccctgctatacaggagatggtgcagtgtgtgacagaactcgccgggcaggccctgcagttcaccactttgctgacaagtctcgctccatag

SEQ ID NO: 224256 - DNA, 1407 bp, Artificial Sequence
  derived and/or modified sequence
atggcaatcgcgacttctgtctatgtggtacctcctcctgccagaccctgccccacgagcggaccgccagctggaccttgtccaccctccccagacctgatttacaagatccctagagcgtccggaactcaactggccgctccgagagacgccctggaggtgtatgacgtccccccaactgcccttcgagtgccttcctctggaccatatgactgtcctgcctcattcagccacccactcactcgggttgcccctcagccacccggtgaggatgacgcaccctatgacgtgccattaacacccaagcccccagccgaactcgagcctgacctcgagtgggagggaggcagagagcctggccctccaatttatgccgctccgtcaaatctcaaacgcgcaagcgccttgttgaatctttatgaggcaccagaagagctgctggccgacggtgagggcggaggcactgatgagggaatatacgatgttccacttttgggaccagaagctccaccctcccccgaacctccaggcgctttggcctcacatgatcaggataccctcgcccagctgttagccagatccccgccaccccctcacagacccagactgcccagtgcggaatccttgtctaggaggcctctgcccgcactcccggtccctgaggccccatctccttccccagtgccttcccccgcaccgggacggaagggatcaatccaggatcgcccactgccccctcctcccccacgtctccctggatatgggggaccaaaggtggaaggcgaccccgaggggagggagatggaagacgatcctgccggtcatcacaacgagtacgagggcattcctatggcggaagagtatgattacgttcacctgaaaggaatggacaaggcacagggaagcaggccccctgaccaggcctgcactggcgacccggaactgcctgagcggggtatgcctgcccctcaggaggctttgagtcccggtgagcccctggtcgtcagcacgggcgatctgcaactactgtacttttatgctgggcagtgtcagtctcactacagcgcactgcaagccgcagtggccgctttaatgagtagtacccaagccaatcagccaccccgattatttgtgccccattctaagagggtggtggttgccgcacaccggctggtttttgtaggtgataccctgggccgactggccgctagtgcccctttaagggcccaggtcagggcagcgggaactgcactcggacaagcactgcgcgcaacagtgttggctgtgaagggcgctgcgttaggctacccctcatcccccgcaatacaagagatggtgcaatgtgtcacagaacttgctgggcaggccctgcaatttaccactttgctaaccagcctcgctccttag

SEQ ID NO: 224257 - DNA, 1407 bp, Artificial Sequence
  derived and/or modified sequence
atggccatcgccaccagcgtgtacgtggtgcccccccccgccagaccctgccccaccagcggcccccccgccggcccctgcccccccagccccgacctgatctacaagatccccagagccagcggcacccagctggccgcccccagagacgccctggaggtgtacgacgtgccccccaccgccctgagagtgcccagcagcggcccctacgactgccccgccagcttcagccaccccctgaccagagtggccccccagccccccggcgaggacgacgccccctacgacgtgcccctgacccccaagccccccgccgagctggagcccgacctggagtgggagggcggcagagagcccggcccccccatctacgccgcccccagcaacctgaagagagccagcgccctgctgaacctgtacgaggcccccgaggagctgctggccgacggcgagggcggcggcaccgacgagggcatctacgacgtgcccctgctgggccccgaggccccccccagccccgagccccccggcgccctggccagccacgaccaggacaccctggcccagctgctggccagaagccccccccccccccacagacccagactgcccagcgccgagagcctgagcagaagacccctgcccgccctgcccgtgcccgaggcccccagccccagccccgtgcccagccccgcccccggcagaaagggcagcatccaggacagacccctgcccccccccccccccagactgcccggctacggcggccccaaggtggagggcgaccccgagggcagagagatggaggacgaccccgccggccaccacaacgagtacgagggcatccccatggccgaggagtacgactacgtgcacctgaagggcatggacaaggcccagggcagcagaccccccgaccaggcctgcaccggcgaccccgagctgcccgagagaggcatgcccgccccccaggaggccctgagccccggcgagcccctggtggtgagcaccggcgacctgcagctgctgtacttctacgccggccagtgccagagccactacagcgccctgcaggccgccgtggccgccctgatgagcagcacccaggccaaccagccccccagactgttcgtgccccacagcaagagagtggtggtggccgcccacagactggtgttcgtgggcgacaccctgggcagactggccgccagcgcccccctgagagcccaggtgagagccgccggcaccgccctgggccaggccctgagagccaccgtgctggccgtgaagggcgccgccctgggctaccccagcagccccgccatccaggagatggtgcagtgcgtgaccgagctggccggccaggccctgcagttcaccaccctgctgaccagcctggccccctag

SEQ ID NO: 224258 - DNA, 2704 bp, Artificial Sequence
  derived and/or modified sequence
cgggcgcgctgagtgagtgcgcgcgtgaaaaccgccgcaccgccgggggtgcgagtgtctgggccgaagcggccactccagcgacccagccccacggccacgctctcgggggcctttggctccaggcaacttggggcaagcgtctcagttctcgctctcccttcctcccagcggggtcgccgcagaccccagccctgggagcaccgctctgcagcgcggccggcgggtggagacggttggcccctaaactcgctcgtccagcccaaccgccccggcggcttctcccagccctcgaggctctcctgagcggcctggagaggcgtcgagcgcagcccagcgcccgcctgctcacccgccccggcccgggaagggaattttcggatcctgcgagcccggggcgcccccgcggcctagggcgggcagctcccggggcctggccgagccggtggcgcccgggaggccgcggggacagcacgcagcgcgcgcccttggatgccgtcccgcagcgacgccccggcccgccccgctcctcctcctgcctggctagcctgcctctcatttgggaagttttgtgggttttctttctcctcctccaaccttggcggaggccacgactcaggcgccacagctgggggctagaggccgcggaccatggtgcggggcagccaccgctgaagtcagcaaaaccgagcctggcctgaggcaggctgcgcgggaggccaaagccatggccattgccacgtcggtgtatgtggtgccgcccccagctcggccctgtccaacctcaggacctccagctggaccttgcccaccctctcctgacctcatctacaaaatccccagagctagtgggacccagctggctgctcccagagatgccttggaggtctacgatgtgccccccaccgccctccgggtgccctccagtggcccctatgactgccctgcctccttttcccaccctctgacccgggttgccccgcagccccctggagaggatgatgctccctatgatgtgcctctgaccccaaagccacctgcagagctggaaccagatctggagtgggaaggaggccgggagccggggccccccatctatgctgccccctccaacctgaaacgagcgtcagccttactcaatttgtatgaagcacccgaggaactgctggcagacggggagggcgggggcactgatgaggggatctacgatgtgcctctgctggggccagaggctcccccttctccagagccccctggagccttggcctcccatgaccaggacaccctggcccagcttctggccagaagccccccacccccacacaggccccggctcccctcagctgagagcctgtcccgccgccctctgcctgccctgcctgtccctgaggcccccagcccctccccagtgccctctcctgccccaggccggaagggcagcatccaggaccggcctctgcccccacccccaccccgcctgcctggttatggaggccccaaggtcgagggggatccagagggcagggagatggaggatgacccagcaggacaccacaatgagtacgagggcattccgatggccgaggagtatgactatgtccacctgaagggcatggacaaagctcagggatctaggcccccggatcaggcctgcacaggggatcctgaactgcccgagagggggatgccggcgccgcaggaggccctgtccccaggggagccactggttgtgtccaccggagatctgcagctcctgtacttctatgctgggcaatgccagagccactactcagccctgcaggcagccgtggcagccctgatgtccagtacccaggctaatcagcccccgcgccttttcgtgccccacagcaagagggtggtggtggctgctcatcgcctggtgtttgttggggacaccctgggccggctggcagcctctgcccctctgagagcacaggtcagggctgcaggtacagcactgggccaggcattgcgggccactgtgctggctgtcaagggagctgccctgggctacccatccagccctgccatccaagagatggtgcagtgtgtaacagaactggcagggcaggccctgcaattcactaccctgctcactagcctggctccatgaaggtcctttggcacagctctgctcctcccctgcctgccaaagcccccctttaggccttgggtggctggaaggctttgttaagggactaggagaaatgggggtatctttcccctttcctgccctttctgctcatctcaacctctcacagaggtgtcttctccccctaacctacagctttttgtacaagccattttgtgtaaattatttatatttaatattattccctgctttgtcaggagcaggtactaggctctggggcagtgaggaactagatccttctctcctcagcctagggtggaggtcactgcactaccacccacctctggaagactggctgtgaaaagtcaggtggcagaaacctggggccacatagagcctctctcttttcctgtttcttggctctagaagatcagcactgcactgttagctgagagtgcgggcaagacataaactgtccagagtttgaaggttctcggaaagaccggagggcttctccccacagaaggcggagagagctggggctcagacatgggtgtgcaccttaataaaccctgctgtctgcctccctga

SEQ ID NO: 224259 - protein, 103 aa, Artificial Sequence
  derived and/or modified sequence
MGQQSSVRRLKRSVPCESNEANEANEANKTMPETPTGDSDPQPAPKKMKTSESSTILVVRYRRNVKRTSPEELLNDHARENRINPDQMEEEEFIEITTERPKK

SEQ ID NO: 224260 - DNA, 312 bp, Artificial Sequence
  derived and/or modified sequence
atgggccagcagagcagcgtgagaagactgaagagaagcgtgccctgcgagagcaacgaggccaacgaggccaacgaggccaacaagaccatgcccgagacccccaccggcgacagcgacccccagcccgcccccaagaagatgaagaccagcgagagcagcaccatcctggtggtgagatacagaagaaacgtgaagagaaccagccccgaggagctgctgaacgaccacgccagagagaacagaatcaaccccgaccagatggaggaggaggagttcatcgagatcaccaccgagagacccaagaagtag

SEQ ID NO: 224261 - DNA, 312 bp, Artificial Sequence
  derived and/or modified sequence
atgggacagcagtcctctgtccggcggctcaagcggtccgtgccatgcgagtcaaacgaagccaacgaggctaacgaagccaacaaaacgatgccggaaacgcctacaggtgacagtgacccccagcctgccccaaagaagatgaagacctccgaatcatcaactatcctggtcgtgcggtatagacgcaacgtgaaacgcacgtcacctgaggagttactgaatgatcatgctcgagaaaatcgcatcaatcccgaccaaatggaggaggaggaattcattgagatcacaactgaacggcccaagaaatag

SEQ ID NO: 224262 - DNA, 312 bp, Artificial Sequence
  derived and/or modified sequence
atgggccagcagagctctgtgcggcggctgaagaggtctgtgccctgtgagagcaatgaggccaatgaggccaatgaggccaacaagaccatgcctgagacccccaccggggacagcgacccccagcctgcccccaagaagatgaagaccagcgagagcagcaccatcctggtggtgcgctacagaagaaatgtgaagaggaccagccctgaggagctgctgaatgaccacgcccgggagaaccgcatcaacccagaccagatggaggaggaggagttcatcgagatcaccacagagcggcccaagaagtag

SEQ ID NO: 224263 - DNA, 312 bp, Artificial Sequence
  derived and/or modified sequence
atgggccagcagagcagcgtgcggcggctgaagcggagcgtgccctgcgagtctaacgaagcgaatgaggctaatgaggccaataagacgatgcccgagacccccacaggtgactccgatccccaaccggctccgaagaaaatgaagacaagtgagtcctctaccatcctggtggttagatatcggcgcaacgtaaagcgcacctcacctgaggagctgctcaatgaccatgccagagagaatcggattaaccctgaccaaatggaagaggaggaattcatagaaattacgacagaacgacctaaaaagtag

SEQ ID NO: 224264 - DNA, 312 bp, Artificial Sequence
  derived and/or modified sequence
atgggccaacaatccagcgtacgcaggctgaaacggagcgtcccttgcgagtctaatgaagcaaatgaggcaaatgaggccaataagaccatgccggaaaccccaaccggggactcagacccacaaccagccccaaaaaagatgaagaccagcgaatctagtacaatcttagtcgtgagataccgcaggaacgtgaaacgtaccagccccgaagaactgttaaacgatcacgcgagggaaaatcgcatcaaccccgatcagatggaagaagaagaattcatcgagatcaccacggagagaccaaagaaatag

SEQ ID NO: 224265 - DNA, 469 bp, Artificial Sequence
  derived and/or modified sequence
gtcaccaggagggtatgcatagggagggcaagagctctgggccactgcgaagattcaaaagctccaaaaacctactgtagacatcgaagaaccaatatatacaatgggccaacaatccagtgtccgcaggctgaagaggagcgtcccctgtgaatccaacgaggccaacgaggccaatgaggccaacaagacgatgccggagaccccaactggggactcagacccgcaacctgctcctaaaaaaatgaaaacatctgagtcctcgaccatactagtggttcgctacaggaggaacgtgaaaagaacatctccagaggaactgctgaatgaccacgcccgagagaacagaatcaaccccgaccaaatggaggaggaggaattcatagaaataacgactgaaagacctaaaaagtagcaagaagctacatccctcaaacttcggcaatgaaaataaagtttgagaagctga

SEQ ID NO: 224266 - protein, 243 aa, Artificial Sequence
  derived and/or modified sequence
MSSGTELLWPGAALLVLLGVAASLCVRCSRPGAKRSEKIYQQRSLREDQQSFTGSRTYSLVGQAWPGPLADMAPTRKDKLLQFYPSLEDPASSRYQNFSKGSRHGSEEAYIDPIAMEYYNWGRFSKPPEDDDANSYENVLICKQKTTETGAQQEGIGGLCRGDLSLSLALKTGPTSGLCPSASPEEDEESEDYQNSASIHQWRESRKVMGQLQREASPGPVGSPDEEDGEPDYVNGEVAATEA

SEQ ID NO: 224267 - protein, 64 aa, Artificial Sequence
  derived and/or modified sequence
MSSGTELLWPGAALLVLLGVAASLCVRCSRPGAKRSEKIYQQRSLREDQQSFTGSRTYSLVGQA

SEQ ID NO: 224268 - protein, 58 aa, Artificial Sequence
  derived and/or modified sequence
MSSGTELLWPGAALLVLLGVAASLCVRCSRPGAKRSEKIYQQRSLREDQQSFTGSRTY

SEQ ID NO: 224269 - protein, 100 aa, Artificial Sequence
  derived and/or modified sequence
MSSGTELLWPGAALLVLLGVAASLCVRCSRPGAKRSEKIYQQRSLREDQQSFTGSRTYSLVGQAWPGPLADMAPTRKDKLLQFYPSLEDPASSRYQNFSK

SEQ ID NO: 224270 - DNA, 732 bp, Artificial Sequence
  derived and/or modified sequence
atgagcagcggcaccgagctgctgtggcccggcgccgccctgctggtgctgctgggcgtggccgccagcctgtgcgtgagatgcagcagacccggcgccaagagaagcgagaagatctaccagcagagaagcctgagagaggaccagcagagcttcaccggcagcagaacctacagcctggtgggccaggcctggcccggccccctggccgacatggcccccaccagaaaggacaagctgctgcagttctaccccagcctggaggaccccgccagcagcagataccagaacttcagcaagggcagcagacacggcagcgaggaggcctacatcgaccccatcgccatggagtactacaactggggcagattcagcaagccccccgaggacgacgacgccaacagctacgagaacgtgctgatctgcaagcagaagaccaccgagaccggcgcccagcaggagggcatcggcggcctgtgcagaggcgacctgagcctgagcctggccctgaagaccggccccaccagcggcctgtgccccagcgccagccccgaggaggacgaggagagcgaggactaccagaacagcgccagcatccaccagtggagagagagcagaaaggtgatgggccagctgcagagagaggccagccccggccccgtgggcagccccgacgaggaggacggcgagcccgactacgtgaacggcgaggtggccgccaccgaggcctag

SEQ ID NO: 224271 - DNA, 732 bp, Artificial Sequence
  derived and/or modified sequence
atgtctagcggaaccgaattgttatggcctggggccgccctgctcgtgctacttggggtggcagcttctctgtgcgtgagatgttcaaggccgggtgctaaacggagtgagaaaatttaccagcaacggagtctccgagaggaccagcagtcatttactggttcaaggacctactcactggtgggacaagcctggccaggccctcttgcggacatggcacccaccagaaaagacaaattgcttcagttctacccttccctggaggatccggctagctccaggtaccagaatttttcaaaaggtagcaggcacggttctgaggaagcttacatcgacccaatcgccatggaatactataattggggtaggttttctaagccacctgaggatgatgatgccaactcctacgagaatgtcctgatttgcaaacagaaaacaacggaaaccggcgcgcagcaggagggaatagggggattgtgtcggggtgatctgagcctaagcttggccctaaaaacagggccaacatccgggctgtgcccttctgcctcccctgaagaagatgaggaatctgaggactaccagaactccgccagtatccaccagtggcgcgagtcccgaaaggttatgggtcagcttcagcgagaagcctcccctggtccagtgggcagccccgatgaagaggacggcgagccggattatgttaatggtgaggttgctgcaaccgaggcctag

SEQ ID NO: 224272 - DNA, 732 bp, Artificial Sequence
  derived and/or modified sequence
atgtcaagtggtaccgagctgctgtggccgggtgccgctctgctcgtactgcttggagttgccgccagcttgtgcgtccgatgttcaagacctggcgcgaagaggagtgagaagatataccagcagaggagcctgagggaggaccagcagagctttactgggagcaggacctattctctagtcggacaggcatggcccggccctctcgcagacatggctccaacacggaaggataagcttctccagttctatccaagtctggaagatcccgcgagctccagataccagaatttcagtaaggggtcgcggcatggcagcgaggaggcgtatatcgatcctatcgcaatggaatactacaattggggtcggttcagtaagcccccagaagacgatgatgccaatagttacgaaaatgtgctcatctgcaagcagaagaccactgagaccggcgcacagcaggagggtatcggtggactgtgcagaggggatcttagtctaagcttggctcttaaaactgggcccacctcaggcctgtgtccttctgcttcccctgaggaggatgaggaatccgaagactaccagaactctgcgtccattcatcaatggagggagagccgaaaggtgatgggacagctccagagggaagcctcaccaggcccggttggcagccccgacgaagaggacggggagcctgactatgtgaacggtgaagtggccgctaccgaggcctag

SEQ ID NO: 224273 - DNA, 732 bp, Artificial Sequence
  derived and/or modified sequence
atgtccagcggtaccgagctcctttggccaggggcagctctactagtactcttaggcgtggccgccagcctatgtgtacgatgttctagaccaggggccaaacgcagcgagaagatctaccagcagaggagtttaagagaagatcagcaaagcttcacgggatctagaacctatagtttggtaggacaggcgtggcctggaccattggcagatatggccccgactaggaaagacaagctcctgcaattctaccccagcctggaggatccagccagcagtagatatcagaatttcagtaaaggcagcagacacggctccgaggaagcgtatatcgacccgatcgccatggagtattataactggggtcggttcagtaaacctcccgaagacgacgacgccaattcctacgagaatgtcttaatttgtaagcagaaaactaccgagacaggtgcgcagcaagaaggcatcggtgggttgtgccgaggcgacctgtctctctcactagccctgaagaccggcccaacctctggactgtgtccaagtgccagtccagaagaggacgaggaatccgaagactaccaaaactctgccagcatccaccagtggcgggagagccgaaaggtcatgggacagctgcaaagggaggcatctccaggtcctgtgggtagtcccgacgaagaagatggcgagcctgattacgttaacggagaagttgctgctactgaagcgtag

SEQ ID NO: 224274 - DNA, 732 bp, Artificial Sequence
  derived and/or modified sequence
atgagcagcggcacagagctgctgtggccaggggccgccctgctggtgctgctgggcgtggccgccagcctgtgtgtgcgctgcagcaggcctggggccaagaggtctgagaagatctaccagcagaggagcctgcgggaggaccagcagagcttcaccggcagcaggacctacagcctggtgggccaggcctggccaggccccctggccgacatggcccccaccaggaaggacaagctgctgcagttctaccccagcctggaggaccctgccagcagccgctaccagaacttcagcaagggcagccgccacggcagcgaggaggcctacatcgaccccatcgccatggagtactacaactggggccgcttcagcaagcccccagaagatgatgatgccaacagctatgaaaatgtgctgatctgcaagcagaagaccacagaaacaggagcccagcaggagggcatcggcggcctgtgccgcggggacctgagcctgagcctggccctgaagacaggccccaccagcggcctgtgccccagcgccagccctgaggaggatgaggagagcgaggactaccagaacagcgccagcatccaccagtggagggagagcaggaaggtgatgggccagctgcagcgggaggccagccctggccctgtgggcagcccagatgaagaagatggagagccagactatgtgaatggagaggtggccgccacagaggcctag

SEQ ID NO: 224275 - DNA, 2360 bp, Artificial Sequence
  derived and/or modified sequence
attatcttgctccctgtctattggagtgtatctctcttcctctctgtgtgactttttgtgtttatgtgtgtgtttagtgtgtgtccatattttcctgttctcttgtgtctctctgctgtgtctctctctttttctttctgttttttgagacggagtctccctctgtcacccaggctggagtgcagtggtgcgatctcggctcactgcaacctctgcttctgaggttcaaacgattctcctgcctcagcctcccgagtagctggaattacagacacatgccaccatgcccagctaattttgtatttttaatagagacggggtttcaccatgttggccaggctggtcttaaactcttgaccttacgtgatccacccgcctcggcctcccaaagtttttggattacaggtgtgagccacctcgcccggtcctatctctctttcttctctttctccctctcactttgtttctcttctctctctctctcccgcctccttcccccgtctcccctcccttccccccaccgccctcttcatagctgagcctgtccggcagtgcggcggatgtacggatgattcagtggctggcaggaagcccgccctgcccgcccgccagtgtcagtggtgttggcatcagcttgggcaggtgtgcgggctcaggatggggcggccgtggtgaggaaccctggactctcagcatcacaagaggcaacaccaggagccaacatgagctcggggactgaactgctgtggcccggagcagcgctgctggtgctgttgggggtggcagccagtctgtgtgtgcgctgctcacgcccaggtgcaaagaggtcagagaaaatctaccagcagagaagtctgcgtgaggaccaacagagctttacggggtcccggacctactccttggtcgggcaggcatggccaggacccctggcggacatggcacccacaaggaaggacaagctgttgcaattctaccccagcctggaggatccagcatcttccaggtaccagaacttcagcaaaggaagcagacacgggtcggaggaagcctacatagaccccattgccatggagtattacaactgggggcggttctcgaagcccccagaagatgatgatgccaattcctacgagaatgtgctcatttgcaagcagaaaaccacagagacaggtgcccagcaggagggcataggtggcctctgcagaggggacctcagcctgtcactggccctgaagactggccccacttctggtctctgtccctctgcctccccggaagaagatgaggaatctgaggattatcagaactcagcatccatccatcagtggcgcgagtccaggaaggtcatggggcaactccagagagaagcatcccctggcccggtgggaagcccagacgaggaggacggggaaccggattacgtgaatggggaggtggcagccacagaagcctagggcagaccaagaagaaaggagccaaggcaaagagggaccactgtgctcatggacccatcgctgccttccaaggaccatttcccagagctactcaacttttaagcccctgccatggttgctcctggaaggagaaccagccaccctgaggaccacctggccatgcgtgcacagcctgggaaaagacagttactcacgggagctgcaggcccgtcaccaagccctctcccgacccaggctttgtggggcaggcacctggtaccaagggtaacccggctcctggtatggacggatgcgcaggatttaggataagctgtcacccagtccccataacaaaaccactgtccaacactggtatctgtgttcttttgtgctatgaatttggattcctaattgctattgttggttgctggggttttaaatgattgataagcttgtacagttaacttatagagggggagccatatttaacattctggatttcagagtagagatttctgtgttgtctcctagaaagcattacatgtagtttatttcagcatccttgttgggtggggccctggctctcttcccctttggtgggacctcccctttctttgggcttcagttcactcaggaagaaatgaggctgtcgccatctttatgtgcttccagtggaaatgtcacttgctacagacaatagtgcatgagagtctagagaagtagtgaccagaacagggcagagtaggtcccctccatggccctgaatcctcctctgctccagggctggcctctgcagagctgattaaacagtgttgtgactgtctcatgggaagagctggggcccagagggaccttgagtcagaaatgttgccagaaaaagtatctcctccaaccaaaacatctcaataaaaccattttagttgaaaa

SEQ ID NO: 224276 - DNA, 1869 bp, Artificial Sequence
  derived and/or modified sequence
agtgtcagtggtgttggcatcagcttgggcaggtgtgcgggctcaggatggggcggccgtggtgaggaaccctggactctcagagatggaatttcaccgtgttgcctaggctggtctggagctcttgatctcaagcgatcctccctgcctcggcctcccaacgtgctgggattataggcgtgagccaccgctcctggccaggcatcacaagaggcaacaccaggagccaacatgagctcggggactgaactgctgtggcccggagcagcgctgctggtgctgttgggggtggcagccagtctgtgtgtgcgctgctcacgcccaggtgcaaagaggtcagagaaaatctaccagcagagaagtctgcgtgaggaccaacagagctttacggggtcccggacctactccttggtcgggcaggcatggccaggacccctggcggacatggcacccacaaggaaggacaagctgttgcaattctaccccagcctggaggatccagcatcttccaggtaccagaacttcagcaaaggaagcagacacgggtcggaggaagcctacatagaccccattgccatggagtattacaactgggggcggttctcgaagcccccagaagatgatgatgccaattcctacgagaatgtgctcatttgcaagcagaaaaccacagagacaggtgcccagcaggagggcataggtggcctctgcagaggggacctcagcctgtcactggccctgaagactggccccacttctggtctctgtccctctgcctccccggaagaagatgaggaatctgaggattatcagaactcagcatccatccatcagtggcgcgagtccaggaaggtcatggggcaactccagagagaagcatcccctggcccggtgggaagcccagacgaggaggacggggaaccggattacgtgaatggggaggtggcagccacagaagcctagggcagaccaagaagaaaggagccaaggcaaagagggaccactgtgctcatggacccatcgctgccttccaaggaccatttcccagagctactcaacttttaagcccctgccatggttgctcctggaaggagaaccagccaccctgaggaccacctggccatgcgtgcacagcctgggaaaagacagttactcacgggagctgcaggcccgtcaccaagccctctcccgacccaggctttgtggggcaggcacctggtaccaagggtaacccggctcctggtatggacggatgcgcaggatttaggataagctgtcacccagtccccataacaaaaccactgtccaacactggtatctgtgttcttttgtgctatgaatttggattcctaattgctattgttggttgctggggttttaaatgattgataagcttgtacagttaacttatagagggggagccatatttaacattctggatttcagagtagagatttctgtgttgtctcctagaaagcattacatgtagtttatttcagcatccttgttgggtggggccctggctctcttcccctttggtgggacctcccctttctttgggcttcagttcactcaggaagaaatgaggctgtcgccatctttatgtgcttccagtggaaatgtcacttgctacagacaatagtgcatgagagtctagagaagtagtgaccagaacagggcagagtaggtcccctccatggccctgaatcctcctctgctccagggctggcctctgcagagctgattaaacagtgttgtgactgtctcatgggaagagctggggcccagagggaccttgagtcagaaatgttgccagaaaaagtatctcctccaaccaaaacatctcaataaaaccattttagttgaaaa

SEQ ID NO: 224277 - DNA, 2527 bp, Artificial Sequence
  derived and/or modified sequence
ggagtgtatctctcttcctctctgtgtgactttttgtgtttatgtgtgtgtttagtgtgtgtccatattttcctgttctcttgtgtctctctgctgtgtctctctctttttctttctgttttttgagacggagtctccctctgtcacccaggctggagtgcagtggtgcgatctcggctcactgcaacctctgcttctgaggttcaaacgattctcctgcctcagcctcccgagtagctggaattacagacacatgccaccatgcccagctaattttgtatttttaatagagacggggtttcaccatgttggccaggctggtcttaaactcttgaccttacgtgatccacccgcctcggcctcccaaagtttttggattacaggtgtgagccacctcgcccggtcctatctctctttcttctctttctccctctcactttgtttctcttctctctctctctcccgcctccttcccccgtctcccctcccttccccccaccgccctcttcatagctgagcctgtccggcagtgcggcggatgtacggatgattcagtggctggcaggaagcccgccctgcccgcccgccagtgtcagtggtgttggcatcagcttgggcaggtgtgcgggctcaggatggggcggccgtggtgaggaaccctggactctcagagatggaatttcaccgtgttgcctaggctggtctggagctcttgatctcaagcgatcctccctgcctcggcctcccaacgtgctgggattataggcgtgagccaccgctcctggccagggtctgttcctagttgcaacagttcttggaaacccactcgagagggccacgcctccattcaccaggccacgcatcacaagaggcaacaccaggagccaacatgagctcggggactgaactgctgtggcccggagcagcgctgctggtgctgttgggggtggcagccagtctgtgtgtgcgctgctcacgcccaggtgcaaagaggtcagagaaaatctaccagcagagaagtctgcgtgaggaccaacagagctttacggggtcccggacctactccttggtcgggcaggcatggccaggacccctggcggacatggcacccacaaggaaggacaagctgttgcaattctaccccagcctggaggatccagcatcttccaggtaccagaacttcagcaaaggaagcagacacgggtcggaggaagcctacatagaccccattgccatggagtattacaactgggggcggttctcgaagcccccagaagatgatgatgccaattcctacgagaatgtgctcatttgcaagcagaaaaccacagagacaggtgcccagcaggagggcataggtggcctctgcagaggggacctcagcctgtcactggccctgaagactggccccacttctggtctctgtccctctgcctccccggaagaagatgaggaatctgaggattatcagaactcagcatccatccatcagtggcgcgagtccaggaaggtcatggggcaactccagagagaagcatcccctggcccggtgggaagcccagacgaggaggacggggaaccggattacgtgaatggggaggtggcagccacagaagcctagggcagaccaagaagaaaggagccaaggcaaagagggaccactgtgctcatggacccatcgctgccttccaaggaccatttcccagagctactcaacttttaagcccctgccatggttgctcctggaaggagaaccagccaccctgaggaccacctggccatgcgtgcacagcctgggaaaagacagttactcacgggagctgcaggcccgtcaccaagccctctcccgacccaggctttgtggggcaggcacctggtaccaagggtaacccggctcctggtatggacggatgcgcaggatttaggataagctgtcacccagtccccataacaaaaccactgtccaacactggtatctgtgttcttttgtgctatgaatttggattcctaattgctattgttggttgctggggttttaaatgattgataagcttgtacagttaacttatagagggggagccatatttaacattctggatttcagagtagagatttctgtgttgtctcctagaaagcattacatgtagtttatttcagcatccttgttgggtggggccctggctctcttcccctttggtgggacctcccctttctttgggcttcagttcactcaggaagaaatgaggctgtcgccatctttatgtgcttccagtggaaatgtcacttgctacagacaatagtgcatgagagtctagagaagtagtgaccagaacagggcagagtaggtcccctccatggccctgaatcctcctctgctccagggctggcctctgcagagctgattaaacagtgttgtgactgtctcatgggaagagctggggcccagagggaccttgagtcagaaatgttgccagaaaaagtatctcctccaaccaaaacatctcaataaaaccattttagttgaaaa

SEQ ID NO: 224278 - DNA, 732 bp, Artificial Sequence
  derived and/or modified sequence
atgagcagcggcaccgagctgctgtggcccggcgccgccctgctggtgctacttggcgtagccgcttccctgtgtgtgcggtgtagtaggccgggggctaaaagaagcgaaaaaatttaccaacagcgttcgctgagagaagatcagcagtctttcactgggagtcgaacgtatagtctggtcggtcaagcctggccgggccccctggcagacatggctcctactcgcaaggacaagctgctgcagttctatccatctctggaagatcctgcttctagcaggtaccagaacttctccaaaggttctagacacggctcagaagaagcatacatagacccaattgctatggagtactataattggggccgttttagcaaacccccagaagatgatgacgctaatagttatgagaatgtgttgatctgcaagcagaagaccacagaaacaggggctcaacaggagggaatcggagggctatgtcggggagacctgagcctctctctggctctcaagaccggacccactagtggcctgtgtcccagcgcaagcccagaggaggacgaagaatcagaggattatcagaattcagcaagtatccaccagtggcgagagtcgaggaaggtcatgggccagttacagcgggaggctagtcctggtccggtggggtccccagacgaagaagatggtgagccagactatgtgaatggcgaggttgcggctactgaagcttag

SEQ ID NO: 224279 - DNA, 732 bp, Artificial Sequence
  derived and/or modified sequence
atgagcagcggcaccgagctgctgtggcccggcgccgccctgctggtgctgctgggggtagccgcttccttgtgtgtgaggtgtagccgccctggagctaagcggagcgagaaaatataccaacagcgctccctccgcgaggaccagcagtcatttaccggcagcagaacgtattccctagtgggccaggcctggcctggtccattggcggatatggcccccacgaggaaggataaactcctccaattctacccctctctcgaggatcccgccagcagcagatatcagaatttttctaagggatcccggcacgggtctgaggaggcgtacattgatccaattgcaatggagtactacaactggggacgattctccaagcctcctgaagacgacgacgccaattcctatgaaaatgttcttatatgcaagcaaaaaaccaccgagacaggcgcccagcaggagggaattggtggattgtgccgcggcgatctcagtctgagcctcgccctcaaaacaggacctacatcgggtttatgcccctcagcctctcccgaagaagatgaggagagcgaggattaccagaatagtgcctcaatccatcagtggagagagtcgagaaaagttatggggcaacttcagagggaggcgtcgcctggccccgtaggcagccccgatgaagaagatggcgaaccagattatgtcaacggcgaagtggcagcaacagaagcctag

SEQ ID NO: 224280 - DNA, 732 bp, Artificial Sequence
  derived and/or modified sequence
atgagcagcggcaccgagctgctgtggcccggcgccgccctgctggtgctcctaggagtggcggcatccctgtgtgtgagatgctcccggccaggcgctaaacggtccgagaaaatttaccagcagagatctctgagagaagatcagcaatcctttacaggaagtaggacgtatagtctcgtggggcaagcctggcccggcccactggctgacatggctccgaccagaaaagataaacttctgcagttttatcctagtctcgaagatccagcctcctcgcgataccagaacttctctaagggcagcaggcacggaagcgaagaggcctatattgaccctatagccatggagtactacaactggggaagattctctaaaccacccgaggacgatgatgctaactcgtacgaaaacgttctcatttgcaaacagaaaaccactgagaccggagcccagcaggaaggaatcgggggactttgcagaggcgatctctccctgtctttagctctcaagactggcccgaccagtggtctctgtccatccgcatcacctgaagaggacgaagagtctgaggactaccaaaattcagcatccattcaccagtggcgggagagtagaaaggtgatggggcagttgcaacgcgaggcttcccccggtcccgtcgggagcccagatgaggaggatggcgaacctgattatgttaacggggaagttgcagcaaccgaagcctag

SEQ ID NO: 224281 - DNA, 732 bp, Artificial Sequence
  derived and/or modified sequence
atgtctagtggaaccgagcttctgtggcccggagccgctctgctcgtgttgttaggcgtagccgcaagcttgtgtgtccggtgttcccggccaggggcaaaaaggtctgagaaaatctaccagcaacggtctctccgggaagatcagcagagtttcacaggttctcgcacgtatagcctggtcgggcaagcctggcccggacccttagcggatatggctcccacccggaaggacaaactactacagttctatccatcactcgaggatccagcctcatctagatatcaaaacttcagcaagggatcccgccacggctctgaagaggcctacatcgatcctattgcgatggaatattataactggggaaggttttcaaaaccaccggaggacgacgacgcaaacagttatgagaatgtgttaatctgcaagcagaagaccacagaaaccggagcgcagcaggaagggattgggggactatgcagaggtgacctgagtctgtctcttgcactgaaaactggccctacaagcggcttgtgtcctagcgcgtcccctgaagaagatgaggagagtgaggactaccagaatagtgcatctatccaccaatggcgcgaaagccgaaaggtgatgggacaactgcagcgcgaggcatccccaggccctgtaggatctcccgatgaggaggacggcgaacccgattatgtcaacggggaagtggcagctactgaagcttag

SEQ ID NO: 224282 - DNA, 732 bp, Artificial Sequence
  derived and/or modified sequence
atgagctctggcacagaacttctatggcccggagccgctctgctagtcttgctgggagtggcagccagcctctgtgtccgttgtagccggcctggggctaagcggtccgaaaaaatttaccagcagcgttctctgagagaggatcaacagagctttaccggttcccggacctacagcctggtgggacaggcctggccgggacctctcgcggacatggcccctacacggaaggacaagttgctgcagttctacccgtccttggaggacccagccagttctagataccaaaatttcagtaaagggagcaggcacggaagcgaagaggcctatatagacccgatcgcaatggagtattacaactggggccgttttagcaaaccacccgaagatgacgacgctaacagttatgagaatgtgcttatttgcaagcaaaagacaacagagacaggcgctcaacaggagggcatcggtgggctgtgtcggggagatctgagcctgtctttggctcttaagaccggacctacctctggcctttgcccctcagcgtcccccgaagaggacgaggaatccgaggattaccagaacagtgccagcatccatcagtggagagagagccgaaaggtcatgggccagttacagcgtgaagccagtcctggtccagtgggttccccagacgaggaagatggcgagcccgactatgtgaacggggaggttgcagccacggaggcatag

SEQ ID NO: 224283 - DNA, 732 bp, Artificial Sequence
  derived and/or modified sequence
atgagtagtggaacggaactgctgtggcccggagccgctttactggttttgctcggggtggctgcttccttatgcgttaggtgctctaggccaggcgcaaagagaagcgaaaaaatctatcaacagcgctctctaagagaagatcagcagtctttcacaggatcacggacctacagtcttgtcggccaggcctggccagggccattggctgatatggctcctactcgaaaggacaagctacttcagttctacccctcactagaggacccagcttcgtcccggtatcagaacttttcaaagggcagcagacacggctccgaagaggcatacatcgatccgatcgccatggaatattacaattggggacgtttttcaaagcctcccgaggatgatgatgccaattcctatgagaatgtcctgatttgtaagcagaagaccaccgaaacaggtgctcaacaggaaggaatcggaggactgtgcagaggcgacctttccttgagcttggccctgaagacgggtcctacaagcgggctgtgccctagtgcaagtcctgaggaggatgaagaatccgaggactaccagaactctgcttcgatccaccaatggcgcgagtcccgcaaagtgatgggacagctccagagggaagccagccctggtccagtcgggtctcccgacgaggaagatggcgaacctgactatgtcaacggagaggtcgctgctacagaggcctag

SEQ ID NO: 224284 - DNA, 732 bp, Artificial Sequence
  derived and/or modified sequence
atgagctccgggacagaattactgtggcccggagctgctctgctggtactgctcggcgtggcagcctcactctgtgttaggtgctccagacctggcgcgaagagatccgaaaaaatataccaacagcggtccctgagggaagaccaacagtcctttacgggatcccgaacctactcactagtggggcaggcttggcccggacctctcgcagatatggccccaacacggaaggacaagctcctccagttctacccctcattagaggatcccgcttcctctcggtaccaaaatttcagcaaggggtctaggcatgggagcgaagaagcttacatcgacccaatcgccatggaatactacaactgggggcgatttagcaagcctcctgaagatgatgatgctaacagctacgaaaatgtgctgatatgtaagcaaaagacaacagagacaggcgctcagcaggaaggtatcggtggcctgtgcagaggggacctcagtctcagtctcgcactgaaaactggccccacatccggcctctgcccatctgctagtccggaggaagacgaggaaagcgaagattaccagaatagtgcgtcgatccatcagtggagggagagcagaaaagtcatgggccagcttcaaagggaggcctcacctggtcctgttggtagcccggatgaggaggacggagagcctgactatgtaaacggcgaagtggctgccaccgaggcctag

SEQ ID NO: 224285 - DNA, 732 bp, Artificial Sequence
  derived and/or modified sequence
atgtcctccggaaccgagttgttgtggccaggtgctgctctgctggtgttgctgggcgtggctgcttccctttgcgtcaggtgctccagaccaggagccaagagatctgagaaaatttaccagcagaggtcactgcgggaggatcagcagagctttacaggaagccgtacttacagcttggtggggcaggcatggccaggcccgcttgcagacatggcgcctacaaggaaagataagctgttgcagttctacccgtctctagaggacccagcttcctcgagataccagaacttttccaaagggtcccggcatggctcagaagaggcgtatatcgatcctattgcaatggaatactataattgggggcgatttagcaagcccccggaagacgacgacgcgaactcttacgagaatgtgctgatttgtaaacaaaagacaacagaaaccggcgcacagcaagaaggaatcggcggtctctgccgaggtgacctgagtttgtctttggctttgaagactggccctaccagcggcttatgccccagcgcttcaccggaggaggacgaagaatctgaagactaccagaattctgcctcaatccaccagtggagggagtcaagaaaggtgatgggacagctgcagcgcgaggcttctcctggacccgtggggtcccccgacgaggaagacggggagcccgattacgttaatggcgaggtcgccgccacggaagcatag

SEQ ID NO: 224286 - DNA, 195 bp, Artificial Sequence
  derived and/or modified sequence
atgtccagcgggaccgaactgctgtggccgggtgccgcgttgctcgtgctgctgggcgtcgctgcatccctttgcgtgagatgctctagaccgggtgctaagagatccgagaaaatataccagcagaggagtttgagagaggatcaacaaagcttcacgggctctcggacatactccctggtagggcaggcttag

SEQ ID NO: 224287 - DNA, 732 bp, Artificial Sequence
  derived and/or modified sequence
atgagctcagggactgagctcttgtggcccggagcggccctcttggtgcttctgggtgtggccgcaagcctctgcgttaggtgttctcggccaggtgccaagaggagtgaaaaaatctatcagcaaagatcactgcgagaggaccagcagagcttcaccgggtctagaacctattctctagtgggccaggcctggcctggacctctcgccgacatggcgcctaccaggaaggataaactcctgcagttttacccgagtctggaggatcccgccagttctagatatcagaatttcagcaagggaagtaggcatggtagcgaggaagcctatatagacccaatcgctatggaatactataattggggcagattcagtaagccccctgaagatgacgatgcaaactcctatgaaaatgtcctgatctgcaagcagaagaccaccgaaacaggggctcaacaggaaggcatcggtgggctttgtagaggtgatcttagcttgagcctcgctctgaaaactgggcccaccagtggcctttgtccatccgcctcgcccgaagaagacgaggagtccgaggattaccagaactctgcaagcatccatcagtggcgggagtctcggaaggtcatgggccagctccagcgagaggcctctcccggccccgtgggcagccccgacgaagaggatggggagccagattatgttaatggagaagtggcagctactgaggcgtag

SEQ ID NO: 224288 - DNA, 732 bp, Artificial Sequence
  derived and/or modified sequence
atgtcatccggtactgagctcctctggcctggggcggcacttctcgtcctgctgggggtcgctgcttccctgtgtgtccgctgttcgagacccggtgccaagcgcagtgaaaaaatctaccagcaacggagcctgcgagaggaccaacaaagtttcacaggaagtcgcacctattctcttgtggggcaagcttggccaggccccttagccgacatggctcctactaggaaagacaagcttctccagttttatccgtccctcgaggaccccgccagtagcaggtaccaaaacttctccaaaggctccagacatgggtccgaggaggcgtacatagatccaatcgccatggagtactacaattggggtcggttctcgaagcctcctgaggacgacgacgccaacagctatgagaacgtgctcatatgcaaacaaaagactacagagacaggcgcccagcaagaaggcattggcggcctgtgtcgcggggatctctcattatctctcgcccttaagaccggccccaccagtggcctatgccctagcgcgtcccccgaggaagacgaggagtctgaggactatcagaattctgctagtattcaccagtggagggagagccgaaaagttatgggccaactccagagggaggcgtcacctgggcccgtcggtagtccggacgaagaggacggagagcctgattatgtgaatggtgaggtcgccgccactgaggcctag

SEQ ID NO: 224289 - DNA, 177 bp, Artificial Sequence
  derived and/or modified sequence
atgtcctcgggcactgagctgctttggcccggggcagccttgctggtgctgcttggcgtggcagccagcttgtgtgtccgttgttcaaggcctggcgccaaaagaagtgagaagatttaccagcaaaggtcacttcgcgaagaccagcaaagttttaccggaagtagaacatactag

SEQ ID NO: 224290 - DNA, 303 bp, Artificial Sequence
  derived and/or modified sequence
atgtcctccggaacagaattgctttggccgggggccgctctgctggtactgctgggcgtcgctgccagtctttgcgtgaggtgtagcagacctggcgctaagaggagcgagaaaatctaccagcagcgctccttgcgggaagaccagcagagcttcaccggttctagaacatattccctggtgggccaggcatggcccggacccctggccgacatggctcccacaagaaaggataagctcttgcaattctacccctctctggaggacccagcttcttcacgataccaaaacttctccaaatag

SEQ ID NO: 224291 - DNA, 195 bp, Artificial Sequence
  derived and/or modified sequence
atgagcagcggcacagagctgctgtggccaggggccgccctgctggtgctgctgggcgtggccgccagcctgtgtgtgcgctgcagcaggcctggggccaagaggtctgagaagatctaccagcagaggagcctgcgggaggaccagcagagcttcaccggcagcaggacctacagcctggtgggccaggcctag

SEQ ID NO: 224292 - DNA, 177 bp, Artificial Sequence
  derived and/or modified sequence
atgagcagcggcacagagctgctgtggccaggggccgccctgctggtgctgctgggcgtggccgccagcctgtgtgtgcgctgcagcaggcctggggccaagaggtctgagaagatctaccagcagaggagcctgcgggaggaccagcagagcttcaccggcagcaggacctactag

SEQ ID NO: 224293 - DNA, 303 bp, Artificial Sequence
  derived and/or modified sequence
atgagcagcggcacagagctgctgtggccaggggccgccctgctggtgctgctgggcgtggccgccagcctgtgtgtgcgctgcagcaggcctggggccaagaggtctgagaagatctaccagcagaggagcctgcgggaggaccagcagagcttcaccggcagcaggacctacagcctggtgggccaggcctggccaggccccctggccgacatggcccccaccaggaaggacaagctgctgcagttctaccccagcctggaggaccctgccagcagccgctaccagaacttcagcaagtag

SEQ ID NO: 224294 - DNA, 581 bp, Artificial Sequence
  derived and/or modified sequence
agtgtcagtggtgttggcatcagcttgggcaggtgtgcgggctcaggatggggcggccgtggtgaggaaccctggactctcagagatggaatttcaccgtgttgcctaggctggtctggagctcttgatctcaagcgatcctccctgcctcggcctcccaacgtgctgggattataggcgtgagccaccgctcctggccagggtctgttcctagttgcaacagttcttggaaacccactcgagagggccacgcctccattcaccaggccacggtgggtggtgtgcgtatgttttgctgaggcctggtcatcacgctgtggctccaaggctgggaccagccacagaccgagaagccggtcagcatcacaagaggcaacaccaggagccaacatgagctcggggactgaactgctgtggcccggagcagcgctgctggtgctgttgggggtggcagccagtctgtgtgtgcgctgctcacgcccaggtgcaaagaggtcagagaaaatctaccagcagagaagtctgcgtgaggaccaacagagctttacggggtcccggacctactccttggtcgggcaggc

SEQ ID NO: 224295 - DNA, 2453 bp, Artificial Sequence
  derived and/or modified sequence
aggaagcccgccctgcccgcccgccagtgtcagtggtgttggcatcagcttgggcaggtgtgcgggctcaggatggggcggccgtggtgaggaaccctggactctcagcatcacaagaggcaacaccaggagccaacatgagctcggggactgaactgctgtggcccggagcagcgctgctggtgctgttgggggtggcagccagtctgtgtgtgcgctgctcacgcccaggtgcaaagaggtcagagaaaatctaccagcagagaagtctgcgtgaggaccaacagagctttacggggtcccggacctactccttggtcgggcaggcatggccaggacccctggcggacatggcacccacaaggaaggacaagctgttgcaattctaccccagcctggaggatccagcatcttccaggtaccagaacttcagcaaaggaagcagacacgggtcggaggaagcctacatagaccccattgccatggagtattacaactgggggcggttctcgaagcccccagaagatgatgatgccaattcctacgagaatgtgctcatttgcaagcagaaaaccacagagacaggtgcccagcaggagggcataggtggcctctgcagaggggacctcagcctgtcactggccctgaagactggccccacttctggtctctgtccctctgcctccccggaagaagatgaggaatctgaggattatcagaactcagcatccatccatcagtggcgcgagtccaggaaggtcatggggcaactccagagagaagcatcccctggcccggtgggaagcccagacgaggaggacggggaaccggattacgtgaatggggaggtggcagccacagaagcctagggcagaccaagaagaaaggggcgtcaggcagggaattctggtgacttcaggggcaaagaagtgggcaccgggtgggtctcccaactccactgcatcctcctggctgcgaccttggaccaagtgacaacctcccagaacttagttcctcacttggtgcccacctctcagagaagacatcgcacacacggccgggcacggtggctcacgcctgtaatcccggcactttgggaggccgaggcaggcagatcacctgaggtcacgagttcgagaccagcctggccaacatggtgaaacttcatctctactaaaaacacaaaaaattagccaggcatggtggtgggtgcctgtagtcccagttagttgggaggctgaggcaggagaatcatttgaaccctgaaggcggaggttgcggtgagttaagatcacatgcactcaaccctgggtgacagagcgagactccgtctcaataaataaataaaaaaacagacattgcacacaaagcctcagcccagcaggcactcggtcaatgctggaaacagacaggaggcagggacgttgggaaatgtaacagtggctgagacgcgctgaggagccaccgcaggccagtgagatggtgcggcgctaagcgctcacacgtgcaccatctcttagcacccaaagccacagagcagttaagccacctgcccaaggccacatcttgaagtaaggggaggaggagatggaatccccagtggtcagacatcagacatcaaagcctaggctgggtctactgcttgggaagcacgatggacccccagagggccttgaaggctgcccaaagtccccatctgggagacccaggccgtcatctcagcgagcaggctggagggtggaaaccacagtgaacctgggtggtcaagagtcagccccagaggcaggtgcaggagtttgagccaaatgtgcagagccccacgtcattcattcaaccagtatccactgggcccctgctacgggcaagtcctgctctaggtgctgggaacaccaacataaagaacagcaaacccctgaccccttagaacttgcattctggtaggagagagaaaacagatagggctggacacagcggtcatgcctataaatcccagcacttcgggaggctgaggcgggaggatcctttgagcctctgagtttgaggccagcctgggcaacatagcaagacctctctctctacaaaaactttttttttttttttttgagacagagtatcactgtcactcaggctggagtgcagtggcgccatctcggctcactgcaacctccacctcctgggttcaagcgattctcgtgcctcagccttccaagtagctgggattacaggcacacgccaccatgtccagcctctataaaaacatttaaaattagccaggcatggtggtggatgccctagagtcccactgacttgggaggctgaggtgggaagatcacttgagcctgggaggtcaaggttgcaatgagccatggttgctgcagtgagctgtggtcgtgccactgcactcaagcctgggcaacagagcaagaccccatctcaaaaaaaaaatttaaaaa

SEQ ID NO: 224296 - DNA, 585 bp, Artificial Sequence
  derived and/or modified sequence
atatcctgttctttccttcaccgtgggagacgagctgagcctgtccggcagtgcggcggatgtacggatgattcagtggctggcaggaagcccgccctgcccgcccgccagtgtcagtggtgttggcatcagcttgggcaggtgtgcgggctcaggatggggcggccgtggtgaggaaccctggactctcagagatggaatttcaccgtgttgcctaggctggtctggagctcttgatctcaagcgatcctccctgcctcggcctcccaacgtgctgggattataggcgtgagccaccgctcctggccagggtctgttcctagttgcaacagttcttggaaacccactcgagagggccacgcctccattcaccaggccacgcatcacaagaggcaacaccaggagccaacatgagctcggggactgaactgctgtggcccggagcagcgctgctggtgctgttgggggtggcagccagtctgtgtgtgcgctgctcacgcccaggtgcaaagaggtcagagaaaatctaccagcagagaagtctgcgtgaggaccaacagagctttacggggtcccggacctact

SEQ ID NO: 224297 - DNA, 561 bp, Artificial Sequence
  derived and/or modified sequence
ggatgtacggatgattcagtggctggcaggaagcccgccctgcccgcccgccagtgtcagtggtgttggcatcagcttgggcaggtgtgcgggctcaggatggggcggccgtggtgaggaaccctggactctcagagatggaatttcaccgtgttgcctaggctggtctggagctcttgatctcaagcgatcctccctgcctcggcctcccaacgtgctgggattataggccatcacaagaggcaacaccaggagccaacatgagctcggggactgaactgctgtggcccggagcagcgctgctggtgctgttgggggtggcagccagtctgtgtgtgcgctgctcacgcccaggtgcaaagaggtcagagaaaatctaccagcagagaagtctgcgtgaggaccaacagagctttacggggtcccggacctactccttggtcgggcaggcatggccaggacccctggcggacatggcacccacaaggaaggacaagctgttgcaattctaccccagcctggaggatccagcatcttccaggtaccagaacttcagcaaag

SEQ ID NO: 224298 - DNA, 732 bp, Artificial Sequence
  derived and/or modified sequence
atgagcagcggcaccgagctgctgtggcccggcgccgccctgctggtgctgctgggagtggcggcatctttgtgcgtcagatgctctcgcccgggcgccaagcgaagcgagaaaatataccaacaaaggagcctgcgagaagatcagcagagtttcactgggtccaggacttattcccttgttgggcaggcttggcccggccctcttgccgacatggccccaacgaggaaagacaaactacttcagttctatccgagtttggaagatccagcttcaagcagatatcagaacttcagtaaaggatctcgccacggcagcgaggaagcctatattgaccctattgcgatggagtactataattggggccgtttttctaaacctcctgaagatgacgacgctaattcctatgagaacgtcctgatctgcaaacagaaaacaaccgaaaccggagcgcagcaggagggaattggtgggttatgtaggggggatctgtccctgagcctggctctgaagacaggacccactagtgggctctgccccagcgcttcacctgaggaagatgaggaatcagaggactaccagaatagtgctagcattcatcagtggcgcgaatctcgaaaggtaatgggacagctgcaacgagaagcttctcctggcccggtgggcagcccagatgaagaggatggagagccagactatgtaaatggggaggtggcagcgacggaggcctag

SEQ ID NO: 224299 - DNA, 732 bp, Artificial Sequence
  derived and/or modified sequence
atgagcagcggcaccgagctgctgtggcccggcgccgccctgctggtgctcttgggtgttgcagccagtctctgcgtgcgctgttctagacctggcgccaagagatccgagaagatctaccaacagagaagccttcgcgaggatcagcaatccttcaccggaagcagaacatactcactggtgggacaagcatggcccgggccattagcggatatggcccctactaggaaggacaaactcctccagttttacccctcactggaggatccagcttcttcaagatatcagaatttctcaaaaggatctagacatggctccgaagaggcatatatagacccaatcgcaatggagtattacaattgggggcgatttagcaaaccccccgaagatgatgatgcaaacagttatgagaacgttttaatttgtaagcagaaaacaaccgagactggcgcgcaacaggaagggatcggagggctttgtcgtggggacctgagcctgtccctggctctgaaaacgggaccaacaagcggattgtgccctagcgcctcccctgaagaagacgaagagtctgaagactaccagaattcagcgtctatccatcagtggcgcgaaagtagaaaagtcatgggacagctccagcgagaagcgtccccgggccctgtgggtagccccgacgaggaagatggcgaacccgactacgtgaatggggaggtggccgccacagaggcttag

SEQ ID NO: 224300 - DNA, 195 bp, Artificial Sequence
  derived and/or modified sequence
atgagcagcggcaccgagctgctgtggcccggcgccgccctgctggtgcttctaggcgtcgccgcctccttatgtgtgaggtgcagccgcccgggagccaaaagaagcgaaaaaatttaccagcagcgctcactgcgagaggatcaacagagtttcacgggttcacggacatactccctcgttggccaggcctag

SEQ ID NO: 224301 - DNA, 732 bp, Artificial Sequence
  derived and/or modified sequence
atgagcagcggcaccgagctgctgtggcccggcgccgccctgctggtactgcttggggtcgccgcctccctgtgcgtgcgctgtagcagacccggggccaaacgaagtgagaaaatctaccagcagagatcactccgggaggatcagcagtcctttacaggcagtaggacttattcacttgtaggacaggcctggcctggcccacttgctgatatggcgcccactcggaaagataaactgctccaattttatccttcactggaagatcctgccagctcgcgctaccagaacttctccaagggttcaagacatggatctgaggaggcctacatcgatccaatcgcaatggaatactacaactgggggcggttctcaaagcccccagaggatgatgacgctaattcttacgaaaacgtccttatttgcaagcagaagaccactgagactggagcccagcaggagggtattggcggattatgtcgcggcgatttatctctcagccttgcccttaagaccgggccaacatctgggctgtgcccctccgcctctccggaggaagacgaagagtccgaagactaccaaaactccgcttctatccaccaatggcgggaatccagaaaggtgatggggcagttgcagcgcgaagcatcacccggcccagtaggatcaccagacgaggaggatggggaaccagactacgtgaacggggaggtggccgctaccgaggcgtag

SEQ ID NO: 224302 - DNA, 732 bp, Artificial Sequence
  derived and/or modified sequence
atgagcagcggcaccgagctgctgtggcccggcgccgccctgctggttcttcttggggtcgccgccagtttgtgcgtgaggtgttcgaggcctggggccaaaaggagcgagaagatttatcagcagcgatcactccgcgaggatcagcagagctttacaggatccagaacctactccctggtaggacaggcctggcccggcccacttgcggatatggcacccactaggaaggataaactgctccaattctaccccagcctcgaggatccggcaagctctagataccagaattttagcaaaggaagtaggcatggctcagaggaagcatacattgaccccatagcaatggagtactataactggggacgattctccaagcctcccgaagacgatgacgccaattcatacgaaaacgtgcttatttgtaagcagaagaccactgagacaggagcccaacaggaaggcataggaggcctttgcagaggggacctgagcttgtcactggcacttaaaacaggtcccacttccggactgtgccccagcgctagccccgaagaagatgaggaaagcgaggactatcagaacagtgcatcaatccatcagtggcgggagtcccggaaggttatgggccagctgcagcgcgaggctagcccagggccggttgggtctcccgacgaggaagatggagagccagattacgtaaacggcgaagtcgcagcaacagaggcctag

SEQ ID NO: 224303 - DNA, 177 bp, Artificial Sequence
  derived and/or modified sequence
atgagcagcggcaccgagctgctgtggcccggcgccgccctgctggtgctccttggcgtagctgcgagcttgtgcgtgaggtgcagcagaccaggtgccaaaagatctgagaaaatttatcagcagcgctccctcagggaagaccagcagagttttacgggatcccgaacctactag

SEQ ID NO: 224304 - DNA, 303 bp, Artificial Sequence
  derived and/or modified sequence
atgagcagcggcaccgagctgctgtggcccggcgccgccctgctggtgctgctgggggttgccgcttcactgtgtgtgaggtgctctcgtcctggcgctaagcggagcgaaaaaatatatcaacagagatcgctcagggaggatcagcagagtttcacaggttctcggacctatagtctggtggggcaggcctggcctggcccgttagctgatatggcgccaacacgaaaagataaactcctccagttctacccttcacttgaggatcctgcgtcctcaaggtaccagaacttttcaaaatag

SEQ ID NO: 224305 - DNA, 732 bp, Artificial Sequence
  derived and/or modified sequence
atgagttcaggcacagagcttctgtggcctggtgccgctttgctggtgttattaggcgtggccgcttcactgtgtgtccgatgttcgaggcctggggctaaacgcagcgaaaagatttaccagcaacggtccctgcgggaggatcagcagtcattcaccgggtccaggacctactcattggtgggacaggcctggcccggacctctggccgatatggcacccaccagaaaagacaagcttcttcaattctatccaagcttggaggacccagccagctctaggtaccagaacttcagtaaggggtccaggcacggctctgaagaagcctacatcgacccaattgccatggaatactacaactggggcaggttttctaagcctcccgaagacgacgatgccaacagttatgagaacgttctgatttgtaagcaaaagaccactgagactggcgctcagcaggaaggcataggtggattatgccgcggagacctgtccctgtctcttgcactcaagactggacccacaagcgggctgtgtccgtctgcctcccctgaagaagatgaggagtctgaagattatcagaattctgcctccatccatcagtggcgggaaagtcgaaaggtcatgggtcagcttcagcgagaggcatcacctgggcctgtggggagcccggatgaggaggatggcgaaccagattatgtcaatggggaggttgctgcgaccgaagcctag

SEQ ID NO: 224306 - DNA, 732 bp, Artificial Sequence
  derived and/or modified sequence
atgtctagtgggacagagctcctctggcctggggctgcactcctcgtcctacttggggtggcagcatcactgtgcgttaggtgtagtagacctggagccaagcgctccgaaaagatctaccagcaaagatcactgcgggaagaccaacagtccttcacggggtctcgtacatatagcttagtgggccaggcctggcctggacccttggcagatatggctcctactcgcaaggataaattgctgcagttttaccctagcctggaggatccggcatcctctagataccagaattttagcaaaggcagccgccacggttccgaggaggcctatattgaccccattgccatggagtattataactgggggaggttcagtaaaccgccagaggatgatgacgcaaattcctatgagaacgtgctgatttgcaagcagaaaacaaccgagacgggtgctcaacaggagggcatcggcggactttgtagaggcgacttgtccctatcactggcattgaaaactggacctacaagtggcctatgcccctcagcaagtcccgaagaggacgaagagagcgaagattaccaaaattccgcttctatccatcagtggagagagtccagaaaagtgatgggccagctgcagcgggaagctagtcccggaccggtgggctctcctgatgaggaggacggggaacccgattacgtcaacggcgaagtcgcagctaccgaggcctag

SEQ ID NO: 224307 - DNA, 195 bp, Artificial Sequence
  derived and/or modified sequence
atgagttcgggcactgagctgctctggcccggtgccgcacttctcgtgttgcttggggtcgctgcgtccctctgcgtcaggtgttccagaccaggggctaaacggtcagagaagatctatcaacagcggagtcttcgcgaggatcagcaatccttcaccggcagccgaacctactccctcgtagggcaggcttag

SEQ ID NO: 224308 - DNA, 732 bp, Artificial Sequence
  derived and/or modified sequence
atgtcgtccgggactgaattgttgtggcctggggctgctctgttggtgctgctgggagtagcagcttctctctgtgtccggtgcagtcggcctggcgcaaaacgctcagaaaagatctatcaacagcgctccttgagggaggatcagcagtcctttaccgggagccgcacatattctttggtaggacaagcctggcccggaccactggcggatatggctccaacccggaaagataagcttcttcagttctatcccagcctcgaagaccctgcaagctctcgttaccagaattttagcaaaggaagtagacatgggtcagaggaagcttatatcgacccaatcgccatggaatactacaactggggtagattctctaagccccctgaagacgacgatgctaacagctatgagaacgtgttaatttgcaaacagaagacgacggagaccggagcacaacaggagggaattggcggactgtgccggggagacctcagtttgtcccttgccctgaaaactggacctaccagtggactctgcccctctgcctctcccgaggaggatgaagaatccgaggactatcagaattctgcgtctatccatcagtggagggaatctagaaaagtgatgggccaactgcaacgggaggcctctcccggaccagtgggatctcccgacgaggaagatggcgagcccgactatgtgaatggtgaggtggccgcaactgaggcctag

SEQ ID NO: 224309 - DNA, 732 bp, Artificial Sequence
  derived and/or modified sequence
atgagctctgggacagaactcctatggcctggggctgcactcctcgtcctgttaggggtggcagcgtccctttgcgttcgctgctcaaggcccggtgctaagaggtcggaaaaaatttaccagcagcgcagccttagggaggatcagcagtcctttactgggtctaggacttattccctggtgggacaggcttggccgggtccactggccgacatggctcctacccgcaaagacaagctgctgcaattctacccttccctcgaggaccccgcttctagtcggtaccaaaacttcagcaaggggtctaggcatggcagcgaagaagcctacatagacccaattgccatggagtattacaattggggccgattctccaagccaccggaggacgacgacgctaattcttacgaaaacgtgctgatttgtaagcagaagactacagagacaggcgcacaacaggagggcattgggggtctttgccgaggcgatctatcgttgtctctcgccctgaaaacaggtccaacttccgggctttgcccctctgcatcacccgaggaggatgaagaaagcgaagattatcagaactcagcctctatccatcaatggcgtgaatctagaaaggtaatgggccagttgcagagagaagcatctcctggtcccgtaggctcgcccgatgaggaggacggtgagccagattacgtaaacggggaggtcgcagcaactgaagcatag

SEQ ID NO: 224310 - DNA, 177 bp, Artificial Sequence
  derived and/or modified sequence
atgtcttccggaaccgaactcctgtggccaggagcagctcttctcgttctgttgggagtcgctgccagtctctgcgtaaggtgttccaggcctggggctaagagatctgaaaagatctatcaacagcggtctttaagagaggatcagcagtcattcacaggcagtagaacctactag

SEQ ID NO: 224311 - DNA, 303 bp, Artificial Sequence
  derived and/or modified sequence
atgtcctccggtactgagctcctgtggccaggtgcagctctgctggttctgctgggcgtcgccgcttcactctgcgtccgatgcagcagaccaggagcgaagaggagcgagaagatttatcaacagcggagtctgagagaggaccaacaaagcttcacaggcagtaggacatactctttagtgggccaggcctggcctggacctttggctgacatggctcctacaaggaaagacaaacttcttcagttctacccatcactcgaggatcccgcaagcagccgttaccaaaacttcagtaagtag

SEQ ID NO: 224312 - DNA, 195 bp, Artificial Sequence
  derived and/or modified sequence
atgagcagcggcaccgagctgctgtggcccggcgccgccctgctggtgctgctgggcgtggccgccagcctgtgcgtgagatgcagcagacccggcgccaagagaagcgagaagatctaccagcagagaagcctgagagaggaccagcagagcttcaccggcagcagaacctacagcctggtgggccaggcctag

SEQ ID NO: 224313 - DNA, 177 bp, Artificial Sequence
  derived and/or modified sequence
atgagcagcggcaccgagctgctgtggcccggcgccgccctgctggtgctgctgggcgtggccgccagcctgtgcgtgagatgcagcagacccggcgccaagagaagcgagaagatctaccagcagagaagcctgagagaggaccagcagagcttcaccggcagcagaacctactag

SEQ ID NO: 224314 - DNA, 303 bp, Artificial Sequence
  derived and/or modified sequence
atgagcagcggcaccgagctgctgtggcccggcgccgccctgctggtgctgctgggcgtggccgccagcctgtgcgtgagatgcagcagacccggcgccaagagaagcgagaagatctaccagcagagaagcctgagagaggaccagcagagcttcaccggcagcagaacctacagcctggtgggccaggcctggcccggccccctggccgacatggcccccaccagaaaggacaagctgctgcagttctaccccagcctggaggaccccgccagcagcagataccagaacttcagcaagtag

SEQ ID NO: 224315 - DNA, 942 bp, Artificial Sequence
  derived and/or modified sequence
atggctcaacgcaagaacgcaaaatccagtgggaactcatcatcctccggttccgggtccggcagcacgtccgccggatcctcttccccaggggcgcggagggagacaaagcatggagggcataagaatggtcgcaagggcggcctgtctggtactagctttttcacttggttcatggtgatcgccctgctgggggtgtggactagtgtagcggtggtctggttcgatttagttgactacgaggaggtacttggaaagctggggatatatgatgccgacggagacggcgattttgacgttgatgacgctaaggttttgctgggcctgaaggagcgttctacatctgagcctgctgttcctcctgaagaagccgagcctcatactgaaccagaagagcaggtgccagtggaagctgaaccccagaatatcgaggacgaggccaaggagcagattcaaagcttactgcacgaaatggtgcatgccgagcacgtcgagggcgaggacctgcagcaggaagatggtccaactggtgagccacagcaggaagacgatgagtttctgatggctactgatgttgatgatcggttcgagaccttggagcccgaggtttcgcacgaagagaccgagcacagctaccatgtagaagaaaccgtctcccaggactgcaatcaagatatggaggagatgatgagcgaacaggaaaacccagactcttctgaaccggtggtcgaagacgaaagactgcatcatgatactgatgatgtcacatatcaagtttacgaagaacaggccgtatatgagccactcgaaaatgagggcatagaaattaccgaagtcactgcgcccccggaggacaatccggtggaggatagccaggtcatagttgaagaggtaagcatttttcctgtagaagagcaacaggaggtccctcccgatacatag

SEQ ID NO: 224316 - DNA, 942 bp, Artificial Sequence
  derived and/or modified sequence
atggcccagaggaagaatgccaagagcagcggcaacagcagcagcagcggcagcggcagcggcagcaccagcgctggcagcagcagccctggggcccggcgggagaccaagcacggcggccacaagaatggaaggaagggcggcctgagcggcaccagcttcttcacctggttcatggtgattgccctgctgggcgtgtggacctctgtggccgtggtgtggtttgacctggtggactatgaggaggtgctgggcaagctgggcatctatgatgctgatggagatggagactttgatgtggatgatgccaaggtgctgctgggcctgaaggagaggagcaccagcgagcctgctgtgcccccagaggaggccgagccccacacagagcctgaggagcaggtgcctgtggaggccgagccccagaacattgaagatgaggccaaggagcagatccagagcctgctgcacgagatggtgcatgctgagcacgtggagggggaggacctgcagcaggaggatggccccaccggggagccccagcaggaggatgatgagttcctgatggccacagatgtggatgacagatttgagaccctggagcctgaggtgtcccatgaggagacagagcacagctaccacgtggaggagaccgtgtcccaggactgcaaccaggacatggaggagatgatgtctgagcaggagaacccagacagcagcgagcctgtggtggaggatgagcggctgcaccacgacacagatgatgtgacctaccaggtgtatgaggagcaggccgtgtatgagcccctggagaatgaaggcatcgagatcacagaggtgacagcccctcctgaggacaaccctgtggaggacagccaggtgattgtggaggaggtgtccatcttccctgtggaggagcagcaggaggtgcccccagacacctag

SEQ ID NO: 224317 - DNA, 942 bp, Artificial Sequence
  derived and/or modified sequence
atggcccagcggaagaacgccaagagcagcggcaacagcagcagctccggctcaggcagcggatcaactagcgccggatcatcaagtccaggggcccgcagggagacaaagcacggagggcataagaatgggcgaaaaggtggtctgtccggaacaagttttttcacatggtttatggtcatcgcactgctcggggtctggacgagcgtcgctgtcgtgtggttcgacctggtagattacgaagaggttctagggaagcttggtatttacgatgccgatggggacggcgacttcgacgtcgacgacgccaaggtgcttctgggcctgaaagaaaggagcacaagcgaacctgccgtcccaccagaggaggctgaaccgcacactgaacccgaagagcaggttcctgttgaagctgagccgcaaaacatcgaagacgaggctaaggaacagattcaatccctgcttcatgaaatggtgcacgctgagcatgtggaaggcgaggatttgcagcaggaagacgggcccacaggggaacctcaacaggaagacgacgaatttttaatggcgacagatgtggatgaccgcttcgaaacccttgaacccgaagtcagccacgaagagacagaacacagctatcacgtcgaagagaccgtcagtcaagactgcaatcaggacatggaagagatgatgtctgagcaggagaaccccgactcgagcgagccagtggtcgaggatgagaggctgcaccatgatactgacgacgttacctatcaggtgtatgaggaacaagctgtttacgagcccttagagaacgaggggatcgaaataacggaggtaaccgccccccctgaggacaatccagtcgaagattcacaggtcatcgtggaggaggtttctatctttcccgtggaggagcaacaggaggtcccacctgacacctag

SEQ ID NO: 224318 - DNA, 942 bp, Artificial Sequence
  derived and/or modified sequence
atggcccagagaaaaaatgccaagtcctctggtaattcatcttctagcggctccggatcggggtcaacttctgctggctccagcagtcctggagctcgccgagagaccaagcacggcggacataaaaatggccgaaaaggtggcttatcgggcacaagcttcttcacgtggttcatggtcatcgcactactgggcgtttggacctctgtggctgtcgtgtggttcgaccttgtggattatgaagaggtgttggggaaactgggcatctacgacgcagatggagacggcgatttcgatgtggatgatgcaaaagtcttgctggggttgaaggagcggtcaacctcggaaccggcagtcccacctgaggaggctgagcctcacaccgagccagaggaacaggtgcctgtcgaggctgagccacagaacatagaggacgaagctaaagagcagatccaaagtcttctacatgagatggtgcatgctgagcatgtggaaggagaggatctccagcaggaagacgggccaacaggcgaaccccaacaggaagatgatgaattcctcatggctactgacgttgatgatagattcgaaacacttgaacctgaagttagccatgaggagaccgagcacagctatcatgttgaggagaccgtatcacaggactgcaatcaggacatggaagagatgatgtccgaacaggagaatcccgatagttcggaacccgtcgtcgaagatgagcgactgcaccatgacactgacgacgttacatatcaggtatatgaggaacaggctgtgtatgaacccctggaaaacgaaggaatcgaaataacggaggtaactgcccctcccgaagacaaccctgtcgaggactctcaggtgatcgtggaagaagtctctattttcccggtcgaggagcagcaggaggtgccacctgacacgtag

SEQ ID NO: 224319 - DNA, 2904 bp, Artificial Sequence
  derived and/or modified sequence
agggagtcacaggttcgtacacgcgaggccgggcgcgcgcagccggcaggcgggtgaagtcttcccaggtgctgcaggcggtgctgaggcacagggtctgctgcaggagcagcggcccgaacccgctccagcggcccgccgccgccagcggttcccgcgtcgcgtgtgtacccccgcgcactgaaggaggtccgccagccctcaccagcccccgcggaccgtgcaatggcccagcgtaagaatgccaagagcagcggcaacagcagcagcagcggctccggcagcggtagcacgagtgcgggcagcagcagccccggggcccggagagagacaaagcatggaggacacaagaatgggaggaaaggcggactctcaggaacttcattcttcacgtggtttatggtgattgcattgctgggcgtctggacatctgtagctgtcgtttggtttgatcttgttgactatgaggaagttctaggaaaactaggaatctatgatgctgatggtgatggagattttgatgtggatgatgccaaagttttattaggacttaaagagagatctacttcagagccagcagtcccgccagaagaggctgagccacacactgagcccgaggagcaggttcctgtggaggcagaaccccagaatatcgaagatgaagcaaaagaacaaattcagtcccttctccatgaaatggtacacgcagaacatgttgagggagaagacttgcaacaagaagatggacccacaggagaaccacaacaagaggatgatgagtttcttatggcgactgatgtagatgatagatttgagaccctggaacctgaagtatctcatgaagaaaccgagcatagttaccacgtggaagagacagtttcacaagactgtaatcaggatatggaagagatgatgtctgagcaggaaaatccagattccagtgaaccagtagtagaagatgaaagattgcaccatgatacagatgatgtaacataccaagtctatgaggaacaagcagtatatgaacctctagaaaatgaagggatagaaatcacagaagtaactgctccccctgaggataatcctgtagaagattcacaggtaattgtagaagaagtaagcatttttcctgtggaagaacagcaggaagtaccaccagatacttaaagcttcaaaaagactgcccctaccaccacaggaggaccagcctaaccatacgctccaaaagatggctgtgatagatcttgtgaagcaattactgagcagatcaagatctttgggaaggaacactaaagatgttttgaatgaattatagtccactggcattttagtgtatttttttttctttttagaaacacacatttctaaaaatgtcatgttacattcctgcatgtcccttttgatagcattagtggatccattggatttcttttttctttttgtgagacagcttttagtcttacctgaatttatgtgtgtttttccgacagtggttaataattatattggtgatgtagcagcaattgtgttggcagggttttcatatattattagtaattaacactaactgttggactgacttgtgtacactgtgttaaacatgatttaaaagctattaagagtactttgtgttagcactcttaaaaacgctaacagagatcatcattagctgtgaagatttgagttgtatatacctgcactgatattcttatcaaaaatttctacattagctttaagtgttcagattaacacttttgaaatttttgtagcttttagctgattaattagaaaaatttaatatttcagtgaaagttttaaattatcatttatttatttttttaaatgagaggggaaagctgaaattccttgttaagacacaaggaaaaagaatggccctactattatcatgcaaaaatgctttgttggcacctcagattaatcatataatagctatagtctcttcagcatttgtttaaattttagaaaacctgtataaattactggtgcataacttaaagattattctgcctttggctaattgagtaattcccctccagcactagagaccgctcagtgctcttactagatgaactcagtaacgccttgagctgggttgattgaggatgtgtgaaaagctcacagagcccgatgcctgctgctatttcacggcaatgagcctttttctttctacactgaagattttcttcttatttaatgtggtttattttgggctcagaaataattgctctgttgaaaataatcctttgtcagaaaagaaggtagctaccacatcattttgaaaggaccatgagcaactataagcaaagccataagaagtggtttgatcgatatattaggggtagctcttgattttgttaacattaagataaggtgactttttccccctgcttttaggattaaaatcaaagatacttctatatttttatcactatagatcatagttattatacaatgtagtgagtcctgcatgggtactcgatgtgtaatgaaacctgaaataataagataataagaaaagcaataattttctaaagctgtgctgtcggtgatacagagatgatactcaaattataataaaactcttcattttgtgaattatagaagctactttttataaagccatatttttttagggaaactaaggagtgacatagaactgatgaatgagtaaaagtaagttttgctggatttttgtagaactctggacgttgaggattcattatgctgtggttaactttaaatatttttgaattccaaatatctgaattaatgagccttgtctttacaaatatgtgccattgtgcaacatcggtggattttctaaaaataatgtaaatgtcttctattaaatgttgagtgcaataaaatacagaagaattctct

SEQ ID NO: 224320 - DNA, 942 bp, Artificial Sequence
  derived and/or modified sequence
atggcccagagaaagaacgccaagagcagcggcaacagcagcagcagcggcagcggcagcggcagcaccagcgccggcagcagcagccccggcgccagaagagagaccaagcacggcggccacaagaacggcagaaagggcggcctgagcggcaccagcttcttcacctggttcatggtgatcgccctgctgggcgtgtggaccagcgtggccgtggtgtggttcgacctggtggactacgaggaggtgctgggcaagctgggcatctacgacgccgacggcgacggcgacttcgacgtggacgacgccaaggtgctgctgggcctgaaggagagaagcaccagcgagcccgccgtgccccccgaggaggccgagccccacaccgagcccgaggagcaggtgcccgtggaggccgagccccagaacatcgaggacgaggccaaggagcagatccagagcctgctgcacgagatggtgcacgccgagcacgtggagggcgaggacctgcagcaggaggacggccccaccggcgagccccagcaggaggacgacgagttcctgatggccaccgacgtggacgacagattcgagaccctggagcccgaggtgagccacgaggagaccgagcacagctaccacgtggaggagaccgtgagccaggactgcaaccaggacatggaggagatgatgagcgagcaggagaaccccgacagcagcgagcccgtggtggaggacgagagactgcaccacgacaccgacgacgtgacctaccaggtgtacgaggagcaggccgtgtacgagcccctggagaacgagggcatcgagatcaccgaggtgaccgccccccccgaggacaaccccgtggaggacagccaggtgatcgtggaggaggtgagcatcttccccgtggaggagcagcaggaggtgccccccgacacctag

SEQ ID NO: 224321 - protein, 210 aa, Artificial Sequence
  derived and/or modified sequence
MAEDKETKHGGHKNGRKGGLSGTSFFTWFMVIALLGVWTSVAVVWFDLVDYEEVLGKLGIYDADGDGDFDVDDAKVLLEGPSGVAKRKTKAKVKELTKEELKKEKEKPESRKESKNEERKKGKKEDVRKDKKIADADLSRKESPKGKKDREKEKVDLEKSAKTKENRKKSTNMKDVSSKMASRDKDDRKESRSSTRYAHLTKGNTQKRNG

SEQ ID NO: 224322 - DNA, 633 bp, Artificial Sequence
  derived and/or modified sequence
atggcagaggacaaggaaactaaacacgggggacacaagaacgggagaaaaggaggcctcagcggcacatctttctttacatggtttatggtcatcgccttgcttggcgtttggacgtctgtggccgtggtttggttcgacctggtggattacgaagaggtgctgggaaaactggggatctacgacgcagacggggacggtgatttcgacgtggatgatgccaaggttctgctggaaggccctagcggggttgccaagcgcaagaccaaagccaaagttaaggagctaaccaaagaagaactcaagaaagagaaagaaaaacccgagtcgcggaaagagtcaaaaaatgaggaaagaaaaaaaggtaagaaggaagacgtgcgtaaggacaagaaaattgcggacgccgatctctctaggaaagagtcgccaaagggcaaaaaggaccgagaaaaggaaaaagtggatctcgagaagagcgcaaagacgaaggagaatcggaagaagtcgactaacatgaaagacgtttctagtaaaatggcctctagggataaagacgacaggaaggaatccaggagctcaacccgctacgcccacctgactaaaggcaatacccagaagagaaacggttag

SEQ ID NO: 224323 - DNA, 633 bp, Artificial Sequence
  derived and/or modified sequence
atggccgaggacaaggagaccaagcatggaggccacaagaatggaagaaaaggaggcctgagcggcaccagcttcttcacctggttcatggtgattgccctgctgggcgtgtggacctctgtggccgtggtgtggtttgacctggtggactatgaggaggtgctgggcaagctgggcatctatgatgctgatggagatggagactttgatgtggatgatgccaaggtgctgctggagggccccagcggcgtggccaagaggaagaccaaggccaaggtgaaggagctgaccaaggaggagctgaagaaggagaaggagaagccagagagcaggaaggagagcaagaatgaggagaggaagaagggcaagaaggaggatgtgaggaaggacaagaagattgctgatgctgacctgagcaggaaggagagccccaagggcaagaaggaccgggagaaggagaaggtggacctggagaagagcgccaagaccaaggaaaataggaagaagagcaccaacatgaaggatgtgagcagcaagatggccagccgggacaaggatgacaggaaggagagccgcagcagcaccaggtatgcccacctgaccaagggcaacacccagaagagaaatggatag

SEQ ID NO: 224324 - DNA, 633 bp, Artificial Sequence
  derived and/or modified sequence
atggccgaggacaaggagaccaagcacggcggccacaagaacggcagaaagggcggactcagcggcacctcatttttcacttggtttatggttattgcactacttggtgtttggactagtgtggccgtggtgtggtttgaccttgtcgattatgaggaggtgctcgggaagctgggcatctacgatgcagatggtgatggagatttcgacgtggacgatgctaaagtgctcctcgagggaccgtcaggagtggccaaacggaaaaccaaggccaaagttaaagagctgaccaaggaggaattgaaaaaggagaaggaaaaacccgagagtcgaaaagagagtaagaacgaagaacgtaagaagggaaaaaaggaggacgtgcgaaaggacaaaaaaattgctgacgccgacctctccagaaaggaaagtccaaaagggaaaaaggaccgcgaaaaagaaaaagtcgacctggagaagagtgccaagactaaagagaacaggaagaaaagcacaaatatgaaggatgtgagtagtaagatggccagcagggacaaggacgatcgcaaagaatcgaggagctcaactcggtacgctcatctgacgaagggcaatacacagaagcgtaatgggtag

SEQ ID NO: 224325 - DNA, 633 bp, Artificial Sequence
  derived and/or modified sequence
atggccgaggacaaggagacaaaacacggcggacacaaaaacggacggaaggggggactatccggaaccagtttcttcacctggtttatggttattgcactgttgggcgtctggacctctgtggctgtggtctggtttgacctcgtagattatgaggaggtgctgggcaaactaggtatctacgacgccgacggggatggcgacttcgatgtcgatgatgctaaggtcttactggaggggcctagtggggtcgctaagcgaaaaacaaaggcaaaggtcaaggagctgaccaaggaggaactgaaaaaggaaaaagaaaaacctgaatctcgtaaagaaagcaagaatgaagaaaggaaaaaaggaaaaaaagaggacgtgagaaaagataagaagattgctgacgccgatctgtccagaaaggaaagccctaagggaaagaaggacagagaaaaggagaaagtcgacctcgagaaatccgctaaaactaaagagaatcgtaagaagtcaaccaacatgaaagacgtgagctccaagatggcctctcgtgataaggacgaccgcaaagaaagccgaagttccacccgatatgcccatctgacgaagggaaacacgcagaagcggaacggatag

SEQ ID NO: 224326 - DNA, 842 bp, Artificial Sequence
  derived and/or modified sequence
catgcagtgtgcctaaaacctgccagcagtacttttgagtttttttttttgttttgttttactttagcatttattattcatggattgaagaaatcaaaatggctgaagataaagagacaaagcatggaggacacaagaatgggaggaaaggcggactctcaggaacttcattcttcacgtggtttatggtgattgcattgctgggcgtctggacatctgtagctgtcgtttggtttgatcttgttgactatgaggaagttctaggaaaactaggaatctatgatgctgatggtgatggagattttgatgtggatgatgccaaagttttattagaaggacccagtggggtagccaagagaaaaactaaggctaaagttaaagaactcactaaagaagagctcaagaaggagaaagagaaacctgagtcaaggaaggaaagtaagaatgaagagagaaaaaaggggaagaaagaggatgtccgaaaggataagaaaattgctgatgcagacctatccaggaaggagtctcctaagggtaaaaaggacagagaaaaagagaaagtggacctagaaaaaagtgctaaaaccaaggaaaataggaaaaaatcaacaaatatgaaggatgtttctagtaaaatggcatcccgagacaaagatgacagaaaggaaagtagaagttctaccagatatgcacacttaacaaagggaaatacccagaaaagaaacggctaaagctctggcatcatcatcccagaacatggtcatgttccagattgcagtttgttacaaaaaagcatggaaaatgtaatattgctctgattggtgagggtgtgtaaattagcc

SEQ ID NO: 224327 - DNA, 633 bp, Artificial Sequence
  derived and/or modified sequence
atggccgaggacaaggagaccaagcacggcggccacaagaacggcagaaagggcggcctgagcggcaccagcttcttcacctggttcatggtgatcgccctgctgggcgtgtggaccagcgtggccgtggtgtggttcgacctggtggactacgaggaggtgctgggcaagctgggcatctacgacgccgacggcgacggcgacttcgacgtggacgacgccaaggtgctgctggagggccccagcggcgtggccaagagaaagaccaaggccaaggtgaaggagctgaccaaggaggagctgaagaaggagaaggagaagcccgagagcagaaaggagagcaagaacgaggagagaaagaagggcaagaaggaggacgtgagaaaggacaagaagatcgccgacgccgacctgagcagaaaggagagccccaagggcaagaaggacagagagaaggagaaggtggacctggagaagagcgccaagaccaaggagaacagaaagaagagcaccaacatgaaggacgtgagcagcaagatggccagcagagacaaggacgacagaaaggagagcagaagcagcaccagatacgcccacctgaccaagggcaacacccagaagagaaacggctag

SEQ ID NO: 224328 - DNA, 900 bp, Artificial Sequence
  derived and/or modified sequence
atggcagaagataaggagaccaagcacgggggccacaagaatggccgcaaaggtggtcttagcggcactagcttttttacctggttcatggttatcgcactcctgggggtatggacttcagtcgctgtagtgtggttcgacctcgtggactacgaggaggtgcttgccaaggccaaggactttagatataacctgagcgaggttcttcagggaaagctggggatttacgacgccgacggggatggcgatttcgatgttgatgatgccaaggttttgctcgggctgaaggagcgcagcacctccgaaccagcagtcccgccggaggaggcagagcctcacactgagccggaagagcaagttccagtcgaagcagaaccacaaaatatagaggacgaggccaaggaacagatacagtccttgttgcacgagatggtacacgctgagcatgtcgaaggcgaagacttgcagcaggaggacgggcccaccggcgaaccccagcaggaggatgatgagttcctgatggccacagatgttgatgacagattcgaaaccctggagcccgaagtatcccacgaggagactgagcatagctaccatgtagaggagaccgtcagccaggactgtaaccaggatatggaagagatgatgagcgaacaggagaaccctgattcctctgagcccgtcgtagaggacgagcgtctgcatcacgacacggatgacgtgacatatcaggtgtatgaagagcaggcggtgtacgagcccctggaaaacgaggggattgagataaccgaggtcaccgcacccccagaggacaatcccgttgaagactcccaggtaattgtggaagaggtttccatttttccagttgaggagcaacaagaggttcctccagacacatag

SEQ ID NO: 224329 - DNA, 900 bp, Artificial Sequence
  derived and/or modified sequence
atggccgaagacaaagaaacgaaacatggcgggcacaaaaacggacggaaaggtgggctctctgggacatcttttttcacatggtttatggtgatcgccctactcggagtgtggacctcagtcgctgttgtgtggttcgacctcgtcgactacgaggaggtactggccaaggccaaagatttcagatacaacttgagcgaggtgcttcaaggcaagctcggtatttatgacgctgatggggacggtgacttcgatgtggacgatgccaaagtgctactgggtcttaaagagcgaagcaccagtgagcccgctgtccctcccgaggaggcggaaccacacactgagcctgaggagcaagtgccagtcgaggccgagccgcaaaatattgaggatgaggcgaaggagcaaatccagagcttattgcatgagatggtacatgcagaacatgtggagggggaggaccttcagcaagaggatggccccactggggaaccccagcaggaggacgatgagtttttgatggcgactgatgtggatgacagatttgagaccctggagcctgaggtcagtcacgaggagactgagcactcgtaccacgtggaagagaccgtgagccaggactgtaaccaggacatggaggaaatgatgtcagagcaagagaatccagactccagcgaaccagtggttgaggatgaacgtctgcatcacgatacagacgacgtaacttaccaggtgtatgaagaacaggctgtgtatgagcctctagagaatgagggcatcgagatcaccgaggtgacagctcccccagaagataaccccgtcgaggactctcaggtgatcgtggaagaagtaagcatcttcccagtggaagagcaacaggaagtgcccccagacacatag

SEQ ID NO: 224330 - DNA, 900 bp, Artificial Sequence
  derived and/or modified sequence
atggccgaggacaaggagaccaagcatggaggccacaagaatggaagaaaaggaggcctgagcggcaccagcttcttcacctggttcatggtgattgccctgctgggcgtgtggacctctgtggccgtggtgtggtttgacctggtggactatgaggaggtgctggccaaggccaaggacttccgctacaacctgtctgaggtgctgcagggcaagctgggcatctatgatgctgatggagatggagactttgatgtggatgatgccaaggtgctgctgggcctgaaggagaggagcaccagcgagcctgctgtgcccccagaggaggccgagccccacacagagcctgaggagcaggtgcctgtggaggccgagccccagaacattgaagatgaggccaaggagcagatccagagcctgctgcacgagatggtgcatgctgagcacgtggagggggaggacctgcagcaggaggatggccccaccggggagccccagcaggaggatgatgagttcctgatggccacagatgtggatgacagatttgagaccctggagcctgaggtgtcccatgaggagacagagcacagctaccacgtggaggagaccgtgtcccaggactgcaaccaggacatggaggagatgatgtctgagcaggagaacccagacagcagcgagcctgtggtggaggatgagcggctgcaccacgacacagatgatgtgacctaccaggtgtatgaggagcaggccgtgtatgagcccctggagaatgaaggcatcgagatcacagaggtgacagcccctcctgaggacaaccctgtggaggacagccaggtgattgtggaggaggtgtccatcttccctgtggaggagcagcaggaggtgcccccagacacctag

SEQ ID NO: 224331 - DNA, 900 bp, Artificial Sequence
  derived and/or modified sequence
atggccgaggacaaggagaccaagcacggcggccacaagaacggcaggaagggaggactctctgggacctccttctttacgtggtttatggtgatcgctctgctcggcgtgtggacctccgttgcagtggtttggtttgatcttgtggattacgaagaggtcctcgccaaagcaaaggatttccgctacaacttgtctgaggtgttgcaaggaaagcttggaatatacgacgccgacggggacggagatttcgatgtggatgatgcgaaagttctgctgggcctgaaagagaggagcacctccgaacctgccgttccccccgaagaagctgagccccacacagaacctgaggaacaggtgcctgtagaggccgaaccacagaacatcgaagatgaagcaaaggagcagatacagagcttattacatgaaatggttcacgccgagcacgtcgagggtgaagatttgcagcaggaagatgggccaactggtgagccacagcaggaagatgatgaattcctaatggctactgatgtggatgaccggttcgagactctggaaccagaggtgagccatgaggagaccgaacacagttatcatgtggaagagaccgtgagccaggactgcaatcaggacatggaggagatgatgtccgagcaagaaaaccctgatagcagcgagcctgtggtagaggacgaacggctgcatcatgacacagacgacgtcacgtatcaggtctatgaggaacaggctgtgtatgaaccattagaaaacgaggggattgagattacggaggtcacagcgcctcccgaggataaccctgtcgaggactcccaggtgatcgttgaagaagtgtccatctttcctgtcgaagagcagcaggaagtgcccccggatacttag

SEQ ID NO: 224332 - DNA, 900 bp, Artificial Sequence
  derived and/or modified sequence
atggccgaggacaaggagaccaagcacggcggccacaagaacggccgtaagggcggcttgtcagggacgtccttcttcacgtggtttatggtcatcgcactgttaggtgtatggacctctgttgccgtggtttggttcgatctggttgactacgaggaggttctcgccaaggcaaaagatttccggtataatcttagcgaggtgctgcagggcaagctcggaatatatgacgccgacggggacggggattttgatgttgatgacgccaaggttttgctgggcctgaaggaacggtcaacatctgagccagcagtgccaccagaggaggccgaacctcacacagaacccgaggaacaggtgccagtagaagccgaaccgcagaatattgaggacgaagcaaaagaacagattcagtccttactgcacgagatggtccatgctgaacacgtggaaggcgaagatctccaacaggaggatggccccacaggtgaaccacaacaggaagacgatgaattccttatggccacagacgtggacgatcggtttgagaccttagagccggaagtgtcccacgaggaaacggagcacagttaccacgtcgaggaaactgttagtcaggattgtaatcaggacatggaggagatgatgagcgaacaagagaatccagacagctcagagcccgtggtggaagatgaaaggctccatcacgacaccgatgatgtgacttatcaggtatacgaagaacaggccgtttatgagcctctggagaacgaaggaattgagattaccgaggtgaccgcgccacccgaggacaaccccgtcgaggatagtcaggtgattgtggaggaggtgtccattttccctgtagaggagcagcaagaggtgcccccagacacgtag

SEQ ID NO: 224333 - DNA, 900 bp, Artificial Sequence
  derived and/or modified sequence
atggcagaggataaggaaacaaaacacggaggtcacaagaacggccgaaagggaggactgagtggcacctctttctttacttggttcatggtaatagcactccttggtgtttggacatctgtcgctgtggtctggttcgacctggtggactacgaagaggtactggccaaagccaaggatttcaggtacaacctgtccgaagttctgcagggcaagcttggaatttacgatgccgacggagatggagacttcgatgtcgatgatgccaaagttcttctgggtctgaaagagcgatcaacatctgagccagcggtgcccccagaagaggccgaaccccatacggagcccgaggagcaggtcccagtggaggccgaaccgcaaaacatagaagatgaggccaaagaacagattcagtccttgctccacgagatggtgcatgccgaacacgtagagggggaagacctacagcaggaagacgggccaactggggagccgcaacaggaagacgacgaatttctgatggctaccgacgttgacgaccggttcgagaccttagaacccgaggtgtcacatgaggaaaccgaacactcatatcacgttgaggaaactgtttcacaggactgtaatcaagacatggaagagatgatgtctgaacaggagaatccggacagcagcgaacccgtagtagaggacgaacgcctgcaccacgacacagatgacgtgacctaccaggtctacgaagagcaggccgtgtatgaacccttagagaatgaagggatagagataaccgaggtgacagccccacccgaggataatcccgtcgaggatagtcaggtcattgttgaagaggtgtccatctttcccgtagaggagcaacaggaagtgccccctgatacttag

SEQ ID NO: 224334 - DNA, 900 bp, Artificial Sequence
  derived and/or modified sequence
atggctgaggacaaggagactaaacatgggggtcataagaacggcagaaagggagggttgtcagggactagcttctttacctggttcatggtcatcgcgcttctgggggtgtggacatcagtggccgttgtgtggtttgacctggtcgattacgaggaggtgttagccaaggccaaggattttcgatacaacttatcagaggtgctgcagggaaagctggggatctacgacgccgatggagacggagattttgacgtggatgacgctaaagttcttctcggattgaaggagcgaagtaccagtgagcccgcagtcccccctgaagaagctgagccacacaccgagcccgaagagcaggtgccagtagaggctgagccccagaacattgaagatgaagccaaggaacagatccagagtctgctccatgagatggtgcatgccgaacacgtggagggcgaggatcttcagcaggaggacgggcctacaggcgagccacagcaggaggatgatgagttcctgatggcaaccgacgtggacgacagattcgagaccctggagcccgaagtgtcacatgaggagacagaacattcttatcatgtggaggagactgttagccaagattgcaatcaggacatggaagaaatgatgtctgaacaagagaacccagatagcagtgagccagtggttgaggatgaaagacttcaccatgacaccgacgacgttacctaccaggtgtacgaagaacaggctgtatacgagcccttggaaaatgaggggatcgaaatcactgaggtgacagcccctccagaagacaatcctgtcgaggactcacaggtgatcgtcgaagaggtgtcgatcttccctgtggaggagcagcaggaggttcctcctgatacttag

SEQ ID NO: 224335 - DNA, 2273 bp, Artificial Sequence
  derived and/or modified sequence
cctgccagcagtacttttgagtttttttttttgttttgttttactttagcatttattattcatggattgaagaaatcaaaatggctgaagataaagagacaaagcatggaggacacaagaatgggaggaaaggcggactctcaggaacttcattcttcacgtggtttatggtgattgcattgctgggcgtctggacatctgtagctgtcgtttggtttgatcttgttgactatgaggaagttctagccaaagcaaaggacttccgttataacttatcagaggtgcttcaaggaaaactaggaatctatgatgctgatggtgatggagattttgatgtggatgatgccaaagttttattaggacttaaagagagatctacttcagagccagcagtcccgccagaagaggctgagccacacactgagcccgaggagcaggttcctgtggaggcagaaccccagaatatcgaagatgaagcaaaagaacaaattcagtcccttctccatgaaatggtacacgcagaacatgttgagggagaagacttgcaacaagaagatggacccacaggagaaccacaacaagaggatgatgagtttcttatggcgactgatgtagatgatagatttgagaccctggaacctgaagtatctcatgaagaaaccgagcatagttaccacgtggaagagacagtttcacaagactgtaatcaggatatggaagagatgatgtctgagcaggaaaatccagattccagtgaaccagtagtagaagatgaaagattgcaccatgatacagatgatgtaacataccaagtctatgaggaacaagcagtatatgaacctctagaaaatgaagggatagaaatcacagaagtaactgctccccctgaggataatcctgtagaagattcacaggtaattgtagaagaagtaagcatttttcctgtggaagaacagcaggaagtaccaccagatacttaaagcttcaaaaagactgcccctaccaccacaggaggaccagcctaaccatacgctccaaaagatggctgtgatagatcttgtgaagcaattactgagcagatcaagatctttgggaaggaacactaaagatgttttgaatgaattatagtccactggcattttagtgtatttttttttctttttagaaacacacatttctaaaaatgtcatgttacattcctgcatgtcccttttgatagcattagtggatccattggatttcttttttctttttgtgagacagcttttagtcttacctgaatttatgtgtgtttttccgacagtggttaataattatattggtgatgtagcagcaattgtgttggcagggttttcatatattattagtaattaacactaactgttggactgacttgtgtacactgtgttaaacatgatttaaaagctattaagagtactttgtgttagcactcttaaaaacgctaacagagatcatcattagctgtgaagatttgagttgtatatacctgcactgatattcttatcaaaaatttctacattagctttaagtgttcagattaacacttttgaaatttttgtagcttttagctgattaattagaaaaatttaatatttcagtgaaagttttaaattatcatttatttatttttttaaatgagaggggaaagctgaaattccttgttaagacacaaggaaaaagaatggccctactattatcatgcaaaaatgctttgttggcacctcagattaatcatataatagctatagtctcttcagcatttgtttaaattttagaaaacctgtataaattactggtgcataacttaaagattattctgcctttggctaattgagtaattcccctccagcactagagaccgctcagtgctcttactagatgaactcagtaacgccttgagctgggttgattgaggatgtgtgaaaaatgtggtttattttgggctcagaaataattgctctgttgaaaataatcctttgtcagaaaagaaggtagctaccacatcattttgaaaggaccatgagcaactataagcaaagccataagaagtggtttgatcgatatattaggggtagctcttgattttgttaacattaagataaggtgactttttccccctgcttttaggattaaaatcaaagatacttctatatttttatcactatagatcatagttattatacaatgtagtgagtcctgcatgggtactcgatgtgtaatgaaacctgaaataataagataataagaaaagc

SEQ ID NO: 224336 - DNA, 1947 bp, Artificial Sequence
  derived and/or modified sequence
cctgccagcagtacttttgagtttttttttttgttttgttttactttagcatttattattcatggattgaagaaatcaaaatggctgaagataaagagacaaagcatggaggacacaagaatgggaggaaaggcggactctcaggaacttcattcttcacgtggtttatggtgattgcattgctgggcgtctggacatctgtagctgtcgtttggtttgatcttgttgactatgaggaagttctagccaaagcaaaggacttccgttataacttatcagaggtgcttcaaggaaaactaggaatctatgatgctgatggtgatggagattttgatgtggatgatgccaaagttttattaggacttaaagagagatctacttcagagccagcagtcccgccagaagaggctgagccacacactgagcccgaggagcaggttcctgtggaggcagaaccccagaatatcgaagatgaagcaaaagaacaaattcagtcccttctccatgaaatggtacacgcagaacatgttgagggagaagacttgcaacaagaagatggacccacaggagaaccacaacaagaggatgatgagtttcttatggcgactgatgtagatgatagatttgagaccctggaacctgaagtatctcatgaagaaaccgagcatagttaccacgtggaagagacagtttcacaagactgtaatcaggatatggaagagatgatgtctgagcaggaaaatccagattccagtgaaccagtagtagaagatgaaagattgcaccatgatacagatgatgtaacataccaagtctatgaggaacaagcagtatatgaacctctagaaaatgaagggatagaaatcacagaagtaactgctccccctgaggataatcctgtagaagattcacaggtaattgtagaagaagtaagcatttttcctgtggaagaacagcaggaagtaccaccagatacttaaagcttcaaaaagactgcccctaccaccacaggaggaccagcctaaccatacgctccaaaagatggctgtgatagatcttgtgaagcaattactgagcagatcaagatctttgggaaggaacactaaagatgttttgaatgaattatagtccactggcattttagtgtatttttttttctttttagaaacacacatttctaaaaatgtcatgttacattcctgcatgtcccttttgatagcattagtggatccattggatttcttttttctttttgtgagacagcttttagtcttacctgaatttatgtgtgtttttccgacagtggttaataattatattggtgatgtagcagcaattgtgttggcagggttttcatatattattagtaattaacactaactgttggactgacttgtgtacactgtgttaaacatgatttaaaagctattaagagtactttgtgttagcactcttaaaaacgctaacagagatcatcattagctgtgaagatttgagttgtatatacctgcactgatattcttatcaaaaatttctacattagctttaagtgttcagattaacacttttgaaatttttgtagcttttagctgattaattagaaaaatttaatatttcagtgaaagttttaaattatcatttatttatttttttaaatgagaggggaaagctgaaattccttgttaagacacaaggaaaaagaatggccctactattatcatgcaaaaatgctttgttggcacctcagattaatcatataatagctatagtctcttcagcatttgtttaaattttagaaaacctgtataaattactggtgcataacttaaagattattctgcctttggctaattgagtaattcccctccagcactagagaccgctcagtgctcttactagatgaactcagtaacgccttgagctgggttgattgaggatgtgtgaaaa

SEQ ID NO: 224337 - DNA, 900 bp, Artificial Sequence
  derived and/or modified sequence
atggccgaggacaaggagaccaagcacggcggccacaagaacggcagaaagggcggcctgagcggcaccagcttcttcacctggttcatggtgatcgccctgctgggcgtgtggaccagcgtggccgtggtgtggttcgacctggtggactacgaggaggtgctggccaaggccaaggacttcagatacaacctgagcgaggtgctgcagggcaagctgggcatctacgacgccgacggcgacggcgacttcgacgtggacgacgccaaggtgctgctgggcctgaaggagagaagcaccagcgagcccgccgtgccccccgaggaggccgagccccacaccgagcccgaggagcaggtgcccgtggaggccgagccccagaacatcgaggacgaggccaaggagcagatccagagcctgctgcacgagatggtgcacgccgagcacgtggagggcgaggacctgcagcaggaggacggccccaccggcgagccccagcaggaggacgacgagttcctgatggccaccgacgtggacgacagattcgagaccctggagcccgaggtgagccacgaggagaccgagcacagctaccacgtggaggagaccgtgagccaggactgcaaccaggacatggaggagatgatgagcgagcaggagaaccccgacagcagcgagcccgtggtggaggacgagagactgcaccacgacaccgacgacgtgacctaccaggtgtacgaggagcaggccgtgtacgagcccctggagaacgagggcatcgagatcaccgaggtgaccgccccccccgaggacaaccccgtggaggacagccaggtgatcgtggaggaggtgagcatcttccccgtggaggagcagcaggaggtgccccccgacacctag

SEQ ID NO: 224338 - DNA, 2022 bp, Artificial Sequence
  derived and/or modified sequence
atgagactgagctggagcgtggcccagggccccttcgacagcttcgtggtgcagtacgaggacaccaacggccagccccaggccctgctggtggacggcgaccagagcaagatcctgatcagcggcctggagcccagcaccccctacagattcctgctgtacggcctgcacgagggcaagagactgggccccctgagcgccgagggcaccaccggcctggcccccgccggccagaccagcgaggagagcagacccagactgagccagctgagcgtgaccgacgtgaccaccagcagcctgagactgaactgggaggccccccccggcgccttcgacagcttcctgctgagattcggcgtgcccagccccagcaccctggagccccaccccagacccctgctgcagagagagctgatggtgcccggcaccagacacagcgccgtgctgagagacctgagaagcggcaccctgtacagcctgaccctgtacggcctgagaggcccccacaaggccgacagcatccagggcaccgccagaaccctgagccccgtgctggagagccccagagacctgcagttcagcgagatcagagagaccagcgccaaggtgaactggatgcccccccccagcagagccgacagcttcaaggtgagctaccagctggccgacggcggcgagccccagagcgtgcaggtggacggccaggccagaacccagaagctgcagggcctgatccccggcgccagatacgaggtgaccgtggtgagcgtgagaggcttcgaggagagcgagcccctgaccggcttcctgaccaccgtgcccgacggccccacccagctgagagccctgaacctgaccgagggcttcgccgtgctgcactggaagcccccccagaaccccgtggacacctacgacgtgcaggtgaccgcccccggcgccccccccctgcaggccgagacccccggcagcgccgtggactaccccctgcacgacctggtgctgcacaccaactacaccgccaccgtgagaggcctgagaggccccaacctgaccagccccgccagcatcaccttcaccaccggcctggaggcccccagagacctggaggccaaggaggtgacccccagaaccgccctgctgacctggaccgagccccccgtgagacccgccggctacctgctgagcttccacacccccggcggccagaaccaggagatcctgctgcccggcggcatcaccagccaccagctgctgggcctgttccccagcaccagctacaacgccagactgcaggccatgtggggccagagcctgctgccccccgtgagcaccagcttcaccaccggcggcctgagaatccccttccccagagactgcggcgaggagatgcagaacggcgccggcgccagcagaaccagcaccatcttcctgaacggcaacagagagagacccctgaacgtgttctgcgacatggagaccgacggcggcggctggctggtgttccagagaagaatggacggccagaccgacttctggagagactgggaggactacgcccacggcttcggcaacatcagcggcgagttctggctgggcaacgaggccctgcacagcctgacccaggccggcgactacagcatgagagtggacctgagagccggcgacgaggccgtgttcgcccagtacgacagcttccacgtggacagcgccgccgagtactacagactgcacctggagggctaccacggcaccgccggcgacagcatgagctaccacagcggcagcgtgttcagcgccagagacagagaccccaacagcctgctgatcagctgcgccgtgagctacagaggcgcctggtggtacagaaactgccactacgccaacctgaacggcctgtacggcagcaccgtggaccaccagggcgtgagctggtaccactggaagggcttcgagttcagcgtgcccttcaccgagatgaagctgagacccagaaacttcagaagccccgccggcggcggctag

SEQ ID NO: 224339 - DNA, 2022 bp, Artificial Sequence
  derived and/or modified sequence
atgcgactttcatggtcagtagctcagggcccgtttgactccttcgtggtccagtacgaggacaccaatggccaaccacaggccttgctcgtcgacggcgaccagagcaagattctaatcagtgggttggaaccctctaccccctatcggttcctactttacggcttgcatgagggtaaaagattgggaccattgagtgcagagggaaccacaggtctcgcgcctgctgggcagactagcgaggaatcccggcccaggttatcccaactgagtgtgacggatgtgaccaccagctctctccgtctcaactgggaggcccctcccggtgcgttcgacagcttcctgttgcggtttggggtgccttctccctctacactggaacctcacccccggccgctgttgcaacgagagctgatggtacctggtacacgccattctgccgtcctccgcgatctccgctcagggaccctttacagtctaacactgtatgggttgagagggccgcacaaagccgatagcatccagggtaccgctagaactctaagtcctgtgcttgagtcacccagggatttacagttttctgaaataagggagacaagtgccaaagtgaactggatgccaccaccctctagggcggacagctttaaggtgagttaccagctggcagacgggggggagccccaatcagtgcaggtggacggccaggcccggacccaaaaactgcaggggctgattcccggcgcaaggtacgaagtgaccgttgtttcggtcaggggtttcgaggagtcagaacccctgacggggttcttgaccaccgttcctgacgggccaacccaactgagagcactgaacctgacggaaggattcgcagtgcttcactggaagcctccccagaaccctgtcgatacatatgatgttcaggtgacggcccccggagccccgcccctgcaggcggaaactcctggcagcgccgtggattatcccctccacgatctggtgctgcacacaaattacactgccacggtgcggggactccgcggccccaacctgaccagcccagcatctatcaccttcactacgggccttgaagccccccgcgacctggaggcgaaagaggttaccccgagaaccgccctgcttacctggactgaaccaccggtgcgccccgccggctacttactctcctttcatactcccggcggacaaaatcaggaaatccttctgcccggcggcatcacaagccaccagcttttgggtttgtttcctagcacgagttataatgcgcggcttcaggccatgtggggccagtcccttctccctccagtctcaacctctttcacaacaggaggcctgaggattccatttccccgcgactgtggagaggagatgcaaaacggtgcaggcgcttctcgcacctcaactatttttctgaatggcaacagggagagaccgctcaatgtcttctgcgacatggaaactgatggcgggggatggctagtcttccaacggcgtatggatggacagacagacttctggagggactgggaggattatgcacatggttttgggaatatatctggggagttttggttaggaaatgaagctctgcacagtctgacgcaggccggagattactctatgagagtagacctgagagctggggacgaagccgtgttcgcgcaatatgacagcttccacgtcgactccgcagcagagtactacagacttcacctggaagggtaccacgggaccgcgggggactcaatgagttatcacagtgggtccgtattctctgctagagaccgcgaccctaattccttactcatctcatgtgccgtcagctacagaggtgcttggtggtaccgtaactgccactatgccaacctgaacggattatatggttcaactgttgatcatcagggcgtgtcttggtatcactggaagggcttcgaattttctgtccccttcaccgagatgaagttacggccccggaatttccggtcaccagcgggcggaggctag

SEQ ID NO: 224340 - DNA, 2022 bp, Artificial Sequence
  derived and/or modified sequence
atgaggctgtcctggagcgtggcccagggcccctttgacagctttgtggtgcagtatgaggacaccaacggccagccccaggccctgctggtggatggagaccagagcaagatcctgatcagcggcctggagcccagcaccccctaccgcttcctgctgtatggcctgcacgagggcaagaggctgggccccctgtctgctgagggcaccaccggcctggccccagctggccagaccagcgaggagagccggccccggctgagccagctgtctgtgacagatgtgaccaccagcagcctgcggctgaactgggaggcccctcctggggcctttgacagcttcctgctgcgcttcggcgtgcccagccccagcaccctggagccccacccccggcccctgctgcagcgggagctgatggtgcccggcaccaggcacagcgctgtgctgcgggacctgcggagcggcaccctgtacagcctgaccctgtatggcctgcggggcccccacaaggctgacagcatccagggcacagcccggaccctgagccctgtgctggagagcccccgggacctgcagttcagcgagatccgggagaccagcgccaaggtgaactggatgcccccacccagcagagctgacagcttcaaggtgtcctaccagctggctgatggaggagagccccagagcgtgcaggtggatggccaggcccggacccagaagctgcagggcctcatccctggggcccgctatgaggtgacagtggtgtctgtgcggggctttgaggagagcgagcccctgaccggcttcctgaccaccgtgcctgatggccccacccagctgcgggccctgaacctgacagagggctttgctgtgctgcactggaagccaccccagaaccctgtggacacctatgatgtgcaggtgacagcccctggggccccacccctgcaggccgagaccccaggcagcgctgtggactaccccctgcatgacctggtgctgcacaccaactacacagccaccgtgcggggcctgcggggccccaacctgaccagccctgccagcatcaccttcaccaccggcctggaggccccccgggacctggaggccaaggaggtgacccccaggacagccctgctgacctggacagagccccctgtgcggcctgctggctacctgctgtccttccacaccccaggcggccagaaccaggagatcctgctgcccggcggcatcaccagccaccagctgctgggcctcttccccagcaccagctacaatgcccggctgcaggccatgtggggccagagcctgctgccccctgtgtccaccagcttcaccaccggcggcctgcgcatccccttcccccgggactgtggggaggagatgcagaatggagctggggccagcaggaccagcaccatcttcctgaatggaaaccgggagcggcccctgaatgtgttctgtgacatggagacagatggcggcggctggctggtgttccagaggaggatggatggccagacagacttctggagggactgggaggactatgcccacggcttcggcaacatcagcggggagttctggctgggcaatgaggccctgcacagcctgacccaggccggggactacagcatgagggtggacctgcgggctggagatgaagctgtgtttgcccagtatgacagcttccacgtggacagcgctgctgagtactaccgcctgcacctggagggctaccacggcacagctggggacagcatgagctaccacagcggctctgtgttcagcgcccgggaccgggaccccaacagcctgctgatcagctgtgctgtgtcctacagaggagcctggtggtacagaaactgccactacgccaacctgaatggcctgtatggcagcacagtggaccaccagggcgtgtcctggtaccactggaagggctttgagttctctgtgcccttcacagagatgaagctgcggcccaggaacttccgcagccctgctgggggcggctag

SEQ ID NO: 224341 - DNA, 2022 bp, Artificial Sequence
  derived and/or modified sequence
atgcggctgagctggagcgtggcccagggccccttcgacagcttcgtggtgcagtacgaagatacaaatggacagccacaggcactcctcgttgacggagaccagtccaaaatcctcatttcaggactggagccaagtaccccataccgattcctcctttatggtctgcacgaggggaagcgactcgggcctctctctgccgaaggaacgaccggcctggcgcccgccggccaaacaagtgaggagagccgcccccggcttagccagctctctgtcacagacgtgactacgtcatcactgcggctgaactgggaggcgccgcctggcgctttcgattcctttctccttcggttcggcgtcccaagcccttccaccctggagccccatccacgtccccttctgcagcgggaactgatggtgccaggcacccgccatagcgcggtcctcagggaccttcgttctggcacactgtattccttgactctctacgggttgagagggccacataaggccgattctatacaggggacagccagaaccctgtccccagttcttgaaagcccccgggacctgcaatttagtgaaattcgagaaacaagcgccaaggttaactggatgcctcccccgtctagggcagattctttcaaagtgagttatcaactagccgatggcggtgaacctcagagcgtccaagtcgacggccaagccagaacacagaagctgcagggcttaatacccggtgcaaggtatgaagtgaccgttgtatcagtccgtgggttcgaggaatccgaacctctcaccgggttcctgacaaccgtgccagacgggcccacccaactgagagcattgaatctgaccgaaggatttgccgtgctgcattggaaacctcctcagaatcctgtggacacgtacgacgttcaggtgacggccccaggggcccctcccctgcaggccgagacaccaggatctgccgtagactatccccttcacgatttggtgctgcacaccaactacaccgcaacagtccgcggattgcggggccccaacctgacatctcccgcgtccattacatttacaacaggcctggaggcacctagagatcttgaagctaaagaagttaccccacgaacagctctgctgacatggaccgaacctcccgttaggcccgctggatacctgttatcctttcatactccggggggtcagaaccaggagatcctccttccagggggcattacatctcatcaactgctcgggctctttccttcaacatcatacaacgctcgactgcaggctatgtggggtcagagtcttttgcctccagtctcgactagctttactacaggcggactccgtattccgtttccgagggattgcggagaagaaatgcagaacggcgcgggcgcaagtcggacatccaccattttcctgaacggcaaccgggagcggccattgaacgtgttctgcgacatggagacagatggtggcggctggctggtcttccagcgacggatggatggccagactgatttctggcgggattgggaggattacgctcacggtttcggcaatatttccggtgagttctggctgggtaacgaggccctgcactcgcttactcaagccggcgattactcaatgcgcgtcgacctgagggctggggatgaagccgtgtttgctcaatatgacagctttcatgtcgattctgctgctgagtactatagattgcacttggagggctaccacgggacagcgggagactctatgagctaccactccggcagcgtgtttagcgctcgagatagggacccgaattctctgctcatctcttgcgctgtgtcctaccgaggagcctggtggtaccgtaattgccactatgcgaacctcaatggtctttatggctcaacagtggaccatcagggcgtgtcatggtatcattggaaaggttttgagttctcagtgccctttacagagatgaagttgcgcccccgaaatttccgctctccagccggaggtggctag

SEQ ID NO: 224342 - DNA, 2022 bp, Artificial Sequence
  derived and/or modified sequence
atgaggctgtcctggtccgtcgcccagggccctttcgactccttcgtcgtacagtacgaagataccaacggccagccacaggctctgttggtggatggagatcagtctaaaatactgatcagtgggcttgagccgagcactccctacagatttttgctgtatggcctgcacgaaggcaagagactgggacctcttagtgctgaagggacgacgggcttggctcctgctggacagacatctgaggagtctagaccaaggctcagccagttgtctgtcacagatgtaaccacatcttccctgcggcttaactgggaagccccacccggagcctttgatagttttctactccgattcggtgtccctagcccttccaccttggagccacaccctagaccattgctccagcgcgagctgatggttccaggtactagacactccgccgtcctgagagacctacggagtggaacactgtactccctgactctctacgggttgcggggaccgcacaaagctgattccatccagggtacggccaggacgctgtccccagtgctcgagagtcctagggatctgcagttttcagagattcgggaaacttccgccaaagttaactggatgcctcctcctagtagagccgattcatttaaagttagctaccagcttgctgacgggggtgagccccagtcggtgcaggtggacggccaggcacgcacccagaaactgcagggcctgatccccggagcccgttacgaagttactgtggtgtccgtgcgaggtttcgaggaaagcgagcctcttactggtttcctgacaacagtgccagatgggcctactcagctgagagcactcaatctcacagaggggttcgcagtgctgcattggaaaccgccacagaaccccgtcgacacatacgatgttcaggtaacagcccctggagcccctcccctccaggccgagacaccaggctccgcagtagattaccctctccatgatctggtcttgcatactaactacaccgcaactgtccggggtttaagaggaccaaatctcacttcccctgcttcgattacctttactacaggcctagaagcccctcgagacttagaggcgaaagaggtgacccctaggaccgcactactcacatggacagagccgcctgtacgcccagccggatatctgctctcgttccatactcccggaggccaaaatcaggagatactactccctggcggaattaccagtcaccaactgcttgggctattccccagcactagttacaatgcgagactccaggccatgtggggccagtctctgcttcctcccgtgagcacgtcttttactacaggtggcctgcgtatcccatttcccagagattgcggtgaggaaatgcagaacggcgctggagcgtcccgcacgtctaccattttcctgaacggcaacagggaacggccactcaatgtgttttgtgacatggagactgacggcggtggatggcttgtgttccagagacgcatggacggtcagaccgacttctggagagactgggaggactacgcgcacgggttcggcaacatatctggcgaattctggctggggaacgaggcactgcattctctgacgcaagccggagattactccatgcgtgtggatttaagagctggcgacgaggcagtcttcgcccaatacgactcatttcacgtcgattcggccgctgagtattacaggctacacctagaaggatatcacggaactgccggagatagcatgtcatatcatagcgggagcgtcttctccgcccgagatcgagatcccaattcgcttctgataagttgtgctgtttcttataggggagcatggtggtatcgcaactgccactacgcaaatctgaatggactgtacggcagtacagtcgaccatcaaggggtcagctggtatcactggaagggattcgaattctccgtcccattcaccgaaatgaaactgcgtccacgcaactttcgaagtcctgccggagggggatag

SEQ ID NO: 224343 - DNA, 2022 bp, Artificial Sequence
  derived and/or modified sequence
atgcgattatcatggagtgtagcccagggacctttcgactcttttgtcgtccaatacgaagatacaaacggtcaaccccaggcgcttctcgtggatggcgatcagagcaaaattctgatttccgggctggagccttctaccccataccggttccttctctacggacttcacgaaggcaaacggctcggcccactgagtgccgagggcaccaccggattggccccagccgggcaaaccagtgaggaatcccgcccacggctgtctcaactgtccgtgactgacgtgactacttcatctctgcggctcaattgggaggccccacctggagcttttgactcatttctgctgagattcggtgtgcccagcccgagcacactggaaccccaccccagacccctgcttcagcgagaactgatggtgcctggaacacgtcactcagccgtgctgcgcgacctgaggagtggaacattatactcactaaccctgtatggcctgcgcggaccgcataaagcagattccatccagggtacagcccgcactctttctccagtgcttgagtccccccgagatttacaattttcagaaattcgagagacatcagccaaggtcaattggatgcctccaccgagcagagctgatagcttcaaggtcagctaccagttggcggacggtggagagcctcagagtgttcaggtagacgggcaagcaaggacgcagaaactccaaggactcatccctggcgctaggtatgaagttaccgtggtgtccgtgcgcggcttcgaggagtccgagccactgaccgggttcctcaccacagttcccgacgggccaacacagttgagggctttgaacctaacagaaggtttcgcagtgctgcattggaagccccctcaaaatcccgtagatacatacgatgtgcaggtaaccgcgccaggcgcacctcctttgcaggctgagactccgggctcagccgtcgattatccattacatgacttagtgttacacaccaattacaccgccaccgtgagaggacttcgcggacctaacctgacatcccctgcaagcataacatttacaactggtctggaagctccaagggatcttgaggcgaaagaagtgaccccacgaaccgcgctgttaacttggacggaaccgcctgtaaggccagctggctacttgttgagctttcataccccaggaggccaaaatcaagaaatcctcttgcccggggggatcaccagtcatcaactcctcgggctgttccccagcacaagctacaatgcccgcctccaggcaatgtggggccagagcctgctcccacctgtttcgaccagtttcaccacaggaggactgaggataccgtttccccgcgattgtggagaggagatgcaaaacggtgcaggagcatctagaacaagcactatatttttgaacggaaacagggaaagaccgctgaatgttttttgcgacatggaaacagatggaggaggctggctggtgttccagagacgcatggatgggcagactgacttctggcgcgattgggaggactatgctcacggctttggaaatatcagtggggagttctggttagggaacgaggcattgcatagtctgacacaggccggagactattcgatgagagtggaccttcgagctggcgacgaagccgtgttcgcccagtatgatagcttccatgtagattccgccgccgagtattacaggctccacctggagggctatcatggcaccgccggtgactcaatgtcatatcatagcggatcagtattctccgcgcgtgaccgagacccgaactcattactgatctcatgcgccgtcagttaccgcggcgcttggtggtatcggaattgccattacgctaatcttaacgggctgtacggctctacagtggaccatcagggggtgtcgtggtatcactggaagggatttgagttctccgtccctttcacagaaatgaagctgcgacctcggaatttcaggtcccccgccggcggaggatag

SEQ ID NO: 224344 - DNA, 2022 bp, Artificial Sequence
  derived and/or modified sequence
atgcgactaagctggagtgtagctcagggcccatttgacagtttcgtcgtgcagtatgaggatacaaatggacaacctcaggcactgcttgtagatggagaccagtctaagatactgatctctggccttgaacctagtacgccatataggtttctgctttacgggctgcacgaggggaaacgattaggtcctctgagcgcggaagggaccacgggactcgcaccagccggacagacaagcgaggagagcagacctagactttcccagctcagcgtcacagatgtcactacaagctccttgcgtctgaactgggaggccccccctggcgcttttgattcctttttgctgcgattcggcgtcccaagcccttctacattggaaccccaccccagacctctgctgcaacgagaactcatggtgcctggaacacgccacagcgccgtacttcgggacctgagatccggcacactttattccctgacactttacggcttgagagggcctcacaaggccgactctatacaaggtactgcacgcacactttcacccgtgctagagagtcccagggacttgcaattttctgagatacgggaaacatcagccaaggtgaactggatgcctcccccatcaagggctgactcctttaaggtctcctaccaattagccgacggaggtgagccacaaagcgtacaagtagacggccaggcaaggacccagaagctgcagggactgatccccggtgctaggtatgaggtgacagtggtgtccgtaagaggtttcgaggaatcagaaccgctcacaggtttcctgaccaccgtccctgatggacctacccagttaagagcactcaacttaactgaaggctttgcagtcttacactggaaaccaccccagaatccagtcgacacttacgacgttcaagttacagcgccaggggctccacctcttcaagccgagaccccagggagcgcagtggattatcccctgcacgacttggttctgcacacaaactacacggccacagtacgaggactgcgcggaccaaacttgactagcccggcaagcatcaccttcacaacaggactggaagcccctagagaccttgaagctaaagaggtaacaccacggaccgctctactgacatggactgaaccgcctgtgcggcctgcgggttacctgctctcatttcacaccccaggaggccagaatcaggagatactacttcccggcggcattacttcacaccaactgcttggactctttccttctacttcctataatgcgaggctgcaggcaatgtggggtcagtcgctgttgccccctgttagtacctcattcaccaccggtggactgagaatccccttcccacgcgattgcggtgaagagatgcaaaatggggcaggtgcatccaggacctccactatattcctcaacggcaatcgagaacggccactgaacgtattttgtgacatggagaccgatggcggcggatggctggtcttccagagaagaatggatgggcaaactgacttttggagggattgggaggattacgctcacggctttggaaacattagtggggaattctggttgggcaacgaggctttacactctttaacacaagcgggagactattcaatgagggttgatttgagggcgggcgatgaagcagtattcgctcagtacgactcttttcacgttgatagcgcagcagagtactataggcttcacctggagggataccacgggactgctggtgattccatgtcttaccacagcggaagtgtattttcagcacgggacagagatccaaactcactattgatcagttgtgcggtttcttatcgcggagcttggtggtaccggaattgtcactacgcgaatctgaacggtctctatggaagcactgtggatcaccagggggtcagctggtaccactggaagggatttgagttctcggtcccattcactgagatgaaattgcggcctagaaactttcggagcccagctggaggcggatag

SEQ ID NO: 224345 - DNA, 2022 bp, Artificial Sequence
  derived and/or modified sequence
atgagactgagctggagcgtggcccagggccccttcgacagcttcgtggtgcagtacgaggacaccaacggccagccccaggccctgctggtggacggcgaccagagcaagatcctgatcagcggcctggagcccagcaccccctacagattcctgctgtacggcctgcacgagggcaagagactgggccccctgagcgccgagggcaccaccggcctggcccccgccggccagaccagcgaggagagcagacccagactgagccagctgagcgtgaccgacgtgaccaccagcagcctgagactgaactgggaggccccccccggcgccttcgacagcttcctgctgagattcggcgtgcccagccccagcaccctggagccccaccccagacccctgctgcagagagagctgatggtgcccggcaccagacacagcgccgtgctgagagacctgagaagcggcaccctgtacagcctgaccctgtacggcctgagaggcccccacaaggccgacagcatccagggcaccgccagaaccctgagccccgtgctggagagccccagagacctgcagttcagcgagatcagagagaccagcgccaaggtgaactggatgcccccccccagcagagccgacagcttcaaggtgagctaccagctggccgacggcggcgagccccagagcgtgcaggtggacggccaggccagaacccagaagctgcagggcctgatccccggcgccagatacgaggtgaccgtggtgagcgtgagaggcttcgaggagagcgagcccctgaccggcttcctgaccaccgtgcccgacggccccacccagctgagagccctgaacctgaccgagggcttcgccgtgctgcactggaagcccccccagaaccccgtggacacctacgacatccaggtgaccgcccccggcgccccccccctgcaggccgagacccccggcagcgccgtggactaccccctgcacgacctggtgctgcacaccaactacaccgccaccgtgagaggcctgagaggccccaacctgaccagccccgccagcatcaccttcaccaccggcctggaggcccccagagacctggaggccaaggaggtgacccccagaaccgccctgctgacctggaccgagccccccgtgagacccgccggctacctgctgagcttccacacccccggcggccagacccaggagatcctgctgcccggcggcatcaccagccaccagctgctgggcctgttccccagcaccagctacaacgccagactgcaggccatgtggggccagagcctgctgccccccgtgagcaccagcttcaccaccggcggcctgagaatccccttccccagagactgcggcgaggagatgcagaacggcgccggcgccagcagaaccagcaccatcttcctgaacggcaacagagagagacccctgatcgtgttctgcgacatggagaccgacggcggcggctggctggtgttccagagaagaatggacggccagaccgacttctggagagactgggaggactacgcccacggcttcggcaacatcagcggcgagttctggctgggcaacgaggccctgcacagcctgacccaggccggcgactacagcatgagagtggacctgagagccggcgacgaggccgtgttcgcccagtacgacagcttccacgtggacagcgccgccgagtactacagactgcacctggagggctaccacggcaccgccggcgacagcatgagctaccacagcggcagcgtgttcagcgccagagacagagaccccaacagcctgctgatcagctgcgccgtgagctacagaggcgcctggtggtacagaaactgccactacgccaacctgaacggcctgtacggcagcaccgtggaccaccagggcgtgagctggtaccactggaagggcttcgagttcagcgtgcccttcaccgagatgaagctgagacccagaaacttcagaagccccgccggcggcggctag

SEQ ID NO: 224346 - DNA, 2022 bp, Artificial Sequence
  derived and/or modified sequence
atgaggttgagttggtctgtcgctcagggaccttttgactcctttgtggtgcagtacgaagatacgaatggacaacctcaggcattgctggtggacggtgaccagtctaaaattttgatatccggactggaaccgagcacgccctataggttcttattgtacgggctgcacgaagggaaacgcctaggaccactgtccgccgagggcaccacaggactggctcccgccggccagaccagcgaagagagtaggcctcggctgagccagctctccgtgaccgacgtgacaaccagcagcctgcgattaaactgggaggctcctcccggggctttcgattcattcttgcttcgtttcggagtgccaagtccttcaaccctcgaaccacacccccggcctctgctgcagagggaactgatggtgccaggcactaggcatagcgcagtcttgcgagatctccgcagtgggaccttgtacagcctgaccctctatggccttagaggtccccacaaggctgacagtattcagggtacagccaggactctctcccctgtgcttgaaagccccagggatctgcagttctctgaaatcagagagacatcagctaaagtaaactggatgcctcccccctctagggccgattccttcaaagtttcataccagctcgccgacgggggcgagcctcagagcgttcaggtggacgggcaagcacgtacacagaagctacagggcctcatacctggcgcacgctacgaggtcaccgtggttagcgtgcgtggcttcgaggaaagcgaacccctgacaggattcctcacaaccgttcccgatggacccacgcagctaagagccctcaatctcaccgagggatttgcagttttgcactggaaacctccacagaacccagtcgacacatacgatatccaggtgacagcccccggagcccctccccttcaagcagaaaccccaggatcagctgtagattatccattgcacgatcttgtgctccacaccaattatactgcaactgtgaggggcctaaggggtcccaacctgacctccccggcttcaataacatttacgacgggtctggaagcccctagagacctcgaggctaaggaggttaccccacgcaccgccctgctgacttggacagaaccaccggtgcggccagctggctacctgttgtcattccacacgcccggcggtcagacccaggagatcctgctcccaggcggcatcactagtcatcagctccttggactctttccttctacgagctataatgcgaggttgcaggccatgtggggccagagtctgttacctcccgtgtccacttccttcaccaccggcggactgagaattccatttccccgggactgtggggaggagatgcagaacggagcgggcgcctctcgaaccagcacaatattcttgaatgggaacagagagcggccgctcatcgtgttctgcgacatggaaaccgacggcggcgggtggcttgtctttcagagacggatggacggccagacagacttctggcgggactgggaggattacgctcatgggtttggcaacatcagcggcgaattctggctcgggaacgaggcgctccatagcctgactcaggccggggattatagcatgagggtggatcttcgcgccggtgacgaggccgtgtttgcccaatacgacagcttccatgtggattccgctgctgaatactacagactacatcttgaagggtaccacggtaccgccggcgattccatgagttaccatagcggaagtgtcttttcagcccgggatcgggatcccaattcactccttatctcctgcgcagtttcttacaggggggcttggtggtacagaaactgccactacgctaacctcaacggactttacggctccaccgtggatcaccagggagtatcttggtaccattggaaaggcttcgagtttagcgtcccttttaccgagatgaagctacggccgaggaacttccgcagccctgctggggggggctag

SEQ ID NO: 224347 - DNA, 2022 bp, Artificial Sequence
  derived and/or modified sequence
atgagactgagttggtctgtggcacagggaccattcgattccttcgtagttcagtatgaagatactaacggtcagcctcaggccctgctcgtggatggcgatcagtctaaaattctcatttccggcctggaacccagtacaccgtacaggttcctcttgtatggcctgcatgaggggaaacgtctggggcccctatccgccgaaggaactacaggcctcgcaccagcgggacaaacgtcagaagaatccaggccaagactgtcgcagctgtctgtgaccgacgtgacaacctcatccctgagactgaattgggaggcgccacctggggcgtttgactcatttttattgcgtttcggggtgccatctccgtcaacccttgagccccaccctagacccctgcttcagagagagttaatggtgcccggtacccgacacagcgctgttcttcgcgacctccggagtggcacactttacagcctgactctctacggactgcgtggaccacacaaagccgatagcatccagggtaccgcacggacgctctcaccggtgctggaaagcccgagggaccttcagttctctgagattcgggaaacgagcgccaaagtaaactggatgccgcccccatctcgggccgattctttcaaagtgagctaccagcttgcggacggcggggaacctcagtccgtgcaagtcgacggccaggccagaacccagaaactccagggactcatccccggagctcgttatgaggtcacagtggtgtcagtccgcggatttgaggagagtgaacctctcaccgggttcctaacaacagtacctgatggcccgacccagctgcgcgcgttgaatctaacagaggggttcgctgtgctccattggaaaccccctcaaaatcccgtggatacctacgacgtgcaagtgaccgctcccggggccccccccttgcaagccgaaactccaggctctgctgtagactatccactgcacgaccttgtgttgcatacgaactacaccgcaacggtgcggggcttacggggcccaaacttaactagtcccgcttctattaccttcacaacgggcctcgaagccccgagagaccttgaagccaaagaagttacgccccggacagccctgctaacctggactgagccaccagtccgccccgccggctacttgctcagttttcacactcccgggggccagaaccaagaaattttacttccggggggcatcacaagccaccagttgttgggcctcttcccatccacatcatataacgcacggctgcaggccatgtgggggcagtcactgctgccgcccgtgagtacctcgtttacaacgggaggcctcaggattccttttcctcgggactgcggggaggagatgcagaacggcgccggggcctcccggactagcacaattttcctgaacggtaatcgggaaagacccctgaacgtattctgtgacatggagacggacggtggtggttggctggtattccagcggcgaatggacggacagaccgatttctggcgagattgggaggattatgcccacggcttcggaaacatctctggagaattctggctcggtaatgaagctctccacagcttaacgcaagccggagattattctatgcgcgtagacctgcgtgcaggagacgaggctgtgttcgcacagtatgacagcttccacgtagacagcgcagccgagtactaccgcctgcaccttgagggttatcacggcactgccggcgactccatgagctatcattcgggctcagtgtttagtgcgcgcgacagagacccgaacagcctgttgatttcctgcgcagtgagctacagaggtgcttggtggtatagaaactgtcattatgcaaatctgaacgggctgtatggctccacagtagatcatcaaggagttagctggtatcattggaaaggcttcgaatttagtgtgcccttcactgaaatgaagctgcggcctcgcaatttccggtctccggccgggggcggttag

SEQ ID NO: 224348 - DNA, 2022 bp, Artificial Sequence
  derived and/or modified sequence
atgaggctgtcctggagcgtggcccagggcccctttgacagctttgtggtgcagtatgaggacaccaacggccagccccaggccctgctggtggatggagaccagagcaagatcctgatcagcggcctggagcccagcaccccctaccgcttcctgctgtatggcctgcacgagggcaagaggctgggccccctgtctgctgagggcaccaccggcctggccccagctggccagaccagcgaggagagccggccccggctgagccagctgtctgtgacagatgtgaccaccagcagcctgcggctgaactgggaggcccctcctggggcctttgacagcttcctgctgcgcttcggcgtgcccagccccagcaccctggagccccacccccggcccctgctgcagcgggagctgatggtgcccggcaccaggcacagcgctgtgctgcgggacctgcggagcggcaccctgtacagcctgaccctgtatggcctgcggggcccccacaaggctgacagcatccagggcacagcccggaccctgagccctgtgctggagagcccccgggacctgcagttcagcgagatccgggagaccagcgccaaggtgaactggatgcccccacccagcagagctgacagcttcaaggtgtcctaccagctggctgatggaggagagccccagagcgtgcaggtggatggccaggcccggacccagaagctgcagggcctcatccctggggcccgctatgaggtgacagtggtgtctgtgcggggctttgaggagagcgagcccctgaccggcttcctgaccaccgtgcctgatggccccacccagctgcgggccctgaacctgacagagggctttgctgtgctgcactggaagccaccccagaaccctgtggacacctatgacatccaggtgacagcccctggggccccacccctgcaggccgagaccccaggcagcgctgtggactaccccctgcatgacctggtgctgcacaccaactacacagccaccgtgcggggcctgcggggccccaacctgaccagccctgccagcatcaccttcaccaccggcctggaggccccccgggacctggaggccaaggaggtgacccccaggacagccctgctgacctggacagagccccctgtgcggcctgctggctacctgctgtccttccacaccccaggcggccagacccaggagatcctgctgcccggcggcatcaccagccaccagctgctgggcctcttccccagcaccagctacaatgcccggctgcaggccatgtggggccagagcctgctgccccctgtgtccaccagcttcaccaccggcggcctgcgcatccccttcccccgggactgtggggaggagatgcagaatggagctggggccagcaggaccagcaccatcttcctgaatggaaaccgggagcggcccctcatcgtgttctgtgacatggagacagatggcggcggctggctggtgttccagaggaggatggatggccagacagacttctggagggactgggaggactatgcccacggcttcggcaacatcagcggggagttctggctgggcaatgaggccctgcacagcctgacccaggccggggactacagcatgagggtggacctgcgggctggagatgaagctgtgtttgcccagtatgacagcttccacgtggacagcgctgctgagtactaccgcctgcacctggagggctaccacggcacagctggggacagcatgagctaccacagcggctctgtgttcagcgcccgggaccgggaccccaacagcctgctgatcagctgtgctgtgtcctacagaggagcctggtggtacagaaactgccactacgccaacctgaatggcctgtatggcagcacagtggaccaccagggcgtgtcctggtaccactggaagggctttgagttctctgtgcccttcacagagatgaagctgcggcccaggaacttccgcagccctgctgggggcggctag

SEQ ID NO: 224349 - DNA, 2022 bp, Artificial Sequence
  derived and/or modified sequence
atgcggctgagctggagcgtggcccagggccccttcgacagcttcgtggtgcagtatgaggataccaatgggcagcctcaggccctattggtagacggggatcaatcgaagattctcattagcggacttgagccgtccaccccctatagatttcttctgtacggactccacgaggggaagcgactgggccctctttccgctgagggcacaactggcctagcaccagccggccaaacatccgaggagtcaagaccaagattgtctcagctttccgtgacggatgtgaccacttcctcactaaggcttaactgggaggccccacccggcgcctttgatagcttcttattgcggtttggagtccccagcccatccacgctcgaaccccacccacggccgctgcttcagagggagcttatggtccctggcacacggcatagcgctgtgctaagggaccttcgctctggaacgctgtacagcctgactctctatgggctacgtggacctcataaggccgacagtattcagggcaccgccagaaccttgtcccctgtattagagtctccacgcgacctgcagtttagcgaaatcagagagacaagcgccaaggtcaattggatgcctccaccttccagagctgatagctttaaggtatcataccagcttgccgatggcggcgagcctcagtccgttcaggtggatgggcaggccagaacccaaaagctgcagggcctgatcccaggagctcgttacgaagtcactgtggttagcgtccgcggctttgaagaatccgaaccactaaccggcttcttaactacagtgcctgatggtccaacccagcttcgggctcttaatctgacggagggctttgccgtattacactggaaacccccccagaaccccgtggatacttacgacatccaagttaccgcccctggtgcacctcccctccaagctgagactcctggcagtgctgtggactatcctcttcacgatctagtcttacacacaaattacaccgcaactgtgagaggactcaggggacccaatctgacttcccccgcaagcattacctttacaaccgggttggaagcacctagggacctggaggcaaaggaagtcacacctcggaccgctcttctgacctggactgaaccccccgttcgaccagcgggatacctccttagcttccatacacctggcggtcagacgcaagagatactactgcctggtgggatcacttcacaccagctgctaggtctgtttccgagcactagttacaacgccagactgcaagccatgtggggacagtccctcctccctcctgtcagcacgagttttacgactgggggcctgcggataccattcccacgggattgcggcgaggagatgcagaatggcgctggcgctagccgcacgtccacaatttttctcaacgggaatagagaaagacccctgatcgtgttctgtgacatggagacagatggcggtgggtggctggtcttccagcggaggatggacggccagaccgatttctggcgagattgggaggactacgctcacggtttcggaaacatatctggtgagttctggttagggaatgaggccctgcacagcctgacacaagccggggactactcaatgcgggttgatttgagagctggggacgaggccgtatttgctcagtacgacagcttccacgtggacagcgccgcggaatactaccgcctccacctggagggctaccatgggaccgccggagactccatgagctatcacagcggctctgtttttagtgctcgagatagagatcctaattcacttttgataagctgtgcggtaagttatcgcggagcctggtggtacaggaattgccattacgctaatttgaatggattgtatggatccacagtggaccaccaaggtgtctcctggtaccactggaaggggttcgagttctctgtacctttcactgaaatgaagctacggccccgcaattttagaagccccgcaggaggcggctag

SEQ ID NO: 224350 - DNA, 2022 bp, Artificial Sequence
  derived and/or modified sequence
atgcggctgagctggagcgtggcccagggccccttcgacagcttcgttgtgcagtatgaggacacaaatgggcaacctcaggctcttctggttgatggcgatcagagcaaaatcctcattagtgggctggagcccagtaccccctatcgctttctgttgtacgggctgcacgaaggtaaacgcctggggcccctctcggcagagggaaccaccggtcttgcccccgccggccaaactagcgaagagtcccgacctagactctcacaattgagcgtgaccgacgtgactacaagcagccttagactgaattgggaggccccccccggcgcctttgatagtttccttctcagatttggagtgcccagtccttccacattagagccacatcctaggcccctgttacagagagagctgatggttcctggcacgcgtcatagcgcagtgctacgagacctgcgaagcggcactctctatagtctcacgctatacgggctgaggggcccgcataaagcagattcaattcagggaacagccaggaccttatcgcccgttctggagagcccaagagaccttcagtttagtgaaatcagggagacttcagccaaggtcaattggatgccacctcctagcagggccgatagtttcaaagtgtcatatcagctggcagacggcggagagccccagtccgtccaggttgacggacaggccaggacacagaaattgcagggcctgatccctggggccaggtatgaagtcacagtcgtgtccgttagaggcttcgaggagagcgagcccctgacggggttcctcaccacagtgcctgacgggcccacccagctgcgtgccctgaatcttacagagggctttgctgtgctgcattggaaaccgccacagaacccagtggacacatacgacgtacaggtgacagctcctggcgccccccctctccaggcggaaacgccagggtcagcggttgactaccctttacatgatctggtgctgcataccaattacaccgcaaccgtgcgtgggttaaggggtcccaatctcacctcgccagcctctattaccttcactacaggactggaggctcccagagatctggaggccaaagaggtgactccgcgcaccgcactcctcacttggactgagcctccggttcgcccggcaggatatctgctttccttccacacccccggtgggcagaatcaagagattctgttacccggcggaatcacatcacaccagcttctcgggctgtttccctccactagctataatgctagacttcaagctatgtggggacagagcctactgccccccgtgtcaacatccttcactactgggggcctgcggattccgtttccaagggactgcggagaagagatgcaaaacggagccggtgccagccggacaagcacaatcttcctgaatgggaatcgtgaacgtcccctaaacgtcttttgtgacatggaaaccgacggcggtggatggctggtgttccagcgccgtatggacggccagaccgacttttggagggattgggaggattacgcacacggcttcggaaatatctcgggcgaattctggctcggcaacgaagctcttcattctctgacacaggctggggactattctatgagagtggacttgagagctggtgacgaggccgtgttcgctcagtacgatagctttcacgtggactccgccgcagaatactacagactccacttggagggttatcacggcacagcgggtgatagtatgagctatcactcaggctctgtgttctccgctcgcgatagagacccaaatagcctgttaatttcctgtgctgtgagttaccggggggcctggtggtaccggaattgccactatgcgaacctgaatggtctgtacggctcgacagtggaccaccagggtgtgagttggtaccactggaagggatttgagttcagtgtgccatttactgaaatgaaactgaggccccggaactttagatctcccgctgggggaggatag

SEQ ID NO: 224351 - DNA, 2022 bp, Artificial Sequence
  derived and/or modified sequence
atgaggctttcctggagtgtggctcaggggcctttcgattcgttcgtggttcagtacgaagacactaacggacagccacaggcccttctggttgacggagaccagtcaaagattctgattagcgggctggagccctctaccccttaccggtttctgctgtacggtctgcatgaggggaagaggctggggcctctttctgcggaaggaactactggccttgcaccagcaggacaaactagcgaagaaagcaggccgaggctgagccaactgagcgtcacggacgtgacgacaagctcgcttaggctgaactgggaggcacccccaggcgcttttgattctttcctgcttcgcttcggagtacctagcccgtccacccttgaacctcaccccagacctctgttgcagagggaacttatggtcccgggaaccagacattccgcagtgctgcgtgaccttcgttctggaactctgtactcactgaccttgtacggcttaaggggccctcacaaagctgactcgattcagggcactgctcgtactctgtcgccagtactcgaaagcccaagagacctacagtttagcgagattcgtgagactagtgcaaaagtcaattggatgccacctccttcacgcgcagattcctttaaggtgagctaccagctggccgacggtggagagcctcagagcgtgcaagtggacggtcaggccaggactcagaagctgcaaggcctcattcctggcgcaagatatgaagtgaccgtggtgtctgtaagaggatttgaggaaagcgaaccactcactgggtttctgacgactgtgccagatgggccaacacagctcagagctcttaacctgacggaaggatttgcggtgttgcactggaagccccctcagaaccccgtcgacacctatgacattcaagttactgccccaggtgcccctcccctgcaagcggagacacctggaagcgcagtcgactaccctttacatgacctggtgctccacacgaattatacagccaccgtgcgaggactccggggacccaacctcacatcaccagcgtccatcacctttaccactgggctggaggctcccagggatctagaagcgaaagaagttaccccaagaacagccctgctgacttggactgaaccacccgtgaggccagcaggctacctattaagtttccacactcccggtggacagacccaggaaatactgctacccggtggcataacaagtcaccagctgctcggcctcttcccatctacctcatacaatgcgaggctgcaggcaatgtgggggcaatcactccttccccctgtgagcacgagcttcacaactggcggtctcagaataccctttcccagggactgcggagaagaaatgcagaacggagccggagcctccagaaccagtactatcttcctcaatggcaaccgagaacggccactgatcgtgttctgtgacatggaaaccgacggtgggggatggctggtcttccagaggcgaatggacgggcagaccgacttttggcgcgactgggaggactacgcacatgggttcggtaacatatcaggagagttctggctcgggaacgaggcacttcacagtctgacgcaggcaggagactacagcatgcgtgtggatctgcgtgcaggagatgaagctgtttttgcacagtacgattcctttcacgtggactccgcagccgaatactacaggcttcatctcgaggggtaccacgggaccgctggagacagcatgtcctaccattcaggaagcgtgtttagcgccagggacagggacccaaattccttgctgatctcctgcgccgtgagctatcgcggagcctggtggtaccgaaattgccactacgccaatctgaacggtctgtacggctcaactgtcgaccaccagggagtctcctggtaccattggaagggatttgagttctccgtgcctttcacagagatgaagctcagacctagaaacttcaggtcaccggcaggcggaggctag

SEQ ID NO: 224352 - DNA, 2022 bp, Artificial Sequence
  derived and/or modified sequence
atgcgcttatcttggagtgtggcgcagggcccattcgactcctttgtggttcagtacgaagacacgaacgggcagccacaggctctgctggtagatggcgaccagtcaaagatcctgataagcggcctagaaccaagcactccttaccgtttcttactatatggcctccacgagggcaagcggttgggaccactttcagctgaagggaccacaggcctggcccctgctggccaaactagtgaggaatctcgaccacgactttctcagctgtccgtcaccgatgtgacaacttcctctctgaggctcaactgggaggctccacccggtgcttttgactccttcttgttgcgattcggcgtgcccagcccttcgacattagaacctcatcccagaccactcctgcagcgagaactgatggtccccggtacaagacactctgcagtgttgcgtgatctgagaagtgggactctctactccctgacattgtacgggttacgcggacctcataaagccgacagcatccaaggcactgctcgaaccctgagtcccgtgctggaatccccacgggacctgcaatttagtgagattagggaaaccagtgcaaaagtgaactggatgcctcctccatccagggcagactcctttaaagtctcttatcaactcgcagacggcggtgaacctcagagcgttcaggtcgacggtcaagcaaggacacaaaagctacagggccttattccgggagccaggtatgaagtcacagttgtcagtgtgaggggttttgaggagagcgaaccgctaactggattcctcactactgtacccgatgggcctacacagttaagggcattgaacctaacagaaggattcgctgtattgcactggaagcctccccagaaccccgtcgatacgtacgacgtgcaggtgacagcaccaggcgctccgccacttcaagctgagacacctgggtcagctgtggactatcccttgcatgatctggttctccacaccaattatacagccaccgttagaggactgcggggacccaacctcacctctccggcaagcattacattcaccaccggcctggaagctcctagggatcttgaagccaaggaagtcaccccccgaactgcactgcttacatggaccgagcccccagtccgaccggctggttacctgctcagcttccatacacctggaggccaaaatcaggagatcctgttaccgggtggtatcacgtcccaccaactcctgggcctgttcccttccaccagttacaacgcgaggttgcaagctatgtggggtcagtccttgttaccacctgtttccacctcttttactaccggtggcctgagaatcccatttcccagggactgtggcgaagaaatgcaaaacggtgcaggtgcttcccggacaagcaccatatttcttaacggcaacagagagcgtccactcaacgtcttttgtgacatggaaaccgacggcggtggatggcttgtgttccagcggaggatggacggccaaactgatttctggagagactgggaggattatgcgcatggctttggcaatatttctggggagttctggttgggcaacgaagccttgcacagcctaacccaggcaggggattactccatgagggtggatctccgggcaggcgatgaggctgtgttcgctcagtacgactcttttcacgttgactcagccgcagagtattacagactgcacctggaaggctaccacggaactgcgggtgattcaatgagctatcacagcggatccgtgttctccgccagggacagagacccaaactcactgcttatttcctgtgccgtctcttaccgcggtgcctggtggtaccgcaactgccactacgcgaacttgaacggtctatacggatctacagtggaccaccagggcgtgtcgtggtaccattggaagggcttcgagttctctgtgcctttcacagagatgaaattgcgtcctcgcaatttcagatcccccgctggcggtggatag

SEQ ID NO: 224353 - RNA, 2022 nt, Artificial Sequence
  derived and/or modified sequence
augcgauuaucauggaguguagcccagggaccuuucgacucuuuugucguccaauacgaagauacaaacggucaaccccaggcgcuucucguggauggcgaucagagcaaaauucugauuuccgggcuggagccuucuaccccauaccgguuccuucucuacggacuucacgaaggcaaacggcucggcccacugagugccgagggcaccaccggauuggccccagccgggcaaaccagugaggaaucccgcccacggcugucucaacuguccgugacugacgugacuacuucaucucugcggcucaauugggaggccccaccuggagcuuuugacucauuucugcugagauucggugugcccagcccgagcacacuggaaccccaccccagaccccugcuucagcgagaacugauggugccuggaacacgucacucagccgugcugcgcgaccugaggaguggaacauuauacucacuaacccuguauggccugcgcggaccgcauaaagcagauuccauccaggguacagcccgcacucuuucuccagugcuugaguccccccgagauuuacaauuuucagaaauucgagagacaucagccaaggucaauuggaugccuccaccgagcagagcugauagcuucaaggucagcuaccaguuggcggacgguggagagccucagaguguucagguagacgggcaagcaaggacgcagaaacuccaaggacucaucccuggcgcuagguaugaaguuaccgugguguccgugcgcggcuucgaggaguccgagccacugaccggguuccucaccacaguucccgacgggccaacacaguugagggcuuugaaccuaacagaagguuucgcagugcugcauuggaagcccccucaaaaucccguagauacauacgaugugcagguaaccgcgccaggcgcaccuccuuugcaggcugagacuccgggcucagccgucgauuauccauuacaugacuuaguguuacacaccaauuacaccgccaccgugagaggacuucgcggaccuaaccugacauccccugcaagcauaacauuuacaacuggucuggaagcuccaagggaucuugaggcgaaagaagugaccccacgaaccgcgcuguuaacuuggacggaaccgccuguaaggccagcuggcuacuuguugagcuuucauaccccaggaggccaaaaucaagaaauccucuugcccggggggaucaccagucaucaacuccucgggcuguuccccagcacaagcuacaaugcccgccuccaggcaauguggggccagagccugcucccaccuguuucgaccaguuucaccacaggaggacugaggauaccguuuccccgcgauuguggagaggagaugcaaaacggugcaggagcaucuagaacaagcacuauauuuuugaacggaaacagggaaagaccgcugaauguuuuuugcgacauggaaacagauggaggaggcuggcugguguuccagagacgcauggaugggcagacugacuucuggcgcgauugggaggacuaugcucacggcuuuggaaauaucaguggggaguucugguuagggaacgaggcauugcauagucugacacaggccggagacuauucgaugagaguggaccuucgagcuggcgacgaagccguguucgcccaguaugauagcuuccauguagauuccgccgccgaguauuacaggcuccaccuggagggcuaucauggcaccgccggugacucaaugucauaucauagcggaucaguauucuccgcgcgugaccgagacccgaacucauuacugaucucaugcgccgucaguuaccgcggcgcuuggugguaucggaauugccauuacgcuaaucuuaacgggcuguacggcucuacaguggaccaucagggggugucgugguaucacuggaagggauuugaguucuccgucccuuucacagaaaugaagcugcgaccucggaauuucaggucccccgccggcggaggauag

SEQ ID NO: 224354 - RNA, 2022 nt, Artificial Sequence
  derived and/or modified sequence
augcgacuaagcuggaguguagcucagggcccauuugacaguuucgucgugcaguaugaggauacaaauggacaaccucaggcacugcuuguagauggagaccagucuaagauacugaucucuggccuugaaccuaguacgccauauagguuucugcuuuacgggcugcacgaggggaaacgauuagguccucugagcgcggaagggaccacgggacucgcaccagccggacagacaagcgaggagagcagaccuagacuuucccagcucagcgucacagaugucacuacaagcuccuugcgucugaacugggaggcccccccuggcgcuuuugauuccuuuuugcugcgauucggcgucccaagcccuucuacauuggaaccccaccccagaccucugcugcaacgagaacucauggugccuggaacacgccacagcgccguacuucgggaccugagauccggcacacuuuauucccugacacuuuacggcuugagagggccucacaaggccgacucuauacaagguacugcacgcacacuuucacccgugcuagagagucccagggacuugcaauuuucugagauacgggaaacaucagccaaggugaacuggaugccucccccaucaagggcugacuccuuuaaggucuccuaccaauuagccgacggaggugagccacaaagcguacaaguagacggccaggcaaggacccagaagcugcagggacugauccccggugcuagguaugaggugacagugguguccguaagagguuucgaggaaucagaaccgcucacagguuuccugaccaccgucccugauggaccuacccaguuaagagcacucaacuuaacugaaggcuuugcagucuuacacuggaaaccaccccagaauccagucgacacuuacgacguucaaguuacagcgccaggggcuccaccucuucaagccgagaccccagggagcgcaguggauuauccccugcacgacuugguucugcacacaaacuacacggccacaguacgaggacugcgcggaccaaacuugacuagcccggcaagcaucaccuucacaacaggacuggaagccccuagagaccuugaagcuaaagagguaacaccacggaccgcucuacugacauggacugaaccgccugugcggccugcggguuaccugcucucauuucacaccccaggaggccagaaucaggagauacuacuucccggcggcauuacuucacaccaacugcuuggacucuuuccuucuacuuccuauaaugcgaggcugcaggcaauguggggucagucgcuguugcccccuguuaguaccucauucaccaccgguggacugagaauccccuucccacgcgauugcggugaagagaugcaaaauggggcaggugcauccaggaccuccacuauauuccucaacggcaaucgagaacggccacugaacguauuuugugacauggagaccgauggcggcggauggcuggucuuccagagaagaauggaugggcaaacugacuuuuggagggauugggaggauuacgcucacggcuuuggaaacauuaguggggaauucugguugggcaacgaggcuuuacacucuuuaacacaagcgggagacuauucaaugaggguugauuugagggcgggcgaugaagcaguauucgcucaguacgacucuuuucacguugauagcgcagcagaguacuauaggcuucaccuggagggauaccacgggacugcuggugauuccaugucuuaccacagcggaaguguauuuucagcacgggacagagauccaaacucacuauugaucaguugugcgguuucuuaucgcggagcuuggugguaccggaauugucacuacgcgaaucugaacggucucuauggaagcacuguggaucaccagggggucagcugguaccacuggaagggauuugaguucucggucccauucacugagaugaaauugcggccuagaaacuuucggagcccagcuggaggcggauag

SEQ ID NO: 224355 - DNA, 237 bp, Artificial Sequence
  derived and/or modified sequence
atgcgtactgactcgtccaagatgactgatgtagagtcgggagtggccaactttgcatcgtctgctagagcgggcaggcggaacgcgctacccgacatccaatctagtgctgccaccgatggaacctctgacttaccactcaagttagaagctttatccgtgaaggaggatgccaaggaaaaggacgaaaaaactacccaggaccaactggaaaagcctcagaacgaggagaagtag

SEQ ID NO: 224356 - DNA, 237 bp, Artificial Sequence
  derived and/or modified sequence
atgcggactgacagttcgaagatgaccgatgtggagtctggcgtggctaattttgcaagcagcgcccgggccggtcggagaaacgcactccctgacatccaatcaagcgctgccaccgacggcacctccgatctgcctctgaaattggaggccctatctgttaaggaggacgctaaggaaaaagacgaaaaaacgactcaggaccagttggaaaagccacaaaatgaggaaaagtag

SEQ ID NO: 224357 - DNA, 237 bp, Artificial Sequence
  derived and/or modified sequence
atgcgtacagacagttctaaaatgaccgacgtggagtcgggcgtggctaacttcgcttcctcagccagggcaggccgtagaaacgctctccccgatattcagtcatcagctgccaccgatggaacttctgacctaccattaaaattggaagctctaagcgttaaggaagatgcaaaggaaaaggacgaaaaaactacccaggaccagctggagaagccccagaacgaggagaagtag

SEQ ID NO: 224358 - DNA, 237 bp, Artificial Sequence
  derived and/or modified sequence
atgcgcactgactcaagcaagatgaccgacgtggagagcggagttgcgaattttgctagttctgccagagcgggacggagaaatgcattgcctgacattcaatcaagcgccgccacggacggaacatcagatctgccactgaaactcgaggccttgtccgtcaaagaggatgcaaaagagaaagatgagaagaccacacaggaccagcttgaaaagcctcagaacgaagaaaagtag

SEQ ID NO: 224359 - DNA, 237 bp, Artificial Sequence
  derived and/or modified sequence
atgcggaccgattcatcaaagatgactgacgttgaaagcggcgtcgcaaatttcgcatcatctgcccgcgcagggagaagaaatgcactgcccgatatacaatcaagtgccgcaacagacggtacctctgacctgccactgaagctggaagcattgagtgtcaaagaagacgcaaaggagaaggatgaaaagactacccaagaccaactggagaaaccccagaatgaagaaaagtag

SEQ ID NO: 224360 - DNA, 237 bp, Artificial Sequence
  derived and/or modified sequence
atgaggacagacagcagcaagatgacagatgtggagagcggcgtggccaactttgccagcagcgcccgggccggcagaagaaatgccctgcctgacatccagagcagcgctgccacagatggcaccagtgacctgcccctgaagctggaggccctgtctgtgaaggaggatgccaaggagaaggatgagaagaccacccaggaccagctggagaagccccagaatgaggagaagtag

SEQ ID NO: 224361 - DNA, 237 bp, Artificial Sequence
  derived and/or modified sequence
atgcggaccgacagcagcaagatgaccgacgtggagagcggcgtggcgaactttgcttcaagcgctcgtgctggcagaagaaacgccctgccagatattcaatcctctgctgctacggatgggacgtcagatctgccactgaagctagaagccctctcagtgaaagaggacgcaaaagagaaggatgaaaagaccacccaggaccagttagaaaagccgcagaatgaagaaaaatag

SEQ ID NO: 224362 - DNA, 237 bp, Artificial Sequence
  derived and/or modified sequence
atgcggaccgacagcagcaagatgaccgacgtggagagcggcgtggccaacttcgcctctagcgcccgagctgggagacggaatgccttgcctgacatacaaagcagtgccgccaccgacggcacatccgacttacctttgaaactggaagctctttcagtcaaagaggatgctaaggagaaggatgaaaagactactcaggaccagttagagaagcctcagaatgaagagaaatag

SEQ ID NO: 224363 - DNA, 237 bp, Artificial Sequence
  derived and/or modified sequence
atgcggaccgacagcagcaagatgaccgacgtggagagcggcgtggctaactttgcttcatccgccagagccggaagacgtaacgcgttacctgacattcagagttcggcggccaccgacggcacttccgatctgccactgaaacttgaagctctgtctgtaaaagaggacgcgaaggagaaagacgagaagactactcaggaccagctggagaagccacaaaacgaggagaagtag

SEQ ID NO: 224364 - DNA, 237 bp, Artificial Sequence
  derived and/or modified sequence
atgcggaccgacagcagcaagatgaccgacgtggagagcggcgtggccaatttcgcctcctcagctcgcgccggtcggcggaatgctttgcccgatattcagagtagcgcagccaccgatggaacgtccgacctgccactcaaactggaagccctatccgtgaaggaggacgctaaggaaaaggacgaaaaaactacccaggaccagctggaaaagccccagaacgaggagaagtag

SEQ ID NO: 224365 - DNA, 237 bp, Artificial Sequence
  derived and/or modified sequence
atgcggaccgacagcagcaagatgaccgacgtggagagcggcgtggctaactttgcatcatctgccagagccgggaggcgtaacgccctgcccgacatccaaagctcggctgccaccgacggcacgagtgatcttccattaaaattggaggcactttccgtgaaggaggacgccaaagaaaaggatgaaaagactacccaggaccagctcgagaaaccccagaatgaggaaaaatag

SEQ ID NO: 224366 - DNA, 237 bp, Artificial Sequence
  derived and/or modified sequence
atgagaaccgacagctcaaagatgaccgatgtggagtcgggcgttgctaacttcgccagtagtgctcgcgctggcagacggaacgctttgcccgacatccaaagctcagctgccacagacggaacctcagacctgcctctaaaactggaggccctttcggtcaaagaggacgccaaggagaaggatgagaagacgacccaagaccagctggagaagccccagaatgaggagaaatag

SEQ ID NO: 224367 - DNA, 237 bp, Artificial Sequence
  derived and/or modified sequence
atgcgaacagatagcagtaaaatgacagatgttgagtccggcgtcgccaacttcgccagctctgcccgagccggacgacgcaacgcccttcccgacatccagagctctgcggcaacagacgggacgtctgatctcccattgaagctggaagccctgtccgttaaagaagatgctaaggagaaagacgagaaaactactcaggaccagctggagaaaccacagaatgaggagaagtag

SEQ ID NO: 224368 - DNA, 237 bp, Artificial Sequence
  derived and/or modified sequence
atgcggaccgactcaagcaaaatgaccgacgttgaaagtggggtggccaatttcgctagttccgcaagggcaggtcgtcgtaacgccctccccgatatacagtcctcagcggctactgacggaaccagcgacttaccgctgaagctggaagctctgtccgttaaagaggacgccaaggaaaaagacgagaagacaacccaggaccaactggagaaaccacagaacgaggaaaaatag

SEQ ID NO: 224369 - DNA, 237 bp, Artificial Sequence
  derived and/or modified sequence
atgcgcactgattccagtaagatgacagatgtggaatccggagtagctaatttcgcttcttccgcccgtgctgggagaagaaacgcacttccagatatccagtctagcgcggctaccgacggcacttctgacctgccactgaaactggaagccttgagcgtcaaagaagatgccaaagagaaagatgaaaagacaacccaggatcaacttgaaaaacctcagaacgaagaaaagtag

SEQ ID NO: 224370 - DNA, 237 bp, Artificial Sequence
  derived and/or modified sequence
atgcggactgacagctctaaaatgactgatgtcgaatcaggcgtcgcaaatttcgctagctctgccagggccggacgccgaaatgccctgcctgatatccagtcttccgcagctacagatggaaccagcgatctgcccctgaagctggaggcattatccgtgaaggaagacgcaaaagaaaaggatgagaaaaccactcaggatcagctcgagaaaccccagaatgaagagaaatag

SEQ ID NO: 224371 - DNA, 237 bp, Artificial Sequence
  derived and/or modified sequence
atgagaaccgacagcagcaagatgaccgacgtggagagcggcgtggccaacttcgccagcagcgccagagccggcagaagaaacgccctgcccgacatccagagcagcgccgccaccgacggcaccagcgacctgcccctgaagctggaggccctgagcgtgaaggaggacgccaaggagaaggacgagaagaccacccaggaccagctggagaagccccagaacgaggagaagtag

SEQ ID NO: 224372 - protein, 165 aa, Artificial Sequence
  derived and/or modified sequence
MSVTLHTDVGDIKIEVFCERTPKTCEMESRCVPQAGVQWRDLGSLQPPPPGFKQVFCLSLPRTGRGGNSIWGKKFEDEYSEYLKHNVRGVVSMANNGPNTNGSQFFITYGKQPHLDMKYTVFGKVIDGLETLDELEKLPVNEKTYRPLNDVHIKDITIHANPFAQ

SEQ ID NO: 224373 - DNA, 498 bp, Artificial Sequence
  derived and/or modified sequence
atgagtgttactctgcacactgatgtgggcgacattaagatcgaggtcttttgcgagaggaccccgaagacatgtgagatggagtcaagatgcgtcccccaggccggcgtgcaatggcgcgacctgggctctctacagccccccccgcctggatttaagcaggtcttttgcctgtccttgccacggaccggccgcggaggaaattcgatctggggcaagaaatttgaggatgaatattccgagtacctcaaacataacgtgagaggggtcgtgagcatggccaataacgggcctaacactaacggtagccaattcttcattacttacgggaagcagccccatctcgacatgaagtacacagtgtttggcaaggttattgatggcttggagacactggacgagctggaaaagctgcccgtaaacgaaaagacttatagacctctcaatgacgtgcacatcaaagatataacaatccacgccaaccctttcgcccagtag

SEQ ID NO: 224374 - DNA, 498 bp, Artificial Sequence
  derived and/or modified sequence
atgtccgtaactctgcacactgacgtgggggacatcaaaatagaggttttctgcgaaagaacccctaaaacttgcgagatggaaagccgatgtgtgccacaagcaggtgttcaatggagggatttggggtcactgcaacctccacctcctggattcaaacaggtcttttgtctgtccttaccgcgaacgggccgcgggggaaatagtatctgggggaaaaaattcgaagacgagtactctgagtacctgaaacataacgttaggggggtagtgtctatggctaacaacggccctaatacaaatggatcacagttctttatcacttatggaaaacagcctcatctggacatgaagtataccgttttcggaaaggttatcgacggactggagactctggacgagctcgagaagttgcctgttaacgaaaagacgtataggccgttaaatgacgtgcacattaaggacattaccatacatgccaaccccttcgctcaatag

SEQ ID NO: 224375 - DNA, 1370 bp, Artificial Sequence
  derived and/or modified sequence
gtaaagcattgcttgaggttgcccaggtagtttcgccttacacttcttgtcccagtgcaattattagtagagctccctttcactgtcaaatttccggttggggataaattgcattgtcgttttggtttgagataggaagatgaggggaggaaggaggtgaggcggtaaggggcgttctctctcttgggtcccgcgcccaacttccgctggcccaaagaaactataattttgaaccaacagacctctgctggcatctgcgattgcatttttcctgttttaacaacggctgtgctagacgaagtggtgaagcccaaagacttatttttgagctcgctgtaagactgagaaatcacgtagtccttcctgaaaccactaagaggaaaaatgtctgtgacactgcatacagatgtaggtgatattaaaattgaagtcttctgtgagaggacacccaaaacatgtgagatggagtctcgctgtgtcccccaggctggagtacaatggcgcgatctcggctcactgcaacctccgcctcctgggttcaagcaagtcttctgcctcagcctcccgagaactggaagaggaggcaacagtatttggggcaagaagtttgaggatgaatacagtgaatatcttaagcacaatgttagaggtgttgtatctatggctaataatggcccgaacaccaatggatctcagttcttcatcacctatggcaaacagccacatttggacatgaaatacaccgtatttggaaaggtaatagatggtctggaaactctagatgagttggagaagttgccagtaaatgagaagacataccgacctcttaatgatgtacacattaaggacataactattcatgccaacccatttgctcagtagctatgatagacctggacaaataacttgacaaattgctggaacacacttattgtggtttacccggttttaattatgtcagagattgcatcatccttctgcttgtttacaactatgatcttctatgaaatggtggtaccaaggggcgcccaacagcttttatccccattcttagagcatattctttattataatgattatccaacatatttctttaattttaatacaaaaaatacatcatttaatttttgttacatatgaacattcatttttaaatgctcagcctcaagtgcaggcatttttgagtggcctgattacatattcctcccacagcaagtccgtatcctggaagtgttattttataataaaatttaaaaagttttaaagaattaaatcgtaggacaaattaattaaaatattgtgtaaaattaccttcaggctatgtgtataaggtatatatgaaacgtaaatgaacttcatgtttaaatttg

SEQ ID NO: 224376 - DNA, 756 bp, Artificial Sequence
  derived and/or modified sequence
ggcggaagtggtcctttccgtttggcagccgagtgtaaagcattgcttgaggttgcccagagacttatttttgagctcgctgtaagactgagaaatcacgtagtccttcctgaaaccactaagaggaaaaatgtctgtgacactgcatacagatgtaggtgatattaaaattgaagtcttctgtgagaggacacccaaaacatgtgagatggagtctcgctgtgtcccccaggctggagtacaatggcgcgatctcggctcactgcaacctccgcctcctgggttcaagcaagtcttctgcctcagcctcccgagaactggaagaggaggcaacagtatttggggcaagaagtttgaggatgaatacagtgaatatcttaagcacaatgttagaggtgttgtatctatggctaataatggcccgaacaccaatggatctcagttcttcatcacctatggcaaacagccacatttggacatgaaatacaccgtatttggaaaggtaatagatggtctggaaactctagatgagttggagaagttgccagtaaatgagaagacataccgacctcttaatgatgtacacattaaggacataactattcatgccaacccatttgctcagtagctatgatagacctggacaaataacttgacaaattgctggaacacacttattgtggtttacccggttttaattatgtcagagattgcatcatccttctgcttgtttacaactatgatcttctatgaaat

SEQ ID NO: 224377 - DNA, 498 bp, Artificial Sequence
  derived and/or modified sequence
atgtctgtgaccctgcacacagatgtgggggacatcaagattgaggtgttctgtgagaggacccccaagacctgtgagatggagagccgctgtgtgccccaggccggcgtgcagtggagggacctgggcagcctgcagcccccacctcctggcttcaagcaggtgttctgcctgagcctgcccaggacaggccggggcggcaacagcatctggggcaagaagtttgaagatgagtacagcgagtacctgaagcacaacgtgcggggcgtggtgtccatggccaacaacggccccaacaccaacggcagccagttcttcatcacctacggcaagcagccccacctggacatgaagtacacagtgtttgggaaggtgattgatggcctggagaccctggatgagctggagaagctgcctgtgaatgagaagacctaccggcccctgaatgatgtgcacatcaaggacatcaccatccacgccaacccctttgcccagtag

SEQ ID NO: 224378 - DNA, 498 bp, Artificial Sequence
  derived and/or modified sequence
atgagcgtgaccctgcacaccgacgtgggcgacatcaagatcgaggttttctgcgagcgcacccccaagacatgcgagatggagagtcggtgtgtcccgcaggccggggtacagtggagggacttagggtccctgcagcctccgccacccggcttcaaacaggtgttctgcctgagccttccaagaaccgggagagggggcaactccatttggggaaagaaattcgaagatgaatattctgaatacctcaagcataacgtgcgaggcgtggtgtctatggcgaataacggtcccaacacaaatggctctcagtttttcatcacatacggcaagcaaccccatcttgacatgaagtatactgttttcggcaaggtcatagatggtctcgaaacgttagatgagctggaaaagctgccagtcaatgagaaaacttatcggccattgaacgacgtacatatcaaagatatcactattcatgctaacccctttgctcagtag

SEQ ID NO: 224379 - DNA, 498 bp, Artificial Sequence
  derived and/or modified sequence
atgagcgtgaccctgcacaccgacgtgggcgacatcaagatcgaggtgttttgtgagaggactcctaaaacctgcgaaatggagagtcggtgtgtcccacaggctggagttcagtggagggacctcggatcactgcagccacccccacctgggtttaagcaggtattctgtctgagtttaccacgtaccgggagggggggcaattccatctgggggaaaaagttcgaggacgagtactctgagtacttgaagcacaatgtgaggggcgtcgtttcaatggccaataatggtccaaataccaacggatcacagttttttatcacttacggcaagcagcctcacttggacatgaaatatactgtctttgggaaagtcattgatggactggagactctggacgagctggagaagctgccagtcaacgagaagacttacagacctctgaatgatgtgcatattaaggacatcacaattcatgcaaatcccttcgcgcaatag

SEQ ID NO: 224380 - DNA, 498 bp, Artificial Sequence
  derived and/or modified sequence
atgagtgtgacattacatacagatgttggggatattaagattgaggtgttttgtgagcgaacgccaaagacctgtgaaatggagagcaggtgcgtgcctcaggccggagtgcagtggagagacctggggagcctgcagcctccacctcctggctttaagcaggttttctgtctttccttaccgcgaaccgggcgtggaggaaacagtatctggggcaagaagttcgaagacgagtacagtgagtacttgaagcataatgtcagaggagtggtttccatggccaataacgggcctaatacgaacgggagccagttctttatcacctatgggaagcagcctcacctagatatgaagtatacggtgtttggcaaagtgatcgatggcttagagaccctcgatgagctggaaaagctcccagtcaatgaaaagacgtatagaccattaaatgatgttcatatcaaagatattactattcatgcgaaccccttcgcccaatag

SEQ ID NO: 224381 - DNA, 498 bp, Artificial Sequence
  derived and/or modified sequence
atgtcagtgacgcttcataccgacgtaggagatattaaaatcgaggtattctgcgagagaacacctaagacttgcgaaatggagtcacgctgtgtccctcaggccggagtgcagtggcgagacctgggaagcttgcagcctcctcccccaggattcaagcaggtattttgcctgagcctgcctcgcaccggcagaggcggaaactcaatttggggcaaaaagtttgaagacgaatacagtgagtaccttaagcacaatgtgaggggagtcgtgtctatggcaaataacggacctaacacaaacggaagccagtttttcatcacatacgggaaacagccacatctcgatatgaaatatacagtattcggtaaggttatcgatggactagagacccttgacgaactcgagaagctgccagtgaacgaaaagacgtacaggcctctgaacgacgttcacataaaggacatcactattcatgctaatccctttgctcagtag

SEQ ID NO: 224382 - DNA, 498 bp, Artificial Sequence
  derived and/or modified sequence
atgagcgtgaccctgcacaccgacgtgggcgacatcaagatcgaggtgttctgcgagagaacccccaagacctgcgagatggagagcagatgcgtgccccaggccggcgtgcagtggagagacctgggcagcctgcagccccccccccccggcttcaagcaggtgttctgcctgagcctgcccagaaccggcagaggcggcaacagcatctggggcaagaagttcgaggacgagtacagcgagtacctgaagcacaacgtgagaggcgtggtgagcatggccaacaacggccccaacaccaacggcagccagttcttcatcacctacggcaagcagccccacctggacatgaagtacaccgtgttcggcaaggtgatcgacggcctggagaccctggacgagctggagaagctgcccgtgaacgagaagacctacagacccctgaacgacgtgcacatcaaggacatcaccatccacgccaaccccttcgcccagtag

SEQ ID NO: 224383 - protein, 125 aa, Artificial Sequence
  derived and/or modified sequence
MPRYELALILKAMQRPETAATLKRTIEALMDRGAIVRDLENLGERALPYRISAHSQQHNRGGYFLVDFYAPTAAVESMVEHLSRDIDVIRGNIVKHPLTQELKECEGIVPVPLAEKLYSTKKRKK

SEQ ID NO: 224384 - DNA, 378 bp, Artificial Sequence
  derived and/or modified sequence
atgcctaggtacgaattggctcttatccttaaggcaatgcagcgacctgagactgcggctaccctcaagcgaactatcgaggcattaatggatcgcggggccattgtccgagatctggaaaaccttggcgagcgcgccctcccttataggataagcgcacactcccagcagcacaataggggcggatacttcctggtggacttttacgcccctaccgccgcagttgagagcatggtggaacatctctcacgagacatcgacgtgataagaggaaatattgttaaacatccactcactcaggagctgaaggagtgtgaaggtattgttccagtccctctagcggagaaactgtatagcaccaagaagagaaagaagtag

SEQ ID NO: 224385 - DNA, 378 bp, Artificial Sequence
  derived and/or modified sequence
atgcccaggtatgagctggccctgatcctgaaggccatgcagaggcctgagacagctgccaccctgaagaggaccatcgaggccctgatggacagaggagccatcgtgcgggacctggagaacctgggggagcgggccctgccctaccgcatcagcgcccacagccagcagcacaacagaggaggctacttcctggtggacttctacgcccccacagctgctgtggagagcatggtggagcacctgagccgggacattgatgtgatccggggcaacatcgtgaagcaccccctgacccaggagctgaaggaatgtgagggcatcgtgcctgtgcccctggccgagaagctgtacagcaccaagaagaggaagaagtag

SEQ ID NO: 224386 - DNA, 990 bp, Artificial Sequence
  derived and/or modified sequence
cggcgtctgcgcagctgccagcgcctttaagcccgggctcgcgctctcggaccgtgctttcgccgcctgggagccgtccggcgcagcagtttctaggtccccactgtccccgccgtcccgccccttcgcgtcccgggaaccggctggcttccgagccgcactcgccgatcctccaggcatgccccgctacgagctggctttaatcctgaaagccatgcagcggccagagactgctgctactttgaaacgtacgatagaggccctgatggacagaggagcaatagtgagggacttggaaaacctgggtgaacgagcgcttccttataggatctctgcccacagtcagcagcacaacagaggcgggtatttcttggtggatttttatgcacccaccgcagctgttgaaagcatggtggagcacttgtctcgagatatagatgtgattagagggaatattgtcaaacaccctctgacccaggaactaaaagaatgtgaagggattgtcccagtcccactcgcagaaaaattatattccacaaagaagaggaagaagtgagaagattcgccagattttagccttatatgtaattccttcacatttgggcagcatggacgagaaggaagaatttgcaagtttggcctttatataagcatgtgttgcaggtgctgtttgatttttctaaggtatttttagcccttgatcccctttgcttgcgagaggtggggaactgctcactgacagcttctctgtaacctgcagtaccagtggatcgttcttgattttgttttcattagtgtcatttctttgtcattgaggacttttccccttacaacagtaacaccattttttgaagagcaaaacttataatacctcctgggattgtgagctagtcattcagcctgtgtaaccatgtggaaataaaaattgacgaccaatgtattatatggacaacttttgctttgagtaataaacttgattgtaggaatgtg

SEQ ID NO: 224387 - DNA, 378 bp, Artificial Sequence
  derived and/or modified sequence
atgccccggtacgagctggccctgatcctgaaggccatgcagcggcccgagaccgcggctacgctcaaaagaactatcgaggctctgatggatcgaggcgcaattgtccgggatctcgagaatttaggagagagggccctcccctaccggatctccgcccatagccagcagcacaaccggggcggctactttctggtcgatttctatgcccccactgctgcagtggaaagcatggtggagcacctcagccgggacatcgacgtgattcgagggaatatcgtgaagcaccctctgacccaggagctgaaggaatgtgaaggcatagtgccggtccctctggccgagaagctttactcgacgaagaagcggaaaaaatag

SEQ ID NO: 224388 - DNA, 378 bp, Artificial Sequence
  derived and/or modified sequence
atgccaaggtacgaactggccctgatcctgaaggcgatgcagaggcccgagactgccgctacactcaagaggaccatcgaggctctcatggatcgtggggctattgttagggatctggagaacctgggcgagagagctctcccttatcgcatctccgcacacagccagcagcataatagaggtggttactttttagtggatttctatgcgcctacagccgcagtagagtctatggtagagcacttgtccagagatatcgacgtgatcagaggcaacattgtgaagcatcccttgacccaggagctgaaggagtgcgagggcatcgtccctgtcccactggctgagaaactctattctacaaagaaacgcaagaagtag

SEQ ID NO: 224389 - DNA, 378 bp, Artificial Sequence
  derived and/or modified sequence
atgcccagatacgagctggccctgatcctgaaggccatgcagagacccgagaccgccgccaccctgaagagaaccatcgaggccctgatggacagaggcgccatcgtgagagacctggagaacctgggcgagagagccctgccctacagaatcagcgcccacagccagcagcacaacagaggcggctacttcctggtggacttctacgcccccaccgccgccgtggagagcatggtggagcacctgagcagagacatcgacgtgatcagaggcaacatcgtgaagcaccccctgacccaggagctgaaggagtgcgagggcatcgtgcccgtgcccctggccgagaagctgtacagcaccaagaagagaaagaagtag

SEQ ID NO: 224390 - protein, 137 aa, Artificial Sequence [sequence omitted]

SEQ ID NO: 224391 - DNA, 414 bp, Artificial Sequence
  derived and/or modified sequence
atgggggtgctcgcagctgccgctcgctgccttgtgcggggtgcagacaggatgtccaaatggacaagtaagagggggccccggtccttccggggtaggaagggcaggggagccaaaggcattggctttctcacctccggatggcggtttgtgcagataaaagagatggtgcccgaattcgtcgtccctgatctcaccggcttcaaattgaaaccatacgtttcctacttagcccctgagagcgaggagacccccttgaccgccgcccagcttttttctgaggccgtggcccccgcaatagagaaggactttaaagacggtactttcgatcctgacaatctggaaaaatatggtttcgaacctactcaggagggaaaactattccagctgtacccccggaacttcctgcgctag

SEQ ID NO: 224392 - DNA, 414 bp, Artificial Sequence
  derived and/or modified sequence
atgggcgtgctggccgctgctgcccgctgcctggtgagaggagctgacaggatgagcaagtggaccagcaagaggggccccaggagcttccggggcaggaagggccgcggggccaagggcatcggcttcctgaccagcggctggaggtttgtgcagatcaaggagatggtgcctgagtttgtggtgcctgacctgaccggcttcaagctgaagccctacgtgtcctacctggcccctgagagcgaggagacccccctgacagctgcccagctgttcagcgaggccgtggccccagccatcgagaaggacttcaaggatggcacctttgatcctgacaacctggagaagtatggctttgagcccacccaggagggcaagctgttccagctgtaccccaggaacttcctgaggtag

SEQ ID NO: 224393 - DNA, 1262 bp, Artificial Sequence
  derived and/or modified sequence
gggcgacttccgcgtggggtgagaggtcgcctgcgagggtgaccgggcaggagggctcagtgcgcaagccggacgtgctgggtccaagattattgattaatttgggcaccgcgagggctcgagtccccccacaccactgcccggcctgcgggggagcacagacagcccgggccctcccggctgcaggtcccgggctttccccgcgcggttgccggctccgcccagaggagccgcgcccggcggaggggtaagaaaggcagggtcgcggcgtcaacgcggcggccgtctcgagtccagggcccgcgtcctccccgacctcccgacgccacctcacggcctcagggggactgggctcccgggaaaccgccggccacctggcggacgaacacaggcagtggcgggcagtggagacgccagggaccaccgcgctgagagcgatcactcatccgccagccccgccccgcgagccccgccccgcgagccccgccccgcgagccccgccccgcgagccccgccccgcgagccccgccccgcgagccccgcaccgccggccccgcaccgccagccccgcgagccccgccccgccccgcgcgctcctcgcattggccgagtccccgcggccacaccccctaccagattggggccgctattggacgcggcggccgcggccaatcggagccgctcttgctgcgacgcagcggtcggaagcggagcaaggtcgaggccgggttggcgccggagccggggccgcttggagctcgtgtggggtctccggtccagggcgcggcatgggcgtcctggccgcagcggcgcgctgcctggtccggggtgcggaccgaatgagcaagtggacgagcaagcggggcccgcgcagcttcaggggccgcaagggccggggcgccaagggcatcggcttcctcacctcgggctggaggttcgtgcagatcaaggagatggtcccggagttcgtcgtcccggatctgaccggcttcaagctcaagccctacgtgagctacctcgcccctgagagcgaggagacgcccctgacggccgcgcagctcttcagcgaagccgtggcgcctgccatcgaaaaggacttcaaggacggtaccttcgaccctgacaacctggaaaagtacggcttcgagcccacacaggagggaaagctcttccagctctaccccaggaacttcctgcgctagctgggcgggggaggggcggcctgccctcatctcatttctattaaacgcctttgccagcta

SEQ ID NO: 224394 - DNA, 414 bp, Artificial Sequence
  derived and/or modified sequence
atgggcgtgctggccgccgccgcccggtgcctggtgcggggcgccgacaggatgtctaagtggaccagtaaacgtggtcctcgtagtttcagggggagaaagggccggggggctaagggaattggattcctgacaagtggctggcgatttgtccagattaaggagatggtccctgaattcgtcgtgccagaccttaccggtttcaagctcaaaccctacgtgtcttatctggcccccgagagtgaagagacaccgttaaccgccgctcagctgttttctgaggcggttgctcctgctattgagaaggattttaaggacggcacatttgatcccgacaacttggagaagtacgggttcgagcctacgcaggaggggaaactgttccagctttacccgagaaatttcctgcgttag

SEQ ID NO: 224395 - DNA, 414 bp, Artificial Sequence
  derived and/or modified sequence
atgggggtgttggcggctgccgcaaggtgcctagtcaggggagccgaccgaatgagcaaatggaccagtaagaggggtcccaggtccttccgtggaaggaaagggagaggagcgaaagggattggcttcctgactagtgggtggaggtttgtgcaaattaaagagatggtgcccgagttcgtggtccctgatcttactggcttcaaactaaagccctatgtctcctacctcgcccctgagagcgaggagactccactcacggccgctcagctcttctctgaagcagtcgccccagccatcgagaaagacttcaaggacggaactttcgaccccgacaatctggaaaagtacggatttgaacctacccaggagggcaagctttttcagctgtatccaagaaattttttaaggtag

SEQ ID NO: 224396 - DNA, 414 bp, Artificial Sequence
  derived and/or modified sequence
atgggcgtgctggccgccgccgccagatgcctggtgagaggcgccgacagaatgagcaagtggaccagcaagagaggccccagaagcttcagaggcagaaagggcagaggcgccaagggcatcggcttcctgaccagcggctggagattcgtgcagatcaaggagatggtgcccgagttcgtggtgcccgacctgaccggcttcaagctgaagccctacgtgagctacctggcccccgagagcgaggagacccccctgaccgccgcccagctgttcagcgaggccgtggcccccgccatcgagaaggacttcaaggacggcaccttcgaccccgacaacctggagaagtacggcttcgagcccacccaggagggcaagctgttccagctgtaccccagaaacttcctgagatag

SEQ ID NO: 224397 - DNA, 312 bp, Artificial Sequence
  derived and/or modified sequence
atggccaacctctttattcgcaaaatggtaaatcctctgctctacctgagcaggcacactgtgaagccaagggccctttccacttttctctttggcagcatccgaggtgccgctcccgtggccgtggagcctggggccgctgttcgtagtttgctgtcgcccgggctgcttccacacctcctgccagccctcggttttaaaaataagactgtgttaaaaaaacggtgcaaggactgttacctcgtcaaacgcagagggcgatggtacgtgtattgtaagacacatccgaggcacaagcagagacaaatgtag

SEQ ID NO: 224398 - DNA, 312 bp, Artificial Sequence
  derived and/or modified sequence
atggccaatttattcatcagaaagatggttaatcccctgctctatttgtcccgtcacacggtcaaacccagggctttgtccacctttctgttcggctccataagaggcgccgctcctgtggccgtcgaaccaggtgctgctgttcggagcctccttagcccgggacttctgccccacctgctgcccgctttgggattcaaaaacaagacagtgctcaagaagaggtgcaaagattgttatctagtgaagcgtagagggaggtggtacgtatattgcaagacacaccccaggcataaacagaggcagatgtag

SEQ ID NO: 224399 - DNA, 312 bp, Artificial Sequence
  derived and/or modified sequence
atggcgaatctctttattaggaagatggtgaaccccctcctctacttatcccggcacaccgtcaaaccaagggcactgtccactttcttattcggcagcatacgaggggcagccccggtggctgtcgagcccggcgcagccgtgaggtcacttctttcacccggcctcctgccgcacttgttgcccgccttgggattcaagaacaaaaccgtgctgaaaaaacgctgcaaagattgctacctagtaaaaagacgaggccgctggtacgtctactgcaaaacacaccctagacataaacagagacagatgtag

SEQ ID NO: 224400 - DNA, 312 bp, Artificial Sequence
  derived and/or modified sequence
atggcgaacttgtttatccgaaaaatggtgaaccccttgttgtacctatccagacacacagtcaaaccccgcgcgctgagcacgttcctcttcggctctattcgcggcgcagcccctgtggctgtggaacccggggctgcagtaaggtccctcctgagtcctggattgctgcctcacctgcttcccgctctggggttcaagaataagaccgtactgaagaaacgatgtaaggactgctacctggttaaaaggcggggccgctggtacgtttattgcaaaacccatccgagacataaacaacgccagatgtag

SEQ ID NO: 224401 - DNA, 312 bp, Artificial Sequence
  derived and/or modified sequence
atggccaacctcttcatcaggaagatggtgaaccccctgctgtacctgagccgccacacagtgaagccccgggccctgagcaccttcctgtttggcagcatcagaggagctgcccctgtggccgtggagcccggggctgctgtgcgcagcctgctgagccctggcctgctgccccacctgctgcctgccctgggcttcaagaacaagacagtgctgaagaagcgctgcaaggactgctacctggtgaagaggcggggccgctggtacgtgtactgcaagacccaccccaggcacaagcagaggcagatgtag

SEQ ID NO: 224402 - DNA, 312 bp, Artificial Sequence
  derived and/or modified sequence
atggccaacctgttcatccggaagatggtgaaccccctgctgtacctcagccgtcacacagtcaagccacgcgcactgtcaactttcttgttcggttctatacgtggagcagcccctgtggcggtcgaaccaggtgctgctgtgcggtctttactgtccccgggcctactgccccatctgctccctgcgctgggcttcaaaaacaagacagttttgaagaaaaggtgcaaggactgctatttggtgaaaagaagaggccgctggtacgtgtactgcaagacccatccccgtcataagcagcgccaaatgtag

SEQ ID NO: 224403 - DNA, 312 bp, Artificial Sequence
  derived and/or modified sequence
atggccaacctgttcatccggaagatggtgaaccccctgctgtacttgtcccgacacacggtcaagcctagggccctttctactttcttgttcgggtctatccgcggagccgcgcccgtggccgtggagccaggggctgccgtccggtcactcttaagccccggtttattaccccatctgcttccagctcttggattcaagaacaaaactgttctgaaaaagaggtgcaaggattgttatctggtcaagaggcgcggcaggtggtacgtgtactgcaagactcacccacgacataagcagaggcagatgtag

SEQ ID NO: 224404 - DNA, 312 bp, Artificial Sequence
  derived and/or modified sequence
atggccaacctgttcatccggaagatggtgaaccccctgctgtacctatcacgacacactgtgaagccaagggccctcagcacgtttttgtttggatccatcagaggtgccgcccccgtggcagtcgagccaggagcagcagtgagatccctgttgagccccgggcttttgccacacctccttcctgcgctgggattcaaaaataaaacagtactgaagaaaagatgtaaagattgctacctggtgaaaaggaggggcaggtggtacgtgtactgtaagacccatccacggcataaacagcgccagatgtag

SEQ ID NO: 224405 - DNA, 312 bp, Artificial Sequence
  derived and/or modified sequence
atggccaacctgttcatccggaagatggtgaaccccctgctgtacttgtctaggcacacagtgaaaccaagagctctcagcacattcctctttggctccattaggggagccgcccccgtcgcggtggagcccggcgctgcggttcgatcactgctgagtccaggacttttgccccatctcttaccggcacttggattcaaaaacaagacagtcctgaaaaagagatgcaaggattgttacctggtcaaacgcagggggcgatggtacgtgtattgcaaaacccatcctcgccacaagcagaggcagatgtag

SEQ ID NO: 224406 - DNA, 312 bp, Artificial Sequence
  derived and/or modified sequence
atggccaacctcttcatccgaaagatggttaatccactgctgtacctgtctagacacacagtgaaaccacgtgccctcagcacctttcttttcgggtccatcagaggcgcagctcccgttgccgttgagcctggagccgcagtgagaagccttctgagtcccggtctccttccccacctcctgcccgcactaggatttaagaataaaactgtcctgaaaaaacgctgtaaggactgctatctcgtcaaaaggaggggtcggtggtacgtgtactgtaagacacaccctcgacacaaacagaggcaaatgtag

SEQ ID NO: 224407 - DNA, 312 bp, Artificial Sequence
  derived and/or modified sequence
atggcaaacctatttattcggaagatggtcaaccctttgctgtacttgtcccgccacaccgtgaaaccgcgtgcgcttagtactttccttttcgggagcatcagaggcgctgcccctgttgcggtcgaaccgggtgctgctgttagatcactcctgagtccgggactgctacctcacctgctgccagcactcggtttcaagaacaagacggtactcaaaaagcgctgcaaggattgctacttggtgaaacgacggggtcggtggtatgtatattgtaagacccaccctcggcacaagcaaaggcagatgtag

SEQ ID NO: 224408 - DNA, 312 bp, Artificial Sequence
  derived and/or modified sequence
atggctaacctttttatcaggaaaatggtcaaccctcttctttatttatctaggcacactgttaaaccccgagccctctccacatttctttttggcagcattagaggggctgcccctgtcgctgtcgagccaggagcagcagtgcggagcctgctgtccccaggactgctcccgcacctccttccggctctgggcttcaagaataaaacggtgttgaaaaaacgatgtaaggactgctatcttgtgaaaaggcgaggacgctggtatgtatactgtaagacgcatcctcgccacaaacagcgccagatgtag

SEQ ID NO: 224409 - DNA, 312 bp, Artificial Sequence
  derived and/or modified sequence
atggcgaatctgtttattcgcaagatggttaatcctttactctacctgagtcgccacactgtgaagcccagggccttaagcacgttcctcttcggcagtatcagaggggctgctccagtggccgtggagccaggggcagcggtccgctcactactaagcccaggcctattgccccacctcctgccggctttggggtttaagaataagactgtgctgaagaaaagatgcaaagattgctaccttgtcaaacgtagagggagatggtatgtgtattgtaaaacccaccctcggcacaaacaaagacaaatgtag

SEQ ID NO: 224410 - DNA, 312 bp, Artificial Sequence
  derived and/or modified sequence
atggccaacctgttcatcagaaagatggtgaaccccctgctgtacctgagcagacacaccgtgaagcccagagccctgagcaccttcctgttcggcagcatcagaggcgccgcccccgtggccgtggagcccggcgccgccgtgagaagcctgctgagccccggcctgctgccccacctgctgcccgccctgggcttcaagaacaagaccgtgctgaagaagagatgcaaggactgctacctggtgaagagaagaggcagatggtacgtgtactgcaagacccaccccagacacaagcagagacagatgtag

SEQ ID NO: 224411 - protein, 1537 aa, Artificial Sequence
  derived and/or modified sequence
MGEKLELRLKSPVGAEPAVYPWPLPVYDKHHDAAHEIIETIRWVCEEIPDLKLAMENYVLIDYDTKSFESMQRLCDKYNRAIDSIHQLWKGTTQPMKLNTRPSTGLLRHILQQVYNHSVTDPEKLNNYEPFSPEVYGETSFDLVAQMIDEIKMTDDDLFVDLGSGVGQVVLQVAAATNCKHHYGVEKADIPAKYAETMDREFRKWMKWYGKKHAEYTLERGDFLSEEWRERIANTSVIFVNNFAFGPEVDHQLKERFANMKEGGRIVSSKPFAPLNFRINSRNLSDIGTIMRVVELSPLKGSVSWTGKPVSYYLHTIDRTILENYFSSLKNPKLREEQEAARRRQQRESKSNAATPTKGPEGKVAGPADAPMDSGAEEEKAGAATVKKPSPSKARKKKLNKKGRKMAGRKRGRPKKMNTANPERKPKKNQTALDALHAQTVSQTAASSPQDAYRSPHSPFYQLPPSVQRHSPNPLLVAPTPPALQKLLESFKIQYLQFLAYTKTPQYKASLQELLGQEKEKNAQLLGAAQQLLSHCQAQKEEIRRLFQQKLDELGVKALTYNDLIQAQKEISAHNQQLREQSEQLEQDNRALRGQSLQLLKARCEELQLDWATLSLEKLLKEKQALKSQISEKQRHCLELQISIVELEKSQRQQELLQLKSCVPPDDALSLHLRGKGALGRELEPDASRLHLELDCTKFSLPHLSSMSPELSMNGQAAGYELCGVLSRPSSKQNTPQYLASPLDQEVVPCTPSHVGRPRLEKLSGLAAPDYTRLSPAKIVLRRHLSQDHTVPGRPAASELHSRAEHTKENGLPYQSPSVPGSMKLSPQDPRPLSPGALQLAGEKSSEKGLRERAYGSSGELITSLPISIPLSTVQPNKLPVSIPLASVVLPSRAERARSTPSPVLQPRDPSSTLEKQIGANAHGAGSRSLALAPAGFSYAGSVAISGALAGSPASLTPGAEPATLDESSSSGSLFATVGSRSSTPQHPLLLAQPRNSLPASPAHQLSSSPRLGGAAQGPLPEASKGDLPSDSGFSDPESEAKRRIVFTITTGAGSAKQSPSSKHSPLTASARGDCVPSHGQDSRRRGRRKRASAGTPSLSAGVSPKRRALPSVAGLFTQPSGSPLNLNSMVSNINQPLEITAISSPETSLKSSPVPYQDHDQPPVLKKERPLSQTNGAHYSPLTSDEEPGSEDEPSSARIERKIATISLESKSPPKTLENGGGLAGRKPAPAGEPVNSSKWKSTFSPISDIGLAKSADSPLQASSALSQNSLFTFRPALEEPSADAKLAAHPRKGFPGSLSGADGLSPGTNPANGCTFGGGLAADLSLHSFSDGASLPHKGPEAAGLSSPLSFPSQRGKEGSDANPFLSKRQLDGLAGLKGEGSRGKEAGEGGLPLCGPTDKTPLLSGKAAKARDREVDLKNGHNLFISAAAVPPGSLLSGPGLAPAASSAGGAASSAQTHRSFLGPFPPGPQFALGPMSLQANLGSVAGSSVLQSLFSSVPAAAGLVHVSSAATRLTNSHAMGSFSGVAGGTVGGN

SEQ ID NO: 224412 - DNA, 4614 bp, Artificial Sequence
  derived and/or modified sequence
atgggcgagaagctggagctcaggctgaaatccccagttggggcagagcctgcggtgtacccttggccattgccagtctatgataagcaccacgatgccgcccatgagatcattgagactatccggtgggtctgcgaggagattcccgacctgaagctggcaatggaaaactacgttttgatagattacgacacaaaaagtttcgaatctatgcagcggctctgcgataagtataatcgggccatcgattctatccaccagctctggaaaggcaccacccagcccatgaagctgaacactcgccccagcacaggcctgcttcgccatatcctccagcaggtgtacaatcactccgtgactgatcctgagaaactcaacaactatgagcccttctcacctgaagtgtacggggagacatctttcgacctggtggcgcagatgatagatgaaatcaagatgaccgatgacgatctgttcgtagacctcgggtctggagtgggccaggtggtgctacaagttgcagcagctaccaactgtaaacaccactatggggtggaaaaagccgatattcctgctaaatacgctgagacaatggatagagaatttagaaaatggatgaaatggtacggcaaaaagcatgccgaatacactcttgagcgtggggactttctgagcgaggagtggagggagaggatagcaaacacaagcgttatcttcgtaaacaacttcgctttcggaccggaagtggatcatcagctcaaggaaagattcgccaacatgaaggagggcgggagaatcgtatcctcaaagcccttcgcccctctcaacttcaggatcaactcgcgcaatctgtcagatattggcacaattatgcgcgtggtcgaattaagccctctgaaagggagcgtctcttggaccggtaaacctgtaagctactacttacatactatcgacagaaccatcctggaaaactacttttcctcattgaagaacccgaagctacgggaggaacaggaagccgccaggagaagacagcagcgagagtctaaatcaaatgctgccactcccactaaaggccccgagggcaaggtcgctggacctgctgatgctcctatggactctggcgctgaggaggaaaaagcgggggctgcgactgtcaagaaaccctctcccagcaaagctagaaaaaaaaagcttaataaaaaggggcgcaagatggccggccgcaaacgagggcggcccaagaaaatgaacactgcgaaccccgagaggaaacctaaaaaaaatcagacagccttggacgcactgcacgcccagaccgtctcccagaccgcagcatcttccccgcaggacgcctatcgaagtccccattcccctttctaccagctgccaccgagtgtccaacgccatagtcctaatccacttctggtcgcccctacgcctccagcactgcaaaaactacttgagagcttcaaaattcaatacctacagtttctggcatacacgaagaccccacagtataaagcaagcctgcaggaactattgggtcaggaaaaagagaagaacgcccagctgcttggggcggctcagcagcttctgagccactgtcaggcccaaaaggaggaaattaggcggctgtttcagcagaagctggatgaacttggagttaaggctctgacttacaatgacctgattcaggcgcaaaaagagataagtgcccacaatcagcagctccgcgaacaaagtgaacaactcgagcaggacaatcgtgcactacgagggcagtctctccagctgttgaaagcccgctgcgaggaactgcagctggactgggccaccctgtctctggagaaactgctgaaggagaagcaggctctgaaatctcagatttctgaaaaacagcgacactgcctggagctgcagattagcatagtggagctggagaaatcccagcggcagcaggagcttctgcagttgaagagctgtgtgccaccagatgatgctttaagcttacatcttcggggcaagggcgcacttgggagagagctggagcccgacgcttctcgtttacacctggaactggactgtaccaagttctccctcccgcatctgtcgtctatgagccccgaactgtccatgaacggtcaagccgccggatacgagctctgtggagtgctcagcagaccttcctccaagcagaacacccctcagtaccttgcctccccactcgatcaggaggtggtgccatgcaccccgagccacgtggggcgtccacgcctggagaagctttccggcctggccgcacccgattacactcgactctcacccgcgaagattgtgctgcggcggcatctgagccaggaccatacagtacctgggcgtccagccgcctcagagttacactcccgggccgagcatacaaaggaaaacggactgccctatcagtctccatctgtacctgggagcatgaagttatctcctcaggatccaaggcctctctcccccggcgccctccagttggccggcgagaagtcatcggagaaaggcctgagggagagagcctatggtagcagcggtgagctgattacctcattaccgataagtattcctctgagtacagtgcaacccaataaactgccggtgtccatcccactcgcatccgtggttttgccaagccgggcagaacgggctcgctccactcccagccctgtcctgcaaccacgggacccgagctcaaccttggaaaagcaaatcggcgcgaatgcccatggtgccggatcccgatcgctggctcttgcccctgccggcttcagctatgccggttccgtggccatctctggagcgctggcaggaagtccagcgagtttgaccccaggtgctgagcctgctacattggatgagtctagctcttcaggatctctgtttgccacagtggggagtagatcttcaacgcctcagcaccccctgttgttagcccagcctcgcaattcactgccggccagcccagcacatcagttgagtagttcccctagattaggaggcgccgcccagggtcccctgcccgaggcgagtaagggggatctcccttccgatagcggtttttctgatcccgagtctgaggccaagcgaaggattgtattcacaattactaccggcgcggggagcgccaagcagagtccttcaagcaagcattcccccctcactgcaagtgctcgcggcgactgcgtgccctcacacggtcaagattctcggcgtaggggaagacgtaaaagagcctctgcaggtaccccttcactgtcagcaggagtgtcacctaagcgcagagccctcccaagcgtcgccggtctgtttacgcagccatcgggctctccactgaacctgaactcaatggtgtcgaacataaatcagccactggagatcacggcaatttcctctcccgaaaccagcctgaagagcagtcctgttccttatcaagatcacgaccagcctcccgttttgaaaaaagagcgccccctgtcacagaccaatggtgcgcactacagccctcttaccagtgacgaagaaccaggatctgaggatgaacccagctcagccaggatcgaacgcaaaattgcgactatctccttagagagtaaatcacctcctaaaactctggagaatggaggtgggctagctggcaggaaaccggcacccgcaggggagcctgttaatagctcgaaatggaaaagcaccttctcacccatcagtgacattggacttgccaagtctgccgactcccctctgcaggcctcttccgccctgtctcagaacagccttttcacctttcggccagcattggaggagcctagcgcagatgccaagctcgcagcccacccccgaaaaggtttcccaggaagcctgtctggagccgacggcttatcaccaggcaccaatccggccaacggttgcacttttggagggggccttgccgcggacctgtccctgcactctttctcagacggcgcctctctgccccacaagggcccagaggctgcggggctctcatctccccttagcttcccttcacaacgcggaaaggaggggtccgacgccaacccatttttgtctaagcggcagctagacggcctcgccgggttaaagggcgaagggagccgcggaaaggaagccggcgagggggggctgcctctttgcggccccacagacaaaactcctctcctgtcaggaaaggccgctaaggcaagggacagagaggttgacctgaaaaatggccacaacttatttatttctgcggccgctgtgccccccggatccttgcttagcggtccaggcctcgcgcctgcagccagtagtgccggtggagctgcctccagcgcgcagacccaccggtcctttctggggcctttccctcccggcccccagttcgccttaggccccatgtctctgcaagctaatttgggaagcgtcgcgggatctagtgtactccagtcgctattcagttcagttccagcggctgccgggctggtgcacgtgagtagtgccgcgaccaggctgaccaatagtcacgccatgggatcgttcagcggcgttgccggaggcacagtgggagggaactag

SEQ ID NO: 224413 - DNA, 4614 bp, Artificial Sequence
  derived and/or modified sequence
atgggagagaagctggagctgcggctgaagagccctgtgggcgctgagcctgctgtgtacccctggcccctgcctgtgtatgacaagcaccatgatgctgcccacgagatcatcgagaccatccgctgggtgtgtgaggagatcccagacctgaagctggccatggagaactacgtgctgattgattatgacaccaagagctttgagagcatgcagaggctgtgtgacaagtacaacagagccatcgacagcatccaccagctgtggaagggcaccacccagcccatgaagctgaacacccggcccagcacaggcctgctgcggcacatcctgcagcaggtgtacaaccacagcgtgacagatcctgagaagctgaacaactatgagcccttcagccctgaggtgtatggagagaccagctttgacctggtggcccagatgattgatgagatcaagatgacagatgatgacctgtttgtggacctgggcagcggcgtgggccaggtggtgctgcaggtggccgccgccaccaactgcaagcaccactatggagtggagaaggctgacatcccagccaagtatgcagagaccatggaccgggagttcaggaagtggatgaagtggtacggcaagaagcacgccgagtacaccctggagcggggggacttcctgtctgaggagtggagggagcgcatcgccaacaccagcgtcatctttgtgaacaactttgcctttggacctgaggtggaccaccagctgaaggagagatttgccaacatgaaggagggcggccgcatcgtgagcagcaagccctttgcccccctgaacttccgcatcaacagcaggaacctgagtgacatcggcaccatcatgagggtggtggagctgagccccctgaagggctctgtgtcctggacaggcaagcctgtgtcctactacctgcacaccatcgacaggaccatcctggagaactacttcagcagcctgaagaaccccaagctgcgggaggagcaggaggccgcccggcggcggcagcagcgggagagcaagagcaatgctgccacccccaccaagggccctgagggcaaggtggccggccctgcagatgcccccatggacagcggggctgaggaggagaaggccggggccgccaccgtgaagaagcccagccccagcaaggccaggaagaagaagctgaacaagaagggcaggaagatggccggcaggaagaggggccggcccaagaagatgaacacagccaaccctgagaggaagcccaagaagaaccagacagccctggatgccctgcacgcccagacagtgtcccagacagctgccagcagcccccaggatgcctaccgcagcccccacagccccttctaccagctgccccccagcgtgcagaggcacagccccaaccccctgctggtggcccccaccccaccagccctgcagaagctgctggagagcttcaagatccagtacctgcagttcctggcctacaccaagaccccccagtacaaggccagcctgcaggagctgctgggccaggagaaggagaagaatgcccagctgctgggcgccgcccagcagctgctgagccactgccaggcccagaaggaggagatccggcggctcttccagcagaagctggatgagctgggcgtgaaggccctgacctacaatgacctgatccaggcccagaaggagatcagcgcccacaaccagcagctgcgggagcagagcgagcagctggagcaggacaacagagccctgcggggccagagcctgcagctgctgaaggcccgctgtgaggagctgcagctggactgggccaccctgagcctggagaagctgctgaaggagaagcaggccctgaagagccagatcagcgagaagcagaggcactgcctggagctgcagatcagcatcgtggagctggagaagagccagaggcagcaggagctgctgcagctgaagagctgtgtgcccccagatgatgccctgagcctgcacctgcggggcaagggggccctgggccgggagctggagccagatgccagccggctgcacctggagctggactgcaccaagttcagcctgccccacctgagctccatgagccctgagctgtccatgaatggccaggccgccggctatgagctgtgtggggtgctgagccggcccagcagcaagcagaacaccccccagtacctggccagccccctggaccaggaggtggtgccctgcacccccagccacgtgggccggccccggctggagaagctgagcggcctggccgccccagactacacccggctgagccctgccaagatcgtgctgcggcggcacctgagccaggaccacacagtgcccggccggcctgctgccagcgagctgcacagcagagctgagcacaccaaggaaaatggcctgccctaccagagccccagcgtgcccggctccatgaagctgagcccccaggacccccggcccctgagccctggggccctgcagctggccggggagaagagcagcgagaagggcctgcgggagcgggcctacggcagcagcggggagctgatcaccagcctgcccatcagcatccccctgagcacagtgcagcccaacaagctgcctgtgtccatccccctggcctctgtggtgctgcccagcagagctgagcgggcccggagcacccccagccctgtgctgcagccccgggaccccagcagcaccctggagaagcagatcggggccaatgcccatggagctggcagccgcagcctggccctggccccagctggcttctcctatgccggctctgtggccatcagcggggccctggccggcagccctgccagcctgaccccaggagctgagcccgccaccctggatgagagcagcagcagcggcagcctgtttgccaccgtgggcagccgcagcagcaccccccagcaccccctgctgctggcccagcccaggaacagcctgcctgccagccctgcccaccagctgagcagcagcccccggctgggcggggccgcccagggccccctgcctgaggccagcaaaggagacctgcccagcgacagcggcttcagtgaccctgagagcgaggccaagagaagaattgtgttcaccatcaccactggagctggcagcgccaagcagagccccagcagcaagcacagccccctgacagccagcgcccggggggactgtgtgcccagccacggccaggacagcagaagaagaggccgcaggaagagggccagcgctggcacccccagcctgtctgctggggtgagccccaagagaagagccctgcccagcgtggccggcctcttcacccagcccagcggcagccccctgaacctgaacagcatggtgagcaacatcaaccagcccctggagatcacagccatcagcagccctgagaccagcctgaagagcagccctgtgccctaccaggaccatgaccagccccctgtgctgaagaaggagcggcccctgagccagaccaacggggcccactacagccccctgaccagtgatgaggagcccggctctgaagatgagcccagcagcgcccgcatcgagaggaagatcgccaccatcagcctggagagcaagagcccccccaagaccctggagaatggaggcggcctggccggcaggaagccagccccagctggggagcctgtgaacagcagcaagtggaagagcaccttcagccccatcagtgacatcggcctggccaagtctgctgacagccccctgcaggccagcagcgccctgagccagaacagcctcttcaccttccggcctgccctggaggagcccagcgcagatgccaagctggccgcccaccccaggaagggcttccctggcagcctgtctggagcagatggcctgagccctggcaccaacccagccaacggctgcaccttcggcggcggcctggccgctgacctgagcctgcacagcttcagtgatggagccagcctgccccacaagggccctgaggccgccggcctgagcagccccctgtccttccccagccagaggggcaaggagggcagtgatgccaaccccttcctgagcaagaggcagctggatggcctggccggcctgaagggggagggcagccggggcaaggaggccggggagggcggcctgcccctgtgtggccccacagacaagacccccctgctgagcggcaaggccgccaaggcccgggaccgggaggtggacctgaagaatggccacaacctcttcatctctgctgctgctgtgcccccaggcagcctgctgagcggccctggcctggccccagctgccagcagcgctggaggagctgccagcagcgcccagacccaccgctccttcctgggccccttccccccaggcccccagtttgccctgggccccatgagcctgcaggccaacctgggctctgtggccggcagctctgtgctgcagagcctcttcagctctgtgcctgctgctgctggcctggtgcacgtgagcagcgctgccacccggctgaccaacagccacgccatgggcagcttctctggagtggccggcggcaccgtgggcggcaactag

SEQ ID NO: 224414 - DNA, 4614 bp, Artificial Sequence
  derived and/or modified sequence
atgggcgagaagctggagctgcggctgaagagccccgtgggcgccgaaccggcagtttatccctggccactccctgtgtatgacaagcatcatgatgcggcccatgaaatcattgagaccattcggtgggtgtgcgaggagattcctgacctgaaactcgccatggagaattatgtgctcattgactacgataccaagtctttcgagtcgatgcagaggttgtgcgataagtacaaccgggcgatagacagtatccatcaactctggaaaggaaccacacagcccatgaaattaaacacaaggccttctacagggcttctgcgtcacatcttgcagcaggtgtacaaccactcagtgacagatcccgagaaactcaacaactacgaacccttctcacctgaagtatatggggagacttctttcgatttagtggctcaaatgattgatgaaatcaaaatgactgatgatgatctgttcgttgatctgggaagtggagtaggccaagtcgtcttgcaggtagccgcagcaacgaactgcaagcaccactacggtgtagaaaaggccgacatccccgcaaaatatgccgagaccatggatagggagtttcgtaagtggatgaagtggtatggcaagaagcacgccgagtacacccttgagagaggtgatttcctctcagaggaatggcgagaaaggattgctaacacttccgttatatttgtgaataactttgccttcggacctgaagtggaccaccagctcaaggaacggtttgccaatatgaaagaaggcgggcgaatcgtttcaagcaaaccctttgccccactgaatttccggatcaactcacggaacttgtccgatatcggtacaattatgagagttgtggaacttagcccactgaagggcagcgtctcatggacagggaagcctgtttcatattatctgcacacaatcgaccgtacgatcctggagaattacttctcatccctgaagaatcccaagttacgcgaagagcaggaagctgccagacggcgtcagcagagggagtctaaatcaaacgctgcaacccctacaaaagggccagagggtaaggtggcgggccctgcggatgcccccatggattccggagccgaagaagagaaggcaggcgcagctacggtcaagaaaccaagccccagcaaggccaggaaaaagaagttgaataagaagggcagaaaaatggcaggccgcaagcgtggccgaccaaagaagatgaacacagctaatcctgaacgtaaaccaaaaaaaaatcagaccgccctggatgctctccacgcacagaccgttagccagacggctgcttcaagtcctcaggacgcctacagaagcccccactcacccttctatcagctgccccccagcgtgcagcgtcactcccccaacccactcctcgtggcacctacacccccagccctgcagaagctactcgagtcattcaagattcagtatttgcagttcctcgcctacactaagacgcctcaatacaaggctagccttcaggagctcctgggacaggaaaaagaaaaaaacgcgcagttactgggcgcagctcagcagctgctttctcattgtcaggctcagaaggaggagattcggaggttgtttcagcagaagttagacgaacttggtgtcaaggcactcacgtacaatgaccttatccaagcacagaaggagatctccgcccacaatcagcaacttcgcgagcaatctgaacagctggagcaagataaccgtgcccttagaggacagtctttacagctgctcaaagcgcgctgtgaggagcttcagctcgactgggcaacattgtcgctcgagaaactgctgaaggagaagcaggccttgaaatcccaaatatcagagaagcagcgacactgtctggagctgcaaatttcgattgtggaactcgagaagtcccagaggcaacaagagctcctgcaactaaaatcatgtgtgcctcctgacgatgccctgagtctccatctgcgcggaaagggggcactgggaagagaactcgagccagacgcctctcgactgcatctggaactggattgtactaagttttctttgcctcatctgagtagcatgtcacctgagctgtctatgaacggtcaagctgctgggtacgagttgtgcggggtcctttctcgaccatcaagcaaacagaatactccacaatatctagcttctccattagaccaagaagtggttccttgcaccccatcccatgttggccggcccagacttgagaaactgagtggactggccgctcccgactatacccgcctctcccctgccaagatcgtcttacggcgacacctatctcaggaccacaccgttcctggccggcctgctgcatctgagctacacagtagggcagagcataccaaggagaacgggttaccttaccaatccccctctgttcccgggagcatgaagctcagtccgcaggaccctcgccctctctctcctggagcactacagcttgctggggaaaaaagttccgaaaaaggcctgcgcgaaagggcctatgggtcctccggggagcttattacctcattaccaattagtatcccgctgagtacggtgcagcccaataaactgcccgtatctatccctcttgccagcgtcgtgctaccttccagagctgagagggcgagaagcaccccttctcccgttctgcagcccagggacccttcatccaccctcgagaagcagatcggggccaacgcacatggcgctgggtcccggtctctggccctggctcctgccggcttcagctacgcaggcagtgtggccataagtggcgccctggccggatcacctgcgtctctgactcctggagccgaaccggcgactctggatgaatcaagcagcagcggctccttatttgctactgtcggaagtcggtcttccaccccacaacatcctctgcttttagctcagccccggaactctttgccggcctcccctgcccaccaattatcaagttccccaagactcggtggggcggcccagggccctttacctgaagctagcaagggggatcttccaagtgactctggtttttcagatcccgagagcgaagctaaacggcgtatcgtcttcaccatcactaccggggccggcagtgctaagcagtctccctcctccaaacactctccgttgaccgctagcgcacgcggtgattgtgtaccatcccacgggcaggacagccgacgcaggggcaggcggaaaagggctagcgcgggcacaccaagcctaagcgcgggagtctctcctaagaggcgggccctgccgtctgttgcaggcctgtttacacagcccagcggatcccctcttaacctgaactcaatggtaagcaatatcaaccaacccctggaaataacagccatctcctcccccgagacttcgctgaagtcatcacccgtgccataccaggaccacgatcagcctcccgtgcttaaaaaagaaaggcccctgtctcaaactaatggggctcactacagcccattgaccagcgacgaggagcccggctcagaagacgagccttccagtgctagaatcgaacggaagattgctacaatatccctggaatccaaatcacctccgaagactttggagaacggtggcgggctcgcaggccgaaaacccgctcccgccggggaacccgtgaactcatccaagtggaagagcactttctcaccaatttctgatatcggcctcgcaaaaagcgcagattcacccctccaggcttcttcggctctctcacagaatagtctctttacttttcgcccagcactggaggagcctagtgccgatgctaagctagcagcgcacccacgcaaggggtttcctggctctctgagcggcgccgacggtctctcccctggtaccaacccagcgaatgggtgcacatttgggggagggctggccgccgacctcagcctccacagttttagcgacggcgcttcactcccccataaagggcccgaggcggctggcttgtcgtcgcccctgagctttccttcccagcgaggtaaggagggctcagacgctaacccatttttgtcgaagaggcagctggacggacttgctgggcttaagggagagggatcccgtggtaaggaggcaggcgaagggggcctgcctctgtgcgggccaaccgacaaaactccgcttcttagtggcaaggccgccaaggctagggaccgagaagtcgatctcaaaaatgggcataatctcttcatcagcgctgcagcggtgccccccggctccctactatccgggcctggtttggcaccggcagcgtcttctgccggtggggctgcctcctcggcgcagactcatagatcattccttggaccattcccgcccggtcctcagtttgcccttggaccgatgagccttcaagccaacctgggttctgtggcgggctcgtctgttttacagagcctcttttctagcgtgcctgcggcagctgggctcgtccatgtttcaagtgctgcaacgcgattgactaattcgcacgctatgggcagtttctccggcgtggctggcgggaccgtcggggggaactag

SEQ ID NO: 224415 - DNA, 4614 bp, Artificial Sequence
  derived and/or modified sequence
atgggagagaagctggagcttaggcttaaatcgccggtcggcgcagaacctgccgtgtacccatggcccctgcccgtatatgataaacaccacgacgcagcacatgagattattgagaccatcaggtgggtttgtgaagagatcccagacctcaagcttgctatggagaattatgtcttaattgattacgataccaagagcttcgagagcatgcagaggctctgtgacaagtacaatagagcaattgattccatccatcagctgtggaaaggtaccacgcagccaatgaaactaaatactaggccaagtacagggctactcaggcacattttgcaacaagtttataatcactcagttactgatcctgagaaattgaacaactatgaacccttttctccagaagtatatggtgaaacttctttcgatttggttgcccagatgattgacgagatcaagatgacagatgatgatttgttcgttgacctcgggtccggcgtcgggcaggtcgtcctacaggtcgccgctgctacaaactgcaagcatcactacggcgttgaaaaagccgatatccctgccaaatacgccgaaactatggatcgggaatttaggaagtggatgaagtggtatggcaagaagcacgctgaatacacgctggagcgtggggatttcctcagcgaagagtggagagagcgtatcgcaaatacaagtgtcatttttgtcaataactttgcttttggcccagaggtggatcatcagctcaaggaacgctttgctaatatgaaggaaggtggccgaatcgtatcctctaagccatttgccccattgaacttcaggattaattctcgaaatctgagcgacattggtacaataatgagggttgtggaactttccccacttaaaggctctgtgtcttggactggtaaaccagtgtcttattaccttcacactatcgacaggacgattttagagaactacttttcgagtctgaagaaccccaagctgagagaagagcaggaggctgccagaagaagacaacagagggagtcaaagtcaaacgccgctacacctactaaagggcctgaggggaaagtagccggacctgcagatgctcccatggattcaggcgctgaagaagagaaggctggtgccgcaactgtaaaaaagccgagcccaagcaaggctcggaagaaaaaactcaacaagaaaggccgaaaaatggcaggtaggaagagggggaggccaaaaaaaatgaacacagctaatccggaaaggaagccaaagaaaaatcagactgccctagacgcccttcatgcccaaacggtttcccagactgccgcttcttccccccaggacgcctatagaagcccacatagccctttttatcagctgcccccatctgtgcagcggcatagccccaatccactccttgtcgctccaaccccacctgctctgcaaaagctgctcgagtcatttaagatacagtaccttcagttcctggcctatactaagacacctcagtacaaagcgtctttacaagaactgctaggacaagaaaaagaaaagaacgctcagctcctgggggctgcccagcagctgctgagtcactgtcaggcgcagaaagaggagatacggaggctgttccagcagaaacttgacgaactaggagtgaaagcactcacatacaacgatctaatccaagcccagaaggaaattagtgcccataatcagcaactgagggaacagtccgagcaactggagcaggacaacagggccctacgaggccaatctctgcaattattgaaggccaggtgcgaagagttgcagctggattgggcaaccctctctctcgaaaagttattgaaggagaaacaggctttaaagtcgcagatttccgaaaaacagcgccactgtcttgaactgcagatttcaattgtggagctggaaaaatcccagagacagcaggagctattacagcttaagtcttgcgtgcctccggatgatgcactgagcctccacttgagaggaaagggcgctcttggcagagagttagagcctgatgcatctcggctgcacctggagctggattgtaccaaattttctctaccccatttgtctagcatgtctcctgagttgagcatgaacggacaggcagccggatatgagctttgtggggttctgtctcgcccttcttcgaaacagaacactccgcagtatttggcttcccccctagaccaagaggtggtcccctgcacaccgtctcatgtcgggaggccacggttagaaaagctgtccggactggccgctcctgactacacccgactgagccctgcgaaaatcgtgcttagacgccaccttagccaggaccataccgtgcctggccgacctgcggcttctgaactgcacagccgcgctgaacacactaaggagaacggacttccataccagtccccttcggtgcctggtagcatgaagctgtccccacaggacccaagaccactgagtcctggggctctgcaacttgctggagaaaagagcagcgaaaaaggactgcgggaacgggcatacggaagcagcggcgagctcattacaagcctcccaatcagcatcccgctttcaacagtgcagcctaataagcttccagtgtccatccccctggcatccgtggtgctcccctccagagcggagagggccaggagcacgccttctccagtactgcaaccacgggacccttcatcgaccttggagaaacagataggcgctaacgcccacggggcagggagccgttctcttgctctggctccagccggtttctcgtacgctggcagcgtggcaatttccggtgccctagccggatcgccagcctccctgacacccggagctgagcctgctacactggacgagagctcctcatccggaagtctctttgccactgtcggcagtcgatcttctaccccacaacatccactgctcctggcccaaccaagaaattcactgccggcatctcctgcacatcagctgtctagtagcccccgtctagggggagccgctcagggtccactcccagaagctagcaagggagacttaccatccgactccggcttctctgatccggaatcagaagcaaagaggcggattgtgtttacaataaccactggcgctggaagtgccaagcagagccccagttccaaacactctcctctgaccgctagcgctcgcggagattgtgtgccaagccatgggcaagattctagaaggaggggcaggcgtaaaagggcaagtgccggaaccccatccctttcagccggagtctccccaaagagacgggctctacctagcgtagctggactctttacacagccttcagggagccccctgaacttaaatagcatggtctcaaacataaaccaaccactcgagattacagcaatctcctcccccgaaacttctttgaagtcttccccggtaccctatcaggatcacgaccagccaccagtgttgaagaaggagagaccattgagccagacaaacggcgcacattatagccccctgacttccgacgaggaaccaggaagtgaggacgaaccctcctctgctcggatcgaacggaaaatagccacgatctctctggagagcaagagcccacctaagaccttggagaatggcggagggcttgccggacgcaaacctgccccagccggtgaacctgtgaactcatctaaatggaaatctacgttcagccctataagcgatattgggctcgccaagagcgccgattcccccctgcaggcctcttccgccttgtctcagaactctttgtttacctttcgaccagcacttgaggaaccctctgctgacgccaaactggccgcacacccacggaagggcttccctgggtcacttagcggagcggatggtctgagcccgggtacaaacccagcaaatgggtgtacctttggcggtggactggcagctgacctgtcgctgcattcattcagcgacggcgcttcactgccccataaaggacctgaggccgctgggctctcttcgcctctgtcctttccgagccagagggggaaagagggctccgatgctaatccttttctttccaaaaggcagctggacgggctcgctggcctcaagggggaggggtctcgcggaaaggaagccggtgagggcggtcttcctctgtgcgggccaaccgacaagacaccactcctgagcggaaaggcagccaaggccagggatagagaagtggacctgaagaacgggcataacctcttcattagcgcagccgctgttccccctggatctctgctctctgggcctgggctggctccagctgcgtcgtctgcaggcggagccgcatctagcgcacagacacacaggtcctttctggggccttttccaccaggtccacagttcgcactgggtcctatgagcttgcaagctaacctgggctccgtggccggatctagcgtcttacaatcgttgtttagcagcgtgcccgctgcagctggcctggttcatgtgagctcagctgcaacccgcttaactaattcccacgcgatgggctccttctcaggggtggccggtgggacggttggaggaaattag

SEQ ID NO: 224416 - DNA, 4614 bp, Artificial Sequence
  derived and/or modified sequence
atgggcgagaagctggagctgagactgaagagccccgtgggcgccgagcccgccgtgtacccctggcccctgcccgtgtacgacaagcaccacgacgccgcccacgagatcatcgagaccatcagatgggtgtgcgaggagatccccgacctgaagctggccatggagaactacgtgctgatcgactacgacaccaagagcttcgagagcatgcagagactgtgcgacaagtacaacagagccatcgacagcatccaccagctgtggaagggcaccacccagcccatgaagctgaacaccagacccagcaccggcctgctgagacacatcctgcagcaggtgtacaaccacagcgtgaccgaccccgagaagctgaacaactacgagcccttcagccccgaggtgtacggcgagaccagcttcgacctggtggcccagatgatcgacgagatcaagatgaccgacgacgacctgttcgtggacctgggcagcggcgtgggccaggtggtgctgcaggtggccgccgccaccaactgcaagcaccactacggcgtggagaaggccgacatccccgccaagtacgccgagaccatggacagagagttcagaaagtggatgaagtggtacggcaagaagcacgccgagtacaccctggagagaggcgacttcctgagcgaggagtggagagagagaatcgccaacaccagcgtgatcttcgtgaacaacttcgccttcggccccgaggtggaccaccagctgaaggagagattcgccaacatgaaggagggcggcagaatcgtgagcagcaagcccttcgcccccctgaacttcagaatcaacagcagaaacctgagcgacatcggcaccatcatgagagtggtggagctgagccccctgaagggcagcgtgagctggaccggcaagcccgtgagctactacctgcacaccatcgacagaaccatcctggagaactacttcagcagcctgaagaaccccaagctgagagaggagcaggaggccgccagaagaagacagcagagagagagcaagagcaacgccgccacccccaccaagggccccgagggcaaggtggccggccccgccgacgcccccatggacagcggcgccgaggaggagaaggccggcgccgccaccgtgaagaagcccagccccagcaaggccagaaagaagaagctgaacaagaagggcagaaagatggccggcagaaagagaggcagacccaagaagatgaacaccgccaaccccgagagaaagcccaagaagaaccagaccgccctggacgccctgcacgcccagaccgtgagccagaccgccgccagcagcccccaggacgcctacagaagcccccacagccccttctaccagctgccccccagcgtgcagagacacagccccaaccccctgctggtggcccccaccccccccgccctgcagaagctgctggagagcttcaagatccagtacctgcagttcctggcctacaccaagaccccccagtacaaggccagcctgcaggagctgctgggccaggagaaggagaagaacgcccagctgctgggcgccgcccagcagctgctgagccactgccaggcccagaaggaggagatcagaagactgttccagcagaagctggacgagctgggcgtgaaggccctgacctacaacgacctgatccaggcccagaaggagatcagcgcccacaaccagcagctgagagagcagagcgagcagctggagcaggacaacagagccctgagaggccagagcctgcagctgctgaaggccagatgcgaggagctgcagctggactgggccaccctgagcctggagaagctgctgaaggagaagcaggccctgaagagccagatcagcgagaagcagagacactgcctggagctgcagatcagcatcgtggagctggagaagagccagagacagcaggagctgctgcagctgaagagctgcgtgccccccgacgacgccctgagcctgcacctgagaggcaagggcgccctgggcagagagctggagcccgacgccagcagactgcacctggagctggactgcaccaagttcagcctgccccacctgagcagcatgagccccgagctgagcatgaacggccaggccgccggctacgagctgtgcggcgtgctgagcagacccagcagcaagcagaacaccccccagtacctggccagccccctggaccaggaggtggtgccctgcacccccagccacgtgggcagacccagactggagaagctgagcggcctggccgcccccgactacaccagactgagccccgccaagatcgtgctgagaagacacctgagccaggaccacaccgtgcccggcagacccgccgccagcgagctgcacagcagagccgagcacaccaaggagaacggcctgccctaccagagccccagcgtgcccggcagcatgaagctgagcccccaggaccccagacccctgagccccggcgccctgcagctggccggcgagaagagcagcgagaagggcctgagagagagagcctacggcagcagcggcgagctgatcaccagcctgcccatcagcatccccctgagcaccgtgcagcccaacaagctgcccgtgagcatccccctggccagcgtggtgctgcccagcagagccgagagagccagaagcacccccagccccgtgctgcagcccagagaccccagcagcaccctggagaagcagatcggcgccaacgcccacggcgccggcagcagaagcctggccctggcccccgccggcttcagctacgccggcagcgtggccatcagcggcgccctggccggcagccccgccagcctgacccccggcgccgagcccgccaccctggacgagagcagcagcagcggcagcctgttcgccaccgtgggcagcagaagcagcaccccccagcaccccctgctgctggcccagcccagaaacagcctgcccgccagccccgcccaccagctgagcagcagccccagactgggcggcgccgcccagggccccctgcccgaggccagcaagggcgacctgcccagcgacagcggcttcagcgaccccgagagcgaggccaagagaagaatcgtgttcaccatcaccaccggcgccggcagcgccaagcagagccccagcagcaagcacagccccctgaccgccagcgccagaggcgactgcgtgcccagccacggccaggacagcagaagaagaggcagaagaaagagagccagcgccggcacccccagcctgagcgccggcgtgagccccaagagaagagccctgcccagcgtggccggcctgttcacccagcccagcggcagccccctgaacctgaacagcatggtgagcaacatcaaccagcccctggagatcaccgccatcagcagccccgagaccagcctgaagagcagccccgtgccctaccaggaccacgaccagccccccgtgctgaagaaggagagacccctgagccagaccaacggcgcccactacagccccctgaccagcgacgaggagcccggcagcgaggacgagcccagcagcgccagaatcgagagaaagatcgccaccatcagcctggagagcaagagcccccccaagaccctggagaacggcggcggcctggccggcagaaagcccgcccccgccggcgagcccgtgaacagcagcaagtggaagagcaccttcagccccatcagcgacatcggcctggccaagagcgccgacagccccctgcaggccagcagcgccctgagccagaacagcctgttcaccttcagacccgccctggaggagcccagcgccgacgccaagctggccgcccaccccagaaagggcttccccggcagcctgagcggcgccgacggcctgagccccggcaccaaccccgccaacggctgcaccttcggcggcggcctggccgccgacctgagcctgcacagcttcagcgacggcgccagcctgccccacaagggccccgaggccgccggcctgagcagccccctgagcttccccagccagagaggcaaggagggcagcgacgccaaccccttcctgagcaagagacagctggacggcctggccggcctgaagggcgagggcagcagaggcaaggaggccggcgagggcggcctgcccctgtgcggccccaccgacaagacccccctgctgagcggcaaggccgccaaggccagagacagagaggtggacctgaagaacggccacaacctgttcatcagcgccgccgccgtgccccccggcagcctgctgagcggccccggcctggcccccgccgccagcagcgccggcggcgccgccagcagcgcccagacccacagaagcttcctgggccccttcccccccggcccccagttcgccctgggccccatgagcctgcaggccaacctgggcagcgtggccggcagcagcgtgctgcagagcctgttcagcagcgtgcccgccgccgccggcctggtgcacgtgagcagcgccgccaccagactgaccaacagccacgccatgggcagcttcagcggcgtggccggcggcaccgtgggcggcaactag

SEQ ID NO: 224417 - DNA, 7436 bp, Artificial Sequence
  derived and/or modified sequence
cccgcctagcatggtgcggcggccgcgcgcgcggacatgggggagaagctggagctgagactgaagtcgcccgtgggggctgagcccgccgtctacccgtggccgctgccggtctacgataaacatcacgatgctgctcatgaaatcatcgagaccatccgatgggtctgtgaagaaatcccggatctcaagctcgctatggagaattacgttttaattgactatgacaccaaaagcttcgagagcatgcagaggctctgcgacaagtacaaccgtgccatcgacagcatccaccagctgtggaagggcaccacgcagcccatgaagctgaacacgcggccgtccactggactcctgcgccatatcctgcagcaggtctacaaccactcggtgaccgaccccgagaagctcaacaactacgagcccttctcccccgaggtgtacggggagacctccttcgacctggtggcccagatgattgatgagatcaagatgaccgacgacgacctgtttgtggacttggggagcggtgtgggccaggtcgtgctccaggttgctgctgccaccaactgcaaacatcactatggcgtcgagaaagcagacatcccggccaagtatgcggagaccatggaccgcgagttcaggaagtggatgaaatggtatggaaaaaagcatgcagaatacacattggagagaggcgatttcctctcagaagagtggagggagcgaatcgccaacacgagtgttatatttgtgaataattttgcctttggtcctgaggtggatcaccagctgaaggagcggtttgcaaacatgaaggaaggtggcagaatcgtgtcctcgaaaccctttgcacctctgaacttcagaataaacagtagaaacttgagtgacatcggcaccatcatgcgcgtggtggagctctcgcccctgaagggctcggtgtcgtggacggggaagccagtctcctactacctgcacactatcgaccgcaccatacttgaaaactatttttctagtctgaaaaacccaaaactcagggaggaacaggaggcagcccggcgccgccagcagcgcgagagcaagagcaacgcggccacgcccactaagggcccagagggcaaggtggccggccccgccgacgcccccatggactctggtgctgaggaagagaaggcgggagcagccaccgtgaagaagccgtctccctccaaagcccgcaagaagaagctaaacaagaaggggaggaagatggctggccgcaagcgcgggcgccccaagaagatgaacactgcgaaccccgagcggaagcccaagaagaaccaaactgcactggatgccctgcacgctcagaccgtgtctcagacggcggcctcctcaccccaggatgcctacagatcccctcacagcccgttctaccagctacctccgagcgtgcagcggcactcccccaacccgctgctggtggcgcccaccccgcccgcgctgcagaagcttctagagtccttcaagatccagtacctgcagttcctggcatacacaaagaccccccagtacaaggccagcctgcaggagctgctgggccaggagaaggagaagaacgcccagctcctgggtgcggctcagcagctcctcagccactgccaggcccagaaggaggagatcaggaggctgtttcagcaaaaattggatgagctgggtgtgaaggcgctgacctacaacgacctgattcaagcgcagaaggagatctccgcccataaccagcagctgcgggagcagtcggagcagctggagcaggacaaccgcgcgctccgcggccagagcttgcagctgctcaaggctcgctgcgaggagctgcagctggactgggccacgctgtcgctggagaagctgttgaaggagaagcaggccctgaagagccagatctcggagaagcagaggcactgcctggagctgcagatcagcattgtggagctagagaagagccagcggcagcaggagctcctgcagctcaagtcctgtgtgccgcctgacgacgccctgtccctgcacctgcgtgggaagggcgccctgggccgcgagctggagcctgacgccagccggctgcacctggagctggactgcaccaagttctcgctgcctcacttgagcagcatgagcccggagctctccatgaacggccaggctgctggctatgagctctgcggtgtgctgagccggccttcgtcgaagcagaacacgccccagtacctggcctcacccctggaccaggaggtggtgccctgtacccctagccacgtcggccggccgcgcctggagaagctgtctggcctagccgcacccgactacactaggctgtccccggccaagattgtgctgaggcggcacctgagccaggaccacacggtgcccggcaggccggctgccagtgagctgcattcgagagctgagcacaccaaggagaacggccttccctaccagagccccagcgtgcctggcagcatgaagctgagccctcaggacccgcggcccctgtcccctggggccttgcagcttgctggagagaagagcagtgagaagggcctgagagagcgcgcctacggcagcagcggggagctcatcaccagcctgcccatcagcatcccgctcagcaccgtgcagcccaacaagctcccggtcagcattcccctggccagcgtggtgctgcccagccgcgccgagagggcgaggagcacccccagtcccgtgctgcagccccgtgacccctcgtccacacttgaaaagcagattggtgctaatgcccacggtgctgggagcagaagccttgccctggcccccgcaggcttctcctacgctggctcggtggccatcagcggggccttggcgggcagcccggcctctctcacacctggagccgagccggccaccttggatgagtcctccagctctgggagcctttttgccaccgtggggtcccgcagctccacgccacagcaccccctgctgctggcacagccccggaactcgcttcctgcctctcccgcccaccagctctcctccagtccccggcttggtggggccgcccagggcccgttgcccgaggccagcaagggagacctgccctccgattccggcttctcagatcctgagagtgaagccaagaggaggattgtgttcaccatcaccactggtgcgggcagtgccaagcagtcgccctccagcaagcacagccccctgaccgccagcgcccgtggggactgtgtgccgagccacgggcaggacagtcgcaggcgcggccggcggaagcgagcatctgcggggacgcccagcttgagcgcaggcgtgtcccccaagcgccgagccctgccgtccgtcgctggccttttcacacagccttcggggtctcccctcaacctcaactccatggtcagtaacatcaaccagcccctggagattacagccatctcgtccccggagacctccctgaagagctcccctgtgccctaccaggaccacgaccagccccccgtgctcaagaaggagcggcctctgagccagaccaatggggcacactactccccactcacctcagacgaggagccaggctctgaggacgagcccagcagtgctcgaattgagagaaaaattgcaacaatctccttagaaagcaaatctcccccgaaaaccttggaaaatggtggtggcttggcgggaaggaagcccgcgcccgccggcgagccagtcaatagcagcaagtggaagtccaccttctcgcccatctccgacatcggcctggccaagtcggcggacagcccgctgcaggccagctccgccctcagccagaactccctgttcacgttccggcccgccctggaggagccctctgccgatgccaagctggccgctcaccccaggaaaggctttcccggctccctgtcgggggctgacggactcagcccgggcaccaaccctgccaacggctgcaccttcggcgggggcctggccgcggacctgagtttacacagcttcagtgatggtgcttctcttccccacaagggccccgaggcggccggcctgagctccccgctgagcttcccctcgcagcgcggcaaggagggctcggacgccaaccctttcctgagcaagaggcagctggacggcctggctgggctgaagggcgagggcagccgcggcaaggaggcaggggagggcggcctaccgctgtgcgggcccacggacaagaccccactgctgagcggcaaggccgccaaggcccgggaccgcgaggtcgacctcaagaatggccacaacctcttcatctctgcggcggccgtgcctcccggaagcctcctcagcggccccggcctggccccggcggcgtcctccgcaggcggcgcggcgtcctccgcccagacgcaccggtccttcctgggccccttcccgccgggaccgcagttcgcgctcggccccatgtccctgcaggccaacctcggctccgtggccggctcctccgtgctgcagtcgctgttcagctctgtgccggccgccgcaggcctggtgcacgtgtcgtccgctgccaccagactgaccaactcgcacgccatgggcagcttttccggggtggcaggcggcacagttggaggtaactaggatttctacctcaaccgcgagacctatgcaaggacggtgtggaccaactcgcgcccgcggcatggtgcccgccggcctgccgggctcccacccctggacggcagaggcaaggacggacgggagctccactgtgaatcggcggcacgcgccgcaggaggctgggactggtccagtttgtactgtcgatagttttagataaagtatttatcattttttaaaaagtataaacaattctgacttattttattccatctaagtggtaaaaggcaacttattgagaaatataaatatctatatatgagagctctatataaagacacgtgtctgcagggcgggcccgccagcggattcgccacagcctgccccggtgctatctcgtccccaggcccgcgcctgcctccacccgcttggtgctgactagacgctgacaacgccgaaccccgttctcggaaacgccgcccggccggctcccccgacgcgctgctcccgtaccaaaggcaggcccgtcgccaccacattcctcggaggcctccccgcggcctgagccccttcctgagcgccctggcgcctgccctgagctcttcacctttaccccggcactgtgaacccccagactgttcaccctccggggcgtgggttgcgcccttgcatgtgaaggggcctgcgcggtgacgcagctggccatgtgctgcgcgatggtgctgtgaggacggcgcgggcacgttgaacaagtgcatttacttttgtatttctcggctgtccatggctcgcagcatgccctgcgatgcggggcaggcctgtcgtgggtcccttggtgtttctgtacaggagagagtcacactaatgagtggcagtattttatagagatgtgatgagaatttataaatttcatagatttgacagcttttatttttagatggtataatgcacagtgaagaggaaagaaaagcgaggggaaaaaaccttatttattcaaacagtgcacaaaatggccccagcgtcagccccgaccctagacccctcagttgcagctcccagcagcccagacagagctgccggcgcccctgcctgccccacatcccttcctgtcagggccacgcctggcacccatcccttggagcctgtgctggttctcccagctgctgtgggtgtgctggggccagggtgcactgctgaaacctggcctctctggccctaggccccagggtgacgtcggccccccactctgcagccttggcgggtgcctgggactgggtgtggaaggagaggagctgaggccggggtgtagcaggcaggcagggccactccagtgcttctggagccctgagcagtcagggcctgggttgtctgagcagtggtggctctgtgccctccctggaggatgggatctgggagtctgagctccccgcatctggccctgggctgtgtggcacttgctgagcccaccttctcaagtgcttgctcctgtgagatggcatcggggagccccttccccaaggtgccacagatccaccctccagggagctgccagccctgtgttctggttcccaagggcaggatggacacacgtcacatccctaccacgtggcctccaaagggagccacggaggaaaggcttctgtggttgctaggtgggggagtcctgtgtgggagggcctgaagacccctgcttgtgcctggtgaggggggtgctgcctcccccagcccccaacaacctctcagacccccaccctccaacatagctgagttctgaagatggtgctccggacctgtcctcttaagtggtgcccagtgccctccccaccccacgttggtgctctcagctagaaggtgctgtgcctctgcctgagccccaagccccgagcctggccttcaggacaggcagcctgctctgtgtcgccacgggccggatacgccacagggttgatggcagagacggccgagtccctggtctagaacaagacacattctttaaacactgtattacttctgcctccctctaggtgacagtggcagtccgggtgccatcacgggtcctgcagatggccatgcagggctcctgcccacgcaggccaccgtatgttcaggacacgcactgggtctcagagccactggcccaggcagaagtctccttgagcccactgggtcatatgcgtgtcaccacacgtgaactagtgtggtggctgcctgcggacaccctcctgttctgagccctgggcctgtgttcttctcagacactcccagactgaggggtggtgtgtggcgggtggcagggtggctgtggagactggggatctggagcctggtgctggcacctggcctgagtttccgtgggcagctggcggggacctgtgctgctgctgctgactgtgggtgggcgggcggcgcctgggagtggctcttgctcaggaattgataggaaccctaaaaactaggataccccctcctcggcccatgaggcacgcacagtgacttatttaagacttcccccttaatttatctgcccccaggatgcgtcagtctgttcagtggtcagcaggccccccaccccccgccgactgccctcgccatcgtggtcagacccccctcccaacacaacacgctgctggtctgtgtcagcctttgtaacgtgggaggctctgccgtgtcttccgggtgaactgtatttggattgcgcgcattgtcacggtccgcccctgggctgcaggcgccccttcctctgggcacccctgcattctgcatccccacctctagacgctgtaataaacagactgttttcactcgga

SEQ ID NO: 224418 - protein, 216 aa, Artificial Sequence
  derived and/or modified sequence
MGKAAAAVAFGAEVGVRLALFAAFLVTELLPPFQRLIQPEEMWLYRNPYVEAEYFPTKPMFVIAFLSPLSLIFLAKFLKKADTRDSRQACLAASLALALNGVFTNTIKLIVGRPRPDFFYRCFPDGLAHSDLMCTGDKDVVNEGRKSFPSGHSSFAFAGLAFASFYLAGKLHCFTPQGRGKSWRFCAFLSPLLFAAVIALSRTCDYKHHWQGPFKW

SEQ ID NO: 224419 - DNA, 651 bp, Artificial Sequence
  derived and/or modified sequence
atgggcaaggccgccgccgccgtggccttcggcgccgaggtgggcgtgagactggccctgttcgccgccttcctggtgaccgagctgctgccccccttccagagactgatccagcccgaggagatgtggctgtacagaaacccctacgtggaggccgagtacttccccaccaagcccatgttcgtgatcgccttcctgagccccctgagcctgatcttcctggccaagttcctgaagaaggccgacaccagagacagcagacaggcctgcctggccgccagcctggccctggccctgaacggcgtgttcaccaacaccatcaagctgatcgtgggcagacccagacccgacttcttctacagatgcttccccgacggcctggcccacagcgacctgatgtgcaccggcgacaaggacgtggtgaacgagggcagaaagagcttccccagcggccacagcagcttcgccttcgccggcctggccttcgccagcttctacctggccggcaagctgcactgcttcaccccccagggcagaggcaagagctggagattctgcgccttcctgagccccctgctgttcgccgccgtgatcgccctgagcagaacctgcgactacaagcaccactggcagggccccttcaagtggtag

SEQ ID NO: 224420 - DNA, 651 bp, Artificial Sequence
  derived and/or modified sequence
atgggaaaagcagccgcggctgttgcctttggcgctgaagtgggcgtgcgactagcactttttgccgccttcctagtgacagagctcctgcctccttttcagagactgatccagcctgaggagatgtggctttacaggaatccttatgtggaagctgagtattttcccacaaagcccatgttcgtgatcgcatttctttcacccttgtcactcatcttcctggcaaagtttctgaagaaggccgacacacgcgacagcagacaagcctgtttggctgcatccctggctctggcgctcaacggagttttcaccaacaccatcaagttaatcgttggccggccgagacccgactttttctataggtgttttccagatggactcgctcactccgatctgatgtgtactggagacaaggatgtcgtcaatgaaggccgaaagtcgtttccgtccggtcattcaagttttgcttttgccggactggcattcgcgagcttttacctggccggtaagttgcactgttttaccccacaaggccgtggcaaatcatggcgattttgcgcctttctcagtcccctgctgttcgccgctgtaattgctctctccaggacctgtgattacaagcaccattggcaggggcctttcaagtggtag

SEQ ID NO: 224421 - DNA, 651 bp, Artificial Sequence
  derived and/or modified sequence
atgggcaaggctgctgctgctgtggccttcggggctgaggtgggcgtgcggctggccctgtttgctgccttcctggtgacagagctgctgccccccttccagaggctcatccagcctgaggagatgtggctgtacagaaacccctacgtggaggccgagtacttccccaccaagcccatgtttgtgattgccttcctgagccccctgagcctcatcttcctggccaagttcctgaagaaggctgacacccgggacagccggcaggcctgcctggccgccagcctggccctggccctgaatggagtcttcaccaacaccatcaagctgattgtgggccggcccaggccagacttcttctaccgctgcttcccagatggcctggcccacagcgacctgatgtgcacaggagacaaggatgtggtgaatgaaggaaggaagagcttccccagcggccacagcagctttgcctttgctggcctggcctttgccagcttctacctggccggcaagctgcactgcttcaccccccagggccggggcaagtcctggaggttctgtgccttcctgagccccctgctgtttgctgctgtgattgccctgagcaggacctgtgactacaagcaccactggcagggccccttcaagtggtag

SEQ ID NO: 224422 - DNA, 651 bp, Artificial Sequence
  derived and/or modified sequence
atgggcaaggccgccgccgccgtggccttcggcgccgaggtgggcgtgcggcttgctttgttcgccgcctttttagtgactgaactcctgcctccgttccaaaggctcattcagcctgaggagatgtggctttacagaaatccttacgtggaggccgagtacttcccaacaaagccaatgttcgttatcgcctttctgtcacccctgtccctgattttcctggccaagttcctgaagaaggcggataccagggactcccggcaggcctgtctagcagcatccctggcactggcccttaatggcgttttcacgaataccatcaagctcatagtgggtcgcccgaggccagatttcttctaccgatgcttccccgacggcctcgcccacagcgaccttatgtgcacaggagacaaggatgtggtaaacgaagggaggaaaagtttcccatcaggacacagctcatttgccttcgccggactggcctttgcatctttctacctggcgggcaaactgcactgttttactccacagggtagaggtaaatcttggcgattttgtgcatttctgagtcctcttttgtttgcagccgtcattgctctcagtaggacctgcgattataagcatcactggcagggaccttttaagtggtag

SEQ ID NO: 224423 - DNA, 651 bp, Artificial Sequence
  derived and/or modified sequence
atggggaaggctgccgctgcggtcgcctttggcgctgaagtgggggttagattagccctcttcgcagcatttctagtgacagaactgctgcctcccttccagcggctcatccagccggaagaaatgtggctgtatcgcaatccatatgtagaggctgaatactttcccaccaagcctatgttcgtgattgccttcctgtcccctctgtccctgatattcctggctaagttcctgaaaaaggcagatacccgggacagccggcaggcatgtttagcggcatctctggccctggcactgaacggcgtgttcaccaacacgattaagctcatagtgggcaggccacgaccggattttttctatcgatgcttccccgatggccttgcacactctgatctgatgtgtacgggggacaaggacgtcgtcaacgaaggacggaaatcattcccttccggccattccagcttcgccttcgcaggcctggcatttgcaagcttttatctagctggtaaactgcattgcttcaccccccagggtcgagggaaaagctggcggttctgcgcattcctgtctcccctgctgttcgcagccgtaatcgctctgtcaaggacatgcgactacaaacatcactggcagggtcccttcaagtggtag

SEQ ID NO: 224424 - DNA, 853 bp, Artificial Sequence
  derived and/or modified sequence
gcggccggatggggaaggcggcggcggcggtggcctttggggccgaagtgggcgtgcggctcgcgctgttcgcggccttcctggtgacggagctgctccccccgttccagagactcatccagccggaggagatgtggctctaccggaacccctacgtggaggcggagtatttccccaccaagccgatgtttgttattgcatttctctctccactgtctctgatcttcctggccaaatttctcaagaaggcagacacaagagacagcagacaagcctgcctggctgccagccttgccctggctctgaatggcgtctttaccaacacaataaaactgatcgtagggaggccacgcccagatttcttctaccgctgcttccctgatgggctagcccattctgacttgatgtgtacaggggataaggacgtggtgaatgagggccgaaagagcttccccagtggacattcttcctttgcatttgctggtctggcctttgcgtccttctacctggcagggaagttacactgcttcacaccacaaggccgtgggaaatcttggaggttctgtgcctttctgtcacctctactttttgcagctgtgattgcactgtcccgcacatgtgactacaagcatcactggcaaggaccctttaaatggtgaaaatgggcagatgaatagcaataagtggacctttgttactcttctgagttagaaaaattctaatttagtacactctgaacaaagcttattatacttacttaagatgtgttttgatttggtgttcagaaagcaacctgacaatgataatactgtaactatgataaaattgagaataaaaagattttatttagaaa

SEQ ID NO: 224425 - protein, 182 aa, Artificial Sequence
  derived and/or modified sequence
MELGELLYNKSEYIETASGNKVSRQSVLCGSQNIVLNGKTIVMNDCIIRGDLANVRVGRHCVVKSRSVIRPPFKKFSKGVAFFPLHIGDHVFIEEDCVVNAAQIGSYVHVGKNCVIGRRCVLKDCCKILDNTVLPPETVVPPFTVFSGCPGLFSGELPECTQELMIDVTKSYYQKFLPLTQV

SEQ ID NO: 224426 - DNA, 549 bp, Artificial Sequence
  derived and/or modified sequence
atggagctgggcgagctgctttacaataaatccgagtacatcgagacagcctccggcaataaggtctctaggcaatctgtgttgtgcggctcacagaatatcgtgctgaacggaaagaccatcgttatgaacgattgtatcatcagaggcgatttagccaacgtgagggtcggacgccactgcgtggtcaaatcccggtctgtgatacgcccacccttcaaaaagttctcaaaaggtgtggccttcttcccacttcacataggagatcatgtatttatcgaagaagactgcgtcgtcaatgcggcccagatcggatcgtatgtgcacgtggggaaaaattgcgtgatcggacggaggtgtgttctcaaggactgctgcaaaatacttgacaatactgtgttgcctccagagacggtagtgccaccctttacagttttctctggctgcccgggactgttcagcggcgagcttccagaatgcacccaggagctaatgattgacgtgacgaaatcatactatcagaaattcctgcccctgacacaggtgtag

SEQ ID NO: 224427 - DNA, 549 bp, Artificial Sequence
  derived and/or modified sequence
atggagctgggggagctgctgtacaacaagtctgagtacatcgagacagccagcggcaacaaggtgtcccggcagagcgtgctgtgtggcagccagaacatcgtgctgaatggcaagaccatcgtgatgaatgactgcatcatccggggggacctggccaacgtgcgggtgggccgccactgtgtggtgaagagccgcagcgtcatccggccccccttcaagaagttcagcaagggcgtggccttcttccccctgcacatcggggaccacgtgttcatcgaggaggactgtgtggtgaatgctgcccagatcggcagctatgtgcacgtgggcaagaactgtgtgattggccgccgctgtgtgctgaaggactgctgcaagatcctggacaacacagtgctgcccccagagaccgtggtgccccccttcaccgtcttcagcggctgccccggcctcttcagcggggagctgcctgaatgtacccaggagctgatgattgatgtgaccaagagctactaccagaagttcctgcccctgacccaggtgtag

SEQ ID NO: 224428 - DNA, 549 bp, Artificial Sequence
  derived and/or modified sequence
atggagctgggcgagctgctgtacaacaagagcgagtacatcgagacagcatccggcaataaagtctctagacagagtgttctctgcggcagtcagaacattgtgctcaacgggaagaccattgtgatgaacgactgcatcatacgtggagacctggcaaatgtgagggtgggaagacactgcgtggtgaagagccgatccgtgataagaccaccattcaagaagttcagcaagggggtagcatttttccctctgcacatcggtgatcatgtctttatcgaggaggattgtgtggtgaatgctgcccagatcggaagttatgtccacgtgggtaagaattgcgtcatagggcgcaggtgtgtgctcaaggattgctgcaagatactggacaatactgtactaccacctgaaactgtagtgcccccattcacggtattctccggctgtccaggcctgttctctggtgaattgccggagtgcacccaagaacttatgatcgatgtgaccaagtcctactatcagaagtttcttcctttaactcaggtgtag

SEQ ID NO: 224429 - DNA, 549 bp, Artificial Sequence
  derived and/or modified sequence
atggagctgggcgagctcttatataacaagagtgaatacatcgagaccgccagcggaaataaggtttcccgacaatctgttctctgcggatctcaaaatatcgtactcaatgggaaaactatcgttatgaacgactgtatcatcaggggggacttggcaaacgtcagagtcggcagacactgcgtggtgaaaagcagaagtgtaatcagaccacccttcaaaaaattctccaaaggcgttgccttttttcctctgcacataggggaccacgtgtttattgaagaggattgcgtggttaacgccgctcaaataggctcctatgttcatgtgggaaagaactgcgttattggcaggcgctgtgtgttaaaggactgctgtaagattctggacaatacagtgctcccccctgagacagtggtgcccccattcactgtgtttagcggctgccctggactgttcagcggggagctgcctgaatgcactcaggaactgatgatagatgtcacaaaaagctattaccagaaatttctcccgctcactcaggtatag

SEQ ID NO: 224430 - DNA, 549 bp, Artificial Sequence
  derived and/or modified sequence
atggagctgggcgagctgctgtacaacaagagcgagtacatcgagaccgccagcggcaacaaggtgagcagacagagcgtgctgtgcggcagccagaacatcgtgctgaacggcaagaccatcgtgatgaacgactgcatcatcagaggcgacctggccaacgtgagagtgggcagacactgcgtggtgaagagcagaagcgtgatcagaccccccttcaagaagttcagcaagggcgtggccttcttccccctgcacatcggcgaccacgtgttcatcgaggaggactgcgtggtgaacgccgcccagatcggcagctacgtgcacgtgggcaagaactgcgtgatcggcagaagatgcgtgctgaaggactgctgcaagatcctggacaacaccgtgctgccccccgagaccgtggtgccccccttcaccgtgttcagcggctgccccggcctgttcagcggcgagctgcccgagtgcacccaggagctgatgatcgacgtgaccaagagctactaccagaagttcctgcccctgacccaggtgtag

SEQ ID NO: 224431 - DNA, 3430 bp, Artificial Sequence
  derived and/or modified sequence
gaggccgcctaaaggagagccgcgctgtcgatgagtcccagtgggccacctggagcggaagtggaggagcggccggaagtagccggaatctctgaaagactgaccgactgactctgacaggatccggggctgagggaaggaggcggcggccatggagttgggcgagctgctctacaacaagtctgagtacatcgagacggcatctgggaacaaagtcagtcgccagtcagtgttgtgtggaagccagaacatcgttctcaatggcaagaccattgtgatgaatgactgtattatccgaggggatctggcaaatgtaagagttggacgtcattgtgttgtgaaaagtcgtagtgtcataaggccaccattcaagaagttcagcaaaggtgttgcattctttcctttacatattggagaccatgtctttattgaggaagattgtgtggtcaacgcagcacagattggttcctatgttcatgttgggaagaactgtgtgattgggcgccgatgtgtgttgaaagactgctgcaaaattcttgacaacacagtattacctccagaaactgtggttccaccattcactgtcttctcaggctgcccaggactcttctcaggggagctcccggagtgcactcaggagctgatgattgacgtcaccaagagctactaccagaagtttttgcccctgacgcaagtctagcatctctgcctcatgtcttgaatctgcttgagctctaagatgaacctggggacaaagtgagccagtcagcacctacaaagagcttttgtgtctttgacatctaccaccctcctccttttaaaaaatttctttagaatttctcaatcttcaaggctctaagtgcttaagaattcactaacagacagaccatctggaggagctgtcttcaaatgctgtgcttacaccttatctatgaacagtcactttgtaccattatctgtggaacacagaatcatctgttcccaacactccagccccttggtcctgtggatggctggatcccgcctgaaacggacctgcagagcagcagcacccttccggtgtggaggctatgtagctggtgcgctgctcacggccattcactgcccatgctgagcgcctctcacacaggtaatgcccagcttttctgctgctaacacatttggccagttgttgcagttgctcatcatcttgggaaaggtgtttgtgacttttcagagcccagattcctgttgtctattaaaacttgaagggaggggtgaatagtgtttctctcttcttcccaaaatgaccttagctgtcctaggatagttagtaaaagactttttagcattttgacctagggcctttggctttcactaaaagtggggacctcagtatcccagattgtaattttgccaagtgttagatttgagtctctcatgtggatgcattagtcaggtggttactccttgcttcaaggtacttaccttatttcattgaagacaccgcatttgtgaactcttgcttcctggcctagaaccattcagcctaccctgtatttgccataaactccacaattcacaccaaaatgtctgtacttagagctaattcgcatatatacaggaagggctcttagaatcagtttgtgggcacagagcctcaggagtaaatgaagttactagggctgttcttaccatctccttctggccaaatagcacaacatttcctcgttctgctctgacctcttagcttagaaggaagattcagaagtgaggggctaagaaggttgtccttgcctaatgctctgatctgtaagtgaatagggcagaacagttcagccttgaggttagaatttagcaggagctatcctgacttaatatccagttgtggggtttgcaaaacaaaacagctgtatgtaatcattgccactagttccatctagaactcctttctagtttgttatttttaaaatgtttatacataaaaccaccaaaatacatagcttcgacaagatggaagtttatttctctctcccataacagtgcagtgatagtcagctggtccaggccaggcaaggggctggtccatgatgtcatcaggcacccaggttcctactgtcttgccatgtggccacagttagcaacaaaggaggctgtaaatttagtttctacttgggcagccaaaactctgaggaaggagattctgctagtaaaaaggagtgggggaagaatggccattgggagacaacaagcagactcaaccaggcctctttgttggcttcctttcctcctgctgcacatgagccttcgccgtgcatttggagccatgacagctgatagctccagacctgcatcctcctagcttgggggctctgaatgaaaggtttcttcccttccagttcgaatttggaaactcccaaagttctcaatggtttgttgtgagttccatgtcctcttggatcagtcactgtggccatgcatgtttggccacatgattaatccagtctgggtcatgaccttttcttcatccaaaacaaggtgatgggaagacaaaaacaatagctactacaaacaataggagtttataattatgtgctgatgtattcgaagatgtgttgacagtcgtgagtgtgtatcctaggaaaggcgagctggactctgtctccatggtggctctcaccccagggacctaggaacagcctgtcaccacacaattacttttataaccctggagatgaaaatctccttgtcctcaaaatacttccagaagaacaaccagatgggaaggaccttggttgggactctttccagttcacttggggcagagggaatttaatggctcacgtagctgaaaaggatgggctagattgggcttcaggctgcatcccaggactccaaacagggatctgtctctttggctctcagctctgctttcatttgagttggctttattcttgggcttcacagtgtggccccacagcaccagttattgataaaaagagctcccctttgctgacagaactgctggatttggttctcattggtccagacgaggaaggtatccagcctcaagtcatcattgtggccaggaagatggaatacaccaaatggacaggcctggcatgtacccacagagactgagagttggtgctggtggttgtggtggcagatgatattacctgaagaagggacgaatgggtgctgggcaggacaaagcatcagctgtccagttcaggcctctcctctttccctggtgtcttcattttcctccgtctccctgctgtcccttaccctctgcccaatctctcattactcctggtcttgggagttgccttctgaggatactccactgggggtacctgagcctggattagagggcagggggaggatattgcctagccaaagtgggtgttcaataaagaaccatttggagatggtcttctgtctggaa

SEQ ID NO: 224432 - protein, 543 aa, Artificial Sequence
  derived and/or modified sequence
MRKPAAGFLPSLLKVLLLPLAPAAAQDSTQASTPGSPLSPTEYERFFALLTPTWKAETTCRLRATHGCRNPTLVQLDQYENHGLVPDGAVCSNLPYASWFESFCQFTHYRCSNHVYYAKRVLCSQPVSILSPNTLKEIEASAEVSPTTMTSPISPHFTVTERQTFQPWPERLSNNVEELLQSSLSLGGQEQAPEHKQEQGVEHRQEPTQEHKQEEGQKQEEQEEEQEEEGKQEEGQGTKEGREAVSQLQTDSEPKFHSESLSSNPSSFAPRVREVESTPMIMENIQELIRSAQEIDEMNEIYDENSYWRNQNPGSLLQLPHTEALLVLCYSIVENTCIITPTAKAWKYMEEEILGFGKSVCDSLGRRHMSTCALCDFCSLKLEQCHSEASLQRQQCDTSHKTPFVSPLLASQSLSIGNQVGSPESGRFYGLDLYGGLHMDFWCARLATKGCEDVRVSGWLQTEFLSFQDGDFPTKICDTDYIQYPNYCSFKSQQCLMRNRNRKVSRMRCLQNETYSALSPGKSEDVVLRWSQEFSTLTLGQFG

SEQ ID NO: 224433 - DNA, 1632 bp, Artificial Sequence
  derived and/or modified sequence
atgagaaaacccgcggccggatttctgccctctctccttaaagttctccttctacccctggcccctgcagccgctcaggacagcacgcaggctagtactcccggatcacctttatctcctaccgaatacgagaggttttttgccctgttgacccctacctggaaggctgaaactacttgtagactgcgagcaacccatggatgcagaaaccccacactggtccagctggaccaatacgagaatcatgggcttgtgccggatggtgccgtctgtagtaacttgccctacgcaagctggttcgagtccttttgccagttcacccattatcggtgctccaatcatgtgtattatgccaagagagtcctctgtagtcagccagtttccatactttcaccaaacactctgaaagaaatcgaagcctccgccgaggtgagtcccaccaccatgacctcacccatctcacctcactttacagtgaccgagagacagacctttcagccatggcccgaaaggttgtcgaacaatgttgaagagttgctccaaagtagcctgagcctcggcggccaagaacaggcacctgaacacaaacaggaacagggtgtcgaacatcgtcaggagcccacccaggaacacaagcaggaggagggtcagaagcaggaagaacaggaagaagaacaggaggaagaaggaaagcaagaagaagggcaggggacaaaggagggacgggaggctgtgagccagcttcagaccgactctgagccaaagtttcacagcgagagcttgagcagcaatccgtctagtttcgctccgcgggtcagggaggttgagagtacccccatgattatggagaatatccaggaattgattagaagtgcgcaggagatcgacgagatgaacgagatctacgatgagaatagctactggagaaatcagaatcctggaagcctcttgcaactacctcacacagaagctctgctcgtcctctgctattccatagtggagaatacatgcatcatcaccccaactgctaaagcctggaagtatatggaagaggagattctcggttttggaaaaagcgtctgcgactccctcggccggcgtcacatgtctacgtgtgctctgtgcgacttctgtagcctgaagttggagcagtgtcactcagaagcttccctgcagcggcagcaatgtgacaccagtcataagaccccctttgttagccctttgctagcatcccagagcctcagcatcggaaatcaagttgggtcacccgagtctggacggttctacggactggacctttacggtgggctccacatggatttctggtgtgcgaggttggccactaagggctgcgaggatgtccgcgttagcggctggctccagacagagttcctctcattccaggatggggacttcccaaccaagatctgtgataccgactatatccagtacccaaactattgcagctttaagtcccagcagtgcctaatgagaaaccgcaaccgcaaagtctcccgcatgagatgtctacagaacgaaacgtactcagctctgagtcccggaaaaagtgaagatgtggtgttacgatggtctcaggaatttagcaccctgaccctggggcaatttggttag

SEQ ID NO: 224434 - DNA, 1632 bp, Artificial Sequence
  derived and/or modified sequence
atgaggaagccagctgctggcttcctgcccagcctgctgaaggtgctgctgctgcccctggccccagctgctgcccaggacagcacccaggccagcaccccaggcagccccctgagccccacagaatatgagcgcttctttgccctgctgacccccacctggaaggccgagaccacctgccgcctgcgggccacccacggctgcaggaaccccaccctggtgcagctggaccagtatgagaaccacggcctggtgcctgatggagctgtgtgcagcaacctgccctatgcctcctggtttgagagcttctgccagttcacccactaccgctgcagcaaccacgtgtactatgccaagagggtgctgtgcagccagcctgtgtccatcctgagccccaacaccctgaaggagattgaggccagcgctgaggtgagccccaccaccatgaccagccccatcagcccccacttcaccgtgacagagcggcagaccttccagccctggccagagcggctgagcaacaacgtggaggagctgctgcagagcagcctgagcctgggcggccaggagcaggcccctgagcacaagcaggagcagggcgtggagcaccggcaggagcccacccaggagcacaagcaggaggagggccagaagcaggaggagcaggaggaggagcaggaggaggagggcaagcaggaggagggccagggcaccaaggagggccgggaggccgtgtcccagctgcagacagacagcgagcccaagttccacagcgagagcctgagcagcaaccccagcagctttgccccccgggtgcgggaggtggagagcacccccatgatcatggagaacatccaggagctgatccgcagcgcccaggagattgatgagatgaatgagatctatgatgagaacagctactggaggaaccagaaccctggcagcctgctgcagctgccccacacagaggccctgctggtgctgtgctacagcatcgtggagaacacctgcatcatcacccccacagccaaggcctggaagtacatggaggaggagatcctgggctttgggaagtctgtgtgtgacagcctgggccgccgccacatgagcacctgtgccctgtgtgacttctgcagcctgaagctggagcagtgccacagcgaggccagcctgcagaggcagcagtgtgacaccagccacaagaccccatttgtgagccccctgctggccagccagagcctgagcatcggcaaccaggtgggcagccctgagagcggccgcttctacggcctggacctgtatggaggcctgcacatggacttctggtgtgcccggctggccaccaagggctgtgaagatgtgcgggtgtctggctggctgcagacagagttcctgtccttccaggatggagacttccccaccaagatctgtgacacagactacatccagtaccccaactactgcagcttcaagagccagcagtgcctgatgaggaacagaaacaggaaggtgtccaggatgcgctgcctgcagaatgagacctacagcgccctgagccctgggaagtcagaagatgtggtgctgcgctggagccaggagttcagcaccctgaccctgggccagtttggatag

SEQ ID NO: 224435 - DNA, 1632 bp, Artificial Sequence
  derived and/or modified sequence
atgcggaagcccgccgccggcttcctgcccagcctgctgaaggtgctgctgctgccccttgctccagccgccgcccaggacagcacccaggccagcactcctggctccccactcagcccaaccgagtatgagagattctttgcactgcttacgcctacttggaaagcggaaacaacttgtagactgagggctactcacggctgtcggaatcccaccttggtccaactagatcaatacgaaaaccacggcctcgttcccgacggcgcagtgtgtagcaacctgccctatgcctcttggttcgaatccttctgccagttcactcactatcgctgttcaaatcacgtttactatgccaaacgagtgttgtgttcccagcccgtaagtatcctgtcacctaacaccctaaaggagatcgaggcctctgccgaagtgtcaccaacaaccatgaccagcccgatctcgccacacttcactgttacggagaggcagacatttcagccctggccagagcgactgtctaataacgttgaagagctgctgcagagcagcctctccctcggcggccaggagcaggcgcccgaacacaagcaggaacaaggcgttgaacatagacaagagcccactcaggagcacaaacaagaagagggccagaagcaagaggagcaggaggaggagcaagaagaggaagggaagcaggaggaaggtcaggggacgaaagaggggagggaagctgtcagccagttacaaaccgactccgagccaaagttccacagcgaatcccttagttctaaccccagctccttcgccccccgtgtgagagaagtggaatcgacacccatgatcatggaaaatatccaggagctaatccggagcgcgcaagaaatcgacgaaatgaacgagatttacgacgagaactcttattggcgcaatcagaaccctggctccctcctccagctgccacacacagaggccctgctggtgctttgttactccatcgtcgagaacacatgtatcatcaccccgactgctaaggcctggaaatatatggaagaagaaatcctgggatttggaaagtcggtctgcgactccttaggtagaaggcacatgagtacttgtgccctgtgcgatttttgtagcctgaaattggaacagtgccacagcgaagcatcccttcagcgacagcagtgtgatacttcccataaaacacccttcgtgtctcccctgctggcatctcaatcactctccatcggaaatcaggtcggctccccagaaagcgggcgcttttacggcctggacctgtacggtggactccacatggacttttggtgtgcacgactcgctaccaaaggatgcgaggatgtaagagtgagcggctggctgcagaccgaatttttatctttccaggatggagatttccccacaaaaatctgcgacactgactatatccagtacccaaactattgttcctttaaaagtcagcagtgtctcatgcgtaaccggaacagaaaagtcagccggatgcggtgccttcagaacgaaacctactcggcactatctcctggcaagagcgaggatgtggtgttaagatggtctcaggaatttagcactcttaccctgggccagtttggttag

SEQ ID NO: 224436 - DNA, 1632 bp, Artificial Sequence
  derived and/or modified sequence
atgagaaagccagcagcaggctttctcccctcccttcttaaggtgctgctgctacctctagcacctgcggctgcccaggattccacccaggccagtacccccggatccccactctcacctaccgagtatgagcggtttttcgccttactcaccccaacctggaaagccgagactacatgccgactgcgagctacacatggatgccgaaaccccaccctggtgcagctggaccagtatgagaatcacgggctagtcccagacggcgctgtgtgttcaaatctgccatacgcttcttggtttgagtctttttgccaatttacacattaccggtgctcaaatcacgtgtactacgcaaaaagggtgctctgctcccaacctgtgagtatcttgtcaccaaacacgctgaaggaaattgaggctagtgccgaggtaagtcccactaccatgacttctcccatttccccgcactttaccgttaccgagcggcagacctttcagccctggccagagaggctgagcaataacgtggaagagctgcttcaatcaagtctttccctgggaggccaggaacaggcccctgagcacaaacaagagcagggcgtcgagcaccgccaggaacctacgcaggagcacaagcaggaggagggccagaagcaagaagaacaggaagaggagcaggaggaggagggaaaacaagaggaaggacagggtactaaagagggccgagaggcggtatcacaattgcagaccgatagtgaaccgaagtttcactcggaatctcttagttctaacccctcatcattcgctccgagagtgcgcgaggtcgaatctacacctatgattatggagaatattcaagaactcattcggagcgcgcaggagatagatgagatgaatgaaatctatgatgagaactcatactggaggaatcaaaatcccggaagcctgctgcagctgcctcataccgaagccctgttagtgctgtgctactcaatagtcgagaacacttgcatcattactcccaccgcgaaggcttggaagtacatggaggaggagattctcggttttgggaagtccgtatgtgattctcttgggcgtcgccacatgtcaacgtgtgcactgtgtgacttttgcagcctgaaactggagcaatgccatagtgaagccagcctgcagcgacagcaatgcgatacctcacacaaaacacctttcgtcagtcccctactggccagccaaagtttgagcattggaaaccaggtcggtagccccgaatcaggcaggttctatgggctggacttgtatggcggtctgcatatggatttctggtgcgcacgcctcgccacaaaggggtgtgaggacgtgagagtcagtgggtggctgcagaccgagtttctctctttccaggatggcgattttccgacgaaaatatgtgacacagattatatacagtatcccaattactgtagttttaagtcacaacagtgtctgatgaggaacaggaatcggaaggtgagtagaatgcgctgcctccagaacgagacttactccgccctgtcacctggcaagtccgaggacgtagtgcttcgatggagccaggagttctccacccttaccctcggccagttcggttag

SEQ ID NO: 224437 - DNA, 1632 bp, Artificial Sequence
  derived and/or modified sequence
atgagaaaacctgccgccggctttctgcctagtctgctcaaggttctgttactgcctttagcaccagccgctgcacaagactctacacaggcgtccacacccggaagccccctgtccccaaccgaatatgaaagattcttcgcattgctgacaccaacctggaaagcggaaaccacctgccgattgcgagccactcatgggtgccgcaacccaacactggttcagctggaccagtacgaaaatcatggactagtgcctgacggggcagtctgcagtaacctcccttacgcctcttggtttgagtccttctgccagtttactcattatcgctgtagtaaccacgtgtattacgcaaagcgggtcttgtgtagccagcctgtgtctatactatcccctaataccctcaaagagatcgaggcttctgccgaagtgtcacccactacaatgacatcacctattagtccgcattttaccgttaccgagcgccagacattccagccctggccagaacggctgagtaacaatgtggaggaattgctgcagtcctcactctcgttaggcgggcaagagcaggcccctgaacacaaacaggagcaaggagtggaacacagacaggagccaactcaggagcacaaacaagaggaggggcagaaacaagaggaacaggaggaggaacaagaggaggaaggtaagcaagaggagggtcaaggaacaaaagagggccgggaagctgtaagtcagctgcaaaccgacagcgagcctaagttccatagcgagtcactgtctagtaatccatcatcttttgccccaagagtgcgcgaggtggagtccacaccaatgatcatggagaacatacaggaactgattcgtagcgcccaggaaatcgatgaaatgaacgaaatatatgacgagaactcttactggaggaatcagaacccaggatcactgctccaactcccgcacaccgaggctctgttagtgctttgctactctatcgtcgagaatacctgcatcatcacaccaactgctaaggcatggaagtacatggaagaagagatacttggttttgggaaatccgtgtgcgattcacttggcaggcggcacatgtccacatgcgccctctgtgatttttgttctcttaaattagagcagtgccattcagaggcctccctgcagcggcaacagtgtgacacctctcataagacacccttcgtttccccgctgctggcgtcccagagcctgagcattggcaatcaggttggctcccctgaatcaggtagattttatggcttggatctctacggcggactgcatatggatttttggtgcgccagactggctaccaaaggctgcgaagacgtgagagtgtctggctggctccagaccgaatttctctctttccaggacggtgatttccccacgaagatatgtgacacggattatatccagtaccctaactattgtagcttcaaaagtcagcagtgtctgatgcggaatcgcaataggaaggtgagcaggatgcggtgccttcagaacgagacttattctgccctgtctcccggcaaatcagaggacgtcgtcttacggtggagccaggaattcagtaccctgaccctggggcagtttggttag

SEQ ID NO: 224438 - DNA, 1632 bp, Artificial Sequence
  derived and/or modified sequence
atgcgcaaacccgcagctggttttctgccctctctgttgaaagtactgttgctgccattggcccccgccgctgcccaggattctacccaagcctctacccccgggagcccactgagtcccaccgaatacgaaagattttttgccctcctcacacccacctggaaagctgaaaccacctgccgactgcgcgctactcacggatgcagaaatcctacattagtgcagcttgaccaatacgagaaccacggattggtccctgatggagcagtttgtagcaacctgccctacgctagctggttcgaatctttctgtcagtttacccattatcgatgcagtaatcatgtgtactacgctaagcgggttctgtgtagtcagccggtctcaattctttcccccaatacgctcaaggagatcgaggccagcgccgaagtttctccaactaccatgacaagtcccataagcccccacttcaccgttaccgaaagacagacattccaaccatggcctgaacgactgtctaataatgtcgaagagctgctgcagtcttctttgtccctgggtgggcaggaacaggcacctgagcataaacaggaacaaggggtagaacacagacaggaacctacacaggagcataagcaggaggaaggccagaagcaggaagaacaagaggaggagcaggaagaagagggaaaacaggaagaaggacagggcacaaaggaagggagggaggccgtgagtcaacttcagacggacagtgagccgaagttccatagcgagtctctgtcatcaaacccatcttcctttgcaccccgtgtgcgggaagtagagtccacgcccatgatcatggaaaatattcaggagcttataagaagtgcacaggagattgatgaaatgaacgaaatttacgacgaaaactcctactggagaaatcagaacccggggtcacttttacaactgccccatactgaagctctactggtgctttgttattcaatcgtcgaaaacacgtgtatcattaccccaaccgccaaagcttggaaatacatggaagaagagatattgggatttggtaaaagcgtctgcgactccctaggaagacgtcacatgtccacatgcgccttgtgcgatttttgctctctcaagctcgagcaatgccattccgaagcttccctccagaggcagcagtgcgatacctcacacaaaactccatttgtctctcccctactggcaagtcagtctctctctatcggtaaccaagtgggttcaccagaatctggacgcttctatggccttgatctttacgggggacttcatatggacttttggtgcgcaagactcgcaacaaaaggctgtgaggacgtcagagtgagcggatggctgcagaccgaatttcttagctttcaggacggagatttcccgaccaagatttgcgacaccgactatatccagtaccctaactactgctctttcaagtcccagcagtgccttatgcgcaacaggaataggaaagtttctcgaatgagatgtttacaaaatgaaacttatagtgctctgtctccgggcaagtctgaagatgttgttctccgctggagccaggagtttagtacattgacactcggccaattcggatag

SEQ ID NO: 224439 - DNA, 1632 bp, Artificial Sequence
  derived and/or modified sequence
atgagaaagcccgccgccggcttcctgcccagcctgctgaaggtgctgctgctgcccctggcccccgccgccgcccaggacagcacccaggccagcacccccggcagccccctgagccccaccgagtacgagagattcttcgccctgctgacccccacctggaaggccgagaccacctgcagactgagagccacccacggctgcagaaaccccaccctggtgcagctggaccagtacgagaaccacggcctggtgcccgacggcgccgtgtgcagcaacctgccctacgccagctggttcgagagcttctgccagttcacccactacagatgcagcaaccacgtgtactacgccaagagagtgctgtgcagccagcccgtgagcatcctgagccccaacaccctgaaggagatcgaggccagcgccgaggtgagccccaccaccatgaccagccccatcagcccccacttcaccgtgaccgagagacagaccttccagccctggcccgagagactgagcaacaacgtggaggagctgctgcagagcagcctgagcctgggcggccaggagcaggcccccgagcacaagcaggagcagggcgtggagcacagacaggagcccacccaggagcacaagcaggaggagggccagaagcaggaggagcaggaggaggagcaggaggaggagggcaagcaggaggagggccagggcaccaaggagggcagagaggccgtgagccagctgcagaccgacagcgagcccaagttccacagcgagagcctgagcagcaaccccagcagcttcgcccccagagtgagagaggtggagagcacccccatgatcatggagaacatccaggagctgatcagaagcgcccaggagatcgacgagatgaacgagatctacgacgagaacagctactggagaaaccagaaccccggcagcctgctgcagctgccccacaccgaggccctgctggtgctgtgctacagcatcgtggagaacacctgcatcatcacccccaccgccaaggcctggaagtacatggaggaggagatcctgggcttcggcaagagcgtgtgcgacagcctgggcagaagacacatgagcacctgcgccctgtgcgacttctgcagcctgaagctggagcagtgccacagcgaggccagcctgcagagacagcagtgcgacaccagccacaagacccccttcgtgagccccctgctggccagccagagcctgagcatcggcaaccaggtgggcagccccgagagcggcagattctacggcctggacctgtacggcggcctgcacatggacttctggtgcgccagactggccaccaagggctgcgaggacgtgagagtgagcggctggctgcagaccgagttcctgagcttccaggacggcgacttccccaccaagatctgcgacaccgactacatccagtaccccaactactgcagcttcaagagccagcagtgcctgatgagaaacagaaacagaaaggtgagcagaatgagatgcctgcagaacgagacctacagcgccctgagccccggcaagagcgaggacgtggtgctgagatggagccaggagttcagcaccctgaccctgggccagttcggctag

SEQ ID NO: 224440 - DNA, 1933 bp, Artificial Sequence
  derived and/or modified sequence
gcgtgcgccccgccccgcgcctgcggctctctctgcggcttggcccgttagaggcggcttgtgtccacgggacgcgggcggatcttctccggccatgaggaagccagccgctggcttccttccctcactcctgaaggtgctgctcctgcctctggcacctgccgcagcccaggattcgactcaggcctccactccaggcagccctctctctcctaccgaatacgaacgcttcttcgcactgctgactccaacctggaaggcagagactacctgccgtctccgtgcaacccacggctgccggaatcccacactcgtccagctggaccaatatgaaaaccacggcttagtgcccgatggtgctgtctgctccaacctcccttatgcctcctggtttgagtctttctgccagttcactcactaccgttgctccaaccacgtctactatgccaagagagtcctgtgttcccagccagtctctattctctcacctaacactctcaaggagatagaagcttcagctgaagtctcacccaccacgatgacctcccccatctcaccccacttcacagtgacagaacgccagaccttccagccctggcctgagaggctcagcaacaacgtggaagagctcctacaatcctccttgtccctgggaggccaggagcaagcgccagagcacaagcaggagcaaggagtggagcacaggcaggagccgacacaagaacacaagcaggaagaggggcagaaacaggaagagcaagaagaggaacaggaagaggagggaaagcaggaagaaggacaggggactaaggagggacgggaggctgtgtctcagctgcagacagactcagagcccaagtttcactctgaatctctatcttctaacccttcctcttttgctccccgggtacgagaagtagagtctactcctatgataatggagaacatccaggagctcattcgatcagcccaggaaatagatgaaatgaatgaaatatatgatgagaactcctactggagaaaccaaaaccctggcagcctcctgcagctgccccacacagaggccttgctggtgctgtgctattcgatcgtggagaatacctgcatcataacccccacagccaaggcctggaagtacatggaggaggagatccttggtttcgggaagtcggtctgtgacagccttgggcggcgacacatgtctacctgtgccctctgtgacttctgctccttgaagctggagcagtgccactcagaggccagcctgcagcggcaacaatgcgacacctcccacaagactccctttgtcagccccttgcttgcctcccagagcctgtccatcggcaaccaggtagggtccccagaatcaggccgcttttacgggctggatttgtacggtgggctccacatggacttctggtgtgcccggcttgccacgaaaggctgtgaagatgtccgagtctctgggtggctccagactgagttccttagcttccaggatggggatttccctaccaagatttgtgacacagactatatccagtacccaaactactgttccttcaaaagccagcagtgtctgatgagaaaccgcaatcggaaggtgtcccgcatgagatgtctgcagaatgagacttacagtgcgctgagccctggcaaaagtgaggacgttgtgcttcgatggagccaggagttcagcaccttgactctaggccagttcggatgagctggcgtctattctgcccacaccccagcccaacctgcccacgttctctattgttttgagaccccattgctttcaggctgccccttctgggtctgttactcggcccctactcacatttccttgggttggagcaacagtcccagagagggccacggtgggagctgcgccctccttaaaagatgactttacataaaatgttgatcttca

SEQ ID NO: 224441 - RNA, 1632 nt, Artificial Sequence
  derived and/or modified sequence
augagaaaaccugccgccggcuuucugccuagucugcucaagguucuguuacugccuuuagcaccagccgcugcacaagacucuacacaggcguccacacccggaagcccccuguccccaaccgaauaugaaagauucuucgcauugcugacaccaaccuggaaagcggaaaccaccugccgauugcgagccacucaugggugccgcaacccaacacugguucagcuggaccaguacgaaaaucauggacuagugccugacggggcagucugcaguaaccucccuuacgccucuugguuugaguccuucugccaguuuacucauuaucgcuguaguaaccacguguauuacgcaaagcgggucuuguguagccagccugugucuauacuauccccuaauacccucaaagagaucgaggcuucugccgaagugucacccacuacaaugacaucaccuauuaguccgcauuuuaccguuaccgagcgccagacauuccagcccuggccagaacggcugaguaacaauguggaggaauugcugcaguccucacucucguuaggcgggcaagagcaggccccugaacacaaacaggagcaaggaguggaacacagacaggagccaacucaggagcacaaacaagaggaggggcagaaacaagaggaacaggaggaggaacaagaggaggaagguaagcaagaggagggucaaggaacaaaagagggccgggaagcuguaagucagcugcaaaccgacagcgagccuaaguuccauagcgagucacugucuaguaauccaucaucuuuugccccaagagugcgcgagguggaguccacaccaaugaucauggagaacauacaggaacugauucguagcgcccaggaaaucgaugaaaugaacgaaauauaugacgagaacucuuacuggaggaaucagaacccaggaucacugcuccaacucccgcacaccgaggcucuguuagugcuuugcuacucuaucgucgagaauaccugcaucaucacaccaacugcuaaggcauggaaguacauggaagaagagauacuugguuuugggaaauccgugugcgauucacuuggcaggcggcacauguccacaugcgcccucugugauuuuuguucucuuaaauuagagcagugccauucagaggccucccugcagcggcaacagugugacaccucucauaagacacccuucguuuccccgcugcuggcgucccagagccugagcauuggcaaucagguuggcuccccugaaucagguagauuuuauggcuuggaucucuacggcggacugcauauggauuuuuggugcgccagacuggcuaccaaaggcugcgaagacgugagagugucuggcuggcuccagaccgaauuucucucuuuccaggacggugauuuccccacgaagauaugugacacggauuauauccaguacccuaacuauuguagcuucaaaagucagcagugucugaugcggaaucgcaauaggaaggugagcaggaugcggugccuucagaacgagacuuauucugcccugucucccggcaaaucagaggacgucgucuuacgguggagccaggaauucaguacccugacccuggggcaguuugguuag

SEQ ID NO: 224442 - RNA, 1632 nt, Artificial Sequence
  derived and/or modified sequence
augcgcaaacccgcagcugguuuucugcccucucuguugaaaguacuguugcugccauuggcccccgccgcugcccaggauucuacccaagccucuacccccgggagcccacugagucccaccgaauacgaaagauuuuuugcccuccucacacccaccuggaaagcugaaaccaccugccgacugcgcgcuacucacggaugcagaaauccuacauuagugcagcuugaccaauacgagaaccacggauuggucccugauggagcaguuuguagcaaccugcccuacgcuagcugguucgaaucuuucugucaguuuacccauuaucgaugcaguaaucauguguacuacgcuaagcggguucuguguagucagccggucucaauucuuucccccaauacgcucaaggagaucgaggccagcgccgaaguuucuccaacuaccaugacaagucccauaagcccccacuucaccguuaccgaaagacagacauuccaaccauggccugaacgacugucuaauaaugucgaagagcugcugcagucuucuuugucccugggugggcaggaacaggcaccugagcauaaacaggaacaagggguagaacacagacaggaaccuacacaggagcauaagcaggaggaaggccagaagcaggaagaacaagaggaggagcaggaagaagagggaaaacaggaagaaggacagggcacaaaggaagggagggaggccgugagucaacuucagacggacagugagccgaaguuccauagcgagucucugucaucaaacccaucuuccuuugcaccccgugugcgggaaguagaguccacgcccaugaucauggaaaauauucaggagcuuauaagaagugcacaggagauugaugaaaugaacgaaauuuacgacgaaaacuccuacuggagaaaucagaacccggggucacuuuuacaacugccccauacugaagcucuacuggugcuuuguuauucaaucgucgaaaacacguguaucauuaccccaaccgccaaagcuuggaaauacauggaagaagagauauugggauuugguaaaagcgucugcgacucccuaggaagacgucacauguccacaugcgccuugugcgauuuuugcucucucaagcucgagcaaugccauuccgaagcuucccuccagaggcagcagugcgauaccucacacaaaacuccauuugucucuccccuacuggcaagucagucucucucuaucgguaaccaaguggguucaccagaaucuggacgcuucuauggccuugaucuuuacgggggacuucauauggacuuuuggugcgcaagacucgcaacaaaaggcugugaggacgucagagugagcggauggcugcagaccgaauuucuuagcuuucaggacggagauuucccgaccaagauuugcgacaccgacuauauccaguacccuaacuacugcucuuucaagucccagcagugccuuaugcgcaacaggaauaggaaaguuucucgaaugagauguuuacaaaaugaaacuuauagugcucugucuccgggcaagucugaagauguuguucuccgcuggagccaggaguuuaguacauugacacucggccaauucggauag

SEQ ID NO: 224443 - protein, 641 aa, Artificial Sequence
  derived and/or modified sequence
MNWAAFGGSEFFIPEGIQIDSRCPLSRNITEWYHYYGIAVKESSQYYDVMYSKKGAAWVSETGKKEVSKQTVAYSPRSKLGTLLPEFPNVKDLNLPASLPEEKVSTFIMMYRTHCQRILDTVIRANFDEVQSFLLHFWQGMPPHMLPVLGSSTVVNIVGVCDSILYKAISGVLMPTVLQALPDSLTQVIRKFAKQLDEWLKVALHDLPENLRNIKFELSRRFSQILRRQTSLNHLCQASRTVIHSADITFQMLEDWRNVDLNSITKQTLYTMEDSRDEHRKLITQLYQEFDHLLEEQSPIESYIEWLDTMVDRCVVKVAAKRQGSLKKVAQQFLLMWSCFGTRVIRDMTLHSAPSFGSFHLIHLMFDDYVLYLLESLHCQERANELMRAMKGEGSTAEVREEIILTEAAAPTPSPVPSFSPAKSATSVEVPPPSSPVSNPSPEYTGLSTTGAMQSYTWSLTYTVTTAAGSPAENSQQLPCMRNTHVPSSSVTHRIPVYPHREEHGYTGSYNYGSYGNQHPHPMQSQYPALPHDTAISGPLHYAPYHRSSAQYPFNSPTSRMEPCLMSSTPRLHPTPVTPRWPEVPSANTCYTSPSVHSARYGNSSDMYTPLTTRRNSEYEHMQHFPGFAYINGEASTGWAK

SEQ ID NO: 224444 - DNA, 3378 bp, Artificial Sequence
  derived and/or modified sequence
agagtgagttccaggtgggaaggcagttatgacagttgagaagtagtagaagacacggaaggcacagaaggcagacttcgctcagcacaaagaattttctgataaccatactggcaaaatgaactgggctgccttcggagggtctgaattcttcatcccagaaggcattcagatagattcgagatgcccactaagcagaaatatcacggaatggtaccattactatggcattgcagtgaaagaaagctcccaatattatgatgtgatgtattccaagaaaggagctgcctgggtgagtgagacgggcaagaaagaagtgagcaaacagacagtggcatattcaccccggtccaaactcggaacactgctgccagaatttcccaatgtcaaagatctaaatctgccagccagcctgcctgaggagaaggtttctacctttattatgatgtacagaacacactgtcagagaatactggacactgtaataagagccaactttgatgaggttcaaagtttccttctgcacttttggcaaggaatgccgccccacatgctgcctgtgctgggctcctccacggtggtgaacattgtcggcgtgtgtgactccatcctctacaaagctatctccggggtgctgatgcccactgtgctgcaggcattacctgacagcttaactcaggtgattcgaaagtttgccaagcaactggatgagtggctaaaagtggctctccacgacctcccagaaaacttgcgaaacatcaagttcgaattgtcgagaaggttctcccaaattctgagacggcaaacatcactaaatcatctctgccaggcatctcgaacagtgatccacagtgcagacatcacgttccaaatgctggaagactggaggaacgtggacctgaacagcatcaccaagcaaaccctttacaccatggaagactctcgcgatgagcaccggaaactcatcacccaattatatcaggagtttgaccatctcttggaggagcagtctcccatcgagtcctacattgagtggctggataccatggttgaccgctgtgttgtgaaggtggctgccaagagacaagggtccttgaagaaagtggcccagcagttcctcttgatgtggtcctgtttcggcacaagggtgatccgggacatgaccttgcacagcgcccccagcttcgggtcttttcacctaattcacttaatgtttgatgactacgtgctctacctgttagaatctctgcactgtcaggagcgggccaatgagctcatgcgagccatgaagggagaaggaagcactgcagaagtccgagaagagatcatcttgacagaggctgccgcaccaaccccttcaccagtgccatcgttttctccagcaaaatctgccacatctgtggaagtgccacctccctcttcccctgttagcaatccttcccctgagtacactggcctcagcactacaggagcaatgcagtcttacacgtggtctctaacatacacagtgacgacggctgctgggtccccagctgagaactcccaacagctgccctgtatgaggaacactcatgtgccttcttcctccgtcacacacaggataccagtttatccccacagagaggaacatggatacacgggaagctataactatgggagctatggcaaccagcatcctcaccccatgcagagccagtatccggccctccctcatgacacagctatctctgggccactccactatgccccttaccacaggagctctgcacagtacccttttaatagccccacttcccggatggaaccttgtttgatgagcagtactcccagactgcatcctaccccagtcactccccgctggccagaggtgccctcagccaacacgtgctacacaagcccgtctgtgcattctgcgaggtacggaaactctagtgacatgtatacacctctgacaacgcgcaggaattctgaatatgagcacatgcaacactttcctggctttgcttacatcaacggagaggcctctacaggatgggctaaatgactgctatcataggcatccatatttaatattaataataataattaataataataataaacccaacacccatcccccagaagactttatctctatacattgtaactcatgggctattcctaagtgcccattttcctaatgaacatgaggatgggatcaatgtgggatgaataaactttagttcagaaacaggacttactaaaagtcagtgggactgggtttctgtagccaagccagacttgactgtttctgtagagcactatctcgggcaggccattctgtgccttttccctctgttccatgactttgctttgtgttggcaaccacttctagtaagctactgattttcctgttgacaaaatctctttagtcttgaaggatggatactggagacagaatctggtttgtgttcttggatgggcacataatttaccaagagcattcaccttgccatctgtcttgtcattgtactgtacaaggaacagccctcagacgtgttctgcacatcccttcttcctggtggtaccatccctatttcctggagcaccagggctaaatggggagctatctggaaactctagattttctgtcatacccacatctgtcacagtacctgcattgtcttggaatgtaagcactgtcttgagggaaggaagaggtctgttctgtattgccttaagttgattgaggtttgtaggagactggttcttctacatacaaggatttgtcttaagtttgcacaatggctagtgtcagcaaaaggcaggagagggtttttgttttttttttaagttctatgagaatgtggatttatggcattgagtatcacactcagctctgctgtgttaactttgtgaaactggatggaacaaactttaacttaccaagcaccaagtgtgaaagtgactttcacggttccttcataaaactataataatatccgacactttgatagaaaaaaattcaaagctgtgcctttgagcctatactatactgtgtatgtgtggaaataaaaatgtattgtacttttggagaattttttgtaggcatttttctgtcagatttgtagtaatttgtgaggtttgttagagattaatataggttttctttctgtattataaaatgcaccaagcaattatggtggacctattaccctatgggtaagaaataaatggaaatatgacatcggatgtttcagcaactgttctgtaaataaaatctttgatcacaccactcagtgtgataattgtgtctacagctaaaatggaaatagttttatctgtacagttgtgcaagatatgaatggtttcacactcaaataaaaaatattgaaacga

SEQ ID NO: 224445 - DNA, 1926 bp, Artificial Sequence
  derived and/or modified sequence
atgaattgggcagctttcggagggtccgagttctttatacctgagggcattcagattgatagcagatgcccactgagccgcaatattaccgaatggtaccattactatgggatcgctgttaaggaatcctctcagtactatgatgtcatgtacagcaaaaagggcgccgcatgggtgagcgagacaggcaagaaagaagttagtaagcaaaccgttgcttatagccccagaagtaagctcgggactctcctacctgagtttcctaatgtgaaagacctgaatctgcctgcgtccttgcctgaggaaaaggtgtcaaccttcatcatgatgtacaggacacattgtcaaaggatcctggatacagtgattagggccaactttgatgaggtccaaagctttctcctgcacttctggcagggcatgcctccacacatgttgcccgtcttaggttcttccactgtggtgaacatcgtgggagtctgcgatagtattctgtacaaggctattagtggggtcctgatgcccacagtcctgcaggcccttcccgattctcttacccaggtaattaggaagttcgccaagcagcttgatgagtggctgaaggtggcgctgcatgatcttcctgaaaacctccgaaatatcaaatttgaactcagcagaagattcagccagattctaagacgacaaacatctctcaaccacttgtgtcaggctagcagaacagtcattcactccgccgatattactttccaaatgctggaggattggcgcaatgtagacctgaattctatcacaaaacaaacgctttatactatggaggattcgcgcgacgaacacaggaagctcataactcaactctatcaagagtttgaccacttattagaagagcagtcccctattgagtcttacattgagtggctggataccatggttgatcggtgcgtggtgaaagttgctgcgaaaaggcagggctccctgaagaaagtcgctcagcagttcctcttaatgtggtcttgttttggcacgcgggtgatccgcgacatgaccctgcactcggcccccagctttggaagcttccatctgattcacctgatgttcgacgattatgtgctgtacctgctcgagtccttacattgtcaggaacgcgccaacgaactgatgcgagcaatgaagggcgagggatccactgccgaagtccgggaagaaattattctgaccgaggccgccgctcccaccccaagccccgtgcctagtttcagtcccgctaagagcgccactagtgtggaagtcccccccccctcttctcctgtgtctaacccatctcctgaatacaccgggctgtctacgactggggcaatgcagtcttatacctggtctctaacttacaccgtgacgacagcagccggttcacctgcagaaaattcccaacagctgccatgcatgcggaacactcacgtcccttcatcatcagtgactcatcgcatacccgtctacccccaccgggaagagcatggatacacaggatcatacaattacggctcttatgggaatcaacacccacaccctatgcagtctcagtacccagcactcccccatgacaccgccatctccggcccactgcactatgccccgtaccatcgttcctcagcccagtacccgtttaattcgcctacatccagaatggagccatgtctcatgagtagtaccccacgacttcatcctactcccgtcactcccagatggcccgaggttccaagcgcaaacacatgttatacctctccctctgtacatagtgcccggtacggcaactcaagtgatatgtatacccccttgaccactcggcggaattcagaatatgaacacatgcaacacttcccaggctttgcctacattaacggagaggcgagcacaggctgggctaagtag

SEQ ID NO: 224446 - DNA, 1926 bp, Artificial Sequence
  derived and/or modified sequence
atgaactgggccgccttcggcggcagcgagttcttcatccctgagggcatccagattgacagccgctgccccctgagcaggaacatcacagagtggtaccactactacggcattgctgtgaaggagagcagccagtactatgatgtgatgtacagcaagaagggggccgcctgggtgtctgagaccgggaagaaggaggtgtccaagcagacagtggcctacagccccaggagcaagctgggcaccctgctgcctgagttccccaacgtgaaggacctgaacctgcctgccagcctgcctgaggagaaggtgtccaccttcatcatgatgtaccgcacccactgccagaggatcctggacaccgtcatccgggccaactttgatgaggtgcagagcttcctgctgcacttctggcagggcatgccaccccacatgctgcctgtgctgggcagcagcacagtggtgaacatcgtgggcgtgtgtgacagcatcctgtacaaggccatcagcggcgtgctgatgcccaccgtgctgcaggccctgcctgacagcctgacccaggtgatcaggaagtttgccaagcagctggatgagtggctgaaggtggccctgcatgacctgcctgagaacctgaggaacatcaagtttgagctgagccgccgcttcagccagatcctgcggcggcagaccagcctgaaccacctgtgccaggccagcaggacagtcatccacagcgctgacatcaccttccagatgctggaggactggagaaatgtggacctgaacagcatcaccaagcagaccctgtacaccatggaggacagcagagatgagcacaggaagctgatcacccagctgtaccaggagtttgaccacctgctggaggagcagagccccatcgagagctacatcgagtggctggacaccatggtggacagatgtgtggtgaaggtggccgccaagaggcagggcagcctgaagaaggtggcccagcagttcctgctgatgtggagctgcttcggcaccagggtcatccgggacatgaccctgcacagcgcccccagctttggcagcttccacctgatccacctgatgtttgatgattatgtgctgtacctgctggagagcctgcactgccaggagcgggccaatgagctgatgagggccatgaagggggagggcagcacagctgaggtgcgggaggagatcatcctgacagaggccgccgcccccacccccagccctgtgcccagcttctccccagccaagagcgccacctctgtggaggtgcccccacccagcagccctgtgagcaaccccagccctgagtacacaggcctgagcaccaccggggccatgcagagctacacctggagcctgacctacacagtgaccacagctgctggcagccctgctgagaacagccagcagctgccctgcatgaggaacacccacgtgcccagcagctctgtgacccaccgcatccctgtgtacccccaccgggaggagcacggctacacaggcagctacaactacggcagctatggcaaccagcacccccaccccatgcagagccagtacccagccctgccccatgacacagccatcagcggccccctgcactacgccccctaccacaggagcagcgcccagtaccccttcaacagccccaccagcaggatggagccctgcctgatgagcagcaccccccggctgcaccccacccctgtgaccccccgctggccagaggtgcccagcgccaacacctgctacaccagccccagcgtgcacagcgcccgctatggcaacagcagtgacatgtacacccccctgaccaccaggagaaattctgaatatgagcacatgcagcacttccctggctttgcctacatcaacggggaggccagcacaggctgggccaagtag

SEQ ID NO: 224447 - DNA, 1926 bp, Artificial Sequence
  derived and/or modified sequence
atgaactgggccgccttcggcggcagcgagttcttcatccccgagggcatccagatagacagccgctgtcccctgagtcgaaatataacagagtggtatcactactatggaattgcagtaaaagagagcagtcaatattacgacgtcatgtactccaaaaagggggcagcctgggttagtgaaacgggaaaaaaagaggtctcaaaacagactgtggcctattcaccacggtctaaactgggcaccctcctgccagaattcccaaatgttaaggacctgaacctgccggccagcttaccagaggaaaaggtctcgactttcataatgatgtaccgcactcattgccaacgcatcctggatacggttatcagggccaactttgacgaggtccagtctttccttctgcatttttggcaaggcatgccaccgcacatgttacctgtactgggcagcagcactgtggtgaatatcgtgggcgtgtgcgattcgatactctacaaagctatctcaggggtgcttatgccaacagttctacaggcactgcctgacagcctgacacaggtgattagaaaattcgccaagcagcttgacgaatggcttaaagtggcgcttcatgacctccctgagaatttgcgaaacattaagttcgagttatcaagacgctttagccagattctgcgaaggcagactagccttaatcacctctgtcaggccagcaggacagtgatccattcagcagatattaccttccagatgctggaagattggcggaacgttgacctgaatagtatcacaaagcaaacactgtacacgatggaggacagccgcgacgaacataggaagttaataactcagttgtaccaggagtttgaccatttgctcgaggagcagagcccgattgagagttacatcgaatggctggacacaatggtggatcggtgtgtcgtcaaagtcgccgcgaagcgccaaggctcactcaaaaaggttgcccagcagtttctgctgatgtggagctgctttggtacgagagtgatcagagatatgactctccactccgctcccagctttgggagtttccacttgattcatctcatgttcgacgactatgtgctctatctgctggagtcacttcattgtcaggagcgggctaatgagttgatgcgagcaatgaagggagagggctcgacggccgaggtgagggaggaaattatcttaaccgaagcagcggcaccaaccccgagccctgtgcccagcttttctcccgcaaagtcagccaccagtgtggaagttccccccccaagtagccccgtttctaacccaagccctgaatacacaggcctgagcaccacaggcgccatgcagagttacacctggtcactgacgtacactgttaccactgccgccggaagtcctgcagagaattcgcagcagctaccctgcatgcggaatactcatgtgccctcctccagtgttactcatcgaatccctgtctacccacatagagaggaacatggttacactggctcctataattacggatcatacggaaaccaacacccacaccctatgcaatcccagtaccccgctttgccacacgatactgccatttctggaccgttgcactatgccccataccatcgcagctcagcacaatatccattcaactctcccaccagtcgcatggagccatgcttgatgtcttccactccccgcctgcaccctacacccgtgacacctaggtggccggaagtcccctccgccaatacttgctatacttctccatcagtgcacagcgcaaggtatggcaatagctcagacatgtacacaccgctgaccacaagacgtaactctgaatacgagcatatgcagcattttccaggattcgcctacattaatggcgaggcctcaacaggatgggccaaatag

SEQ ID NO: 224448 - DNA, 1926 bp, Artificial Sequence
  derived and/or modified sequence
atgaactgggctgccttcggaggctcagagttttttataccagagggcatacagatagactctcgatgccctctgtctcgcaacatcacggaatggtaccattactacgggatagccgtgaaagagtcttctcaatattatgacgttatgtactccaaaaagggcgctgcctgggtgtcagagacaggcaagaaggaagtgagcaagcaaactgtcgcttattccccaagaagcaagttaggaaccctgctgcctgaattccccaatgtgaaagacctcaatttacctgccagtttgccggaggagaaagtcagtaccttcatcatgatgtatcgcacgcattgccagcgtattctagacaccgttattagagccaactttgacgaggtccagagcttcctcctgcacttttggcaggggatgcctccacacatgctgcctgtgctaggctcaagcaccgtggtgaacattgtgggagtctgcgactctattctctataaggcaatctccggcgtgttgatgcccaccgtcctgcaggcccttccagactccctcacccaggtgatccgcaagttcgcaaaacaacttgatgagtggctaaaggtggccctgcacgacctgccagagaatctgcgcaacataaaattcgagcttagtaggcgattctcacagatcctcaggagacagacatcgttgaaccacctctgccaagctagtagaactgtaatacattcggccgacatcacttttcagatgctggaagactggcgcaacgtggatctgaactccattaccaagcagaccttgtacaccatggaagattcccgcgatgaacatcgcaaactgatcacccagctgtatcaagaatttgatcatctgctagaggaacagagcccaatcgaatcatacatcgaatggctggataccatggtggatcgctgcgtagtaaaggtggcggctaagcgccagggttccttgaagaaggtagcccagcagttcctgctgatgtggagttgcttcggcacgcgtgttattcgcgatatgacactccatagcgcgccaagcttcggctccttccatctcattcatttgatgttcgacgattacgtactgtatctgctcgaatccttacattgtcaagagagggccaacgagctaatgcgcgctatgaaaggagagggatccacagccgaggtgcgggaagagataattttaactgaagctgccgctcccactcctagcccggtcccctcctttagccctgctaagagcgctacttcggttgaagtgcccccacctagttcgcccgtttctaatcctagccccgaatatacgggcctctccacaacaggagctatgcagtcttacacatggagcctgacttacacagtgacaaccgctgcgggttctcccgcagaaaatagtcagcaattaccctgcatgagaaatactcacgtcccaagctcttccgttacacataggattcctgtctacccgcatcgagaagagcacgggtacacgggctcttacaattatggcagttatggcaaccagcatcctcatcctatgcagtctcagtacccggcacttccccacgacactgcaatctctgggcctctccattacgccccatatcatagatcgtctgctcagtacccattcaactcccccacttcacgtatggagccttgtctcatgtcatcaacacccagattacatccaaccccagttactcctagatggcctgaggtaccatcagcaaacacatgctacacttccccatcagtgcactccgctaggtatggcaactcctccgatatgtatacaccactgactacccggaggaattcagagtacgagcatatgcagcattttccaggattcgcatatattaatggggaagcttccacagggtgggctaagtag

SEQ ID NO: 224449 - DNA, 1926 bp, Artificial Sequence
  derived and/or modified sequence
atgaactgggccgccttcggcggcagcgagttcttcatccccgagggcatccagatcgacagcagatgccccctgagcagaaacatcaccgagtggtaccactactacggcatcgccgtgaaggagagcagccagtactacgacgtgatgtacagcaagaagggcgccgcctgggtgagcgagaccggcaagaaggaggtgagcaagcagaccgtggcctacagccccagaagcaagctgggcaccctgctgcccgagttccccaacgtgaaggacctgaacctgcccgccagcctgcccgaggagaaggtgagcaccttcatcatgatgtacagaacccactgccagagaatcctggacaccgtgatcagagccaacttcgacgaggtgcagagcttcctgctgcacttctggcagggcatgcccccccacatgctgcccgtgctgggcagcagcaccgtggtgaacatcgtgggcgtgtgcgacagcatcctgtacaaggccatcagcggcgtgctgatgcccaccgtgctgcaggccctgcccgacagcctgacccaggtgatcagaaagttcgccaagcagctggacgagtggctgaaggtggccctgcacgacctgcccgagaacctgagaaacatcaagttcgagctgagcagaagattcagccagatcctgagaagacagaccagcctgaaccacctgtgccaggccagcagaaccgtgatccacagcgccgacatcaccttccagatgctggaggactggagaaacgtggacctgaacagcatcaccaagcagaccctgtacaccatggaggacagcagagacgagcacagaaagctgatcacccagctgtaccaggagttcgaccacctgctggaggagcagagccccatcgagagctacatcgagtggctggacaccatggtggacagatgcgtggtgaaggtggccgccaagagacagggcagcctgaagaaggtggcccagcagttcctgctgatgtggagctgcttcggcaccagagtgatcagagacatgaccctgcacagcgcccccagcttcggcagcttccacctgatccacctgatgttcgacgactacgtgctgtacctgctggagagcctgcactgccaggagagagccaacgagctgatgagagccatgaagggcgagggcagcaccgccgaggtgagagaggagatcatcctgaccgaggccgccgcccccacccccagccccgtgcccagcttcagccccgccaagagcgccaccagcgtggaggtgcccccccccagcagccccgtgagcaaccccagccccgagtacaccggcctgagcaccaccggcgccatgcagagctacacctggagcctgacctacaccgtgaccaccgccgccggcagccccgccgagaacagccagcagctgccctgcatgagaaacacccacgtgcccagcagcagcgtgacccacagaatccccgtgtacccccacagagaggagcacggctacaccggcagctacaactacggcagctacggcaaccagcacccccaccccatgcagagccagtaccccgccctgccccacgacaccgccatcagcggccccctgcactacgccccctaccacagaagcagcgcccagtaccccttcaacagccccaccagcagaatggagccctgcctgatgagcagcacccccagactgcaccccacccccgtgacccccagatggcccgaggtgcccagcgccaacacctgctacaccagccccagcgtgcacagcgccagatacggcaacagcagcgacatgtacacccccctgaccaccagaagaaacagcgagtacgagcacatgcagcacttccccggcttcgcctacatcaacggcgaggccagcaccggctgggccaagtag

SEQ ID NO: 224450 - protein, 183 aa, Artificial Sequence
  derived and/or modified sequence
MASRAGPRAAGTDGSDFQHRERVAMHYQMSVTLKYEIKKLIYVHLVIWLLLVAKMSVGHLRLLSHDQVAMPYQWEYPYLLSILPSLLGLLSFPRNNISYLVLSMISMGLFSIAPLIYGSMEMFPAAQQLYRHGKAYRFLFGFSAVSIMYLVLVLAVQVHAWQLYYSKKLLDSWFTSTQEKKHK

SEQ ID NO: 224451 - protein, 181 aa, Artificial Sequence
  derived and/or modified sequence
MASRAGPRAAGTDGSDFQHRERVAMHYQMSVTLKYEIKKLIYVHLVIWLLLVAKMSVGHLRLLSHDQVAMPYQWEYPYLLSILPSLLGLLSFPRNNISYLVLSMISMGLFHRSTHLWQHGDVPCCTAATAMARPTVSSLVFLPFPMYLVLVLAVQVHAWQLYYSKKLLDSWFTSTQEKKHK

SEQ ID NO: 224452 - DNA, 552 bp, Artificial Sequence
  derived and/or modified sequence
atggccagcagagccggccccagagccgccggcaccgacggcagcgacttccagcacagagagagagtggccatgcactaccagatgagcgtgaccctgaagtacgagatcaagaagctgatctacgtgcacctggtgatctggctgctgctggtggccaagatgagcgtgggccacctgagactgctgagccacgaccaggtggccatgccctaccagtgggagtacccctacctgctgagcatcctgcccagcctgctgggcctgctgagcttccccagaaacaacatcagctacctggtgctgagcatgatcagcatgggcctgttcagcatcgcccccctgatctacggcagcatggagatgttccccgccgcccagcagctgtacagacacggcaaggcctacagattcctgttcggcttcagcgccgtgagcatcatgtacctggtgctggtgctggccgtgcaggtgcacgcctggcagctgtactacagcaagaagctgctggacagctggttcaccagcacccaggagaagaagcacaagtag

SEQ ID NO: 224453 - DNA, 546 bp, Artificial Sequence
  derived and/or modified sequence
atggccagcagagccggccccagagccgccggcaccgacggcagcgacttccagcacagagagagagtggccatgcactaccagatgagcgtgaccctgaagtacgagatcaagaagctgatctacgtgcacctggtgatctggctgctgctggtggccaagatgagcgtgggccacctgagactgctgagccacgaccaggtggccatgccctaccagtgggagtacccctacctgctgagcatcctgcccagcctgctgggcctgctgagcttccccagaaacaacatcagctacctggtgctgagcatgatcagcatgggcctgttccacagaagcacccacctgtggcagcacggcgacgtgccctgctgcaccgccgccaccgccatggccagacccaccgtgagcagcctggtgttcctgcccttccccatgtacctggtgctggtgctggccgtgcaggtgcacgcctggcagctgtactacagcaagaagctgctggacagctggttcaccagcacccaggagaagaagcacaagtag

SEQ ID NO: 224454 - DNA, 552 bp, Artificial Sequence
  derived and/or modified sequence
atggccagccgcgccggtccgagggctgcaggcacagatggatcagattttcaacaccgcgagcgcgttgctatgcattaccagatgtccgttaccctgaagtatgaaattaaaaaactgatctatgtgcatttagtgatttggcttcttctggtcgccaagatgagtgtgggtcatctgcgactgctgagtcacgaccaagtcgccatgccctaccaatgggagtacccctacctcctctctatcctgccctcactcttggggttgctctcatttccccggaataacatcagctatctagtcctctctatgatcagtatgggtctcttcagcatcgcccccttaatctacggatccatggagatgtttcctgccgcccagcagttgtaccgtcacggcaaggcctatcgattcctgtttggcttctctgctgtgagtattatgtatctggttttggtgctcgctgtgcaagttcatgcgtggcagctgtactattctaagaagcttcttgacagctggtttacctccactcaggagaagaagcacaagtag

SEQ ID NO: 224455 - DNA, 546 bp, Artificial Sequence
  derived and/or modified sequence
atggctagccgggccgggccaagagccgccgggaccgatggctctgacttccaacatcgagaacgcgtcgcgatgcattatcagatgtcagtgaccctgaagtatgagattaagaaacttatctatgtacacctggtgatttggctgctcctcgtggctaagatgtcagttggccacttgaggttgctttcccatgaccaggtggctatgccttaccagtgggagtacccttaccttttgtcgatcctgcccagccttctgggactgctttctttcccaagaaacaatatatcctacctagtgctgtccatgatctctatggggcttttccatagatccacgcatctttggcaacacggtgacgtgccatgttgcactgccgctacagcaatggcaagacctaccgtctcctcactggtctttcttccctttcccatgtacctggtcttggtgctcgcagtccaagtacatgcctggcagctgtattattctaagaagctcttggactcatggttcaccagcactcaagagaagaagcacaagtag

SEQ ID NO: 224456 - DNA, 1693 bp, Artificial Sequence
  derived and/or modified sequence
gcgcggagaggagtgaccatagagtcggtcctccagagacagaggggccggaagttctcttcacggagccgcgcggctgcgggggcgcaaatagggtcagtgggccgcttggcggtgtcgttgcggtaccaggtccgcgtgaggggttcgggggttctgggcaggcacaatggcgtctcgagcaggcccgcgagcggccggcaccgacggcagcgactttcagcaccgggagcgcgtcgccatgcactaccagatgagtgtgactctcaagtatgaaatcaagaagctgatctacgtacatctggtcatatggctgctgctggttgctaagatgagcgtgggacacctgaggctcttgtcacatgatcaggtggccatgccctatcagtgggaatacccgtatttgctgagcattttgccctctctcttgggccttctctcctttccccgcaacaacattagctacctggtgctctccatgatcagcatgggactcttttccatcgctccactcatttatggcagcatggagatgttccctgctgcacagcagctctaccgccatggcaaggcctaccgtttcctctttggtttttctgccgtttccatcatgtacctggtgttggtgttggcagtgcaagtgcatgcctggcagttgtactacagcaagaagctcctagactcttggttcaccagcacacaggagaagaagcataaatgaagcctctttggggtgaagcctggacatcccatcgaatgaaaggacactagtacagcggttccaaaatcccttctggtgattttagcagctgtgatgttggtacctggtgcagaccaggccaaagttctggaaagctccttttgccatctgctgaggtggcaaaactataatttattcctggttggctagaactgggtgaccaacagctatgaaacaaatttcagctgtttgaagttgaactttgaggtttttctttaagaatgagcttcgtccttgcctctactcggtcattctccccatttccatccattaccccttagccattgagactaaaggaaatagggaataaatcaaattacttcatctctaggtcacgggtcaggaaacatttgggcagctgctcccttggcaggctgtggtctcctctgcaaagcattttaattaaaaacctcaataaagatggccctgcccacactgtgccttgtgtttggggcttgatagagtgtgaaaggtgtgttgcttgaaaggtgtggccttagacactaggagatgatgggtagaagctccttgagaaacctagcagtggccatagagaagtagactgggtatggggaacctaagtcatagttgtaacctacagctgattggtaagaactatgggccagacatttaatctctccatctatgaaatagtccattctcatttatctaccttaggttatgggctcttcttttagttggatattcacatttatctttcagtgttaactgggtatcagttatgagtctactactgtataatggcatccaaaagaattttaaagtacctcggtttatagggatttacaattcagtagaaacttgttattcatgtgaaacagtgaacataatatctaatgatgtggagcaagtacattaaaaacaggaaggaagagatctgtgattaaactaaaggccctttcacacctaaaa

SEQ ID NO: 224457 - DNA, 1133 bp, Artificial Sequence
  derived and/or modified sequence
gttctcttcacggagccgcgcggctgcgggggcgcaaatagggtcagtgggccgcttggcggtgtcgttgcggtaccaggtccgcgtgaggggttcgggggttctgggcaggcacaatggcgtctcgagcaggcccgcgagcggccggcaccgacggcagcgactttcagcaccgggagcgcgtcgccatgcactaccagatgagtgtgactctcaagtatgaaatcaagaagctgatctacgtacatctggtcatatggctgctgctggttgctaagatgagcgtgggacacctgaggctcttgtcacatgatcaggtggccatgccctatcagtgggaatacccgtatttgctgagcattttgccctctctcttgggccttctctcctttccccgcaacaacattagctacctggtgctctccatgatcagcatgggactctttcatcgctccactcatttatggcagcatggagatgttccctgctgcacagcagctaccgccatggcaaggcctaccgtttcctctttggtttttctgccgtttccaatgtacctggtgttggtgttggcagtgcaagtgcatgcctggcagttgtactacagcaagaagctcctagactcttggttcaccagcacacaggagaagaagcataaatgaagcctctttggggtgaagcctggacatcccatcgaatgaaaggacactagtacagcggttccaaaatcccttctggtgattttagcagctgtgatgttggtacctggtgcagaccaggccaaagttctggaaagctccttttgccatctgctgaggtggcaaaactataatttattcctggttggctagaactgggtgaccaacagctatgaaacaaatttcagctgtttgaagttgaactttgaggtttttctttaagaatgagcttcgtccttgcctctactcggtcattctccccatttccatccattaccccttagccattgagactaaaggaaatagggaataaatcaaattacttcatctctaggtcacgggtcaggaaacatttgggcagctgctcccttggcaggctgtggtctcctctgcaaagcattttaattaaaaacctcaataaagatggccctgccc

SEQ ID NO: 224458 - DNA, 552 bp, Artificial Sequence
  derived and/or modified sequence
atggccagcagagctggccccagggctgctggaacagatggcagtgacttccagcaccgggagcgggtggccatgcactaccagatgtctgtgaccctgaagtatgagatcaagaagctgatctacgtgcacctggtgatctggctgctgctggtggccaagatgtctgtgggccacctgcggctgctgagccatgaccaggtggccatgccctaccagtgggagtacccctacctgctgagcatcctgcccagcctgctgggcctgctgtccttccccaggaacaacatctcctacctggtgctgtccatgatctccatgggcctcttcagcatcgcccccctcatctacggctccatggagatgtttcctgctgcccagcagctgtaccgccacggcaaggcctaccgcttcctgtttggcttctctgctgtgtccatcatgtacctggtgctggtgctggccgtgcaggtgcacgcctggcagctgtactacagcaagaagctgctggacagctggttcaccagcacccaggagaagaagcacaagtag

SEQ ID NO: 224459 - DNA, 546 bp, Artificial Sequence
  derived and/or modified sequence
atggccagcagagctggccccagggctgctggaacagatggcagtgacttccagcaccgggagcgggtggccatgcactaccagatgtctgtgaccctgaagtatgagatcaagaagctgatctacgtgcacctggtgatctggctgctgctggtggccaagatgtctgtgggccacctgcggctgctgagccatgaccaggtggccatgccctaccagtgggagtacccctacctgctgagcatcctgcccagcctgctgggcctgctgtccttccccaggaacaacatctcctacctggtgctgtccatgatctccatgggcctcttccacaggagcacccacctgtggcagcacggagatgtgccctgctgcacagctgccacagccatggcccggcccaccgtgagcagcctggtgttcctgcccttccccatgtacctggtgctggtgctggccgtgcaggtgcacgcctggcagctgtactacagcaagaagctgctggacagctggttcaccagcacccaggagaagaagcacaagtag

SEQ ID NO: 224460 - DNA, 552 bp, Artificial Sequence
  derived and/or modified sequence
atggccagccgggccggcccccgggccgccggcaccgacggcagcgacttccagcaccgggagagggttgcaatgcattaccagatgtcagtcactctgaagtacgaaatcaagaaattgatttacgttcacctggtcatatggctgttgctggtggctaaaatgagtgtgggccatctgagattgttaagccacgatcaggtggctatgccatatcagtgggagtacccttacctcctgtcaatacttccaagtctattaggcttgttgagttttcccaggaacaatatctcatacctggtcctctctatgatcagcatggggttgtttagcatagcacctctcatttacgggtccatggagatgtttcccgcagctcagcaactgtatcgacacgggaaggcttatagatttcttttcggattttctgccgtgagcatcatgtacctcgtcctagtcctcgccgtgcaggtccacgcctggcagctctattactccaaaaaattgctggatagctggttcacaagcacccaggaaaaaaagcataagtag

SEQ ID NO: 224461 - DNA, 546 bp, Artificial Sequence
  derived and/or modified sequence
atggccagccgggccggcccccgggccgccggcaccgacggcagcgactttcagcaccgcgagagagtggctatgcactatcagatgagcgtcactctgaagtacgaaattaaaaagttaatttacgtgcatttggtcatttggctacttctggtcgcaaagatgagtgtgggacacctgagactcctgtctcatgaccaggtagccatgccgtaccagtgggagtacccctatctgctgtccatcctgccaagcctccttggcctgctgtcttttccacggaacaatatctcttacctggtcttaagcatgataagtatgggtctgttccacagatccacccacctgtggcagcatggagacgtaccctgttgcacagccgccaccgctatggctagaccaacagtgtcttccctggtgtttctccctttccctatgtaccttgtcctggtcctggcagttcaggtgcatgcttggcagttatactactcgaaaaaacttttggactcttggtttacatctacgcaggagaaaaagcacaagtag

SEQ ID NO: 224462 - DNA, 552 bp, Artificial Sequence
  derived and/or modified sequence
atggccagtagggccggacccagggctgcgggtaccgacggcagcgatttccaacacagagagcgagtcgccatgcactaccagatgtccgtgacccttaagtacgaaatcaaaaagttgatatacgtgcacctggtgatctggctgctgctcgtcgctaaaatgtctgtcggacatctccgattgctaagtcatgatcaggtggcaatgccatatcagtgggagtacccttatcttctgagcatcctgccaagccttctgggcttgctgtcgtttcctagaaacaatatcagttacctggtgctgtccatgatcagcatgggcctcttcagcatagccccactgatttatgggtcaatggagatgtttccagccgcacagcagctctacagacatggcaaggcctacagattcttattcggatttagtgcagttagcattatgtacctggttcttgtgcttgccgtccaggtccacgcctggcaattgtactacagcaaaaaactgctggatagttggttcaccagcactcaggaaaagaaacacaaatag

SEQ ID NO: 224463 - DNA, 546 bp, Artificial Sequence
  derived and/or modified sequence
atggccagtcgagccggacccagagcggcaggtacggacggttcagactttcagcacagggagagagtcgcgatgcattatcaaatgagcgtcacactaaaatacgaaattaaaaagctcatttatgttcacttggtaatatggctgctgcttgtcgctaagatgagcgttggacaccttagactgttatcacacgaccaggtagcaatgccctatcagtgggaatacccttacttactgagtattctgccgtcactcctggggttactgtcctttcctcggaacaacatcagttatctggtgttgagcatgatttctatgggacttttccataggtctacgcacctgtggcaacacggtgacgtaccgtgctgtaccgctgccacagccatggccagacctaccgtctcgtctctggtgtttttgccgtttccaatgtatcttgtgctggtactggcagtccaggtgcacgcttggcaattgtactattcaaagaagctgctcgacagctggttcacgagcactcaggagaagaaacataaatag

SEQ ID NO: 224464 - protein, 423 aa, Artificial Sequence
  derived and/or modified sequence
MSASAVYVLDLKGKVLICRNYRGDVDMSEVEHFMPILMEKEEEGMLSPILAHGGVRFMWIKHNNLYLVATSKKNACVSLVFSFLYKVVQVFSEYFKELEEESIRDNFVIIYELLDELMDFGYPQTTDSKILQEYITQEGHKLETGAPRPPATVTNAVSWRSEGIKYRKNEVFLDVIESVNLLVSANGNVLRSEIVGSIKMRVFLSGMPELRLGLNDKVLFDNTGRGKSKSVELEDVKFHQCVRLSRFENDRTISFIPPDGEFELMSYRLNTHVKPLIWIESVIEKHSHSRIEYMIKAKSQFKRRSTANNVEIHIPVPNDADSPKFKTTVGSVKWVPENSEIVWSIKSFPGGKEYLMRAHFGLPSVEAEDKEGKPPISVKFEIPYFTTSGIQVRYLKIIEKSGYQALPWVRYITQNGDYQLRTQ

SEQ ID NO: 224465 - protein, 370 aa, Artificial Sequence
  derived and/or modified sequence
MSASAVYVLDLKGKVLICRNYRGDVDMSEVEHFMPILMEKEEEGMLSPILAHGGVRFMWIKHNNLYLVATSKKNACVSLVFSFLYKVVQVFSEYFKELEEESIRDNFVIIYELLDELMDFGYPQTTDSKILQEYITQEGHKLETGAPRPPATVTNAVSWRSEGIKYRKNEVFLDVIESVNLLVSANGNVLRSEIVGSIKMRVFLSGMPELRLGLNDKVLFDNTGRGKSKSVELEDVKFHQCVRLSRFENDRTISFIPPDGEFELMSYRLNTHVKPLIWIESVIEKHSHSRIEYMIKGGKEYLMRAHFGLPSVEAEDKEGKPPISVKFEIPYFTTSGIQVRYLKIIEKSGYQALPWVRYITQNGDYQLRTQ

SEQ ID NO: 224466 - protein, 351 aa, Artificial Sequence [sequence omitted]

SEQ ID NO: 224467 - DNA, 2355 bp, Artificial Sequence
  derived and/or modified sequence
attcctgacagcacctcccggaccggacataacggtccccgcgcggctccccgaaccggaagtggaggtgagctgtcgcgggcggcgcccggccttgctcaacgcccagcagtccccaccgtcgctgccgccgccaccgccctcggccgctgccgaggcctcctgcagccatcatgtccgccagcgccgtctacgtgctggacctgaagggcaaggtgctcatctgccggaactaccgtggcgacgtggacatgtcagaggtggagcacttcatgcccatcctgatggagaaggaggaggaggggatgctgtcgcccatcctggcccacgggggggtccgtttcatgtggatcaaacacaacaacctgtatctggttgccacatccaagaagaacgcgtgcgtgtcgctggtcttttctttcctctataaggtggtgcaggtgttttccgagtacttcaaggagctggaggaggagagcatccgggacaactttgttatcatctacgagctgctggacgagctcatggacttcggctacccccagaccaccgacagcaagatcctgcaggagtacatcactcaggaaggccacaagctggaaacaggggccccgcggccaccagccaccgtcaccaacgcggtgtcctggcggtccgaaggcatcaagtatcggaagaatgaggtgttcttggacgtcatcgagtctgtcaacctcttggtcagcgccaacggcaatgtcctgcgcagcgagatcgtgggctccatcaagatgcgagtcttcctctcgggcatgcccgagctgcgcctgggcctcaacgacaaggtcctctttgacaacacgggccgcggcaaaagcaaatccgtggagctggaggatgtgaagttccaccagtgtgtgcggctatcacgcttcgagaatgaccgcaccatctccttcatcccacccgacggcgagttcgagctcatgtcctaccgtctcaacacccacgtcaagcctttgatatggatcgagtcggtgatcgagaagcactcccacagccgcatcgagtacatgatcaaggccaaaagccagttcaagcggcggtcaacagccaacaacgtggagatccacattcccgtgcccaatgatgccgactcacccaagttcaagacgacggtggggagcgttaagtgggtccccgagaacagcgagatcgtgtggtccatcaagtccttcccgggcggcaaggagtacctgatgcgggcccacttcggcctgcctagtgtggaggccgaagacaaggagggcaagcccccgatcagtgtcaagttcgagatcccttacttcactacctccggcatccaggtgcgctacctgaagatcattgagaagagtgggtaccaggccctgccctgggtgcgttatatcacgcagaatggagattaccagctccggacccagtgaggggctgtcgcagccaacaccccggcctcggggctcctggtggcagcaccaggggacacacctgccaaacccaccagatggaggggccctccctggtctctggccaccctcccagcctctgcccagggacccctgccttccccaggccatctgctctgccgtcgacactcgtctcagaagcccctttcccagaagaggctggtcttcaagaagtctcgtttctttgcccctgaagtcagtttcaggggaaggatgtgaaatttttccgtgtagaggttacagccttttatgctgttgagctcccaggtaccaaaaagcttggccaacgcttgccagccagccagctgcaggtggcatctgccacgaaggaagcgccagcctcgccaggccagcaggggcgtcgttttgttgccattttgttgaacgttatgggtttatgggtgttcctggaacttgtctttgtgcattcgttgctgtttgtgttaccctcactgtccccatgtcccacccacgtcctacggcactcaggaagcacttggtgaggacgagccctcacccttcttgtcttccttcccggcagcgcccgcagcgggccatttacacgtcgaggctggcacctggcgcgctcgggggccactgtagcgtctgcctgctccctggactcgcaggcctcgcctgtggcgccttcccagggccagcctgggtcacgagatgctgtcactcagccagatcagtattgacccaccaggggaggtggggtttggtgagagacgccagcctcagactttttcccactgagggtccagagagcggggccacgtgtcacccacgtctgcgcttggtcacccgtcctccccaccctgtgtgtgtttatgtcatagttacattaaattccattcattgaatactc

SEQ ID NO: 224468 - DNA, 1578 bp, Artificial Sequence
  derived and/or modified sequence
ggaagtggaggtgagctgtcgcgggcggcgcccggccttgctcaacgcccagcagtccccaccgtcgctgccgccgccaccgccctcggccgctgccgaggcctcctgcagccatcatgtccgccagcgccgtctacgtgctggacctgaagggcaaggtgctcatctgccggaactaccgtggcgacgtggacatgtcagaggtggagcacttcatgcccatcctgatggagaaggaggaggaggggatgctgtcgcccatcctggcccacgggggggtccgtttcatgtggatcaaacacaacaacctgtatctggttgccacatccaagaagaacgcgtgcgtgtcgctggtcttttctttcctctataaggtggtgcaggtgttttccgagtacttcaaggagctggaggaggagagcatccgggacaactttgttatcatctacgagctgctggacgagctcatggacttcggctacccccagaccaccgacagcaagatcctgcaggagtacatcactcaggaaggccacaagctggaaacaggggccccgcggccaccagccaccgtcaccaacgcggtgtcctggcggtccgaaggcatcaagtatcggaagaatgaggtgttcttggacgtcatcgagtctgtcaacctcttggtcagcgccaacggcaatgtcctgcgcagcgagatcgtgggctccatcaagatgcgagtcttcctctcgggcatgcccgagctgcgcctgggcctcaacgacaaggtcctctttgacaacacgggccgcggcaaaagcaaatccgtggagctggaggatgtgaagttccaccagtgtgtgcggctatcacgcttcgagaatgaccgcaccatctccttcatcccacccgacggcgagttcgagctcatgtcctaccgtctcaacacccacgtcaagcctttgatatggatcgagtcggtgatcgagaagcactcccacagccgcatcgagtacatgatcaagggcggcaaggagtacctgatgcgggcccacttcggcctgcctagtgtggaggccgaagacaaggagggcaagcccccgatcagtgtcaagttcgagatcccttacttcactacctccggcatccaggtgcgctacctgaagatcattgagaagagtgggtaccaggccctgccctgggtgcgttatatcacgcagaatggagattaccagctccggacccagtgaggggctgtcgcagccaacaccccggcctcggggctcctggtggcagcaccaggggacacacctgccaaacccaccagatggaggggccctccctggtctctggccaccctcccagcctctgcccagggacccctgccttccccaggccatctgctctgccgtcgacactcgtctcagaagcccctttcccagaagaggctggtcttcaagaagtctcgtttctttgcccctgaagtcagtttcaggggaaggatgtgaaatttttccgtgtagaggttacagccttttatgctgttgagctcccaggtaccaaaaagcttggccaacgcttgccagccagccagctgca

SEQ ID NO: 224469 - DNA, 1272 bp, Artificial Sequence
  derived and/or modified sequence
atgtccgcctcagccgtgtacgttcttgacctgaagggtaaggtgcttatttgtcgtaactatagaggcgacgttgatatgagcgaagtggaacattttatgcccattttgatggaaaaggaggaggagggcatgctttcaccaatcctcgcccacggaggggtacggttcatgtggattaagcacaacaatctgtatctcgtagcgacctctaaaaagaacgcatgcgtttcactggtgttttcttttctctacaaggtagtgcaggttttttctgaatattttaaggaacttgaggaagaaagtattagggacaactttgtcattatctatgagttacttgacgaacttatggacttcggatatccacaaacgactgactctaagattctccaggaatacattacccaggaggggcacaaactcgaaacaggagctccccggccaccggcaactgtgactaatgctgtttcctggcgcagtgagggaatcaagtaccggaaaaacgaggtgttcctggatgtgatcgagtccgtgaacctccttgtgtccgccaacgggaacgtgcttcgctcagaaatcgttggctcaattaaaatgcgggtctttcttagcggtatgccagaattacggctgggactgaatgataaagtgctgtttgacaacactggacgcgggaagtctaaatccgtcgagttagaggatgttaaattccatcagtgtgtgaggctgtctcgttttgagaacgacagaacaatatcttttatccctcctgacggcgagtttgaactaatgtcttaccggctgaacacacatgtgaagccactgatctggatcgagagtgtgatcgaaaaacactcacatagcaggatcgagtacatgattaaagcgaagtctcagtttaagagaaggtcgactgcaaacaatgtggagatacatatccccgtcccaaacgacgcagatagcccaaagtttaaaacgacggtgggctcagtgaagtgggtccctgagaattccgaaatcgtgtggagcattaagagtttccccggcggcaaagaatacctgatgcgcgcacatttcgggttaccaagtgttgaggccgaggataaggagggtaagcccccaattagtgtaaaatttgagattccgtactttacaacaagcggcatccaagtccgctacctcaagatcatcgaaaaaagtggctatcaggccctcccctgggtgaggtacatcacccagaatggagattatcagcttcggacccagtag

SEQ ID NO: 224470 - DNA, 1113 bp, Artificial Sequence
  derived and/or modified sequence
atgagcgcatccgcagtttacgttttagatttaaagggcaaagtgctcatttgccgaaactatcgcggcgatgtggatatgagtgaggtggagcacttcatgccaatcttgatggaaaaggaggaggagggtatgctcagtcctattcttgctcatggcggagtgaggtttatgtggataaagcacaacaatctgtaccttgtagccacgtccaaaaagaacgcatgtgtctctttagtgttttctttcctgtataaggtagtgcaagtgttttccgaatattttaaagaattagaggaggagtctatcagagacaattttgtaatcatttatgagctgctcgatgaactaatggacttcggctatccacagacaactgactcaaagatcctccaagaatacataacccaggagggccacaagctggaaacaggtgcacctcggcctcccgccacagttaccaacgccgtgagctggcgttcagaagggattaagtaccgtaaaaacgaggttttcttagatgtcattgaatctgttaacctgctggtgtcagccaacgggaatgtgctgcggtcggaaatcgtgggctcaattaaaatgcgcgtattcctgtccggcatgcccgaactacggttgggcctaaacgataaagtccttttcgacaacactggaagggggaagtcaaagagcgtagaactggaggatgtgaagttccatcaatgcgtccgcttgtcacgattcgaaaatgacaggactatttcgttcatcccgccagatggtgaatttgagctgatgagctaccgtctgaatacgcacgtgaaaccgttaatatggatcgagagcgttatcgagaagcactcccactcccgtatcgagtacatgattaaagggggcaaagagtatctgatgcgagcccacttcggactgccctccgtcgaggcagaggacaaagagggcaaaccacccattagtgtcaaattcgagattccgtattttacaacaagcgggatccaggtgagatacctcaagataattgagaagtccgggtatcaagcgctgccctgggtgcgctacatcacgcagaacggggactatcagttgcggactcagtag

SEQ ID NO: 224471 - DNA, 1272 bp, Artificial Sequence
  derived and/or modified sequence
atgtctgccagcgctgtgtatgtgctggacctgaagggcaaggtgctgatctgcaggaactacagaggagatgtggacatgtctgaggtggagcacttcatgcccatcctgatggagaaggaggaggagggcatgctgagccccatcctggcccacggcggcgtgcgcttcatgtggatcaagcacaacaacctgtacctggtggccaccagcaagaagaatgcctgtgtgtccctggtgttctccttcctgtacaaggtggtgcaggtgttcagcgagtacttcaaggagctggaggaggagagcatccgggacaactttgtgatcatctatgagctgctggatgagctgatggactttggctacccccagaccacagacagcaagatcctgcaggagtacatcacccaggagggccacaagctggagaccggggccccccggcccccagccaccgtgaccaatgctgtgtcctggaggtctgagggcatcaagtacaggaagaatgaggtgttcctggatgtgattgagagcgtgaacctgctggtgtctgccaatggaaatgtgctgcggtctgagatcgtgggcagcatcaagatgagggtcttcctgagcggcatgcctgagctgcggctgggcctgaatgacaaggtgctgtttgacaacacaggccggggcaagagcaagtctgtggagctggaggatgtgaagttccaccagtgtgtgcggctgagcagatttgaaaatgacaggaccatctccttcatccccccagatggagaatttgagctgatgagctaccgcctgaacacccacgtgaagcccctcatctggattgaatctgtgattgagaagcacagccacagcagaattgagtacatgatcaaggccaagagccagttcaagagaagaagcacagccaacaacgtggagatccacatccctgtgcccaatgatgctgacagccccaagttcaagaccaccgtgggctctgtgaagtgggtgcctgaaaattctgaaattgtgtggagcatcaagagcttccctgggggcaaggagtacctgatgagggcccacttcggcctgcccagcgtggaggccgaggacaaggagggcaagccacccatctctgtgaagtttgagatcccctacttcaccaccagcggcatccaggtgcgctacctgaagatcatcgagaagagcggctaccaggccctgccctgggtgcgctacatcacccagaatggagactaccagctgcggacccagtag

SEQ ID NO: 224472 - DNA, 1113 bp, Artificial Sequence
  derived and/or modified sequence
atgtctgccagcgctgtgtatgtgctggacctgaagggcaaggtgctgatctgcaggaactacagaggagatgtggacatgtctgaggtggagcacttcatgcccatcctgatggagaaggaggaggagggcatgctgagccccatcctggcccacggcggcgtgcgcttcatgtggatcaagcacaacaacctgtacctggtggccaccagcaagaagaatgcctgtgtgtccctggtgttctccttcctgtacaaggtggtgcaggtgttcagcgagtacttcaaggagctggaggaggagagcatccgggacaactttgtgatcatctatgagctgctggatgagctgatggactttggctacccccagaccacagacagcaagatcctgcaggagtacatcacccaggagggccacaagctggagaccggggccccccggcccccagccaccgtgaccaatgctgtgtcctggaggtctgagggcatcaagtacaggaagaatgaggtgttcctggatgtgattgagagcgtgaacctgctggtgtctgccaatggaaatgtgctgcggtctgagatcgtgggcagcatcaagatgagggtcttcctgagcggcatgcctgagctgcggctgggcctgaatgacaaggtgctgtttgacaacacaggccggggcaagagcaagtctgtggagctggaggatgtgaagttccaccagtgtgtgcggctgagcagatttgaaaatgacaggaccatctccttcatccccccagatggagaatttgagctgatgagctaccgcctgaacacccacgtgaagcccctcatctggattgaatctgtgattgagaagcacagccacagcagaattgagtacatgatcaagggcggcaaggagtacctgatgagggcccacttcggcctgcccagcgtggaggccgaggacaaggagggcaagccacccatctctgtgaagtttgagatcccctacttcaccaccagcggcatccaggtgcgctacctgaagatcatcgagaagagcggctaccaggccctgccctgggtgcgctacatcacccagaatggagactaccagctgcggacccagtag

SEQ ID NO: 224473 - DNA, 1272 bp, Artificial Sequence
  derived and/or modified sequence
atgagcgccagcgccgtgtacgtgctggacctgaagggcaaggtgttgatctgtaggaattatcggggcgacgtcgatatgtctgaggtggagcattttatgcctatcctgatggaaaaggaagaggagggaatgcttagcccaatcctggcccacgggggtgtcaggtttatgtggatcaagcataataacttgtacctcgtggccacaagtaaaaaaaatgcttgcgtgagcctggtattcagtttcctgtacaaagtggtccaggtgttctctgagtacttcaaagagctggaggaggagtctatcagggataattttgtgattatttacgagctcctcgacgaactcatggacttcggatacccacagaccaccgacagcaagatattgcaggaatatataacacaggagggccataaactcgagacaggtgcccctaggccaccagccacagtgaccaatgcggtgagctggagatctgagggtatcaagtaccggaagaatgaagtgttcctggacgtgatcgagtctgtcaatctactggtgagcgctaatgggaatgtcctgcgatctgagattgtgggcagcatcaaaatgagggtgtttttatcaggcatgccggaattgaggttagggctcaacgataaagtgctcttcgataatactgggcgggggaaatctaagtctgtcgagcttgaggacgtgaagtttcaccagtgcgtccgcctgtcccggttcgaaaacgaccgcactattagcttcatccccccagatggagagtttgagcttatgtcctaccgtcttaatacacacgtcaagcccctcatctggattgagtcagttatcgaaaaacatagccattcccggattgagtacatgataaaagccaaatctcagtttaaacgccgcagcaccgcaaataacgttgaaattcacattccagtgcccaacgacgccgattctccaaaattcaagacgaccgtgggatcagtcaagtgggtgcccgagaacagtgaaatcgtctggagtataaagagctttcccgggggcaaggagtacctgatgcgggcccacttcggcttgcccagcgtggaggccgaggacaaagaaggcaaacctcccatctcagtcaaattcgagataccctacttcacaacatccggaatccaagtgcgataccttaagattattgagaagtccggctatcaggccctaccctgggtgcggtacatcacacagaacggagactaccagctgaggacgcagtag

SEQ ID NO: 224474 - DNA, 1113 bp, Artificial Sequence
  derived and/or modified sequence
atgagcgccagcgccgtgtacgtgctggacctgaagggcaaggtgttaatttgtcgaaactaccgtggagacgttgacatgtccgaggtcgaacacttcatgcctatcttgatggaaaaggaagaggaaggtatgttgagccctatccttgcacatggcggcgtgcgttttatgtggattaaacataataatttgtatctggtggctacaagcaagaaaaacgcctgcgtatcactggttttctcatttttatacaaagtcgtccaggtgtttagtgaatatttcaaagagcttgaggaggagtctattcgcgacaatttcgtgattatttacgaattattggatgagctgatggatttcggctatccacaaaccactgacagtaaaatattacaagaatatattactcaggaaggccacaagctagagaccggcgctccacggccaccggccaccgtgactaatgcagttagttggcgcagtgaggggattaaataccggaagaacgaagtgttcctcgacgtgatcgagagcgtgaatctgctcgtgtcagccaatggaaacgtgctaaggtctgagatcgttgggtcaattaaaatgcgagtctttcttagtggcatgcccgaactccgtctgggactgaatgacaaagttcttttcgataataccggaagaggcaagtccaagtctgttgaactcgaggacgtgaagttccaccagtgtgtgagattaagtcggttcgagaacgatcggacaatctctttcattccccctgacggagagttcgagctaatgagttataggctaaatacccacgtgaagccattaatttggattgagagcgttatcgagaagcatagccactccaggattgagtatatgatcaagggcggaaaggaatacttgatgcgcgcccattttggattgccctccgtagaggcagaggataaggaggggaagcctccgatttcagtgaaatttgagatcccatattttaccacgtctggaatccaggttagatatcttaaaatcatcgagaagagcggctatcaggcccttccgtgggtccggtatatcacccagaatggtgattatcagttgaggactcagtag

SEQ ID NO: 224475 - DNA, 1272 bp, Artificial Sequence
  derived and/or modified sequence
atgagcgcctctgcggtgtacgtgctggacctgaagggaaaggtcctcatctgtcggaattatagaggcgatgtggatatgtctgaggtcgagcatttcatgcccatcttgatggaaaaagaagaggaagggatgctgtccccaatattagcacacggtggagttcgctttatgtggattaagcacaataatttgtacctggttgcaacaagtaagaaaaacgcttgtgtaagtctcgtatttagctttctttacaaagtggtgcaagtgttctcagagtactttaaggaactcgaggaggagtccataagagacaatttcgtgatcatctacgaactactcgatgaactcatggatttcggctacccccagacaacagattctaagattctacaagaatacatcacccaagaagggcacaagctggagaccggcgcacctagaccccctgcgaccgtcaccaacgccgtaagttggagatccgaggggatcaaatatcgcaaaaacgaagtcttcctggatgtcatcgagagtgtcaacctactggtgagtgccaacggcaatgttcttcggagcgaaatcgtgggaagtataaaaatgcgagtgttcctgagcggaatgccggagctgagattagggcttaatgacaaggtgcttttcgataataccgggaggggcaaatcgaaaagtgtggagctggaagatgtcaaattccatcagtgtgtgagactctcccgtttcgaaaatgatcgaaccatttcctttataccgcctgatggtgagttcgaactgatgtcctatcgattgaacactcacgtgaagcccctgatctggatcgagtccgtgatcgagaaacattcacattcgcggattgagtacatgattaaggctaagagtcagttcaaacggcgatcaacagccaacaatgttgaaatccacatccccgtccctaatgatgcagacagccctaaattcaagacaacagttggttctgtgaagtgggttcccgagaatagcgagatcgtgtggtctatcaagagttttcccggaggcaaggagtacttaatgcgcgctcactttggcctacccagtgtcgaggctgaagacaaggagggaaagccccctatatccgtgaagtttgaaatcccctattttaccacaagcggcattcaggttcgctatcttaaaatcatcgagaaatccggctaccaggctctcccttgggtccgatatattacacagaatggggactaccaactgcgaactcaatag

SEQ ID NO: 224476 - DNA, 1113 bp, Artificial Sequence
  derived and/or modified sequence
atgagtgcatccgccgtatatgtgctcgacctgaagggtaaggttctaatctgtaggaactacagaggcgacgtggatatgtcagaggtcgagcactttatgcctattctaatggaaaaggaagaggaggggatgctgtccccaatcttagcccacgggggtgtgaggtttatgtggattaagcataacaacctgtaccttgtcgcgacctctaagaagaatgcctgcgtatcccttgttttttctttcctgtataaagtggtgcaggtgttctctgagtattttaaagaactggaagaagagtccatccgggacaactttgtcattatatatgagctcctggacgagttaatggacttcggttacccccagacaacagactctaagattctccaggagtatatcacacaagaggggcacaagctcgaaactggcgctcctcggccacctgccacagtgacaaacgcagtgagttggcgtagtgagggtatcaaatatcggaagaatgaggtgtttcttgatgtaatcgagagcgtgaacctcctggtgagcgccaacggaaatgtactcagaagtgagatcgtgggtagcattaagatgcgagtcttcctctccggtatgccagaactccgtttgggattgaacgacaaggtgctcttcgacaacactggccgtggcaaatctaagagcgtggagttggaggacgtgaaatttcatcaatgtgttcggctgagtcgatttgagaatgacagaactatctctttcatcccacctgacggtgaatttgaactgatgtcatacagattaaatacgcatgttaaacctcttatctggatcgaatcagtaatagagaaacatagccactcccggattgagtatatgatcaaaggcggaaaagaatacctaatgcgcgctcatttcggattacccagcgtagaagcagaggataaggagggtaagccacctatctcagtcaagttcgagataccttatttcacaacttcaggcatccaagttcgctacctgaagattattgagaaatcaggatatcaggcattgccctgggtgcgctacattactcagaatggggattaccaactcagaactcaatag

SEQ ID NO: 224477 - DNA, 1272 bp, Artificial Sequence
  derived and/or modified sequence
atgagcgccagcgccgtgtacgtgctggacctgaagggcaaggtgctgatctgcagaaactacagaggcgacgtggacatgagcgaggtggagcacttcatgcccatcctgatggagaaggaggaggagggcatgctgagccccatcctggcccacggcggcgtgagattcatgtggatcaagcacaacaacctgtacctggtggccaccagcaagaagaacgcctgcgtgagcctggtgttcagcttcctgtacaaggtggtgcaggtgttcagcgagtacttcaaggagctggaggaggagagcatcagagacaacttcgtgatcatctacgagctgctggacgagctgatggacttcggctacccccagaccaccgacagcaagatcctgcaggagtacatcacccaggagggccacaagctggagaccggcgcccccagaccccccgccaccgtgaccaacgccgtgagctggagaagcgagggcatcaagtacagaaagaacgaggtgttcctggacgtgatcgagagcgtgaacctgctggtgagcgccaacggcaacgtgctgagaagcgagatcgtgggcagcatcaagatgagagtgttcctgagcggcatgcccgagctgagactgggcctgaacgacaaggtgctgttcgacaacaccggcagaggcaagagcaagagcgtggagctggaggacgtgaagttccaccagtgcgtgagactgagcagattcgagaacgacagaaccatcagcttcatcccccccgacggcgagttcgagctgatgagctacagactgaacacccacgtgaagcccctgatctggatcgagagcgtgatcgagaagcacagccacagcagaatcgagtacatgatcaaggccaagagccagttcaagagaagaagcaccgccaacaacgtggagatccacatccccgtgcccaacgacgccgacagccccaagttcaagaccaccgtgggcagcgtgaagtgggtgcccgagaacagcgagatcgtgtggagcatcaagagcttccccggcggcaaggagtacctgatgagagcccacttcggcctgcccagcgtggaggccgaggacaaggagggcaagccccccatcagcgtgaagttcgagatcccctacttcaccaccagcggcatccaggtgagatacctgaagatcatcgagaagagcggctaccaggccctgccctgggtgagatacatcacccagaacggcgactaccagctgagaacccagtag

SEQ ID NO: 224478 - DNA, 1113 bp, Artificial Sequence
  derived and/or modified sequence
atgagcgccagcgccgtgtacgtgctggacctgaagggcaaggtgctgatctgcagaaactacagaggcgacgtggacatgagcgaggtggagcacttcatgcccatcctgatggagaaggaggaggagggcatgctgagccccatcctggcccacggcggcgtgagattcatgtggatcaagcacaacaacctgtacctggtggccaccagcaagaagaacgcctgcgtgagcctggtgttcagcttcctgtacaaggtggtgcaggtgttcagcgagtacttcaaggagctggaggaggagagcatcagagacaacttcgtgatcatctacgagctgctggacgagctgatggacttcggctacccccagaccaccgacagcaagatcctgcaggagtacatcacccaggagggccacaagctggagaccggcgcccccagaccccccgccaccgtgaccaacgccgtgagctggagaagcgagggcatcaagtacagaaagaacgaggtgttcctggacgtgatcgagagcgtgaacctgctggtgagcgccaacggcaacgtgctgagaagcgagatcgtgggcagcatcaagatgagagtgttcctgagcggcatgcccgagctgagactgggcctgaacgacaaggtgctgttcgacaacaccggcagaggcaagagcaagagcgtggagctggaggacgtgaagttccaccagtgcgtgagactgagcagattcgagaacgacagaaccatcagcttcatcccccccgacggcgagttcgagctgatgagctacagactgaacacccacgtgaagcccctgatctggatcgagagcgtgatcgagaagcacagccacagcagaatcgagtacatgatcaagggcggcaaggagtacctgatgagagcccacttcggcctgcccagcgtggaggccgaggacaaggagggcaagccccccatcagcgtgaagttcgagatcccctacttcaccaccagcggcatccaggtgagatacctgaagatcatcgagaagagcggctaccaggccctgccctgggtgagatacatcacccagaacggcgactaccagctgagaacccagtag

SEQ ID NO: 224479 - protein, 91 aa, Artificial Sequence
  derived and/or modified sequence
MLIFLGCYRRRLEERAGTMSAETASGPTEDQVEILEYNFNKVDKHPDSTTLCLIAAEAGLSEEETQKWFKQRLAKWRRSEGLPSECRSVTD

SEQ ID NO: 224480 - protein, 47 aa, Artificial Sequence
  derived and/or modified sequence
MSAETASGPTEDQVEILEYNFNKVDKHPDSTTLCLIAAEAGLSEEET

SEQ ID NO: 224481 - DNA, 1552 bp, Artificial Sequence
  derived and/or modified sequence
gcaccagatctacgctttgaaatgaggcaacatctaactggaaactcgctcaaagtaaggaagtggatgagaagactcagggtcccttttctcttccccgtcttctctcagccacatctctcttatcctatcttggtgaagaagcttgcttggctaggagagaggtcagggacgagaagatagtgacgagaaagttccatgagactctcagaagtcccagcctgaacatcaaacctgaataaccaggagagacgtaacctcggcatactttcagtggtttacctcctgcccacgctgcaggtttttcaggtccttgctcgagtgtgtgctcataggcgtaaataaacgtgctatcagcagcctgcgtcagccagcccagctatttaagcaggctggcatcagcaaacacagcttccaaacccagggcttgcgcttgcctttgcctcttccacactaatgacagactgccccactgagaagggtctagcggagcacaggtcaccagctgggcaacattcagaaagttagtcttcctatgctcattttcctgggctgttacagaagaagactggaagagcgcgcagggaccatgtcggcggagaccgcgagcggccccacagaggaccaggtggaaatcctggagtacaacttcaacaaggtcgacaagcacccggattccaccacgctgtgcctcatcgcggccgaggcaggcctttccgaggaggagacccagaaatggtttaagcagcgcctggcaaagtggcggcgctcagaaggcctgccctcagagtgcagatccgtcacagactaaggagatggcaggcattgacagcttcactccatgaaggccatctctgtttctctcctccgcttaaccaagctgttgtggtttttcagcatagtgttgtatgttccattgctagctgtcctgctgtttaacacagtgttgtattttttttctaaatgtacataattagaaaagaaaataacaataggaagctatgtgtatcttctgtgtaaagcagtggcttcactggaaaaatggtgtggctagcatttccctttgagtcatgatgacagatggtgtgaaaaccatctaagtttgcttttgaccatcacctcccagtagcaatttgctttcataatccatttagcaatccaggcctctgttgaaaagataatatgagggagaagggaacacatttccttctgaacttacttccctaagtcactttccttatgtatcatctaatacaatgatggttgagtgaaaatacagaaggggtgtttgagtattcagatttcataaaacacttccttggaatatagctgcattaacttggaaagaagcctgttgggccagaagacagaaactccaactggcaaaaaagcaagcatctaagaaaaaaaaccaccaaagttcttgaatttactatatttaaatgcattggttaagtttattttgctaaataaagtgaactgctttttgtctctaaaatgatattctaaataaaaccttaactttttgttgaagatgcactgaaaaaaaaaa

SEQ ID NO: 224482 - DNA, 276 bp, Artificial Sequence
  derived and/or modified sequence
atgctgatcttcctgggctgctacaggcggagactggaggaacgggccggcacaatgagtgctgagactgcatcaggtcccactgaagaccaagtggagatcctggagtataactttaacaaggtggacaaacatccagattcaacgactctctgcctgatagctgccgaagctggcctgtcagaggaggagacgcagaagtggtttaagcagcgtctggctaaatggagaagaagtgaaggcctgccaagtgagtgtcgctctgttaccgattag

SEQ ID NO: 224483 - DNA, 276 bp, Artificial Sequence
  derived and/or modified sequence
atgttaatttttctggggtgttacaggagaagactcgaagagagggctggtacaatgagcgccgagaccgcttccggacctacagaggatcaagtcgagattctggagtataacttcaataaagtcgacaaacaccccgattctaccactttatgcctaattgcagctgaagctggactcagtgaagaagagacccaaaaatggtttaaacaaaggctggctaagtggcggagaagcgagggactcccgagcgaatgtaggtcagtaactgattag

SEQ ID NO: 224484 - DNA, 1129 bp, Artificial Sequence
  derived and/or modified sequence
gaaggccgcctaccggggaggccggaggccggctagtcgcggactcgggcgaacccaccctcgcgatctgtcaagtctgtccccaggggaggtccccctttcgggaggaagtttttaaggggatttctcaaaatcacccccgcgcttccttcactccttccttagagccggagcgcgcagggaccatgtcggcggagaccgcgagcggccccacagaggaccaggtggaaatcctggagtacaacttcaacaaggtcgacaagcacccggattccaccacgctgtgcctcatcgcggccgaggcaggcctttccgaggaggagacccagaaatggtttaagcagcgcctggcaaagtggcggcgctcagaaggcctgccctcagagtgcagatccgtcacagactaaggagatggcaggcattgacagcttcactccatgaaggccatctctgtttctctcctccgcttaaccaagctgttgtggtttttcagcatagtgttgtatgttccattgctagctgtcctgctgtttaacacagtgttgtattttttttctaaatgtacataattagaaaagaaaataacaataggaagctatgtgtatcttctgtgtaaagcagtggcttcactggaaaaatggtgtggctagcatttccctttgagtcatgatgacagatggtgtgaaaaccatctaagtttgcttttgaccatcacctcccagtagcaatttgctttcataatccatttagcaatccaggcctctgttgaaaagataatatgagggagaagggaacacatttccttctgaacttacttccctaagtcactttccttatgtatcatctaatacaatgatggttgagtgaaaatacagaaggggtgtttgagtattcagatttcataaaacacttccttggaatatagctgcattaacttggaaagaagcctgttgggccagaagacagaaactccaactggcaaaaaagcaagcatctaagaaaaaaaaccaccaaagttcttgaatttactatatttaaatgcattggttaagtttattttgctaaataaagtgaactgctttttgtctctaaaatgatattctaaataaaaccttaactttttgttgaa

SEQ ID NO: 224485 - DNA, 1601 bp, Artificial Sequence
  derived and/or modified sequence
acagatgcaggggaaataaatgagaatcgtttttgagggagacctaaaactgtatcatcctagcccgaatctctcccttttaactgttctttatgtgtacattctgtgcccaaaagaaaacaacctttcattaattgggcaattgtccaggctcttagcttggcatccagctctcagagctgtgaaatcaaccgcaccagatctacgctttgaaatgaggcaacatctaactggaaactcgctcaaagtaaggaagtggatgagaagactcagggtcccttttctcttccccgtcttctctcagccacatctctcttatcctatcttggtgaagaagcttgcttggctaggagagaggtcagggacgagaagatagtgacgagaaagttccatgagactctcagaagtcccagcctgaacatcaaacctgaataaccaggagagacgtaacctcggcatactttcagtggtttacctcctgcccacgctgcaggtttttcaggtccttgctcgagtgtgtgctcataggcgtaaataaacgtgctatcagcagcctgcgtcagccagcccagctatttaagcaggctggcatcagcaaacacagcttccaaacccagggcttgcgcttgcctttgcctcttccaccgcgcagggaccatgtcggcggagaccgcgagcggccccacagaggaccaggtggaaatcctggagtacaacttcaacaaggtcgacaagcacccggattccaccacgctgtgcctcatcgcggccgaggcaggcctttccgaggaggagacccagaaatggtttaagcagcgcctggcaaagtggcggcgctcagaaggcctgccctcagagtgcagatccgtcacagactaaggagatggcaggcattgacagcttcactccatgaaggccatctctgtttctctcctccgcttaaccaagctgttgtggtttttcagcatagtgttgtatgttccattgctagctgtcctgctgtttaacacagtgttgtattttttttctaaatgtacataattagaaaagaaaataacaataggaagctatgtgtatcttctgtgtaaagcagtggcttcactggaaaaatggtgtggctagcatttccctttgagtcatgatgacagatggtgtgaaaaccatctaagtttgcttttgaccatcacctcccagtagcaatttgctttcataatccatttagcaatccaggcctctgttgaaaagataatatgagggagaagggaacacatttccttctgaacttacttccctaagtcactttccttatgtatcatctaatacaatgatggttgagtgaaaatacagaaggggtgtttgagtattcagatttcataaaacacttccttggaatatagctgcattaacttggaaagaagcctgttgggccagaagacagaaactccaactggcaaaaaagcaagcatctaagaaaaaaaaccaccaaagttcttgaatttactatatttaaatgcattggttaagtttattttgctaaataaagtgaactgctttttgtctctaaaatgatattctaaataaaaccttaactttttgttgaa

SEQ ID NO: 224486 - DNA, 1164 bp, Artificial Sequence
  derived and/or modified sequence
ctaccggggaggccggaggccggctagtcgcggactcgggcgaacccaccctcgcgatctgtcaagtctgtccccaggggaggtccccctttcgggaggaagtttttaaggggatttctcaaaatcacccccgcgcttccttcactccttccttagagccggaggtcggtgagggcccgcggaatcatctatctcgcccccgtcgcagcgcgcagggaccatgtcggcggagaccgcgagcggccccacagaggaccaggtggaaatcctggagtacaacttcaacaaggtcgacaagcacccggattccaccacgctgtgcctcatcgcggccgaggcaggcctttccgaggaggagacccagaaatggtttaagcagcgcctggcaaagtggcggcgctcagaaggcctgccctcagagtgcagatccgtcacagactaaggagatggcaggcattgacagcttcactccatgaaggccatctctgtttctctcctccgcttaaccaagctgttgtggtttttcagcatagtgttgtatgttccattgctagctgtcctgctgtttaacacagtgttgtattttttttctaaatgtacataattagaaaagaaaataacaataggaagctatgtgtatcttctgtgtaaagcagtggcttcactggaaaaatggtgtggctagcatttccctttgagtcatgatgacagatggtgtgaaaaccatctaagtttgcttttgaccatcacctcccagtagcaatttgctttcataatccatttagcaatccaggcctctgttgaaaagataatatgagggagaagggaacacatttccttctgaacttacttccctaagtcactttccttatgtatcatctaatacaatgatggttgagtgaaaatacagaaggggtgtttgagtattcagatttcataaaacacttccttggaatatagctgcattaacttggaaagaagcctgttgggccagaagacagaaactccaactggcaaaaaagcaagcatctaagaaaaaaaaccaccaaagttcttgaatttactatatttaaatgcattggttaagtttattttgctaaataaagtgaactgctttttgtctctaaaatgatattctaaataaaaccttaactttttgttgaa

SEQ ID NO: 224487 - DNA, 1542 bp, Artificial Sequence
  derived and/or modified sequence
gcaccagatctacgctttgaaatgaggcaacatctaactggaaactcgctcaaagtaaggaagtggatgagaagactcagggtcccttttctcttccccgtcttctctcagccacatctctcttatcctatcttggtgaagaagcttgcttggctaggagagaggtcagggacgagaagatagtgacgagaaagttccatgagactctcagaagtcccagcctgaacatcaaacctgaataaccaggagagacgtaacctcggcatactttcagtggtttacctcctgcccacgctgcaggtttttcaggtccttgctcgagtgtgtgctcataggcgtaaataaacgtgctatcagcagcctgcgtcagccagcccagctatttaagcaggctggcatcagcaaacacagcttccaaacccagggcttgcgcttgcctttgcctcttccacactaatgacagactgccccactgagaagggtctagcggagcacaggtcaccagctgggcaacattcagaaagttagtcttcctatgctcattttcctgggctgttacagaagaagactggaagagcgcgcagggaccatgtcggcggagaccgcgagcggccccacagaggaccaggtggaaatcctggagtacaacttcaacaaggtcgacaagcacccggattccaccacgctgtgcctcatcgcggccgaggcaggcctttccgaggaggagacccagaaatggtttaagcagcgcctggcaaagtggcggcgctcagaaggcctgccctcagagtgcagatccgtcacagactaaggagatggcaggcattgacagcttcactccatgaaggccatctctgtttctctcctccgcttaaccaagctgttgtggtttttcagcatagtgttgtatgttccattgctagctgtcctgctgtttaacacagtgttgtattttttttctaaatgtacataattagaaaagaaaataacaataggaagctatgtgtatcttctgtgtaaagcagtggcttcactggaaaaatggtgtggctagcatttccctttgagtcatgatgacagatggtgtgaaaaccatctaagtttgcttttgaccatcacctcccagtagcaatttgctttcataatccatttagcaatccaggcctctgttgaaaagataatatgagggagaagggaacacatttccttctgaacttacttccctaagtcactttccttatgtatcatctaatacaatgatggttgagtgaaaatacagaaggggtgtttgagtattcagatttcataaaacacttccttggaatatagctgcattaacttggaaagaagcctgttgggccagaagacagaaactccaactggcaaaaaagcaagcatctaagaaaaaaaaccaccaaagttcttgaatttactatatttaaatgcattggttaagtttattttgctaaataaagtgaactgctttttgtctctaaaatgatattctaaataaaaccttaactttttgttgaagatgcactg

SEQ ID NO: 224488 - DNA, 1485 bp, Artificial Sequence
  derived and/or modified sequence
aaagcgccaacccactgcggagacagaaggccgcctaccggggaggccggaggccggctagtcgcggactcgggcgaacccaccctcgcgatctgtcaagtctgtccccaggggaggtccccctttcgggaggaagtttttaaggggatttctcaaaatcacccccgcgcttccttcactccttccttagagccggaggtcggtgagggcccgcggaatcatctatctcgcccccgtcgcaggcagggatacagttcctgcaaggggtcccggggggcgcgggaggcgcaggacgctaggctctgccgtcagcccgcaacagcgctcagtccagggagggaggcccgggtggggggcagccgtaagcccccgctcagcgtgcagccaccggggacttgcgcggccgtggcaccgctggagggggcggcctggggctggggctgcccggcggcgccgcgaccgccttccttcgctgcgtcccgcccgctccacgcctcgctcaccgccgccgcttctccctgccccgcagcgcgcagggaccatgtcggcggagaccgcgagcggccccacagaggaccaggtggaaatcctggagtacaacttcaacaaggtcgacaagcacccggattccaccacgctgtgcctcatcgcggccgaggcaggcctttccgaggaggagacccagaaatggtttaagcagcgcctggcaaagtggcggcgctcagaaggcctgccctcagagtgcagatccgtcacagactaaggagatggcaggcattgacagcttcactccatgaaggccatctctgtttctctcctccgcttaaccaagctgttgtggtttttcagcatagtgttgtatgttccattgctagctgtcctgctgtttaacacagtgttgtattttttttctaaatgtacataattagaaaagaaaataacaataggaagctatgtgtatcttctgtgtaaagcagtggcttcactggaaaaatggtgtggctagcatttccctttgagtcatgatgacagatggtgtgaaaaccatctaagtttgcttttgaccatcacctcccagtagcaatttgctttcataatccatttagcaatccaggcctctgttgaaaagataatatgagggagaagggaacacatttccttctgaacttacttccctaagtcactttccttatgtatcatctaatacaatgatggttgagtgaaaatacagaaggggtgtttgagtattcagatttcataaaacacttccttggaatatagctgcattaacttggaaagaagcctgttgggccagaagacagaaactccaactggcaaaaaagcaagcatctaagaaaaaaaaccaccaaagttcttgaatttactatatttaaatgcattggttaagtttattttgctaaataaagtgaactgctttttgtctctaaaatgatattctaaataaaaccttaactttttgttgaa

SEQ ID NO: 224489 - DNA, 472 bp, Artificial Sequence
  derived and/or modified sequence
ttccaaacccagggcttgcgcttgcctttgcctcttccacagtttctccaaaataaaaaaaaaaagaaaagaaaaacaaatgacaagtttgcaagactgataaaacagcgcgcagggaccatgtcggcggagaccgcgagcggccccacagaggaccaggtggaaatcctggagtacaacttcaacaaggtcgacaagcacccggattccaccacgctgtgcctcatcgcggccgaggcaggcctttccgaggaggagacccagaaatggtttaagcagcgcctggcaaagtggcggcgctcagaaggcctgccctcagagtgcagatccgtcacagactaaggagatggcaggcattgacagcttcactccatgaaggccatctctgtttctctcctccgcttaaccaagctgttgtggtttttcagcatagtgttgtatgttccattgctagctgtcctgctgtttaaca

SEQ ID NO: 224490 - DNA, 1090 bp, Artificial Sequence
  derived and/or modified sequence
ctaccagactaatgacagactgccccactgagaagggtctagcggagcacaggtcaccagctgggcaacattcagaaagttagtcttcctatgctcattttcctgggctgttacagaagaagactggaagagcgcgcagggaccatgtcggcggagaccgcgagcggccccacagaggaccaggtggaaatcctggagtacaacttcaacaaggtcgacaagcacccggattccaccacgctgtgcctcatcgcggccgaggcaggcctttccgaggaggagacccagaaatggtttaagcagcgcctggcaaagtggcggcgctcagaaggcctgccctcagagtgcagatccgtcacagactaaggagatggcaggcattgacagcttcactccatgaaggccatctctgtttctctcctccgcttaaccaagctgttgtggtttttcagcatagtgttgtatgttccattgctagctgtcctgctgtttaacacagtgttgtattttttttctaaatgtacataattagaaaagaaaataacaataggaagctatgtgtatcttctgtgtaaagcagtggcttcactggaaaaatggtgtggctagcatttccctttgagtcatgatgacagatggtgtgaaaaccatctaagtttgcttttgaccatcacctcccagtagcaatttgctttcataatccatttagcaatccaggcctctgttgaaaagataatatgagggagaagggaacacatttccttctgaacttacttccctaagtcactttccttatgtatcatctaatacaatgatggttgagtgaaaatacagaaggggtgtttgagtattcagatttcataaaacacttccttggaatatagctgcattaacttggaaagaagcctgttgggccagaagacagaaactccaactggcaaaaaagcaagcatctaagaaaaaaaaccaccaaagttcttgaatttactatatttaaatgcattggttaagtttattttgctaaataaagtgaactgctttttgtctctaaaatgatattctaaataaaaccttaactttttgttgaaga

SEQ ID NO: 224491 - DNA, 496 bp, Artificial Sequence
  derived and/or modified sequence
cggctagtcgcggactcgggcgaacccaccctcgcgatctgtcaacgcgcagggaccatgtcggcggagaccgcgagcggccccacagaggaccaggtggaaatcctggagtacaacttcaacaaggtcgacaagcacccggattccaccacgctgtgcctcatcgcggccgaggcaggcctttccgaggaggagacccagaaatggtttaagcagcgcctggcaaagtggcggcgctcagaaggcctgccctcagagtgcagatccgtcacagactaaggagatggcaggcattgacagcttcactccatgaaggccatctctgtttctctcctccgcttaaccaagctgttgtggtttttcagcatagtgttgtatgttccattgctagctgtcctgctgtttaacacagtgttgtattttttttctaaatgtacataattagaaaagaaaataacaataggaagctatgtgtatcttctgtgtaaagcagtgg

SEQ ID NO: 224492 - DNA, 1161 bp, Artificial Sequence
  derived and/or modified sequence
acccagggcttgcgcttgcctttgcctcttccacactaatgacagactgccccactgagaagggtctagcggagcacaggtcaccagctgggcaacattcagaaagttagtcttcctatgctcattttcctgggctgttacagaagaagactggaagaggtaatttccaaggttcttcccagctctgaagttgtgtgtcaaagcgcgcagggaccatgtcggcggagaccgcgagcggccccacagaggaccaggtggaaatcctggagtacaacttcaacaaggtcgacaagcacccggattccaccacgctgtgcctcatcgcggccgaggcaggcctttccgaggaggagacccagaaatggtttaagcagcgcctggcaaagtggcggcgctcagaaggcctgccctcagagtgcagatccgtcacagactaaggagatggcaggcattgacagcttcactccatgaaggccatctctgtttctctcctccgcttaaccaagctgttgtggtttttcagcatagtgttgtatgttccattgctagctgtcctgctgtttaacacagtgttgtattttttttctaaatgtacataattagaaaagaaaataacaataggaagctatgtgtatcttctgtgtaaagcagtggcttcactggaaaaatggtgtggctagcatttccctttgagtcatgatgacagatggtgtgaaaaccatctaagtttgcttttgaccatcacctcccagtagcaatttgctttcataatccatttagcaatccaggcctctgttgaaaagataatatgagggagaagggaacacatttccttctgaacttacttccctaagtcactttccttatgtatcatctaatacaatgatggttgagtgaaaatacagaaggggtgtttgagtattcagatttcataaaacacttccttggaatatagctgcattaacttggaaagaagcctgttgggccagaagacagaaactccaactggcaaaaaagcaagcatctaagaaaaaaaaccaccaaagttcttgaatttactatatttaaatgcattggttaagtttattttgctaaataaagtgaactgctttttgtctctaaaatgatattctaaataaaaccttaactttttgttgaaga

SEQ ID NO: 224493 - DNA, 980 bp, Artificial Sequence
  derived and/or modified sequence
gagacagaaggccgcctaccggggaggccggaggccggctagtcgcggactcgggcgaacccaccctcgcgatctgtcaagtctgtccccaggggaggtccccctttcgggaggaagtttttaaggggatttctcaaaatcacccccgcgcttccttcactccttccttagagccggaggtcgcgcgcagggaccatgtcggcggagaccgcgagcggccccacagaggaccaggtggaaatcctggagtacaacttcaacaaggtcgacaagcacccggattccaccacgctgtgcctcatcgcggccgaggcaggcctttccgaggaggagacccagaaatggtttaagcagcgcctggcaaagtggcggcgctcagaaggcctgccctcagagtgcagatccgtcacagactaaggagatggcaggcattgacagcttcactccatgaaggccatctctgtttctctcctccgcttaaccaagctgttgtggtttttcagcatagtgttgtatgttccattgctagctgtcctgctgtttaacacagtgttgtattttttttctaaatgtacataattagaaaagaaaataacaataggaagctatgtgtatcttctgtgtaaagcagtggcttcactggaaaaatggtgtggctagcatttccctttgagtcatgatgacagatggtgtgaaaaccatctaagtttgcttttgaccatcacctcccagtagcaatttgctttcataatccatttagcaatccaggcctctgttgaaaagataatatgagggagaagggaacacatttccttctgaacttacttccctaagtcactttccttatgtatcatctaatacaatgatggttgagtgaaaatacagaaggggtgtttgagtattcagatttcataaaacacttccttggaatatagctgcattaacttggaaagaagcctgttgggccagaagacagaaac

SEQ ID NO: 224494 - DNA, 1117 bp, Artificial Sequence
  derived and/or modified sequence
acccagggcttgcgcttgcctttgcctcttccacactaatgacagactgccccactgagaagggtctagcggagcacaggtcaccagctgggcaacattcagaaagttagtcttcctatgctcattttcctgggctgttacagaagaagactggaagagcgcgcagggaccatgtcggcggagaccgcgagcggccccacagaggaccaggtggaaatcctggagtacaacttcaacaaggtcgacaagcacccggattccaccacgctgtgcctcatcgcggccgaggcaggcctttccgaggaggagacccagaaatggtttaagcagcgcctggcaaagtggcggcgctcagaaggcctgccctcagagtgcagatccgtcacagactaaggagatggcaggcattgacagcttcactccatgaaggccatctctgtttctctcctccgcttaaccaagctgttgtggtttttcagcatagtgttgtatgttccattgctagctgtcctgctgtttaacacagtgttgtattttttttctaaatgtacataattagaaaagaaaataacaataggaagctatgtgtatcttctgtgtaaagcagtggcttcactggaaaaatggtgtggctagcatttccctttgagtcatgatgacagatggtgtgaaaaccatctaagtttgcttttgaccatcacctcccagtagcaatttgctttcataatccatttagcaatccaggcctctgttgaaaagataatatgagggagaagggaacacatttccttctgaacttacttccctaagtcactttccttatgtatcatctaatacaatgatggttgagtgaaaatacagaaggggtgtttgagtattcagatttcataaaacacttccttggaatatagctgcattaacttggaaagaagcctgttgggccagaagacagaaactccaactggcaaaaaagcaagcatctaagaaaaaaaaccaccaaagttcttgaatttactatatttaaatgcattggttaagtttattttgctaaataaagtgaactgctttttgtctctaaaatgatattctaaataaaaccttaactttttgttgaaga

SEQ ID NO: 224495 - DNA, 979 bp, Artificial Sequence
  derived and/or modified sequence
gcggagacagaaggccgcctaccggggaggccggaggccggctagtcgcggactcgggcgaacccaccctcgcgatctgtcaagtctgtccccaggggaggtccccctttcgggaggaagtttttaaggggatttctcaaaatcacccccgcgcttccttcactccttccttagagccggagcgcgcagggaccatgtcggcggagaccgcgagcggccccacagaggaccaggtggaaatcctggagtacaacttcaacaaggtcgacaagcacccggattccaccacgctgtgcctcatcgcggccgaggcaggcctttccgaggaggagacccagaaatggtttaagcagcgcctggcaaagtggcggcgctcagaaggcctgccctcagagtgcagatccgtcacagactaaggagatggcaggcattgacagcttcactccatgaaggccatctctgtttctctcctccgcttaaccaagctgttgtggtttttcagcatagtgttgtatgttccattgctagctgtcctgctgtttaacacagtgttgtattttttttctaaatgtacataattagaaaagaaaataacaataggaagctatgtgtatcttctgtgtaaagcagtggcttcactggaaaaatggtgtggctagcatttccctttgagtcatgatgacagatggtgtgaaaaccatctaagtttgcttttgaccatcacctcccagtagcaatttgctttcataatccatttagcaatccaggcctctgttgaaaagataatatgagggagaagggaacacatttccttctgaacttacttccctaagtcactttccttatgtatcatctaatacaatgatggttgagtgaaaatacagaaggggtgtttgagtattcagatttcataaaacacttccttggaatatagctgcattaacttggaaagaagcctgttgggccagaagacagaaac

SEQ ID NO: 224496 - DNA, 731 bp, Artificial Sequence
  derived and/or modified sequence
gcaccagatctacgctttgaaatgaggcaacatctaactggaaactcgctcaaagtaaggaagtggatgagaagactcagggtcccttttctcttccccgtcttctctcagccacatctctcttatcctatcttggtgaagaagcttgcttggctaggagagaggtcagggacgagaagatagtgacgagaaagttccatgagactctcagaagtcccagcctgaacatcaaacctgaataaccaggagagacgtaacctcggcatactttcagtggtttacctcctgcccacgctgcaggtttttcaggtccttgctcgagtgtgtgctcataggcgtaaataaacgtgctatcagcagcctgcgtcagccagcccagctatttaagcaggctggcatcagcaaacacagcttccaaacccagggcttgcgcttgcctttgcctcttccacactaatgacagactgccccactgagaagggtctagcggagcacaggtcaccagctgggcaacattcagaaagttagtcttcctatgctcattttcctgggctgttacagaagaagactggaagagcgcgcagggaccatgtcggcggagaccgcgagcggccccacagaggaccaggtggaaatcctggagtacaacttcaacaaggtcgacaagcacccggattccaccacgctgtgcctcatcgcggccgaggcaggcctttccgaggaggagaccc

SEQ ID NO: 224497 - DNA, 276 bp, Artificial Sequence
  derived and/or modified sequence
atgctgatcttcctgggctgctacagaagaaggctggaggagcgggccggcaccatgtctgctgagacagccagcggccccacagaggaccaggtggagatcctggagtacaacttcaacaaggtggacaagcacccagacagcaccaccctgtgcctgattgctgctgaggccggcctgtctgaggaggagacccagaagtggttcaagcagaggctggccaagtggaggagaagtgagggcctgcccagtgaatgtagatctgtgacagactag

SEQ ID NO: 224498 - DNA, 276 bp, Artificial Sequence
  derived and/or modified sequence
atgctgatcttcctgggctgctaccggcggcggctggaggagcgggcgggcacaatgtcagctgagaccgcgagcggtccaaccgaagaccaggtggaaattctggaatacaactttaacaaggtggataagcacccagattcaacaactctttgtctaatcgctgcagaagccggcttaagcgaggaggaaactcagaagtggttcaaacagagactggctaagtggcgacgaagcgaaggcctgcccagtgagtgtcgatcggtcaccgattag

SEQ ID NO: 224499 - DNA, 276 bp, Artificial Sequence
  derived and/or modified sequence
atgctgatcttcctgggctgctaccggcggcggctggaggagcgggcaggaactatgagcgcagaaacggcctccgggccaacagaggatcaggtggaaatcctcgagtataactttaataaggttgacaagcatcctgattctacgactttatgtcttatagcagctgaagcagggctctccgaggaagagactcaaaaatggtttaaacaacgccttgcaaaatggagaaggagcgaggggctgccatccgagtgccggtctgtgacagactag

SEQ ID NO: 224500 - DNA, 276 bp, Artificial Sequence
  derived and/or modified sequence
atgctcatatttcttggatgttaccgacgacgcttagaggagagagctggaaccatgtctgctgagacagcatcaggtccgactgaggaccaggttgaaattctggagtataatttcaacaaggttgacaagcacccggatagcacaactctctgcttgatcgcagccgaagcaggattaagtgaggaagaaacacaaaagtggtttaagcagagactcgccaaatggagacgcagcgaaggcctgcccagcgagtgccgttccgtgaccgattag

SEQ ID NO: 224501 - DNA, 276 bp, Artificial Sequence
  derived and/or modified sequence
atgcttattttcctaggctgctatcgccgacggctggaggagcgggctggtacgatgagtgctgaaaccgcctcgggccctacagaggaccaggtggagatcctcgagtataacttcaacaaggtggacaaacatccggattccacaactctgtgtttgatcgccgcagaagccggtctctccgaagaggagacccagaagtggtttaagcagaggctggccaagtggagacgctccgaggggctgccctccgaatgtcggtctgtgaccgattag

SEQ ID NO: 224502 - DNA, 276 bp, Artificial Sequence
  derived and/or modified sequence
atgctgatcttcctgggctgctacagaagaagactggaggagagagccggcaccatgagcgccgagaccgccagcggccccaccgaggaccaggtggagatcctggagtacaacttcaacaaggtggacaagcaccccgacagcaccaccctgtgcctgatcgccgccgaggccggcctgagcgaggaggagacccagaagtggttcaagcagagactggccaagtggagaagaagcgagggcctgcccagcgagtgcagaagcgtgaccgactag

SEQ ID NO: 224503 - protein, 773 aa, Artificial Sequence
  derived and/or modified sequence
QTQTESLTLCSGEAERRGKEEWPDSHHYPGPTPAPESSDGPHKVTVLATMLSSRWWPSSWGILGLGPRSPPRGSQLCALYAFTYTGADGQQVSLAEGDRFLLLRKTNSDWWLARRLEAPSTSRPIFVPAAYMIEESIPSQSPTTVIPGQLLWTPGPKLFHGSLEELSQALPSRAQASSEQPPPLPRKMCRSVSTDNLSPSLLKPFQEGPSGRSLSQEDLPSEASASTAGPQPLMSEPPVYCNLVDLRRCPRSPPPGPACPLLQRLDAWEQHLDPNSGRCFYINSLTGCKSWKPPRRSRSETNPGSMEGTQTLKRNNDVLQPQAKGFRSDTGTPEPLDPQGSLSLSQRTSQLDPPALQAPRPLPQLLDDPHEVEKSGLLNMTKIAQGGRKLRKNWGPSWVVLTGNSLVFYREPPPTAPSSGWGPAGSRPESSVDLRGAALAHGRHLSSRRNVLHIRTIPGHEFLLQSDHETELRAWHRALRTVIERLDRENPLELRLSGSGPAELSAGEDEEEESELVSKPLLRLSSRRSSIRGPEGTEQNRVRNKLKRLIAKRPPLQSLQERGLLRDQVFGCQLESLCQREGDTVPSFLRLCIAAVDKRGLDVDGIYRVSGNLAVVQKLRFLVDRERAVTSDGRYVFPEQPGQEGRLDLDSTEWDDIHVVTGALKLFLRELPQPLVPPLLLPHFRAALALSQIQELIGSMPKPNHDTLRYLLEHLCRVIAHSDKNRMTPHNLGIVFGPTLFRPEQETSDPAAHALYPGQLVQLMLTNFTSLFP

SEQ ID NO: 224504 - protein, 731 aa, Artificial Sequence
  derived and/or modified sequence
MLSSRWWPSSWGILGLGPRSPPRGSQLCALYAFTYTGADGQQVSLAEGDRFLLLRKTNSDWWLARRLEAPSTSRPIFVPAAYMIEESIPSQSPTTVIPGQLLWTPGPKLFHGSLEELSQALPSRAQASSEQPPPLPRKMCRSVSTDNLSPSLLKPFQEGPSGRSLSQEDLPSEASASTAGPQPLMSEPPVYCNLVDLRRCPRSPPPGPACPLLQRLDAWEQHLDPNSGRCFYINSLTGCKSWKPPRRSRSETNPGSMEGTQTLKRNNDVLQPQAKGFRSDTGTPEPLDPQGSLSLSQRTSQLDPPALQAPRPLPQLLDDPHEVEKSGLLNMTKIAQGGRKLRKNWGPSWVVLTGNSLVFYREPPPTAPSSGWGPAGSRPESSVDLRGAALAHGRHLSSRRNVLHIRTIPGHEFLLQSDHETELRAWHRALRTVIERLDRENPLELRLSGSGPAELSAGEDEEEESELVSKPLLRLSSRRSSIRGPEGTEQNRVRNKLKRLIAKRPPLQSLQERGLLRDQVFGCQLESLCQREGDTVPSFLRLCIAAVDKRGLDVDGIYRVSGNLAVVQKLRFLVDRERAVTSDGRYVFPEQPGQEGRLDLDSTEWDDIHVVTGALKLFLRELPQPLVPPLLLPHFRAALALSESEQCLSQIQELIGSMPKPNHDTLRYLLEHLCRVIAHSDKNRMTPHNLGIVFGPTLFRPEQETSDPAAHALYPGQLVQLMLTNFTSLFP

SEQ ID NO: 224505 - protein, 299 aa, Artificial Sequence
  derived and/or modified sequence
MTKIAQGGRKLRKNWGPSWVVLTGNSLVFYREPPPTAPSSGWGPAGSRPESSVDLRGAALAHGRHLSSRRNVLHIRTIPGHEFLLQSDHETELRAWHRALRTVIERLDRENPLELRLSGSGPAELSAGEDEEEESELVSKPLLRLSSRRSSIRGPEGTEQNRVRNKLKRLIAKRPPLQSLQERGLLRDQVFGCQLESLCQREGDTVPSFLRLCIAAVDKRGLDVDGIYRVSGNLAVVQKLRFLVDRERAVTSDGRYVFPEQPGQALSESEQCLSQIQELIGSMPKPNHDTLRYLLEHLC

SEQ ID NO: 224506 - protein, 640 aa, Artificial Sequence
  derived and/or modified sequence
MLSSRWWPSSWGILGLGPRSPPRGSQLCALYAFTYTGADGQQVSLAEGDRFLLLRKTNSDWWLARRLEAPSTSRPIFVPAAYMIEESIPSQSPTTVIPGQLLWTPGPKLFHGSLEELSQALPSRAQASSEQPPPLPRKMCRSVSTDNLSPSLLKPFQEGPSGRSLSQEDLPSEASASTAGPQPLMSEPPVYCNLVDLRRCPRSPPPGPACPLLQRLDAWEQHLDPNSGRCFYINSLTGCKSWKPPRRSRSETNPGSMEGTQTLKRNNDVLQPQAKGFRSDTGTPEPLDPQGSLSLSQRTSQLDPPALQAPRPLPQLLDDPHEVEKSGLLNMTKIAQGGRKLRKNWGPSWVVLTGNSLVFYREPPPTAPSSGWGPAGSRPESSVDLRGAALAHGRHLSSRRNVLHIRTIPGHEFLLQSDHETELRAWHRALRTVIERLDRENPLELRLSGSGPAELSAGEDEEEESELVSKPLLRLSSRRSSIRGPEGTEQNRVRNKLKRLIAKRPPLQSLQERGLLRDQVFGCQLESLCQREGDTVPSFLRLCIAAVDKRGLDVDGIYRVSGNLAVVQKLRFLVDRERAVTSDGRYVFPEQPGQEGRLDLDSTEWDDIHVVTGALKLFLRELPQPLVPPLLLPHFRAALG

SEQ ID NO: 224507 - protein, 547 aa, Artificial Sequence
  derived and/or modified sequence
MSEPPVYCNLVDLRRCPRSPPPGPACPLLQRLDAWEQHLDPNSGRCFYINSLTGCKSWKPPRRSRSETNPGSMEGTQTLKRNNDVLQPQAKGFRSDTGTPEPLDPQGSLSLSQRTSQLDPPALQAPRPLPQLLDDPHEVEKSGLLNMTKIAQGGRKLRKNWGPSWVVLTGNSLVFYREPPPTAPSSGWGPAGSRPESSVDLRGAALAHGRHLSSRRNVLHIRTIPGHEFLLQSDHETELRAWHRALRTVIERLDRENPLELRLSGSGPAELSAGEDEEEESELVSKPLLRLSSRRSSIRGPEGTEQNRVRNKLKRLIAKRPPLQSLQERGLLRDQVFGCQLESLCQREGDTVPSFLRLCIAAVDKRGLDVDGIYRVSGNLAVVQKLRFLVDRERAVTSDGRYVFPEQPGQEGRLDLDSTEWDDIHVVTGALKLFLRELPQPLVPPLLLPHFRAALALSESEQCLSQIQELIGSMPKPNHDTLRYLLEHLCRVIAHSDKNRMTPHNLGIVFGPTLFRPEQETSDPAAHALYPGQLVQLMLTNFTSLFP

SEQ ID NO: 224508 - DNA, 2322 bp, Artificial Sequence
  derived and/or modified sequence
cagacacagaccgaatctttaactctgtgtagtggagaagccgaacgaagaggtaaggaggaatggccagattcccaccactaccccggacccacccccgcccccgagtcctccgatggcccccataaggtgaccgttctcgcaacgatgttgtcttctcggtggtggccctcatcctggggcatccttggcctcggtcctagatcaccaccacgaggcagtcaactttgtgctctgtacgctttcacctacactggagctgatggacagcaggtgagcttagctgagggcgaccgttttctgcttctgaggaaaactaacagcgattggtggctggccagaagactcgaagcgcctagtacgagcaggcccatctttgttcctgctgcgtacatgattgaagagtccatcccaagtcagtcaccaactaccgtgatacctggccaactgctctggacgcctgggcccaaattgttccatggaagtctggaagagttgtcccaggcattgccatcaagagctcaggcatccagcgagcagccacccccactccctcggaagatgtgtcgctcagtcagtactgataaccttagtccctccctcctcaagcccttccaagagggccccagtggtcggtccctgtctcaggaagacctgccatctgaggctagcgcctcaacagctggcccccaacctctgatgtctgagcccccagtgtactgtaatctggtggacctgcgccggtgtccgcgcagtccacctcccggccctgcatgtccattgctgcagagactagatgcttgggaacagcacttagacccgaatagcggaaggtgtttctacatcaattctctcaccggctgtaaatcttggaagccccctcggcgttctcgatccgagacaaatcctgggtctatggagggaacccaaacattgaaacgcaataatgacgtactccagccccaagccaagggatttagaagcgacactggtacccccgaaccgctggatccccaaggaagcctgtcgttgtcacagaggacgtcccagctggatcctcccgcattacaggcccctagaccactgcctcagctgctagatgaccctcatgaggtcgaaaaaagcgggcttttgaacatgaccaagatcgctcagggagggaggaaattgcgtaaaaactgggggccaagctgggtcgtcttgactggcaacagtctcgtgttttatagagaacctccgcctaccgcgccaagtagcggctggggccctgctggctccaggcctgagtcatcggtggacctgcgaggggcggctctggcacacggaagacatctgtccagcagaaggaatgtactccacatcaggaccatccctggtcatgagtttctccttcagagcgatcacgagaccgagctgcgggcctggcaccgtgcactgagaacagtaatagaaagattggatcgcgaaaatcctctcgagctgcgcctgtctggatccggacccgccgaactatccgccggcgaggatgaagaggaggaaagcgaactggtgtccaaacccctcctacgcctttcgtcaaggaggtctagcattcggggacccgagggtacagagcaaaacagggtgaggaataagctaaagagactaattgctaagcgccccccgctccagagcctgcaagaaagaggccttcttcgggatcaggtcttcggatgtcaattggaaagcctgtgccagcgggaaggggatacggtccctagctttctcagactctgcatcgcagctgtcgacaaaagagggctggacgtcgatgggatttatcgcgtgagcggaaacctggccgtggtgcagaaactcaggttcctggtggaccgggagagagcagtaacctccgatggccggtacgtgtttcccgagcagcccggtcaggaggggagactagatttagatagcacggaatgggatgatatacacgtggtgactggagctttgaaacttttcctgcgggaactgccacagcctctggttcctcccctgctgctgcctcatttcagagccgctctggccctcagccagatacaggagctgatcgggtccatgcccaaacctaaccacgatactctgcggtacctgttagagcatctttgcagggttatagctcatagcgacaagaacaggatgacgcctcacaaccttggaatcgtcttcggcccaacactattccgcccggaacaggaaacctcagatcccgccgctcacgccttgtatcctgggcaacttgtccagctgatgttgactaatttcacctccctcttcccgtag

SEQ ID NO: 224509 - DNA, 2196 bp, Artificial Sequence
  derived and/or modified sequence
atgctcagttccaggtggtggcccagctcctgggggattctgggtctgggaccccgctctcccccacggggctcacaattgtgcgcgttgtacgctttcacttataccggggccgatggacaacaggtgtctctggccgagggcgacagatttctcttgctgaggaaaacaaactccgactggtggctggcacgacggctggaagcaccctctacctctagacccatctttgtgccagccgcttacatgattgaagaaagcatcccctcccagtcacctacaactgtgattcctggacagctcttgtggacgcccggcccgaagcttttccatggctccttggaagaactatcccaagcactccctagccgagcacaggcttcttctgagcaacctccacccctacccagaaagatgtgtcggagcgtctcgaccgacaatctaagccctagtctactaaaacctttccaggaaggccctagtggacggagcctgtcgcaggaagatctccccagcgaggcctctgcaagcacagccggtccacagcccctgatgtccgaaccccccgtgtactgcaacctggtcgatctgcgcaggtgccctcgttcaccccccccgggaccagcatgtcctctgctgcaacgtctggacgcttgggagcagcacctggaccctaactccggccgttgcttctacattaattcactgacaggttgtaagagttggaagcctcctagaaggtctcgcagcgagaccaacccaggctccatggagggtacacagacactgaagagaaataatgacgtgctgcaacctcaggctaagggtttccggagcgacactggcacccctgagcccctggatccccagggcagtctgagtctctctcagcgcacatctcaactagatcccccagcactccaagcacctcgcccacttccgcagcttctggatgatccacacgaggtggaaaagagtggactgctgaacatgaccaaaatcgcccaggggggcaggaaacttagaaagaactgggggccctcttgggtggtactaactggtaattccttagtattctacagagaaccaccgcctaccgccccgagtagtggttggggccccgccggttcacgccctgagagctctgtggacctccggggtgccgcgttagcacatggaaggcacctctcttcgaggaggaatgtgttacatattcgaactattcctggccatgaattcctattacagtcagatcatgaaactgaactgagagcatggcacagggccttgaggacagtgatcgagagactggaccgggagaacccattagaacttcggctctctgggagcgggcctgcagagctgtccgcgggggaggacgaagaagaggaatctgagctggtgtccaagccacttttaaggctgagtagccggcgctcaagtatccgcgggcctgaggggacagaacagaatagagtgagaaataagcttaagaggctgatcgctaaacgtccgcccctacagtctctccaggagcggggtcttcttcgcgaccaggtgtttgggtgtcagctcgagagcctctgtcagagagaaggtgatacagtgccctcttttctgcgcctatgtatagctgccgttgacaagagagggctggacgtggacggaatttatagagtgtcgggcaatctcgctgtggtccagaaactccggtttctcgtggaccgagagcgcgcagtaacgtctgacggtcggtatgtgttccccgagcaaccgggtcaggaaggtcggctggacctggactccaccgaatgggacgatattcacgtagtgacaggagccttaaagttgtttcttcgggaattgccacagcccttggtaccacccctcctgctgccccatttccgggctgcactcgcgctaagtgagtcggagcaatgcttgagccagattcaggaattgattgggtccatgcccaagcccaaccacgataccctacggtacctgctcgagcacctgtgccgcgtgattgctcactccgacaaaaatcgtatgacgccgcataatcttggtatagtatttggacctacactatttagaccggagcaagagacgagcgaccccgcagcacacgccctgtacccaggccagctggtacaacttatgctcactaactttacgagtctgttcccctag

SEQ ID NO: 224510 - DNA, 2322 bp, Artificial Sequence
  derived and/or modified sequence
cagacccagacagagagcctgaccctgtgcagcggggaggccgagcggcggggcaaggaggagtggccagacagccaccactacccaggccccaccccagcccctgagagcagtgatggcccccacaaggtgacagtgctggccaccatgctgagcagccgctggtggcccagctcctggggcatcctgggcctgggccccaggagccccccccggggcagccagctgtgtgccctgtatgccttcacctacacaggagcagatggccagcaggtgtccctggccgagggggaccgcttcctgctgctgaggaagaccaacagcgactggtggctggcccggcggctggaggcccccagcaccagccggcccatctttgtgcctgctgcctacatgattgaggagagcatccccagccagagccccaccaccgtcatccctggccagctgctgtggaccccaggccccaagctgttccacggcagcctggaggagctgagccaggccctgcccagccgggcccaggccagcagcgagcagcccccacccctgcccaggaagatgtgccgctctgtgtccacagacaacctgagccccagcctgctgaagcccttccaggagggccccagcggccgcagcctgagccaggaggacctgcccagcgaggccagcgccagcacagctggcccccagcccctgatgtctgagccccctgtgtactgcaacctggtggacctgcggcgctgccccaggagccccccacctggccctgcctgccccctgctgcagaggctggatgcctgggagcagcacctggaccccaacagcggccgctgcttctacatcaacagcctgaccggctgcaagtcctggaagcccccaagaagaagccgctctgagaccaaccctggctccatggagggcacccagaccctgaagaggaacaatgatgtgctgcagccccaggccaagggcttcagaagtgacaccggcaccccagagcccctggacccccagggcagcctgagcctgagccagaggaccagccagctggaccccccagccctgcaggccccccggcccctgccccagctgctggatgacccccatgaggtggagaagagcggcctgctgaacatgaccaagatcgcccagggcggcaggaagctgaggaagaactggggccccagctgggtggtgctgaccggcaacagcctggtgttctaccgggagcccccacccacagcccccagcagcggctggggccctgctggcagcaggcctgagagctctgtggacctgcggggagctgccctggcccacggccgccacctgagcagcagaagaaatgtgctgcacatccgcaccatccctggccacgagttcctgctgcagagcgaccacgagacagagctgcgggcctggcaccgggccctgaggacagtgattgagcggctggaccgggagaaccccctggagctgcggctgagcggcagcggccctgctgagctgtctgctggggaggatgaggaggaggagagcgagctggtgtccaagcccctgctgcggctgagcagcagaagaagcagcatccggggccctgagggcacagagcagaacagagtgaggaacaagctgaagaggctcatcgccaagaggcctcccctgcagagcctgcaggagcggggcctgctgcgggaccaggtgtttggctgccagctggagagcctgtgccagcgggagggggacacagtgcccagcttcctgcggctgtgcatcgctgctgtggacaagaggggcctggatgtggatggcatctacagagtgtctggcaacctggccgtggtgcagaagctgcgcttcctggtggaccgggagagagctgtgaccagtgatggccgctacgtgtttcctgagcagcccggccaggagggccgcctggacctggacagcacagagtgggatgacatccacgtggtgactggagccctgaagctgttcctgcgggagctgccccagcccctggtgccccccctgctgctgccccacttccgggccgccctggccctgagccagatccaggagctgattggctccatgcccaagcccaaccacgacaccctgcgctacctgctggagcacctgtgccgggtgattgcccacagcgacaagaacaggatgaccccccacaacctgggcatcgtgtttggccccaccctcttccggcctgagcaggagaccagtgaccctgctgcccacgccctgtacccaggccagctggtgcagctgatgctgaccaacttcaccagcctcttcccctag

SEQ ID NO: 224511 - DNA, 2196 bp, Artificial Sequence
  derived and/or modified sequence
atgctgagcagccgctggtggcccagctcctggggcatcctgggcctgggccccaggagccccccccggggcagccagctgtgtgccctgtatgccttcacctacaccggggctgatggccagcaggtgtccctggccgagggggaccgcttcctgctgctgaggaagaccaacagcgactggtggctggcccggcggctggaggcccccagcaccagccggcccatctttgtgcctgctgcctacatgattgaggagagcatccccagccagagccccaccaccgtcatccctggccagctgctgtggaccccaggccccaagctgttccacggcagcctggaggagctgagccaggccctgcccagccgggcccaggccagcagcgagcagcccccacccctgcccaggaagatgtgccgctctgtgtccacagacaacctgagccccagcctgctgaagcccttccaggagggccccagcggccgcagcctgagccaggaggacctgcccagcgaggccagcgccagcacagctggcccccagcccctgatgtctgagccccctgtgtactgcaacctggtggacctgcggcgctgccccaggagccccccacctggccctgcctgccccctgctgcagaggctggatgcctgggagcagcacctggaccccaacagcggccgctgcttctacatcaacagcctgaccggctgcaagtcctggaagccaccccggcgcagccgctctgagaccaaccctggctccatggagggcacccagaccctgaagagaaataatgatgtgctgcagccccaggccaagggcttcagaagtgacaccggcaccccagagcccctggacccccagggcagcctgagcctgagccagaggaccagccagctggaccccccagccctgcaggccccccggcccctgccccagctgctggatgacccccatgaggtggagaagagcggcctgctgaacatgaccaagatcgcccagggcggcaggaagctgaggaagaactggggccccagctgggtggtgctgactggaaacagcctggtgttctaccgggagcccccacccacagcccccagcagcggctggggccctgctggcagcaggcctgagagctctgtggacctgcggggggccgccctggcccacggccgccacctgagcagcagaagaaatgtgctgcacatccgcaccatccctggccacgagttcctgctgcagagcgaccatgaaacagagctgcgggcctggcaccgggccctgaggacagtcatcgagcggctggaccgggagaaccccctggagctgcggctgagcggcagcggccctgctgagctgtctgctggagaagatgaggaggaggagagcgagctggtgtccaagcccctgctgcggctgagcagccgccgcagcagcatccggggccctgagggcacagagcagaacagagtgaggaacaagctgaagaggctgattgccaagaggcctcccctgcagagcctgcaggagcggggcctgctgcgggaccaggtgtttggctgccagctggagagcctgtgccagcgggagggggacacagtgcccagcttcctgcggctgtgcatcgctgctgtggacaagaggggcctggatgtggatggcatctacagagtgtctggcaacctggccgtggtgcagaagctgcgcttcctggtggaccgggagagagctgtgaccagtgatggccgctacgtgtttcctgagcagcccggccaggagggccgcctggacctggacagcacagagtgggatgacatccacgtggtgactggagccctgaagctgttcctgcgggagctgccccagcccctggtgccccccctgctgctgccccacttccgggccgccctggccctgtctgagagcgagcagtgcctgagccagatccaggagctgattggctccatgcccaagcccaaccacgacaccctgcgctacctgctggagcacctgtgccgggtgattgcccacagcgacaagaacaggatgaccccccacaacctgggcatcgtgtttggccccaccctcttccggcctgagcaggagaccagtgaccctgctgcccacgccctgtacccaggccagctggtgcagctgatgctgaccaacttcaccagcctcttcccctag

SEQ ID NO: 224512 - DNA, 2322 bp, Artificial Sequence
  derived and/or modified sequence
cagacccagaccgagagcctgaccctgtgcagcggcgaggccgagcgccgggggaaagaggagtggcccgactcgcaccactacccgggccccacaccagcccctgaaagttctgacgggccacacaaagttaccgtccttgcaaccatgttaagttctcggtggtggccttcttcttggggaatcctcggcctcggaccgaggtccccaccacgggggagccagctttgtgccctgtatgcctttacttacaccggagccgatggccagcaagtgtcactcgcagagggcgatcggtttttgctgctcagaaagaccaactcagattggtggctcgccaggcgcctggaagctccgtcaacctctaggccaatctttgttcctgctgcgtacatgatcgaggaaagcatcccttctcaaagtccaaccacagtaatacctgggcaattattatggacaccgggccctaaattatttcatgggtcacttgaggagcttagtcaagctctgccctcacgagctcaggcttcttccgagcagcctcctcccctgcccagaaaaatgtgcagatccgtgtctactgataacctgagcccctccctcctaaagccgtttcaggagggcccgagcggcaggtctctctcacaagaggaccttccaagtgaggcgtcagccagcacggctggcccacagcccttgatgtcagaaccccctgtttattgtaacctcgtggatttacggaggtgccctagatctcctccgcctggccccgcatgcccgctcctacaaagactggatgcatgggagcaacatctggacccgaattctggtcgctgtttttatattaattctctgactggctgtaaatcttggaagccgcctaggcgttcccggagcgaaacaaaccctggctctatggagggaactcagaccctcaagaggaacaacgatgttttacagccgcaggcaaaagggttccggagtgatactggcactccagagccattagacccccagggatcactgtcgctttctcagcgcacgtcccagttggacccccccgctttgcaggcccccaggcctttgcctcaactcctggatgacccccacgaggttgaaaagagcggcctcctaaatatgaccaagatcgcacagggtgggagaaaactgagaaagaactggggccccagttgggttgtactcacgggcaactccctggtgttttaccgtgagccccctcccacagccccaagctcaggctggggacccgctggttcacggcccgagtcatccgtggacttgcgcggggccgctctggcccatggacgtcacctgtcaagtcgtcggaatgtgctccatattagaacaattcctggacacgagtttcttctgcagagtgaccatgagacagaattgcgtgcctggcaccgggcccttagaaccgttatagaacgcctggatcgggagaaccccctagaattgcggttgtcgggatctggaccggccgagctctccgccggtgaagatgaggaagaggagtcggaactggtgtctaagcctctgctgcggctgtccagtagaaggtcctccattcgagggcctgaaggcacagagcaaaacagagtgagaaacaagctgaaaaggctaatagcaaagagaccgcctctgcagagtttgcaagagcgagggctgctgagggaccaggtctttggctgtcaactggagtccctttgccagcgtgagggtgacactgtgccatcgtttctcagactttgcattgcagccgtggacaaaaggggactcgacgtggacggaatttaccgcgtctcgggaaacctggccgttgtgcagaagctccgcttccttgttgaccgggagcgtgccgtaacctctgacggcaggtacgtctttcctgaacagcctgggcaagaggggcggctggatctggattcaacggaatgggatgacatacatgttgtgacaggtgccctgaagttgtttctccgcgagctaccccaacctttggtccccccactgctgcttccccactttagggcagctcttgccctgtcacagatccaggaactgatcgggagtatgcccaaacccaaccacgacacgctcagatatttactcgaacatttatgtagagttatagctcacagcgacaagaataggatgactccacacaacctgggcattgtttttggacccacgctgttccgaccagaacaggaaacttccgacccagccgcccatgctttgtatcctggacagctggtgcagttgatgctgactaactttacgagcctctttccatag

SEQ ID NO: 224513 - DNA, 2196 bp, Artificial Sequence
  derived and/or modified sequence
atgctgagcagccggtggtggcccagcagctggggcatcctgggcctgggcccaaggtcccctccgcgggggtcacaactgtgcgccctttatgcgttcacttacaccggggctgatgggcagcaggtctccctggccgaaggagatcgttttctcctcctgaggaaaacaaactctgactggtggttagcgcgcagactggaggcgccttctacttccagaccaatattcgtgccagccgcgtacatgattgaagaatcaatcccttcccaatccccaaccaccgtgatccccggacagttactctggacccctggaccaaagttattccacggctcactcgaagaactgagtcaagctcttccctcacgggcccaggcttcctcagagcaacctccacctcttcccaggaaaatgtgtcgatcagtgtcaaccgataaccttagtccatccctgctgaagccttttcaggagggaccctcaggccgatccctgtcccaggaagatttgccatctgaggcttccgccagtactgccgggccccagccattgatgagcgaacctcccgtgtattgcaatcttgtggacctgcgacggtgcccacgctctccaccacccggcccggcatgccctctgctgcaacggctcgatgcctgggaacagcatcttgatccaaattctgggaggtgcttctacattaattccctgaccggctgcaagagctggaaaccaccgagacggtcccggtcagagacaaaccccggcagcatggaggggacccagacacttaaaagaaataacgacgtactccagccacaggccaaaggcttcagaagtgatactgggacacccgagcccctcgatcctcagggaagcctgtccctctctcagcgaacttctcagctagaccctccggctctgcaagctccccggccactgccacagctgctcgatgacccgcacgaggttgaaaaatccgggctattgaacatgaccaagatcgcacaaggaggccgaaagctccggaaaaattggggaccatcatgggtagtactgacaggtaattcgctagtgttctatagggagcccccacctacagccccctcctccgggtggggcccggctggctctagaccagagtcttccgtggaccttcgaggagcggccttagcccacggtcgccatttgtcatccagacgcaatgtgctgcatataagaaccattccgggtcacgaattcctgcttcagtccgatcacgaaacggaactgcgggcttggcacagagctctgcggaccgtcatcgagagactggatagggagaatccactggagcttcgactctccgggagtggacccgcagagctgtccgcaggcgaagacgaggaagaggagagtgagttggtttccaagcccctcctgcgtctgagctcgaggcgttcttccattcgcggacccgaaggaaccgaacagaatcgtgtgaggaataagctgaagagactgatagccaaacggccaccgcttcagagcttgcaggagcgtggattactccgcgaccaagtctttggttgtcagcttgaaagcctctgccaacgggagggggatacagtgccgagtttccttcgcctgtgcatcgccgctgtcgacaagagaggattagacgtggatgggatctatcgagttagtggtaatctcgcagtggtgcagaaactacggttcctcgtggaccgtgaaagagccgtgacaagcgacggccggtatgtgttccctgaacagcctggacaggagggacgcctcgatctggatagtacagagtgggacgacattcacgttgttaccggcgcccttaaactctttctccgtgaactcccccagccactggtcccacccctgttgctgccacatttcagagcggcccttgcgctctccgagagcgagcagtgcctctcccagatccaggaactcattggctcgatgcccaagcctaaccacgacacactgagataccttctggagcacctgtgtagggttatcgcgcactctgataaaaataggatgacaccccataatctcgggatcgtcttcggtccaacactgtttcggcctgagcaggagacaagcgaccccgcggcgcacgcgctatacccaggccagctggtgcagctgatgcttactaactttacatccctgttcccctag

SEQ ID NO: 224514 - DNA, 2322 bp, Artificial Sequence
  derived and/or modified sequence
cagacccagaccgagtcacttacattgtgctcaggcgaggcagagagacgaggtaaggaggagtggcctgattcacaccactatccaggtccaactccggcaccagagagttctgacgggcctcacaaagtgactgtgctggccaccatgttgtcctcacgttggtggccgagttcttgggggatacttgggctgggccctcgttctcctcccagaggatcccagctttgcgccctctatgcattcacttatacaggggcagacgggcagcaagtgtcgctggccgaaggcgatagattcctgctcctcagaaaaacaaactctgattggtggctcgcacggaggctcgaagctccctccactagtagacccattttcgtacctgcagcatacatgatcgaagagtccatccccagccaatctcctacaaccgtgatcccgggacaactcttgtggacacccggtccaaaactgttccacggctcactggaagagctttcccaggcactgccatctcgcgctcaagcgtcaagtgaacaacccccaccactcccccgaaaaatgtgtcgctcggtgagtaccgacaatctgagtcctagtctacttaagcccttccaggaaggcccaagcggccgtagcctctcgcaggaggaccttccatcggaggcaagcgcttccaccgctggacctcagccactcatgagcgagccccctgtgtactgcaacctcgtggacctaagaaggtgccctagaagcccacccccaggtcctgcctgtcccttgctccagcggctcgatgcttgggagcaacatctggatcctaatagcggtcgttgtttctacatcaactcgctgaccgggtgcaagagctggaaaccaccacggaggagtaggtccgaaacaaaccccggttcaatggaagggactcagactctgaaacgcaacaatgatgttctgcagccacaggccaaaggctttcgcagtgataccggcacccccgagccgctggacccccagggctctctcagtctatcacagcgtacgtcacagctggaccctccggcactgcaggcccctagaccccttccacagctgctggatgacccccacgaggtcgagaaatccggacttctcaacatgactaagattgcccaggggggaagaaagctgaggaagaattggggaccttcttgggttgtcctgactgggaattccttggtattttatagggagcccccaccaacagccccatcatctgggtgggggccagctggaagtcgacctgaatcctccgtggatttaaggggtgcagctctggcccatggaaggcatttatcatctcgtaggaacgtgttgcacatcaggactatcccgggacatgagtttctgttgcagagcgaccacgagacagaactccgggcttggcacagagcgttaagaaccgttattgagagattagatcgtgagaatccgctcgaactgcgtctgagtggaagtggaccagccgagctatctgcaggagaggacgaggaggaagagagtgagctcgtgtctaagccactccttcggctttcatctagaagatcatcaatacggggacccgaaggcactgagcagaacagggtcagaaataagttgaagagactcattgctaagagaccaccactgcagtccctccaggaaaggggccttctgagggaccaggtttttggctgtcagctggaatcactgtgtcagcgcgaaggagatacggtgcctagcttcctgcgcctttgtattgccgcagttgacaagcgcggattggatgttgacggcatttatagagtttcagggaacctagcagttgttcagaagctccggttcctggtcgaccgcgagcgtgcagtcacctctgacggcagatacgtctttccagaacagccgggacaggagggccgtcttgacctagactctaccgaatgggatgacattcacgttgtgacaggagccctcaagctgttcctacgagagttgccacagccgttggtacccccactgctgctgccacatttccgggcagcgctggccctctctcagattcaggaactgattggcagtatgccaaagcctaaccacgataccctccgatatctgctggagcatctctgtagagtgatagcccatagtgataagaataggatgaccccacacaacttggggatcgtctttggaccaaccctgttcaggcctgaacaggaaaccagtgaccccgcagcccatgctctctaccccggtcagctggttcagctcatgctgacgaacttcacttctctgttcccctag

SEQ ID NO: 224515 - DNA, 2196 bp, Artificial Sequence
  derived and/or modified sequence
atgctatctagtaggtggtggccctcgtcctggggtattctgggcctgggcccacggtcaccgcctcgaggttctcaactgtgtgctctgtatgccttcacatatacgggcgcagacggacagcaagtgagtctggctgagggtgatcgctttctgctgctgagaaagactaactctgactggtggctcgcccgtcgcttagaggcccctagcacgtcccgcccaatttttgttccagccgcttatatgattgaggagagtatccccagtcagtcacctaccactgtaatccctggtcagttgttgtggacacccggtccaaagttgtttcacggaagcttagaggagttatcgcaggcccttccctcacgcgcacaagcaagtagcgaacagcccccaccactgccaaggaagatgtgtcgtagcgtgtccactgataatctgagcccatctctgttgaaaccttttcaggaaggaccctctggtcggagtttaagccaggaggacttgccgtccgaggcttctgcaagcaccgccggacctcagccgctgatgtcagagccacccgtctactgcaacctcgttgatttgagaaggtgtccacgaagtcccccacctggaccagcatgccccttactgcagcgcctggacgcctgggagcaacatttggatccaaatagtggaaggtgtttttacatcaacagtttgacaggatgtaagtcatggaagccgcctcgcaggagcagatctgaaacgaatcccggatccatggaagggacacaaacccttaagcgtaacaatgacgtgctccaacctcaagctaaaggatttaggtcagataccggaaccccggaaccgttggaccctcagggttcactgagcctaagtcaaaggacttctcagcttgacccaccggcactccaggccccacgaccactgcctcaactgctcgacgatcctcatgaggtggagaaatcgggtctcctcaacatgaccaagattgctcaggggggaagaaagctccgcaagaactgggggccttcttgggtggttttgactggcaactccctcgtcttttacagggagccacccccaacggccccatccagcgggtggggacctgcaggaagtcggcctgaaagtagtgtggacctccgcggtgccgcactcgctcacggtagacacttatcgagccggaggaatgtcctccatattcgcaccataccaggtcacgagttcctgttacagagcgaccacgagacagagctcagggcctggcatagggccttaagaacagtgatcgagcggctcgatagggaaaaccccttagaattgaggctgtctggcagtggccctgccgaactcagcgccggagaggacgaggaggaggagagcgagctcgtttctaaaccccttctgaggctatctagtagacgtagtagcatcaggggcccagaaggcaccgaacagaacagggttagaaacaaactaaaaaggcttatcgctaaacggccacccttgcagagcttgcaagaaagaggcctcctccgcgaccaggtgttcggctgtcaactcgaaagtctgtgtcaacgggaaggcgacactgtgccgtcattcctgcgattatgtatcgccgctgttgataaaaggggtcttgacgtggacgggatataccgggttagcggcaatctcgcggtggttcagaaactgcggttcctcgtcgatcgagagagggctgtaactagcgatggacgttatgtgtttcctgagcaacccggacaagaaggcagactggacctggattccacagaatgggatgacattcatgtggtgaccggggcactcaagctatttctgcgggagctgccacagcccctcgtgccgcctcttttgttgccccacttcagggcggctctggccctgtctgagtcagaacagtgcctttcccaaatccaggagctgattggctctatgcccaaacccaatcatgacacactaagatatctcctggaacatttatgccgggtcattgcccacagcgacaaaaaccgaatgaccccccataacttaggtattgtgttcggtccaacgctgttcaggcctgaacaggaaactagcgatcctgccgcacacgcactctacccagggcaactggtgcagctgatgcttactaacttcacgagcctctttccttag

SEQ ID NO: 224516 - DNA, 2573 bp, Artificial Sequence
  derived and/or modified sequence
caaacccaaacagaaagcctcacattgtgcagtggagaagctgagagaagaggaaaagaggagtggccagactcccaccactacccaggaccaactcctgctcctgaatcttctgatgggccccacaaggtgacagtgctggctacaatgctatccagccggtggtggccaagttcctgggggatcctagggctgggcccccgaagccctcctcggggatcccagctctgtgccctctatgcctttacttatactggggcagatggccagcaggtgtctctggctgaaggggataggttcctactgcttcgaaagaccaactccgactggtggttggcaagacgcctagaagctccctccacctctcgacccatcttcgtcccagcagcctatatgatagaggaatccatcccttcccagagtccaactaccgtcatccccggccaattgctctggactcctgggccgaagttgtttcatggttccctggaggagttgtctcaggccctcccaagcagggctcaggctagctcggagcagcctcctccacttccccgcaaaatgtgtaggagcgtcagcactgacaatctgagccccagccttctgaagcctttccaggaaggaccaagcggaagatccctctcccaggaagacttgccgtcagaagccagtgccagcacagcaggcccccagcccctcatgtcagagccccctgtgtactgtaacctggtggaccttcgccgctgtcctcggtccccacccccaggccctgcatgccccctgctgcagaggctggatgcctgggagcagcacctggaccccaactctggacgctgcttctacataaattcactgactggctgcaagtcctggaagcccccgcgccgcagtcgcagcgagacgaaccctggctccatggaggggacacagaccctgaagaggaacaatgatgtcctgcaacctcaggcaaagggcttcagatctgacacagggaccccagaaccgcttgacccacagggttcactcagcctcagccaacgcacctcgcagcttgaccctccagccttgcaggcccctcgacctctgccgcagctcctggacgacccccatgaggtggaaaagtcgggtctgctcaacatgaccaagattgcccaaggggggcgcaagctcaggaagaactggggcccgtcttgggtggtgttaacgggtaacagcctggtgttctaccgagagccaccgccgacagcgccctcctcaggctggggaccagcgggtagccggcccgaaagtagcgtggacctgcgcggggcggccctggcgcacggccgccacctgtccagccgccgcaacgtcctgcacatccgcacgatccctggccacgagttcctgctgcagtcggaccacgagacagagctgcgagcctggcaccgcgcgctgcggactgtcatcgagcggctggatcgggagaaccccctggagctgcgtctgtcgggctctggacccgcggagctgagcgccggggaggacgaagaagaggagtcggagctggtgtccaagccgctgctgcgcctcagcagccgccggagctccattcgggggcccgaaggcaccgagcagaaccgcgtgcgcaacaaactaaagcggctcatcgcgaagagaccgcccttacaaagcctgcaggagcggggtctgctccgagaccaggtgttcggctgccagttggaatcactctgccagcgggaaggagacacggtgcccagctttttgcggctctgcattgctgctgtggataaaagaggtctagatgtggatggcatttatcgggtgagcgggaacttggcagtggtccagaagcttcgctttctggtggacagagagcgtgcggtcacctccgatgggaggtatgtgttcccagaacagccaggacaagaaggtcggttagatttggacagtactgagtgggatgacattcatgtggtcaccggagccctgaagctttttctccgggagctgccccagcctctggtgccaccactgctgctgccccatttccgtgctgcccttgcactctctcagatacaagaattaataggctcaatgccaaagcccaaccatgacactctacggtacctcctggagcatttatgcagggtgatagcacactcagataagaatcgcatgacaccccacaacctgggaattgtgtttggaccaaccctgtttcggccagagcaggagacatctgacccagcagcccatgctctctacccagggcagctggtccagctgatgctcaccaacttcaccagcctcttcccctgatgcagggaaggaagaagagaaaacatatttccggtcatctctggtggtgagaggctggtgttctgttttgaggatatccctttaaatctcccaaatgactgtctctatcttcatgagtgtgacttgaggtgttgggatgggtgagggagcttctctaaagaggaaagtgagtggattaacccctgcttctcttcttgttccctgttatcattcctccccaacataataatacataaagtggcatggtattt

SEQ ID NO: 224517 - DNA, 2597 bp, Artificial Sequence
  derived and/or modified sequence
ctccctgtttctgtcttgaacctgattctttcttcttatctccttcctgtgtccacctcaagactcccaccactacccaggaccaactcctgctcctgaatcttctgatgggccccacaaggtgacagtgctggctacaatgctatccagccggtggtggccaagttcctgggggatcctagggctgggcccccgaagccctcctcggggatcccagctctgtgccctctatgcctttacttatactggggcagatggccagcaggtgtctctggctgaaggggataggttcctactgcttcgaaagaccaactccgactggtggttggcaagacgcctagaagctccctccacctctcgacccatcttcgtcccagcagcctatatgatagaggaatccatcccttcccagagtccaactaccgtcatccccggccaattgctctggactcctgggccgaagttgtttcatggttccctggaggagttgtctcaggccctcccaagcagggctcaggctagctcggagcagcctcctccacttccccgcaaaatgtgtaggagcgtcagcactgacaatctgagccccagccttctgaagcctttccaggaaggaccaagcggaagatccctctcccaggaagacttgccgtcagaagccagtgccagcacagcaggcccccagcccctcatgtcagagccccctgtgtactgtaacctggtggaccttcgccgctgtcctcggtccccacccccaggccctgcatgccccctgctgcagaggctggatgcctgggagcagcacctggaccccaactctggacgctgcttctacataaattcactgactggctgcaagtcctggaagcccccgcgccgcagtcgcagcgagacgaaccctggctccatggaggggacacagaccctgaagaggaacaatgatgtcctgcaacctcaggcaaagggcttcagatctgacacagggaccccagaaccgcttgacccacagggttcactcagcctcagccaacgcacctcgcagcttgaccctccagccttgcaggcccctcgacctctgccgcagctcctggacgacccccatgaggtggaaaagtcgggtctgctcaacatgaccaagattgcccaaggggggcgcaagctcaggaagaactggggcccgtcttgggtggtgttaacgggtaacagcctggtgttctaccgagagccaccgccgacagcgccctcctcaggctggggaccagcgggtagccggcccgaaagtagcgtggacctgcgcggggcggccctggcgcacggccgccacctgtccagccgccgcaacgtcctgcacatccgcacgatccctggccacgagttcctgctgcagtcggaccacgagacagagctgcgagcctggcaccgcgcgctgcggactgtcatcgagcggctggatcgggagaaccccctggagctgcgtctgtcgggctctggacccgcggagctgagcgccggggaggacgaagaagaggagtcggagctggtgtccaagccgctgctgcgcctcagcagccgccggagctccattcgggggcccgaaggcaccgagcagaaccgcgtgcgcaacaaactaaagcggctcatcgcgaagagaccgcccttacaaagcctgcaggagcggggtctgctccgagaccaggtgttcggctgccagttggaatcactctgccagcgggaaggagacacggtgcccagctttttgcggctctgcattgctgctgtggataaaagaggtctagatgtggatggcatttatcgggtgagcgggaacttggcagtggtccagaagcttcgctttctggtggacagagagcgtgcggtcacctccgatgggaggtatgtgttcccagaacagccaggacaagaaggtcggttagatttggacagtactgagtgggatgacattcatgtggtcaccggagccctgaagctttttctccgggagctgccccagcctctggtgccaccactgctgctgccccatttccgtgctgcccttgcactctccgaatcagagcagtgcctctctcagatacaagaattaataggctcaatgccaaagcccaaccatgacactctacggtacctcctggagcatttatgcagggtgatagcacactcagataagaatcgcatgacaccccacaacctgggaattgtgtttggaccaaccctgtttcggccagagcaggagacatctgacccagcagcccatgctctctacccagggcagctggtccagctgatgctcaccaacttcaccagcctcttcccctgatgcagggaaggaagaagagaaaacatatttccggtcatctctggtggtgagaggctggtgttctgttttgaggatatccctttaaatctcccaaatgactgtctctatcttcatgagtgtgacttgaggtgttgggatgggtgagggagcttctctaaagaggaaagtgagtggattaacccctgcttctcttcttgttccctgttatcattcctccccaacataataatacataaagtggcatggtattttttctgatgca

SEQ ID NO: 224518 - DNA, 2461 bp, Artificial Sequence
  derived and/or modified sequence
ctccctgtttctgtcttgaacctgattctttcttcttatctccttcctgtgtccacctcaagactcccaccactacccaggaccaactcctgctcctgaatcttctgatgggccccacaaggtgacagtgctggctacaatgctatccagccggtggtggccaagttcctgggggatcctagggctgggcccccgaagccctcctcggggatcccagctctgtgccctctatgcctttacttatactggggcagatggccagcaggtgtctctggctgaaggggataggttcctactgcttcgaaagaccaactccgactggtggttggcaagacgcctagaagctccctccacctctcgacccatcttcgtcccagcagcctatatgatagaggaatccatcccttcccagagtccaactaccgtcatccccggccaattgctctggactcctgggccgaagttgtttcatggttccctggaggagttgtctcaggccctcccaagcagggctcaggctagctcggagcagcctcctccacttccccgcaaaatgtgtaggagcgtcagcactgacaatctgagccccagccttctgaagcctttccaggaaggaccaagcggaagatccctctcccaggaagacttgccgtcagaagccagtgccagcacagcaggcccccagcccctcatgtcagagccccctgtgtactgtaacctggtggaccttcgccgctgtcctcggtccccacccccaggccctgcatgccccctgctgcagaggctggatgcctgggagcagcacctggaccccaactctggacgctgcttctacataaattcactgactggctgcaagtcctggaagcccccgcgccgcagtcgcagcgagacgaaccctggctccatggaggggacacagaccctgaagaggaacaatgatgtcctgcaacctcaggcaaagggcttcagatctgacacagggaccccagaaccgcttgacccacagggttcactcagcctcagccaacgcacctcgcagcttgaccctccagccttgcaggcccctcgacctctgccgcagctcctggacgacccccatgaggtggaaaagtcgggtctgctcaacatgaccaagattgcccaaggggggcgcaagctcaggaagaactggggcccgtcttgggtggtgttaacgggtaacagcctggtgttctaccgagagccaccgccgacagcgccctcctcaggctggggaccagcgggtagccggcccgaaagtagcgtggacctgcgcggggcggccctggcgcacggccgccacctgtccagccgccgcaacgtcctgcacatccgcacgatccctggccacgagttcctgctgcagtcggaccacgagacagagctgcgagcctggcaccgcgcgctgcggactgtcatcgagcggctggatcgggagaaccccctggagctgcgtctgtcgggctctggacccgcggagctgagcgccggggaggacgaagaagaggagtcggagctggtgtccaagccgctgctgcgcctcagcagccgccggagctccattcgggggcccgaaggcaccgagcagaaccgcgtgcgcaacaaactaaagcggctcatcgcgaagagaccgcccttacaaagcctgcaggagcggggtctgctccgagaccaggtgttcggctgccagttggaatcactctgccagcgggaaggagacacggtgcccagctttttgcggctctgcattgctgctgtggataaaagaggtctagatgtggatggcatttatcgggtgagcgggaacttggcagtggtccagaagcttcgctttctggtggacagagagcgtgcggtcacctccgatgggaggtatgtgttcccagaacagccaggacaagcactctccgaatcagagcagtgcctctctcagatacaagaattaataggctcaatgccaaagcccaaccatgacactctacggtacctcctggagcatttatgcagggtgatagcacactcagataagaatcgcatgacaccccacaacctgggaattgtgtttggaccaaccctgtttcggccagagcaggagacatctgacccagcagcccatgctctctacccagggcagctggtccagctgatgctcaccaacttcaccagcctcttcccctgatgcagggaaggaagaagagaaaacatatttccggtcatctctggtggtgagaggctggtgttctgttttgaggatatccctttaaatctcccaaatgactgtctctatcttcatgagtgtgacttgaggtgttgggatgggtgagggagcttctctaaagaggaaagtgagtggattaacccctgcttctcttcttgttccctgttatcattcctccccaacataataatacataaagtggcatggtattttttctgatgc

SEQ ID NO: 224519 - DNA, 2323 bp, Artificial Sequence
  derived and/or modified sequence
gtgctcttccttcctccagactcctagcccagggcagggtttttctgtgttctgcttgcctgataggctacagcaggtctcctctagagatgtgacttgcccagcccttccctctctttcttaaccgtgggtggaaaggggctcctcttcccttctgtagacccttctctgtcttcttttaccttgcaggatgtgagggtggggcacccccttcaacattccccccaccccacaaaaagcctgttcccctttcctgtggccctgaggtgggggtggggtgggggaggcgggaagttggcaacaggaagtgaggagaagagcaaagaaaactgtgagagagagaatttttaaaaagcagctggggcctgaggtttctcccccagtaccctgggtcacctcagcccagagctggcggcaggcccccagcccctcatgtcagagccccctgtgtactgtaacctggtggaccttcgccgctgtcctcggtccccacccccaggccctgcatgccccctgctgcagaggctggatgcctgggagcagcacctggaccccaactctggacgctgcttctacataaattcactgactggctgcaagtcctggaagcccccgcgccgcagtcgcagcgagacgaaccctggctccatggaggggacacagaccctgaagaggaacaatgatgtcctgcaacctcaggcaaagggcttcagatctgacacagggaccccagaaccgcttgacccacagggttcactcagcctcagccaacgcacctcgcagcttgaccctccagccttgcaggcccctcgacctctgccgcagctcctggacgacccccatgaggtggaaaagtcgggtctgctcaacatgaccaagattgcccaaggggggcgcaagctcaggaagaactggggcccgtcttgggtggtgttaacgggtaacagcctggtgttctaccgagagccaccgccgacagcgccctcctcaggctggggaccagcgggtagccggcccgaaagtagcgtggacctgcgcggggcggccctggcgcacggccgccacctgtccagccgccgcaacgtcctgcacatccgcacgatccctggccacgagttcctgctgcagtcggaccacgagacagagctgcgagcctggcaccgcgcgctgcggactgtcatcgagcggctggatcgggagaaccccctggagctgcgtctgtcgggctctggacccgcggagctgagcgccggggaggacgaagaagaggagtcggagctggtgtccaagccgctgctgcgcctcagcagccgccggagctccattcgggggcccgaaggcaccgagcagaaccgcgtgcgcaacaaactaaagcggctcatcgcgaagagaccgcccttacaaagcctgcaggagcggggtctgctccgagaccaggtgttcggctgccagttggaatcactctgccagcgggaaggagacacggtgcccagctttttgcggctctgcattgctgctgtggataaaagaggtctagatgtggatggcatttatcgggtgagcgggaacttggcagtggtccagaagcttcgctttctggtggacagagagcgtgcggtcacctccgatgggaggtatgtgttcccagaacagccaggacaagaaggtcggttagatttggacagtactgagtgggatgacattcatgtggtcaccggagccctgaagctttttctccgggagctgccccagcctctggtgccaccactgctgctgccccatttccgtgctgcccttgcactctccgaatcagagcagtgcctctctcagatacaagaattaataggctcaatgccaaagcccaaccatgacactctacggtacctcctggagcatttatgcagggtgatagcacactcagataagaatcgcatgacaccccacaacctgggaattgtgtttggaccaaccctgtttcggccagagcaggagacatctgacccagcagcccatgctctctacccagggcagctggtccagctgatgctcaccaacttcaccagcctcttcccctgatgcagggaaggaagaagagaaaacatatttccggtcatctctggtggtgagaggctggtgttctgttttgaggatatccctttaaatctcccaaatgactgtctctatcttcatgagtgtgacttgaggtgttgggatgggtgagggagcttctctaaagaggaaagtgagtggattaacccctgcttctcttcttgttccctgttatcattcctccccaacataataatacataaagtggcatggt

SEQ ID NO: 224520 - DNA, 2322 bp, Artificial Sequence
  derived and/or modified sequence
cagacccagaccgagagcctgaccctgtgcagcggcgaggccgagagaagaggcaaggaggagtggcccgacagccaccactaccccggccccacccccgcccccgagagcagcgacggcccccacaaggtgaccgtgctggccaccatgctgagcagcagatggtggcccagcagctggggcatcctgggcctgggccccagaagcccccccagaggcagccagctgtgcgccctgtacgccttcacctacaccggcgccgacggccagcaggtgagcctggccgagggcgacagattcctgctgctgagaaagaccaacagcgactggtggctggccagaagactggaggcccccagcaccagcagacccatcttcgtgcccgccgcctacatgatcgaggagagcatccccagccagagccccaccaccgtgatccccggccagctgctgtggacccccggccccaagctgttccacggcagcctggaggagctgagccaggccctgcccagcagagcccaggccagcagcgagcagcccccccccctgcccagaaagatgtgcagaagcgtgagcaccgacaacctgagccccagcctgctgaagcccttccaggagggccccagcggcagaagcctgagccaggaggacctgcccagcgaggccagcgccagcaccgccggcccccagcccctgatgagcgagccccccgtgtactgcaacctggtggacctgagaagatgccccagaagccccccccccggccccgcctgccccctgctgcagagactggacgcctgggagcagcacctggaccccaacagcggcagatgcttctacatcaacagcctgaccggctgcaagagctggaagccccccagaagaagcagaagcgagaccaaccccggcagcatggagggcacccagaccctgaagagaaacaacgacgtgctgcagccccaggccaagggcttcagaagcgacaccggcacccccgagcccctggacccccagggcagcctgagcctgagccagagaaccagccagctggacccccccgccctgcaggcccccagacccctgccccagctgctggacgacccccacgaggtggagaagagcggcctgctgaacatgaccaagatcgcccagggcggcagaaagctgagaaagaactggggccccagctgggtggtgctgaccggcaacagcctggtgttctacagagagcccccccccaccgcccccagcagcggctggggccccgccggcagcagacccgagagcagcgtggacctgagaggcgccgccctggcccacggcagacacctgagcagcagaagaaacgtgctgcacatcagaaccatccccggccacgagttcctgctgcagagcgaccacgagaccgagctgagagcctggcacagagccctgagaaccgtgatcgagagactggacagagagaaccccctggagctgagactgagcggcagcggccccgccgagctgagcgccggcgaggacgaggaggaggagagcgagctggtgagcaagcccctgctgagactgagcagcagaagaagcagcatcagaggccccgagggcaccgagcagaacagagtgagaaacaagctgaagagactgatcgccaagagaccccccctgcagagcctgcaggagagaggcctgctgagagaccaggtgttcggctgccagctggagagcctgtgccagagagagggcgacaccgtgcccagcttcctgagactgtgcatcgccgccgtggacaagagaggcctggacgtggacggcatctacagagtgagcggcaacctggccgtggtgcagaagctgagattcctggtggacagagagagagccgtgaccagcgacggcagatacgtgttccccgagcagcccggccaggagggcagactggacctggacagcaccgagtgggacgacatccacgtggtgaccggcgccctgaagctgttcctgagagagctgccccagcccctggtgccccccctgctgctgccccacttcagagccgccctggccctgagccagatccaggagctgatcggcagcatgcccaagcccaaccacgacaccctgagatacctgctggagcacctgtgcagagtgatcgcccacagcgacaagaacagaatgaccccccacaacctgggcatcgtgttcggccccaccctgttcagacccgagcaggagaccagcgaccccgccgcccacgccctgtaccccggccagctggtgcagctgatgctgaccaacttcaccagcctgttcccctag

SEQ ID NO: 224521 - DNA, 2196 bp, Artificial Sequence
  derived and/or modified sequence
atgctgagcagcagatggtggcccagcagctggggcatcctgggcctgggccccagaagcccccccagaggcagccagctgtgcgccctgtacgccttcacctacaccggcgccgacggccagcaggtgagcctggccgagggcgacagattcctgctgctgagaaagaccaacagcgactggtggctggccagaagactggaggcccccagcaccagcagacccatcttcgtgcccgccgcctacatgatcgaggagagcatccccagccagagccccaccaccgtgatccccggccagctgctgtggacccccggccccaagctgttccacggcagcctggaggagctgagccaggccctgcccagcagagcccaggccagcagcgagcagcccccccccctgcccagaaagatgtgcagaagcgtgagcaccgacaacctgagccccagcctgctgaagcccttccaggagggccccagcggcagaagcctgagccaggaggacctgcccagcgaggccagcgccagcaccgccggcccccagcccctgatgagcgagccccccgtgtactgcaacctggtggacctgagaagatgccccagaagccccccccccggccccgcctgccccctgctgcagagactggacgcctgggagcagcacctggaccccaacagcggcagatgcttctacatcaacagcctgaccggctgcaagagctggaagccccccagaagaagcagaagcgagaccaaccccggcagcatggagggcacccagaccctgaagagaaacaacgacgtgctgcagccccaggccaagggcttcagaagcgacaccggcacccccgagcccctggacccccagggcagcctgagcctgagccagagaaccagccagctggacccccccgccctgcaggcccccagacccctgccccagctgctggacgacccccacgaggtggagaagagcggcctgctgaacatgaccaagatcgcccagggcggcagaaagctgagaaagaactggggccccagctgggtggtgctgaccggcaacagcctggtgttctacagagagcccccccccaccgcccccagcagcggctggggccccgccggcagcagacccgagagcagcgtggacctgagaggcgccgccctggcccacggcagacacctgagcagcagaagaaacgtgctgcacatcagaaccatccccggccacgagttcctgctgcagagcgaccacgagaccgagctgagagcctggcacagagccctgagaaccgtgatcgagagactggacagagagaaccccctggagctgagactgagcggcagcggccccgccgagctgagcgccggcgaggacgaggaggaggagagcgagctggtgagcaagcccctgctgagactgagcagcagaagaagcagcatcagaggccccgagggcaccgagcagaacagagtgagaaacaagctgaagagactgatcgccaagagaccccccctgcagagcctgcaggagagaggcctgctgagagaccaggtgttcggctgccagctggagagcctgtgccagagagagggcgacaccgtgcccagcttcctgagactgtgcatcgccgccgtggacaagagaggcctggacgtggacggcatctacagagtgagcggcaacctggccgtggtgcagaagctgagattcctggtggacagagagagagccgtgaccagcgacggcagatacgtgttccccgagcagcccggccaggagggcagactggacctggacagcaccgagtgggacgacatccacgtggtgaccggcgccctgaagctgttcctgagagagctgccccagcccctggtgccccccctgctgctgccccacttcagagccgccctggccctgagcgagagcgagcagtgcctgagccagatccaggagctgatcggcagcatgcccaagcccaaccacgacaccctgagatacctgctggagcacctgtgcagagtgatcgcccacagcgacaagaacagaatgaccccccacaacctgggcatcgtgttcggccccaccctgttcagacccgagcaggagaccagcgaccccgccgcccacgccctgtaccccggccagctggtgcagctgatgctgaccaacttcaccagcctgttcccctag

SEQ ID NO: 224522 - DNA, 1617 bp, Artificial Sequence
  derived and/or modified sequence
atggtggccggctggctgaccaactacagccaggacagcgtgaccttcgaggacgtggccgtggacttcacccaggaggagtggaccctgctggaccagacccagagaaacctgtacagagacgtgatgctggagaactacaagaacctggtggccgtggactgggagagccacatcaacaccaagtggagcgccccccagcagaacttcctgcagggcaagaccagcagcgtggtggagatggagagaaaccacttcggcgaggagctgttcgacttcaaccagtgcgagaaggccctgagcgagcacagctgcctgaagacccacagaagaacctacttcagaaagaagacctgcgagtgcaaccagtgcgagaaggccttcagaaagcccagcatcttcaccctgcacaagaagaccgacatcggcgaggagctgcccaactgcaaccagtgcgagaccgccttcagccagcacctgcacctggtgtgcaagaagaccagccagaacctgcacctggtgtgcaagaagacccacacccaggagaagccctacaagtgcagcgactgcgagaagggcctgcccagcagcagccacctgagagagtgcgtgagaatctacggcggcgagagaccctacacccacaaggagtacgtggagaccttcagccacagcaccgccctgttcgtgcacatgcagacccaggacggcgagaagttctacgagtgcaaggcctgcggcaagcccttcaccgagagcagctacctgacccagcacctgagaacccacagcagagtgctgcccatcgagcacaagaagttcggcaaggccttcgccttcagccccgacctggccaagcacatcagactgagaaccagaggcaagcactacgtgtgcaacgagtgcggcaaggagttcacctgcttcagcaagctgaacatccacatcagagtgcacaccggcgagaagccctacgagtgcaacaagtgcggcaaggccttcaccgacagcagcggcctgatcaagcacagaagaacccacaccggcgagaagccctacgagtgcaaggagtgcggcaaggccttcgccaacagcagccacctgaccgtgcacatgagaacccacaccggcgagaagccctaccagtgcaaggagtgcggcaaggccttcatcaacagcagcagcttcaagagccacatgcagacccaccccggcgtgaagccctacgactgccagcagtgcggcaaggccttcatcagaagcagcttcctgatcagacacctgagaagccacagcgccgagagacccttcgagtgcgaggagtgcggcaaggccttcagatacagcagccacctgagccagcacaagagaatccacaccggcgagagaccctacaagtgccagaagtgcggccaggccttcagcatcagcagcggcctgaccgtgcacatgagaacccacaccggcgagagacccttcgagtgccaggagtgcggcaaggccttcaccagaagcacctacctgatcagacacctgagaagccacagcgtggagaagccctacaaggagtgcggccagaccttcagcaacagcagctgcctgaccgagtgcgtgtag

SEQ ID NO: 224523 - DNA, 1617 bp, Artificial Sequence
  derived and/or modified sequence
atggtcgcaggatggctcacaaattattcacaagattcagtcacatttgaggatgtggccgttgactttacccaggaggagtggactttgctcgaccagactcagcgtaacctgtatcgcgatgtcatgttggaaaattacaaaaacttagtcgcagttgactgggaatcgcatatcaatacaaaatggtcggcaccccagcaaaactttctccagggtaaaacatcctcggtagtggagatggagaggaatcattttggtgaagaactattcgattttaaccagtgcgaaaaggcgctgtcagaacactcttgtctgaagactcaccggcgcacttactttcgaaaaaaaacttgtgaatgcaaccagtgtgaaaaagcattcagaaagcccagtatttttacactacacaaaaaaaccgatataggcgaggagctgccgaactgcaatcagtgcgagacagccttctcacagcacctgcacctcgtgtgtaagaagacaagtcaaaatttacacctggtgtgcaaaaagacccacactcaggagaagccatacaaatgctcagattgtgaaaagggactgccctcatccagccacctacgcgagtgcgtcaggatatatgggggggaacggccttatacccacaaggaatatgtcgagactttcagccatagcacggcactctttgtccacatgcaaacccaagacggtgagaagttttatgagtgcaaagcatgtggcaagcccttcaccgagtcctcctacttgacccaacatctgcggactcactctcgggtacttcctattgagcacaaaaaattcggtaaggccttcgcctttagccctgacttggcaaaacacattaggctcagaacaaggggtaaacactacgtctgcaatgaatgtggcaaggagtttacgtgctttagtaagttaaacatccacataagggttcacacgggagagaagccctacgagtgcaacaaatgcggcaaggcctttactgattcgagtgggctgattaaacatcgccggacccacacaggtgagaaaccctacgagtgtaaggagtgcggtaaggcatttgctaacagctcccatctgacagtgcatatgcggactcatacaggtgagaagccctaccagtgtaaggagtgtgggaaggcttttatcaatagctcaagctttaagagccacatgcagacccatccaggtgtaaagccctacgattgtcagcagtgcggcaaagctttcatccggagcagtttcttgattcgacatctgcgttcccatagcgctgagaggccttttgaatgcgaggaatgcggcaaggcatttcgatattcctcccacttgtctcaacacaaaagaattcacacaggagagaggccctacaagtgtcagaagtgtggtcaggcattctctatttccagcgggctcacggtccacatgagaacacatacgggtgagcgtccttttgaatgtcaggaatgcggtaaagcatttacacggagcacatacctcattcgccatctccgatctcacagcgtcgagaaaccatataaggagtgcggccagacattcagcaacagtagttgtcttaccgaatgcgtctag

SEQ ID NO: 224524 - DNA, 1617 bp, Artificial Sequence
  derived and/or modified sequence
atggtcgccggttggttaactaactacagccaggacagtgtcacttttgaggatgtagccgtagactttacccaggaagagtggacattgttggaccagactcaacgaaacctctacagagacgttatgttggagaactacaagaacctggtagcagtggactgggaatcacatattaacaccaagtggtccgcaccgcagcaaaactttttgcagggtaagacctctagcgtcgtggagatggaaagaaaccattttggagaagagctcttcgatttcaatcagtgcgaaaaggcgttatcagagcattcctgcctcaaaacgcacaggcgcacctacttcagaaaaaagacctgcgagtgtaatcagtgcgagaaagcattcagaaagccttctatttttactttgcataagaagaccgacatcggagaggaacttcccaactgtaatcaatgtgagacggccttttcccagcaccttcacttggtctgtaagaaaacgtcccaaaacttgcacctggtatgcaagaagacacacacccaagagaaaccttataaatgttccgattgtgagaaagggctgccaagctcatcacaccttcgagaatgtgtcagaatttacggcggcgaaagaccctacactcacaaggaatatgtggagaccttttcacacagcacagctctttttgtgcacatgcagacccaggacggagagaagttctatgagtgcaaagcctgtggaaaaccctttactgagtcctcttacttaacccagcatctccgaacccactcgcgggtcttgcctatagagcacaagaaatttggaaaggcattcgccttctcacctgacctcgcgaagcacatacggcttcgcacaagaggcaagcattacgtgtgtaatgagtgcggaaaagaattcacctgtttcagtaagctgaacatccatatccgggttcatacgggagaaaaaccatacgagtgcaacaagtgtggcaaggccttcaccgattcgtccggcctgatcaaacatcggaggacacataccggggaaaagccatatgaatgtaaggaatgtggtaaggcctttgccaactcctctcatctgactgtgcacatgcggacacacaccggtgaaaaaccataccagtgtaaagagtgcggaaaagcattcattaacagctccagttttaagagtcacatgcaaactcatccaggggttaagccttacgattgccagcaatgtgggaaggcatttatcagaagtagttttctgattcgccacctgcgctctcactccgctgaacggccttttgagtgcgaagaatgcgggaaagcctttaggtacagctcccacctttctcagcacaaaagaatccacacgggcgaacgcccctacaagtgccaaaagtgcgggcaagccttcagcatctcgagtggcctgactgtgcatatgcgaacacacacgggtgagagacctttcgaatgtcaggaatgtggcaaggcttttactcgaagcacatatctgatccgccatctgaggtcccatagcgtggagaagccctacaaggagtgtggccagacattctccaattcttcttgcctcaccgagtgcgtgtag

SEQ ID NO: 224525 - DNA, 1617 bp, Artificial Sequence
  derived and/or modified sequence
atggtggcaggttggctaacaaattactcacaggactccgtgacgttcgaagacgtcgcagtcgactttacccaggaagagtggacacttcttgatcagacccagagaaacctgtatagggatgtcatgctggaaaattataaaaacttagtggccgtggattgggagtcccacattaacacgaagtggtcagccccccaacagaattttttgcagggtaaaacttcttctgtggttgagatggagaggaaccattttggagaggaattatttgacttcaatcagtgtgagaaagccctctctgagcatagctgtctgaaaactcaccggcgcacttacttcaggaagaagacttgtgagtgtaaccagtgtgaaaaagcttttcgtaagccttcaattttcactctgcacaagaagactgatattggtgaggaactgcccaattgtaaccagtgcgagactgccttctctcagcatctgcaccttgtttgtaaaaagacctcacagaacctccacctggtctgcaaaaaaacgcacacccaagaaaagccatataagtgttctgactgcgagaaaggattgccctcatcatcccacctccgggagtgtgtgcggatatacggaggggaaagaccttacacgcataaggagtacgtggagacgttctcccactccacggctctgttcgtccatatgcaaacccaggacggcgagaagttctacgagtgcaaggcctgtggtaagccctttacagagtcctcctatctgacacagcaccttcgaacacactcaagagtgctgcccatcgagcacaagaaatttggaaaagcgttcgcattttcacccgacctcgccaaacacattcgtctgaggaccagaggaaagcactacgtgtgtaacgaatgcggcaaggagttcacatgctttagcaagcttaatatccatatccgggtgcacactggtgagaagccctacgaatgcaacaaatgcggcaaagcctttacagactccagcggcctgatcaagcatcggcggactcacaccggtgagaagccgtacgagtgcaaagagtgcgggaaggcattcgcaaactcatctcacctcaccgttcacatgagaacacacacaggagagaaaccgtaccagtgcaaggaatgtggaaaggcttttataaatagctcgtcattcaaaagtcacatgcagacccaccccggcgtgaaaccctatgattgtcagcaatgcgggaaggctttcattagatcttctttcctgatcagacacctgagatcgcatagtgcagagagacctttcgagtgcgaagaatgcgggaaagcgtttcgctatagctcccaccttagtcagcacaagagaatacatacaggggagagaccatacaaatgccaaaaatgtggccaggcattctctatttcttcagggctgactgtccacatgcgtacgcacaccggggagaggccatttgagtgccaagagtgcggcaaagcttttacccgctcaacctacctgatacggcacctacgctctcactctgtggaaaagccgtacaaggagtgcggacagactttcagcaattcttcatgtctgaccgagtgcgtgtag

SEQ ID NO: 224526 - DNA, 1617 bp, Artificial Sequence
  derived and/or modified sequence
atggtggccggctggctgaccaactacagccaggacagcgtgacctttgaagatgtggccgtggacttcacccaggaggagtggaccctgctggaccagacccagaggaacctgtacagagatgtgatgctggagaactacaagaacctggtggccgtggactgggagagccacatcaacaccaagtggagcgccccccagcagaacttcctgcagggcaagaccagctctgtggtggagatggagaggaaccactttggagaggagctgtttgacttcaaccagtgtgagaaggccctgtctgagcacagctgcctgaagacccacaggaggacctacttcaggaagaagacctgtgagtgcaaccagtgtgagaaggccttcaggaagcccagcatcttcaccctgcacaagaagacagacatcggggaggagctgcccaactgcaaccagtgtgaaacagccttcagccagcacctgcacctggtgtgcaagaagaccagccagaacctgcacctggtgtgcaagaagacccacacccaggagaagccctacaagtgcagcgactgtgagaagggcctgcccagcagcagccacctgcgggagtgtgtgcgcatctatggaggagagcggccctacacccacaaggagtatgtggagaccttcagccacagcacagccctgtttgtgcacatgcagacccaggatggagagaagttctatgagtgcaaggcctgtgggaagcccttcacagagagcagctacctgacccagcacctgcggacccacagccgggtgctgcccatcgagcacaagaagtttgggaaggcctttgccttctccccagacctggccaagcacatccggctgcggacccggggcaagcactacgtgtgcaatgaatgtgggaaggagttcacctgcttcagcaagctgaacatccacatccgggtgcacactggagagaagccctatgagtgcaacaagtgtgggaaggccttcacagacagcagcggcctcatcaagcacaggaggacccacactggagagaagccctatgagtgcaaggaatgtgggaaggcctttgccaacagcagccacctgactgtgcacatgaggacccacactggagagaagccctaccagtgcaaggaatgtgggaaggccttcatcaacagcagcagcttcaagagccacatgcagacccaccctggggtgaagccctatgactgccagcagtgtgggaaggccttcatccgcagcagcttcctgatccgccacctgcggagccacagcgctgagcggccctttgaatgtgaagaatgtgggaaggccttccgctacagcagccacctgagccagcacaagaggatccacactggagagcggccctacaagtgccagaagtgtggccaggccttcagcatcagcagcggcctgactgtgcacatgaggacccacactggagagcggccctttgagtgccaggagtgtgggaaggccttcaccaggagcacctacctgatccgccacctgcggagccacagcgtggagaagccctacaaggaatgtggccagaccttcagcaacagcagctgcctgacagaatgtgtgtag

SEQ ID NO: 224527 - DNA, 1617 bp, Artificial Sequence
  derived and/or modified sequence
atggtggccggctggctgaccaactacagccaggacagcgtgaccttcgaggatgttgccgtggatttcacccaggaagagtggaccttgctcgatcaaacacaacgaaacttgtatcgagatgtaatgcttgagaactataaaaaccttgttgcggttgattgggaatctcacatcaataccaaatggagcgcccctcagcagaactttctgcagggaaagacgagttcagtagtggaaatggaacgaaatcacttcggtgaggagctgttcgactttaaccaatgcgaaaaggctctctccgaacacagctgcttgaagactcatcgcagaacgtacttcaggaaaaaaacatgtgagtgcaaccagtgcgaaaaggctttccggaaaccctcgatttttacacttcataagaaaaccgacatcggcgaagaactgcctaactgcaatcagtgcgaaactgccttcagtcagcatctgcatttggtctgtaaaaagactagccagaatctgcacctagtatgtaaaaaaacacatactcaggaaaaaccttacaagtgttctgattgcgaaaaaggcctgcccagctcttcccatttacgcgaatgcgtgcggatctacggaggcgaacggccatacactcacaaagagtatgtcgagacgtttagtcatagcacagccctgttcgtgcacatgcagacccaggacggagaaaaattctatgagtgcaaagcctgcggtaagcccttcacagaaagttcctacctcacacagcatctgaggactcactccagggtgttaccgatcgaacataagaagtttgggaaggctttcgccttcagccctgacctcgcaaagcatatacggcttaggacccggggaaagcactatgtctgcaatgaatgcggcaaagaattcacctgtttcagtaagctgaatatccacattcgcgtccacacgggcgaaaagccatacgaatgcaacaaatgcggaaaggccttcacagactccagtggcctcattaagcatcggcggacacacactggagagaaaccttacgagtgtaaggagtgtggaaaggccttcgcaaattcaagccacctgacagttcacatgcggacacacactggcgagaagccttaccagtgtaaggaatgtggcaaggcgttcattaacagctcctccttcaagagtcatatgcagacacatcccggtgttaagccctatgattgccagcagtgtggcaaggcctttattaggtcatcttttttgataaggcatctacgctcccactcagcagagcggccattcgagtgtgaggaatgtggcaaagcctttcgttacagctcacatctgagccagcacaagcggatccacacgggagagcggccctataagtgccagaagtgcgggcaagcattctccatttcgtctggactgactgtccacatgcggacccataccggagagagaccttttgagtgccaggaatgcggcaaagcttttaccaggtcaacatacctgattaggcacctgaggagccacagcgtcgaaaagccttacaaggaatgtgggcagaccttctcaaattcatcttgtctcactgaatgtgtctag

SEQ ID NO: 224528 - DNA, 1617 bp, Artificial Sequence
  derived and/or modified sequence
atggtggccggctggctgaccaactacagccaggacagcgtgaccttcgaagacgtggccgtggacttcactcaggaagagtggacactgctggatcagacgcagcggaatctgtaccgggacgtaatgctcgagaattataagaaccttgtggccgtcgattgggaaagccatattaataccaaatggtcagccccgcagcagaactttctccaaggcaaaacaagctcagtcgttgaaatggaaagaaaccatttcggcgaggagctctttgacttcaaccagtgtgagaaggctctctcggagcacagttgcctgaaaacacaccggcggacctacttcaggaaaaaaacttgcgaatgtaatcagtgcgaaaaggcattcaggaagcccagtatatttacactgcacaaaaagacggatattggagaagagctacctaattgcaaccagtgtgaaaccgctttttcgcaacatcttcatctcgtgtgcaagaagacttctcagaacctgcacctcgtttgtaagaagacccatactcaagaaaaaccctataaatgctccgactgcgaaaaggggcttccttcctcctcacacttgagagagtgcgtcaggatctacgggggggaacggccgtatacccataaggagtatgtcgaaacattttctcactctacagccctgttcgtccacatgcaaactcaggacggcgaaaaattctacgagtgcaaggcatgcggcaagcctttcactgaaagtagctacctcacccagcacctgcgaacacattcacgggtcctccccatcgaacacaaaaaatttggtaaagccttcgctttttccccagatctagctaagcatatacgacttaggaccaggggaaagcattatgtgtgtaacgaatgcggcaaggaatttacctgctttagtaaactgaatattcacattcgggtccacacaggcgagaagccgtatgagtgtaacaaatgcggtaaagctttcacagacagttccggccttatcaagcaccggcggactcataccggagagaagccgtacgagtgtaaggaatgcggcaaggccttcgctaatagttcacatctcactgttcacatgcgcactcacacaggcgagaagccataccagtgtaaggagtgtgggaaagcctttattaactcttcctctttcaagtcccatatgcaaacccatcctggcgttaaaccgtacgactgccagcagtgtggcaaagcatttatcagaagctcttttctgattcgacacctgcgaagccattcagccgagcgtccttttgagtgtgaagagtgcggaaaggcatttaggtactctagtcacctgtcccagcacaaacgcatccacactggcgaacggccatataagtgtcagaaatgtgggcaagccttctcaatttcctccggtctgaccgttcatatgcggactcatactggcgagaggccttttgagtgccaagaatgcggcaaggcttttacccgaagtacctacctgatacgccacctccgatcccactcagtggagaaaccttataaagaatgtggccagacattcagcaactcatcctgcttaacagaatgcgtgtag

SEQ ID NO: 224529 - DNA, 1617 bp, Artificial Sequence
  derived and/or modified sequence
atggtggccggctggctgaccaactacagccaggacagcgtgaccttcgaagatgtggcagttgacttcactcaggaggaatggactctgctcgaccagacgcagcggaatctgtaccgggacgtgatgctggaaaactacaagaacctcgtggccgtggattgggaatcccacatcaatactaagtggagcgcaccccagcagaactttcttcagggcaaaacctcatccgtagtagaaatggaaagaaatcatttcggggaggaactgttcgatttcaatcagtgcgagaaggctctgtccgaacatagctgcctcaaaacccataggaggacatacttccggaaaaaaacatgtgaatgcaaccagtgtgaaaaggccttccgaaagccttctatcttcactctccacaagaagactgatatcggtgaagagttgccaaactgcaatcagtgtgagactgccttcagtcagcatctgcacctggtttgcaagaagacatcacagaatcttcatcttgtgtgcaaaaaaacacatacacaggaaaaaccttataaatgctctgactgcgagaaaggactgccgagcagtagtcacctgagagagtgcgtaaggatttacggtggggagcgcccatatactcacaaagaatatgtcgagactttcagccattctactgcactatttgtgcacatgcaaacccaggacggggaaaaattttatgagtgtaaggcctgcgggaagccctttaccgaaagcagttatctgacccagcatctccggactcactcacgcgtattgcctattgagcataagaagttcggcaaggccttcgccttttcccctgatctggcgaagcatatacgcttacgcactagagggaagcattacgtatgtaatgagtgcgggaaagagttcacctgcttcagcaagttaaatatccacattcgggtccacacaggcgaaaagccttatgaatgcaacaaatgtggcaaggccttcactgattcctctggattaatcaagcaccggcgtacgcacacgggggagaagccttacgagtgcaaggagtgcggtaaggcgtttgccaacagttctcacctgactgtccatatgcggactcacaccggcgaaaaaccgtaccagtgtaaggagtgtggaaaggctttcataaactcaagctctttcaagtcccacatgcagactcatcctggagtcaaaccttatgactgccagcaatgcggcaaggctttcatcagatctagtttcctgattagacacctccggtctcacagcgctgaacgaccctttgaatgcgaagagtgtggtaaagctttccgatattcgtcccatttgtctcagcacaagcgaatacacacaggcgaaaggccttataagtgtcagaagtgcgggcaagctttttccatcagttctgggctcacagtgcacatgcgcactcacaccggcgagagaccctttgaatgccaggagtgcgggaaggccttcaccagaagtacgtaccttatcaggcacctgagaagccactctgtggagaagccatacaaggagtgcggccagacattcagcaactcctcctgcctgacagaatgcgtatag

SEQ ID NO: 224530 - DNA, 1617 bp, Artificial Sequence
  derived and/or modified sequence
atggtggcaggttggctcaccaactactcacaggacagtgtcactttcgaagatgtggccgtggattttactcaggaggagtggactctgctggatcagacacagcgcaacctgtaccgggatgtgatgctggagaattataaaaatctggtcgccgtcgactgggagtcgcatatcaacacaaagtggtcggctccgcagcagaactttcttcagggtaagactagctctgtagtcgagatggaaaggaaccactttggcgaggaacttttcgacttcaaccagtgtgaaaaggcactttctgagcactcgtgcttaaaaactcataggaggacctatttcaggaaaaagacctgtgagtgtaatcagtgtgagaaggcatttcgcaaaccctctatctttacgctccacaaaaaaaccgatataggggaagagctcccaaactgcaaccaatgcgagaccgcatttagccaacacttacacctcgtatgcaaaaagacttctcagaacctccacctagtttgtaaaaaaactcacactcaggaaaagccctacaagtgcagtgactgtgagaagggcttaccttcatccagccaccttcgcgagtgcgtaagaatatacggtggggaacgaccctatacccataaagaatacgtagagaccttctcccactcgactgccctgtttgttcatatgcagacccaggatggggagaaattttacgaatgcaaagcgtgtgggaagccttttactgagagcagttatttaacacaacacttgagaactcactctagagtcttgcctatcgagcataagaaattcggcaaggccttcgcgttttctcctgacctggctaaacacatccgattgagaaccagggggaaacattatgtgtgtaatgaatgtgggaaggagttcacctgctttagtaagcttaacatacacattagagtccacaccggggagaagccttacgaatgtaataagtgtggaaaagcattcacagactcctctgggctgattaagcaccgtaggacgcacactggagaaaaaccgtacgaatgcaaagagtgcggtaaggcattcgcgaactcctctcacttaacggtgcatatgagaactcacaccggggaaaagccttatcaatgcaaggaatgcggaaaagccttcattaactccagttctttcaagtcccatatgcagacgcatcctggtgtgaagccatacgactgccagcagtgtggaaaagcctttatacgctcctcattcctgatcagacacctaaggagtcactcggccgagagaccgttcgagtgcgaagagtgcggaaaggcctttcggtactcctcgcaccttagccagcataagcggatacatacaggggaaaggccctacaagtgccagaagtgcgggcaggcgtttagtatcagcagcggtctgaccgtccacatgcgcacccataccggagagaggcctttcgaatgccaggaatgcgggaaggctttcacaaggagtacctacctgatcaggcacctcagatcacacagcgttgagaagccctataaagaatgtgggcaaacattctccaactctagctgcctgacagagtgcgtctag

SEQ ID NO: 224531 - DNA, 1617 bp, Artificial Sequence
  derived and/or modified sequence
atggtggctgggtggctgacaaattattcccaggatagcgttacgttcgaggacgttgccgtggacttcacccaggaagagtggacgctgctcgatcagactcagcgaaacctgtacagggatgtgatgcttgaaaactacaagaatcttgtggctgttgattgggaatcacatatcaacaccaagtggtccgcaccacagcagaatttccttcagggaaagacatccagcgtggtagagatggagcgaaaccacttcggggaggaattgtttgattttaatcagtgcgagaaggcactgtccgaacatagttgcttgaagacccatagacgaacctactttaggaagaagacatgtgagtgtaatcagtgcgagaaagccttccggaaaccctctatctttactctccacaagaaaaccgatatcggtgaggaactgccaaactgtaaccagtgtgaaactgctttctcacaacatctgcatctggtgtgtaagaagactagccagaacttgcacctcgtctgcaaaaaaacacacacccaggagaagccatataagtgctcagactgcgagaagggactaccctcatcttcgcatttgcgagaatgtgtcagaatctatggcggtgagcgtccttacacccacaaagaatatgtagaaaccttcagtcactctaccgcactcttcgtgcacatgcagacacaggacggagagaagttctacgagtgcaaggcctgcgggaagccgttcactgaaagttcatacctcacccagcacctgcgaacgcactcccgagtgcttcctattgagcacaagaagttcggtaaggccttcgctttcagtcctgacctcgccaaacatatcagacttcgaacccgcggtaagcactatgtgtgcaacgagtgtggcaaagaatttacctgtttcagcaaactgaacattcacattagagtgcacactggcgaaaaaccttacgaatgcaacaagtgtggcaaagcattcactgattccagcggactcattaagcatcgaagaacccatactggagaaaagccatatgagtgcaaggaatgcgggaaggcatttgccaacagctcccatttaacagtgcatatgagaacacatacgggcgaaaagccttaccagtgtaaagaatgtggaaaagctttcatcaactcatcatcgtttaaatctcacatgcaaacacaccccggtgtaaagccatatgattgtcagcaatgcgggaaagccttcattcggagctccttcctcatcaggcacctgcgcagccactcggcagagaggccctttgaatgcgaggagtgtggcaaggccttccgctactcgagtcacctcagccagcataagaggatacacaccggtgagcgaccttacaaatgccagaagtgcggtcaggccttctctatatcctccgggctgaccgtgcacatgcgcactcatacaggagaaagaccattcgagtgccaggagtgcggcaaagcatttactagatcaacttatctaattcgacatctgaggtctcatagcgtagaaaagccttataaggaatgtggccagacctttagtaatagctcatgcctgaccgagtgtgtgtag

SEQ ID NO: 224532 - DNA, 1617 bp, Artificial Sequence
  derived and/or modified sequence
atggtggcagggtggctcactaactatagtcaagattccgttacattcgaggacgtcgcagttgactttacccaggaggaatggacattgctggaccagacccagagaaatctgtatcgggacgtgatgttagaaaattacaaaaatctggttgccgttgattgggagagccatatcaatacaaagtggtctgccccacagcaaaacttccttcaaggcaaaacatcaagcgttgtggaaatggagcgcaatcactttggcgaggagctattcgatttcaatcagtgtgagaaagccttgagcgagcatagttgcttaaagactcacaggaggacttattttcgcaaaaaaacatgcgagtgcaaccaatgtgaaaaagctttccgtaaaccctcaatctttacactgcataagaaaaccgacataggcgaagaacttcctaattgcaaccagtgcgagactgctttttcccagcatctgcatctcgtgtgcaagaagacttcacagaacctgcaccttgtgtgtaagaagacacatacacaggaaaaaccatataagtgcagcgattgtgaaaaagggcttcctagctcttctcacttgagggaatgcgtcaggatctacggtggcgagcggccttacactcataaagagtacgtggaaaccttctcccattcaacggcgctgtttgtacacatgcaaactcaagatggcgaaaaattttacgagtgtaaagcatgcggcaagcccttcacagaaagctcctatctaacacagcacctcagaactcactccagagtccttcccatagaacacaagaagttcggcaaagcatttgcctttagccccgatcttgctaagcatattcgactcagaaccaggggaaagcattatgtgtgtaacgagtgcgggaaggaatttacgtgtttttcaaagctcaatatacacatccgagttcataccggtgaaaagccgtatgaatgtaacaaatgtgggaaggcgttcaccgattcatcaggcctaataaagcatcggcgtacacacacgggtgagaagccctatgaatgtaaggagtgcgggaaggcatttgcaaactcctcccacctgaccgtgcacatgcgcactcataccggagagaagccttaccagtgtaaagagtgtggcaaagcatttatcaactccagctcgttcaagtcccacatgcagactcatcccggagttaagccatacgactgtcagcaatgtggcaaggccttcatccgctcgagtttcctaattcgacatctccggagccacagcgccgaaaggccatttgagtgtgaggaatgtggtaaagctttccggtactctagtcacctgagccagcataagcggattcacacaggcgagagaccttacaagtgccaaaagtgcggtcaggcgttctctatctcttccggacttaccgtccatatgcgtacacataccggcgaacggccatttgagtgtcaggagtgtgggaaggctttcacgagaagtacctatctgattaggcaccttaggagtcatagtgtggagaagccttacaaagagtgtggccagaccttctcaaacagtagctgcctgacagaatgcgtatag

SEQ ID NO: 224533 - protein, 288 aa, Artificial Sequence
  derived and/or modified sequence
MEPPDQCSQYMTSLLSPAVDDEKELQDMNAMVLSLTEEVKEEEEDAQPEPEQGTAAGEKLKSAGAQGGEEKDGGGEEKDGGGAGVPGHLWEGDLEGTSGSDGNVEDSDQSEKEPGQQYSRPQGAVGGLEPGNAQQPNVHAFTPLQLQELERIFQREQFPSEFLRRRLARSMNVTELAVQIWFENRRAKWRRHQRALMARNMLPFMAVGQPVMVTAAEAITAPLFISGMRDDYFWDHSHSSSLCFPMPPFPPPSLPLPLMLLPPMPPAGQAEFGPFPFVIVPSFTFPNV

SEQ ID NO: 224534 - DNA, 867 bp, Artificial Sequence
  derived and/or modified sequence
atggagccgccagatcagtgcagccagtacatgacctcgttgttaagtccagccgtggatgacgagaaggagctgcaggacatgaatgcaatggtcctgagcctcacagaagaggttaaggaagaggaggaggatgcgcagcccgaacccgagcagggaaccgcagcgggagaaaagttgaaatctgccggcgctcagggcggtgaggagaaggatggaggaggcgaggaaaaggacggcggcggcgccggggtccccgggcatttatgggaaggagatctagaggggacctccggctccgatggaaatgtggaagacagcgatcaaagcgagaaggaaccgggccagcagtactccaggcctcagggcgccgtgggcggactggagcctggaaacgctcagcaaccgaatgtacacgcctttacacctctccaactccaggagctggaacggatctttcagagagagcagttcccttctgaattcctcagacggcggctcgcccgaagtatgaacgttacagaattggccgttcaaatatggttcgagaatcggcgagcaaagtggaggaggcatcagcgcgcactgatggctcgaaatatgctcccgttcatggctgtgggacaaccagtgatggtaactgcggcagaagcaatcacagccccgttgtttatcagcggcatgcgcgatgactacttctgggaccacagtcacagcagcagtctgtgtttccccatgccccctttccctcccccttctctgccccttcctctcatgttgctgccccccatgcctcccgcaggccaagccgagtttggtcccttccctttcgttatcgtacctagcttcacatttccaaatgtgtag

SEQ ID NO: 224535 - DNA, 867 bp, Artificial Sequence
  derived and/or modified sequence
atggagcccccagaccagtgcagccagtacatgaccagcctgctgagccctgctgtggatgatgagaaggagctgcaggacatgaatgccatggtgctgagcctgacagaggaggtgaaggaggaggaggaggatgcccagcctgagcctgagcagggcacagctgctggggagaagctgaagtctgctggggcccagggcggggaggagaaggatggcggcggggaggagaaggatggcggcggggccggcgtgcccggccacctgtgggagggggacctggagggcaccagcggcagtgatggaaatgtggaggacagcgaccagagcgagaaggagcccggccagcagtacagccggccccagggcgctgtgggcggcctggagcctggaaatgcccagcagcccaacgtgcacgccttcacccccctgcagctgcaggagctggagcgcatcttccagcgggagcagttccccagcgagttcctgcggcggcggctggcccgctccatgaatgtgacagagctggccgtgcagatctggtttgaaaatagaagagccaagtggaggaggcaccagagggccctgatggccaggaacatgctgcccttcatggctgtgggccagcctgtgatggtgacagctgctgaggccatcacagcccccctcttcatcagcggcatgagagatgactacttctgggaccacagccacagcagcagcctgtgcttccccatgccacccttccccccacccagcctgcccctgcccctgatgctgctgccccccatgcctcctgctggccaggccgagtttggccccttcccctttgtgattgtgcccagcttcaccttccccaacgtgtag

SEQ ID NO: 224536 - DNA, 1309 bp, Artificial Sequence
  derived and/or modified sequence
aacccacagcaaatagcgggaagcagaaaagcaagagaggaggtctctaagtggatacactgttgctgagtctagacaccagaagaacgttgcaggcggcgactcacagttctagcactgcctaggagagcgtggtggccccagctcagaatctgcagaagtgcacagctccatccacaccactcagggtatggagcctccggaccagtgtagccagtatatgaccagcttgctcagccctgcagtcgacgacgagaaagaactacaggatatgaatgctatggtgctgtcgcttactgaagaggtcaaagaggaggaagaggatgcacagcctgagcctgagcaaggcacagcagcaggagaaaagttaaagtcggcaggagcccaaggcggagaagaaaaagatggcggcggagaagaaaaagatggcggcggcgccggagttcctggccacctatgggaaggagacctcgagggcaccagcggcagcgatggcaacgttgaggacagcgaccagagcgagaaggaacctgggcagcagtattcgcgcccacagggcgccgtcggggggctggagcctggcaacgcgcagcagcccaacgtccacgccttcaccccattgcagctgcaggagctggagcgcattttccaacgcgagcagttccccagtgagttcctgcgaaggaggctggcaagaagcatgaatgtgactgaactcgcagtgcagatttggtttgagaatagaagagccaaatggaggagacatcagagggcattaatggcaagaaacatgctgcccttcatggcagtgggccagcctgtcatggtaaccgcagctgaggccataacggcacccttgttcatcagcgggatgagagatgattacttctgggaccacagccattccagcagcctgtgtttccccatgccaccctttcctcctccgtccttgccccttccactcatgcttcttccacctatgccacccgctggccaggctgaatttggcccattcccttttgttatcgtgccttctttcacattccccaatgtctaagggatagcctctgtgccactttttgccagagtgtctttgagccagattcatattttgcatagcaccccatcaaaagtagttcatcaaatgtctattaaacgttttaaagaaaagtacatcattgacccatttttagggcacttgtaaaaatgtttctataaatatgtgaagggtatgtacatttgttttgtgtgtcacatggggtcagtaagttctcaataaaaattgttaagaaatgccattcaaaccgaa

SEQ ID NO: 224537 - DNA, 867 bp, Artificial Sequence
  derived and/or modified sequence
atggagccccccgaccagtgcagccagtacatgaccagcctgctgtcacccgccgtggacgacgaaaaagaactacaggacatgaacgccatggtgctaagcctgaccgaagaagtgaaagaggaagaagaggacgcacaaccagagccggagcagggcacggccgctggggagaaactgaagtctgccggggcacagggtggcgaggaaaaggacggaggtggtgaggaaaaagatggcggcggcgcaggcgtgccggggcacctgtgggaaggcgatcttgagggcacttcaggttctgatggcaatgtcgaagattctgatcaaagtgaaaaggagcccgggcaacagtactcaagaccacagggggccgtaggggggcttgaacctggcaacgcacagcagcctaatgttcacgctttcacaccactccagctgcaggagctagaaaggattttccaaagggaacagttcccaagcgagtttttgaggaggaggctcgccaggtcaatgaacgtcacagaattggccgtccagatctggttcgaaaataggcgtgctaaatggcgaaggcatcagagagcgctcatggcacgaaatatgctgccattcatggccgtcggacagccggtcatggtgacagcggctgaggccattactgcacctttattcatcagcggcatgagggatgattatttttgggatcatagccatagctcttctttgtgctttcctatgccccctttccctcccccaagcctgcccttaccactgatgttgttgccgcctatgccaccagctgggcaagccgagttcggacctttccccttcgttattgtgcccagcttcactttcccaaatgtgtag

SEQ ID NO: 224538 - DNA, 867 bp, Artificial Sequence
  derived and/or modified sequence
atggagccccctgaccagtgttctcagtatatgactagtctgctgtcccccgctgtggatgatgaaaaagaattgcaggatatgaatgccatggtcctgagcctcaccgaggaagtgaaggaagaagaggaagacgcccagccagaaccagagcagggtacggcggctggtgagaaactcaaatcggccggagctcaggggggtgaggaaaaggacggaggcggagaagaaaaggatggcggaggcgcaggggtgcccggacacctctgggagggggacctggaaggcacctctgggagtgatgggaacgtcgaagattccgatcaatccgagaaagagcccggtcagcagtactcgcgaccgcagggcgctgtgggagggctcgaacccggaaacgctcagcaaccaaacgttcacgcctttacacctctccagctgcaggagttagaacgaatctttcagagagaacagttccctagcgaatttctgagacgaaggttggcccgtagcatgaatgtaaccgagctggccgttcagatttggtttgagaaccgtagggctaagtggcgtaggcatcaaagagccctgatggcccgtaacatgctaccctttatggccgtcggccagcctgttatggtcacagcagctgaggctattacggctcccctgtttataagcggcatgcgggacgactacttttgggatcactcacactcttcgtctttgtgcttcccaatgcccccatttcctcctcctagcctgccactgccgctcatgttgctgccccctatgccgccagccggacaggcagagtttggtccctttcccttcgtgattgttccatctttcacgtttcctaacgtctag

SEQ ID NO: 224539 - DNA, 867 bp, Artificial Sequence
  derived and/or modified sequence
atggagccccccgaccagtgcagccagtacatgaccagcctgctgagccccgccgtggacgacgagaaggagctgcaggacatgaacgccatggtgctgagcctgaccgaggaggtgaaggaggaggaggaggacgcccagcccgagcccgagcagggcaccgccgccggcgagaagctgaagagcgccggcgcccagggcggcgaggagaaggacggcggcggcgaggagaaggacggcggcggcgccggcgtgcccggccacctgtgggagggcgacctggagggcaccagcggcagcgacggcaacgtggaggacagcgaccagagcgagaaggagcccggccagcagtacagcagaccccagggcgccgtgggcggcctggagcccggcaacgcccagcagcccaacgtgcacgccttcacccccctgcagctgcaggagctggagagaatcttccagagagagcagttccccagcgagttcctgagaagaagactggccagaagcatgaacgtgaccgagctggccgtgcagatctggttcgagaacagaagagccaagtggagaagacaccagagagccctgatggccagaaacatgctgcccttcatggccgtgggccagcccgtgatggtgaccgccgccgaggccatcaccgcccccctgttcatcagcggcatgagagacgactacttctgggaccacagccacagcagcagcctgtgcttccccatgccccccttccccccccccagcctgcccctgcccctgatgctgctgccccccatgccccccgccggccaggccgagttcggccccttccccttcgtgatcgtgcccagcttcaccttccccaacgtgtag

SEQ ID NO: 224540 - protein, 689 aa, Artificial Sequence [sequence omitted]

SEQ ID NO: 224541 - protein, 153 aa, Artificial Sequence
  derived and/or modified sequence
MAARTLGRGVGRLLGSLRGLSGQPARPPCGVSAPRRAASGPSGSAPAVAAAAAQPGSYPALSAQAAREPAAFWGPLARDTLVWDTPYHTVWDCDFSTGKIGWFLGGQLNVSVNCLDQHVRKSPESVALIWERDEPGTEVRITYSPWLQMPCGP

SEQ ID NO: 224542 - protein, 606 aa, Artificial Sequence
  derived and/or modified sequence
MLKTFLFLEKYFPCIKYSSACFPGTGLDVYDIKFAVLLHPQTALHFGPPPSLMAFSSLCCRELLETTCRLANTLKRHGVHRGDRVAIYMPVSPLAVAAMLACARIGAVHTVIFAGFSAESLAGRINDAKCKVVITFNQGLRGGRVVELKKIVDEAVKHCPTVQHVLVAHRTDNKVHMGDLDVPLEQEMAKEDPVCAPESMGSEDMLFMLYTSGSTGMPKGIVHTQAGYLLYAALTHKLVFDHQPGDIFGCVADIGWITGHSYVVYGPLCNGATSVLFESTPVYPNAGRYWETVERLKINQFYGAPTAVRLLLKYGDAWVKKYDRSSLRTLGSVGEPINCEAWEWLHRVVGDSRCTLVDTWWQTETGGICIAPRPSEEGAEILPAMAMRPFFGIVPVLMDEKGSVVEGSNVSGALCISQAWPGMARTIYGDHQRFVDAYFKAYPGYYFTGDGAYRTEGGYYQITGRMDDVINISGHRLGTAEIEDAIADHPAVPESAVIGYPHDIKGEAAFAFIVVKDSAGDSDVVVQELKSMVATKIAKYAVPDEILVVKRLPKTRSGKVMRRLLRKIITSEAQELGDTTTLEDPSIIAEILSVYQKCKDKQAAAK

SEQ ID NO: 224543 - DNA, 2070 bp, Artificial Sequence
  derived and/or modified sequence
atggcagcgaggaccttgggtcgaggcgtgggacggctgctcgggtctctgagaggcctgtcgggtcagcctgcccgtccaccttgcggggtgtccgccccccgccgggccgcctcgggcccaagcggctctgctcccgccgtagctgctgcagcggcacagcccggttcatatccagccctttctgcacaggccgccagagaaccggccgccttctggggacccctcgcaagagacaccctggtttgggacaccccttaccacaccgtttgggattgtgatttctctaccggtaaaattgggtggtttttgggtgggcagcttaacgtcagcgtgaattgcttggaccaacacgttcgaaagagcccagaatctgtcgccctgatatgggaaagggacgagcctggcaccgaagtgcggataacttaccgggagctgcttgaaacaacctgcagactggccaataccctgaagcggcatggagtccaccgtggcgaccgagtggctatctatatgccagtttccccactggccgtggccgcgatgctggcctgtgcccgcattggagccgtgcatacagtcatcttcgccgggttcagcgccgagtctctggccggcagaataaacgacgctaaatgtaaagtggtgataacctttaatcaaggcctcagggggggtagggtggtagagttaaagaaaatagtcgatgaggcagtgaaacattgtccaactgttcagcacgtgttggtagctcaccgcaccgataataaagttcatatgggcgatctggatgtccccctcgaacaggaaatggcaaaagaggaccctgtgtgtgcccccgaatcgatgggttctgaagacatgctgttcatgctatacacgtccggatccactggcatgcccaagggcatcgtccatactcaagctggatacctcctgtacgctgccttgactcacaaactggtgttcgaccatcagccaggagatattttcggctgtgtcgccgatattggatggataactggccactcttatgtggtgtacggccctctgtgcaacggcgcaacttctgtgcttttcgagtctactccagtgtatcctaacgctggaagatattgggaaaccgtggagagattgaagattaatcagttctatggcgcgccaacagcagttaggctgctcttaaaatacggagacgcatgggtcaagaagtacgatagaagcagcctcaggacgctcggaagtgttggggagcccatcaattgtgaggcctgggagtggctgcacagggtggtcggagattcccgatgtacgttggtggacacttggtggcaaacagagaccggcggtatctgtattgccccacgtccaagtgaagaaggcgcagagattttgcctgcaatggccatgagaccatttttcggaatcgttccagttctgatggacgagaaaggttccgtggttgaggggagcaacgtgagcggagccctctgtataagccaggcttggccaggaatggcgcgcaccatttacggcgatcatcagcggtttgttgacgcgtacttcaaagcctaccctggttactacttcactggtgacggagcctatcggacagagggcggctattaccagatcaccggccgcatggacgatgtgatcaatatatcgggtcaccgactaggaaccgcagaaatcgaggacgcaattgccgaccacccagctgttccagagtcagccgtcatcggctacccgcatgacatcaaaggcgaggctgctttcgctttcattgtcgtgaaggatagcgccggtgattcggacgttgtggtccaggagctgaaatccatggtggccacaaagattgctaaatacgctgtcccagatgaaatattggtggtaaaacgattacctaaaactcgatcaggaaaagtgatgcgcaggcttctgcgaaagatcataacctctgaggctcaggaacttggagacaccactacactggaagacccctccataatcgccgagatcctatcggtgtaccagaaatgcaaagacaagcaggctgctgccaagtag

SEQ ID NO: 224544 - DNA, 2070 bp, Artificial Sequence
  derived and/or modified sequence
atggccgcccggaccctgggccggggcgtgggccgcctgctgggcagcctgcggggcctgagcggccagcctgcccggcccccctgtggggtgtctgcccccaggagagctgccagcggccccagcggcagcgccccagctgtggccgctgctgctgcccagcccggcagctacccagccctgagcgcccaggccgcccgggagcctgctgccttctggggccccctggcccgggacaccctggtgtgggacaccccctaccacacagtgtgggactgtgacttcagcacaggcaagattggctggttcctgggcggccagctgaatgtgtctgtgaactgcctggaccagcacgtgaggaagagccctgagagcgtggccctgatctgggagagagatgagcctggaacagaggtgcgcatcacctaccgggagctgctggagaccacctgccgcctggccaacaccctgaagagacatggagtgcacagaggagacagagtggccatctacatgcctgtgagccccctggccgtggccgccatgctggcctgtgcccgcatcggggctgtgcacacagtcatctttgctggcttctctgctgagagcctggccggccgcatcaatgatgccaagtgcaaggtggtgatcaccttcaaccagggcctgcggggcggccgggtggtggagctgaagaagatcgtggatgaggccgtgaagcactgccccaccgtgcagcacgtgctggtggcccacaggacagacaacaaggtgcacatgggagacctggatgtgcccctggagcaggagatggccaaggaggaccctgtgtgtgcccctgagagcatgggcagcgaggacatgctgttcatgctgtacaccagcggcagcacaggcatgcccaagggcatcgtgcacacccaggccggctacctgctgtatgctgccctgacccacaagctggtgtttgaccaccagcccggggacatcttcggctgtgtggccgacatcggctggatcaccggccacagctatgtggtgtatggccccctgtgcaatggagccacctctgtgctgtttgagagcacccctgtgtacccaaatgccggccgctactgggagaccgtggagcggctgaagatcaaccagttctatggagcccccacagctgtgcggctgctgctgaagtatggagatgcctgggtgaagaagtatgacaggagcagcctgcggaccctgggctctgtgggggagcccatcaactgtgaggcctgggagtggctgcaccgggtggtgggggacagccgctgcaccctggtggacacctggtggcagacagagaccggcggcatctgcatcgccccccggcccagcgaggagggcgctgagatcctgcctgccatggccatgaggcccttcttcggcatcgtgcctgtgctgatggatgagaagggctctgtggtggagggcagcaatgtgtctggggccctgtgcatcagccaggcctggccaggcatggcccggaccatctatggagaccaccagagatttgtggatgcctacttcaaggcctacccaggctactacttcaccggagatggagcctacagaacagagggcggctactaccagatcaccggccgcatggatgatgtgatcaacatcagcggccaccggctgggcacagctgagattgaagatgccatcgctgaccaccctgctgtgcctgagagcgctgtgattggctacccccatgacatcaagggggaggccgcctttgccttcatcgtggtgaaggacagcgctggggacagtgatgtggtggtgcaggagctgaagtccatggtggccaccaagatcgccaagtatgctgtgcctgatgagatcctggtggtgaagaggctgcccaagaccaggtctgggaaggtgatgaggcggctgctgaggaagatcatcaccagcgaggcccaggagctgggggacaccaccaccctggaggaccccagcatcatcgccgagatcctgtctgtgtaccagaagtgcaaggacaagcaggccgccgccaagtag

SEQ ID NO: 224545 - DNA, 2070 bp, Artificial Sequence
  derived and/or modified sequence
atggccgcccggaccctgggccggggcgtgggccggctgctgggctcacttcgtgggttatctgggcagccagcgagacccccctgcggcgtaagcgccccccggagggccgcaagtgggccctctggatccgcacccgctgtggccgctgccgcagcccagcctggtagctacccggcattgagcgcgcaggccgcccgtgagcctgcagctttctggggacccctcgccagagatacactggtgtgggataccccgtaccacacagtttgggattgcgatttcagtactggcaaaataggatggttccttggtggtcagctgaacgtatccgtcaactgcctggatcagcacgttagaaaatcccctgagtctgtggctctcatctgggaacgagatgaacccggaaccgaggtgcggatcacatatagagagctcctagaaactacatgtcgcttggctaacaccctgaagcgccacggggtacatcgcggtgatagagtggcaatttatatgcccgttagcccattggccgtggcagccatgctggcctgtgccagaatcggagcagtgcatactgtgatttttgctgggttttcagctgaaagtttggccggacgcatcaatgatgccaagtgcaaagtggtcatcacttttaaccagggccttagagggggccgtgttgtcgaactgaaaaagatcgttgacgaggctgtcaaacactgccctactgtccaacatgttctggttgctcaccggaccgataacaaggttcacatgggggacctggacgttcctctggagcaagagatggcgaaagaggatccggtttgtgctcccgaatcaatgggttctgaggatatgctgtttatgctgtatacttccgggtctacaggaatgccaaagggcatcgtacacacacaggctggatacttactctacgcagccctgacccacaaactggtattcgatcaccaacctggtgacatctttggttgcgtggctgatatcggatggatcacagggcacagttacgtcgtttatggcccactctgcaacggcgccacctcagtcctatttgagagtactcctgtatatcctaatgccggtaggtattgggagacagtggaacggctcaaaattaatcagttttacggtgcgcctacagccgtccgattgctcctcaaatatggagacgcatgggttaaaaaatacgaccgcagtagtttgagaacactcggaagcgtgggagagccaataaactgtgaggcctgggagtggctgcaccgcgtagttggcgactctcgatgcactctggtggatacctggtggcagacagagactggcggtatctgtatcgctcctcggccgtccgaggaaggggcagaaattctccccgcaatggccatgaggccttttttcggcattgtccctgtgctcatggatgagaagggtagcgttgtcgaaggaagcaacgtctctggcgccctatgcatatcgcaggcttggccaggcatggcccgcaccatctacggggaccaccagaggtttgtggatgcctacttcaaagcgtatcccgggtactactttaccggggatggggcgtacagaacagaaggaggttactatcagattacaggcaggatggacgacgtaataaacatatccgggcaccgcttggggaccgctgagatcgaggatgccattgccgaccatcctgccgttcctgaatcggccgttataggttacccccatgatattaaaggggaggcagcctttgccttcattgtggttaaagacagcgccggtgactccgacgtggtcgtccaggagctcaagtctatggttgctaccaaaatagctaagtacgccgtcccagacgaaatacttgtggtcaagcggctgcccaagacccgaagcgggaaagtaatgaggaggctgttgcggaagataatcacctccgaagctcaggaacttggagatacaactacactggaggatccatccataattgccgaaattctgtccgtttaccagaaatgcaaagacaagcaggccgccgcaaagtag

SEQ ID NO: 224546 - DNA, 2070 bp, Artificial Sequence
  derived and/or modified sequence
atggcagccaggaccctgggaaggggggtaggcaggcttctaggctcgctgaggggactgtccgggcaacccgctagacccccatgtggagtaagcgccccaaggcgggcagctagcggaccaagtgggtccgccccagcggtcgcggctgccgctgcacagcccggatcttacccggcactgtctgcccaggccgcaagggaacccgcagcattctgggggcctttggccagggatacactggtgtgggacaccccctaccacaccgtgtgggattgcgactttagtactggtaagatcggctggttcttggggggacagctgaacgtctcggtgaattgtctggaccagcatgtaagaaagtctcccgaaagcgtcgccctgatctgggagagagatgaacccggtactgaggtgcggatcacttatcgcgagctgcttgaaacaacatgtagactagccaacacattgaagcgccacggggttcacagaggagatcgggttgcgatttatatgcccgttagccccttagctgttgccgcaatgctcgcttgcgctcgaattggggcagtacataccgtcattttcgctggcttttccgccgagagtttggcaggccgaatcaacgatgccaaatgcaaggtcgtgatcactttcaatcagggcctccgcggaggccgagtggtcgagctgaagaaaatcgttgacgaggctgtgaagcattgtcctaccgttcagcacgtattagtagcccatcgtaccgataacaaggtacatatgggggacctcgacgtccctttagagcaggaaatggcaaaagaggatcccgtttgcgcccctgagtccatgggtagcgaagacatgctgttcatgctctacacttccggctcgacaggaatgcctaaaggaatagtgcatactcaggccggatatttactgtacgcagccctcacccataagctagtattcgaccatcagcctggcgacatattcgggtgcgtcgcagacatcggctggatcacgggccattcctatgtcgtttacggccctctgtgtaatggtgcgaccagcgtgcttttcgagtctacacccgtgtatccgaacgcgggacggtactgggaaaccgttgagcggcttaagattaatcagttctatggagcccctaccgcagtgagactgttgctaaagtatggtgacgcatgggtaaaaaagtatgacaggtcctcccttcggaccttaggctccgtgggcgaacccattaactgcgaagcatgggaatggctccacagagtggtcggggattccagatgtactctggttgacacctggtggcagaccgagaccggtggcatctgtattgctccaagaccttccgaagaaggagctgagatcctgccagcaatggcaatgaggccattcttcggaatcgtcccggtcctgatggacgagaagggctccgttgtggaaggaagcaatgtttcaggggctctctgcatcagtcaggcctggccagggatggccagaaccatttacggagaccaccagagatttgtagatgcatacttcaaggcataccctgggtactatttcacaggcgatggggcatacagaaccgaagggggatattatcaaattacgggaaggatggatgatgtgattaacataagcggacacagactaggtacagccgagatcgaggacgccatagctgaccaccctgctgtacccgagtcggccgttatagggtacccccatgacattaaaggcgaagctgcattcgctttcatcgtcgtgaaagattctgccggtgattccgatgttgtcgtgcaggaactcaaatctatggtcgcaactaaaattgccaagtatgcagttcctgacgagattttagtggtgaagagactgccaaaaacacgctcagggaaggtgatgcgccgactattacgcaagattatcacaagtgaggctcaagaattaggggataccacgactctcgaagacccatctataatcgctgagattctttctgtgtaccaaaagtgtaaggacaagcaggctgctgctaagtag

SEQ ID NO: 224547 - DNA, 2070 bp, Artificial Sequence
  derived and/or modified sequence
atggccgccagaaccctgggcagaggcgtgggcagactgctgggcagcctgagaggcctgagcggccagcccgccagacccccctgcggcgtgagcgcccccagaagagccgccagcggccccagcggcagcgcccccgccgtggccgccgccgccgcccagcccggcagctaccccgccctgagcgcccaggccgccagagagcccgccgccttctggggccccctggccagagacaccctggtgtgggacaccccctaccacaccgtgtgggactgcgacttcagcaccggcaagatcggctggttcctgggcggccagctgaacgtgagcgtgaactgcctggaccagcacgtgagaaagagccccgagagcgtggccctgatctgggagagagacgagcccggcaccgaggtgagaatcacctacagagagctgctggagaccacctgcagactggccaacaccctgaagagacacggcgtgcacagaggcgacagagtggccatctacatgcccgtgagccccctggccgtggccgccatgctggcctgcgccagaatcggcgccgtgcacaccgtgatcttcgccggcttcagcgccgagagcctggccggcagaatcaacgacgccaagtgcaaggtggtgatcaccttcaaccagggcctgagaggcggcagagtggtggagctgaagaagatcgtggacgaggccgtgaagcactgccccaccgtgcagcacgtgctggtggcccacagaaccgacaacaaggtgcacatgggcgacctggacgtgcccctggagcaggagatggccaaggaggaccccgtgtgcgcccccgagagcatgggcagcgaggacatgctgttcatgctgtacaccagcggcagcaccggcatgcccaagggcatcgtgcacacccaggccggctacctgctgtacgccgccctgacccacaagctggtgttcgaccaccagcccggcgacatcttcggctgcgtggccgacatcggctggatcaccggccacagctacgtggtgtacggccccctgtgcaacggcgccaccagcgtgctgttcgagagcacccccgtgtaccccaacgccggcagatactgggagaccgtggagagactgaagatcaaccagttctacggcgcccccaccgccgtgagactgctgctgaagtacggcgacgcctgggtgaagaagtacgacagaagcagcctgagaaccctgggcagcgtgggcgagcccatcaactgcgaggcctgggagtggctgcacagagtggtgggcgacagcagatgcaccctggtggacacctggtggcagaccgagaccggcggcatctgcatcgcccccagacccagcgaggagggcgccgagatcctgcccgccatggccatgagacccttcttcggcatcgtgcccgtgctgatggacgagaagggcagcgtggtggagggcagcaacgtgagcggcgccctgtgcatcagccaggcctggcccggcatggccagaaccatctacggcgaccaccagagattcgtggacgcctacttcaaggcctaccccggctactacttcaccggcgacggcgcctacagaaccgagggcggctactaccagatcaccggcagaatggacgacgtgatcaacatcagcggccacagactgggcaccgccgagatcgaggacgccatcgccgaccaccccgccgtgcccgagagcgccgtgatcggctacccccacgacatcaagggcgaggccgccttcgccttcatcgtggtgaaggacagcgccggcgacagcgacgtggtggtgcaggagctgaagagcatggtggccaccaagatcgccaagtacgccgtgcccgacgagatcctggtggtgaagagactgcccaagaccagaagcggcaaggtgatgagaagactgctgagaaagatcatcaccagcgaggcccaggagctgggcgacaccaccaccctggaggaccccagcatcatcgccgagatcctgagcgtgtaccagaagtgcaaggacaagcaggccgccgccaagtag

SEQ ID NO: 224548 - DNA, 3680 bp, Artificial Sequence
  derived and/or modified sequence
ggcccgcggagactccacggggcgccccgggcgtgaggcacccactctgggagcacagagagctcaggtagcctgcctagatggcggcgcgcaccctgggccgcggcgtcgggaggctgctgggcagcctgcgagggctctcggggcagcccgcgcggccgccgtgcggggtgagcgcgccgcgcagggcggcctcgggaccctcgggcagcgctcccgcagttgcagcagcagcagcacagccaggctcgtatcccgcgctgagtgcacaggcagcccgggagccggccgccttctgggggcctctggcgcgggacactctcgtgtgggacaccccctaccacaccgtctgggactgcgacttcagcactggcaagatcggctggttcctgggaggccagttaaatgtctctgtcaactgcttggaccagcatgttcggaagtcccccgagagcgttgctttgatctgggagcgcgatgagcctggaacggaagtgaggatcacctacagggaactactggagaccacgtgccgcctggccaacacgctgaagaggcatggagtccaccgtggggaccgtgttgccatctacatgcccgtgtccccattggctgtggcagcaatgctggcctgtgccaggatcggagctgtccacacagtcatctttgctggcttcagtgcagagtccttggctgggaggatcaatgatgccaagtgcaaggtggttatcaccttcaaccaaggactccggggtgggcgcgtggtggagctgaagaaaatagtggatgaggctgtgaagcactgccccaccgtgcagcatgtcctggtggctcacaggacagacaacaaggtccacatgggggatctggacgtcccgctggagcaggaaatggccaaggaggaccctgtttgcgccccagagagcatgggcagtgaggacatgctcttcatgctgtacacctcagggagcaccggaatgcccaagggcatcgtccatacccaggcaggctacctgctctatgccgccctgactcacaagcttgtgtttgaccaccagccaggtgacatctttggctgtgtggccgacatcggttggattacaggacacagctacgtggtgtatgggcctctctgcaatggtgccaccagcgtcctttttgagagcaccccagtttatcccaatgctggtcggtactgggagacagtagagaggttgaagatcaatcagttctatggcgccccaacggctgtccggctgttgctgaaatacggtgatgcctgggtgaagaagtatgatcgctcctccctgcggaccctggggtcagtgggagagcccatcaactgtgaggcctgggagtggcttcacagggtggtgggggacagcaggtgcacgctggtggacacctggtggcagacagaaacaggtggcatctgcatcgcaccacggccctcggaagaaggggcggaaatcctccctgccatggcgatgaggcccttctttggcatcgtccccgtcctcatggatgagaagggcagcgtcgtggagggcagcaacgtctccggggccctgtgcatctcccaggcctggccgggcatggccaggaccatctatggcgaccaccagcgatttgtggacgcctacttcaaggcctacccaggctattacttcactggagacggggcttaccgaactgagggcggctattaccagatcacagggcggatggatgatgtcatcaacatcagtggccaccggctggggaccgcagagattgaggacgccatcgccgaccaccctgcagtaccagaaagtgctgtcattggctacccccacgacatcaaaggagaagctgcctttgccttcattgtggtgaaagatagtgcgggtgactcagatgtggtggtgcaggagctcaagtccatggtggccaccaagatcgccaaatatgctgtgcctgatgagatcctggtggtgaaacgtcttccaaaaaccaggtctgggaaggtcatgcggcggctcctgaggaagatcatcactagtgaggcccaggagctgggagacactaccaccttggaggaccccagcatcatcgcagagatcctgagtgtctaccagaagtgcaaggacaagcaggctgctgctaagtgagctggcaccttgtggggctcttgggatgggcgggcacccaagccctggcttgtccttcccagaaggtacccctgaggttggcgtcttcctacgtcccagaagcagcccccaccccacacatgacccacaccgccctcacgtgaagctgggctgagagccctttctcccatccattggaggtcccaggagtgtcacccatggagaggctatgcgacatggctagggctggttctgccatctgagtttggtttcctggaatgaaaaggcattgccatctccattcctctgccctcttgagccagcacaggaaggtgaggccctgggatagcgcgcctgctcagataacacagagctagttagctagtagcaaccgtgttttctccagatctgtctagatacaaaggtcagaaatcttatttttatacttttatattgtggaagaacagcatgcaacactcacatgtagtgtgtggatttacttgaacatgttctttttaacatgtagttatgaaaatctccttttttgcctctactggtgaggaaacatgaggatcagaggccacatttttaattattgttagtgtatttggaagtctgaattggagatgtttgtacctctgtctaaacagttcccttgagaacttccaagcctccggcatcttttcctggtgagtgtttctcctgtgcttggttgtgtataatggagctaactcctaagcggtggggtgaatgtggccgccttagttctgaagctactccagttatgttctgtttcttcaagctgtgatccagaaagatttttgtgcccccagatgcctcttgataggagaggcaacatactccaaatagttgggttcttcagggaagctattagaaactcaggtgacttgttagagcactaacttggtcagagccaaatcctggcaaacgctgcctgaccttcactctgtggttggggcggtgagaaccactgaggtccaatgatgagacttggaggtctggatccagtctctctttgttttaatgtgacttaggtgctgtcaacattagcaagataatggaaatcacgacgccagtgggtgcttacctccctgctaggcatgcaggggctggcggttggcaggggaaggaggcccagtgagccgggtcccttaggggagggagagtttgtcctctttgccccacagtctacccttcagggccttgtggcagtgccagtgttcggggggtgtctgggccactgagtacccactcggtcgtggttgtgctggcctcttgggtgagtgaacctgtgaagcccaggaggtggtgttggctgcagggtacacaaatactgagtggtggtcttttgttacaggcttagcaacaaagctgtgccctgggcatggggggctgtagtgtagctacagttgtgcgtttgtgaaatggcttagctttccatgttgctgagaggaacctggacatggtcccgggcatctgaatgatctgtaggggagggagttcaaataaagctttattttgttcattttc

SEQ ID NO: 224549 - protein, 575 aa, Artificial Sequence
  derived and/or modified sequence
MDPFHACSILKQLKTMYDEGQLTDIVVEVDHGKTFSCHRNVLAAISPYFRSMFTSGLTESTQKEVRIVGVEAESMDLVLNYAYTSRVILTEANVQALFTAASIFQIPSIQDQCAKYMISHLDPQNSIGVFIFADHYGHQELGDRSKEYIRKKFLCVTKEQEFLQLTKDQLISILDSDDLNVDREEHVYESIIRWFEHEQNEREVHLPEIFAKCIRFPLMEDTFIEKIPPQFAQAIAKSCVEKGPSNTNGCTQRLGMTASEMIICFDAAHKHSGKKQTVPCLDIVTGRVFKLCKPPNDLREVGILVSPDNDIYIAGGYRPSSSEVSIDHKAENDFWMYDHSTNRWLSKPSLLRARIGCKLVYCCGKMYAIGGRVYEGDGRNSLKSVECYDSRENCWTTVCAMPVAMEFHNAVEYKEKIYVLQGEFFLFYEPQKDYWGFLTPMTVPRIQGLAAVYKDSIYYIAGTCGNHQRMFTVEAYDIELNKWTRKKDFPCDQSINPYLKLVLFQNKLHLFVRATQVTVEEHVFRTSRKNSLYQYDDIADQWMKVYETPDRLWDLGRHFECAVAKLYPQCLQKVL

SEQ ID NO: 224550 - protein, 601 aa, Artificial Sequence
  derived and/or modified sequence
MAASADLSKSSPTPNGIPSSDPASDAMDPFHACSILKQLKTMYDEGQLTDIVVEVDHGKTFSCHRNVLAAISPYFRSMFTSGLTESTQKEVRIVGVEAESMDLVLNYAYTSRVILTEANVQALFTAASIFQIPSIQDQCAKYMISHLDPQNSIGVFIFADHYGHQELGDRSKEYIRKKFLCVTKEQEFLQLTKDQLISILDSDDLNVDREEHVYESIIRWFEHEQNEREVHLPEIFAKCIRFPLMEDTFIEKIPPQFAQAIAKSCVEKGPSNTNGCTQRLGMTASEMIICFDAAHKHSGKKQTVPCLDIVTGRVFKLCKPPNDLREVGILVSPDNDIYIAGGYRPSSSEVSIDHKAENDFWMYDHSTNRWLSKPSLLRARIGCKLVYCCGKMYAIGGRVYEGDGRNSLKSVECYDSRENCWTTVCAMPVAMEFHNAVEYKEKIYVLQGEFFLFYEPQKDYWGFLTPMTVPRIQGLAAVYKDSIYYIAGTCGNHQRMFTVEAYDIELNKWTRKKDFPCDQSINPYLKLVLFQNKLHLFVRATQVTVEEHVFRTSRKNSLYQYDDIADQWMKVYETPDRLWDLGRHFECAVAKLYPQCLQKVL

SEQ ID NO: 224551 - DNA, 1728 bp, Artificial Sequence
  derived and/or modified sequence
atggaccccttccacgcctgcagcatcctgaagcagctgaagaccatgtacgacgagggccagctgaccgacatcgtggtggaggtggaccacggcaagaccttcagctgccacagaaacgtgctggccgccatcagcccctacttcagaagcatgttcaccagcggcctgaccgagagcacccagaaggaggtgagaatcgtgggcgtggaggccgagagcatggacctggtgctgaactacgcctacaccagcagagtgatcctgaccgaggccaacgtgcaggccctgttcaccgccgccagcatcttccagatccccagcatccaggaccagtgcgccaagtacatgatcagccacctggacccccagaacagcatcggcgtgttcatcttcgccgaccactacggccaccaggagctgggcgacagaagcaaggagtacatcagaaagaagttcctgtgcgtgaccaaggagcaggagttcctgcagctgaccaaggaccagctgatcagcatcctggacagcgacgacctgaacgtggacagagaggagcacgtgtacgagagcatcatcagatggttcgagcacgagcagaacgagagagaggtgcacctgcccgagatcttcgccaagtgcatcagattccccctgatggaggacaccttcatcgagaagatccccccccagttcgcccaggccatcgccaagagctgcgtggagaagggccccagcaacaccaacggctgcacccagagactgggcatgaccgccagcgagatgatcatctgcttcgacgccgcccacaagcacagcggcaagaagcagaccgtgccctgcctggacatcgtgaccggcagagtgttcaagctgtgcaagccccccaacgacctgagagaggtgggcatcctggtgagccccgacaacgacatctacatcgccggcggctacagacccagcagcagcgaggtgagcatcgaccacaaggccgagaacgacttctggatgtacgaccacagcaccaacagatggctgagcaagcccagcctgctgagagccagaatcggctgcaagctggtgtactgctgcggcaagatgtacgccatcggcggcagagtgtacgagggcgacggcagaaacagcctgaagagcgtggagtgctacgacagcagagagaactgctggaccaccgtgtgcgccatgcccgtggccatggagttccacaacgccgtggagtacaaggagaagatctacgtgctgcagggcgagttcttcctgttctacgagccccagaaggactactggggcttcctgacccccatgaccgtgcccagaatccagggcctggccgccgtgtacaaggacagcatctactacatcgccggcacctgcggcaaccaccagagaatgttcaccgtggaggcctacgacatcgagctgaacaagtggaccagaaagaaggacttcccctgcgaccagagcatcaacccctacctgaagctggtgctgttccagaacaagctgcacctgttcgtgagagccacccaggtgaccgtggaggagcacgtgttcagaaccagcagaaagaacagcctgtaccagtacgacgacatcgccgaccagtggatgaaggtgtacgagacccccgacagactgtgggacctgggcagacacttcgagtgcgccgtggccaagctgtacccccagtgcctgcagaaggtgctgtag

SEQ ID NO: 224552 - DNA, 1806 bp, Artificial Sequence
  derived and/or modified sequence
atggccgccagcgccgacctgagcaagagcagccccacccccaacggcatccccagcagcgaccccgccagcgacgccatggaccccttccacgcctgcagcatcctgaagcagctgaagaccatgtacgacgagggccagctgaccgacatcgtggtggaggtggaccacggcaagaccttcagctgccacagaaacgtgctggccgccatcagcccctacttcagaagcatgttcaccagcggcctgaccgagagcacccagaaggaggtgagaatcgtgggcgtggaggccgagagcatggacctggtgctgaactacgcctacaccagcagagtgatcctgaccgaggccaacgtgcaggccctgttcaccgccgccagcatcttccagatccccagcatccaggaccagtgcgccaagtacatgatcagccacctggacccccagaacagcatcggcgtgttcatcttcgccgaccactacggccaccaggagctgggcgacagaagcaaggagtacatcagaaagaagttcctgtgcgtgaccaaggagcaggagttcctgcagctgaccaaggaccagctgatcagcatcctggacagcgacgacctgaacgtggacagagaggagcacgtgtacgagagcatcatcagatggttcgagcacgagcagaacgagagagaggtgcacctgcccgagatcttcgccaagtgcatcagattccccctgatggaggacaccttcatcgagaagatccccccccagttcgcccaggccatcgccaagagctgcgtggagaagggccccagcaacaccaacggctgcacccagagactgggcatgaccgccagcgagatgatcatctgcttcgacgccgcccacaagcacagcggcaagaagcagaccgtgccctgcctggacatcgtgaccggcagagtgttcaagctgtgcaagccccccaacgacctgagagaggtgggcatcctggtgagccccgacaacgacatctacatcgccggcggctacagacccagcagcagcgaggtgagcatcgaccacaaggccgagaacgacttctggatgtacgaccacagcaccaacagatggctgagcaagcccagcctgctgagagccagaatcggctgcaagctggtgtactgctgcggcaagatgtacgccatcggcggcagagtgtacgagggcgacggcagaaacagcctgaagagcgtggagtgctacgacagcagagagaactgctggaccaccgtgtgcgccatgcccgtggccatggagttccacaacgccgtggagtacaaggagaagatctacgtgctgcagggcgagttcttcctgttctacgagccccagaaggactactggggcttcctgacccccatgaccgtgcccagaatccagggcctggccgccgtgtacaaggacagcatctactacatcgccggcacctgcggcaaccaccagagaatgttcaccgtggaggcctacgacatcgagctgaacaagtggaccagaaagaaggacttcccctgcgaccagagcatcaacccctacctgaagctggtgctgttccagaacaagctgcacctgttcgtgagagccacccaggtgaccgtggaggagcacgtgttcagaaccagcagaaagaacagcctgtaccagtacgacgacatcgccgaccagtggatgaaggtgtacgagacccccgacagactgtgggacctgggcagacacttcgagtgcgccgtggccaagctgtacccccagtgcctgcagaaggtgctgtag

SEQ ID NO: 224553 - DNA, 1728 bp, Artificial Sequence
  derived and/or modified sequence
atggaccccttccacgcgtgttctattttgaaacagctgaagacgatgtacgatgagggacagctaaccgatatcgtagtagaggtggaccatggaaagacttttagttgtcatcgcaacgtgctggcagctatctccccttatttcaggtcgatgtttactagtggtctgaccgaatcaacacagaaagaagtccgaatcgtcggggttgaggccgagtcgatggacctggtgctcaactatgcctacacaagccgcgtgatcttgaccgaagctaatgtgcaggcactgttcacagccgcctccattttccagattccatcgatacaagaccagtgcgctaagtacatgatatcccacctcgatccacaaaattctatcggggtcttcatttttgccgatcactacggccaccaggaattgggagaccgtagtaaggagtatatcaggaaaaagttcctatgtgtcactaaggagcaggagttcctacaactgactaaggatcagctgatctccattctggactccgatgacttgaatgtggatcgcgaggagcacgtctatgagtccattattagatggtttgaacacgagcaaaacgagagggaggtgcatctgcctgagatcttcgccaaatgcatccggttcccactgatggaagacactttcatcgagaagatccctcctcagtttgcacaggctatcgccaaatcctgtgtcgagaagggcccttccaataccaacggctgcactcagcggctgggcatgactgcctccgagatgatcatttgcttcgatgccgctcataagcactccggtaagaagcaaacggtcccatgtcttgatatcgtaaccggaagagtgttcaagctttgtaagccccctaatgacttgcgggaggtcgggattcttgtcagccccgacaacgatatttacattgccggaggctatcggccgagttcctccgaggtgtccattgatcacaaagcagagaatgatttctggatgtacgaccactccactaatcgctggctgagcaaaccgagcctcctacgggcaagaattggctgcaagctcgtttactgctgcggaaagatgtacgccattgggggccgggtgtatgaaggggacgggcgtaattcactgaaaagcgttgagtgttatgactctagggagaactgttggactaccgtttgcgccatgcctgtggccatggagttccacaatgctgtggagtacaaggagaaaatttatgtcctccaaggggaatttttcctcttttacgagccccagaaggactattggggtttcttgacacctatgacagttcctaggatccagggactcgcagccgtatataaggacagcatctattacatagcaggcacatgtgggaaccaccagaggatgttcacagtcgaagcctatgacatcgagctgaataaatggactcgtaagaaggactttccgtgcgatcagagtatcaacccttatctcaaattggtgttgttccagaacaaattgcatttattcgttagagccacacaagtcacagtggaggaacacgtattcagaacctcacgcaagaactcactgtaccagtatgatgacatcgcagatcagtggatgaaagtttatgagaccccagaccgcctgtgggacctgggtaggcacttcgagtgcgctgttgccaaactctacccccagtgcctgcaaaaggttttatag

SEQ ID NO: 224554 - DNA, 1806 bp, Artificial Sequence
  derived and/or modified sequence
atggcagcgagtgcagatctcagcaagtctagccccacacctaatggaattccttcctcggaccctgctagcgatgccatggacccttttcacgcttgctcaatattgaagcaacttaagactatgtatgacgagggccaactaacagacatcgtcgtggaggtggatcatgggaaaactttctcttgccaccgcaacgtgctggccgccatcagtccctattttagatctatgttcacgtcaggactcacagaatccactcagaaagaagtgcgtattgtaggagtagaggccgaaagcatggacctcgttctcaactatgcatacacctctcgcgttattctgacagaggcaaacgtgcaggctctctttactgccgcctcgatcttccagattccgtcaattcaggaccagtgtgccaagtacatgattagccacctggacccgcagaattcgattggggtgtttatcttcgcggatcactacggacatcaggaactgggggacaggtcgaaagagtatatacggaaaaaattcctttgtgtgactaaagaacaggaatttttgcagttgacaaaggatcagttgatttctatcctcgattcagacgatttaaacgtggatagagaagagcatgtttatgagtccatcattagatggttcgaacacgagcagaatgagagagaggttcaccttccagaaatctttgcgaaatgcattcggtttccactgatggaagacactttcatcgaaaaaatcccaccacagttcgctcaggcaatagctaaaagttgcgtggagaagggaccaagtaatacaaacgggtgtacccagaggcttggaatgactgccagcgagatgattatctgttttgacgctgctcacaagcattcgggtaagaaacagacagtgccatgcctcgatattgtaaccggtcgcgttttcaaactatgtaaaccacctaatgatcttagggaggtcggcatcctggtatccccagacaatgacatttacatcgccggcgggtataggccctctagtagtgaagtgtccatcgatcataaagcagagaacgatttttggatgtatgaccactcaacgaatcgatggctctctaagccaagtttgctgcgtgcccgaatcggctgcaaactggtgtattgctgtggcaagatgtacgccataggcggcagggtgtacgagggcgacggtcgcaatagcctgaaatccgttgaatgttacgattcacgggaaaattgttggactacagtctgtgctatgcctgtcgccatggagttccacaatgccgtagaatacaaagaaaaaatttatgttttacagggtgagttttttctgttctacgagccacagaaggattactggggatttcttacccccatgaccgtgccccgcattcagggactcgccgccgtatataaggactctatttattacatcgctggaacatgcggcaaccaccagcgtatgttcacagtagaagcctacgacatcgaactgaacaaatggaccaggaaaaaagatttcccctgtgaccagtctattaacccctacctgaagctcgtcctctttcagaacaagctgcacctatttgtgagagccacacaggttaccgtcgaggagcatgttttccgcacaagtaggaaaaactccttgtaccagtacgacgatatcgcggaccaatggatgaaagtttatgagacacccgataggctatgggacttaggtaggcatttcgagtgtgcagtagccaaactctacccgcaatgtttgcagaaagtcctttag

SEQ ID NO: 224555 - DNA, 1728 bp, Artificial Sequence
  derived and/or modified sequence
atggaccccttccacgcctgcagcatcctgaagcagctgaagaccatgtatgatgagggccagctgacagacatcgtggtggaggtggaccacggcaagaccttcagctgccacagaaatgtgctggccgccatcagcccctacttccgctccatgttcaccagcggcctgacagagagcacccagaaggaggtgagaattgtgggcgtggaggccgagagcatggacctggtgctgaactatgcctacaccagcagggtcatcctgacagaggccaacgtgcaggccctcttcaccgctgccagcatcttccagatccccagcatccaggaccagtgtgccaagtacatgatcagccacctggacccccagaacagcattggagtcttcatctttgctgaccactacggccaccaggagctgggggacaggagcaaggagtacatcaggaagaagttcctgtgtgtgaccaaggagcaggagttcctgcagctgaccaaggaccagctgatcagcatcctggacagtgatgacctgaatgtggaccgggaggagcacgtgtatgagagcatcatccgctggtttgaacatgagcagaatgaaagagaggtgcacctgcctgagatctttgccaagtgcatccgcttccccctgatggaggacaccttcatcgagaagatccccccccagtttgcccaggccatcgccaagagctgtgtggagaagggccccagcaacaccaacggctgcacccagaggctgggcatgacagccagcgagatgatcatctgctttgatgctgcccacaagcacagcggcaagaagcagacagtgccctgcctggacatcgtgacaggccgggtcttcaagctgtgcaagcccccaaatgacctgcgggaggtgggcatcctggtgtccccagacaatgacatctacatcgccggcggctaccggcccagcagcagcgaggtgtccattgaccacaaggcagaaaatgacttctggatgtatgaccacagcaccaaccgctggctgagcaagcccagcctgctgcgggccagaattggctgcaagctggtgtactgctgcggcaagatgtatgccatcggcggccgggtgtatgaaggagatggaagaaacagcctgaagtctgtggagtgctatgacagccgggagaactgctggaccaccgtgtgtgccatgcctgtggccatggagttccacaatgctgtggagtacaaggagaagatctacgtgctgcagggcgagttcttcctgttctatgagccccagaaggactactggggcttcctgacccccatgacagtgccccgcatccagggcctggccgctgtgtacaaggacagcatctactacatcgccggcacctgtggcaaccaccagaggatgttcaccgtggaggcctatgacatcgagctgaacaagtggaccaggaagaaggacttcccctgtgaccagagcatcaacccctacctgaagctggtgctcttccagaacaagctgcacctgtttgtgcgggccacccaggtgacagtggaggagcacgtgttccgcaccagcaggaagaacagcctgtaccagtatgatgacattgctgaccagtggatgaaggtgtatgagaccccagaccggctgtgggacctgggccgccactttgaatgtgctgtggccaagctgtacccccagtgcctgcagaaggtgctgtag

SEQ ID NO: 224556 - DNA, 1806 bp, Artificial Sequence
  derived and/or modified sequence
atggccgccagcgctgacctgagcaagagcagccccaccccaaatggcatccccagcagtgaccctgccagtgatgccatggaccccttccacgcctgcagcatcctgaagcagctgaagaccatgtatgatgagggccagctgacagacatcgtggtggaggtggaccacggcaagaccttcagctgccacagaaatgtgctggccgccatcagcccctacttccgctccatgttcaccagcggcctgacagagagcacccagaaggaggtgagaattgtgggcgtggaggccgagagcatggacctggtgctgaactatgcctacaccagcagggtcatcctgacagaggccaacgtgcaggccctcttcaccgctgccagcatcttccagatccccagcatccaggaccagtgtgccaagtacatgatcagccacctggacccccagaacagcattggagtcttcatctttgctgaccactacggccaccaggagctgggggacaggagcaaggagtacatcaggaagaagttcctgtgtgtgaccaaggagcaggagttcctgcagctgaccaaggaccagctgatcagcatcctggacagtgatgacctgaatgtggaccgggaggagcacgtgtatgagagcatcatccgctggtttgaacatgagcagaatgaaagagaggtgcacctgcctgagatctttgccaagtgcatccgcttccccctgatggaggacaccttcatcgagaagatccccccccagtttgcccaggccatcgccaagagctgtgtggagaagggccccagcaacaccaacggctgcacccagaggctgggcatgacagccagcgagatgatcatctgctttgatgctgcccacaagcacagcggcaagaagcagacagtgccctgcctggacatcgtgacaggccgggtcttcaagctgtgcaagcccccaaatgacctgcgggaggtgggcatcctggtgtccccagacaatgacatctacatcgccggcggctaccggcccagcagcagcgaggtgtccattgaccacaaggcagaaaatgacttctggatgtatgaccacagcaccaaccgctggctgagcaagcccagcctgctgcgggccagaattggctgcaagctggtgtactgctgcggcaagatgtatgccatcggcggccgggtgtatgaaggagatggaagaaacagcctgaagtctgtggagtgctatgacagccgggagaactgctggaccaccgtgtgtgccatgcctgtggccatggagttccacaatgctgtggagtacaaggagaagatctacgtgctgcagggcgagttcttcctgttctatgagccccagaaggactactggggcttcctgacccccatgacagtgccccgcatccagggcctggccgctgtgtacaaggacagcatctactacatcgccggcacctgtggcaaccaccagaggatgttcaccgtggaggcctatgacatcgagctgaacaagtggaccaggaagaaggacttcccctgtgaccagagcatcaacccctacctgaagctggtgctcttccagaacaagctgcacctgtttgtgcgggccacccaggtgacagtggaggagcacgtgttccgcaccagcaggaagaacagcctgtaccagtatgatgacattgctgaccagtggatgaaggtgtatgagaccccagaccggctgtgggacctgggccgccactttgaatgtgctgtggccaagctgtacccccagtgcctgcagaaggtgctgtag

SEQ ID NO: 224557 - DNA, 4684 bp, Artificial Sequence
  derived and/or modified sequence
aagcgaaatgacatttcctttttaaatagctggagtcggggccccatcgagaaatggccgcgtcggcagatttaagtaagtcttccccaacaccgaatgggattccatcttcagacccagccagcgatgccatggaccccttccatgcttgcagtattcttaagcaactcaaaacaatgtacgatgaaggacagttgacagacattgtagtggaagtggatcacgggaaaacattttcctgtcatagaaacgttcttgctgcaatcagcccttacttcagatccatgttcactagcggccttacagaaagtactcaaaaagaagttcgaatagttggtgttgaagctgaatcgatggatttagtgttgaactatgcctacacttccagagttattcttacagaggccaatgttcaagccttgttcactgcagctagcatcttccagattccttccatccaagaccaatgtgctaagtatatgatcagtcatttggacccacagaattctattggggtctttatctttgctgatcattatggtcatcaggaactcggagatcgatcaaaagaatacattcgtaaaaagtttctgtgtgtcaccaaagaacaagagtttctccagttgacaaaagaccaactgataagtatactagacagtgacgatttaaatgtagaccgagaagagcatgtttatgaaagcattataaggtggtttgagcatgaacagaatgaaagagaagtgcaccttccagaaatttttgctaaatgcatacgttttcctctgatggaagatacctttatagagaaaattccacctcagtttgcacaggctatagccaaaagctgtgtagaaaagggaccatccaacaccaatggctgtacacagaggcttggaatgactgcttctgaaatgatcatatgttttgatgctgcccacaaacactcaggaaagaagcaaacagtgccttgtctagatatagtcacaggaagggtgtttaaactatgcaaaccaccaaatgacctgagagaagttgggattcttgtatcaccagataatgacatttacattgcaggagggtacaggccaagcagcagtgaggtctccatcgaccataaggcagaaaatgatttctggatgtatgatcattccaccaatagatggctatccaaaccatccttgcttcgagccagaataggctgcaaacttgtctattgctgtggtaaaatgtatgcaatcggaggtcgtgtttatgaaggtgatgggagaaactcactaaaatctgttgagtgctacgacagtagagagaattgttggacgactgtttgcgcgatgccagttgcaatggaatttcataatgctgtggagtacaaagagaagatctatgttttacagggagaattttttctcttctatgagcctcaaaaagactactggggtttcttaacccccatgactgtgcctagaatccagggcttagcagctgtatacaaggactctatctactacatagctggaacctgtggaaatcatcaacgtatgtttactgtagaagcctatgatattgagctaaataaatggactcgtaagaaagactttccatgtgatcagtccataaatccataccttaaactggtacttttccagaacaaactccatttatttgttcgagctactcaagtgactgttgaagaacacgtcttcagaaccagcagaaaaaattccctttaccaatatgatgacattgctgaccagtggatgaaagtgtatgagaccccagatcggctctgggaccttggccggcattttgaatgtgctgttgctaaactgtatcctcagtgtcttcagaaagtactctaaatgagtagcaggccttagtgcatcactggcatctcattcttaggaaacttgtctttgatacaaaagagtgctgacagtatttcagaaagctgagagagttttatacatggaaaatgggtatgcttaaagattgcagggtagggagggattttccttcatccttgtgacatttcatttcagtaaggaaaagataacaaagtgcaattatcagcatttttttttcctggcataaaattaatcatttcattttataattttgtgataaatagtaactgaggtaccagatgaatcaggacaactatgcactcttataagagcatttagggtattattgggtaaagacgtctaaacttgtttgatgtgacttttaattttaaatacgggtaacaatctgaggcaatatcactaggactttagctgtgacctctctaacacagagaagcactaacttagatcctcattcttaatatttatatgtatctatttttgtgtactgttttcaagtgtactgagatttaaatgtgttctattattagagtagatcgaagaaaaaattagtctcagaaagagcttttagtctgattgtttccatttcccatgtaattttaagttaagctaaagttttaaagtggcagttttctgtcgatgactttttcaagtgctaacactgtctcttttgtgaaaatctggaaaagtgctcatattcacaggtggctggtgctagtctaacttaattcatgtgtataactagatggatttaaatggtctgagcctatgcctatctttcaaattggtgtggatttcatggccatagtactttacctgttgaactcttgtgatttcacaagattctctacttatgtgataggagggtatggccagttattcatctaactggactcaatcttagaatagtaggaacattatacccagtttgcactaacatgggccatttgtagcccaaccttctcttccatctacctgtccattcattattggtacaaggaaaggtaacttatttctcttctgcacagagcataatgtgaagttttatacctacttttaaaattctgctttccagaaacaaaattcctgcagtggtctaatttaatgtctttaagtttcatattacaattaaaacctcattttttttttccatttttgcacttaacagtgatgaatacttttacgttggaatcctccttctagctgaaggtgattgaaaaggaaaagagtgagtgaacagaaccatagctttctaggtactaaagcattttttgcatttaactgatgaaatttctaacaatcatcagttaggaatattaacatgaaggataaaccaacttatttgtatacctaaggcaggcatttggatcagtaacatgttttactaagcctagagtaattcgtaaagggtataagcataggacagattttgccctcaatcacaatatttgtattcacttgaaagcaaactggcatggttcgtattttaaaaatcttgcacaaattgtaatgtgatactgtgaaacaaattgaaaacattgcctctttgcatcacatacctcgtttttcagaaactttccaaactgctttacatagacctctacaagtagggaatgttttctgaagcagaagttaaaatggacagcatttctagaattaacattttaaaatctagtcttagctagatatgtggtttcttcttattggtgttgatagtatgtctgtaatctctgtataaactttgtcaacatttttacctccccagttttatcttctgttttgtttttgtttttatcatcatgatgttttggagttattactgtgtattttagaaatcattctttacagttttgcattgctgaggagagagaaaaaacaatttttttgcaagagatgttcatgtaatttatttttgaaagctttgttgaataagatttcctgccgctttttgacaatcttgtgtatttagaaaaatgtattacttgaaaacatgacatagaacattgagttagcaatttacatgggctgtatgttatataagagaatgacatactgtggctaattcaacagtagatttattcttttagcctgcacaacagttgatcttttggctatgacaatttgtatggagggtacgatctaagttaagtgtgtcaaaagcaaggcttaggatttgttatgggagtagaatatatattgaattttgtatgaagaactatttgtttaaattatatagctgggatattttgccactgttaaaatggattcagaagaggtcctagaaaagtaagattagtgacatgtgtgggtttatatttagatatttaaggtgcattttcatagtgtggtaagaccttaagtaaaaggcacaatgggtactacagaattaaaatgtaggtctaacataatgccagttccactttaactttgtttttgcatttgaagaatgtatgtagcactttcctatatatttgtcacacattgaaaactggactgggtataactatgttataggaaagtagaaattgtattctttattttccatctttgttttctgttctacaaagttgatgcttaagcatcaagctgattttattggtcatgagaacaaatggatgtgatcatgaaggaatcagattccctatgtaaagcagtttaaaatggaattcaatgttcagtgctcaggtatgtagtaagtactgtagtcctgtgggggcaaatgtgtagatatttttaaacattttgccataattgcacaattttttgcatttttacctgatgtcattgtttcttataataaaaccttttctgattgaaaa

SEQ ID NO: 224558 - DNA, 4680 bp, Artificial Sequence
  derived and/or modified sequence
gaaatgacatttcctttttaaatagctggagtcggggccccatcgagaaatggccgcgtcggcagatttaagtaagtcttccccaacaccgaatgggattccatcttcagacccagccagcgatgccatggaccccttccatgcttgcagtattcttaagcaactcaaaacaatgtacgatgaaggacagttgacagacattgtagtggaagtggatcacgggaaaacattttcctgtcatagaaacgttcttgctgcaatcagcccttacttcagatccatgttcactagcggccttacagaaagtactcaaaaagaagttcgaatagttggtgttgaagctgaatcgatggatttagtgttgaactatgcctacacttccagagttattcttacagaggccaatgttcaagccttgttcactgcagctagcatcttccagattccttccatccaagaccaatgtgctaagtatatgatcagtcatttggacccacagaattctattggggtctttatctttgctgatcattatggtcatcaggaactcggagatcgatcaaaagaatacattcgtaaaaagtttctgtgtgtcaccaaagaacaagagtttctccagttgacaaaagaccaactgataagtatactagacagtgacgatttaaatgtagaccgagaagagcatgtttatgaaagcattataaggtggtttgagcatgaacagaatgaaagagaagtgcaccttccagaaatttttgctaaatgcatacgttttcctctgatggaagatacctttatagagaaaattccacctcagtttgcacaggctatagccaaaagctgtgtagaaaagggaccatccaacaccaatggctgtacacagaggcttggaatgactgcttctgaaatgatcatatgttttgatgctgcccacaaacactcaggaaagaagcaaacagtgccttgtctagatatagtcacaggaagggtgtttaaactatgcaaaccaccaaatgacctgagagaagttgggattcttgtatcaccagataatgacatttacattgcaggagggtacaggccaagcagcagtgaggtctccatcgaccataaggcagaaaatgatttctggatgtatgatcattccaccaatagatggctatccaaaccatccttgcttcgagccagaataggctgcaaacttgtctattgctgtggtaaaatgtatgcaatcggaggtcgtgtttatgaaggtgatgggagaaactcactaaaatctgttgagtgctacgacagtagagagaattgttggacgactgtttgcgcgatgccagttgcaatggaatttcataatgctgtggagtacaaagagaagatctatgttttacagggagaattttttctcttctatgagcctcaaaaagactactggggtttcttaacccccatgactgtgcctagaatccagggcttagcagctgtatacaaggactctatctactacatagctggaacctgtggaaatcatcaacgtatgtttactgtagaagcctatgatattgagctaaataaatggactcgtaagaaagactttccatgtgatcagtccataaatccataccttaaactggtacttttccagaacaaactccatttatttgttcgagctactcaagtgactgttgaagaacacgtcttcagaaccagcagaaaaaattccctttaccaatatgatgacattgctgaccagtggatgaaagtgtatgagaccccagatcggctctgggaccttggccggcattttgaatgtgctgttgctaaactgtatcctcagtgtcttcagaaagtactctaaatgagtagcaggccttagtgcatcactggcatctcattcttaggaaacttgtctttgatacaaaagagtgctgacagtatttcagaaagctgagagagttttatacatggaaaatgggtatgcttaaagattgcagggtagggagggattttccttcatccttgtgacatttcatttcagtaaggaaaagataacaaagtgcaattatcagcatttttttttcctggcataaaattaatcatttcattttataattttgtgataaatagtaactgaggtaccagatgaatcaggacaactatgcactcttataagagcatttagggtattattgggtaaagacgtctaaacttgtttgatgtgacttttaattttaaatacgggtaacaatctgaggcaatatcactaggactttagctgtgacctctctaacacagagaagcactaacttagatcctcattcttaatatttatatgtatctatttttgtgtactgttttcaagtgtactgagatttaaatgtgttctattattagagtagatcgaagaaaaaattagtctcagaaagagcttttagtctgattgtttccatttcccatgtaattttaagttaagctaaagttttaaagtggcagttttctgtcgatgactttttcaagtgctaacactgtctcttttgtgaaaatctggaaaagtgctcatattcacaggtggctggtgctagtctaacttaattcatgtgtataactagatggatttaaatggtctgagcctatgcctatctttcaaattggtgtggatttcatggccatagtactttacctgttgaactcttgtgatttcacaagattctctacttatgtgataggagggtatggccagttattcatctaactggactcaatcttagaatagtaggaacattatacccagtttgcactaacatgggccatttgtagcccaaccttctcttccatctacctgtccattcattattggtacaaggaaaggtaacttatttctcttctgcacagagcataatgtgaagttttatacctacttttaaaattctgctttccagaaacaaaattcctgcagtggtctaatttaatgtctttaagtttcatattacaattaaaacctcattttttttttccatttttgcacttaacagtgatgaatacttttacgttggaatcctccttctagctgaaggtgattgaaaaggaaaagagtgagtgaacagaaccatagctttctaggtactaaagcattttttgcatttaactgatgaaatttctaacaatcatcagttaggaatattaacatgaaggataaaccaacttatttgtatacctaaggcaggcatttggatcagtaacatgttttactaagcctagagtaattcgtaaagggtataagcataggacagattttgccctcaatcacaatatttgtattcacttgaaagcaaactggcatggttcgtattttaaaaatcttgcacaaattgtaatgtgatactgtgaaacaaattgaaaacattgcctctttgcatcacatacctcgtttttcagaaactttccaaactgctttacatagacctctacaagtagggaatgttttctgaagcagaagttaaaatggacagcatttctagaattaacattttaaaatctagtcttagctagatatgtggtttcttcttattggtgttgatagtatgtctgtaatctctgtataaactttgtcaacatttttacctccccagttttatcttctgttttgtttttgtttttatcatcatgatgttttggagttattactgtgtattttagaaatcattctttacagttttgcattgctgaggagagagaaaaaacaatttttttgcaagagatgttcatgtaatttatttttgaaagctttgttgaataagatttcctgccgctttttgacaatcttgtgtatttagaaaaatgtattacttgaaaacatgacatagaacattgagttagcaatttacatgggctgtatgttatataagagaatgacatactgtggctaattcaacagtagatttattcttttagcctgcacaacagttgatcttttggctatgacaatttgtatggagggtacgatctaagttaagtgtgtcaaaagcaaggcttaggatttgttatgggagtagaatatatattgaattttgtatgaagaactatttgtttaaattatatagctgggatattttgccactgttaaaatggattcagaagaggtcctagaaaagtaagattagtgacatgtgtgggtttatatttagatatttaaggtgcattttcatagtgtggtaagaccttaagtaaaaggcacaatgggtactacagaattaaaatgtaggtctaacataatgccagttccactttaactttgtttttgcatttgaagaatgtatgtagcactttcctatatatttgtcacacattgaaaactggactgggtataactatgttataggaaagtagaaattgtattctttattttccatctttgttttctgttctacaaagttgatgcttaagcatcaagctgattttattggtcatgagaacaaatggatgtgatcatgaaggaatcagattccctatgtaaagcagtttaaaatggaattcaatgttcagtgctcaggtatgtagtaagtactgtagtcctgtgggggcaaatgtgtagatatttttaaacattttgccataattgcacaattttttgcatttttacctgatgtcattgtttcttataataaaaccttttctgattgaaaa

SEQ ID NO: 224559 - DNA, 1728 bp, Artificial Sequence
  derived and/or modified sequence
atggaccccttccacgcctgcagcatcctgaagcagctgaagaccatgtacgacgaaggacagctcactgacatcgttgtcgaggtggatcacggtaagactttctcctgccaccgcaacgttctggcagcaatctctccttacttccggtctatgtttactagcggtctcacagaaagtacccagaaagaagttcgcatcgtcggtgtggaggctgagtccatggatctggtgctcaattatgcttacacatccagagtgattctgacagaggctaatgttcaggccctctttacagcagcttctatctttcagatcccatcgatccaagatcagtgcgccaagtatatgattagccatctcgatccccagaactcaatcggcgtgttcatctttgctgaccactacggacatcaggagttgggtgatcgcagcaaagagtacatcagaaagaaattcctctgtgtaactaaagaacaggaatttctgcagttgacaaaagatcagctaatctcgatactggattctgacgatctgaatgtggaccgcgaagaacacgtgtacgaaagtattatccggtggtttgagcatgaacaaaatgaacgagaggtccatctgcccgaaatcttcgcgaaatgcattagattcccacttatggaagacaccttcatcgaaaagatcccaccccagttcgcccaggccattgccaaatcctgcgtcgaaaagggtcccagtaacactaatggttgcacccagagactggggatgacagcctccgaaatgatcatatgctttgatgcagctcataagcatagcggcaaaaagcagactgtgccctgcctggatatcgtcaccggccgagttttcaaactttgtaagccaccaaacgatttgagagaggtgggcatcctggtctctcccgataatgatatctatattgccggcggatacagacccagctcaagcgaagtatccattgatcacaaagcggagaacgacttttggatgtatgatcacagcacgaatcgatggctgtcaaagccctccctccttagggctcgaattggatgtaagctggtttattgctgtggaaaaatgtacgccatcggtggtcgggtatacgagggcgatggcagaaatagtctgaagtcggtggaatgttacgattctagggaaaactgctggactaccgtgtgcgcaatgcccgttgcgatggaattccacaacgccgtggaatacaaagagaagatttatgttctgcagggggaattcttcttgttctacgagccgcaaaaagattactgggggttcttgacccccatgacagtacctcgtatccagggcctcgccgcagtgtacaaagactcaatttattacattgccggtacctgtgggaaccaccagcggatgtttaccgtggaggcatacgatattgaactgaacaaatggactcgtaaaaaagacttcccatgtgaccagagtatcaacccatatctgaaactggtcttattccagaacaagctgcatttatttgtacgggcgacccaggtcacggttgaggagcacgtattcagaactagtagaaagaactctttgtaccaatatgacgatattgccgaccagtggatgaaggtgtatgagacccccgatcggctctgggatttgggcaggcattttgagtgcgcagtcgcaaaactctatccccaatgcctgcagaaggtgctctag

SEQ ID NO: 224560 - DNA, 1806 bp, Artificial Sequence
  derived and/or modified sequence
atggccgccagcgccgacctgagcaagagcagccccacccccaacgggattccttccagtgaccctgcctcagacgcgatggatccgttccatgcttgcagcattcttaagcagctaaagacaatgtatgacgagggacagctgactgacatcgtggtggaagtcgaccatgggaagaccttctcttgccatcgtaatgtgttggccgcaatctctccctacttccggtccatgttcacttctggcctgacagagtcaacccagaaagaggtgcgcattgtaggagtggaagctgagtctatggacctggtcctaaactatgcatatacatcaagagtgatcctgacagaggcaaacgttcaggccctgttcaccgctgcctcaatattccagattccgtctatccaggaccagtgcgctaagtatatgatttcccacctcgaccctcagaatagtatcggcgtctttatatttgctgatcactatgggcaccaggagcttggtgacaggtccaaagagtatattcgaaagaaatttctgtgtgtaacgaaagagcaagaatttctgcagctgactaaggatcaattgatctctattttagactctgacgatctgaatgtggatagggaggaacacgtttatgagagcattatacgatggttcgaacacgagcagaatgagcgcgaagtgcatctacccgaaatattcgctaaatgcataagatttccattgatggaggatacattcattgagaaaattcctccacaattcgcccaggcaatcgcaaaaagttgtgtggagaaaggaccttcaaatactaatgggtgcactcagaggcttggtatgactgcgagtgaaatgattatctgtttcgatgccgcccacaaacactccggcaagaagcagaccgtgccctgcctagatatagtgaccggcagggtgttcaaactatgcaagcctcccaatgatctgcgggaggttggaattctggtgagtcccgataacgacatctacattgctggcggctataggccctccagctccgaagttagcattgatcataaagctgaaaacgatttttggatgtatgaccacagtaccaatagatggctgagcaaaccatcactactgcgcgcacgcataggatgtaagttagtgtattgctgcgggaagatgtacgccatcgggggccgcgtatatgagggtgatggacgcaatagtttaaagtcagtcgagtgttacgattcccgcgaaaactgttggaccaccgtgtgcgcaatgcctgtggcaatggaatttcataatgctgtggagtacaaagagaagatctatgtcctccaaggagaatttttcctcttctatgaacctcagaaagactactggggatttttgaccccaatgacagttcctcgcatccagggattagcagccgtttataaggatagcatctactacatagccggcacctgcggtaaccatcagcgcatgttcaccgtggaagcctacgatattgagctgaataagtggaccagaaaaaaggactttccatgcgaccagtcgatcaatccttatttgaagctggtcctgtttcagaacaaacttcatctgttcgtccgcgcaacgcaggttaccgttgaagagcatgtgttccgaacttcccgcaaaaactctctttaccagtatgacgacatcgccgaccagtggatgaaagtctatgagacacccgataggctctgggacctgggacgccatttcgagtgcgcagtagcgaagctgtaccctcagtgtttgcagaaagtgctgtag

SEQ ID NO: 224561 - DNA, 1728 bp, Artificial Sequence
  derived and/or modified sequence
atggaccccttccatgcctgttccattctgaaacagctgaaaaccatgtatgacgagggtcagctgaccgatatcgtcgttgaggtcgatcatggcaaaacgtttagctgtcacaggaatgtgctggctgctatcagcccttacttcagatccatgtttacgtcgggcctgacagaatccacccagaaagaagtgaggatcgtgggcgtggaagccgagtctatggacctggtcttgaattatgcttacacttcccgggttatacttacggaggccaacgttcaggctctgttcaccgccgcttctattttccagattccctcgatacaggaccagtgtgccaagtacatgatcagccacctggatccccagaacagtattggtgttttcattttcgctgaccactatggacaccaggaactcggcgatagatccaaggagtacatcagaaagaaatttctttgcgtaaccaaggagcaggagttcctgcagctaaccaaggaccaactgattagtattttggactcggatgacctcaacgttgatcgtgaagaacacgtctatgagtctatcatccggtggtttgagcacgaacagaatgaaagagaggtgcacctgccagagatatttgcaaagtgcattcgattcccacttatggaagacacattcatcgaaaagattcctccacagttcgctcaagcaattgccaaatcgtgtgtggaaaaaggtcccagtaacacaaacggatgcacacagcgattagggatgaccgccagcgagatgattatttgctttgacgccgctcacaagcacagcggaaaaaagcaaacagtcccgtgcctggacatagtgaccgggcgagtattcaagctttgtaaaccccctaacgatctcagagaagtgggcattctggtaagtccagataacgatatatatatcgctggtggttaccgaccatctagttcggaagtgtctatcgatcacaaggctgagaacgacttctggatgtacgatcactcaacgaacagatggctctcgaagccctcgttacttagggccaggattggctgtaagctggtctactgctgcgggaagatgtatgccataggaggcagagtctacgaaggagacggtaggaactcgctgaaatctgtggaatgctacgactcaagagagaactgctggacaaccgtgtgcgccatgccagtggccatggaatttcataatgcagttgagtataaagagaagatttacgtgctacagggtgaattttttctattctacgagccccagaaggattactggggattcctcacacccatgacggttcctagaattcaggggttggcagccgtgtataaagactccatatattacatagccggaacctgtgggaaccaccagaggatgtttactgttgaggcatatgacatagagctgaataagtggaccaggaaaaaggacttcccttgcgatcaaagcattaacccctatctgaaactggtgctattccagaataaactccacttgttcgtgcgcgcaacacaggttaccgtcgaggagcatgtttttcgcacgtctcgcaagaattcactttaccagtatgacgacatcgccgaccagtggatgaaggtttacgaaactcccgataggctctgggatttgggacgacacttcgagtgcgctgtggcgaagttataccctcagtgccttcagaaggttctctag

SEQ ID NO: 224562 - DNA, 1806 bp, Artificial Sequence
  derived and/or modified sequence
atggctgcctccgctgacctctccaagtccagcccgactccaaatgggattccctctagtgatccagcaagcgacgccatggacccttttcacgcctgctctatattgaagcagctaaaaactatgtacgatgaaggacagcttacagatatcgtggtggaggtggaccacggaaagacctttagctgccataggaatgtcctcgctgctatctctccttattttaggtccatgtttacaagcggactgacagaatctacccagaaggaggtccggatcgtaggcgttgaagcagagtctatggacctggttctcaactacgcctacacctcacgagttatcctgacagaagccaatgtacaggccctctttacagcagcgagcatttttcagattccttccatccaggaccagtgcgcgaagtacatgatttcgcacctcgacccccagaactctattggcgtgttcatttttgccgatcattacggccatcaggaactgggggaccggtccaaggaatatattaggaaaaaattcctgtgtgtcacaaaagagcaggagtttctccagcttacgaaagaccagctgatcagtatactcgactctgacgatttgaatgtagaccgcgaggagcatgtgtatgaatcaatcattagatggttcgagcatgaacagaatgaaagagaggtgcacctccctgagatctttgccaagtgtatccgcttccctctcatggaagacacatttatcgaaaagataccccctcagtttgctcaggccattgctaaatcatgtgttgaaaagggcccttcaaataccaatggttgtacacagagattaggtatgacggcctctgagatgattatctgttttgacgcggcacacaaacactccgggaaaaagcagactgttccgtgcttggatatcgtgactggtagggttttcaaactatgcaagcctcccaatgacctcagagaggttggaatcctggttagccccgacaacgatatatatatcgcgggaggatacagacccagtagctcagaagtgagcatcgatcacaaggccgagaacgacttctggatgtatgatcattccaccaataggtggctatcaaagccaagtctcctgagagcgagaatcggatgcaaactggtgtattgttgcggcaaaatgtacgctatcgggggacgagtttatgagggagatggcagaaattcccttaagtctgtggagtgctatgactcccgcgagaattgttggactacggtgtgcgctatgccagttgctatggagttccacaatgcagtggagtacaaggagaaaatctacgtactgcagggcgaattcttcctgttttacgagcctcagaaggattactggggctttcttaccccaatgacagtgccgaggatccagggcctggctgccgtttacaaagattcgatctactatattgccggaacatgcggaaaccatcaaagaatgttcacagtggaggcctacgacatagagctgaataagtggacccgtaaaaaagacttcccttgcgaccagtcgatcaatccttacctgaagctggtactcttccagaataaattgcatctgtttgtgagggccacccaggtcacggtcgaagagcacgtttttcgtacttcacggaagaacagcctatatcaatatgatgacattgctgatcagtggatgaaggtttacgagacacccgaccggctgtgggatctgggcagacattttgagtgtgcagtggctaagctgtacccgcaatgcctccagaaggtgctgtag

SEQ ID NO: 224563 - protein, 350 aa, Artificial Sequence
  derived and/or modified sequence
MNLRGLFQDFNPSKFLIYACLLLFSVLLALRLDGIIQWSYWAVFAPIWLWKLMVIVGASVGTGVWARNPQYRAEGETCVEFKAMLIAVGIHLLLLMFEVLVCDRIERGSHFWLLVFMPLFFVSPVSVAACVWGFRHDRSLELEILCSVNILQFIFIALRLDKIIHWPWLVVCVPLWILMSFLCLVVLYYIVWSVLFLRSMDVIAEQRRTHITMALSWMTIVVPLLTFEILLVHKLDGHNAFSSIPIFVPLWLSLITLMATTFGQKGGNHWWFGIRKDFCQFLLEIFPFLREYGNISYDLHHEDNEETEETPVPEPPKIAPMFRKKARVVITQSPGKYVLPPPKLNIEMPD

SEQ ID NO: 224564 - protein, 172 aa, Artificial Sequence
  derived and/or modified sequence
MSFLCLVVLYYIVWSVLFLRSMDVIAEQRRTHITMALSWMTIVVPLLTFEILLVHKLDGHNAFSSIPIFVPLWLSLITLMATTFGQKGGNHWWFGIRKDFCQFLLEIFPFLREYGNISYDLHHEDNEETEETPVPEPPKIAPMFRKKARVVITQSPGKYVLPPPKLNIEMPD

SEQ ID NO: 224565 - DNA, 1053 bp, Artificial Sequence
  derived and/or modified sequence
atgaacctgagaggcctgttccaggacttcaaccccagcaagttcctgatctacgcctgcctgctgctgttcagcgtgctgctggccctgagactggacggcatcatccagtggagctactgggccgtgttcgcccccatctggctgtggaagctgatggtgatcgtgggcgccagcgtgggcaccggcgtgtgggccagaaacccccagtacagagccgagggcgagacctgcgtggagttcaaggccatgctgatcgccgtgggcatccacctgctgctgctgatgttcgaggtgctggtgtgcgacagaatcgagagaggcagccacttctggctgctggtgttcatgcccctgttcttcgtgagccccgtgagcgtggccgcctgcgtgtggggcttcagacacgacagaagcctggagctggagatcctgtgcagcgtgaacatcctgcagttcatcttcatcgccctgagactggacaagatcatccactggccctggctggtggtgtgcgtgcccctgtggatcctgatgagcttcctgtgcctggtggtgctgtactacatcgtgtggagcgtgctgttcctgagaagcatggacgtgatcgccgagcagagaagaacccacatcaccatggccctgagctggatgaccatcgtggtgcccctgctgaccttcgagatcctgctggtgcacaagctggacggccacaacgccttcagcagcatccccatcttcgtgcccctgtggctgagcctgatcaccctgatggccaccaccttcggccagaagggcggcaaccactggtggttcggcatcagaaaggacttctgccagttcctgctggagatcttccccttcctgagagagtacggcaacatcagctacgacctgcaccacgaggacaacgaggagaccgaggagacccccgtgcccgagccccccaagatcgcccccatgttcagaaagaaggccagagtggtgatcacccagagccccggcaagtacgtgctgcccccccccaagctgaacatcgagatgcccgactag

SEQ ID NO: 224566 - DNA, 1053 bp, Artificial Sequence
  derived and/or modified sequence
atgaatctgagagggctctttcaagatttcaatccatctaagtttttgatctacgcttgcctcttgctgttcagcgtcctgctcgctcttagactggacggcatcatacagtggagttattgggccgtgttcgcacccatctggctctggaagctgatggtaattgtcggtgcgtccgttggcaccggcgtgtgggctaggaacccacagtaccgtgctgaaggggaaacctgtgtggaatttaaggccatgctaattgccgtgggcatacacctgctactgctgatgttcgaggttctcgtttgcgaccgaattgagcgtggtagccacttctggctgctagtgttcatgcctctgttctttgtcagtccagtatctgtggctgcctgcgtgtggggcttcaggcatgacagatcgctggagcttgaaattctttgcagtgtgaatatacttcagttcatattcatagctctgcggctggacaaaatcatccattggccatggcttgtggtgtgtgtgcctctgtggatcctcatgtcgtttctgtgcctcgttgtgttatattacatcgtgtggtcagtcttattcctgcggagcatggatgtcatcgcagagcagcgaagaacccatatcactatggccctgtcctggatgactattgttgtccccctcctcacattcgaaattctgctggtgcacaaactcgatggacataacgcattttctagcatcccaatctttgtgcctttatggctttccctgataaccctcatggcaacgacattcggtcagaaaggaggcaatcattggtggtttggcatccgaaaggacttctgccagtttctgctggagatcttcccgttcttgcgtgaatacggcaacattagctacgatctccatcacgaggataatgaagagactgaggaaactcctgtccctgaaccaccgaagatcgcaccgatgtttcgcaaaaaagccagggtggtgattacccagtctcccggaaaatacgtgcttcctccacccaagctcaacatcgaaatgcccgattag

SEQ ID NO: 224567 - DNA, 1053 bp, Artificial Sequence
  derived and/or modified sequence
atgaacctgcggggcctcttccaggacttcaaccccagcaagttcctgatctatgcctgcctgctgctcttctctgtgctgctggccctgcggctggatggcatcatccagtggagctactgggccgtgtttgcccccatctggctgtggaagctgatggtgattgtgggcgcctctgtgggcaccggggtgtgggccaggaacccccagtacagagctgagggggagacctgtgtggagttcaaggccatgctgattgctgtgggcatccacctgctgctgctgatgtttgaggtgctggtgtgtgacagaattgagcggggcagccacttctggctgctggtgttcatgcccctcttctttgtgtcccctgtgtctgtggccgcctgtgtgtggggcttcagacatgacaggagcctggagctggagatcctgtgcagcgtgaacatcctgcagttcatcttcatcgccctgcggctggacaagatcatccactggccctggctggtggtgtgtgtgcccctgtggatcctgatgtccttcctgtgcctggtggtgctgtactacatcgtgtggagcgtgctcttcctgcgctccatggatgtgattgctgagcagaggaggacccacatcaccatggccctgtcctggatgaccatcgtggtgcccctgctgacctttgagatcctgctggtgcacaagctggatggccacaatgccttcagcagcatccccatctttgtgcccctgtggctgagcctcatcaccctgatggccaccaccttcggccagaagggcggcaaccactggtggtttggcatcaggaaggacttctgccagttcctgctggagatcttccccttcctgcgggagtatggcaacatctcctatgacctgcaccacgaggacaatgaggagacagaggagacccctgtgcctgagccccccaagatcgcccccatgttcaggaagaaggcccgggtggtgatcacccagagccctgggaagtatgtgctgcccccacccaagctgaacatcgagatgccagactag

SEQ ID NO: 224568 - DNA, 1053 bp, Artificial Sequence
  derived and/or modified sequence
atgaacctgcggggcctgttccaggacttcaaccccagcaagttcctgatctacgcttgtctactgctgttcagtgtcttactggcgctccggttagatggtatcattcagtggtcttattgggcggtgttcgcccctatttggctctggaagctgatggttatcgtcggtgcctccgttgggacaggcgtatgggcacgtaacccccaataccgcgcagagggggaaacatgtgtggaatttaaggctatgctgatcgccgtcgggatccacctgcttctgctgatgttcgaggttcttgtgtgcgatcgtatcgaacgcggttcgcacttctggcttttagtttttatgcccctcttcttcgtgtcccctgtgagtgtcgctgcttgcgtgtggggttttaggcacgaccggtccctcgaacttgagatcctctgctcggtcaacatactgcagttcattttcattgctctgcggctggataagatcattcactggccgtggctcgtggtatgtgtgcctctgtggatcctgatgagttttctgtgtctggtggtcctctattatattgtgtggagcgtgctgttcctgaggtctatggacgtcatcgcggaacagagaagaacgcatatcacaatggccctgtcttggatgactatcgttgtaccgttgctcacgttcgaaatcttgcttgtgcacaaactcgatggccacaatgccttttcctctatcccaattttcgtacccctgtggctttccctcatcacactgatggcaacaactttcggacagaaagggggcaatcattggtggttcgggatccggaaagacttctgtcagttccttttggagatcttcccttttttgagagaatatggtaatatctcatacgatctgcatcacgaagacaacgaagagacagaagagacacctgtgccagagcctcccaaaatagctccgatgttccgcaagaaagctagggtagtgatcacccaatcaccaggaaagtatgtgttacccccacccaaactcaatattgagatgccagattag

SEQ ID NO: 224569 - DNA, 1053 bp, Artificial Sequence
  derived and/or modified sequence
atgaaccttcgcggtctctttcaggacttcaatcctagtaagttcctgatctacgcttgtctacttctctttagcgtgctcctcgccctgcgactggacggcataatccagtggtcatattgggctgtgttcgctcctatctggctctggaagcttatggtcatcgtcggggcttccgtcggcacaggcgtgtgggcccgtaatccccagtatcgcgctgagggggaaacctgcgtcgagttcaaagcaatgctgatcgctgtaggcattcacctgcttctgcttatgttcgaggtgctggtgtgtgacaggatcgaaaggggttcccacttttggctgctagtcttcatgcctctcttctttgtttctccggtgagtgtagcggcttgtgtgtggggcttcagacacgatcgctccctggaactcgaaatcctgtgtagtgtgaacattctgcaatttatcttcatcgccctgcgcctcgacaaaattatccactggccctggctcgtggtgtgcgtaccgctgtggatcctgatgtcctttttatgcctcgtagttctctactatatagtgtggtccgtcttattcctgcgttcgatggacgttattgccgaacagaggcggactcatatcactatggctcttagttggatgacgattgtggtgcccctcctgacatttgagatcctgctggttcacaagctggatggacataacgccttcagctctattcccatcttcgttccactgtggttgtcacttatcaccctgatggctactactttcggccaaaagggtgggaatcattggtggttcggcattcgaaaggacttctgccagtttctcctcgaaattttccccttcctccgtgagtacggaaacataagctatgacctccatcacgaggacaacgaggaaacagaagagactcctgtgccagaaccccctaagatagccccaatgttcaggaaaaaagcccgagtcgtaataactcaaagccctgggaagtatgtgcttccaccacccaagctgaacatagaaatgcctgattag

SEQ ID NO: 224570 - DNA, 2813 bp, Artificial Sequence
  derived and/or modified sequence
ccggtcgcgtgcggacacaaggatggggacctcccagcgaggagcgctctgggcggggctccggacgcatgcgcggccctcgtacggaagcccggaaggaggggcagggggcggtggctcaggtttctccgggcggcggcggcggcggcgacggcgacggcgacggcagcggggacggcagcagtagcgggagcagcagcgtggacgcggctggcgctggcgccatgaacccgctgtaaggcgcaggctgtgcagcacggggtgcgggggaggaggaggaggacgccgcggtgaagttctccgccatgaacctgaggggcctcttccaggacttcaacccgagtaaattcctcatctatgcctgtctgctgctgttctctgtgctgctggcccttcgtttggatggcatcatacagtggagttactgggctgtctttgctccaatatggctgtggaagttaatggtcattgttggagcctcagttggaactggagtctgggcacgaaatcctcaatatcgagcagaaggagaaacgtgtgtggagtttaaagccatgttgattgcagtgggcatccacttgctcttgttgatgtttgaagttctggtctgtgacagaatcgagagaggaagccatttctggctcctggtcttcatgccgctgttctttgtttccccggtgtctgttgcagcttgcgtttggggctttcgacatgacaggtcactagagttagaaatcctgtgttctgtcaacattctccagtttatattcattgccttaagactggacaagatcatccactggccctggcttgttgtgtgtgtcccgctgtggattctcatgtcctttctgtgcctggtggtcctctactacattgtgtggtccgtcttgttcttgcgctctatggatgtgattgcagagcagcgcaggacacacataaccatggccctgagctggatgaccatcgtcgtgccccttcttacatttgagattctgctggttcacaaactggatggccacaacgccttctccagcatcccgatctttgtccccctttggctctcgttgatcacgctgatggcaaccacatttggacagaagggaggaaaccactggtggtttggtatccgcaaagatttctgtcagtttctgcttgaaatcttcccatttctacgagaatatggaaacatttcctatgatctccatcacgaagataatgaagaaaccgaagagaccccagttccggagccccctaaaatcgcacccatgtttcgaaagaaggccagggtggtcattacccagagccctgggaagtatgtgctcccacctcccaaattaaatatcgaaatgccagattagatgccacttccggggacagagcttaagtggactgggacgcactctctccgccttcctctgccccctcgttcaccccgcagaccagaaccagtactggagctgggtctccaggtacgtccatctcatgccttgtttgcatccagcgcctatcagccactcaccacgacgggacgcggaagtggcaggtgacgggggtgtgtgccagcagatgcggatgccaggaagagtgtgagaacaggggtgggattaccgtctgtctgggaggggctccaggtacccctcttccccgtcagacccactgggagatggctgcttgccaggcccccagaaggaacatctgtctatacggtgctgaaatcccaatcaaaagtattgtttagaaatgtatttctccacagggctgacctcctgcagctcgctgagcactcccaggtcctcagcactcccaggtcgtggctggggcagtcagtaggaactgtaactatgtctctgatgcaccacgtgtttagacacagcacagtccttttttctgttcctactgtggaagtagtttctctttgggcatgctgacagcagtttttcatagcctcacggatgagccctttctacgggagtgactccatgcttgtatacagagtatttatacaaatgttttagcatcttcatatgcggtgttaacccctagttctgtacagcatattctgttcaagtatttttttacaagcttgtgctgtaggcacatgccttctgctgcagaagtggacgcccgtggcacactccccccccccccgtggggtgccacgccttcatgggacattgccacttctgccctggaactcgtgcaggtacgtagtagctgctactgccagaacggcaacaccaagcaagagatggtccatgcttttctgacgttctcagaatagtggctagcttcaaacctgacaagcgctgcttgaagccggaacactagagaatgttgctgagagcagaaacggccacgcgggtcacgactatgcgtgggaaagtctcaagcttccctcctgccagcaacaagaaggctttggagtaggcatgatgttttcacgtgtgcgtgccgtttctccaagcactgcaggttccaccgtgtgtcagaggctgcaagtttaacatcctcctgcctgaaaacaaataggtcctttgctgaaaagagggtaaaaaaagagctttgatcttctcagccaggagaagagggtggtgttttcacgcgggcaactgctcgccggcctacatggggttaattcaagtctgctgcgagcacgactccgcccttggcactggcctccagcaagccctgttctctttggggtacaggggaacgggatggtttagactttcctgctcagtgtgtaaaaaatgtagctaaagccactatttttgctctccttaagctgttcaataaaccggttcctcatttta

SEQ ID NO: 224571 - protein, 300 aa, Artificial Sequence
  derived and/or modified sequence
MQSDDVIWDTLGNKQFCSFKIRTKTQSFCRNEYSLTGLCNRSSCPLANSQYATIKEEKGQCYLYMKVIERAAFPRRLWERVRLSKNYEKALEQIDENLIYWPRFIRHKCKQRFTKITQYLIRIRKLTLKRQRKLVPLSKKVERREKRREEKALIAAQLDNAIEKELLERLKQDTYGDIYNFPIHAFDKALEQQEAESDSSDTEEKDDDDDDEEDVGKREFVEDGEVDESDISDFEDMDKLDASSDEDQDGKSSSEEEEEKALSAKHKGKMPLRGPLQRKRAYVEIEYEQETEPVAKAKTT

SEQ ID NO: 224572 - DNA, 3900 bp, Artificial Sequence
  derived and/or modified sequence
ggagcggggacccagccccgccgcgccgcctgcagctttccccagcctcctcccagcagaggggaggcccgacagggaggggtcccatcctcatgaacggtcacaaacagggcgctagggaagcacgcccgacccccgcggtccccgcgctccaggattcggcagactgcgcgcgtcctgcctcccgcggatcgcactgggtcccaacagggttcccagctccaggctgcgcccatgaacaagcccagcattgcggacgggcgcgcgcagacgccagcgtggtgaagacgcgggggcgcgcgcgcggcgacgagactgccaggggacgcttcgcaacaccgagagtctcagcgtttctcgagataggtgaggctgcgcgttccggaactggtttcccggaaggagcatgtctgcgcccgcgatccgaccggaagttgcacgctgagccgcggacaccatgcagtcggatgatgttatctgggatacactaggaaacaagcaattttgttccttcaaaataagaaccaagactcagagcttctgccgaaatgaatatagcctgactggactgtgtaatcggtcatcctgtcccctggcaaatagtcagtatgccactattaaagaagagaaaggacagtgctacttgtatatgaaggttatagaacgagcggcttttcctcggcgtctctgggaacgggtccggcttagtaaaaactatgagaaagcactggagcaaatagatgaaaatctgatttactggccccgtttcattcgacacaaatgtaagcagagattcaccaagatcacccaatacctaattcgaattagaaaacttacactaaagcgacagaggaaacttgttcctttgagtaagaaggtggagcgtagggagaaaagaagagaggaaaaggcattaatagctgctcagctggacaatgccattgagaaggaattactggagagactgaaacaagatacgtatggcgacatctacaacttccccattcatgccttcgacaaagccctggaacaacaggaggcagagagtgactcttcagatactgaggaaaaagatgatgatgatgatgatgaggaagatgtggggaaaagagaatttgtcgaagatggtgaggtagatgagagtgacataagtgattttgaggatatggataaactggatgccagcagtgatgaagatcaggatggtaaatcctccagtgaggaggaggaagaaaaggcccttagtgcgaaacacaaaggcaaaatgcccttgagaggaccactgcagagaaaacgagcctatgtggaaatagaatacgagcaggagacagagcccgtggccaaagccaaaaccacgtgatttccctttcagcatttatacccaggactgaacatgcagaactgttttttttttttttttatcttaaacacatacacacctccagtttttgctcttttgtgttgtactgaacacaatatttgtgtttttattatttatgccacgtcagtggggcaagaaatctggagtgagtgaagaaagctaagttgtgaacaagagtgtttttatagcatatgtgttgaagtaacagcttgtgcccgagaaacttaacagatgagttcttgaatctgggatgagatgacggatgtaaatatttctaaattttaaatgctacattacttggtgtccttttttctcccaaactttatttagaaatggaaggagttcaattttttcttgttctactttccctattcttatggaggtaaaaggaaaggaaggaaggaaaaagcagctttcacttacaaagtttcgtgtaaaaatatctttttttcttaaataactccattcatacaaattgggatgggaagaaaatcctttcctcttgggaaagtaatacaagtcttaagttccattgtagggtgcgccttcagaaacctgctgcacttttctgatatagttcaccacttttctgtcttcacagctttggggaattttggccaggagaccctgaaacatgaaaccaaacaggctttgatatttttttttttttaattactttccccttttgcttgattcttcttccttggtatcatattcaaaggaggaaagaatggatgacacttagggacaggtcactaagcagaataggtattagttggttttttattatttttaaatttatatagctctcatgtattgaaggtgctactttaaaaactgtgttaatgtacttgcaaatctcctgctggctcatgaaacagcagaattccagccaaggcaaattcagttggatctagggcttgaaaactgcccaagattaaagagctaagatgaaatagtttgaataaactggtaaaataacaattcatactatctctacatatttttaggatatgaatttttttttcctgctgggtagattgtccagtgacttatggcatgaatttcttttcatgctaccttcaatcttcaactaaagatttctaaaaggggtaagaaatgaggcagtagtttattaaatacatagaagtacacagctattatatgctgtggctttgagaagttaacttttgtggaatatgaaaccaaaggaagaatttccatgtagataaattaagaatagggaaaaacatctacctaaaagatggttgtccctaaaaaactggaaacatctgaaatgctctatttatgttattattcctgggagcttatagcccattatttttactttttttttttaattcagaagactagaacagaacttaaattttacaaacttttgatcataatgcttttgcccatactgtctcgtccttagccccagtgacatgtgctgatcctcctgcctttagttctaaatggttctgaatagctttaaaagatgaataagaaaaaagatcaagctcttttgaggctagagggctcatatggagatctaaaaccctccatgttcatttccagacttggtcaggcacatacatagtaaattataatcaatcatgggaattacataaggataatgaggcccaactgaaaccaagtttcagtctgccttacctttacccgtccttgagaacagcggtccaggagaatcaggcagtctgtggcctcctgtagcagggcgctcttaacagactcaggtgtaaggtttggatcccttgctacatcacaaatcagtttcaagagggccttcagtaagaccacaagtctgcaggaaactctggaatcaggaagaaaagctatgttcatactctaaatctggatattaaaattggaagagacttcaaagactgtcaagtggaaagctatcatttcctaaattaaggaacttaggtcaaagttaaatgaaaaagacctaaaaacagaaccaaagacagcctctagatttcttaccctcaagtctcctgttagcatactgcctatacacacagacacaccctctgccacactgctctcttccttccagaagcttggttctactgtaagcaacagctccttcatgggctgagaaggggaaaccaggatctccccaaccaagggcctatacttttatttttcaactctattaactgaactatgcttggagagagccctgaatcctttaactttaatgccatcttaggcctggaagttagagtgagggaaatgagcttggcttctgggactgtgtcaagttgaattttctgtcatttaatttcagatcctagctcatcatcagtgaagtccagcctacttacttgtaactattaacctttctaaaagttttcatcgccttggtaaagctccagaaatggacaatgctagtgactgcacaatattgtgactgtacttaatgccactgaactgtacactttaaaatggaaaatttatatgtatttttaccacaataaacaaaaaac

SEQ ID NO: 224573 - DNA, 903 bp, Artificial Sequence
  derived and/or modified sequence
atgcagagtgatgacgtgatatgggatacgctcggcaacaaacagttttgctccttcaagataaggacaaagacacagtccttctgccggaacgagtactcccttaccgggctctgcaatcgaagctcttgcccgcttgctaacagccagtacgctacaattaaagaggagaaggggcagtgttatctctatatgaaagtcattgaacgagcagcatttccaaggcgactctgggagcgggttagactatccaaaaactacgaaaaggccctggaacagatcgacgaaaacttgatttactggccacgcttcatccggcacaaatgtaaacagagatttacgaaaataacacagtacctcattcgaatccggaaacttaccctgaaacggcagagaaagctagtccctctgtccaaaaaagtcgagcgccgcgaaaagagacgggaagagaaggcgctgatcgcggcccagctcgacaatgctatagagaaggagttgttggagcgattgaaacaggacacttatggcgatatttacaatttccccatccacgcattcgataaagcccttgagcagcaagaagctgagagtgacagttccgacaccgaagaaaaagacgacgatgatgatgatgaggaggacgttggtaaaagagagtttgtggaagatggcgaggtggatgagtcagatatttctgatttcgaagatatggataaacttgatgcttcttcagacgaagatcaagacggcaagtcaagttccgaggaggaggaagagaaggccctgagcgccaaacacaaggggaagatgccattgcgcggtcccctacaacgcaaacgggcctacgttgaaatcgagtatgaacaggagacagagccagtggcaaaagcaaagacgacctag

SEQ ID NO: 224574 - DNA, 903 bp, Artificial Sequence
  derived and/or modified sequence
atgcagagtgatgatgtgatctgggacaccctgggcaacaagcagttctgcagcttcaagatccgcaccaagacccagagcttctgcagaaatgagtacagcctgaccggcctgtgcaacagaagcagctgccccctggccaacagccagtatgccaccatcaaggaggagaagggccagtgctacctgtacatgaaggtgattgaaagagctgccttcccccggcggctgtgggagcgggtgcggctgagcaagaactatgagaaggccctggagcagattgatgagaacctgatctactggccccgcttcatccgccacaagtgcaagcagcgcttcaccaagatcacccagtacctgatccgcatcaggaagctgaccctgaagaggcagaggaagctggtgcccctgagcaagaaggtggagcggcgggagaagagaagagaggagaaggccctgattgctgcccagctggacaatgccatcgagaaggagctgctggagcggctgaagcaggacacctatggagacatctacaacttccccatccacgcctttgacaaggccctggagcagcaggaggccgagagtgacagcagtgacacagaggagaaggatgatgatgatgatgatgaagaagatgtgggcaagcgggagtttgtggaggatggagaggtggatgaaagtgacatcagtgactttgaggacatggacaagctggatgccagcagtgatgaggaccaggacggcaagagcagcagcgaggaggaggaggagaaggccctgagcgccaagcacaagggcaagatgcccctgcggggccccctgcagaggaagagggcctacgtggagattgaatatgagcaggagacagagcctgtggccaaggccaagaccacctag

SEQ ID NO: 224575 - DNA, 903 bp, Artificial Sequence
  derived and/or modified sequence
atgcagagcgacgacgtgatctgggacaccctgggcaacaagcagttttgtagcttcaaaatccgaactaagactcagagtttttgcaggaacgagtattccctcaccggcctgtgcaacagatcgagctgccctctggcaaatagccagtatgctacaatcaaggaggagaaaggccaatgctatctgtacatgaaagttatagagagagcggcattccctcgccggctctgggaaagggtgagactgtctaagaattacgaaaaggcactcgagcagatcgacgagaatttaatatattggccgagattcattaggcacaaatgtaaacagcgctttaccaaaatcacccagtacctgatacgcattcgcaagctcaccctaaaaagacagcgcaagttggtgcccctgtccaagaaagtagaacgaagagagaaaagacgggaggagaaggcactgattgccgcacaactggataatgcaatagagaaagaacttctggaacgattaaaacaggacacatatggcgatatctacaactttccgatccatgccttcgacaaggcactggagcagcaagaagctgagtcagattcctccgacaccgaggaaaaggacgatgacgacgacgacgaggaggatgtggggaagcgggagtttgtagaagatggagaagtggatgaatccgacattagcgatttcgaggacatggataaactcgacgcctcgagcgacgaagatcaagatgggaagtcctcctccgaggaggaagaagagaaagcattgtccgcaaagcataagggaaagatgcctcttaggggccccttacagcgcaagcgcgcatatgtggaaatagagtatgagcaagagactgagcccgtggctaaggctaagactacttag

SEQ ID NO: 224576 - DNA, 903 bp, Artificial Sequence
  derived and/or modified sequence
atgcagagcgacgacgtgatctgggatacactgggtaataaacaattctgctcatttaagataaggacaaaaacacagagcttctgtcgaaacgagtactctctcacaggcctctgcaaccgtagttcttgccccctcgccaacagccagtatgccactattaaagaggaaaagggtcagtgttatctctacatgaaggtaatcgaacgggcagccttccctcggagactttgggagcgtgtccggctgtcaaagaactacgaaaaagctttggagcaaatagatgagaatttgatatattggccgagattcatcaggcataagtgcaaacagcggtttaccaaaataacccagtatctgatccggatccggaaactcacactgaaacggcagcgaaagctcgtgcctctcagtaaaaaggttgaacgacgggagaaacgccgtgaagagaaggctctgattgccgcacagctggacaacgctattgagaaggagctgctggagcgtctcaagcaagacacttatggagacatatacaacttcccaatccacgcgttcgacaaagctttggagcagcaggaggcagagagcgacagctctgacacagaggagaaggatgatgacgacgacgatgaggaggatgtgggaaagcgcgagttcgtagaagacggcgaggttgacgaatctgatattagcgattttgaggatatggacaagcttgacgcatcctctgatgaagaccaagatgggaaatccagcagcgaggaagaggaagagaaagctttgagcgccaaacataaagggaagatgccattacgtgggccactgcagagaaagcgggcatacgttgaaattgaatacgaacaagaaactgaacccgtggctaaggccaagactacatag

SEQ ID NO: 224577 - DNA, 903 bp, Artificial Sequence
  derived and/or modified sequence
atgcagagcgacgacgtgatctgggacaccctgggcaacaagcagttctgcagcttcaagatcagaaccaagacccagagcttctgcagaaacgagtacagcctgaccggcctgtgcaacagaagcagctgccccctggccaacagccagtacgccaccatcaaggaggagaagggccagtgctacctgtacatgaaggtgatcgagagagccgccttccccagaagactgtgggagagagtgagactgagcaagaactacgagaaggccctggagcagatcgacgagaacctgatctactggcccagattcatcagacacaagtgcaagcagagattcaccaagatcacccagtacctgatcagaatcagaaagctgaccctgaagagacagagaaagctggtgcccctgagcaagaaggtggagagaagagagaagagaagagaggagaaggccctgatcgccgcccagctggacaacgccatcgagaaggagctgctggagagactgaagcaggacacctacggcgacatctacaacttccccatccacgccttcgacaaggccctggagcagcaggaggccgagagcgacagcagcgacaccgaggagaaggacgacgacgacgacgacgaggaggacgtgggcaagagagagttcgtggaggacggcgaggtggacgagagcgacatcagcgacttcgaggacatggacaagctggacgccagcagcgacgaggaccaggacggcaagagcagcagcgaggaggaggaggagaaggccctgagcgccaagcacaagggcaagatgcccctgagaggccccctgcagagaaagagagcctacgtggagatcgagtacgagcaggagaccgagcccgtggccaaggccaagaccacctag

SEQ ID NO: 224578 - protein, 769 aa, Artificial Sequence
  derived and/or modified sequence
MGCNMCVVQKPEEQYKVMLQVNGKELSKLSQEQTLQALRSSKEPLVIQVLRRSPRLRGDSSCHDLQLVDSGTQTDITFEHIMALGKLRPPTPPMVILEPPPISHEYYDPAEFMEGGPQEADRLDELEYEEVELYKSSHRDKLGLMVCYRTDDEEDLGIYVGEVNPNSIAAKDGRIREGDRIIQINGVDVQNREEAVAILSQEENTNISLLVARPESQLAKRWKDSDRDDFLDDFGSENEGELRARKLKSPPAQQPGNEEEKGAPDAGPGLSNSQELDSGVGRTDESTRNEESSEHDLLGDEPPSSTNTPGSLRKFGLQGDALQSRDFHFSMDSLLAEGAGLGGGDVPGLTDEEYERYRELLEIKCHLENGNQLGLLFPRASGGNSALDVNRNESLGHEMAMLEEELRHLEFKCRNILRAQKMQQLRERCMKAWLLEEESLYDLAASEPKKHELSDISELPEKSDKDSTSAYNTGESCRSTPLLVEPLPESPLRRAMAGNSNLNRTPPGPAVATPAKAAPPPGSPAKFRSLSRDPEAGRRQHAEERGRRNPKTGLTLERVGPESSPYLSRRHRGQGQEGEHYHSCVQLAPTRGLEELGHGPLSLAGGPRVGGVAAAATEAPRMEWKVKVRSDGTRYVAKRPVRDRLLKARALKIREERSGMTTDDDAVSEMKMGRYWSKEERKQHLIRAREQRKRREFMMQSRLECLREQQNGDSKPELNIIALSHRKTMKKRNKKILDNWITIQEMLAHGARSADGKRVYNPLLSVTTV

SEQ ID NO: 224579 - DNA, 2310 bp, Artificial Sequence
  derived and/or modified sequence
atgggttgtaacatgtgcgtggtgcagaaacctgaggaacagtacaaggtgatgctccaggtcaacggcaaagagctgtctaaattgagtcaggagcagacccttcaggcattgagaagctctaaggagcctttggtgattcaggtccttaggcggtccccacggctgagaggggactctagttgccacgacctgcagcttgtcgattcaggaacccaaaccgatattacatttgagcacataatggccttaggcaagttacgaccccctaccccaccaatggtaatcctcgagccccctccaattagccatgagtattacgatccggctgaattcatggagggcggtccacaagaggcagatcgactagacgaactagagtacgaagaagtggagttgtataagagcagccaccgggataaattgggtctgatggtatgttacagaactgatgacgaggaggatctgggcatttatgtgggagaagtgaaccctaactctatagccgctaaagacggccgcattcgcgaaggggacagaataattcagattaacggtgtggacgtgcagaacagggaagaggcggtcgccattttaagtcaagaggagaatacaaacatctccttgctggttgcacggccagaatcacagctggccaaacgctggaaggatagtgatcgagatgatttcttggacgacttcgggtccgaaaacgaaggagagctgagagctcgtaaactcaagtctccccccgcgcagcagcccggcaatgaggaagagaaaggtgctcccgacgccggccccggcctgtcaaattcacaggagctcgactccggggttggcaggactgacgagtccacacgaaacgaggagagctccgagcatgacttgctcggggatgagcctccatcaagcactaatactccaggcagcctgagaaaattcggactgcaaggagatgccttgcaaagccgagattttcacttttctatggacagccttctggccgaaggggctggtctggggggcggggacgttccaggactcactgatgaggagtacgagcgataccgagagctccttgagatcaagtgtcacctcgaaaatggcaaccagctcgggctcctgttccctcgcgcttctggtgggaattctgcactggatgtgaatcgcaatgagtccctaggacatgaaatggccatgctggaggaggagctgcgacacctggagtttaagtgtcggaacatcctgcgggcccaaaagatgcagcaactcagagaaaggtgtatgaaggcctggcttctcgaagaggagagtttgtacgatcttgccgcttcagagccaaagaaacatgagctgtcggacattagtgaactgcctgaaaaaagcgacaaggactctacaagtgcgtacaacaccggggagtcctgcagatcaacgccattgttagtagagcccctgccagagtctccgctacggcgtgcaatggcaggcaattccaatttaaaccgtactcctcctggacctgcagtagctacgccagccaaagcagcccccccacccggctctcctgcgaagtttcgaagtctgtcgcgtgaccccgaggccggacggcggcagcacgcggaggaaaggggcaggaggaaccctaagaccggcttgacactcgaacgcgtgggccccgagtctagcccatatctctctcgaaggcatagggggcaggggcaggagggcgagcattaccactcgtgcgtacagttggcccctacacggggcttggaggagctgggacatggtccactctccttagcaggcggtcctcgggtgggcggagtagcagccgcggctactgaagcacctcgaatggagtggaaagtgaaggtacgttccgacggaaccagatacgttgcaaagcgcccagtcagggacaggctgctgaaggcaagagccttgaaaatccgcgaagagaggtcaggaatgacaaccgacgacgacgcagtgtcggaaatgaagatgggcaggtattggagcaaagaggaacgaaaacagcatctaattcgcgcccgagagcagcgcaagcggagggaattcatgatgcagagccgcctcgagtgcctcagagagcagcagaatggtgactctaaacccgagctgaatataatcgcacttagccatcgtaagacaatgaaaaagagaaataagaagatcctcgataattggatcacaattcaggaaatgttagctcatggagcgagatccgccgacggtaagcgagtctataatcctctcctctcggtaactacagtctag

SEQ ID NO: 224580 - DNA, 2310 bp, Artificial Sequence
  derived and/or modified sequence
atgggctgcaacatgtgtgtggtgcagaagccagaggagcagtacaaggtgatgctgcaggtgaatggcaaggagctgagcaagctgagccaggagcagaccctgcaggccctgcggagcagcaaggagcccctggtgatccaggtgctgcggcgcagcccccggctgcggggggacagcagctgccacgacctgcagctggtggacagcggcacccagacagacatcacctttgagcacatcatggccctgggcaagctgcggccccccaccccacccatggtgatcctggagcccccacccatcagccatgagtactatgaccctgctgagttcatggagggcggcccccaggaggccgaccggctggatgagctggagtatgaggaggtggagctgtacaagagcagccaccgggacaagctgggcctgatggtgtgctacagaacagatgatgaggaggacctgggcatctacgtgggggaggtgaaccccaacagcattgctgccaaggatggccgcatccgggagggggaccgcatcatccagatcaatggagtggatgtgcagaaccgggaggaggccgtggccatcctgagccaggaggagaacaccaacatcagcctgctggtggcccggcctgagagccagctggccaagcgctggaaggacagcgacagagatgacttcctggatgactttggaagtgaaaatgaaggagagctgcgggccaggaagctgaagagccccccagcccagcagcctggaaatgaggaggagaagggggccccagatgctggccctggcctgagcaacagccaggagctggacagcggcgtgggccgcacagatgagagcaccagaaatgaggagagcagcgagcatgacctgctgggagatgagccccccagcagcaccaacaccccaggcagcctgaggaagtttggcctgcagggagatgccctgcagagccgggacttccacttctccatggacagcctgctggccgagggcgccggcctgggcggcggagatgtgcccggcctgacagatgaggagtatgaaagataccgggagctgctggagatcaagtgccacctggagaatggaaaccagctgggcctgctcttcccccgggccagcggcggcaacagcgccctggatgtgaacagaaatgaaagcctgggccacgagatggccatgctggaggaggagctgcggcacctggagttcaagtgcaggaacatcctgcgggcccagaagatgcagcagctgcgggagcgctgcatgaaggcctggctgctggaggaggagagcctgtatgacctggccgccagcgagcccaagaagcatgagctgagtgacatcagcgagctgcctgagaagagtgacaaggacagcaccagcgcctacaacacaggagagagctgccgcagcacccccctgctggtggagcccctgcctgagagccccctgcggcgggccatggccggcaacagcaacctgaacagaacacctcctggccctgctgtggccaccccagccaaggccgcccctcctcctggcagccctgccaagttccgcagcctgagccgggaccctgaggccggccggcggcagcacgccgaggagcggggcagaagaaaccccaagacaggcctgaccctggagcgggtgggccctgagagcagcccctacctgagcagaagacaccggggccagggccaggagggggagcactaccacagctgtgtgcagctggcccccacccggggcctggaggagctgggccacggccccctgagcctggccggcggcccccgggtgggcggcgtggccgctgctgccacagaggcccccaggatggagtggaaggtgaaggtgcggagtgatggcaccaggtatgtggccaagaggcctgtgcgggaccggctgctgaaggcccgggccctgaagatccgggaggagaggagcggcatgaccacagatgatgatgctgtgtctgagatgaagatgggccgctactggagcaaggaggagaggaagcagcacctgatccgggcccgggagcagaggaagaggcgggagttcatgatgcagagccggctggagtgcctgcgggagcagcagaatggagacagcaagccagagctgaacatcatcgccctgagccacaggaagaccatgaagaagaggaacaagaagatcctggacaactggatcaccatccaggagatgctggcccatggagcccggtctgcagatggcaagagggtgtacaaccccctgctgtctgtgaccaccgtgtag

SEQ ID NO: 224581 - DNA, 2310 bp, Artificial Sequence
  derived and/or modified sequence
atgggctgcaacatgtgcgtggtgcagaagcccgaggagcagtacaaggttatgctgcaggtgaatggcaaggagcttagcaagctgtcccaagagcagacgctgcaggcgctgaggagctctaaggaacctctggtcatccaggttctaaggaggtccccccgcttacgcggcgatagtagctgccatgacctgcagctggtagattcggggacccaaactgacattacgttcgaacacatcatggccctcggcaagctccgccctcccacccctcctatggttatactcgagcctcctccaatttctcatgagtactacgacccagctgagtttatggaaggaggaccccaagaggccgacagactggatgaactcgagtacgaagaggtcgagctctacaaatcctcacacagagacaagctggggctaatggtctgttataggacggatgacgaggaggacctgggaatttatgtcggcgaggttaatccaaactctatcgcagctaaagacgggcggattagggagggcgaccgtattatccagattaatggcgtagatgtccagaatagggaggaggccgtagcaattctcagccaggaagaaaataccaatatttctttgctagttgctaggccagaaagccaactagctaagagatggaaagactccgacagagacgattttttagacgacttcggctctgagaacgagggtgagctgcgcgccaggaagttgaaatcaccccccgcacaacagcctggaaatgaagaggagaagggggcccctgacgcgggacctggtctcagtaattcacaggagctcgacagtggcgtgggccgtacggatgagagcaccagaaacgaggagtctagcgagcacgacttactaggggacgagccaccaagcagcacaaatactcccgggagccttaggaagttcgggctgcagggggatgcactgcagagtagggatttccacttcagtatggacagcctgctagctgaaggagctggcctgggtggcggggacgtgcccggtctaaccgacgaggagtacgaacgctatcgagagctgctggagataaagtgccacctggagaatggcaaccagctagggcttctgttcccacgggcctccggcggaaattccgcactggacgtcaatcgcaacgagtctctgggtcacgagatggcaatgctcgaagaggaacttaggcaccttgagttcaaatgcagaaatatactgcgcgctcagaagatgcagcagctgcgcgagcgttgtatgaaggcttggctcctcgaggaggagtcactgtatgacttggccgcctctgagcctaagaaacatgagcttagcgacataagtgaacttccagaaaagtcagataaggattcaacgagcgcctataacaccggagagagttgtcgcagcaccccgctcctggtggaacccttgcctgagtccccgttacggcgggccatggctggaaatagcaatttgaataggacaccaccaggaccagcggtggcaacacccgcaaaagcagccccaccgcctggctctccggcgaaatttcgctctctttccagagatccagaagccggtaggagacagcatgctgaagaacgcgggcggcgaaatcccaagacgggactgacgcttgagagagttggtcccgaatctagtccatacctgtccaggcggcaccgtgggcaggggcaggagggcgagcattaccattcttgcgttcagctcgcccctaccaggggcctcgaggagctcggccacgggcctctgtccttagcaggcggcccgcgggtgggaggggtggctgctgcagccacggaagccccgcgtatggagtggaaggtgaaagttcggtcagatgggaccagatacgtagccaaaaggcccgtccgagacagactgcttaaggcccgggctttgaaaatacgggaggagcgaagcggtatgaccactgacgacgatgcggtgtccgaaatgaagatgggtcggtattggagcaaagaggaaaggaaacagcatctgatcagagcccgggagcagaggaagagacgggagttcatgatgcagtccaggctcgaatgcctcagggagcaacagaacggtgatagtaagcccgaattaaatattatcgccttaagccaccgtaaaacgatgaagaaacggaataaaaagatcctggataactggatcacaatccaagaaatgcttgcccacggcgcccggtccgcggacggtaagcgggtgtataatcccctgctctccgttacaactgtgtag

SEQ ID NO: 224582 - DNA, 3689 bp, Artificial Sequence
  derived and/or modified sequence
agcgaagagttaacctgaggggcgagccgctgcccccacctcgggggcgtgcccccctcccccgctaggcggcccgccccccgcgccagggtatggcccctggccccggcccgggacccgaggtcccgcgcccgggtcagtgaaaggcgtcttcccgttcccgccctccgcctcctctcgccggccagcaacatgggatgtaatatgtgcgtggtccagaaaccggaggagcagtacaaagtgatgctgcaggtgaacgggaaggagctctccaagctgtctcaggagcaaactctgcaggccctgcgctcctccaaggagcccctggtgatccaggtgctgagacgcagcccccgcctccggggggacagctcctgtcacgacctgcagctggtggacagtggcactcagaccgacatcaccttcgagcatatcatggcgctgggcaagctgcgtccgcccaccccgcccatggtcatcctggagccccccccaatcagccatgagtattatgacccggcggagtttatggagggcggcccgcaggaggcagaccgcttggatgagctggagtatgaggaggtggagctgtataaaagcagccaccgggacaagctgggcctgatggtttgctaccgcacggacgacgaggaggacctgggcatttatgtcggagaggtaaatcccaacagcattgcagccaaagacggccggatccgtgagggagaccgcatcatccagattaacggtgtagacgtccagaaccgggaagaggcggtggccatcctgagccaggaagagaacaccaacatctccctgctggtggcccgacctgagagtcagctggcgaaaaggtggaaggacagcgaccgggatgacttcctggatgactttggctctgagaatgagggggagctgcgtgctcgtaaactgaaatcaccccctgcccagcagcccggaaacgaagaggagaagggggctcccgatgccggcccaggcctgagcaacagccaggagctggacagcggggtgggccggactgacgagagcacccggaacgaagagagctctgagcacgacctgctgggggacgaacccccgagctccaccaacaccccgggaagcctgcgcaagtttggcctgcaaggggacgccctgcagagccgggacttccatttcagcatggactctctgctggccgagggggcggggctgggagggggcgacgtcccgggcctcacggatgaggagtatgagcgctaccgtgagctcctggagatcaagtgccacctggagaacggcaaccagctgggcctcctctttccccgggcctccggaggcaacagcgccctggacgtcaaccgcaacgagagcctgggccacgagatggccatgctggaggaggagctaaggcacctggaattcaagtgccgcaacatactgcgggcgcagaagatgcagcagctgcgtgagcgctgcatgaaggcctggctgctggaggaggagagcctctacgacctggcggccagcgagcccaagaagcacgagctgtccgacatctccgagctgcccgagaagtcggacaaggacagcaccagcgcctacaacactggggagagctgccgcagcaccccgctgcttgtggagcccctgcccgagagccccctgcggcgggccatggccggcaactccaacttgaaccggacccctcccggccccgctgttgccacccccgccaaggcagctcctccaccggggagccccgccaagttccggtccctctcccgggatcctgaggccggccggaggcagcacgcggaggagcgcggccgccgcaaccccaagacggggttgaccctggagcgtgtgggccctgaaagcagcccttacctctcgcggcgccaccgcggccagggccaggagggcgagcactaccacagctgcgtgcagctggccccgacgcgaggcctggaggagctgggccacggccccctgagcttggccggtggccctcgggtgggcggggtggcggccgcggccactgaagcaccgcgcatggagtggaaagtgaaggtgcgcagcgacggaacccgctacgtggccaagcggcccgtgcgagatcggctgctgaaagcccgtgccctgaagatccgggaggagcgcagcggtatgacgaccgacgacgacgcggtgagcgagatgaagatgggccgctactggagcaaggaggagcggaagcagcacctgatccgggcccgtgagcagcggaagcggcgcgagttcatgatgcagagccggctggagtgcctgcgggagcagcagaatggcgacagcaagcccgagctcaacatcattgccctgagccaccgcaaaaccatgaagaagcggaacaagaagatcctggacaactggatcaccatccaggagatgctggcccacggcgcgcgctccgccgatggcaagcgggtctacaaccctcttctctcagtcaccaccgtgtgagctgcccgggcgggtacacggcccaggcccagggaaccccctggggccccggccctcactctcctatagagattgtgtgtgtgtgtgtgtgcgcgcgcgcgtgctcgctgtgcgcacgcacacatctcctcgtctgggtgtgcgcacagggctttgttagcagagagaagcccctgaggagaagggacgcttttcttccttctgcccaagtaaagtgaccatgccagtggccagcactgggggcacacctgtgatgggcaccccttcagctgtgcgtgtgcattccccatcccccatgctcttgcgtgtgcttgcacgtgcacgcacacacacacccagtgctctctccacccgacccgtgtacttgcagacagggaagctgagctgaaaggagcacaagagagtgtccggcttcgctgctgagcgcggcctctccccgccgctgcgcactgcagttatttgtagacaaaggcacccctgatttttgtggtttttctccctttctgtgcttgccaatagttgttttgttttgtggacctgccctgggggctggcagctccttcaggcagcctggcagaagtggaactcccctctccactgatggctgggaagggagttggggaggaagagtgggagggagggctggggatggatgggagggaaggggagggaaaggtgggaggaatgggaagcagctgttctggtggcttccactctgaggtgtgggaacggggagcctctggggggcacctgtttccccagtgactcagagagagcaagactgcaggaacggaggggtcctgcagggtgtccaccaagaagtcacagagcccgttctgcgccccacaccatctggagcaggggcttctcttctgagtgaactgaggaaggtgcttagatggtgagggctctagaaaccaagccccatgagcagcagtggaagacctcgggccatgcggcctggggaggacttggtggcgatccgcaacctggaccccagtgagaggcggtgggctgactgggaaggagaggcccccaacctcctcaggatttgcacgtgtgaactaggctgcctgtggggtgccccttaggcttggagagccccagattggaggcagacagactgcaccaccccttccccccctgcatctcaagaataaagcaagctgcctttgtacttggttgaa

SEQ ID NO: 224583 - DNA, 2310 bp, Artificial Sequence
  derived and/or modified sequence
atgggctgcaacatgtgtgtggttcaaaaacctgaggagcaatacaaagttatgctacaggttaatggaaaagaactaagcaagttgagccaggaacagacgctacaggcattgaggtcctctaaggagccactggttattcaggtgctgcgcaggagcccccgacttcggggagacagcagctgccatgatctgcagttggtggatagcggtacgcagaccgacatcactttcgagcacatcatggcgctggggaagcttaggccacccacccctccaatggtgatactcgaaccccctcccatcagtcacgagtactacgatcctgcagaatttatggagggagggccacaagaggccgaccggcttgacgagctggagtacgaggaggtcgaactgtacaagtcttctcacagggataaactgggcctgatggtgtgctacaggactgacgacgaagaagacctgggcatttatgtgggggaggtcaatccaaactccatagcggctaaggatggcagaatcagagagggagaccggatcattcagatcaacggtgtcgacgtccaaaacagagaggaggcagtcgccatcttaagccaggaggagaataccaatatcagcctcctggttgcacgcccagagagccagctcgcaaaaagatggaaggactcagatcgcgatgacttcctggatgactttgggtccgaaaacgagggggaactgagggcgcgtaaacttaaaagtccccctgcccagcaaccgggaaatgaagaggaaaaaggagcccctgacgcagggcctggcctttcaaacagccaggagttggactctggggtgggcaggaccgatgagagcactcgaaatgaggaatcgtccgaacacgacctcctgggagacgagcctccatcctccaccaacaccccaggcagtttgcggaagtttggcctgcaaggcgatgccctgcaatctcgtgatttccacttttcaatggacagcctgctggccgagggcgctggcctgggaggaggtgatgtacctggactcactgacgaagagtatgagcgctaccgtgagctcctggaaataaaatgtcatcttgagaatggcaaccaattaggactcctatttcctcgtgcaagcggcggtaacagtgcactagatgtgaaccgaaatgaatcactgggacacgagatggccatgctggaggaggagctgcggcatttagaatttaaatgccggaatatcctccgggctcagaagatgcagcagctgcgggagcgctgcatgaaagcgtggctgttagaggaggagtccctgtacgacctcgccgcttcagagcctaaaaagcatgaactatcagatatatctgaactccctgaaaaaagtgataaagattccacgtcggcctataacactggagagtcatgtcgcagtactcccctcctcgtggagccgttgcccgaaagccccctgcggcgtgctatggccggaaactccaatctcaatcgcacccccccaggtcctgccgtggcgaccccagccaaggccgctcctccacccggttcccctgccaagttccgttcccttagcagagaccccgaagccggacggagacagcatgcagaggagagaggccgaagaaacccaaaaacaggactgacactggaacgcgttgggcctgaaagcagtccttatctgagccgcagacaccgcggacaagggcaggaaggggagcattaccacagctgcgtgcagttggctcccacgagaggactcgaagagctggggcacggacccctgagcctggccggaggtccgagggtggggggtgtcgcggctgccgctaccgaagccccacggatggaatggaaggtgaaagtgcggagtgatgggacacggtatgtggccaagagacctgtaagggatagactgctgaaggcacgcgctctcaaaatcagagaagagagatcaggcatgaccaccgacgatgacgccgtttctgagatgaagatggggagatactggtcaaaggaagagcgtaagcagcacctgatccgtgccagggagcagagaaaaaggagggaattcatgatgcagtcaagattagaatgcctgcgtgaacagcagaacggcgattccaagccagaacttaatattatcgccttgtctcatagaaagacaatgaaaaagcgcaataagaagattctggacaattggatcacaattcaggagatgctcgcccacggcgcacggagcgcagatgggaagcgggtctacaacccactcctcagtgttactaccgtgtag

SEQ ID NO: 224584 - DNA, 2310 bp, Artificial Sequence
  derived and/or modified sequence
atgggctgtaatatgtgcgtagtgcagaaacccgaagagcagtacaaagttatgctccaggtgaatggcaaagagctgagtaagctgtctcaggagcaaacactgcaggccttacggtccagtaaggaacccttggttatccaggtcctcagacgctctccaagacttaggggagattcttcctgccacgacctccagctggttgattccggcacacaaaccgacattactttcgaacacatcatggctctaggcaaactcaggcccccaacccccccaatggtaattctcgagcctcccccaattagtcacgagtactacgaccctgcagaattcatggagggtggccctcaggaggcagacagactggacgagctggaatacgaagaggtcgaactgtataagagtagccacagagacaaactgggattgatggtatgttaccgcacagacgatgaagaagatctcggaatctatgtgggagaggtgaacccgaacagtattgctgctaaggacggccgcattcgcgagggcgacaggattatccagatcaacggtgtggacgttcaaaatagagaagaagccgtagctatactgtcccaggaagaaaacactaacatcagtcttctagtggcccgcccagaaagccagctcgccaagcggtggaaagattccgacagagatgacttcctagatgattttggatctgagaacgaaggagagttgcgggccaggaaattgaagtcacctccggcacagcagccaggtaatgaggaggaaaaaggggcaccggatgctggtcctgggttgtccaactcccaggagcttgactccggagtcggtcgcacagacgaatccacccggaacgaggagtctagcgagcatgatctgttgggagacgagcccccttcaagtacaaacacaccggggtcattgcgcaaatttgggctccagggagacgccttacagtcaagggatttccacttctcaatggactctctgctcgccgaaggtgccggacttggagggggagatgtccccgggctcacagatgaggaatacgagcggtatcgtgaactgcttgagatcaagtgtcatttggagaacgggaatcagctgggcctactgttccctagagcatccgggggcaatagcgcattggacgtgaatcggaacgagagcctgggccacgagatggctatgctggaagaggagctgcgccatctggaattcaagtgtagaaacatcctccgtgctcagaagatgcaacagttgcgagaacggtgcatgaaggcctggctgttagaagaggaaagtctgtatgacctagcagcctccgagcccaaaaaacatgagctttccgacatcagcgaattgcctgaaaaaagcgacaaagatagtaccagcgcatacaatacaggagaatcctgccgctctaccccattgttggtcgagcccttgcctgagtctcccctccggagagctatggccggaaatagcaacctgaaccgcacgcccccaggtccagccgtggctacccctgctaaagctgcccccccacccggaagccccgcaaaattccgatcccttagccgggaccccgaggccggccgacggcagcacgctgaagagaggggccgccgtaacccaaaaaccggacttaccctagaacgagtcggaccggagtcttctccatacctctcacgccgacatcgcggccagggccaagagggggaacactaccactcatgtgtgcagttggctcccactcgtggattagaagaattgggccacgggccgctgtccctcgcgggcggccccagggtcggcggtgttgccgcggccgccaccgaggccccacgtatggaatggaaagttaaagtgcggagcgacggcactcgatatgtcgccaaacgaccagttagagacagactgttgaaagctcgcgcacttaagattagggaagaacgcagtggtatgacaacggacgacgatgcggtctctgagatgaaaatgggccgatattggtctaaagaggagcgcaaacagcatcttattcgtgcccgggaacagagaaaacggcgcgagttcatgatgcagagtagattagagtgcctacgcgagcaacagaacggcgattccaaaccggagctgaacataattgcacttagccaccgtaaaaccatgaaaaagaggaacaaaaaaatactcgacaattggataactattcaggagatgttggctcacggtgcccgatctgcggatgggaaacgggtatacaatcccttgctgtccgttacgacagtgtag

SEQ ID NO: 224585 - DNA, 2310 bp, Artificial Sequence
  derived and/or modified sequence
atgggctgtaatatgtgtgtcgtccagaagcctgaggaacaatacaaggtaatgctgcaagtcaatggaaaagaactgtctaaattgtcccaggaacagacacttcaggccttaagatcttcaaaggaacccctcgtgatccaggtcctgcgcaggtctcctaggcttaggggtgatagttcatgccacgatctgcaactggtggatagcggcactcagaccgatatcacatttgagcacataatggcactaggcaagctgcgcccccccacccctccaatggttatcctggaacccccccctataagccacgagtattacgaccctgctgaattcatggaagggggaccacaagaggccgaccgactggacgagctcgagtacgaagaagtcgaactgtataagagctcccatcgcgacaaactggggctcatggtttgctaccgaacagatgacgaggaggatctggggatttacgtgggtgaggttaatccaaactcaattgctgctaaagacgggaggataagagaaggtgaccggatcatacagattaatggagtagacgtacaaaacagagaagaggctgttgcaatattgtcacaagaggaaaacactaacatctccctgttggtcgcccgccccgaatcccagctggcaaagaggtggaaggactctgatagagacgattttcttgacgattttggcagcgagaacgaaggggaattacgggccagaaaactgaaatccccaccagcccagcaacccggcaatgaagaggagaagggcgcccccgacgcgggacctggtctgtcaaactcccaagaactcgacagcggtgtgggaagaactgatgaaagcacacgtaacgaagaatcgagtgaacacgacttgctcggtgatgagccccctagttccacaaataccccagggtcactccggaaattcggcctccaaggagacgcactgcagagtagggactttcatttcagtatggattcactcctggcagagggagcagggctcggggggggggatgtcccaggccttaccgatgaggaatatgagcggtatcgggagttgctggagattaaatgtcacctggaaaacggtaaccagctagggcttctttttccacgcgcctccgggggaaacagcgcgcttgacgtaaatagaaatgaatctctgggccacgaaatggccatgctcgaagaggagctgagacacctggagtttaaatgcagaaatatactgagagcacagaagatgcaacaactgagagaacgctgcatgaaggcttggttactggaggaggagagcctctacgatcttgccgcatccgaaccaaaaaagcacgagttaagcgatatcagtgaactgcccgaaaaatccgataaagattcgactagcgcgtataacacgggagaatcttgccgctctacccctctccttgtagagcctctgcccgagtcgccacttcgccgcgccatggctggcaactcgaacctaaatcgcaccccccctgggcccgcagtagccactccagcaaaagccgcaccaccacccgggagccccgcaaagtttagaagccttagtagggacccagaggcaggcagacggcaacatgccgaggaaagagggcgccgcaaccctaaaacaggcttgaccctagagcgggtaggcccagagagctcaccctatttaagtcgaagacatcgcggacagggccaagagggagagcactaccactcctgcgttcagcttgccccgacccgaggcctggaagaactcggccacggcccccttagcctggctggagggccacgcgttgggggagtggcagccgcggcgacagaagcaccccgtatggaatggaaggttaaagtacgaagcgacggcacaagatacgtggccaagagacccgttcgggacaggctgctaaaggctcgcgcgcttaaaattcgagaggaaagaagcggtatgaccacagatgacgacgcagtgtccgagatgaagatgggacggtactggtccaaagaggaacgcaagcagcatctgataagagcacgagaacagcgaaagaggagagagtttatgatgcagagtagactggaatgtttgagagagcagcagaacggagattctaaaccagaactgaatataatcgctttgagtcatcggaagaccatgaaaaaaaggaacaaaaagatcttggataattggataaccattcaggagatgctggctcacggggcaagatctgcagacgggaagagagtgtacaatcctctactgagcgtcaccactgtgtag

SEQ ID NO: 224586 - DNA, 2310 bp, Artificial Sequence
  derived and/or modified sequence
atgggctgcaacatgtgcgtggtgcagaagcccgaggagcagtacaaggtgatgctgcaggtgaacggcaaggagctgagcaagctgagccaggagcagaccctgcaggccctgagaagcagcaaggagcccctggtgatccaggtgctgagaagaagccccagactgagaggcgacagcagctgccacgacctgcagctggtggacagcggcacccagaccgacatcaccttcgagcacatcatggccctgggcaagctgagaccccccaccccccccatggtgatcctggagcccccccccatcagccacgagtactacgaccccgccgagttcatggagggcggcccccaggaggccgacagactggacgagctggagtacgaggaggtggagctgtacaagagcagccacagagacaagctgggcctgatggtgtgctacagaaccgacgacgaggaggacctgggcatctacgtgggcgaggtgaaccccaacagcatcgccgccaaggacggcagaatcagagagggcgacagaatcatccagatcaacggcgtggacgtgcagaacagagaggaggccgtggccatcctgagccaggaggagaacaccaacatcagcctgctggtggccagacccgagagccagctggccaagagatggaaggacagcgacagagacgacttcctggacgacttcggcagcgagaacgagggcgagctgagagccagaaagctgaagagcccccccgcccagcagcccggcaacgaggaggagaagggcgcccccgacgccggccccggcctgagcaacagccaggagctggacagcggcgtgggcagaaccgacgagagcaccagaaacgaggagagcagcgagcacgacctgctgggcgacgagccccccagcagcaccaacacccccggcagcctgagaaagttcggcctgcagggcgacgccctgcagagcagagacttccacttcagcatggacagcctgctggccgagggcgccggcctgggcggcggcgacgtgcccggcctgaccgacgaggagtacgagagatacagagagctgctggagatcaagtgccacctggagaacggcaaccagctgggcctgctgttccccagagccagcggcggcaacagcgccctggacgtgaacagaaacgagagcctgggccacgagatggccatgctggaggaggagctgagacacctggagttcaagtgcagaaacatcctgagagcccagaagatgcagcagctgagagagagatgcatgaaggcctggctgctggaggaggagagcctgtacgacctggccgccagcgagcccaagaagcacgagctgagcgacatcagcgagctgcccgagaagagcgacaaggacagcaccagcgcctacaacaccggcgagagctgcagaagcacccccctgctggtggagcccctgcccgagagccccctgagaagagccatggccggcaacagcaacctgaacagaaccccccccggccccgccgtggccacccccgccaaggccgcccccccccccggcagccccgccaagttcagaagcctgagcagagaccccgaggccggcagaagacagcacgccgaggagagaggcagaagaaaccccaagaccggcctgaccctggagagagtgggccccgagagcagcccctacctgagcagaagacacagaggccagggccaggagggcgagcactaccacagctgcgtgcagctggcccccaccagaggcctggaggagctgggccacggccccctgagcctggccggcggccccagagtgggcggcgtggccgccgccgccaccgaggcccccagaatggagtggaaggtgaaggtgagaagcgacggcaccagatacgtggccaagagacccgtgagagacagactgctgaaggccagagccctgaagatcagagaggagagaagcggcatgaccaccgacgacgacgccgtgagcgagatgaagatgggcagatactggagcaaggaggagagaaagcagcacctgatcagagccagagagcagagaaagagaagagagttcatgatgcagagcagactggagtgcctgagagagcagcagaacggcgacagcaagcccgagctgaacatcatcgccctgagccacagaaagaccatgaagaagagaaacaagaagatcctggacaactggatcaccatccaggagatgctggcccacggcgccagaagcgccgacggcaagagagtgtacaaccccctgctgagcgtgaccaccgtgtag

SEQ ID NO: 224587 - DNA, 366 bp, Artificial Sequence
  derived and/or modified sequence
atgcccagcgacagacccttcaagcagagaagaagcttcgccgacagatgcaaggaggtgcagcagatcagagaccagcaccccagcaagatccccgtgatcatcgagagatacaagggcgagaagcagctgcccgtgctggacaagaccaagttcctggtgcccgaccacgtgaacatgagcgagctggtgaagatcatcagaagaagactgcagctgaaccccacccaggccttcttcctgctggtgaaccagcacagcatggtgagcgtgagcacccccatcgccgacatctacgagcaggagaaggacgaggacggcttcctgtacatggtgtacgccagccaggagaccttcggcttctag

SEQ ID NO: 224588 - DNA, 366 bp, Artificial Sequence
  derived and/or modified sequence
atgcctagtgacagaccgtttaaacagcgccgaagcttcgccgatcggtgtaaggaggtccagcagataagagatcaacatccaagtaaaataccagttataatagagcgctacaagggcgagaagcaactccccgtactggataaaactaaattcctagttcctgaccacgttaatatgagcgaactcgtaaaaataattcgaagaaggctccaacttaaccccacccaagcattctttttgctggttaaccagcactctatggtgagcgtgtctacacctatcgctgatatttatgagcaggagaaagacgaggacgggtttctttacatggtctacgcctctcaggaaaccttcgggttctag

SEQ ID NO: 224589 - DNA, 366 bp, Artificial Sequence
  derived and/or modified sequence
atgcccagtgaccggcccttcaagcagaggcgatctttcgcagataggtgtaaagaggtgcagcaaatcagggatcaacatccgagtaagattcctgtcatcattgaaaggtacaaaggggaaaaacaactgcctgtgctcgacaaaacgaagttcctggtgcctgatcacgtgaacatgtccgagctggtgaagattatccgcaggcgactacagctgaatcccacacaggccttttttctgttggtgaatcagcacagcatggtttctgtcagcacaccaatcgctgatatatacgagcaagaaaaggacgaggacggattcttatacatggtctacgcctcacaggagactttcggtttttag

SEQ ID NO: 224590 - DNA, 366 bp, Artificial Sequence
  derived and/or modified sequence
atgcccagcgaccggcccttcaagcagaggaggagctttgctgaccgctgcaaggaggtgcagcagatccgggaccagcaccccagcaagatccctgtgatcatcgagcgctacaagggggagaagcagctgcctgtgctggacaagaccaagttcctggtgcctgaccacgtgaacatgtctgagctggtgaagatcatcagaagaaggctgcagctgaaccccacccaggccttcttcctgctggtgaaccagcacagcatggtgtctgtgtccacccccatcgctgacatctatgagcaggagaaggatgaagatggcttcctgtacatggtgtatgccagccaggagaccttcggcttctag

SEQ ID NO: 224591 - DNA, 366 bp, Artificial Sequence
  derived and/or modified sequence
atgcccagcgaccggcccttcaagcagcggcggagcttcgccgacagatgtaaggaagtccaacagattagagatcagcatcccagcaagatcccggtaattatcgagcgatataaaggagaaaaacagctacctgtactggacaagactaaattcctggtccctgaccatgttaacatgagtgaactggttaaaataatccgcaggcggctgcagctaaaccctactcaggcattctttctcctggttaaccagcattctatggtctcggtgagcacccccatcgccgatatatatgaacaggaaaaggacgaagatggctttctgtatatggtatacgcatctcaggagaccttcggattctag

SEQ ID NO: 224592 - DNA, 366 bp, Artificial Sequence
  derived and/or modified sequence
atgcccagcgaccggcccttcaagcagcggcggagcttcgccgacaggtgcaaagaggtgcagcagataagagaccagcaccccagcaagatccctgttattatcgagaggtataaaggggaaaaacaactgcccgttttggataaaactaaatttctggtaccagatcatgtgaatatgtctgaacttgtgaagatcatcagaagacggctccagctgaatcctactcaggcattcttcctgctggtcaaccaacactctatggtgagtgtgagcacccccatcgctgacatctacgagcaggaaaaggatgaagacgggtttctctacatggtctatgctagtcaagaaacctttggattttag

SEQ ID NO: 224593 - DNA, 366 bp, Artificial Sequence
  derived and/or modified sequence
atgccttctgataggcctttcaagcaaagaagaagttttgccgaccgctgcaaagaagtccaacaaatcagagaccagcatccctccaagatcccagtgataatcgagcgctataaaggcgagaagcagcttccggttctggataaaactaaatttctggtgcctgaccatgtcaatatgtccgaattagtaaaaattataaggcgcagactccagctaaacccaacacaggccttctttttgcttgtgaaccagcacagcatggtgtctgtcagtacccccatcgctgacatctatgaacaggaaaaagatgaagatggctttctgtacatggtctacgcctcccaggagaccttcgggttttag

SEQ ID NO: 224594 - DNA, 366 bp, Artificial Sequence
  derived and/or modified sequence
atgccttccgaccggcctttcaagcagcggcgttcattcgccgacagatgcaaggaagtccagcaaattagagaccagcatcccagcaagattcccgtgataatcgaaagatacaagggcgaaaagcagctccccgtcttggataagacaaaatttcttgtaccagatcatgtgaacatgagcgagttagtgaagatcattcgcagacggctccagcttaacccaacccaggcgttttttctgctggtcaatcagcatagcatggtttcagtttctacccctatcgctgacatctatgaacaagagaaagacgaggacggctttctgtacatggtgtacgcgagccaggaaaccttcggtttttag

SEQ ID NO: 224595 - protein, 212 aa, Artificial Sequence
  derived and/or modified sequence
MEVLRRSSVFAAEIMDAFDRSPTDKELVAQAKALGREYVHARLLRAGLSWSAPERAAPVPGRLAEVCAVLLRLGDELEMIRPSVYRNVARQLHISLQSEPVVTDAFLAVAGHIFSAGITWGKVVSLYAVAAGLAVDCVRQAQPAMVHALVDCLGEFVRKTLATWLRRRGGWTDVLKCVVSTDPGLRSHWLVAALCSFGRFLKAAFFVLLPER

SEQ ID NO: 224596 - DNA, 639 bp, Artificial Sequence
  derived and/or modified sequence
atggaagttctccgcaggagttcagtcttcgccgccgaaatcatggatgctttcgaccggtcaccgaccgataaagagctggttgctcaggctaaagccttgggaagagagtatgtccatgctagattgctcagggctggtctgtcctggtcggccccggagagagctgcccccgttcctggtagactggctgaagtatgtgctgtcctcctccgtctgggtgacgagttggaaatgatacgaccttccgtctatcggaatgtcgcgcgacagttgcacatctccctgcaaagcgaacctgttgttactgatgcgtttctagccgtagctggtcatatctttagcgctggcatcacatggggcaaagttgtgtccttgtatgccgtcgcagcgggccttgcggtcgactgcgttcggcaagctcagcccgctatggtgcacgctctggtcgattgtctgggggagttcgttcgcaaaacccttgccacatggcttaggcgtcgcggcgggtggacagatgttctgaaatgcgtggtgtctaccgatcccggcctgagatctcactggttggtggctgctttgtgctctttcggccgattcctcaaagccgccttttttgtgctactccctgaaagatag

SEQ ID NO: 224597 - DNA, 639 bp, Artificial Sequence
  derived and/or modified sequence
atggaggtgctgcggcgcagctctgtgtttgctgctgagatcatggatgcctttgacaggagccccacagacaaggagctggtggcccaggccaaggccctgggccgggagtatgtgcacgcccggctgctgcgggccggcctgtcctggagcgcccctgagcgggccgcccctgtgcccggccgcctggccgaggtgtgtgctgtgctgctgcggctgggagatgagctggagatgatccggcccagcgtgtacagaaatgtggcccggcagctgcacatcagcctgcagagcgagcctgtggtgacagatgccttcctggccgtggccggccacatcttctctgctggcatcacctggggcaaggtggtgtccctgtatgctgtggccgccggcctggccgtggactgtgtgcggcaggcccagcctgccatggtgcacgccctggtggactgcctgggggagtttgtgaggaagaccctggccacctggctgcggaggagaggaggctggacagatgtgctgaagtgtgtggtgtccacagatcctggcctgcggagccactggctggtggccgccctgtgcagctttggccgcttcctgaaggccgccttctttgtgctgctgcctgagaggtag

SEQ ID NO: 224598 - DNA, 639 bp, Artificial Sequence
  derived and/or modified sequence
atggaggtgctgcggcggagcagcgtgttcgccgccgagatcatggacgcttttgatagaagcccaaccgataaagaattggtcgcacaggccaaggcactcggccgggagtacgttcacgctaggctgctccgcgccggcctaagttggtctgccccagagcgggcggcaccagtgcctggtagattggcagaggtttgcgccgttttgctgcggcttggtgacgaacttgaaatgatccgcccttctgtctacagaaacgtcgcccggcagcttcacatatccctgcagtcagaaccggtggtcacagacgcctttttggcagtagccgggcacatattcagtgcaggaatcacttggggcaaggtggtgtcactgtacgccgttgcagccggcctggcagtcgactgcgtgaggcaggctcagcccgcaatggtgcatgctttggttgattgcctcggtgagtttgtccgtaaaacgttggccacttggcttaggcgcagggggggatggacagacgtgctgaagtgcgttgtttctactgaccctggtctgcgctcccattggcttgtcgccgcactatgctctttcgggcgattccttaaagctgcatttttcgtgctcctgcccgagaggtag

SEQ ID NO: 224599 - DNA, 639 bp, Artificial Sequence
  derived and/or modified sequence
atggaggtgctccgacggtcctcggtattcgcggcagagattatggacgcatttgaccgaagtcccacagacaaggaactggtcgcccaggctaaagcgcttggacgcgaatatgtgcacgcgagattgttgagggccggtctgagttggagcgctccagagcgcgcagcacccgtgccaggtagattggcagaggtctgcgctgtactgctgaggttgggagacgagttggaaatgatccgaccatccgtctacagaaatgtggccagacaacttcatatttcacttcagagcgagcccgtggttacagatgctttccttgctgtcgcgggacatatcttcagcgccggaattacttgggggaaagtcgtgtccctttatgctgtggctgcagggttggccgtagactgcgtcagacaggctcaaccggctatggttcacgccctagtggactgcctcggggaattcgtccggaaaactctggccacttggcttcgcagaaggggtggatggactgatgtgctgaagtgcgtggtctctaccgatccgggtctgaggtcccactggttagtcgcggcactctgtagctttggcagattccttaaggcggctttcttcgtgctgctccccgagaggtag

SEQ ID NO: 224600 - DNA, 2650 bp, Artificial Sequence
  derived and/or modified sequence
agaaggccaagccccaagcccagcctctcgccagctgggagtcgcgcgctgcccacctcgctgcccaggcccccgacgccgcggcaggagccccccaagagcgcgggaagccccgtggacctggcgctcccggctcgggcgtggacggggcgggcgccggggcggggcgcgcgtcctcgcgggtctgaatggaagggtcgaggtcgtcgtcggcggcgagcagatcctgaagccagaactccaccccggcgcccgcgccatgcggcgggagaggtgcggcgccccccacccgcgtcgccgccatggaggtgctgcggcgctcctcggtcttcgccgccgagatcatggacgcctttgaccgctcgcccacagacaaggagctggtggcccaggccaaggcgctgggccgggagtacgtgcacgcgcggctgctgcgcgccggcctctcctggagcgcgcccgagcgtgccgcgccggtcccgggacgcctggctgaggtgtgcgcggtgctgctgcgcctgggcgatgagctggagatgatccggcccagcgtctaccgcaacgtggcgcgtcagctgcacatctccctgcagtctgagcctgtggtgaccgatgcgttcctggccgtggctggccacatcttctctgcaggcatcacgtggggcaaggtggtgtccctgtatgcggtggccgcggggctggccgtggactgtgtgaggcaggcccagcctgccatggtccacgccctcgtggactgcctgggggagttcgtgcgcaagaccctggcaacctggctgcggagacgcggcggatggactgatgtcctcaagtgtgtggtcagcacagaccctggcctccgctcccactggctggtggctgcactctgcagcttcggccgcttcctgaaggctgccttcttcgtgctgctgccagagagatgagctgcccacctggcagtggccgcagcctggccctctgggcccaacgcaggaggccctcagcacccgaacacatcttcctcctccccacccgagcctggagcactctaaccctcggagaccccctaagccccgttcctccgcagacccaggccctccggaaggggtgagtggggaggggctttcctgagcctggagctgggctttggggcagcctgcgaccctccccgcttgtgtcccttctcctgtgatctctgtgttttcccttttctttctggggccaggaagtcagggtcaactcccaggcctcagatgcaggggcccagaacacctgctctcacctgagccccaggtgaaggggcccgggaacacctgctctcacctgagccccaggtgaaggggcccgggaacacctgctctcacctgaaccccaggtgaaggggcccggaacacctgctctcacctgagccccaggtgaaggggcccggaacacctgctctcacctgagccccaggtgaaggggcccgggaacacctgctctcacctgagccccaggtgaaggggcccgggaacacctgctctcacctgaaccccaggtgaaggggcccagaacacctgctctcacctgagccccaggtgaaggggcccggaacacctgctctcacctgagccccaggtgaaggggcccgggaacacctgctctcacctgagcccctggtgaaggggcccggaacacttgctctcacctgagccccaggtgaaggggcccggaacacctgctctcacctgagcccccggtgaaggggcccggaacacttgctctcacctgagccccaggtgaaggggcccggaacacctcctctcacctgagccccaggtgaaggggcccggaacacctcctgtcacctgagccccaggtgaaggggcccgggaacacctctcacctgaacccgggggtcccatcccaggaagaagggccatctcaggacatgagtcctcaggggccctgcacattcaatctgaaggtgaccctggcctggctgaagctggaagagctgtggggactcagcctgtaaacagagcgtaaggttcacatgctggttgcttaatccgtttctggaggaagagtatgacacccacttgtgatggggtccttgtgcggtggggaccggggccggcgggctccaggccagcacacctaacccatggatgtggaacctacggccgagaaggaatgttgcatgagtcggatcccagtccattgtcagtggagggtgagggtgaccccatctgctatttttgtgctcatcctcatacaaccatttggggatgtgcctattagggctccgtaagaactcagatgcctgggaagcccagcccctcaggtgcccccacacacagccttcccttgacgcctacatttctaggcacatgtgaggcatctttcctggagccccgagccagccctgtccctccccagtgcagcatggcactcaggagatacaggctggacatggggcagtcgttctggggaggcctggcctagcagccacccacctgagccctcccggccaggcttcgtgctggggtgggccatgtgccaggacaggagggtcccggcggaaagccagccccggactcatcgtgacattgagatcccactggagggtaggggtggtaataaacttctccaaacgatcgttgtcatttta

SEQ ID NO: 224601 - DNA, 639 bp, Artificial Sequence
  derived and/or modified sequence
atggaggtgctgagaagaagcagcgtgttcgccgccgagatcatggacgccttcgacagaagccccaccgacaaggagctggtggcccaggccaaggccctgggcagagagtacgtgcacgccagactgctgagagccggcctgagctggagcgcccccgagagagccgcccccgtgcccggcagactggccgaggtgtgcgccgtgctgctgagactgggcgacgagctggagatgatcagacccagcgtgtacagaaacgtggccagacagctgcacatcagcctgcagagcgagcccgtggtgaccgacgccttcctggccgtggccggccacatcttcagcgccggcatcacctggggcaaggtggtgagcctgtacgccgtggccgccggcctggccgtggactgcgtgagacaggcccagcccgccatggtgcacgccctggtggactgcctgggcgagttcgtgagaaagaccctggccacctggctgagaagaagaggcggctggaccgacgtgctgaagtgcgtggtgagcaccgaccccggcctgagaagccactggctggtggccgccctgtgcagcttcggcagattcctgaaggccgccttcttcgtgctgctgcccgagagatag

SEQ ID NO: 224602 - protein, 194 aa, Artificial Sequence
  derived and/or modified sequence
MQDAPLSCLSPTKWSSVSSADSTEKSASGAGTRNLPFQFCLRQALRMKAAGILTLIGCLVTGAESKIYTRCKLAKIFSRAGLDNYWGFSLGNWICMAYYESGYNTTAQTVLDDGSIDYGIFQINSFAWCRRGKLKENNHCHVACSALITDDLTDAIICARKIVKETQGMNYWQGWKKHCEGRDLSEWKKGCEVS

SEQ ID NO: 224603 - DNA, 585 bp, Artificial Sequence
  derived and/or modified sequence
atgcaggatgccccattgagttgtttgtcgcccaccaagtggagctctgttagttccgccgattccacagagaagagtgcttccggagctggcacgcgcaacctcccctttcagttttgtctgcggcaggcactgcgcatgaaggctgccggtatcctgactctcattggctgtctggtgacaggtgcagagtcgaaaatctatacacggtgcaaactcgcaaagattttttcccgcgctggcctagataactattggggattcagcttgggcaactggatctgtatggcttactatgaatcaggttataataccacagctcagacggttttggacgatggcagtatagattacggaatctttcaaatcaactccttcgcatggtgtaggcgcggaaagctcaaagaaaacaaccactgccacgtggcctgttccgcattgatcacggacgacttaactgatgctattatttgcgcccgaaagatcgtcaaggagacacaaggcatgaactattggcagggctggaaaaaacactgcgaaggacgagacttatccgagtggaaaaaagggtgcgaagtatcctag

SEQ ID NO: 224604 - DNA, 585 bp, Artificial Sequence
  derived and/or modified sequence
atgcaggatgcccccctaagttgtttatccccaactaagtggtcctctgtatcatcagccgattcgaccgagaagtcagcctccggggcaggcacaaggaacctgccttttcagttttgcctcagacaagccttgagaatgaaagccgctggcattctcacactcatcggctgtctggttactggagccgaaagcaagatttataccagatgcaaactggctaaaatcttctcacgtgctggacttgacaattactggggattctcattgggcaattggatctgtatggcttactatgagtcaggctacaacacgacggcgcagactgtactcgacgatggatctatagactacggcatatttcaaattaactccttcgcttggtgtcgcagaggcaaactgaaggagaataatcattgccacgtcgcttgctccgctctgattactgacgatctaactgatgcaattatatgtgcaagaaagattgtgaaagagacgcaggggatgaactattggcaggggtggaaaaagcattgcgaagggcgcgatctttcagagtggaaaaaaggctgtgaagtttcctag

SEQ ID NO: 224605 - DNA, 585 bp, Artificial Sequence
  derived and/or modified sequence
atgcaagacgcacccttgtcatgtttgagtccaactaaatggtcatctgtcagctccgcggactctactgaaaagtccgcaagtggcgctggaactcggaacctgcccttccagttttgcctccgtcaagcgttacgaatgaaagccgcaggtatcctcactcttattggttgtcttgtgaccggagccgagtcaaaaatctatacaagatgtaagctagcaaaaatcttctctcgagccggtctggacaattactggggcttttccctgggaaattggatttgtatggcgtactacgaaagtggttacaacacaacagctcaaactgtactcgacgacggcagcatagactacggcatctttcagattaatagctttgcctggtgccgacgcgggaaactgaaagaaaataatcactgtcatgtggcttgttcggcgctgattacagatgacctgacagacgctataatctgcgcaagaaaaattgtgaaggaaacacaaggtatgaactattggcagggatggaaaaagcattgcgaaggaagagacttgtccgaatggaaaaaaggatgcgaggtgagctag

SEQ ID NO: 224606 - DNA, 585 bp, Artificial Sequence
  derived and/or modified sequence
atgcaggacgcccccctgagctgcctgagccccaccaagtggagcagcgtgagcagcgccgacagcaccgagaagagcgccagcggcgccggcaccagaaacctgcccttccagttctgcctgagacaggccctgagaatgaaggccgccggcatcctgaccctgatcggctgcctggtgaccggcgccgagagcaagatctacaccagatgcaagctggccaagatcttcagcagagccggcctggacaactactggggcttcagcctgggcaactggatctgcatggcctactacgagagcggctacaacaccaccgcccagaccgtgctggacgacggcagcatcgactacggcatcttccagatcaacagcttcgcctggtgcagaagaggcaagctgaaggagaacaaccactgccacgtggcctgcagcgccctgatcaccgacgacctgaccgacgccatcatctgcgccagaaagatcgtgaaggagacccagggcatgaactactggcagggctggaagaagcactgcgagggcagagacctgagcgagtggaagaagggctgcgaggtgagctag

SEQ ID NO: 224607 - DNA, 585 bp, Artificial Sequence
  derived and/or modified sequence
atgcaggatgcccctcttagctgtttatcaccaacaaaatggagttcggtgtctagtgccgactccaccgaaaagagcgcctccggggctggaaccagaaacctgcccttccagttctgtctgcggcaggctctgaggatgaaagcggcgggaattcttactctgatcggatgtctggtgacaggagcagagtccaagatctatactagatgcaagctggcaaagattttttccagggccggtttagacaactattggggttttagtctggggaattggatctgcatggcttactacgagtctgggtataataccacggctcaaacagtgttggatgatggatccatcgattatggcatcttccagatcaattcctttgcgtggtgccgaaggggtaagctgaaggagaataatcactgccatgtggcttgttcagctctcattaccgatgacttgacggacgccatcatctgtgcaaggaagattgttaaggaaactcagggcatgaactattggcaggggtggaagaaacactgtgaaggccgcgatctgtccgagtggaagaagggatgcgaggtgagttag

SEQ ID NO: 224608 - DNA, 585 bp, Artificial Sequence
  derived and/or modified sequence
atgcaggatgcccccctgagctgcctgagccccaccaagtggagctctgtgtcctctgctgacagcacagagaagagcgccagcggggccggcaccaggaacctgcccttccagttctgcctgcggcaggccctgaggatgaaggccgccggcatcctgaccctcatcggctgcctggtgactggagctgagagcaagatctacacccgctgcaagctggccaagatcttcagccgggccggcctggacaactactggggcttcagcctgggcaactggatctgcatggcctactatgaaagtggctacaacaccacagcccagacagtgctggatgatggcagcattgattatggcatcttccagatcaacagctttgcctggtgccggcggggcaagctgaaggagaacaaccactgccacgtggcctgcagcgccctgatcacagatgacctgacagatgccatcatctgtgccaggaagatcgtgaaggagacccagggcatgaactactggcagggctggaagaagcactgtgagggccgggacctgtctgagtggaagaagggctgtgaggtgtcctag

SEQ ID NO: 224609 - DNA, 815 bp, Artificial Sequence
  derived and/or modified sequence
tcttgagctaggaaaggattactcgcgcctcgttagaatcagacatggcttcaggggatgcaggacgctcccctgagctgcctgtcaccgactaagtggagcagtgtttcttccgcagactcaactgagaagtcagcctctggggcaggcaccaggaatctgccttttcagttctgtctccggcaggctttgaggatgaaggctgcgggcattctgaccctcattggctgcctggtcacaggcgccgagtccaaaatctacactcgttgcaaactggcaaaaatattctcgagggctggcctggacaattactggggcttcagccttggaaactggatctgcatggcatattatgagagcggctacaacaccacagcccagacggtcctggatgacggcagcatcgactatggcatcttccagatcaacagcttcgcgtggtgcagacgcggaaagctgaaggagaacaaccactgccatgtcgcctgctcagccttgatcactgatgacctcacagatgcaattatctgtgccaggaaaattgttaaagagacacaaggaatgaactattggcaaggctggaagaaacattgtgagggcagagacctgtccgagtggaaaaaaggctgtgaggtttcctaaactggaactggacccaggatgctttgcagcaacgccctaggatttgcagtgaatgtccaaatgcctgtgtcatcttgtcccgtttcctcccaatattccttctcaaacttggagagggaaaattaagctatacttttaagaaaataaatatttccatttaaatgtcttcaccc

SEQ ID NO: 224610 - DNA, 585 bp, Artificial Sequence
  derived and/or modified sequence
atgcaggacgcccccctgagctgcctgagccccaccaagtggagcagtgtgagttctgcagacagcaccgagaagagcgcaagtggggccggtacccgaaatttacctttccaattctgtttgcgccaggcgctgagaatgaaggctgctggcattctgactctgattgggtgcctggtcactggtgcagaaagtaaaatctatacccggtgcaaactggccaagatcttcagtcgggctggcctggataattattggggatttagccttggaaattggatatgtatggcatactacgagagcggttataacaccaccgctcagaccgtgctggacgatggaagcatcgattacggcatcttccagattaattcatttgcatggtgtcggaggggtaagctcaaagagaacaaccactgtcacgtggcctgctccgcattaatcaccgacgacttgaccgatgccataatatgtgctcgcaaaatagtgaaagagactcaggggatgaattattggcagggctggaagaagcattgtgaaggacgcgacttaagcgaatggaagaagggttgtgaggtatcatag

SEQ ID NO: 224611 - RNA, 585 nt, Artificial Sequence
  derived and/or modified sequence
augcaggaugccccccuaaguuguuuauccccaacuaagugguccucuguaucaucagccgauucgaccgagaagucagccuccggggcaggcacaaggaaccugccuuuucaguuuugccucagacaagccuugagaaugaaagccgcuggcauucucacacucaucggcugucugguuacuggagccgaaagcaagauuuauaccagaugcaaacuggcuaaaaucuucucacgugcuggacuugacaauuacuggggauucucauugggcaauuggaucuguauggcuuacuaugagucaggcuacaacacgacggcgcagacuguacucgacgauggaucuauagacuacggcauauuucaaauuaacuccuucgcuuggugucgcagaggcaaacugaaggagaauaaucauugccacgucgcuugcuccgcucugauuacugacgaucuaacugaugcaauuauaugugcaagaaagauugugaaagagacgcaggggaugaacuauuggcagggguggaaaaagcauugcgaagggcgcgaucuuucagaguggaaaaaaggcugugaaguuuccuag

SEQ ID NO: 224612 - RNA, 585 nt, Artificial Sequence
  derived and/or modified sequence
augcaagacgcacccuugucauguuugaguccaacuaaauggucaucugucagcuccgcggacucuacugaaaaguccgcaaguggcgcuggaacucggaaccugcccuuccaguuuugccuccgucaagcguuacgaaugaaagccgcagguauccucacucuuauugguugucuugugaccggagccgagucaaaaaucuauacaagauguaagcuagcaaaaaucuucucucgagccggucuggacaauuacuggggcuuuucccugggaaauuggauuuguauggcguacuacgaaagugguuacaacacaacagcucaaacuguacucgacgacggcagcauagacuacggcaucuuucagauuaauagcuuugccuggugccgacgcgggaaacugaaagaaaauaaucacugucauguggcuuguucggcgcugauuacagaugaccugacagacgcuauaaucugcgcaagaaaaauugugaaggaaacacaagguaugaacuauuggcagggauggaaaaagcauugcgaaggaagagacuuguccgaauggaaaaaaggaugcgaggugagcuag

SEQ ID NO: 224613 - protein, 642 aa, Artificial Sequence
  derived and/or modified sequence
MLLKKHAGKGGGREPRSEDPTPAEQHCARTMPPCAVLAALLSVVAVVSCLYLGVKTNDLQARIAALESAKGAPSIHLLPDTLDHLKTMVQEKVERLLAQKSYEHMAKIRIAREAPSECNCPAGPPGKRGKRGRRGESGPPGQPGPQGPPGPKGDKGEQGDQGPRMVFPKINHGFLSADQQLIKRRLIKGDQGQAGPPGPPGPPGPRGPPGDTGKDGPRGMPGVPGEPGKPGEQGLMGPLGPPGQKGSIGAPGIPGMNGQKGEPGLPGAVGQNGIPGPKGEPGEQGEKGDAGENGPKGDTGEKGDPGSSAAGIKGEPGESGRPGQKGEPGLPGLPGLPGIKGEPGFIGPQGEPGLPGLPGTKGERGEAGPPGRGERGEPGAPGPKGKQGESGTRGPKGSKGDRGEKGDSGAQGPRGPPGQKGDQGATEIIDYNGNLHEALQRITTLTVTGPPGPPGPQGLQGPKGEQGSPGIPGMDGEQGLKGSKGDMGDPGMTGEKGGIGLPGLPGANGMKGEKGDSGMPGPQGPSIIGPPGPPGPHGPPGPMGPHGLPGPKGTDGPMGPHGPAGPKGERGEKGAMGEPGPRGPYGLPGKDGEPGLDGFPGPRGEKGDLGEKGEKVTSPSQHVPCLILLLLSALLFSLCDSI

SEQ ID NO: 224614 - DNA, 1929 bp, Artificial Sequence
  derived and/or modified sequence
atgctgctgaagaagcacgccggcaagggcggcggcagagagcccagaagcgaggaccccacccccgccgagcagcactgcgccagaaccatgcccccctgcgccgtgctggccgccctgctgagcgtggtggccgtggtgagctgcctgtacctgggcgtgaagaccaacgacctgcaggccagaatcgccgccctggagagcgccaagggcgcccccagcatccacctgctgcccgacaccctggaccacctgaagaccatggtgcaggagaaggtggagagactgctggcccagaagagctacgagcacatggccaagatcagaatcgccagagaggcccccagcgagtgcaactgccccgccggcccccccggcaagagaggcaagagaggcagaagaggcgagagcggcccccccggccagcccggcccccagggcccccccggccccaagggcgacaagggcgagcagggcgaccagggccccagaatggtgttccccaagatcaaccacggcttcctgagcgccgaccagcagctgatcaagagaagactgatcaagggcgaccagggccaggccggcccccccggcccccccggcccccccggccccagaggcccccccggcgacaccggcaaggacggccccagaggcatgcccggcgtgcccggcgagcccggcaagcccggcgagcagggcctgatgggccccctgggcccccccggccagaagggcagcatcggcgcccccggcatccccggcatgaacggccagaagggcgagcccggcctgcccggcgccgtgggccagaacggcatccccggccccaagggcgagcccggcgagcagggcgagaagggcgacgccggcgagaacggccccaagggcgacaccggcgagaagggcgaccccggcagcagcgccgccggcatcaagggcgagcccggcgagagcggcagacccggccagaagggcgagcccggcctgcccggcctgcccggcctgcccggcatcaagggcgagcccggcttcatcggcccccagggcgagcccggcctgcccggcctgcccggcaccaagggcgagagaggcgaggccggcccccccggcagaggcgagagaggcgagcccggcgcccccggccccaagggcaagcagggcgagagcggcaccagaggccccaagggcagcaagggcgacagaggcgagaagggcgacagcggcgcccagggccccagaggcccccccggccagaagggcgaccagggcgccaccgagatcatcgactacaacggcaacctgcacgaggccctgcagagaatcaccaccctgaccgtgaccggcccccccggcccccccggcccccagggcctgcagggccccaagggcgagcagggcagccccggcatccccggcatggacggcgagcagggcctgaagggcagcaagggcgacatgggcgaccccggcatgaccggcgagaagggcggcatcggcctgcccggcctgcccggcgccaacggcatgaagggcgagaagggcgacagcggcatgcccggcccccagggccccagcatcatcggcccccccggcccccccggcccccacggcccccccggccccatgggcccccacggcctgcccggccccaagggcaccgacggccccatgggcccccacggccccgccggccccaagggcgagagaggcgagaagggcgccatgggcgagcccggccccagaggcccctacggcctgcccggcaaggacggcgagcccggcctggacggcttccccggccccagaggcgagaagggcgacctgggcgagaagggcgagaaggtgaccagccccagccagcacgtgccctgcctgatcctgctgctgctgagcgccctgctgttcagcctgtgcgacagcatctag

SEQ ID NO: 224615 - DNA, 1752 bp, Artificial Sequence
  derived and/or modified sequence
atgctgctgaagaagcacgccggcaagggcggcggcagagagcccagaagcgaggaccccacccccgccgagcagcactgcgccagaaccatgcccccctgcgccgtgctggccgccctgctgagcgtggtggccgtggtgagctgcctgtacctgggcgtgaagaccaacgacctgcaggccagaatcgccgccctggagagcgccaagggcgcccccagcatccacctgctgcccgacaccctggaccacctgaagaccatggtgcaggagaaggtggagagactgctggcccagaagagctacgagcacatggccaagatcagaatcgccagagaggcccccagcgagtgcaactgccccgccggcccccccggcaagagaggcaagagaggcagaagaggcgagagcgccggcccccccggcggcccccccggccccaagggcgacaagggcgagcagggcgaccagggccccagaatggtgttccccaagatcaaccacggcttcctgagcgccgaccagcagctgatcaagagaagactgatcaagggcgaccagggccaggccggcccccccggcccccccggcccccccggccccagaggcccccccggcgacaccggcaaggacggccccagaggcatgcccggcgtgcccggcgagcccggcaagcccggcgagcagggcctgatgggccccctgggcccccccggccagaagggcagcatcggcgcccccggcatccccggcatgaacggccagaagggcgagcccggcctgcccggcgccgtgggccagaacggcatccccggccccaagggcgagcccggcgagcagggcgagaagggcgacgccggcgagaacggccccaagggcgacaccggcgagaagggcgaccccggcagcagcgccgccggcatcaagggcgagcccggcgagagcggcagacccggccagaagggcgagcccggcttcatcggcccccagggcgagcccggcctgcccggcctgcccggcaccaagggcgagagaggcgaggccggcccccccggcagaggcgagagaggcgagcccggcgcccccggccccaagggcaagcagggcgagagcggcaccagaggccccaagggcagcaagggcgacagaggcgagaagggcgacagcggcgcccagggccccagaggcccccccggccagaagggcgaccagggcgccaccgagatcatcgactacaacggcaacctgcacgaggccctgcagagaatcaccaccctgaccgtgaccggcccccccggcccccccggcccccagggcctgcagggccccaagggcgagcagggcagccccggcatccccggcatggacggcgagcagggcctgaagggcagcaagggcgacatgggcgaccccggcatgaccggcgagaagggcggcatcggcctgcccggcctgcccggcgccaacggcatgaagggcgagaagggcgacagcggcatgcccggcccccagggccccagcatcatcggcccccccggcccccccggcccccacggcccccccggccccatgggcccccacggcctgcccggccccaagggcaccgacggccccatgggcccccacggccccgccggccccaagggcgagagaggcgagaagggcgccatgggcgagcccggccccagaggcccctacggcctgccccagggccccgacggcctgcccatgcccggctgctggcagaagtag

SEQ ID NO: 224616 - DNA, 1929 bp, Artificial Sequence
  derived and/or modified sequence
atgcttctgaagaagcacgccgggaaaggtggcggccgggagcccaggtctgaggaccccaccccggcagaacaacattgtgccaggaccatgcctccttgcgccgtgctggcggccctgctctccgtcgttgctgttgtgtcgtgcctctacttaggtgtcaagacaaacgatctccaggcccgaatcgccgccttggagagtgccaagggagccccatctatacacctcctgcctgacaccctagaccatcttaagacaatggtgcaggagaaagtcgagcgcctgttggctcagaaaagctacgagcacatggccaagattcgcatcgcaagagaagctccttccgagtgtaattgccctgccggaccaccaggtaaacgcggcaaacgtggacgacgcggagaaagcggtccccccggccaacccgggccccaggggcccccaggacctaagggagataaaggggaacagggggatcagggccctcgcatggtgttcccaaaaatcaatcatggcttcctgagcgccgatcaacagttgatcaaaagaaggctgattaagggtgaccaaggccaagctggcccaccaggtcctcccggtcctccgggaccaaggggcccaccaggggacaccggtaaggacggaccaagaggtatgccaggggtgccgggcgagcctggtaagcctggcgaacaaggactgatggggcccctaggtccccccggacagaaagggtcaatcggcgcgcccggcattcccggaatgaacgggcagaagggcgagccaggattgcctggcgctgtaggccagaatggtatccctggtcccaagggcgagccaggtgagcagggggagaagggcgacgcgggggagaatggccccaaaggggacaccggagagaagggcgatcctggttcctcggccgccggtattaagggagagcctggggagtcaggcaggcctggtcagaagggagagccaggcttacctggactcccggggttacctggtattaaaggcgagccaggctttataggccctcaaggcgagccgggtctcccaggtctaccaggtaccaagggggagcgaggggaagcaggcccccccggacggggagagagaggagaaccaggggcaccaggcccaaaaggcaagcagggagagtctggcacacgtggccccaagggctccaagggggatcgcggggagaagggtgattcaggagcacagggacctcgggggccaccagggcagaaaggagatcagggtgctacagagatcattgattataatggaaatctgcatgaagctttgcagagaataacaaccctgaccgttaccggacccccaggcccgcccgggcctcagggactccagggccctaagggtgaacaagggtcgcctggcattcctggcatggacggggaacagggtctgaagggtagcaaaggcgatatgggggaccctggaatgacaggggagaaggggggaatcggcttacccggtctgcctggagcaaacgggatgaaaggggaaaagggggacagcggcatgcccggcccacaggggccctcaatcatcgggccacctggccctcccggtccacacggcccaccaggacctatggggccccatgggctgcccgggccaaagggcacagatggcccaatggggccccatggccccgccggaccaaaaggggagagaggggaaaagggtgcaatgggagagccaggacctaggggaccctacggtctgcccggaaaagatggtgagcctggtttggatgggttccctggcccaagaggggagaaaggagatctgggcgagaagggtgaaaaggtcacgagcccctctcagcacgttccttgtctcattcttttgctactgagcgcgctgttattttccctgtgcgatagcatttag

SEQ ID NO: 224617 - DNA, 1752 bp, Artificial Sequence
  derived and/or modified sequence
atgttactgaaaaaacatgcggggaaaggcggcggaagagagcctcggtccgaagaccccacccctgcagagcagcactgtgctaggactatgccaccttgcgcagtgctcgccgccctgttgagcgtcgtagcagtggtgtcatgtctatacctgggggtgaagactaacgatctgcaggctcgaatagcagcactcgagtccgcaaagggagcccctagcatccatctgctccccgataccctggaccacctgaagaccatggtgcaggagaaagttgagcgcctcctggcgcagaagtcatatgagcacatggccaaaatccgaatagcacgggaggctccctctgaatgtaattgtccagctggcccgccagggaagagaggcaaaaggggacggaggggcgagagcgcggggcccccgggaggcccccccggacccaaaggggacaagggcgagcagggggatcagggccctaggatggtgttcccaaagatcaatcatggatttttatcagctgaccagcaactgataaagaggagactgatcaaaggagatcagggacaggcaggaccccccggccccccaggaccacctggaccccgtggccccccaggcgacaccggcaaagacgggccccgtgggatgcctggtgttccaggtgagcctgggaaacctggggaacaggggcttatggggccactgggaccaccagggcaaaagggctccataggtgcacccggtatccctgggatgaacgggcagaaaggagagcctgggttgccgggggctgttggccagaacgggatcccaggccccaaaggcgaaccaggcgaacaaggcgaaaaaggcgacgcaggggagaacgggcctaaaggcgatacaggggaaaagggtgatccagggagcagcgcagcgggcatcaaaggggagcccggcgaaagtggtcgccccggtcagaaaggcgagcccggatttatagggccccagggcgagccagggcttcccggactcccggggactaagggcgaaagaggcgaggctgggcccccgggccgcggagagcgaggagagccaggcgctcccggtcccaaaggaaagcagggagagtctgggactagagggcctaaaggctccaagggcgataggggcgaaaagggcgactctggagcccaagggcccagagggccaccgggccagaaaggcgaccagggcgccacggagatcatagactataatggaaatttgcatgaggccctgcagcgcatcaccacattgacagtcaccgggccaccaggcccaccaggcccccaaggcctgcagggccccaagggtgaacagggctcaccaggtattcccgggatggatggcgagcagggtcttaaaggttctaagggtgatatgggggacccgggtatgactggagagaaggggggtattggtttacccggacttccaggtgccaacggtatgaagggggagaagggcgacagcggtatgccagggcctcagggaccatcaattattggacctcctggccccccaggcccccatgggccgccggggcctatgggcccacacgggttacccgggcccaaggggaccgacgggccgatgggcccacacgggcccgcagggccaaagggcgagaggggcgagaagggcgcgatgggcgaaccaggaccgaggggtccttatggcctcccacagggccccgatggactccccatgccgggatgttggcaaaagtag

SEQ ID NO: 224618 - DNA, 1929 bp, Artificial Sequence
  derived and/or modified sequence
atgctgctgaagaagcatgctggaaaaggaggcggccgggagcccaggtctgaggaccccaccccagctgagcagcactgtgcccggaccatgccaccctgtgctgtgctggccgccctgctgtctgtggtggccgtggtgtcctgcctgtacctgggcgtgaagaccaatgacctgcaggccagaattgctgccctggagagcgccaagggggcccccagcatccacctgctgcctgacaccctggaccacctgaagaccatggtgcaggagaaggtggagcggctgctggcccagaagagctatgagcacatggccaagatccgcatcgcccgggaggcccccagcgagtgcaactgcccagctggccccccaggcaagaggggcaagagaggaagaagaggagagagcggccccccaggccagcccggcccccagggccccccaggccccaagggggacaagggggagcagggcgaccagggccccaggatggtgttccccaagatcaaccacggcttcctgtctgctgaccagcagctgatcaagaggaggctcatcaagggggaccagggccaggccggccccccaggccccccaggccccccaggcccccggggccccccaggggacaccgggaaggatggcccccggggcatgcctggggtgcctggagagcccgggaagccaggagagcagggcctgatgggccccctgggccccccaggccagaagggcagcatcggggcccctggcatccctggcatgaatggccagaagggggagcccggcctgcccggggctgtgggccagaatggcatccctggccccaagggggagcctggagagcagggcgagaagggagatgctggggagaatggccccaagggggacacaggagagaagggggaccccggcagcagcgctgctggcatcaagggggagcccggggagagcggccggcccggccagaagggggagcccggcctgcccggcctgcccggcctgcccggcatcaagggggagcccggcttcatcggcccccagggcgagcccggcctgcccggcctgcccggcaccaagggggagcggggggaggccggccccccaggccgcggggagcggggggagcccggggcccctggccccaagggcaagcagggcgagagcggcacccggggccccaagggcagcaaaggagacagaggagagaagggggacagcggggcccagggcccccggggccccccaggccagaagggggaccagggcgccacagagatcatcgactacaacggcaacctgcacgaggccctgcagaggatcaccaccctgactgtgacaggccccccaggccccccaggcccccagggcctgcagggccccaagggggagcagggcagccctggcatccctggcatggatggagagcagggcctgaagggcagcaagggggacatgggagaccccggcatgactggagagaagggcggcatcggcctgcccggcctgcccggggccaacggcatgaagggggagaagggggacagcggcatgcctggcccccagggccccagcatcatcggccccccaggccccccaggcccccacggccccccaggccccatgggcccccacggcctgcccggccccaagggcacagatggccccatgggcccccacggccctgctggccccaagggggagcggggggagaagggggccatgggagagcccggcccccggggcccctacggcctgcccgggaaggatggagagcccggcctggatggcttccctggccccagaggagagaagggggacctgggggagaagggggagaaggtgaccagccccagccagcacgtgccctgcctgatcctgctgctgctgagcgccctgctcttcagcctgtgtgacagcatctag

SEQ ID NO: 224619 - DNA, 1752 bp, Artificial Sequence
  derived and/or modified sequence
atgctgctgaagaagcatgctggaaaaggaggcggccgggagcccaggtctgaggaccccaccccagctgagcagcactgtgcccggaccatgccaccctgtgctgtgctggccgccctgctgtctgtggtggccgtggtgtcctgcctgtacctgggcgtgaagaccaatgacctgcaggccagaattgctgccctggagagcgccaagggggcccccagcatccacctgctgcctgacaccctggaccacctgaagaccatggtgcaggagaaggtggagcggctgctggcccagaagagctatgagcacatggccaagatccgcatcgcccgggaggcccccagcgagtgcaactgcccagctggccccccaggcaagaggggcaagagaggaagaagaggagagagcgctggccccccaggcggccccccaggccccaagggggacaagggggagcagggcgaccagggccccaggatggtgttccccaagatcaaccacggcttcctgtctgctgaccagcagctgatcaagaggaggctcatcaagggggaccagggccaggccggccccccaggccccccaggccccccaggcccccggggccccccaggggacaccgggaaggatggcccccggggcatgcctggggtgcctggagagcccgggaagccaggagagcagggcctgatgggccccctgggccccccaggccagaagggcagcatcggggcccctggcatccctggcatgaatggccagaagggggagcccggcctgcccggggctgtgggccagaatggcatccctggccccaagggggagcctggagagcagggcgagaagggagatgctggggagaatggccccaagggggacacaggagagaagggggaccccggcagcagcgctgctggcatcaagggggagcccggggagagcggccggcccggccagaagggggagcccggcttcatcggcccccagggcgagcccggcctgcccggcctgcccggcaccaagggggagcggggggaggccggccccccaggccgcggggagcggggggagcccggggcccctggccccaagggcaagcagggcgagagcggcacccggggccccaagggcagcaagggggacagaggagagaagggggacagcggggcccagggcccccggggccccccaggccagaagggggaccagggcgccacagagatcatcgactacaatggaaacctgcacgaggccctgcagaggatcaccaccctgactgtgactggacctcctggccccccaggcccccagggcctgcagggccccaagggggagcagggcagccctggcatccctggcatggatggagagcagggcctgaagggcagcaaaggagacatgggagaccccggcatgaccggggagaagggcggcatcggcctgcccggcctgcccggggccaacggcatgaagggggagaagggggacagcggcatgcctggcccccagggccccagcatcatcggccccccaggccccccaggcccccacggccccccaggccccatgggcccccacggcctgcccggccccaagggcacagatggccccatgggcccccacggccctgctggccccaagggggagcggggggagaagggggccatgggagagcccggcccccggggcccctacggcctgccccagggcccagatggcctgcccatgcctggctgctggcagaagtag

SEQ ID NO: 224620 - DNA, 1929 bp, Artificial Sequence
  derived and/or modified sequence
atgctgctgaagaagcacgccggcaagggcggcggccgggagccccgcagtgaagatccaacacccgcagagcagcattgtgcgcggactatgcccccgtgcgcagtcctagccgcactgttgagtgtcgtcgcagttgtcagctgcttgtacctaggtgtcaaaaccaacgatcttcaggcgagaatcgcagccctggaatccgcgaaaggggctccttctattcatctgctgccagataccctcgaccacctgaagacgatggttcaggagaaagtggagaggcttctggctcagaaatcctacgaacacatggccaagattaggattgctcgagaagctccttccgagtgcaattgccctgccggaccacctgggaagcgcgggaaacgcgggcggagaggcgagagcggaccaccaggacaacctgggccccagggacccccagggcccaagggcgataagggagagcaaggcgaccaaggcccacggatggtatttcccaagattaaccatggatttttaagcgccgaccaacagttaatcaagaggaggctgattaagggggaccagggacaagccggaccaccgggaccaccagggccacctggacctagaggacctccaggagacacagggaaggacgggccccggggaatgcccggtgtccctggtgaacctggcaagcctggggagcaaggccttatggggcccctggggcccccaggacagaaaggatcaataggagccccgggcatcccggggatgaatggccagaagggggaaccgggattaccaggcgccgtcgggcagaatggaataccaggcccaaagggcgaacccggcgagcagggggagaagggagacgccggagaaaatggacctaaaggcgataccggcgaaaagggggatccgggatcgtctgctgcgggtatcaaaggggaaccgggtgaaagcgggaggccaggtcagaaaggagaaccaggtctcccaggcctgcctggccttcctggcataaaaggtgaacccgggtttattggtccacagggggaacccggcttgcctggcctacccggaactaaaggggagcggggtgaggccgggccacccggacggggtgaacgcggagagccaggggctcctggtcccaagggcaagcaaggagaaagtggaacccgcggccctaagggctcgaagggagatcggggggagaaaggagacagcggcgcccagggcccccggggcccacccggtcagaaaggagatcagggggctactgagattattgattacaacggaaatttacacgaggctcttcagaggatcacaacattaacggtgactggtcctcctggaccaccagggccccaggggttgcagggaccaaagggagagcaggggtcccctggaattcctggtatggatggcgagcagggcctgaagggcagcaagggcgatatgggagatcctggtatgacaggcgagaaaggaggcatcggtctgcccggattaccaggcgccaacggaatgaagggggagaaaggcgattccggaatgcccggtccgcaaggccccagtatcattggcccgcctgggccccctgggcctcatggtccgcccggacccatggggcctcacggactgcccggccccaaagggacggatggtccgatgggaccccacggaccagcagggcccaagggagagaggggggaaaaaggcgccatgggggaaccagggccacgcggaccctacgggctgcccggtaaggatggagagcctggtctcgatgggttccccggacctagaggagagaagggggatctgggtgagaagggggagaaggtaacctccccatcccagcacgtgccatgcttaattctgctgctgctgagtgctcttctgttctccttatgcgattctatctag

SEQ ID NO: 224621 - DNA, 1752 bp, Artificial Sequence
  derived and/or modified sequence
atgctgctgaagaagcacgccggcaagggcggcggccgggagccccgcagcgaagatccgacacccgctgagcagcattgtgctcgcacaatgcccccttgcgcagtgctggcggcactgctgagcgtggtggccgttgttagctgcttatacctgggggtaaagactaacgatctgcaggcccgcattgcggctctggagtctgccaaaggggccccttccattcacctcttaccggataccctcgaccacctcaagactatggtgcaagagaaggtcgaacggctacttgcccagaagtcatatgagcatatggcaaagatccgaatagcccgggaggccccaagtgagtgcaattgtcctgctggcccaccgggaaaacgcggcaagcgtgggcgtagaggagaatccgccgggcccccaggcggcccgcccgggcctaaaggagacaagggcgagcagggagaccagggtcccaggatggtgttccccaagattaatcacggcttcctctccgcggaccaacagctcatcaagcgcaggctcattaagggggaccaggggcaggcaggaccccccgggcctccaggaccacccgggccccggggcccccctggcgacacaggcaaggacgggccacggggaatgccaggggtcccaggagagccaggcaaacccggtgagcagggcctgatggggcctctgggacctccagggcagaagggcagcattggggctcccggtataccaggaatgaatgggcagaaaggggagcccggattacctggcgcggtcggccagaacgggatcccagggcccaagggagaacccggtgaacagggggaaaaaggcgatgccggggaaaacgggcccaagggggatacaggagagaaaggcgacccggggagtagtgcagccggtattaaaggcgagcctggcgagtcaggtcgccccggccagaagggagagcctggtttcataggacctcaaggtgagcctggcttaccaggcttacccggtaccaagggggagcgtggagaggcaggccccccagggagaggagagagaggggagcctggagctccaggtcccaaaggcaagcagggagaatcaggcaccagaggcccgaaagggtcaaagggcgacaggggggagaaaggcgacagcggggcccagggcccgcgaggtcccccaggacagaaaggcgaccagggcgccactgaaatcattgactataacggaaatctgcatgaagccctgcagcgcattactacactcacggttacaggtcccccgggcccccctgggccccaagggctacagggcccaaagggtgagcagggctcacccggcatccctggaatggatggcgaacagggactcaagggctccaagggagacatgggagatcccggtatgactggcgaaaaagggggtattggcctgccaggactgccgggagccaacggaatgaagggggaaaagggcgatagcggaatgcctggtccccagggaccctcaataatcggacccccaggccctcccggacctcacggacctccaggccctatgggtccacatgggttaccgggccccaaaggaacggacggccccatgggcccccatgggcccgcagggcccaagggagaaagaggggaaaagggagccatgggagaacctggtccaagaggtccatatggcctgccccaggggcccgacgggctccccatgcctgggtgttggcagaaatag

SEQ ID NO: 224622 - DNA, 1929 bp, Artificial Sequence
  derived and/or modified sequence
atgctactaaaaaaacatgctgggaaaggcggaggtcgtgagccccgttccgaggaccctactcccgcagagcagcactgtgctaggaccatgcctccttgcgccgtgctagcagcactcctatccgtggttgccgtggtctcctgcctatacctcggcgttaaaacaaacgatctccaagctcgcattgccgcactggaaagcgcgaagggagcaccctcaatacacctgctgcccgacactttggatcaccttaaaaccatggtgcaagagaaggtagagagactcctggcccaaaaatcgtatgaacacatggccaagattcggatagccagggaggctccctctgaatgtaactgtccagccggacctccagggaagagagggaagcggggaaggcgcggagagtctggccctccaggacagcccggacctcaggggcctcctggaccgaagggtgataagggggagcagggtgaccagggccctcggatggtgtttccgaaaattaaccacggcttcctttccgccgatcaacaactgatcaaacggaggctaattaagggcgaccaagggcaggcgggaccacctggtcccccaggtccccctggacctagggggccacctggagatacagggaaagatggtccaagaggtatgccaggggtgcccggagagccaggtaagcctggggaacaaggactcatgggccctttaggaccccctggccagaaaggcagtattggcgctccagggattcccggaatgaatggccagaagggtgagcccggactccccggagcagtgggccagaatgggatcccaggtcccaaaggcgagccgggagaacaaggggaaaaaggagatgcaggcgagaatggtcccaagggcgacacaggcgaaaagggcgaccctggcagttcagcggctggcattaagggcgagcctggagagtcagggaggccagggcaaaaaggtgaaccaggactgcccggtctgccgggtctgccagggattaagggggaacctggttttatcggccctcagggcgagccaggcctcccaggactgcctggtactaaaggagaacggggagaagctggaccacccggacgcggagagcgaggcgaacctggggcacctggccctaagggcaaacagggcgagtccggaacccgaggtcctaagggatcaaagggtgaccgcggtgaaaaaggagacagcggcgctcaaggacccagggggccacccggacaaaaaggtgaccagggtgcaaccgaaatcatcgattacaacggaaacctacacgaagctctgcagaggatcaccactctgacagttaccggccctcccggtccccctggccctcaagggctccaaggtccgaaaggcgagcagggaagtcccggaatccccggtatggatggagaacagggtctgaaagggtccaaaggggatatgggggatcccggaatgactggagaaaagggtggaatcgggttgcccggtcttcctggcgctaacggcatgaaaggcgaaaaaggcgactccggaatgccaggcccacaaggcccatcgatcattggccctcccggacctccagggcctcacggtccccctggtccgatgggccctcatggccttccgggacctaaaggaacagacggccctatgggtccacacggtccggctggaccgaaaggcgaacgaggggaaaagggagctatgggagaacctggtcctcgcggaccatatggtttaccgggaaaggatggtgagcccggtctggatgggttccctggtccaagaggcgagaagggcgatctcggggagaagggggaaaaagtgacctccccttctcagcatgtgccctgtctgattttactgttgctctccgcgctacttttcagcctctgcgatagtatctag

SEQ ID NO: 224623 - DNA, 2674 bp, Artificial Sequence
  derived and/or modified sequence
ccgcgacttcggcttcgcgagtagcattggttccttgggtttatttcgttttcctctctcttctccaccttagtcgcccctttcgcgctgcgctgtagcgtgctctcacagcctttttgccttgaactgaatgcaggtgggaaacaggtcggcgtgccgaaagacaccgagtaggtagaaataaggcaaactcacagaggcgcaacaggtccggtcctccgtggccagggcgagccgcggccccgcgtggcgcctcggccgttgccctcggaccctgagcggccactgttggggccctcgaaagaggtgtcggtcctctgggagtcggaagagctgtctgggtgggtttcgtcttgctttttaccccaccgccacccagtccccggacggagggtgcttttcacttccagctgggaggagagaagaaagcggggatggtgcacgcctgcgggtctggacgctgagcaaggcaggggattatttgaggtgtagagggtgggaagcgaagccgagacggccgaccccgccacgatgctgctgaagaagcacgcagggaaaggagggggccgggagcccagatccgaggacccgacccctgccgaacagcattgtgcccggaccatgcccccgtgtgccgtcctggcggccctcctgtcagtggtggccgtggtgtcttgcctgtacctgggtgtgaaaaccaacgacctccaggcgaggatcgccgctctcgaatccgccaaaggggccccttccattcatctgctgcctgataccctggatcacctcaagactatggtgcaagagaaagtggagcgacttctggctcagaaatcctatgaacatatggctaaaataagaatcgcaagagaagcaccttcagaatgtaactgcccagcaggccctccagggaaacgaggtaagagaggccgaagaggagaatctggtcctcctggacagcctggtcctcagggccctcctggtccaaaaggcgataagggagaacaaggtgatcagggacctaggatggtgtttcctaaaatcaatcatgggtttctctctgctgatcagcagctcattaaacgccgcctgattaagggtgaccaaggacaggcagggcctccaggaccccctggccctccaggcccaagagggccacctggggacacagggaaagatggcccccgtggaatgccaggagtacccggtgaaccaggaaagccaggagaacaaggcttgatgggtcctctagggcctccgggacaaaagggttctattggagcacctggaattccagggatgaatgggcaaaagggtgagcccgggttgcctggagcagtaggacagaatggaataccaggacctaagggagaacctggagaacaaggtgaaaagggagacgctggagagaacggccccaagggtgacacaggcgaaaagggtgaccctggatcatctgctgcaggaattaagggagaacctggggaatctggtcgtccagggcaaaagggtgaaccagggcttcctgggcttcctggacttccggggataaagggagaaccaggtttcattggtcctcaaggagaaccaggcttaccaggtttaccaggaacaaaaggtgaacggggggaagcagggcctcctggaagaggtgagcgaggggaacctggagcccccggaccaaaggggaaacaaggtgaatcaggaactagaggcccaaaggggtcaaagggggatcgtggagaaaaaggggactctggagctcagggaccaaggggtccacctggtcaaaaaggggatcaaggagccactgagatcatagactacaacggcaacctccacgaagccttacagaggattaccaccttaactgtcacgggtccccctggacctcctggacctcaaggactacaagggccaaagggagagcagggatctccaggaatcccaggaatggatggagagcagggactcaaaggctcaaagggagacatgggggacccaggtatgacaggtgaaaaaggaggaattggacttcctggattaccgggagccaatggaatgaaaggagaaaaaggagattctggaatgccgggtccacagggtccttctatcataggcccaccaggcccaccaggtccccatggcccacctggccccatgggacctcatggacttcctggaccaaagggtacagatggtcctatgggaccccatggccctgcaggtcccaaaggagaaagaggtgaaaaaggagctatgggagagcctggaccaagagggccctatgggctgcctgggaaagatggagagcctggtcttgatggcttccctggtccacggggtgagaagggtgatctaggagaaaagggagaaaaggtgacctctccatcccagcatgtaccttgtttgattcttctcctgctgtctgctttgctgttcagcttgtgtgattccatttgacacttaatctttctccatcctgtgctccaaaaacatactgatgcctgatttaaggaatcaggtcttcagagaggaatgaagaaggctgtactgccagatataagggcactgcctggcatagaagaaaaaattattatcaccagatattctagctacagtttttcaaccacctgacaccaatttatggaaaaataaaggatttttgaaaaaaaaa

SEQ ID NO: 224624 - DNA, 1752 bp, Artificial Sequence
  derived and/or modified sequence
atgctgctcaagaaacatgcgggaaaaggaggcggacgagaaccaagatccgaggatcctacccctgcagaacagcactgtgcacggaccatgccaccttgcgccgtcctggctgctctgctgtcggtcgtcgccgttgtgtcttgcctttatctgggcgtgaaaaccaatgacctgcaggcacgcatcgctgcgctcgagtccgccaagggcgcacctagcatccatttgctgcctgacactttggatcacctgaaaacaatggttcaggagaaagtcgaacggttgctggctcagaagtcctatgaacacatggcaaaaatcagaatcgcccgagaagctccatccgagtgcaattgtccagcaggccctcccggaaagcgcggaaaaaggggcaggcggggtgagtccgctggcccaccgggtggtcccccaggtcctaaaggagataagggcgagcaaggagatcaagggccacgaatggtgtttcctaaaatcaatcacggatttctgtccgccgatcagcagctaattaagaggcggctaattaaaggggaccagggacaggccggtccacctggaccccctgggccacctggcccacggggacctccaggggatacgggcaaagacggtcccagaggcatgcctggcgtgcctggcgagcctggcaagccaggggagcagggtttaatggggccactgggtcctcctggccagaaagggtctatcggagcccctggaatccccggaatgaatggccagaaaggagagcctggccttccaggcgctgttggccagaacggcatcccaggcccaaaaggggagccaggcgagcagggtgaaaagggcgatgcaggtgaaaatggtcctaagggcgacaccggagagaaaggtgaccccggaagctcagctgccggaatcaaaggcgagcccggtgagtccggcaggcctggccaaaagggcgaacccggatttattggaccacagggcgagcccggtctccctggattgccaggaaccaagggcgagcgtggcgaagctggaccacccggaagaggagagcgtggggaaccaggtgctcccggtccaaaaggaaaacagggcgagtccggcactcggggtccgaaggggtcaaaaggagatagaggtgagaagggagatagcggggcacaggggcctaggggcccaccgggacagaaaggggaccagggcgctacggaaattatcgattacaatggcaacctgcatgaggcgctgcagagaataaccactctgactgttacgggtcccccaggccctcctggccctcaagggttgcaagggccaaaaggggagcagggcagtcctggtattccagggatggatggcgagcagggtctgaagggatccaaaggcgacatgggcgatccaggaatgactggagagaaaggaggcatcggactccccggactcccgggagccaatgggatgaagggcgagaagggtgattccggaatgccagggcctcagggtccatcaattatcggaccccctgggcctccgggaccccacggtccacccggaccaatgggacctcatggcctcccaggacctaaaggaaccgatggacccatggggcctcatggtcccgctggcccaaagggggagcgtggtgagaagggtgctatgggcgaaccgggaccaagaggcccttatggcttgccacaaggcccagatgggctgcccatgccaggctgttggcaaaaatag

SEQ ID NO: 224625 - DNA, 1749 bp, Artificial Sequence
  derived and/or modified sequence
atgctgctgaagaagcacgcagggaaaggagggggccgggagcccagatccgaggacccgacccctgccgaacagcattgtgcccggaccatgcccccgtgtgccgtcctggcggccctcctgtcagtggtggccgtggtgtcttgcctgtacctgggtgtgaaaaccaacgacctccaggcgaggatcgccgctctcgaatccgccaaaggggccccttccattcatctgctgcctgataccctggatcacctcaagactatggtgcaagagaaagtggagcgacttctggctcagaaatcctatgaacatatggctaaaataagaatcgcaagagaagcaccttcagaatgtaactgcccagcaggccctccagggaaacgaggtaagagaggccgaagaggagaatctgctgggccgccagggggccctcctggtccaaaaggcgataagggagaacaaggtgatcagggacctaggatggtgtttcctaaaatcaatcatgggtttctctctgctgatcagcagctcattaaacgccgcctgattaagggtgaccaaggacaggcagggcctccaggaccccctggccctccaggcccaagagggccacctggggacacagggaaagatggcccccgtggaatgccaggagtacccggtgaaccaggaaagccaggagaacaaggcttgatgggtcctctagggcctccgggacaaaagggttctattggagcacctggaattccagggatgaatgggcaaaagggtgagcccgggttgcctggagcagtaggacagaatggaataccaggacctaagggagaacctggagaacaaggtgaaaagggagacgctggagagaacggccccaagggtgacacaggcgaaaagggtgaccctggatcatctgctgcaggaattaagggagaacctggggaatctggtcgtccagggcaaaagggagaaccaggtttcattggtcctcaaggagaaccaggcttaccaggtttaccaggaacaaaaggtgaacggggggaagcagggcctcctggaagaggtgagcgaggggaacctggagcccccggaccaaaggggaaacaaggtgaatcaggaactagaggcccaaaggggtcaaagggggatcgtggagaaaaaggggactctggagctcagggaccaaggggtccacctggtcaaaaaggggatcaaggagccactgagatcatagactacaacggcaacctccacgaagccttacagaggattaccaccttaactgtcacgggtccccctggacctcctggacctcaaggactacaagggccaaagggagagcagggatctccaggaatcccaggaatggatggagagcagggactcaaaggctcaaagggagacatgggggacccaggtatgacaggtgaaaaaggaggaattggacttcctggattaccgggagccaatggaatgaaaggagaaaaaggagattctggaatgccgggtccacagggtccttctatcataggcccaccaggcccaccaggtccccatggcccacctggccccatgggacctcatggacttcctggaccaaagggtacagatggtcctatgggaccccatggccctgcaggtcccaaaggagaaagaggtgaaaaaggagctatgggagagcctggaccaagagggccctatgggctgcctcaggggccagatggcttacccatgcctggctgttggcaaaag

SEQ ID NO: 224626 - protein, 305 aa, Artificial Sequence
  derived and/or modified sequence
MAAGLARLLLLLGLSAGGPAPAGAAKMKVVEEPNAFGVNNPFLPQASRLQAKRDPSPVSGPVHLFRLSGKCFSLVESTYKYEFCPFHNVTQHEQTFRWNAYSGILGIWHEWEIANNTFTGMWMRDGDACRSRSRQSKVELACGKSNRLAHVSEPSTCVYALTFETPLVCHPHALLVYPTLPEALQRQWDQVEQDLADELITPQGHEKLLRTLFEDAGYLKTPEENEPTQLEGGPDSLGFETLENCRKAHKELSKEIKRLKGLLTQHGIPYTRPTETSNLEHLGHETPRAKSPEQLRGDPGLRGSL

SEQ ID NO: 224627 - DNA, 1255 bp, Artificial Sequence
  derived and/or modified sequence
ccacttccggtccccgtggtcacgtgaccgtcacttcacgtgaccgcgcggcggccgctgcggcgcgatggcggcggggctggcgcggctcctgttgctcctcgggctctcggccggcgggcccgcgccggcaggtgcagcgaagatgaaggtggtggaggagcccaacgcgtttggggtgaacaacccgttcttgcctcaggccagtcgcctccaggccaagagggatccttcacccgtgtctggacccgtgcatctcttccgactctcgggcaagtgcttcagcctggtggagtccacgtacaagtatgagttctgcccgttccacaacgtgacccagcacgagcagaccttccgctggaacgcctacagtgggatcctcggcatctggcacgagtgggagatcgccaacaacaccttcacgggcatgtggatgagggacggtgacgcctgccgttcccggagccggcagagcaaggtggagctggcgtgtggaaaaagcaaccggctggcccatgtgtccgagccgagcacctgcgtctacgcgctgacgttcgagacccccctcgtctgccacccccacgccttgctagtgtacccaaccctgccagaggccctgcagcggcagtgggaccaggtagagcaggacctggccgatgagctgatcaccccccagggccatgagaagttgctgaggacactttttgaggatgctggctacttaaagaccccagaagaaaatgaacccacccagctggagggaggtcctgacagcttggggtttgagaccctggaaaactgcaggaaggctcataaagaactctcaaaggagatcaaaaggctgaaaggtttgctcacccagcacggcatcccctacacgaggcccacagaaacttccaacttggagcacttgggccacgagacgcccagagccaagtctccagagcagctgcggggtgacccaggactgcgtgggagtttgtgaccttgtggtgggagagcagaggtggacgcggccgagagccctacagagaagctggctggtaggacccgcagggaccagctgaccaggcttgtgctcagagaagcagacaaaacaaagattcaaggttttaattaattcccatactgataaaaataactccatgaattctgtaaaccattgcataaatgctatagtgtaaaaaaatttaaacaagtgttaactttaaacagttcgctacaagtaaatgattataaatactaaaaaaaaaaa

SEQ ID NO: 224628 - DNA, 1221 bp, Artificial Sequence
  derived and/or modified sequence
tgaccgtcacttcacgtgaccgcgcggcggccgctgcggcgcgatggcggcggggctggcgcggctcctgttgctcctcgggctctcggccggcgggcccgcgccggcaggtgcagcgaagatgaaggtggtggaggagcccaacgcgtttggggtgaacaacccgttcttgcctcaggccagtcgcctccaggccaagagggatccttcacccgtgtctggacccgtgcatctcttccgactctcgggcaagtgcttcagcctggtggagtccacgtacaagtatgagttctgcccgttccacaacgtgacccagcacgagcagaccttccgctggaacgcctacagtgggatcctcggcatctggcacgagtgggagatcgccaacaacaccttcacgggcatgtggatgagggacggtgacgcctgccgttcccggagccggcagagcaaggtggagctggcgtgtggaaaaagcaaccggctggcccatgtgtccgagccgagcacctgcgtctacgcgctgacgttcgagacccccctcgtctgccacccccacgccttgctagtgtacccaaccctgccagaggccctgcagcggcagtgggaccaggtagagcaggacctggccgatgagctgatcaccccccagggccatgagaagttgctgaggacactttttgaggatgctggctacttaaagaccccagaagaaaatgaacccacccagctggagggaggtcctgacagcttggggtttgagaccctggaaaactgcaggaaggctcataaagaactctcaaaggagatcaaaaggctgaaaggtttgctcacccagcacggcatcccctacacgaggcccacagaaacttccaacttggagcacttgggccacgagacgcccagagccaagtctccagagcagctgcggggtgacccaggactgcgtgggagtttgtgaccttgtggtgggagagcagaggtggacgcggccgagagccctacagagaagctggctggtaggacccgcagggaccagctgaccaggcttgtgctcagagaagcagacaaaacaaagattcaaggttttaattaattcccatactgataaaaataactccatgaattctgtaaaccattgcataaatgctatagtgtaaaaaaatttaaacaagtgttaactttaaacagttcgctacaagtaaatgattataaatacta

SEQ ID NO: 224629 - DNA, 918 bp, Artificial Sequence
  derived and/or modified sequence
atggccgccggtttggcaagactgttgctcctcctcgggttgtcagctgggggtccggcccccgctggcgccgcaaagatgaaggttgtcgaagaacctaacgcttttggtgtcaacaaccctttccttccacaagcatcaaggcttcaggcgaaacgggatccctcccctgtttccggccctgtccatctgttccgcctgagtggcaagtgcttctccctcgtggaaagcacctacaagtatgagttttgccccttccataatgtcacccagcacgaacagactttccgctggaatgcttacagcggcatcttgggaatttggcacgagtgggagatcgccaacaatacttttaccggcatgtggatgagggacggcgatgcctgccgttcaagaagccgacagagcaaggtggagctcgcctgtggcaagagcaacaggcttgctcacgtcagtgaaccgtctacatgcgtttacgccctcacatttgagacgcctctcgtctgccatccccacgccctgttagtctaccctacactgccagaggccctgcagagacagtgggaccaggtggagcaggacctcgccgatgagttgatcacaccccagggtcatgaaaagctgttgcgaacactctttgaagacgcggggtacctgaagacaccagaagaaaatgagccaacacagctggagggggggcctgactcactgggatttgagacactcgagaactgtcggaaagcccacaaagaactgtccaaagagattaagcggctcaaagggctcctgactcagcatggcataccctacactcgcccaacagagacatctaacctggagcacctcggccacgaaacccctcgggccaaatccccagagcagcttcggggggaccccggcctcagggggtctctttag

SEQ ID NO: 224630 - DNA, 918 bp, Artificial Sequence
  derived and/or modified sequence
atggctgctggcctggcccggctgctgctgctgctgggcctgtctgctgggggccctgccccagctggggccgccaagatgaaggtggtggaggagcccaatgccttcggcgtgaacaaccccttcctgccccaggccagccggctgcaggccaagagggaccccagccctgtgtctggccctgtgcacctgttccggctgagcggcaagtgcttcagcctggtggagagcacctacaagtatgagttctgccccttccacaacgtgacccagcacgagcagaccttccgctggaatgcctacagcggcatcctgggcatctggcatgagtgggagatcgccaacaacaccttcaccggcatgtggatgagagatggagatgcctgccgcagccgcagccggcagagcaaggtggagctggcctgtgggaagagcaaccggctggcccacgtgtctgagcccagcacctgtgtgtatgccctgacctttgagacccccctggtgtgccacccccacgccctgctggtgtaccccaccctgcctgaggccctgcagaggcagtgggaccaggtggagcaggacctggctgatgagctgatcaccccccagggccacgagaagctgctgcggaccctgtttgaagatgctggctacctgaagaccccagaggagaatgagcccacccagctggagggcggccctgacagcctgggctttgagaccctggagaactgcaggaaggcccacaaggagctgagcaaggagatcaagaggctgaagggcctgctgacccagcacggcatcccctacacccggcccacagagaccagcaacctggagcacctgggccacgagaccccccgggccaagagccctgagcagctgcggggggaccccggcctgcggggcagcctgtag

SEQ ID NO: 224631 - DNA, 918 bp, Artificial Sequence
  derived and/or modified sequence
atggccgccggcctggcccggctgctgctgctgctgggcctgagcgccggtggtcctgcccccgcgggggccgcaaaaatgaaagtagtggaggaaccgaatgctttcggcgtcaacaacccgttccttcctcaggcatctcgcctgcaggccaaacgggatcctagccccgtaagcggtcctgtgcatctatttcggctgtctggaaagtgctttagcctggttgagagtacatataagtacgaattctgtcccttccataatgtgacacaacacgaacagaccttcagatggaatgcttacagcggaatacttgggatatggcacgaatgggaaattgctaataatacattcactggaatgtggatgagggacggcgatgcctgcagaagccggtctagacagagcaaggtggaacttgcttgcgggaaaagcaaccgactcgcacatgtttcagaacccagcacctgcgtctatgccctcactttcgaaactcccttagtgtgccacccacatgcactcctcgtctatcccaccctgcccgaagcactgcagaggcagtgggaccaggtggagcaggatctggcagacgaacttataaccccccagggccacgagaaactgttgaggaccctcttcgaagatgctggataccttaaaacacctgaggagaacgagcctacacagctggagggcgggcctgattcacttggcttcgagaccctagaaaattgccgcaaggcccacaaggagttgtctaaggaaatcaaacgcctgaagggcctgctgacgcagcatgggatcccatatacccgcccgacagaaacgagtaatttagagcatctaggtcatgagacccctagggccaagtcacccgaacaactacgcggtgaccctggtcttcgtggctctttgtag

SEQ ID NO: 224632 - DNA, 918 bp, Artificial Sequence
  derived and/or modified sequence
atggccgcaggactagctcggctgctgctcctcctgggcctgtcagctggagggcctgctccagcgggagccgcaaagatgaaggtggtagaggagcctaatgcatttggagtcaataacccctttctgccgcaggccagtaggctgcaggcaaaacgagatcccagccccgtgtctggccctgtgcatctattccggctcagtggaaaatgctttagtcttgtcgagagcacatacaagtatgaattttgtcccttccacaatgtgacacagcatgagcagactttccgatggaatgcttacagcggaatcctgggcatctggcatgagtgggaaatcgccaataacaccttcaccgggatgtggatgcgcgacggcgacgcctgcaggagtagatccagacagtcaaaggtggaactggcctgcggaaagtcaaataggctggctcacgtgtcagaaccttcaacatgtgtgtacgcccttacctttgagacaccactggtttgtcatccccacgcactgctcgtttatcccacactaccggaggccctccaaaggcagtgggatcaggtcgagcaagacctcgcagatgaactgataacaccacagggacatgaaaaactgctccgcacactttttgaggatgccggttacctaaaaactccggaggagaatgaacccacccagttggaggggggacctgactctctcggcttcgaaactctcgagaattgcagaaaagcccacaaagagctgtccaaggagataaagcgcctgaagggcctcctgacccaacatggaatcccttacaccagacctactgagacaagtaaccttgagcacctcggccacgagaccccacgggctaagagtccggagcagctgaggggtgatcctggcctgcggggatctctctag

SEQ ID NO: 224633 - DNA, 918 bp, Artificial Sequence
  derived and/or modified sequence
atggccgccggactggcgagattgttactgcttctgggactcagcgccggcggacctgctccagcaggggccgccaagatgaaagttgtagaggaacctaatgccttcggagtaaacaacccatttctcccccaggcaagtcgcctccaggcaaagagggacccgagtcctgtctcaggccccgtgcatctgttccggctcagtggaaaatgcttctctttagtcgaatccacatataagtacgaattttgtccatttcataacgtaactcagcacgagcagacatttaggtggaacgcgtattccgggatactgggcatctggcacgaatgggaaatcgccaataatacgtttaccggcatgtggatgagggatggtgatgcttgtcgcagccgtagtcgacagagcaaagtagagctcgcgtgcgggaagtcaaaccgcttagctcacgtttccgaaccgtccacctgcgtgtacgccctgacgtttgaaacccccttggtctgccaccctcacgctctgctggtgtatcctaccttacctgaggccttacagagacagtgggatcaggtagaacaagacttagcagatgaattaatcacaccacagggacatgaaaagctccttcgcaccctgttcgaggatgctggttatcttaagacccccgaggagaatgaacctacccagctcgagggcggccccgactcgttgggctttgaaacactcgagaattgcagaaaggctcacaaggagctgtctaaagagattaagagattgaaaggattattgacccagcatggaataccctacacaaggcctacggaaacttccaacctggagcacttaggccatgaaacccctagggcaaaaagcccggaacaactacgcggcgaccctggactccggggatctttgtag

SEQ ID NO: 224634 - DNA, 918 bp, Artificial Sequence
  derived and/or modified sequence
atggctgcaggcctcgcccgcctgttattgctacttggtctttcagctgggggcccggcaccggcaggcgcagctaaaatgaaagtggtggaagagcccaacgcgtttggtgtaaacaacccgtttctcccccaggccagccggctgcaggcaaaacgtgatcccagccccgtctcaggccctgtacatcttttcagactgtcgggaaagtgttttagcctcgtcgaatcaacatacaagtacgagttttgtcccttccacaatgtcacccagcatgagcagacatttcggtggaatgcttactccggaatattaggaatttggcatgaatgggagatagcgaacaacacctttaccggaatgtggatgcgagacggagatgcatgcaggagcagaagccggcaaagcaaagtggagctcgcttgtggaaagtctaatcgtttagctcatgtgagtgagccctcgacatgcgtatacgctttaacgttcgaaacaccgctcgtgtgccaccctcacgctctgttggtgtatcccactctaccagaggctcttcagcgacaatgggaccaggtggaacaagatctagccgatgagcttatcaccccacagggtcacgagaagttactcagaactttgtttgaggacgctggatacttaaagacccctgaagaaaacgagcccacacagttggagggaggaccggattcccttggttttgaaactctggaaaactgtcgcaaggcccacaaagagctcagtaaagaaattaaaagactgaaaggactgttaactcagcacggcattccctatacacgtccgaccgagaccagtaacctagagcatttgggccatgagactcctcgcgcaaaatctcctgaacagctccgcggtgatccaggtctgagggggagtctgtag

SEQ ID NO: 224635 - DNA, 918 bp, Artificial Sequence
  derived and/or modified sequence
atggccgccggcctggccagactgctgctgctgctgggcctgagcgccggcggccccgcccccgccggcgccgccaagatgaaggtggtggaggagcccaacgccttcggcgtgaacaaccccttcctgccccaggccagcagactgcaggccaagagagaccccagccccgtgagcggccccgtgcacctgttcagactgagcggcaagtgcttcagcctggtggagagcacctacaagtacgagttctgccccttccacaacgtgacccagcacgagcagaccttcagatggaacgcctacagcggcatcctgggcatctggcacgagtgggagatcgccaacaacaccttcaccggcatgtggatgagagacggcgacgcctgcagaagcagaagcagacagagcaaggtggagctggcctgcggcaagagcaacagactggcccacgtgagcgagcccagcacctgcgtgtacgccctgaccttcgagacccccctggtgtgccacccccacgccctgctggtgtaccccaccctgcccgaggccctgcagagacagtgggaccaggtggagcaggacctggccgacgagctgatcaccccccagggccacgagaagctgctgagaaccctgttcgaggacgccggctacctgaagacccccgaggagaacgagcccacccagctggagggcggccccgacagcctgggcttcgagaccctggagaactgcagaaaggcccacaaggagctgagcaaggagatcaagagactgaagggcctgctgacccagcacggcatcccctacaccagacccaccgagaccagcaacctggagcacctgggccacgagacccccagagccaagagccccgagcagctgagaggcgaccccggcctgagaggcagcctgtag

SEQ ID NO: 224636 - protein, 372 aa, Artificial Sequence
  derived and/or modified sequence
MNRSHRHGAGSGCLGTMEVKSKFGAEFRRFSLERSKPGKFEEFYGLLQHVHKIPNVDVLVGYADIHGDLLPINNDDNYHKAVSTANPLLRIFIQKKEEADYSAFGTDTLIKKKNVLTNVLRPDNHRKKPHIVISMPQDFRPVSSIIDVDILPETHRRVRLYKYGTEKPLGFYIRDGSSVRVTPHGLEKVPGIFISRLVPGGLAQSTGLLAVNDEVLEVNGIEVSGKSLDQVTDMMIANSRNLIITVRPANQRNNVVRNSRTSGSSGQSTDNSLLGYPQQIEPSFEPEDEDSEEDDIIIEDNGVPQQIPKAVPNTESLESLTQIELSFESGQNGFIPSNEVSLAAIASSSNTEFETHAPDQKLLEEDGTIITL

SEQ ID NO: 224637 - DNA, 1119 bp, Artificial Sequence
  derived and/or modified sequence
atgaatcgctcacatcgccacggcgccggcagcggctgcctaggaaccatggaagtgaaaagcaagtttggagcagagtttagaagattctctctggagcgcagtaagcccggcaagtttgaagaattctacggtttacttcagcacgtccataaaatccctaatgtcgacgtcttagtcggctatgcagacatacatggcgacctgctgcctatcaataacgatgacaattatcataaagccgtatctaccgccaatcccctgttgaggatcttcattcaaaagaaggaagaggcagactatagcgctttcggcaccgatacacttatcaaaaaaaagaatgttcttactaacgtgcttagaccagataatcatcgcaaaaagccacacatagttatctccatgccacaggattttaggccagtgtcttccatcatcgacgttgacatactgccagagacccaccgccgagtcaggctttacaaatatgggacagagaagccactgggcttttatataagggatggcagctcagttagagtcaccccacacgggcttgaaaaggtaccgggaatttttatcagtcgcttagtgccaggaggattggcacagtctacagggctgctggcagtcaatgacgaagtgctggaggtgaacggtatcgaagtcagcggtaaatcgctcgaccaggtcactgacatgatgattgcaaatagtcgcaacctgataatcacggttcggccggctaaccaacgcaataatgtagtgaggaattcccgaacttcaggtagttccggccaaagtaccgacaactctttgctgggttatccccagcaaatcgagccctcattcgaacccgaggacgaggactccgaggaggatgacattattatcgaggacaacggtgtgccgcagcagattcccaaggccgtgcctaacaccgagtctttagagagcctcacacagattgaactatcattcgagtctggccagaacggattcatcccgagtaatgaagtcagtttggcggcaatcgcgtcctcttcgaacaccgagttcgaaactcacgccccggaccagaaactgcttgaagaggatgggactattatcacattgtag

SEQ ID NO: 224638 - DNA, 1119 bp, Artificial Sequence
  derived and/or modified sequence
atgaacagaagccacagacatggagctggcagcggctgcctgggcaccatggaggtgaagagcaagtttggagctgagttccgccgcttcagcctggagaggagcaagccaggcaagtttgaggagttctacggcctgctgcagcacgtgcacaagatccccaacgtggatgtgctggtgggctatgctgacatccacggggacctgctgcccatcaacaatgatgacaactaccacaaggctgtgtccacagccaaccccctgctgcgcatcttcatccagaagaaggaggaggccgactacagcgccttcggcacagacaccctcatcaagaagaagaatgtgctgaccaacgtgctgcggccagacaaccacaggaagaagccccacatcgtcatctccatgccccaggacttccggcctgtgagcagcatcattgatgtggacatcctgcctgagacccaccggcgggtgcggctgtacaagtatggaacagagaagcccctgggcttctacatcagagatggcagctctgtgcgggtgaccccccacggcctggagaaggtgcccggcatcttcatcagccggctggtgcctgggggcctggcccagagcacaggcctgctggccgtgaatgatgaggtgctggaggtgaatggaattgaggtgtctgggaagagcctggaccaggtgacagacatgatgattgccaacagcaggaacctgatcatcaccgtgcggcctgccaaccagaggaacaacgtggtgaggaacagcaggaccagcggcagcagcggccagagcacagacaacagcctgctgggctacccccagcagatcgagcccagctttgagccagaagatgaagattctgaagaagatgacatcatcattgaagataatggagtgccccagcagatccccaaggctgtgcccaacacagagagcctggagagcctgacccagatcgagctgagctttgaaagtggccagaatggcttcatccccagcaatgaggtgtccctggccgccatcgccagcagcagcaacacagaatttgagacccacgccccagaccagaagctgctggaggaggatggcaccatcatcaccctgtag

SEQ ID NO: 224639 - DNA, 1119 bp, Artificial Sequence
  derived and/or modified sequence
atgaaccggagccaccggcacggcgccggcagcggctgcctgggcacaatggaagtgaagtccaaatttggcgcagaatttagacgcttctctttggaacggagcaaaccaggaaagttcgaagaattttacggtctgctgcagcacgtgcacaagatccccaacgtggacgtgctagtgggctatgctgacattcatggagacctgctccctatcaataacgatgacaactaccacaaggccgttagcacagccaacccactgctgaggattttcatccaaaaaaaagaagaagctgactactctgcttttgggactgacacgctcatcaagaaaaagaatgtcttgactaacgtgctccgcccggataaccacagaaaaaagccccatattgtgatcagtatgccccaggatttccggccagtctcatccatcattgacgtggatatactacccgaaactcatagacgcgtacgactgtataaatacgggacggaaaaaccactgggattctacatccgggacggctcgagcgtgcgggtgacaccccatgggctggagaaggtgccgggaatcttcatttcccgcctggtgcccggtggactggcccaatccactggcctgctagctgtcaatgatgaggttctggaggtgaatggaatcgaggtgtcaggcaaatctcttgaccaggtgacagacatgatgatcgccaactccaggaatctgatcatcactgttagacccgctaaccagcggaacaacgtagtgcgtaattcacgcacctcgggatcgtctggccagagcaccgataattctctcttagggtacccacagcaaattgagccatcttttgaacccgaggacgaggatagcgaggaggatgacatcattatcgaagataatggggtcccacagcagatccctaaagcagttccaaacactgaatctctcgaaagcctgacacagatcgagctgagcttcgaatccgggcagaacggatttatcccttctaacgaagtgagcctggctgccatagctagttcctcgaataccgaatttgagacacatgcgccagaccagaagctcttagaagaggatggcaccattatcacattgtag

SEQ ID NO: 224640 - DNA, 4615 bp, Artificial Sequence
  derived and/or modified sequence
gagggagggagctgcttccccgcctgccgcgccaccagtccgaccctcggtcccgccgtgtgagcagctggtggagtggagctcagcgcggacgccggagctgcggccgccccctctgcaggtgcctgtgaggaggcgcccgggccgcaaccgctttccgagatccccagtcgcgcactcgctccccgcgctcctgaggggccgcccggccggaggaggccgtcgcggggctcggcgttcagcatgaaccgcagccaccggcacggggcgggcagcggctgcctgggcactatggaggtgaagagcaagtttggagctgaatttcgtcggttttcgctggaaagatcaaaacctggaaaatttgaggagttttatggattactacaacatgttcataagatccccaatgttgacgttttggtaggctatgcagacatccatggagacttactacctataaataatgatgataattatcacaaagctgtttcaacggccaatccactgcttaggatatttatacaaaagaaggaagaagcagactacagtgcctttggtacagacacgctaataaagaagaagaatgttttaaccaacgtattgcgtcctgacaaccatagaaaaaagccacatatagtcattagtatgccccaagactttagacctgtgtcttctattatagacgtggatattctcccagaaacgcatcgtagggtacgtctttacaaatacggcacggagaaacccctaggattctacatccgggatggctccagtgtcagggtaacaccacatggcttagaaaaggttccagggatctttatatccaggcttgtcccaggaggtctggctcaaagtacaggactattagctgttaatgatgaagttttagaagttaatggcatagaagtttcagggaagagccttgatcaagtaacagacatgatgattgcaaatagccgtaacctcatcataacagtgagaccggcaaaccagaggaataatgttgtgaggaacagtcggacttctggcagttccggtcagtctactgataacagccttcttggctacccacagcagattgaaccaagctttgagccagaggatgaagacagcgaagaagatgacattatcattgaagacaatggagtgccacagcagattccaaaagctgttcctaatactgagagcctggagtcattaacacagatagagctaagctttgagtctggacagaatggctttattccctctaatgaagtgagcttagcagccatagcaagcagctcaaacacggaatttgaaacacatgctccagatcaaaaactcttagaagaagatggaacaatcataacattatgaaaccgtggtttgaatgttttcagagtgaggatgccatgaggacttgtacatttggctagtttaaaagcatatatacctctgaccagtgacgtggaataggcatgagacgagtaacgttgcaagcttacaatattattaaagtagtagtttgataattgttaatataaactttggtggatcagaggtgaatttaagtccaaaacaaaggggcctttgctgatgaagttacgtgcttttgctgttttgtctgtggagaatcagatgttaaagcacattcttggaactatgtgagaagactagatcatttctgttggaagtggttgcatatttaacctgctgtgcagagcccagttaatttttcctttaactgtatttttaaaattctaatgtgaagtctgattctctcttgtggtacattggggacctcagctcttaaaggtctcatgttcccaatattttattttgattttttttttttttttttttttttttttttttagtgactgggtctcactctgttgcccacactggaatgcagtggcatgatcacagctctctgcagcctcaatcccctgggctcaagcagtcctcccacctcagcctcctgagtagctgggaccataggcacataccaccacatctgtctactttttgtattttttgtagagacagggtttcgccatgttgcccaagttggtcttgaactcctgggcttaagcagtcctgcctcggcttcccaaaatgctaggattagagccaccatgcccagcctattttgatttttgtttttttatgttcctttctaataaattgtaacaaatgatgttctcaagtacatttccagtttcttttcttttctttctttttttttttttttttttttttgagatggagtctcgctctatcgcccaggctggagtgcagtggcgcgatcttggctcactgcaagctctacctcctgggttcacaccattctcctgcctcagcctcccaagtagctgggactacaggcgcctgccaccatgcctggctaatttttagtagagacggggtttcgcagtgttagccaggaaggtctcaatctcctgacctcctgatccgcccgcctcggcctcccaaagtgctgggattacaggcgtgagccaccgcgcccagttgtgcatttctggtttctaagaatcaaaccacttggctgtttttaggagttacttcccatgttataaagctgaggaagctttttttttttttttttgagacagagtctctgtcacccaggctggagtgcagtggtgcaatctcagctcccgggttcaagcaattctcctgcctcagccttctgagtagctaagattacaggtgtgcgccaacacgtctggcttatttttttgtatttttagtagagatggagtttcaccatgttggtcaggtgggtctcaaactcctgacctcaagtgatccgcccatctcctcccaaagtgctggattgcaggcatgagcgcctagccaggaagctatcttttcttgagttatgaaactttgcaacagttgttcaaattggtgtttgtccttcctatagctttcatattttcaaattaattctgtatggctatataatttatgttttaaaaggcaattctcttgactttggaaatatggaagtctctcctttaacctattcttgttcccattcccagtctcatttgaaatcattccttttattgttagtgtgtgtatttttgttggtgtgcttttaatgcatccaagtatgcatcattttggataaaaaatacatccaaattaagatgttttaacacataggacaaacttgtgcactttttatgccaaaaaaaaaaaaaattgggttttccttcatgggatttctagaaacactgcctacactttatgaaaactacatagtattcacctgtgacaggtagagtttatcactattaattttatgaggctatttattactttccaatgcatccacttagaacaagctaagagtaaggctgctaactttaattccttgcctgattttattgtacagtgtgcacaagcacaatggtatgcttgtatatagaaactaaaaatactatgaagtacataagttccctatggcttatggagagttatttattaattaactttatggtagggctagtatgaatacctttttaacaattgtgtgctattacaacaatgaagattcaaatgactccgctttgaaggatgttttctctatatggtaaaatatatatgaagaagtcttgattacgtgaagatcacttgactcagaatacttcaatgtattttgttcacattaccactaagcatattatcagtaaactattaactgactgcacattatgtaatacgttgtactttttgttgaattcaccgaagttcttccatttatatgctatttttaatggcattccggctttaacattctgtgagtcttacaaatttgactcttgaatggcaaaataatgttagtatgtagaaggttaactttcatttataatataagtggtgcaggggttcaacattttaagtaaaaatatttttacacactacctctctctttttttttttaaagttttaacatcagaacttttgggggaaaaactacttcagggcttgactttttgtacaaattttaactgtaaaatacagatttatcttgtacgcattcatggaaatggaaatcaaagctgctattgctttttattttaattatcctgttaagggtatctatcaatggtattttcaagtagatctctgtttcttaaattattggtgaaataattgattactagatatattgtaaaaccaatagatcctggttatacgataaaatatcagctcattggtaggctgaatcaattatttcaagtgcaccttattaacaaaagtatcagtggatccaacataaaattttatagtactaaatgtcaagcctaactgtgaattttgttctgtatcttaagtaaatttatgataatgttctcgagctatcaacaaaatatatgtacttttgtgagctatgaattttctaattaaattttacatgctataacatgatttttacatgaatgatactttgtttataactatcaaatgtcagtattttactacaattttattataaagtgtacattatcactaaatgaacttcgattttaaaaatcaaattagctttagttgtatattattttttacaaataaagatagacttgtataaaggcta

SEQ ID NO: 224641 - DNA, 1119 bp, Artificial Sequence
  derived and/or modified sequence
atgaatcgctctcacaggcatggggctggttctggctgcctgggcaccatggaggttaagagcaagtttggggctgaattccgtcgcttctccctggagaggagtaaacctgggaagtttgaagagttctacggcctactacagcacgtacataaaattccgaatgtggacgtgctagtgggatacgccgacatacacggtgacctgcttcccattaacaatgacgataattaccacaaggcggtgtcaactgctaatcccctccttcggatctttatccagaaaaaagaggaagccgactattctgcgttcggcacagatacgctgattaaaaagaaaaatgtgttaacaaatgtgctcaggcctgataatcatcgcaaaaagcctcatattgttatcagtatgccccaggactttagacccgtttcttccataatcgatgtcgacattctgccggagacacaccggagagtgcgcttgtacaagtatggaaccgagaagcccctcggcttttacattagagatgggagctccgtgcgggtgactccccacgggctggaaaaggtccctggcatctttatctctagactggtgccaggtggcctggcccagagcactggactgctggcggttaacgacgaagtcctggaagtcaatggaatcgaagttagcgggaaatctcttgaccaggtgacggatatgatgatcgctaacagcaggaacctgataattaccgtaaggcctgcgaaccagagaaataatgtggtccggaattcacgcacttcaggttcgagcggccaatcaaccgacaacagcttgctcggatacccccagcaaatcgaaccttcattcgaacctgaggacgaagactcagaagaggatgatataataatcgaagataatggtgtaccacaacaaatccctaaagccgttccaaatacggaatctctggaatcattgacccaaattgagctgagcttcgagagcggtcagaatggatttatcccttctaacgaggtgtccctcgccgctattgcatcatcctccaacactgagttcgagactcatgcccctgaccagaaattgctggaggaagacggcacgataatcacactctag

SEQ ID NO: 224642 - DNA, 1119 bp, Artificial Sequence
  derived and/or modified sequence
atgaacagaagccacagacacggcgccggcagcggctgcctgggcaccatggaggtgaagagcaagttcggcgccgagttcagaagattcagcctggagagaagcaagcccggcaagttcgaggagttctacggcctgctgcagcacgtgcacaagatccccaacgtggacgtgctggtgggctacgccgacatccacggcgacctgctgcccatcaacaacgacgacaactaccacaaggccgtgagcaccgccaaccccctgctgagaatcttcatccagaagaaggaggaggccgactacagcgccttcggcaccgacaccctgatcaagaagaagaacgtgctgaccaacgtgctgagacccgacaaccacagaaagaagccccacatcgtgatcagcatgccccaggacttcagacccgtgagcagcatcatcgacgtggacatcctgcccgagacccacagaagagtgagactgtacaagtacggcaccgagaagcccctgggcttctacatcagagacggcagcagcgtgagagtgaccccccacggcctggagaaggtgcccggcatcttcatcagcagactggtgcccggcggcctggcccagagcaccggcctgctggccgtgaacgacgaggtgctggaggtgaacggcatcgaggtgagcggcaagagcctggaccaggtgaccgacatgatgatcgccaacagcagaaacctgatcatcaccgtgagacccgccaaccagagaaacaacgtggtgagaaacagcagaaccagcggcagcagcggccagagcaccgacaacagcctgctgggctacccccagcagatcgagcccagcttcgagcccgaggacgaggacagcgaggaggacgacatcatcatcgaggacaacggcgtgccccagcagatccccaaggccgtgcccaacaccgagagcctggagagcctgacccagatcgagctgagcttcgagagcggccagaacggcttcatccccagcaacgaggtgagcctggccgccatcgccagcagcagcaacaccgagttcgagacccacgcccccgaccagaagctgctggaggaggacggcaccatcatcaccctgtag

SEQ ID NO: 224643 - protein, 934 aa, Artificial Sequence
  derived and/or modified sequence
MSSDEKGISPAHKTSTPTHRSASSSTSSQRDSRQSIHILERTASSSTEPSVSRQLLEPEPVPLSKEADSWEIIEGLKIGQTNVQKPDKHEGFMLKKRKWPLKGWHKRFFVLDNGMLKYSKAPLDIQKGKVHGSIDVGLSVMSIKKKARRIDLDTEEHIYHLKVKSQDWFDAWVSKLRHHRLYRQNEIVRSPRDASFHIFPSTSTAESSPAANVSVMDGKMQPNSFPWQSPLPCSNSLPATCTTGQSKVAAWLQDSEEMDRCAEDLAHCQSNLVELSKLLQNLEILQRTQSAPNFTDMQANCVDISKKDKRVTRRWRTKSVSKDTKIQLQVPFSATMSPVRLHSSNPNLCADIEFQTPPSHLTDPLESSTDYTKLQEEFCLIAQKVHSLLKSAFNSIAIEKEKLKQMVSEQDHSKGHSTQMARLRQSLSQALNQNAELRSRLNRIHSESIICDQVVSVNIIPSPDEAGEQIHVSLPLSQQVANESRLSMSESVSEFFDAQEVLLSASSSENEASDDESYISDVSDNISEDNTSVADNISRQILNGELTGGAFRNGRRACLPAPCPDTSNINLWNILRNNIGKDLSKVSMPVELNEPLNTLQHLCEEMEYSELLDKASETDDPYERMVLVAAFAVSGYCSTYFRAGSKPFNPVLGETYECIREDKGFRFFSEQVSHHPPISACHCESKNFVFWQDIRWKNKFWGKSMEILPVGTLNVMLPKYGDYYVWNKVTTCIHNILSGRRWIEHYGEVTIRNTKSSVCICKLTFVKVNYWNSNMNEVQGVVIDQEGKAVYRLFGKWHEGLYCGVAPSAKCIWRPGSMPTNYELYYGFTRFAIELNELDPVLKDLLPPTDARFRPDQRFLEEGNLEAAASEKQRVEELQRSRRRYMEENNLEHIPKFFKKVIDANQREAWVSNDTYWELRKDPGFSKVDSPVLW

SEQ ID NO: 224644 - protein, 190 aa, Artificial Sequence
  derived and/or modified sequence
MDGKMQPNSFPWQSPLPCSNSLPATCTTGQSKVAAWLQDSEEMDRCAEDLAHCQSNLVELSKLLQNLEILQRTQSAPNFTDMQANCVDISKKDKRVTRRWRTKSVSKDTKIQLQVPFSATMSPVRLHSSNPNLCADIEFQTPPPNHFGILSVLLQPYSLKKKKKKKKKSTPSLESRIKGAEYKIQSLTSL

SEQ ID NO: 224645 - DNA, 2805 bp, Artificial Sequence
  derived and/or modified sequence
atgtcctccgatgagaaggggatctccccagctcacaaaactagcacaccaacacatcggtcagccagctcttccacctccagccagcgcgacagtaggcagtctattcatatcctggagcgcactgcctctagttcaactgaaccaagcgttagccgccagcttttggagcctgagccagtacctttgtctaaagaggccgactcttgggagatcatagaggggcttaagatcggccagaccaatgtccagaagcctgacaaacacgagggctttatgttgaagaaaaggaaatggcctctcaagggatggcacaagaggttctttgtgctggacaacggaatgctgaagtatagtaaagcgcctctggacatacagaagggcaaggttcacggatcgattgacgtgggcctgtcggttatgtcgattaaaaaaaaagccaggcggatcgacctagacaccgaggaacacatctatcacttgaaggtcaagagccaagattggttcgacgcgtgggtgagtaagcttaggcaccatcgattgtatcgccagaacgaaattgttcgatcaccccgcgacgcctcgttccatatatttcctagcactagtacagccgagtctagccccgctgccaacgtgagtgttatggacggtaaaatgcaacccaattctttcccatggcagagcccactcccatgtagtaatagcctacctgcaacttgcaccacaggccaaagcaaggtagccgcatggctgcaggattccgaagagatggacagatgcgcagaagatctggcccattgccagtcaaatttggttgaattaagtaaactgctccagaatctggagatcctgcagcgaacacaaagcgctcctaattttaccgacatgcaggcaaattgtgttgatattagcaagaaagacaaaagagtcaccagacgctggcgaacgaaaagcgtgagcaaggacaccaagatacagctgcaggtgccattcagtgccaccatgtcgcctgtcaggttacatagttcaaatcctaacctttgcgcggacatcgaatttcagactcctccttctcaccttaccgaccctctggaatcctccacggattacacaaagctccaagaagagttctgtcttatcgcgcagaaagtgcactcactgcttaagtcggcattcaattcgatagctattgaaaaagagaaacttaagcagatggtgagcgagcaggatcattctaagggtcactctacacagatggcgcgattgagacagtcactgtcccaagcgcttaatcaaaatgccgagctcagaagtagactgaatcgtatccacagtgagtctatcatctgcgatcaagttgtgagcgttaatattattccctccccagacgaagctggagagcaaatacacgtctctctgcctttgagtcaacaggtagccaacgaaagtcggctcagtatgagtgaaagtgtgtccgaatttttcgatgcccaggaggtgcttctgtcagcctcttccagcgaaaatgaggcgagtgacgacgaatcatatatctcagatgtgagcgacaatatcagtgaagacaatacctcagttgccgataatatatcaaggcagattctgaatggcgagctgacgggtggggcctttaggaatggaagaagggcgtgcctcccagccccctgtcccgataccagtaatatcaacctatggaatattttacgcaacaatatcggaaaagacctttctaaggtgtctatgcccgtcgaactcaacgagcctttaaacaccctccagcatctgtgtgaggaaatggagtatagcgagcttctcgataaggcgagcgaaacggatgatccatacgaacgaatggtcttagtggcagcattcgcagtgtctgggtactgttcaacatacttccgggcaggcagtaagccgtttaacccggtgctaggagagacctatgaatgcattcgggaggacaagggattcaggttctttagcgaacaggtgagccaccatccaccaataagcgcatgccactgcgagagcaagaattttgtgttctggcaggatatccgctggaaaaacaaattctggggcaagtctatggagatcctgcctgtgggaacgttgaacgtgatgctacctaagtacggagattattatgtgtggaataaggtgacaacatgcatccataacatcctgagtgggaggaggtggatcgagcactacggcgaggtgaccatcagaaacaccaagtccagtgtttgtatttgtaaactgacctttgtcaaagttaattactggaatagtaatatgaacgaggtccaaggtgttgtgattgaccaggaggggaaggctgtgtaccggcttttcgggaagtggcacgaaggattgtactgtggtgtcgccccctccgccaaatgcatctggaggcctggcagcatgccaactaattacgagttgtactacggatttacccggttcgccattgaattgaacgagctggaccctgtgctgaaagacctgttaccacccaccgatgctcggtttcgccccgatcagaggtttctagaagaaggcaatctggaagccgccgcatccgagaaacagagagtggaagagctacagcggtcacgcagaagatatatggaagagaacaaccttgagcacatcccgaagttctttaagaaggtcattgatgcgaatcagcgcgaggcctgggtgtctaacgacacatactgggagctgaggaaagacccaggattcagtaaggtcgactccccggtcttgtggtag

SEQ ID NO: 224646 - DNA, 2805 bp, Artificial Sequence
  derived and/or modified sequence
atgagcagtgatgagaagggcatcagccctgcccacaagaccagcacccccacccacaggtctgccagcagcagcaccagcagccagagggacagccggcagagcatccacatcctggagaggacagccagcagcagcacagagcccagcgtgtcccggcagctgctggagcctgagcctgtgcccctgagcaaggaggccgacagctgggagatcatcgagggcctgaagattggccagaccaacgtgcagaagccagacaagcatgagggcttcatgctgaagaagaggaagtggcccctgaagggctggcacaagcgcttctttgtgctggacaatggcatgctgaagtacagcaaggcccccctggacatccagaagggcaaggtgcacggcagcattgatgtgggcctgtctgtgatgagcatcaagaagaaggccaggagaattgacctggacacagaggagcacatctaccacctgaaggtgaagagccaggactggtttgatgcctgggtgtccaagctgcggcaccaccggctgtaccggcagaatgaaattgtgcgcagccccagagatgccagcttccacatcttccccagcaccagcacagctgagagcagccctgctgccaacgtgtctgtgatggatggcaagatgcagcccaacagcttcccctggcagagccccctgccctgcagcaacagcctgcctgccacctgcaccaccggccagagcaaggtggccgcctggctgcaggacagcgaggagatggacagatgtgccgaggacctggcccactgccagagcaacctggtggagctgagcaagctgctgcagaacctggagatcctgcagaggacccagagcgcccccaacttcacagacatgcaggccaactgtgtggacatcagcaagaaggacaagagggtgacccggcgctggaggaccaagtctgtgtccaaggacaccaagatccagctgcaggtgcccttcagcgccaccatgagccctgtgcggctgcacagcagcaaccccaacctgtgtgccgacatcgagttccagaccccacccagccacctgacagaccccctggagagcagcacagactacaccaagctgcaggaggagttctgcctgattgcccagaaggtgcacagcctgctgaagagcgccttcaacagcatcgccatcgagaaggagaagctgaagcagatggtgtctgagcaggaccacagcaagggccacagcacccagatggcccggctgcggcagagcctgagccaggccctgaaccagaatgctgagctgcggagccggctgaaccgcatccacagcgagagcatcatctgtgaccaggtggtgtctgtgaacatcatccccagcccagatgaggccggggagcagatccacgtgtccctgcccctgagccagcaggtggccaatgaaagccggctgtccatgtctgagagcgtgtctgagttctttgatgcccaggaggtgctgctgagcgccagcagcagtgaaaatgaggccagtgatgatgagagctacatcagtgatgtgtctgacaacatcagcgaggacaacacctctgtggccgacaacatcagccggcagatcctgaatggagagctgactggaggagccttcagaaatggaagaagagcctgcctgcctgccccctgcccagacaccagcaacatcaacctgtggaacatcctgaggaacaacatcggcaaggacctgagcaaggtgtccatgcctgtggagctgaatgagcccctgaacaccctgcagcacctgtgtgaggagatggagtacagcgagctgctggacaaggccagcgagacagatgacccctatgaaagaatggtgctggtggccgcctttgctgtgtctggctactgcagcacctacttccgggccggcagcaagcccttcaaccctgtgctgggggagacctatgagtgcatcagagaagataaaggcttccgcttcttcagcgagcaggtgagccaccacccccccatcagcgcctgccactgtgagagcaagaactttgtgttctggcaggacatccgctggaagaacaagttctggggcaagtccatggagatcctgcctgtgggcaccctgaatgtgatgctgcccaagtacggggactactacgtgtggaacaaggtgaccacctgcatccacaacatcctgagcggccgccgctggattgagcactacggggaggtgaccatccggaacaccaagagctctgtgtgcatctgcaagctgacctttgtgaaggtgaactactggaacagcaacatgaatgaggtgcagggcgtggtgattgaccaggagggcaaggctgtgtaccgcctgtttgggaagtggcatgagggcctgtactgcggcgtggcccccagcgccaagtgcatctggaggcctggctccatgcccaccaactatgagctgtactacggcttcaccaggtttgccatcgagctgaatgagctggaccctgtgctgaaggacctgctgcccccaacagatgcccgcttccggccagaccagcgcttcctggaggagggcaacctggaggccgccgccagcgagaagcagagggtggaggagctgcagaggagcagaagacgctacatggaggagaacaacctggagcacatccccaagttcttcaagaaggtgattgatgccaaccagcgggaggcctgggtgtccaatgacacctactgggagctgaggaaggaccccggcttcagcaaggtggacagccctgtgctgtggtag

SEQ ID NO: 224647 - DNA, 2805 bp, Artificial Sequence
  derived and/or modified sequence
atgagcagcgacgagaagggcatcagccccgcccacaagaccagcactccaacgcacagaagtgctagtagttctacgtccagccagcgggattctcggcagtcaatccacatattggaaagaaccgcttcatcctcgactgagccttctgtctcccggcaactgctggagcccgagcctgtacccctgagtaaagaagcagactcttgggagataatagaaggcctcaagattggccagactaatgtacaaaagccggacaaacatgaaggatttatgttaaaaaagagaaaatggcctctgaaaggctggcacaaaaggttcttcgtgctcgacaacgggatgcttaaatactccaaagcaccactggatatccaaaaggggaaagtccatggctcaattgacgtcggcttgtccgtgatgtccattaagaaaaaggcaaggcgcatagatcttgataccgaagagcacatctaccatctgaaggtcaagtctcaggactggtttgacgcctgggtctccaagcttcgccaccaccgcctgtaccggcagaatgagatagtgcgctcccctagagacgcaagcttccacatctttccctccacttctactgccgaatcttcgcctgctgctaacgttagcgtgatggacgggaagatgcagcccaattcctttccttggcagagtcctttgccttgtagtaatagtttgccagcgacctgtacgacgggacagagtaaggtggccgcctggctgcaggatagcgaggagatggatcgctgcgcagaggatctggcccattgccagagtaatcttgttgagctctcaaagctgctgcagaatcttgagatcctacagagaacacagagcgctcccaacttcaccgacatgcaggccaactgtgtggacatcagcaaaaaagacaagcgcgtcacaagaagatggaggactaagagcgttagcaaggacaccaagatacagttgcaggtgcctttttctgctacaatgagccccgtccgccttcacagcagtaaccccaacctctgtgcagatatcgagttccagacacctccctctcatttaacggacccactcgaatcatccactgactacaccaagttgcaagaggagttttgtctcattgctcagaaggtgcacagtctgctgaaatccgcatttaattccatcgctattgagaaggagaaactaaaacagatggtttccgagcaggaccattcgaagggtcactctacgcagatggcccgcctacgacaaagcttaagccaggctttaaatcaaaacgcggaactccgctcccgcttgaaccgcatccactccgagagtataatctgcgaccaggttgtatccgtcaacatcatcccatcacctgacgaggcgggcgagcagatccacgtgtctctgcctttgtcacagcaggtcgctaacgaaagcagactctcaatgtcagaatctgtcagcgagttctttgacgcccaagaggttctcctgtccgcttcatcgagcgaaaacgaggcctcggacgatgaatcttatatttctgacgtgtctgataatatttctgaggacaacacctccgtggctgacaacatatcaaggcaaatcctgaatggggagctgacgggcggagctttccgtaacgggaggcgagcctgtctgccagcaccgtgtccggacacatccaacattaatttgtggaatatcctgaggaacaacattggtaaggatctcagcaaagtctcaatgccggtggaactgaacgaaccgctgaatacgctccagcacctttgtgaagaaatggaatactcagagctcttggacaaggcttctgagacggacgatccttacgaacgcatggttctggtggctgcgttcgccgtttccgggtactgctctacatattttagagcggggtccaaaccctttaacccggtgctgggtgaaacttacgaatgcattagggaggacaaaggattccgattctttagtgagcaggtcagtcatcaccctcccatttcggcatgccactgcgagtctaagaatttcgtgttctggcaagatataagatggaagaataaattttggggaaagtccatggaaattctccctgtgggaacactgaatgtaatgctgcctaaatatggagactattatgtgtggaataaagtaacaacttgtatccacaatatcctctccggccggcgctggatagagcactatggcgaggtgaccatcaggaatacaaaatcctctgtatgcatttgcaagctgacatttgttaaagtgaattactggaacagtaacatgaacgaagtgcagggcgttgtgattgatcaggagggaaaagcggtgtaccgtctttttgggaaatggcacgaggggctctactgtggggtggcaccttccgctaagtgtatttggaggcctggtagtatgcccaccaactacgaattatattatgggttcacacgattcgccatcgaactcaacgaactcgatccagtgctcaaggaccttttaccacccacagatgcaaggttccgacctgaccagagattcctcgaggaaggcaatctggaggcagccgccagcgagaaacagagggtcgaagagctccagaggagccgacgccgttacatggaagaaaataacttagaacacatacctaagtttttcaagaaagttattgacgcaaaccagcgtgaagcttgggtgtccaacgacacttattgggagctgcggaaggatccaggattttctaaggtagacagtccagtcctgtggtag

SEQ ID NO: 224648 - DNA, 7055 bp, Artificial Sequence
  derived and/or modified sequence
ccgcggcgccaccgctcgccctccaggttctgccacttgctgggaaaacagcaacagaaggatattaaggagccacccctataatttacccagatagccccagcaaggtcaaagacatatcatgtcccaaggagaaaagctgcaggcatctgaggataaatcactgtgaaacagctttgaccataaagctgacttggaagactttgactccaaggtgcaaggtggtttggacaccctcaatattgcctgctcttttctagtcaaacctgattcatgaaatggaatgaagctgaaaaatcatctacttctttgtttgtggatttgagagaagattgggatggtcttaagtgcataaaacgagactctaactgcagcgatgagttcagatgagaagggcatttcccctgctcataaaacatccactccaacccatagaagtgcctcctcttcaacatcctcccaaagggacagtaggcagagtattcacatactggagaggactgcttcctctagcaccgagccctctgtaagtcggcaattgctagaaccggagccagtccccctctccaaggaagctgacagctgggaaattatagaagggctgaaaataggccaaaccaatgtccagaaaccagacaaacatgagggctttatgctgaagaaaagaaaatggcctttaaaaggctggcacaagcgtttttttgtcctggataatggaatgttaaagtattcaaaggcaccactcgatattcagaaaggaaaggtccatgggagcatagatgtgggactctcagtcatgtcaattaaaaagaaagctcgaagaatagaccttgacaccgaagagcacatctatcatttgaaggtgaaatcccaggactggtttgatgcatgggtctccaaactgcgacatcatcggttgtatcgtcagaatgaaattgtgagatcaccaagagatgctagttttcacatatttccttcaacgtccacagctgaatcctcaccagctgctaatgtttctgtaatggatggaaagatgcaaccaaacagctttccgtggcagtcccctttaccatgcagcaatagcctccctgcaacgtgcacaactggccagagtaaagtggcagcctggttacaggactcggaagagatggacaggtgtgcagaagatcttgcacattgccagtcaaaccttgtggaacttagcaaactcctgcaaaatttggaaatacttcagagaactcagtcggcacctaactttactgacatgcaggctaactgtgtagatatttcaaagaaagacaagcgggtcacaagacgatggagaacaaaaagtgtcagcaaagatacaaaaatacaactgcaggttcctttcagtgctaccatgtcaccagttcgcttgcattcctccaaccccaacctttgtgcagatattgaatttcagactccccctagccacctcactgaccctctggaaagttcaacagattatacaaagctgcaagaagaattttgtctaatcgcacagaaagtgcattctcttttgaagtctgcatttaatagcatagctatagagaaggagaagctgaagcagatggtttccgagcaggatcacagtaaaggccacagcacgcagatggcacggctccgacagtcactgtctcaggcactcaaccagaatgctgaactaaggagtcggttgaacagaatacattcagagtctattatttgtgatcaggttgtcagtgtaaatattattcctagccctgatgaggctggtgagcaaatccatgtcagtctccccttatcacagcaagtagccaatgagagccgcctctccatgtcagagtctgtttctgagttctttgatgcccaagaggtgctcctctctgcaagttcgtcagagaatgaggcttcagatgatgagtcttacatcagtgatgtgagtgataatatatctgaagacaacaccagtgttgcagacaatatttctcggcaaatcctgaatggggagcttacaggaggggccttccgaaatgggcgtcgagcatgcctgccagctccttgtcctgacaccagtaacattaacctgtggaatatcttgaggaacaacattggtaaagacctgtctaaagtctctatgcctgtggagctaaacgagccgctcaacaccctgcagcacctctgtgaggaaatggaatacagcgagctcctggacaaggcttcggaaactgatgatccatatgagcgcatggttctcgttgccgcatttgcagtttcaggatactgctccacctatttcagagcaggaagtaagccattcaacccagtccttggggagacttatgaatgcattagagaagacaagggattccgctttttctcagaacaggttagccatcatccacccatttctgcctgtcactgtgaatcaaagaattttgtgttttggcaagatatcagatggaaaaacaagttctgggggaagtcgatggaaatcctgcctgttggaacactgaatgtcatgcttccaaagtatggagattactatgtgtggaataaagtcaccacttgcatacacaacatcctcagtgggagaagatggatagaacattatggagaagtaaccatcagaaataccaaaagcagtgtttgcatttgcaaactcacatttgtcaaggtgaattattggaattctaacatgaatgaagtccagggggtggtgatagatcaggaggggaaggcggtgtaccggctgtttggaaagtggcatgaaggactctactgtggtgtggccccctctgcaaagtgcatttggagaccaggttccatgccaacaaactatgagctgtactatggcttcacaaggtttgctattgagctcaatgagttagatccagtactaaaagatctccttccaccaacagacgcccggttccggccagatcaaagatttttggaagaaggaaatttagaagctgcagcatcagagaagcaaagagtagaggaactccagagatctcggagacgatatatggaagaaaacaatcttgaacatataccaaaattttttaaaaaagttattgatgccaatcaaagagaagcctgggtttctaacgacacctactgggagcttcgaaaggaccctgggtttagcaaagtagacagccctgttctttggtagactgggaatgtagagctagccaacatatcacattctgaatgaataaataactatgcacaattatgtttcttatagctatgtgtggtttctgggtcaactgaaaacctaccatttgcttttctattcatctttataatggactttcagaagtgcattagacaaggcccctaaccactttgggatcctttctgttttgctgcaaccatattccttaaaaaaaaaaaaaaaaaaaaaaaaaaaatccacaccgtccttggaaagcagaataaaaggagcagaatataaaatccaaagtctgaccagtttgtaaagaaaaacaaatggtaactggtgcttaaagctgatcaagaaagttaacaacaacatagaaaccacacgattgttccactgtctggaagcaccatcccctatcgcaggactcctgggccacaagcagtcggtcagtgcagacttcaagtgtgtctgtttgatgtggtgtgattgtgctggccttgtcgaaaaagatgtgatgcttctcagaacctgttccatctgtatgccattgttcatgccttaagaaatgcaaagatgtacaataaatcatttttaaaatgtgtgctcataggtttatgtgaagaacagattttttgaatcatggcatgattcactttctcaatcaggacaattatgagactaacttaaatgggttttttaaaagtgaacaacacgtgctttactctgataagtcagttaccatatggtatgtctgaagggaaagaaggaaaagacgtgctaagtagatctctgtatttacgtggctcgttaatttcctgtcctgcgtccagataataaaccatccctcttccacctaacctcacagtgtgccctattatttggaaaaatctgtctttgatttggacatttggtcatcagtgttaaaaccttaaaaggaaataacaaaaagcatatggaattcctgtgtgggcttagtagtactataaatgtaattgtttttgagtgaagcaccatgtaatccatgtctcaatcccatgcccgctccactgacactagtcgaattccactgagaacagaagcaagaataatagtagtttatttgcattgtttaaatgaattctatgcaaaatcatatttcaaattttcatcaagtgattccatatggtacatggctacatattaagcatttaccttgctattggcagagatatgaaacttaagctaaggaatgtatccatcccaaagcaggaaagcagaagtgtgttttgcatacttcaggatttgtttttcctccactaatatacagaggcttttgcagaaaacttgcatcagtattcctgtttctgcacgtaggtgactatataaatgcctgtatgttttttttaaaatatctcctcagagattttcctagggaattataaaattacatatattttattgttagttagatgtttattcttggattcttaccattagaatttaagtgttatttaaaactctgatacagttacagacactttacattttattatgaggtgttgattttagtggtatttctcctcagcaaagcattcctaataatggctaatacaccatcaaatgaaaaactgctgatgagagtgtaagagaaagcgctaacgtttccactagatggcgcaatattttatttatccaaaactcctcccttgcatctgagtttttatgttatgtgtacagtctgcattagcttagaatggaatttcattctcaggtaaattttcgaatccatcaccagatctaagcattctgcttcaacaataccctctctattcctctcattcccattttaaatccataggtggcttgccctgcggcagtaaaatcttccccttgatattgattctttttctgctcattcatcttgatgttctttttctgcatcctgagatacatgtcgttaattttaataagaatcctattgacttcctcacgggagtctgttctcctatggttgataaagctttaaatactatttaaagtggttctggtctgtacttactagcacttccctgaacagtctcaaaatagcctaaacataagaaaacaatcctgcaaagtaaaggtttttacaagcagagatgaaggaaagggagcagcagctgaccatcagatgtggtatcaggtagctggaagaggatccaggacccatcagggaagcaacgactgtacttagcaatttgggttataattacaaaaaagaaaaaatagtagaaaggatctttaccagacagtaaggtcatggtacaaatcaggtgagtgaatgttggtcagaggtagcctgacactctgatgaggacttcaagatgagaatgagaaaaatgtctattaaaatcactacatttgataatatctcagatttagaatctcttttgggattcagatagtctgattattccaattcaagtgttcagttaagttttagttactattcctataatacccaattcactaatatcatatctcctgtggaatattcattggtgcgatggcctcatccccttttttactttttattgacatggtggttataaaatgaagagacttactctattggaattttcatctacgtagtatttgggctgtcaagactaaatagcaaaagggtagaatattagatcattctcttaataagacctgatttattccttaggatgttatacaaacctttttatttcaggcctactttcttgttttttcctaaaaggatctaggatagaggagaacataatatgcctgtatacttctcccatggtttattcataagctgcttcatctcattggagatggtcattgaggagagcagtaataagtgacgatgattctgaggacttggctagactgagcggatcaatggcacacaccagcactggtagaggctgaccagaagctcatcgattccatatgctgtcacccagggtgcagatttactctcttttgctgttattttattgtttttcttaaattaagccattgtttttcatggattatttttaaaatacctaccccataattttcaggcaattgtaaaaataaaccttatttaagataacttttaatggtacatatcaactatatgtggggaaaaaatgcaattttctgggcaagagaaaccaaaggattttcaatatatgagatgccaggttgtcaattttctaaaccttttcctctagattattctggccctaggcctttcagcaaccccactaatcaattattagatcctgccccaaggagcagtggcttgggggctggatttagggaggaaaacctgattaaactgttttgcttagtactggttacagctgtagctggagaagagtttataatcataaagtacatttttgttattaccttgtggattttaattatccatcttgtctaatcttgttctctgtcatcctagataatgaggtgtttgtgggagcagagctctgcacacaccaggggatgtaataaatgtttgcacttggcccagtatattatgaatgtggcacagtaaataaagtttgtgtacaaaatactagtttatttctatgggagccattatgttcaggatatataaaatgtatctaattaaacaattttgaatctattttgtgctctagaaatgttcttttggggaaagatggaaagaaatgtataaatggagttaagattaaagtatttggggttttttttccccaaaagcttcccagttgtttagaaataatactatccaaagtaggattcggtcctgtaagtcctaactgaatttcttttgtaaaactgatacgtttaaactgtacattgcataatcattctgttaaactaaacctttgtttaatacataattgtaagagca

SEQ ID NO: 224649 - DNA, 2805 bp, Artificial Sequence
  derived and/or modified sequence
atgtcatccgacgaaaagggtatctccccagcccataagacctcaactcccactcatcgcagtgcctcctccagtacatcctctcaaagggacagccgccaatccatacacattctggagaggactgcctccagctccaccgagcctagtgtctctcgtcaacttttggagcccgaacctgtacctttgagtaaggaagcagatagctgggaaatcattgagggtctgaagattggccagactaatgttcagaagcctgataaacatgaaggtttcatgctgaaaaagcgcaagtggcccctgaagggttggcacaagagattcttcgtcctggacaatggaatgctgaagtacagcaaagcgccattggacatccagaaagggaaggtgcatggatccattgacgtggggttgagcgttatgtccatcaagaagaaggcccgaagaatcgatttggatactgaggagcacatttatcacctcaaagtgaagagtcaggattggtttgatgcgtgggtgagtaaactgcggcaccatcgcctgtaccgccaaaatgagatagtgagatcaccaagagatgcatccttccatatttttccgagcacctcaacagctgaaagctcgcccgctgcaaacgtaagtgtgatggatggaaaaatgcagcccaactcttttccttggcaaagccccctcccatgtagtaactccctcccggctacgtgcactaccggccagagcaaagtcgccgcttggctgcaagactctgaagagatggataggtgtgctgaagatctcgcccactgtcaatcaaacctggttgagctgtccaaactactgcagaacctcgagatcctgcagaggacacaatcagccccaaactttaccgacatgcaagccaactgcgtggacatttccaagaaggacaaacgggtgacccggaggtggcggacaaaaagcgtcagcaaggatactaagattcaattacaggtgccgttctccgccactatgagtcccgtgagactccactcatctaatcccaatctgtgtgctgatatagagtttcagactcctccatcgcatttgaccgaccccctggaaagctcgacggactacaccaaacttcaagaggaattttgtctgatagcccagaaggtgcacagtcttctcaagagcgctttcaattccatcgccatcgagaaggagaagttgaaacaaatggtgtccgaacaggatcactccaagggacactcaactcagatggctcggctcaggcagagtttaagccaggctttgaaccagaacgctgaacttcggtctagactcaaccggatccacagcgagtcaatcatctgtgatcaagtggtctccgtgaacattattccttcccctgatgaggctggtgagcagatccacgtgagtctgcctttatctcagcaggtggcaaatgagtctagactatcaatgtcagaatccgtcagtgagttctttgatgctcaggaagtgctgctgtccgcttcgtctagtgaaaatgaggcaagcgacgatgaatcttacatttcagacgtctcagacaatatctcagaggataacacatcggtggccgacaacatctctcggcaaatcctgaacggtgagctcacagggggagccttcagaaacggcaggcgagcttgtttacccgctccatgtcccgatactagcaatattaatttatggaatatcttaagaaacaatatcggaaaggatctgagtaaggtatccatgccggttgaactcaatgagccactgaatactctgcagcacctttgcgaggaaatggagtattcggaactgttggataaggcgagtgaaacagatgacccctatgagagaatggttctggttgccgcatttgccgtctcggggtattgcagtacttactttagggccggttcaaaacccttcaatccagtgttgggtgagacatacgaatgtatcagggaggacaagggcttcagattcttctcagagcaggtgtcacatcaccccccaatcagcgcatgtcactgcgaaagcaaaaattttgtgttttggcaggacatcagatggaagaacaagttctggggaaagagcatggagatcttgcccgtgggtacccttaacgtgatgctacctaagtacggggattactatgtctggaacaaagttactacctgcatccataatattctctccggacgtcgatggatagagcactatggcgaggtgaccatccgcaacacgaagtcaagcgtgtgtatctgtaagcttacgttcgttaaagtgaactattggaacagtaacatgaacgaagtgcaaggcgtggtgattgatcaggaaggaaaagccgtctacaggctgtttggtaaatggcacgaaggcctgtactgtggggtggctccatcagcaaaatgtatctggcggcctggcagcatgccaactaattatgagctttactacggatttacaagattcgccattgaactcaatgaactcgaccccgtccttaaggatctcctgcccccaacggacgcccgtttccggcctgaccagcgatttctggaggaggggaatctggaggcagccgcttccgaaaaacagcgggtcgaggagttacagcggagcagacgacgatacatggaggaaaataatctggaacatattccaaaattttttaagaaggtaatcgatgccaatcagcgcgaggcttgggtgtctaacgacacctactgggaactgcggaaggatcctggattctcaaaagtcgattcgcctgtgctgtggtag

SEQ ID NO: 224650 - DNA, 2805 bp, Artificial Sequence
  derived and/or modified sequence
atgagcagcgacgagaagggcatcagccccgcccacaagaccagcacccccacccacagaagcgccagcagcagcaccagcagccagagagacagcagacagagcatccacatcctggagagaaccgccagcagcagcaccgagcccagcgtgagcagacagctgctggagcccgagcccgtgcccctgagcaaggaggccgacagctgggagatcatcgagggcctgaagatcggccagaccaacgtgcagaagcccgacaagcacgagggcttcatgctgaagaagagaaagtggcccctgaagggctggcacaagagattcttcgtgctggacaacggcatgctgaagtacagcaaggcccccctggacatccagaagggcaaggtgcacggcagcatcgacgtgggcctgagcgtgatgagcatcaagaagaaggccagaagaatcgacctggacaccgaggagcacatctaccacctgaaggtgaagagccaggactggttcgacgcctgggtgagcaagctgagacaccacagactgtacagacagaacgagatcgtgagaagccccagagacgccagcttccacatcttccccagcaccagcaccgccgagagcagccccgccgccaacgtgagcgtgatggacggcaagatgcagcccaacagcttcccctggcagagccccctgccctgcagcaacagcctgcccgccacctgcaccaccggccagagcaaggtggccgcctggctgcaggacagcgaggagatggacagatgcgccgaggacctggcccactgccagagcaacctggtggagctgagcaagctgctgcagaacctggagatcctgcagagaacccagagcgcccccaacttcaccgacatgcaggccaactgcgtggacatcagcaagaaggacaagagagtgaccagaagatggagaaccaagagcgtgagcaaggacaccaagatccagctgcaggtgcccttcagcgccaccatgagccccgtgagactgcacagcagcaaccccaacctgtgcgccgacatcgagttccagaccccccccagccacctgaccgaccccctggagagcagcaccgactacaccaagctgcaggaggagttctgcctgatcgcccagaaggtgcacagcctgctgaagagcgccttcaacagcatcgccatcgagaaggagaagctgaagcagatggtgagcgagcaggaccacagcaagggccacagcacccagatggccagactgagacagagcctgagccaggccctgaaccagaacgccgagctgagaagcagactgaacagaatccacagcgagagcatcatctgcgaccaggtggtgagcgtgaacatcatccccagccccgacgaggccggcgagcagatccacgtgagcctgcccctgagccagcaggtggccaacgagagcagactgagcatgagcgagagcgtgagcgagttcttcgacgcccaggaggtgctgctgagcgccagcagcagcgagaacgaggccagcgacgacgagagctacatcagcgacgtgagcgacaacatcagcgaggacaacaccagcgtggccgacaacatcagcagacagatcctgaacggcgagctgaccggcggcgccttcagaaacggcagaagagcctgcctgcccgccccctgccccgacaccagcaacatcaacctgtggaacatcctgagaaacaacatcggcaaggacctgagcaaggtgagcatgcccgtggagctgaacgagcccctgaacaccctgcagcacctgtgcgaggagatggagtacagcgagctgctggacaaggccagcgagaccgacgacccctacgagagaatggtgctggtggccgccttcgccgtgagcggctactgcagcacctacttcagagccggcagcaagcccttcaaccccgtgctgggcgagacctacgagtgcatcagagaggacaagggcttcagattcttcagcgagcaggtgagccaccacccccccatcagcgcctgccactgcgagagcaagaacttcgtgttctggcaggacatcagatggaagaacaagttctggggcaagagcatggagatcctgcccgtgggcaccctgaacgtgatgctgcccaagtacggcgactactacgtgtggaacaaggtgaccacctgcatccacaacatcctgagcggcagaagatggatcgagcactacggcgaggtgaccatcagaaacaccaagagcagcgtgtgcatctgcaagctgaccttcgtgaaggtgaactactggaacagcaacatgaacgaggtgcagggcgtggtgatcgaccaggagggcaaggccgtgtacagactgttcggcaagtggcacgagggcctgtactgcggcgtggcccccagcgccaagtgcatctggagacccggcagcatgcccaccaactacgagctgtactacggcttcaccagattcgccatcgagctgaacgagctggaccccgtgctgaaggacctgctgccccccaccgacgccagattcagacccgaccagagattcctggaggagggcaacctggaggccgccgccagcgagaagcagagagtggaggagctgcagagaagcagaagaagatacatggaggagaacaacctggagcacatccccaagttcttcaagaaggtgatcgacgccaaccagagagaggcctgggtgagcaacgacacctactgggagctgagaaaggaccccggcttcagcaaggtggacagccccgtgctgtggtag

SEQ ID NO: 224651 - protein, 446 aa, Artificial Sequence
  derived and/or modified sequence
MREIVHIQAGQCGNQIGTKFWEVISDEHGIDPAGGYVGDSALQLERINVYYNESSSQKYVPRAALVDLEPGTMDSVRSGPFGQLFRPDNFIFGQTGAGNNWAKGHYTEGAELVDAVLDVVRKECEHCDCLQGFQLTHSLGGGTGSGMGTLLISKIREEFPDRIMNTFSVMPSPKVSDTVVEPYNATLSVHQLVENTDETYCIDNEALYDICFRTLKLTTPTYGDLNHLVSATMSGVTTSLRFPGQLNADLRKLAVNMVPFPRLHFFMPGFAPLTSRGSQQYRALTVPELTQQMFDARNMMAACDPRHGRYLTVATVFRGPMSMKEVDEQMLAIQSKNSSYFVEWIPNNVKVAVCDIPPRGLKMASTFIGNSTAIQELFKRISEQFSAMFRRKAFLHWFTGEGMDEMEFTEAESNMNDLVSEYQQYQDATANDGEEAFEDEEEEIDG

SEQ ID NO: 224652 - protein, 374 aa, Artificial Sequence
  derived and/or modified sequence
MDSVRSGPFGQLFRPDNFIFGQTGAGNNWAKGHYTEGAELVDAVLDVVRKECEHCDCLQGFQLTHSLGGGTGSGMGTLLISKIREEFPDRIMNTFSVMPSPKVSDTVVEPYNATLSVHQLVENTDETYCIDNEALYDICFRTLKLTTPTYGDLNHLVSATMSGVTTSLRFPGQLNADLRKLAVNMVPFPRLHFFMPGFAPLTSRGSQQYRALTVPELTQQMFDARNMMAACDPRHGRYLTVATVFRGPMSMKEVDEQMLAIQSKNSSYFVEWIPNNVKVAVCDIPPRGLKMASTFIGNSTAIQELFKRISEQFSAMFRRKAFLHWFTGEGMDEMEFTEAESNMNDLVSEYQQYQDATANDGEEAFEDEEEEIDG

SEQ ID NO: 224653 - protein, 418 aa, Artificial Sequence
  derived and/or modified sequence
MREIVHIQAGQCGNQIGTKFWEVISDEHGIDPAGGYVGDSALQLERINVYYNESSSQKYVPRAALVDLEPGTMDSVRSGPFGQLFRPDNFIFGQTGAGNNCLQGFQLTHSLGGGTGSGMGTLLISKIREEFPDRIMNTFSVMPSPKVSDTVVEPYNATLSVHQLVENTDETYCIDNEALYDICFRTLKLTTPTYGDLNHLVSATMSGVTTSLRFPGQLNADLRKLAVNMVPFPRLHFFMPGFAPLTSRGSQQYRALTVPELTQQMFDARNMMAACDPRHGRYLTVATVFRGPMSMKEVDEQMLAIQSKNSSYFVEWIPNNVKVAVCDIPPRGLKMASTFIGNSTAIQELFKRISEQFSAMFRRKAFLHWFTGEGMDEMEFTEAESNMNDLVSEYQQYQDATANDGEEAFEDEEEEIDG

SEQ ID NO: 224654 - DNA, 1257 bp, Artificial Sequence
  derived and/or modified sequence
atgagagagatcgtgcacatccaggccggccagtgcggcaaccagatcggcaccaagttctgggaggtgatcagcgacgagcacggcatcgaccccgccggcggctacgtgggcgacagcgccctgcagctggagagaatcaacgtgtactacaacgagagcagcagccagaagtacgtgcccagagccgccctggtggacctggagcccggcaccatggacagcgtgagaagcggccccttcggccagctgttcagacccgacaacttcatcttcggccagaccggcgccggcaacaactgcctgcagggcttccagctgacccacagcctgggcggcggcaccggcagcggcatgggcaccctgctgatcagcaagatcagagaggagttccccgacagaatcatgaacaccttcagcgtgatgcccagccccaaggtgagcgacaccgtggtggagccctacaacgccaccctgagcgtgcaccagctggtggagaacaccgacgagacctactgcatcgacaacgaggccctgtacgacatctgcttcagaaccctgaagctgaccacccccacctacggcgacctgaaccacctggtgagcgccaccatgagcggcgtgaccaccagcctgagattccccggccagctgaacgccgacctgagaaagctggccgtgaacatggtgcccttccccagactgcacttcttcatgcccggcttcgcccccctgaccagcagaggcagccagcagtacagagccctgaccgtgcccgagctgacccagcagatgttcgacgccagaaacatgatggccgcctgcgaccccagacacggcagatacctgaccgtggccaccgtgttcagaggccccatgagcatgaaggaggtggacgagcagatgctggccatccagagcaagaacagcagctacttcgtggagtggatccccaacaacgtgaaggtggccgtgtgcgacatcccccccagaggcctgaagatggccagcaccttcatcggcaacagcaccgccatccaggagctgttcaagagaatcagcgagcagttcagcgccatgttcagaagaaaggccttcctgcactggttcaccggcgagggcatggacgagatggagttcaccgaggccgagagcaacatgaacgacctggtgagcgagtaccagcagtaccaggacgccaccgccaacgacggcgaggaggccttcgaggacgaggaggaggagatcgacggctag

SEQ ID NO: 224655 - DNA, 1341 bp, Artificial Sequence
  derived and/or modified sequence
atgcgagaaatagtccacattcaggctggacagtgcggcaatcagattgggactaagttttgggaggtgatctcagacgagcatggcatcgatccggctggaggctacgtcggtgactctgcactccaactcgagcggataaacgtgtactacaatgaatctagtagccagaaatacgtgccaagggcggccctggtcgacctggagcccggaaccatggattccgttcggtccggcccttttggccagctgtttcgccctgataatttcatcttcggccagaccggcgcaggcaataactgggctaaggggcactatactgaaggcgccgagctggtggatgcggtactcgacgtggtgcgtaaggaatgcgaacattgtgactgtctgcaggggtttcaacttactcactcacttggcggtggaaccggtagcggcatgggcacactgttgatttctaagattagagaggaattccccgaccgcattatgaacacgttttcagtaatgcctagcccgaaagtgtccgatacagtagtggagccctataacgccaccctgtcagtgcaccagctggtggaaaacaccgatgaaacatattgtatcgacaacgaggctctgtacgacatttgctttaggacgctcaagctcaccacccccacctatggcgatctaaaccatctggtaagtgcaactatgtctggtgtgacaactagtctcagatttccgggacagctgaacgcagacctgaggaaattggctgtaaacatggtaccatttcctagactgcacttcttcatgccagggttcgcccccctgacgagtcgcggctcgcagcagtacagggccctgactgtcccagagctgacccagcagatgtttgatgcaagaaatatgatggcggcatgcgacccgaggcacggaagataccttaccgtggcgacagtgtttcgggggcctatgtcaatgaaggaggtcgacgagcaaatgctggccattcagagcaaaaattcaagttattttgtagaatggatcccaaataacgtaaaggttgccgtgtgtgacatccctcctcgaggactcaaaatggccagcacttttataggaaactcaactgccattcaggagcttttcaagcgcatctcggagcagttctcagcgatgttcaggagaaaggccttcctccactggttcaccggggagggaatggatgagatggagttcactgaggcagagtccaatatgaacgatctggtgtcagagtatcagcagtaccaggacgcaacagcaaatgatggcgaggaggcttttgaagatgaggaagaagagatcgacggatag

SEQ ID NO: 224656 - DNA, 1257 bp, Artificial Sequence
  derived and/or modified sequence
atgcgtgagatcgtgcatatccaagccggtcagtgtgggaaccagattggcaccaagttttgggaggtgattagcgacgaacatggtatcgatccagccggagggtacgtgggtgacagcgcattgcaattggagcggatcaacgtatattacaatgagtctagctcccagaaatatgtcccccgcgccgccctggtggacctggagcccggaacgatggattcagtgagatctgggccattcggacagctgttccgtcccgataacttcatcttcggtcagaccggggcagggaataactgtctacaaggcttccagctgactcattcactagggggcggtactggctctggtatgggtacacttctgatttccaaaattagagaggaattcccagatagaatcatgaacacttttagtgttatgcccagccctaaggtgtctgacacggtggtagaaccttataatgccaccctgtcagtgcaccagctggtggagaacactgatgagacctactgcatcgacaacgaagctctctatgacatttgctttcgcaccctgaagctcacaacacctacctatggcgatctcaaccatctggtgtccgcgactatgtctggagtgacgacctcgctgcgatttcccggtcagctcaatgctgacttgaggaaattggccgtgaacatggtcccattcccccggttacacttcttcatgccaggatttgcccccctgactagccgcggatcacagcagtaccgagctctcacggtgcctgaactcacccagcaaatgtttgacgccaggaatatgatggccgcctgcgacccccgacacggccggtacctgaccgtcgccactgtgttccgggggcctatgtccatgaaagaagtggatgaacagatgctcgctatccagtcaaagaactccagctatttcgtggaatggattccaaacaatgttaaagtcgccgtctgcgacattccaccgaggggactcaagatggcttcaacattcatcggcaatagcacagccatacaggagctcttcaagcgaattagcgagcaattctccgccatgttccggcggaaggcttttctgcattggttcaccggggagggcatggatgaaatggaatttacagaagccgaatccaacatgaatgacttagtgtccgaataccagcagtatcaggatgcaacggccaacgatggggaggaagcattcgaggacgaagaagaagagattgatggctag

SEQ ID NO: 224657 - DNA, 1341 bp, Artificial Sequence
  derived and/or modified sequence
atgagggagatcgtgcacatccaggccggccagtgtggcaaccagatcggcaccaagttctgggaggtgatcagtgatgagcacggcatcgaccctgctgggggctacgtgggggacagcgccctgcagctggagcgcatcaacgtgtactacaatgaaagcagcagccagaagtatgtgcccagggctgccctggtggacctggagcccggcaccatggattctgtgcgcagcggccccttcggccagctgttccggccagacaacttcatcttcggccagacaggagctggcaacaactgggccaagggccactacacagaaggagctgagctggtggatgctgtgctggatgtggtgaggaaagaatgtgagcactgtgactgcctgcagggcttccagctgacccacagcctgggcggcggcactggaagtggcatgggcaccctgctgatcagcaagatccgggaggagttcccagaccgcatcatgaacaccttctctgtgatgcccagccccaaggtgtctgacacagtggtggagccctacaatgccaccctgtctgtgcaccagctggtggagaacacagatgagacctactgcatcgacaatgaggccctgtatgacatctgcttccgcaccctgaagctgaccacccccacctacggggacctgaaccacctggtgtctgccaccatgtctggagtgaccaccagcctgcgcttccctggccagctgaatgctgacctgaggaagctggccgtgaacatggtgcccttcccccggctgcacttcttcatgcctggctttgcccccctgaccagccggggcagccagcagtaccgggccctgactgtgcctgagctgacccagcagatgtttgatgccaggaacatgatggccgcctgtgaccccaggcatggccgctacctgactgtggccaccgtcttccggggccccatgtccatgaaggaggtggatgagcagatgctggccatccagagcaagaacagcagctactttgtggagtggatccccaacaacgtgaaggtggccgtgtgtgacatccccccccggggcctgaagatggccagcaccttcatcggcaacagcacagccatccaggagctgttcaagaggatcagcgagcagttcagcgccatgttccggaggaaggccttcctgcactggttcaccggggagggcatggatgagatggagttcacagaagctgagagcaacatgaatgacctggtgtctgagtaccagcagtaccaggatgccacagccaatgatggagaggaggcctttgaagatgaggaggaggagattgatggatag

SEQ ID NO: 224658 - DNA, 1257 bp, Artificial Sequence
  derived and/or modified sequence
atgagggagatcgtgcacatccaggccggccagtgtggcaaccagatcggcaccaagttctgggaggtgatcagtgatgagcacggcatcgaccctgctgggggctacgtgggggacagcgccctgcagctggagcgcatcaacgtgtactacaatgaaagcagcagccagaagtatgtgcccagggctgccctggtggacctggagcccggcaccatggattctgtgcgcagcggccccttcggccagctgttccggccagacaacttcatcttcggccagacaggagctggcaacaactgcctgcagggcttccagctgacccacagcctgggcggcggcactggaagtggcatgggcaccctgctgatcagcaagatccgggaggagttcccagaccgcatcatgaacaccttctctgtgatgcccagccccaaggtgtctgacacagtggtggagccctacaatgccaccctgtctgtgcaccagctggtggagaacacagatgagacctactgcatcgacaatgaggccctgtatgacatctgcttccgcaccctgaagctgaccacccccacctacggggacctgaaccacctggtgtctgccaccatgtctggagtgaccaccagcctgcgcttccctggccagctgaatgctgacctgaggaagctggccgtgaacatggtgcccttcccccggctgcacttcttcatgcctggctttgcccccctgaccagccggggcagccagcagtaccgggccctgactgtgcctgagctgacccagcagatgtttgatgccaggaacatgatggccgcctgtgaccccaggcatggccgctacctgactgtggccaccgtcttccggggccccatgtccatgaaggaggtggatgagcagatgctggccatccagagcaagaacagcagctactttgtggagtggatccccaacaacgtgaaggtggccgtgtgtgacatccccccccggggcctgaagatggccagcaccttcatcggcaacagcacagccatccaggagctgttcaagaggatcagcgagcagttcagcgccatgttccggaggaaggccttcctgcactggttcaccggggagggcatggatgagatggagttcacagaagctgagagcaacatgaatgacctggtgtctgagtaccagcagtaccaggatgccacagccaatgatggagaggaggcctttgaagatgaggaggaggagattgatggatag

SEQ ID NO: 224659 - DNA, 1341 bp, Artificial Sequence
  derived and/or modified sequence
atgcgggagatcgtgcacatccaggccggccagtgcggcaaccagatagggaccaaattttgggaggtgatatcggacgagcacgggattgaccctgccggcggttacgtgggggattccgccttgcagctggagcggataaacgtgtactataacgaatcgtccagtcaaaagtacgtgccgcgggccgctctcgtggacctggaacctggtactatggattctgtgcgcagcggtcccttcggtcaactgtttcggccagataattttatatttggacagacaggggcgggcaacaactgggctaaaggccactataccgaaggtgctgaactcgtggacgcagttctggacgtggtgcgcaaggaatgtgagcattgcgactgcctccagggctttcaactaacccattcccttgggggcggaactggatcgggaatggggactctgctaatctcgaagattcgggaggagtttcctgacagaatcatgaacacattctccgtgatgcccagtcctaaggtttccgacacggtcgtggagccatacaatgctacactgtcagtgcaccagctggtggagaacaccgacgagacatactgcattgacaacgaggcactttacgacatctgttttcgcacactgaaactgacaacgccaacgtatggcgatctcaatcatctcgtgagcgccacaatgagcggtgttactacaagccttagattccccgggcaactcaacgccgaccttagaaagttagcagttaacatggtgccatttccccggctccatttcttcatgcccggctttgccccacttacctcaagagggtcccagcaataccgcgccctgaccgtgccggagctcactcaacagatgttcgacgctcggaatatgatggcggcgtgtgatccccgacacgggcgctacctcacggtagctaccgttttcagaggcccaatgtccatgaaagaggtcgatgaacagatgctcgctattcagagcaagaattcctcatacttcgtcgagtggataccaaacaacgtgaaggtagccgtctgcgacatcccacctagggggctgaagatggcctccacatttataggaaactccacagccatccaggagctattcaaacgcatttcagagcaattttctgccatgtttaggcggaaagcattcctccattggttcaccggcgagggcatggatgagatggagtttacagaagcagaaagtaacatgaacgaccttgttagtgaataccagcagtatcaggacgcaaccgcaaatgacggcgaagaagccttcgaagacgaggaagaagagattgatggatag

SEQ ID NO: 224660 - DNA, 1257 bp, Artificial Sequence
  derived and/or modified sequence
atgcgggagatcgtgcacatccaggccggccagtgcggcaaccagattggaaccaagttttgggaagttatcagcgacgaacacggaatcgacccagctggcgggtatgttggtgatagcgccttgcaactcgaacgtattaatgtgtattacaacgaatcatctagccagaagtatgttccgcgggcggccctggtggatctggagccagggaccatggattctgtccgatctggaccttttggccagttgtttcgaccagataattttatcttcgggcagactggcgccgggaacaattgtttacaggggtttcagctaacccactctttgggaggtgggactgggtcaggcatgggcacgctccttatttcaaaaattcgagaggagtttcccgacaggatcatgaatacattctcagtaatgccgagtccaaaagtgtctgacacagtggtggaaccctataacgctactctcagcgtgcatcaattagtggagaataccgacgaaacatattgtattgataacgaggctttatatgacatctgtttccggacattaaaactaacaactccaacttatggcgacctcaaccatctggtgtccgccacaatgtctggcgttactacttctctcaggttccccggacagctgaatgctgatcttcggaaactagccgttaacatggttccatttccacgtttacacttcttcatgcccggcttcgctcctttaacgagccgcgggtctcagcagtatcgagcactcaccgtgcctgaactgacccaacagatgtttgacgccagaaatatgatggctgcttgcgacccacgtcacgggagatatcttactgtggctaccgtcttccgtgggcccatgtccatgaaagaggttgacgagcagatgctggccatccaaagtaagaattcaagctactttgtggaatggatccctaacaatgttaaggtggcagtgtgtgacataccaccccggggattaaaaatggcatcaacttttattggaaattcaacagccattcaggaactgtttaaacgcatcagtgaacagttcagtgcaatgtttcgccgcaaagctttcctgcactggttcactggagaaggcatggatgaaatggaattcactgaagcagaaagtaacatgaacgacctcgtttcagagtatcaacaataccaggacgctaccgcaaacgacggcgaagaggcttttgaagatgaagaggaggagattgacgggtag

SEQ ID NO: 224661 - DNA, 1341 bp, Artificial Sequence
  derived and/or modified sequence
atgagagagatcgtgcatatccaggccggacagtgcggcaaccagattggcactaagttctgggaagtgatctcggatgagcatggaatcgacccagccggtgggtatgtgggggatagcgccttgcaactcgagaggatcaacgtatattacaacgaatcctcatctcagaagtacgtgccacgtgctgctctggtggacctggaacccggaaccatggactctgttagatcagggcctttcggtcagttgttccggcctgacaatttcatctttgggcagacaggcgctggcaacaattgggctaagggacactataccgaaggggctgagctggtggatgcagtactcgacgtggtgcggaaagagtgtgaacattgtgactgcttacagggctttcagctcacccatagtctggggggagggacaggtagcggcatggggacgctgttgataagtaagatccgcgaggagtttcctgacaggattatgaacacgttttcagttatgccaagcccaaaggtctcagacacggttgtagaaccgtataatgcgaccctcagcgtccaccagctggtcgagaatacagacgaaacatactgcattgataacgaagcattatatgacatatgctttaggaccttgaaactgacaaccccaacgtacggggatctgaaccatctggtgagcgccaccatgtctggagttacgacttcattacgattcccgggacaattgaacgccgacctgcgaaagctggccgtcaacatggttccctttccaagactgcatttcttcatgcctggattcgccccattgacctcccgaggctctcagcagtacagagcacttacggtgccagaactaactcagcaaatgtttgatgctcgtaacatgatggctgcctgcgatcccaggcacggcaggtatctgaccgtggccacagtgtttcgcggacccatgtccatgaaggaagtcgatgagcagatgctagcaatccagagcaagaactcctcttattttgtagaatggatcccaaacaatgttaaggttgccgtctgtgatatccccccacgaggcctcaaaatggcgagtacttttattggaaatagcactgcaatccaggagctattcaagcgcatctcagaacagttctccgccatgttccggagaaaggcctttctgcactggtttacaggggagggcatggatgaaatggagtttacagaggcggagagcaacatgaatgacctggtttctgagtatcagcagtatcaggatgccacggcaaatgacggggaggaggcgttcgaggatgaagaggaagagattgacggttag

SEQ ID NO: 224662 - DNA, 2163 bp, Artificial Sequence
  derived and/or modified sequence
agttgccgctgtcgtccgcagagccagttcctagcgcagagccgcgcccgccatgagggagatcgtgcacatccaggcgggccagtgcgggaaccagatcggcaccaaggtgggcctggcgcggtgcagggcctctccgcgggtcggctgctggcgggccccgggtctcccggcgcgacccccgccggggcgcgcacccgctgtgcgcccctgggtcctcggagcccggtgcggacccgcgagggccgcagggagggagcgcccggggcgtggccggccggggaccttctactcttcgctccccacccccatcccaactgggagcggctgccggcggctcaggcgcgcctggaattcggccgccggggcgcctggggtgggcgcgggtggcggcgtcccgggctctgggttctgagcgtctgtccccccgccttgccctgcccaagttttgggaagtgatcagcgatgagcacggcatcgacccggccggaggctacgtgggagactcggcgctgcagctggagagaatcaacgtctactacaatgagtcatcgtctcagaaatatgtgcccagggccgccctggtggacttagagccaggcaccatggacagcgtgcggtctgggccttttgggcagcttttccggcctgacaacttcatctttggccagacgggtgcagggaacaactgggcgaaagggcactacacggagggcgcggagctggtggacgcagtgctggacgtggtgcggaaggagtgcgagcactgcgactgcctgcagggcttccagctcacgcactcgctgggcggcggcacgggctcaggcatgggcacgctgctcatcagcaagatccgtgaggagttcccggaccgcatcatgaacaccttcagcgtcatgccctcgcccaaggtgtcggacacggtggtggagccctacaatgccacactgtcggtgcaccagctggtggagaatacagacgagacctactgcatcgacaacgaggcgctctatgacatctgcttccgcactctgaagctgacaacgcccacctacggggacctcaaccacctggtgtccgccaccatgagtggggtcaccacctcgctgcgcttcccgggccagctcaatgctgacctgcgcaagctggcggtgaacatggtgcccttcccgcgcctgcacttcttcatgcctggcttcgcgccgctcaccagccgcggcagccagcagtaccgggccctgaccgtgcccgagctcacccagcagatgttcgacgccaggaacatgatggccgcctgcgatccgcgccatggccgctacctgaccgtggccaccgtgttccgcgggcccatgtccatgaaggaggtggacgagcagatgctggccatccagagtaagaacagcagctacttcgtggagtggattcccaacaacgtgaaggtggccgtgtgcgacatcccgccccgcggcctgaagatggcctccaccttcatcggcaacagcacggccatccaggagctgttcaagcgcatctccgagcagttctcagccatgttccggcgcaaggccttcctgcactggttcacgggtgagggcatggatgaaatggagttcaccgaggcggagagcaacatgaacgacctggtatccgagtaccagcagtaccaggatgccaccgccaatgacggggaggaagcttttgaggatgaggaagaggagatcgatggatagtcggaatagagccgccccaactcagatcctacaacacgcaagttccttcttgaaccctggtgcctcctaccctatggccctgaatggtgcactggtttaattgtgttggtgtcggcccctcacaaatgcagccaagtcatgtaattagtcatctggaacaaagactaaaaacagcagagaattgcgggttctacccagtcagaagatcacaccatggagactttctactagaggacttgaaagagaactgaggggccacaaaataaacttcaccttccattaagtgttcaagcatgtctgcaaattaggagggagttagaaacagtctttttcatcctttgtgatgaagcctgaaattgtgccgtgttgccttatatgaatatgcagtatgggactttgaaataatgattcataataaaatactaaacgtgtg

SEQ ID NO: 224663 - DNA, 1257 bp, Artificial Sequence
  derived and/or modified sequence
atgagggaaatcgttcacatccaggcaggacagtgcggaaaccagatcggcaccaagttctgggaggtcatctcggatgagcatggtattgatcctgctggaggatacgtgggtgacagcgccctacagttggagcggattaatgtttactataatgagagctcaagtcaaaaatacgtgcctagggccgctctcgtagacctggaaccaggaaccatggattcagtgaggtctggacccttcggtcagctgtttagacccgacaactttattttcggccagactggtgcagggaataactgcctccagggcttccagctgacacattccttgggcggtggaaccgggtctggaatgggcaccctcctgatcagcaaaataagggaagagttccccgatcgcattatgaatacgttcagcgtgatgccatctcctaaggtcagcgataccgtggtagaaccttacaacgccacattgtcagtgcaccagctggttgagaacaccgacgagacttattgtattgataacgaggctctgtatgatatttgctttcgtaccctgaaacttactacccccacttacggcgacctgaaccatctcgtgtcagcgactatgagcggagtgaccacctccctaaggttcccaggacagctgaacgcggatctccgcaaattagcagtgaatatggtgcccttccctcgcctgcacttcttcatgccaggctttgcacccctaacatcacggggttctcagcagtacagagctctgaccgtacctgaattgacccagcaaatgttcgacgccagaaacatgatggccgcttgtgaccctagacatggtagatacctcaccgtggcaaccgtgttcaggggcccaatgagtatgaaagaagtggatgagcagatgctggcgatccagagcaaaaactcatcttatttcgtggagtggatccccaacaacgtgaaagtggctgtttgcgacataccacctcgcggactgaaaatggcgtcaacattcatagggaactctacagctattcaggagctctttaaaaggatttctgagcagttcagcgccatgttccggcgaaaggcctttctgcactggtttacgggcgaaggcatggatgagatggagttcactgaggccgaaagtaatatgaacgacctggtatccgaatatcagcagtaccaagatgctacagccaacgatggagaggaggcttttgaggacgaggaggaagaaatcgatggctag

SEQ ID NO: 224664 - DNA, 1490 bp, Artificial Sequence
  derived and/or modified sequence
agccagttcctagcgcagagccgcgcccgccatgagggagatcgtgcacatccaggcgggccagtgcgggaaccagatcggcaccaagttttgggaagtgatcagcgatgagcacggcatcgacccggccggaggctacgtgggagactcggcgctgcagctggagagaatcaacgtctactacaatgagtcatcgtctcagaaatatgtgcccagggccgccctggtggacttagagccaggcaccatggacagcgtgcggtctgggccttttgggcagcttttccggcctgacaacttcatctttggccagacgggtgcagggaacaactgcctgcagggcttccagctcacgcactcgctgggcggcggcacgggctcaggcatgggcacgctgctcatcagcaagatccgtgaggagttcccggaccgcatcatgaacaccttcagcgtcatgccctcgcccaaggtgtcggacacggtggtggagccctacaatgccacactgtcggtgcaccagctggtggagaatacagacgagacctactgcatcgacaacgaggcgctctatgacatctgcttccgcactctgaagctgacaacgcccacctacggggacctcaaccacctggtgtccgccaccatgagtggggtcaccacctcgctgcgcttcccgggccagctcaatgctgacctgcgcaagctggcggtgaacatggtgcccttcccgcgcctgcacttcttcatgcctggcttcgcgccgctcaccagccgcggcagccagcagtaccgggccctgaccgtgcccgagctcacccagcagatgttcgacgccaggaacatgatggccgcctgcgatccgcgccatggccgctacctgaccgtggccaccgtgttccgcgggcccatgtccatgaaggaggtggacgagcagatgctggccatccagagtaagaacagcagctacttcgtggagtggattcccaacaacgtgaaggtggccgtgtgcgacatcccgccccgcggcctgaagatggcctccaccttcatcggcaacagcacggccatccaggagctgttcaagcgcatctccgagcagttctcagccatgttccggcgcaaggccttcctgcactggttcacgggtgagggcatggatgaaatggagttcaccgaggcggagagcaacatgaacgacctggtatccgagtaccagcagtaccaggatgccaccgccaatgacggggaggaagcttttgaggatgaggaagaggagatcgatggatagtcggaatagagccgccccaactcagatcctacaacacgcaagttccttcttgaaccctggtgcctcctaccctatggccctgaatggtgcactggtttaattgtgttggtgtcggcccctcacaaatgcagccaagtcatgtaattagtcatctggaacaaagactaaaaacagcagagaattgcgggttctacccagtcag

SEQ ID NO: 224665 - DNA, 2002 bp, Artificial Sequence
  derived and/or modified sequence
ctcccggcaagggtcccccgactggcgcccgcgcgtcctccctcggctgctgcaggccgggccgcggcgtcgagcgggggcggcggggcggggcccgcagccattggcgagcggcggggcgggggcgggggcgcggagggtcggccccgggacgcgcgcagccggcccgcagttgccgctgtcgtccgcagagccagttcctagcgcagagccgcgcccgccatgagggagatcgtgcacatccaggcgggccagtgcgggaaccagatcggcaccaagttttgggaagtgatcagcgatgagcacggcatcgacccggccggaggctacgtgggagactcggcgctgcagctggagagaatcaacgtctactacaatgagtcatcgtctcagaaatatgtgcccagggccgccctggtggacttagagccaggcaccatggacagcgtgcggtctgggccttttgggcagcttttccggcctgacaacttcatctttggccagacgggtgcagggaacaactgggcgaaagggcactacacggagggcgcggagctggtggacgcagtgctggacgtggtgcggaaggagtgcgagcactgcgactgcctgcagggcttccagctcacgcactcgctgggcggcggcacgggctcaggcatgggcacgctgctcatcagcaagatccgtgaggagttcccggaccgcatcatgaacaccttcagcgtcatgccctcgcccaaggtgtcggacacggtggtggagccctacaatgccacactgtcggtgcaccagctggtggagaatacagacgagacctactgcatcgacaacgaggcgctctatgacatctgcttccgcactctgaagctgacaacgcccacctacggggacctcaaccacctggtgtccgccaccatgagtggggtcaccacctcgctgcgcttcccgggccagctcaatgctgacctgcgcaagctggcggtgaacatggtgcccttcccgcgcctgcacttcttcatgcctggcttcgcgccgctcaccagccgcggcagccagcagtaccgggccctgaccgtgcccgagctcacccagcagatgttcgacgccaggaacatgatggccgcctgcgatccgcgccatggccgctacctgaccgtggccaccgtgttccgcgggcccatgtccatgaaggaggtggacgagcagatgctggccatccagagtaagaacagcagctacttcgtggagtggattcccaacaacgtgaaggtggccgtgtgcgacatcccgccccgcggcctgaagatggcctccaccttcatcggcaacagcacggccatccaggagctgttcaagcgcatctccgagcagttctcagccatgttccggcgcaaggccttcctgcactggttcacgggtgagggcatggatgaaatggagttcaccgaggcggagagcaacatgaacgacctggtatccgagtaccagcagtaccaggatgccaccgccaatgacggggaggaagcttttgaggatgaggaagaggagatcgatggatagtcggaatagagccgccccaactcagatcctacaacacgcaagttccttcttgaaccctggtgcctcctaccctatggccctgaatggtgcactggtttaattgtgttggtgtcggcccctcacaaatgcagccaagtcatgtaattagtcatctggaacaaagactaaaaacagcagagaattgcgggttctacccagtcagaagatcacaccatggagactttctactagaggacttgaaagagaactgaggggccacaaaataaacttcaccttccattaagtgttcaagcatgtctgcaaattaggagggagttagaaacagtctttttcatcctttgtgatgaagcctgaaattgtgccgtgttgccttatatgaatatgcagtatgggactttgaaataatgattcataataaaatactaaacgtgtgtcttca

SEQ ID NO: 224666 - DNA, 1341 bp, Artificial Sequence
  derived and/or modified sequence
atgagagagatcgtgcacatccaggccggccagtgcggcaaccagatcggcaccaagttctgggaggtgatcagcgacgagcacggcatcgaccccgccggcggctacgtgggcgacagcgccctgcagctggagagaatcaacgtgtactacaacgagagcagcagccagaagtacgtgcccagagccgccctggtggacctggagcccggcaccatggacagcgtgagaagcggccccttcggccagctgttcagacccgacaacttcatcttcggccagaccggcgccggcaacaactgggccaagggccactacaccgagggcgccgagctggtggacgccgtgctggacgtggtgagaaaggagtgcgagcactgcgactgcctgcagggcttccagctgacccacagcctgggcggcggcaccggcagcggcatgggcaccctgctgatcagcaagatcagagaggagttccccgacagaatcatgaacaccttcagcgtgatgcccagccccaaggtgagcgacaccgtggtggagccctacaacgccaccctgagcgtgcaccagctggtggagaacaccgacgagacctactgcatcgacaacgaggccctgtacgacatctgcttcagaaccctgaagctgaccacccccacctacggcgacctgaaccacctggtgagcgccaccatgagcggcgtgaccaccagcctgagattccccggccagctgaacgccgacctgagaaagctggccgtgaacatggtgcccttccccagactgcacttcttcatgcccggcttcgcccccctgaccagcagaggcagccagcagtacagagccctgaccgtgcccgagctgacccagcagatgttcgacgccagaaacatgatggccgcctgcgaccccagacacggcagatacctgaccgtggccaccgtgttcagaggccccatgagcatgaaggaggtggacgagcagatgctggccatccagagcaagaacagcagctacttcgtggagtggatccccaacaacgtgaaggtggccgtgtgcgacatcccccccagaggcctgaagatggccagcaccttcatcggcaacagcaccgccatccaggagctgttcaagagaatcagcgagcagttcagcgccatgttcagaagaaaggccttcctgcactggttcaccggcgagggcatggacgagatggagttcaccgaggccgagagcaacatgaacgacctggtgagcgagtaccagcagtaccaggacgccaccgccaacgacggcgaggaggccttcgaggacgaggaggaggagatcgacggctag

SEQ ID NO: 224667 - protein, 531 aa, Artificial Sequence
  derived and/or modified sequence
MDEESLESALQTYRAQLQQVELALGAGLDSSEQADLRQLQGDLKELIELTEASLVSVRKSSLLAALDEERPGRQEDAEYQAFREAITEAVEAPAAARGSGSETVPKAEAGPESAAGGQEEEEGEDEEELSGTKVSAPYYSSWGTLEYHNAMVVGTEEAEDGSAGVRVLYLYPTHKSLKPCPFFLEGKCRFKENCRFSHGQVVSLDELRPFQDPDLSSLQAGSACLAKHQDGLWHAARITDVDNGYYTVKFDSLLLREAVVEGDGILPPLRTEATESDSDSDGTGDSSYARVVGSDAVDSAQSSALCPSLAVVGSDAVDSGTCSSAFAGWEVHTRGIGSRLLTKMGYEFGKGLGRHAEGRVEPIHAVVLPRGKSLDQCVETLQKQTRVGKAGTNKPPRCRGRGARPGGRPAPRNVFDFLNEKLQGQAPGALEAGAAPAGRRSKDMYHASKSAKRALSLRLFQTEEKIERTQRDIRSIQEALARNAGRHSVASAQLQEKLAGAQRQLGQLRAQEAGLQQEQRKADTHKKMTEF

SEQ ID NO: 224668 - protein, 97 aa, Artificial Sequence
  derived and/or modified sequence
MDEESLESALQTYRAQLQQVELALGAGLDSSEQADLRQLQGDLKELIELTEASLVSVRKSSLLAALDEERPGRQEDAEYQAFREAITEAVEAPAAAR

SEQ ID NO: 224669 - DNA, 1596 bp, Artificial Sequence
  derived and/or modified sequence
atggacgaggagagcctggagagcgccctgcagacctacagagcccagctgcagcaggtggagctggccctgggcgccggcctggacagcagcgagcaggccgacctgagacagctgcagggcgacctgaaggagctgatcgagctgaccgaggccagcctggtgagcgtgagaaagagcagcctgctggccgccctggacgaggagagacccggcagacaggaggacgccgagtaccaggccttcagagaggccatcaccgaggccgtggaggcccccgccgccgccagaggcagcggcagcgagaccgtgcccaaggccgaggccggccccgagagcgccgccggcggccaggaggaggaggagggcgaggacgaggaggagctgagcggcaccaaggtgagcgccccctactacagcagctggggcaccctggagtaccacaacgccatggtggtgggcaccgaggaggccgaggacggcagcgccggcgtgagagtgctgtacctgtaccccacccacaagagcctgaagccctgccccttcttcctggagggcaagtgcagattcaaggagaactgcagattcagccacggccaggtggtgagcctggacgagctgagacccttccaggaccccgacctgagcagcctgcaggccggcagcgcctgcctggccaagcaccaggacggcctgtggcacgccgccagaatcaccgacgtggacaacggctactacaccgtgaagttcgacagcctgctgctgagagaggccgtggtggagggcgacggcatcctgccccccctgagaaccgaggccaccgagagcgacagcgacagcgacggcaccggcgacagcagctacgccagagtggtgggcagcgacgccgtggacagcgcccagagcagcgccctgtgccccagcctggccgtggtgggcagcgacgccgtggacagcggcacctgcagcagcgccttcgccggctgggaggtgcacaccagaggcatcggcagcagactgctgaccaagatgggctacgagttcggcaagggcctgggcagacacgccgagggcagagtggagcccatccacgccgtggtgctgcccagaggcaagagcctggaccagtgcgtggagaccctgcagaagcagaccagagtgggcaaggccggcaccaacaagccccccagatgcagaggcagaggcgccagacccggcggcagacccgcccccagaaacgtgttcgacttcctgaacgagaagctgcagggccaggcccccggcgccctggaggccggcgccgcccccgccggcagaagaagcaaggacatgtaccacgccagcaagagcgccaagagagccctgagcctgagactgttccagaccgaggagaagatcgagagaacccagagagacatcagaagcatccaggaggccctggccagaaacgccggcagacacagcgtggccagcgcccagctgcaggagaagctggccggcgcccagagacagctgggccagctgagagcccaggaggccggcctgcagcaggagcagagaaaggccgacacccacaagaagatgaccgagttctag

SEQ ID NO: 224670 - DNA, 1596 bp, Artificial Sequence
  derived and/or modified sequence
atggatgaagagtccctcgagagtgcactacaaacctatagggcccagttacagcaggtggagctggctctgggcgccggactggattcttccgaacaagctgacctgagacagctccaaggcgacctgaaggagctaatagagctgacggaagcatctctggtgtccgtccgcaagtcctcactcctggccgcgttagatgaagaacgacctggccggcaggaagatgccgaataccaggcctttagagaagccattaccgaagcggttgaagctcctgccgcagccagggggtccggaagcgaaacagtgccaaaggcagaagccggacctgaatccgcggcaggagggcaagaggaagaggaaggtgaggacgaagaagagctgtctggtacgaaagtctccgctccctattactcgagctggggtacccttgagtaccataacgctatggttgttggcacagaggaggcagaagacgggagcgcaggcgtcagggtcttgtacctatacccaacccacaagagtttaaagccatgtccattctttctggaaggcaaatgccggttcaaggaaaactgcagatttagccatggacaagtggtgtcactggacgagttgcgaccctttcaggatcccgacctgtccagcctacaggcagggagcgcctgcctggccaagcaccaggacggcctgtggcatgcggcacgcattacagatgtagataatggttactacaccgttaagtttgatagtctgttgctcagggaggctgtcgtagaaggtgatggtattctcccacccttgcggacagaggccaccgaatcggattctgactccgacggaaccggcgactcttcttacgcgcgcgtggtggggtcagacgccgtcgatagtgctcagagttcagccctgtgcccaagcttggctgtggtgggtagtgatgcagtggactctggaacctgtagttctgcattcgcaggttgggaagtccatactcgaggtattggatctaggctgctgacgaagatggggtatgaattcggaaagggccttggacgtcatgctgaggggagagtggaacctatacacgccgttgtgttgccaagagggaagtctctcgaccaatgcgtcgaaaccctgcaaaagcaaacccgcgtcggcaaagccggaaccaataagcccccaaggtgtcgtggtcggggcgcacgacctggagggagacctgccccgcggaatgtcttcgactttctcaacgaaaagctccagggtcaggctcccggggcactcgaggcaggagctgcaccagctggtcgacggtctaaggacatgtatcatgcctccaaaagtgccaaaagggcactgtctctccggctgttccagacagaagagaaaatcgagcgtactcagagggacatccgcagtatccaggaagctttggccaggaatgcaggcaggcactctgtggcaagcgcccaactgcaggagaagctcgctggcgctcagcgacaactgggacagctccgcgcgcaggaggctggcctgcaacaagaacagaggaaagccgacacacataagaaaatgacagagttttag

SEQ ID NO: 224671 - DNA, 1596 bp, Artificial Sequence
  derived and/or modified sequence
atggatgaggagagcctggagagcgccctgcagacctaccgggcccagctgcagcaggtggagctggccctgggcgccggcctggacagcagcgagcaggccgacctgcggcagctgcagggcgacctgaaggagctgattgagctgacagaggccagcctggtgtctgtgaggaagagcagcctgctggccgccctggatgaggagaggcctggccggcaggaggatgctgagtaccaggccttccgggaggccatcacagaagctgtggaggccccagctgctgcccggggcagcggcagcgagaccgtgcccaaggccgaggccggccctgagagcgctgctgggggccaggaggaggaggagggggaggatgaggaggagctgagcggcaccaaggtgtctgccccctactacagctcctggggcaccctggagtaccacaatgccatggtggtgggcacagaggaggctgaagatggcagcgctggggtgcgggtgctgtacctgtaccccacccacaagagcctgaagccctgccccttcttcctggagggcaaatgtcgcttcaaggagaactgccgcttcagccacggccaggtggtgtccctggatgagctgcggcccttccaggaccctgacctgagcagcctgcaggccggcagcgcctgcctggccaagcaccaggacggcctgtggcatgctgcccgcatcacagatgtggacaatggctactacacagtgaagtttgacagcctgctgctgcgggaggccgtggtggagggagatggcatcctgccccccctgaggacagaggccacagaaagtgacagcgacagtgatggcactggagacagcagctatgcccgggtggtgggcagtgatgctgtggacagcgcccagagcagcgccctgtgccccagcctggccgtggtgggcagtgatgctgtggacagcggcacctgcagcagcgcctttgctggctgggaggtgcacacccggggcatcggcagccggctgctgaccaagatgggctatgaatttgggaagggcctgggcagacatgctgagggccgggtggagcccatccatgctgtggtgctgccccggggcaagagcctggaccagtgtgtggagaccctgcagaagcagaccagggtgggcaaggccggcaccaacaagcccccacgctgccggggccgcggggcccggcctgggggccgcccagcccccagaaatgtgtttgacttcctgaatgagaagctgcagggccaggcccctggggccctggaggccggggccgccccagctggaagaagaagcaaggacatgtaccacgccagcaagagcgccaagagggccctgagcctgcggctcttccagacagaggagaagattgaaagaacccagagggacatccgcagcatccaggaggccctggccagaaatgccggccgccacagcgtggccagcgcccagctgcaggagaagctggccggggcccagaggcagctgggccagctgcgggcccaggaggccggcctgcagcaggagcagaggaaggctgacacccacaagaagatgacagagttctag

SEQ ID NO: 224672 - DNA, 1596 bp, Artificial Sequence
  derived and/or modified sequence
atggacgaggagagcctggagagcgccctgcagacctaccgggcccagctgcagcaggtcgagctggctcttggcgcaggccttgacagtagcgaacaggcagatctgagacagctgcagggcgatctaaaagagctgattgagctgacggaggcgtcattggtgagtgtgaggaagagctctcttctggcggcacttgacgaggaacggcccggcaggcaggaagatgcagagtaccaggcatttcgagaagccatcaccgaagcagtggaggcacctgctgccgctaggggttctgggagtgagaccgtgcccaaggcagaagctggaccggagagcgctgcaggtggtcaagaggaggaagagggcgaggatgaagaagagctgagtgggaccaaagtttctgcaccttactattccagctggggtactctggaataccacaatgccatggtggtcggcactgaggaggcggaagacggtagcgctggcgtgcgcgtactctatctgtaccccacccacaaatcacttaaaccctgtcccttcttccttgagggtaagtgccgatttaaagaaaactgtcgctttagccacggccaggttgtgtcactggatgagctgagacctttccaagatcccgacctgtcgtccctgcaagccggttctgcttgccttgccaagcaccaggacgggttgtggcatgctgcgcggatcactgacgtggataatggctactacaccgtcaaatttgattcgttattactccgagaggcagtagtcgagggtgatgggattctccctcccctgcggaccgaggcaacagagtcggactccgatagcgatggtaccggcgactcgtcctacgcacgggtggtcggaagcgatgccgtggactcggctcagagcagtgcactctgcccaagtcttgccgtggtcgggtcagacgccgtggacagtgggacgtgctcttctgccttcgccggttgggaagttcacacaagaggcataggttccagactgctgaccaaaatgggatacgaatttggaaaagggctgggacgacacgccgaaggcagagtcgagccgatccacgccgttgtgctcccgcgggggaagagcttagaccagtgcgtcgagactctgcagaagcagactagagttggaaaagccggcacaaacaaacccccccgttgcaggggacgtggggctaggcctgggggtaggcctgccccaagaaacgtgtttgattttctcaacgagaaactacaaggccaagcgcctggagccctggaggcaggagctgcaccagctggacggagatctaaggacatgtaccacgcctctaagagtgccaaacgggctctcagcctgcgccttttccagaccgaggaaaaaattgaaaggacacagagggacataagatcaatccaggaggcccttgcacgcaatgcagggcggcacagcgttgcctccgctcagctccaagaaaagttagctggggctcaaagacagttaggtcagttgcgggctcaggaggccggactgcagcaggaacagcgtaaagctgatacgcacaaaaaaatgacggagttttag

SEQ ID NO: 224673 - DNA, 1596 bp, Artificial Sequence
  derived and/or modified sequence
atggatgaggaatctctcgagagcgctctccaaacttatcgcgctcagctacagcaggtagagctggccctgggtgccggtctggacagctcagagcaggccgacctccggcagctccagggtgatctgaaggagctgatcgagctcacggaggcaagcctagtgtctgttaggaagagctctttgctggcggcattggatgaggagagaccaggtcgacaggaggacgcagagtatcaggccttccgcgaggccatcactgaggcggtggaggctcctgctgccgctcgaggctctgggtcggagacagtgccgaaagcagaggcaggcccagagagtgccgctgggggtcaagaggaggaagagggggaggatgaggaggagctatcaggcacgaaggtgagcgcgccatactattcatcatggggcaccctggagtatcacaatgccatggtcgtcggtacagaggaagcagaagacggctccgctggtgttagagtgctctacctgtatccaacacacaagagtctcaaaccatgtccgttttttctagaggggaagtgtagattcaaggagaactgcagattctcccacggccaggtggtgtctctcgatgagcttagacctttccaggatcctgatctgagcagcctacaagctggaagcgcttgtctggcaaagcatcaagacgggctctggcatgctgcacgcataactgacgtggataatggttactatactgtcaaatttgattcactccttctacgtgaggcagtggtggaaggggatggcattttgcccccactgcgcaccgaggcaacagaatccgacagcgactcagatgggaccggagacagcagctacgctcgcgtcgtcggaagcgatgcggtggacagcgctcaatcaagtgcattatgtccaagcctagcggttgtagggagcgacgcagtggactctggcacatgttcctcagcattcgctggatgggaagtacatactaggggcatcggcagtcggctattgacaaaaatgggatacgagttcggaaagggcctgggccgtcacgccgaaggccgagtggagcccatccacgcagttgtactgcctaggggaaagtccctggatcaatgcgtcgagacactccagaagcagactagggttggcaaagccggaaccaataaacctccacggtgcaggggaagaggcgctcggcctgggggaagacctgcccctcggaatgtcttcgattttttaaacgaaaagctgcagggacaggcccctggtgcgctcgaggcaggcgcagccccagccggaagacgatccaaggacatgtaccatgcatcaaaatccgcgaagagagcgttgtcgctccgtctgttccagactgaagagaagattgaaagaactcagagagacatcaggagcatacaggaggctctggctcggaacgctggtcgccactcggtggcctcagcacagctgcaggaaaaactcgccggtgcgcagcgtcaactgggccagctccgcgctcaggaagccggactccagcaggaacaacgcaaggctgatacccacaagaaaatgacagagttctag

SEQ ID NO: 224674 - DNA, 1945 bp, Artificial Sequence
  derived and/or modified sequence
gaaaagggggcgccgggccgctctagccggtgaggccggcgggctctctgtggctgcggctgggaaaccgcgcggaggaggtgcccggccggggaccagccctggtccagcgcctccctctctcagcatggacgaggagagcctggagtcggccttgcagacctaccgtgcgcagctgcagcaggtggagctggccttgggcgccggcctggattcgtctgagcaggctgacctgcgccagctgcagggggacctgaaggagctcatcgagctcaccgaggccagcctggtgtctgtcaggaagagcagcttgttggccgcgctggacgaagagcgcccgggccgccaggaagatgctgagtaccaggctttccgggaggccatcactgaggcggtggaggcaccagcagcggcccgtgggtccggatcagagaccgttcctaaagcagaggcggggccagaatctgcggcaggtgggcaggaggaggaagagggagaggacgaggaagagctgagtgggacaaaggtgagcgcgccctactacagctcctggggcactctggagtatcacaacgccatggtggtgggaacggaagaggcggaggatggctcggcgggtgtccgtgtgctttacctgtaccccactcacaagtctctgaagccgtgcccgttcttcctggagggaaagtgccgctttaaggagaactgcaggttctcccatgggcaggtggtctctctggatgagctgcgccccttccaggacccagacctgagctccctgcaggccggctctgcgtgtctggccaagcaccaggatggcctctggcacgcagcacgcatcaccgatgtggacaacggctactacacagtcaagtttgactcgctgctgctgagggaggccgtggtggagggggacggcatcctgcccccactgcgcacagaggccacagagtccgactcagacagcgacggtacgggtgactccagctatgccagagtggtggggtcggacgccgtggactctgcacagtcctctgccctctgtccgtctcttgcagtggtggggtcagatgctgtggactctgggacctgcagctctgcctttgctggctgggaggtgcacacgcgaggtataggctccagactcctcaccaagatgggctatgagtttggcaagggtttgggccgacacgcggaaggccgggtggagcccatccatgctgtggtgttgcctcgagggaagtcgctggaccagtgtgtggagaccctgcagaagcagaccagggttggcaaggctggcaccaacaagccccccaggtgccggggaagaggggccaggcctgggggccgcccagctcctcggaatgtgtttgacttcctcaatgaaaagctgcaaggtcaggctcctggggccctagaagccggggcggccccagcggggaggaggagcaaggacatgtaccatgccagcaagagtgccaagcgggccctgagcctgcggctcttccagactgaggagaagatcgagcgaacccagcgggacatcaggagcatccaggaggctctcgcccgcaacgctggccggcatagcgtggcgtcagcccagctgcaggagaagctggcaggagcccagcgccagctggggcagctccgggctcaggaagccggcctgcagcaggagcagaggaaggcagacacccacaagaagatgactgagttctagagaccccacaagcactatggacgaagcgtgggaccccagcacgggctgccctcaggaagaccagtgttgcccgaggaggggccggcctgctggcctggggcgtgcagacactgctgagtggagacagagctgcggggtcccatctggacacttacttgcccacctgccagtgtcttgggcatttccttggcaaggacattaaagtgatttcatcacagtgtc

SEQ ID NO: 224675 - protein, 529 aa, Artificial Sequence
  derived and/or modified sequence
MKPHLKQWRQRMLFGIFAWGLLFLLIFIYFTDSNPAEPVPSSLSFLETRRLLPVQGKQRAIMGAAHEPSPPGGLDARQALPRAHPAGSFHAGPGDLQKWAQSQDGFEHKEFFSSQVGRKSQSAFYPEDDDYFFAAGQPGWHSHTQGTLGFPSPGEPGPREGAFPAAQVQRRRVKKRHRRQRRSHVLEEGDDGDRLYSSMSRAFLYRLWKGNVSSKMLNPRLQKAMKDYLTANKHGVRFRGKREAGLSRAQLLCQLRSRARVRTLDGTEAPFSALGWRRLVPAVPLSQLHPRGLRSCAVVMSAGAILNSSLGEEIDSHDAVLRFNSAPTRGYEKDVGNKTTIRIINSQILTNPSHHFIDSSLYKDVILVAWDPAPYSANLNLWYKKPDYNLFTPYIQHRQRNPNQPFYILHPKFIWQLWDIIQENTKEKIQPNPPSSGFIGILIMMSMCREVHVYEYIPSVRQTELCHYHELYYDAACTLGAYHPLLYEKLLVQRLNMGTQGDLHRKGKVVLPGFQAVHCPAPSPVIPHS

SEQ ID NO: 224676 - protein, 95 aa, Artificial Sequence
  derived and/or modified sequence
  misc_feature (1)..(1): Xaa can be any naturally occurring amino acid
XSGFIGILIMMSMCREVHVYEYIPSVRQTELCHYHELYYDAACTLGAYHPLLYEKLLVQRLNMGTQGDLHRKGKVVLPGFQAVHCPAPSPVIPHS

SEQ ID NO: 224677 - protein, 35 aa, Artificial Sequence
  derived and/or modified sequence
MKPHLKQWRQRMLFGIFAWGLLFLLIFIYFTDSNP

SEQ ID NO: 224678 - DNA, 1590 bp, Artificial Sequence
  derived and/or modified sequence
atgaagccccacctgaagcagtggagacagagaatgctgttcggcatcttcgcctggggcctgctgttcctgctgatcttcatctacttcaccgacagcaaccccgccgagcccgtgcccagcagcctgagcttcctggagaccagaagactgctgcccgtgcagggcaagcagagagccatcatgggcgccgcccacgagcccagcccccccggcggcctggacgccagacaggccctgcccagagcccaccccgccggcagcttccacgccggccccggcgacctgcagaagtgggcccagagccaggacggcttcgagcacaaggagttcttcagcagccaggtgggcagaaagagccagagcgccttctaccccgaggacgacgactacttcttcgccgccggccagcccggctggcacagccacacccagggcaccctgggcttccccagccccggcgagcccggccccagagagggcgccttccccgccgcccaggtgcagagaagaagagtgaagaagagacacagaagacagagaagaagccacgtgctggaggagggcgacgacggcgacagactgtacagcagcatgagcagagccttcctgtacagactgtggaagggcaacgtgagcagcaagatgctgaaccccagactgcagaaggccatgaaggactacctgaccgccaacaagcacggcgtgagattcagaggcaagagagaggccggcctgagcagagcccagctgctgtgccagctgagaagcagagccagagtgagaaccctggacggcaccgaggcccccttcagcgccctgggctggagaagactggtgcccgccgtgcccctgagccagctgcaccccagaggcctgagaagctgcgccgtggtgatgagcgccggcgccatcctgaacagcagcctgggcgaggagatcgacagccacgacgccgtgctgagattcaacagcgcccccaccagaggctacgagaaggacgtgggcaacaagaccaccatcagaatcatcaacagccagatcctgaccaaccccagccaccacttcatcgacagcagcctgtacaaggacgtgatcctggtggcctgggaccccgccccctacagcgccaacctgaacctgtggtacaagaagcccgactacaacctgttcaccccctacatccagcacagacagagaaaccccaaccagcccttctacatcctgcaccccaagttcatctggcagctgtgggacatcatccaggagaacaccaaggagaagatccagcccaacccccccagcagcggcttcatcggcatcctgatcatgatgagcatgtgcagagaggtgcacgtgtacgagtacatccccagcgtgagacagaccgagctgtgccactaccacgagctgtactacgacgccgcctgcaccctgggcgcctaccaccccctgctgtacgagaagctgctggtgcagagactgaacatgggcacccagggcgacctgcacagaaagggcaaggtggtgctgcccggcttccaggccgtgcactgccccgcccccagccccgtgatcccccacagctag

SEQ ID NO: 224679 - DNA, 288 bp, Artificial Sequence
  derived and/or modified sequence
tgaagcggcttcatcggcatcctgatcatgatgagcatgtgcagagaggtgcacgtgtacgagtacatccccagcgtgagacagaccgagctgtgccactaccacgagctgtactacgacgccgcctgcaccctgggcgcctaccaccccctgctgtacgagaagctgctggtgcagagactgaacatgggcacccagggcgacctgcacagaaagggcaaggtggtgctgcccggcttccaggccgtgcactgccccgcccccagccccgtgatcccccacagctag

SEQ ID NO: 224680 - DNA, 1590 bp, Artificial Sequence
  derived and/or modified sequence
atgaaaccccacctaaagcagtggcgtcagcggatgctgtttggcattttcgcttggggtctgctgttcttactcatattcatatatttcaccgacagcaacccggcggagccagtgccatcaagtcttagcttcttggaaactcggcggttgctacccgtccagggaaagcagagggcaattatgggcgcagcccatgaacccagcccaccaggggggcttgacgccagacaagcattgccaagagcccatccagccggatctttccatgccggccctggcgacctgcagaagtgggcccagtcacaagatgggttcgagcacaaggagttctttagctctcaggtgggacggaaaagccagtctgccttctaccccgaggacgatgactacttttttgccgctggacagccagggtggcattcccacacccagggtaccctcggcttccccagtccaggcgaacccggcccccgtgagggcgcgtttcccgcagcgcaggtgcagcgcagacgcgtgaagaaacgtcatagacggcaaagaagaagccatgtgctagaagaaggagatgacggggatagactctattcaagtatgtctagagccttcctgtaccgtctgtggaagggcaacgtatcttctaaaatgctgaatccgcgcctgcaaaaagctatgaaggattacttgacagccaataagcacggagttaggtttaggggcaagcgagaggcgggcttgtcacgcgcccagttgctgtgccagcttcgaagcagagccagggtacggaccctggacggtacagaagcacccttcagcgcccttggctggcggagattggtgcccgccgtgccattgagtcaattgcaccccagagggctacgtagctgcgcagtcgttatgagcgctggcgccatccttaatagttctctgggagaagagatcgattctcacgatgccgtcctgagattcaactcagcgccaacaagagggtacgaaaaggacgtcgggaacaagaccaccatccgcattatcaatagtcagatcctgaccaatccttcgcatcactttattgacagtagcctgtataaggatgtgatactggtggcttgggatcctgccccgtattcagcgaacttaaatttatggtacaaaaagcccgactataatttattcaccccctacattcagcatcgacagaggaacccgaatcagcccttttacattcttcatcctaagtttatctggcagttgtgggacatcatccaagagaatacaaaagaaaagattcaaccgaaccctccatcatccggttttatcggaattttaatcatgatgagcatgtgtcgagaagtacacgtttatgagtacatcccatcagtgaggcaaactgaactgtgtcactaccatgaattgtattatgacgcagcgtgcactctcggggcttaccacccattactgtacgaaaagctcctggtgcagcggcttaatatgggcacgcaaggggacctccaccggaaaggaaaagttgtgctgcccggattccaggctgttcattgccccgccccctcgccagtgatcccgcactcctag

SEQ ID NO: 224681 - DNA, 288 bp, Artificial Sequence
  derived and/or modified sequence
tgatctgggttcattggaatcttaatcatgatgtctatgtgccgcgaagtccacgtgtacgaatacattccatccgtgcggcagaccgagttatgtcattaccacgagctttactacgacgccgcctgtactctgggcgcctaccatccgctgttgtacgagaagttacttgtgcagcgtttgaacatgggcacccagggcgatctccacaggaagggtaaagtggtcctccctggctttcaggccgtacattgtcctgccccttcccctgtgataccccactcttag

SEQ ID NO: 224682 - DNA, 1590 bp, Artificial Sequence
  derived and/or modified sequence
atgaagccccacctgaaacagtggagacaacgcatgctattcggaatttttgcttggggcttactgtttctgctgatcttcatatatttcactgacagtaatccagccgaaccggtgccatcttctttgtcttttctcgagactagacggcttctgcctgtccaagggaaacagcgggcaataatgggagccgcccatgaaccgtcccctccaggaggcttggacgcccggcaagccttgccaagggctcaccccgccggttctttccacgcgggtccgggggacctgcagaaatgggcacagagtcaggacggatttgaacacaaggagtttttttcttcacaagtggggcgaaagtcccagtccgctttctacccagaagatgatgactatttctttgccgccgggcagccaggttggcatagtcatacacagggaacattaggcttcccttccccaggtgaacctgggccccgggagggcgccttccctgcagcgcaggtgcagaggcgacgcgttaagaagaggcacagacgccagcggcgctcccatgttctggaagagggcgacgacggagaccggttatattcatccatgtccagggccttcctatatcgcctgtggaagggcaatgtgtcctctaaaatgctaaacccaagactgcagaaagcaatgaaagactatttgactgctaacaagcacggcgttcgctttcggggcaagagggaagctggcttgtctcgcgcccagctgctctgccagctccgatcgagggccagagtgcgaacactggatggcaccgaagccccctttagcgccctcggatggaggaggttggtgccagctgtccccctatctcagctgcatccccgcggtcttagatcctgtgctgtagtcatgtctgcgggagcgatcttaaactcctcattgggcgaggaaattgacagccacgacgcagtccttcggtttaatagcgcccccaccagggggtatgagaaggatgtggggaacaaaacaacaattcgcattatcaactcccagattctgacaaacccatcccatcacttcatcgatagctctctttacaaggacgtgatcctcgttgcatgggaccctgccccttacagtgccaatctcaacctgtggtacaagaaacctgattataatctgttcacaccctacatccaacacaggcagcgtaaccccaatcaacccttctatatccttcacccgaaatttatttggcaactgtgggatatcatacaggagaatactaaggagaagatccagccgaatccaccctcctctggatttattggtatcctaattatgatgtccatgtgcagagaagtgcacgtgtacgaatacatccccagcgtgcgccagacagaactgtgccactaccatgaactgtattacgatgcagcctgcacactgggtgcctaccacccactgctgtacgagaagctgcttgttcaacgactcaacatggggacccaaggcgacctgcaccggaaaggcaaagtcgtcctgcctggcttccaggcggtccactgccccgcgccgtcgcccgtgatcccccatagttag

SEQ ID NO: 224683 - DNA, 1590 bp, Artificial Sequence
  derived and/or modified sequence
atgaagccccacctgaagcagtggaggcagaggatgctgtttggcatctttgcctggggcctgctcttcctgctgatcttcatctacttcacagacagcaacccagctgagcctgtgcccagcagcctgtccttcctggagacccggcggctgctgcctgtgcagggcaagcagagggccatcatgggcgccgcccacgagcccagccccccaggcggcctggatgcccggcaggccctgccccgggcccaccctgctggcagcttccacgccggccctggggacctgcagaagtgggcccagagccaggacggctttgagcacaaggagttcttcagcagccaggtgggcaggaagagccagagcgccttctacccagaagatgatgactacttctttgctgctggccagcccggctggcacagccacacccagggcaccctgggcttccccagccctggagagcccggcccccgggagggcgccttccctgctgcccaggtgcagaggagaagagtgaagaagaggcaccggcggcagaggaggagccacgtgctggaggagggagatgatggagaccggctgtacagctccatgagccgggccttcctgtaccgcctgtggaagggaaatgtgagcagcaagatgctgaacccccggctgcagaaggccatgaaggactacctgacagccaacaagcacggcgtgcgcttccggggcaagcgggaggccggcctgagccgggcccagctgctgtgccagctgcggagccgggcccgggtgaggaccctggatggaacagaggcccccttcagcgccctgggctggaggcggctggtgcctgctgtgcccctgagccagctgcacccccggggcctgcggagctgtgctgtggtgatgtctgctggggccatcctgaacagcagcctgggggaggagattgacagccatgatgctgtgctgcgcttcaacagcgcccccacccggggctatgagaaggatgtgggcaacaagaccaccatccgcatcatcaacagccagatcctgaccaaccccagccaccacttcatcgacagcagcctgtacaaggatgtgatcctggtggcctgggaccctgccccctacagcgccaacctgaacctgtggtacaagaagccagactacaacctcttcaccccctacatccagcaccggcagaggaaccccaaccagcccttctacatcctgcaccccaagttcatctggcagctgtgggacatcatccaggagaacaccaaggagaagatccagcccaacccccccagcagcggcttcatcggcatcctgatcatgatgtccatgtgccgggaggtgcacgtgtatgagtacatccccagcgtgcggcagacagagctgtgccactaccacgagctgtactatgatgctgcctgcaccctgggcgcctaccaccccctgctgtatgagaagctgctggtgcagaggctgaacatgggcacccagggcgacctgcacaggaagggcaaggtggtgctgcccggcttccaggccgtgcactgcccagcccccagccctgtgatcccccacagctag

SEQ ID NO: 224684 - DNA, 288 bp, Artificial Sequence
  derived and/or modified sequence
tgaagcggcttcatcggcatcctgatcatgatgtccatgtgccgggaggtgcacgtgtatgagtacatccccagcgtgcggcagacagagctgtgccactaccacgagctgtactatgatgctgcctgcaccctgggcgcctaccaccccctgctgtatgagaagctgctggtgcagaggctgaacatgggcacccagggcgacctgcacaggaagggcaaggtggtgctgcccggcttccaggccgtgcactgcccagcccccagccctgtgatcccccacagctag

SEQ ID NO: 224685 - DNA, 1590 bp, Artificial Sequence
  derived and/or modified sequence
atgaagccccacctgaagcagtggcggcagcggatgctgttcggcatctttgcatggggtctccttttcctgttgatatttatctattttacagactccaaccccgccgagcccgtcccatcatctctcagttttctggagacccggagattgctgccagttcagggaaagcagagagcgatcatgggggccgcccacgagccatcccctccaggcgggctcgatgcccgccaggccctgcctcgcgctcatccagcaggtagtttccacgctgggccaggtgatctccaaaaatgggcacagtctcaggacggttttgagcataaggagttcttctcatcgcaggtggggcggaaaagtcaaagcgccttttatccagaagacgacgactatttcttcgcggctgggcaacctggttggcacagccacacacagggcacacttggcttccctagcccgggggagccagggccccgagagggtgcattccccgccgcgcaggtgcagagaagaagggtaaaaaagaggcacagacgacagcgtcggtctcacgtcctggaagagggggatgacggcgatagactgtatagcagtatgagccgggcattcttgtatcgtctttggaaaggtaacgtgagtagcaaaatgcttaacccgcggctacagaaggccatgaaagactacctgaccgcaaacaagcacggcgtaaggttcagagggaaaagggaggcaggcctctctcgcgcccaactgctttgtcaattgcgtagccgggcccgggttcgtacactagatgggacggaggcccccttcagcgcacttggttggaggcggcttgtgcctgctgtgccactgtctcagctgcaccccagaggcctgcggtcctgcgccgtggttatgtcagcaggagctattttgaactctagtctaggggaagagatagatagtcatgacgcagtgctaagatttaactctgcgccaactagaggctatgagaaagacgtgggaaataagaccaccatacgcattataaacagccagattcttactaatccatctcaccactttatcgatagttcactgtacaaggatgtgatcctggtggcctgggatcctgctccatactcagcaaacctcaatctatggtacaagaagcctgactacaatctgtttacaccatacattcagcacaggcagaggaatccaaatcaacccttctatattcttcaccccaaatttatctggcaactttgggacatcatccaggagaacacaaaagagaaaattcagccaaatcccccgtcctcagggtttatcggaattttaattatgatgtcaatgtgccgggaggtacatgtctacgaatatataccttctgtgcggcaaacggagctctgccattaccacgaactttactacgatgcagcctgcaccttgggagcctatcatcccctcctgtacgagaaacttcttgtccagcgccttaatatggggacacagggagacctacaccgcaagggtaaagtggtcctccctggctttcaggcggtgcactgtcctgccccatcaccggtgattccccattcctag

SEQ ID NO: 224686 - DNA, 288 bp, Artificial Sequence
  derived and/or modified sequence
tgaagcggcttcatcggcatcctgatcatgatgagcatgtgccgggaagtccatgtgtacgagtacatcccctcagttaggcagaccgaactgtgccactatcatgagctctattacgacgctgcatgtacacttggggcctatcaccctctcctgtacgagaagttgctggtgcagaggctgaacatgggtacgcagggagaccttcaccggaaaggaaaggtggtcttgcccggctttcaggctgtgcactgccccgctccaagtcccgtcattcctcactcctag

SEQ ID NO: 224687 - DNA, 1590 bp, Artificial Sequence
  derived and/or modified sequence
atgaagccccacctgaagcagtggcggcagcggatgctgttcggcatcttcgcatggggccttctgtttctgctgatcttcatctacttcactgactccaatcctgctgagcccgtcccctcctcactcagcttcctggaaactcggcggcttctgccagtgcagggcaagcaacgggcaattatgggggccgctcatgaaccttctcccccaggtggcttggacgcacggcaagccctgcccagagctcaccctgcaggcagtttccacgcgggtcccggagatctgcagaaatgggctcagtctcaggatggcttcgagcacaaggagtttttctcatcccaggtgggtaggaagtcacagtctgctttctatccagaggacgatgactatttttttgccgctggccagcctggatggcattcccatacgcagggaactcttggttttccctctcccggtgagccaggtccacgtgagggcgcctttcccgctgcccaggttcagcggagacgcgtgaaaaagagacatagacgacaacgccggtcacacgtgctggaggagggtgacgatggcgatcgactgtactcttcaatgtcgcgagcctttctgtatagactatggaagggcaatgtgagtagcaagatgctgaacccccgccttcagaaggctatgaaggactacctgacggccaataagcatggtgtgagatttcgggggaagagagaggcggggctgagcagggcccagctgctctgtcagcttcggtctcgagccagagtgaggacattagacggcacagaagcgcctttcagcgcactagggtggaggcgtctggttcctgctgtcccattgagccagctgcatcccaggggcctgagatcgtgcgctgtggtgatgtccgcgggggcaattttgaactcctccttgggagaggagatcgattctcatgatgctgttctgagatttaatagcgcacccaccagaggctatgaaaaagatgtgggcaataaaaccaccatcagaattatcaactctcagattctaaccaatccctcccaccacttcattgattcaagcttatataaagatgtgatactggtcgcctgggatcccgccccctactcagcaaacctgaacctgtggtataagaaacccgactataacctatttactccctatatccagcatagacagcgaaaccctaatcagcccttctacattctgcaccccaaatttatatggcaactatgggacatcatacaggaaaatactaaggagaagattcagccgaatccgccatcttccggctttatcggcattctgatcatgatgtcaatgtgtcgagaagttcacgtttacgagtatatccccagcgtgcggcagactgaactctgccactaccacgagctgtactatgatgcagcctgcacactcggcgcgtatcacccgttgctgtacgaaaaactactggtgcagaggctgaacatggggacccaaggggatttgcatcgcaaaggaaaagtggtgttgcctggttttcaggctgttcactgccccgctccctctcctgtgatcccacactcctag

SEQ ID NO: 224688 - DNA, 1590 bp, Artificial Sequence
  derived and/or modified sequence
atgaagccccacctcaagcagtggcggcagcggatgttattcggaatctttgcctgggggttgttattcctgctgatctttatatactttaccgattctaatccagccgagcctgtcccatcttctctgtcttttcttgagactcgccgactgctgcctgttcaagggaagcagcgggcaattatgggcgcagcacatgaaccatctcccccagggggtcttgacgctagacaggcccttccgagggctcatccagccggatccttccacgccggtcccggtgatctgcagaagtgggcccagagccaggatggctttgaacacaaagagtttttctcttcccaggtgggcaggaagtcgcagtctgccttctaccccgaagacgacgactacttttttgccgcaggccaacctggatggcatagtcacacccaaggaactctgggattcccttcccccggagagcccggacccagagagggcgcatttcccgctgcccaagttcagcgacgcagggtaaaaaaacggcataggcgccaaaggagaagtcatgtactggaggagggggatgatggtgatagactttattccagcatgtctcgcgctttcctctatcgcctgtggaagggcaatgtcagtagcaagatgctgaacccaaggttacagaaagctatgaaggactatctgactgccaacaagcacggagtgagattccgaggcaagagggaggccggactgagccgagcccagctgttgtgccagctgagatcccgagctcgggtgcgtacactggatggcaccgaagcccctttcagcgccttgggttggaggcgactggtgcccgctgtccccctctcacagcttcaccctcgcggattaagaagctgcgcagtcgtaatgagcgcaggtgcaattctcaactctagtctgggagaggagattgactctcacgacgctgtgctacgattcaacagcgccccaactaggggctacgaaaaggatgtgggaaacaaaacaacaattcggatcataaatagccaaatcttgacaaacccttcacaccattttatagattcttccctgtacaaggatgtcatcttggtcgcctgggacccagctccctacagcgccaatctgaatctatggtataagaaacccgactataatctctttacaccctacattcaacacaggcaacgcaaccctaaccaacctttctatattcttcacccaaagttcatctggcagctttgggatatcatccaggagaataccaaagaaaagattcagccaaaccctcctagttctggctttattggcattctaattatgatgtcaatgtgtagggaagttcacgtttacgagtatatccctagcgtgaggcaaaccgaactctgccattaccatgaactatactatgacgccgcatgtactttaggggcttatcaccctctgctctacgagaaacttttggtgcagaggctcaatatgggcacccagggcgaccttcaccgtaaaggcaaagttgtgctgcccggttttcaggcagtccattgcccagccccttcacccgtgattccgcactcctag

SEQ ID NO: 224689 - DNA, 288 bp, Artificial Sequence
  derived and/or modified sequence
taaagcggatttatcggtatcctgattatgatgtctatgtgtcgagaggtgcacgtttatgagtacattcccagcgtcagacagacagagctctgtcattatcacgaactgtactatgatgcagcttgtacactcggtgcctatcatccactgctctacgagaagctgctggttcagcgcctgaacatgggcacccagggcgatctgcacaggaaaggcaaagtcgtgctgcccggatttcaggccgtccactgcccagcacccagtccagtaatcccacacagctag

SEQ ID NO: 224690 - DNA, 1590 bp, Artificial Sequence
  derived and/or modified sequence
atgaaacctcacttaaaacaatggaggcaaaggatgttgttcggtattttcgcctgggggcttctcttcctgctgatttttatatacttcacggactcgaatccagctgagcccgtcccttcatccctgagtttcctagagacccggaggcttcttcctgtgcagggaaagcagcgtgcgatcatgggcgcagcacatgagcctagtcctccaggaggactggatgccagacaggccttgccacgtgcccatcccgcaggatccttccatgctggccctggcgatttgcagaaatgggctcagtcacaagacggcttcgagcacaaggaatttttttcctcgcaagtgggtcgcaagagtcagtcggccttttacccagaggacgatgattactttttcgcggctggtcaaccagggtggcactcgcatacccagggtacactggggtttccatcgcccggagaacctggtcctagggagggcgcattcccggcagctcaggtccagaggcgacgcgtcaagaagcgccaccgtagacagcggagatctcacgtgctggaagaaggggacgacggcgatagactctatagttccatgtcgcgcgctttcctgtataggctatggaaaggaaacgtgtccagtaagatgcttaacccacgactgcagaaagccatgaaggactatctgacagccaacaagcatggcgtccgtttccgcggaaagcgcgaagccggactctctagagcccagctcctctgtcagttgcggtccagggcccgagtccgcacgttagacggcaccgaggcccctttctccgctctcggatggagacggctggtgcccgctgtaccgctttcccagctgcaccctagggggctgcgtagctgcgccgtggtaatgtctgccggtgcaatcctgaattccagccttggtgaagaaattgattctcatgacgccgtcctccgattcaactccgcccctactagaggatacgagaaagacgtcgggaacaaaacaaccattcgtatcatcaactcccaaatcttaaccaaccctagtcatcatttcatcgattccagtctgtataaagatgtaatcctggtggcttgggacccggctccctattcagctaatctgaatttatggtataaaaagcctgattacaatttgttcacaccatacatccagcatcgccaacggaaccctaaccagcccttctacatccttcatcccaagttcatttggcagctgtgggatataatccaggaaaatacaaaggagaaaattcagccaaatcctcccagcagcggattcattggaattcttatcatgatgagcatgtgtcgcgaggtacacgtatacgagtacatcccaagtgtcagacaaacagaactgtgtcactatcacgagctgtactatgatgccgcttgtacactgggtgcttatcacccactcttgtacgagaaacttttagtacaacggctaaacatgggcacgcagggcgatcttcatagaaagggtaaagtggtgctgcctgggttccaagccgtacattgcccggctccctcacctgtgatcccccactcctag

SEQ ID NO: 224691 - DNA, 6857 bp, Artificial Sequence
  derived and/or modified sequence
ttccgccggggcaggcgccgggactccctcctggccgcccacagcctgtgcgcattcctgcattcctgccgccgcccgggacccgagtgccccggaggtgtccaggcgcggtgccaggcgggtactgtgcaggttcattctgccacccatctgcattaagacacaaggtgctgaccgcagagacctgccatgaaaccacacttgaagcaatggagacaacgaatgcttttcggaatattcgcttgggggctcctctttttgctgattttcatctacttcaccgacagcaaccccgctgagcctgtacccagctccctctccttcctggagaccaggaggctcctgccggtgcaggggaagcagcgggccatcatgggcgccgcacatgagccctccccgcctgggggcctggacgcacgccaggcgctgccccgcgcccacccagccggttcctttcatgcggggcctggagacctgcagaaatgggcccagtcccaagatgggtttgaacataaagagtttttttcatcccaggtggggagaaaatctcaaagtgctttctacccggaggatgacgactacttttttgctgctggtcagccagggtggcacagccacactcaggggacattgggattcccttcccccggggagccaggcccacgggagggggcttttccggctgcacaggtccagaggaggcgggtgaagaagaggcaccggaggcagagaaggagccacgtgttggaggagggcgacgacggcgacaggctgtactcctccatgtccagggccttcctgtaccggctctggaaggggaacgtctcttccaaaatgctgaacccgcgcctgcagaaggcgatgaaggattacctgaccgccaacaagcacggggtgcgcttccgcgggaagcgggaggccgggctgagcagggcacagctgctgtgccagctgcggagccgcgcgcgcgtgcggacgctggacggcaccgaggcgcccttttctgcgctgggctggcggcgcctggtgcccgccgtgcccctgagccagctgcacccccgcggcctgcgcagctgcgctgtcgtcatgtctgcaggcgcaatcctcaactcttccttgggcgaggaaatagattctcatgatgcggttttgagatttaactctgctcctacacgtggttatgagaaagatgttgggaataaaaccaccatacgcatcattaattcgcagattctgaccaaccccagccatcacttcattgacagttcactgtataaagacgtcattttggtggcctgggaccctgccccatattccgcaaatcttaacctgtggtacaaaaaaccggattacaacctgttcactccatatattcagcatcgtcagagaaacccaaatcagccattttacattcttcatcctaaatttatatggcagctctgggatattatccaggagaacactaaagagaagattcaaccaaacccaccatcttctggtttcattggaatcctcataatgatgtccatgtgcagagaggtgcacgtgtatgaatatatcccatccgtgcggcagacggagctgtgccactaccacgagctgtactacgacgcagcctgcaccctcggggcgtaccacccactactctatgagaagctcctggtgcagcgcctgaacatgggcacgcagggggatttgcatcgcaagggcaaggtggttcttcccggcttccaggcggtgcactgccctgcaccaagtccagtcattccacactcttaaaaagggtttcttgggaatcaatgtgcaataaggtactactgttgtactcaaagtcacaaaagaatacttgaagatagattttagacagtgtagttttgagtctttaaacagtaatttagtggtggtcatgataatccttctctttctaagccattgagtatgtattactgctttgaacatagaaatggtttttttaaaaaaataaggctcaagaaagatgcaaaaccaaggatagctagaaagaaaacacatgtatgaccatgggtatgatacctccagaaatgttaacaacttattcttctgccatgagtacccctcatcagggttggtttcaatgacaggttttggtgatgttcctgaccatatgaagtggtttatgtttagaaacattcaaattgagggacatcatttacagcatcgagtgtgtcagttatacatgcattcatcattaaatatcctaggttttatgacagacattgaaattatcactcagatgtgtttaacagcaaaaaattcccagcacatcctggcaaaggcttttatttccaaccgttgcattcttcatctctgcctcccattgcccactgaatgctttgctttctgtgcatcaagacagagttctaaaaccagaaaacatccatcttgaaaggtccaagaaaaagccaaattccatatagcaccacagaggaggccctttgtttccctgcagtatttcaaccaggaacattagtatcacatccaccaggaggcacatcactggcaagtaacatagaatcacagggctgcaggtgcccctggacactccccggttctggcttttctgccttgtacctcctcacctgcagatctaccctgcagcttttgcatagtcagtgacacacttgacaattggcacagctgtgctggggaagacgggagacaccttgctccttccaaactagaaggaaagattttggagccatcaccctgtgcttctagggatgcacgcctgtctttattatacaggtttcttgcaggtttttatcagccagtgggaactccacagtgatgagcactgaatcttcactaaatcttcctacagacatttaggaatccagtccttgcttttgcagatatgttttatgtcagcagcatgacaaagccatataattaaataatttatgtgaaagcattgcttattaacaaggaaaatatgtagatgcttcagagggaaaggcagctagagggaaattttcatcccaatatgttagctatattcagggttgattttttctttaatctcaactgtcactgatacattgaaaaatttttgctatgaatatagtgaaacagaaacattctgtaataccttaattaaacatgctattatttcaatgtataaccaaaacatatctccatggtacagttaagacttgttgcaatgacaatagcagcttaattaaatgcgttctcccttgcaaaatgtatgaatgtcaggagagtttagtggaaaagttttctttgtttcaggattggtttcttctagactgttctcaggactactttcttgagcaagaatggcttacagagactgaaggcttctgtttggttagtctattcagcagatatggagctggaaaacaagacatctcctatagcttgctataatagtgaaggagaaattggaaagttttaatcacaataatatccaataaaagcccattttgagagttttgttattaagtcaatgagaagggataggtaactttgtcctatatattaacttatgtctaaatagacatggttaagccatgttcctttctaatttcttttcttttcttttttttttttttttttgagacagtctctcgctctgtcgcccaggctagagtgcagtggtgcgatcttggttcactgccagctctgcctcccacgttcacaccattctcctgcctcagcctcctgagtagctggggactacaggcacccgccaccacgcccagctaattttttgtatttttagtagagacagggtttcaccgtgttagccagggtggtctcgatctcctgaccttgtgatctgcctgcctcggcctcccaaagtgatgggattataggcgtgagccaccaccgcgcccggtcattcctttctaatttcttgaaaaaactttgtcttgtccttatgtttacatgtgtgtaataatttcagcaactctggaatgtgggtgaggtggctgtggtggatgaatattactccctaccctccttggatctttctagatcttccagaccattaaatgcccctgaagctccttttatagttttgcaagtggatttacttgtagacatccttactatccagcataatcccccttggctgacatgagaacttggttagaggagaatttattggggtcagtgtaaatattcaagttcaaaagcctcagaacccaacactttaaagatttttaaatggaattttgtcgtagtcattgtacttttaaaatagtactttcagtttcattgaggttacaagaaagactgaagagtacaaaggaaatttagttacaatttttgcatttattatggccttaaagactcttgggaatcaggctctgttcaacagtcaataaatgtaatacacacattaatatagtactgactgggcgttcttctataaaagtttaagttctttggcttctaagaaaatgttgggcagttacagttaacttgatgactacttctagtattagccaaatgggtcctaagtggcagcattttgccagacattgactaaatccttacatgccacatttactgaattccaataaacatatagttcttctgtggagtagttaacagtaagtggcagctcactgaatttctcccaggttctgtctcttccaaaatcctccatcctctcttatgaagggaagctgataaaaaaaaatcctcttggtgcaagctgaagctgttaaggattccttttttcactctcaggaccaacagacgttcttttgtatttcaagataatttcacctgttgttgttgttgttgttgttgttgttgttgttgttgttgttgttacaaagaaacaaattttgagcagcaatgacaattcaaccatatctagattctccctaccttatttctccagccagtcacaccaggcagacgggtaacctttaacagacctggtgttctcatggaataccgatgctcgtcccagggagctgacctttctcactatgtccttatagagctgctcttacagagaactttgtgctcaggaccaagggatggtcaattaaaagttgcatgtaagcatcaggcttggatgggcaagggagggcttttatacatctttgaacgaccaggtctttccttgtctgcctgaaggcagagcttcgagaaacagcacttcccatgtgtctggtcctcttggtctctcagccagacacttaatcaatcctggactctccagtagtcctcagtcattgtagccatagcatctgcaaaaaaagaaatgctaaaataatcattagcgttttcaaaattaggaaatcaaagtagctgggtcactctcttacatgtgtatgagccagttaattctgctggacagatcatacttacgctgctgattgactcttctgagcagtaacacatctcctgaattaattaggtaggtcccgtttgggtgctttaagtgggatcagtcttagatgagtgccagtatgtgattgaatttcatacgcacaaatgccatgattcaagttctctctccagtttttcttatagatcaacacacagtacatgtggtcagttacttggttgaatttctgcttagctgtggtaagagacagagaaagggagtgaggtgggaccaggggaattatcagaaagacatgagtgaacctattggccaggtagcttccaagtatgttctattgtattgtctgttttgattctgatagtttagaactctttctgatagtttagaactcttacccagtggttacatgactgatcaaggcaactccatctggaaattaattgcttgggtaaaatgtccctgagtttcaacttgtcttttatctctggatattctcttatgagattattatgcatgtttctgtcacatgggcattatttacacacttgataaatgaaaggtatttctctgtccgttcaaggaaataaaatgtaagttcttgttttattaaatgaatgaagccttttggttaaaaaaaaagtaatgtaatatgtttctgttcaaacttgagctaatgacatttaaggaattaaagacattgatctagttcttagtatgaaaagtgtacatgtagatatagttatataattgtgtatatacatatctacacacatggttggttttatattgctttttcatcaatatttttgactgaaacctttacaataaattttattttaattatgtaaccactaatattttgagagaaggaagcaaatgttatatgtccttctgttaaaagaaaaaaaattcagtcctccgccaaccgcttcccacacactcatactctgcacatcttggctacattaaaatggactgacagaattatttaaaaggcactatgaaggtagaacactaccttaatattttatcctagtcagaagcctgatttaacactgaactttgaagggaagcttagctgtagctcatggctttcaaagattagaagaaacatttactggttctatggaaaatagtcttcttgctaggtagattggaaacaaagaaattgcattggtggtgttaaaatctaacatttataacaaatcctgttttattctagatgaaatacttagacaattcttccagtggaaaccagtgaacttttttaacagctttgggaattcttttgtatgataatttttaaaatgaaatgtgtactcttcaaactaattaaagcttgaagttttccaggagtcgcattttaaaagtgtttgtacacattttaacacttggatattttctattttggttttgtatatttttatgtatacacaatgtacagacttttttcttgtaaataaaacatgttttcatttgtctagaa

SEQ ID NO: 224692 - DNA, 574 bp, Artificial Sequence
  derived and/or modified sequence
ttctggtttcattggaatcctcataatgatgtccatgtgcagagaggtgcacgtgtatgaatatatcccatccgtgcggcagacggagctgtgccactaccacgagctgtactacgacgcagcctgcaccctcggggcgtaccacccactactctatgagaagctcctggtgcagcgcctgaacatgggcacgcagggggatttgcatcgcaagggcaaggtggttcttcccggcttccaggcggtgcactgccctgcaccaagtccagtcattccacactcttaaaaagggtttcttgggaatcaatgtgcaataagatgaaatacttagacaattcttccagtggaaaccagtgaacttttttaacagctttgggaattcttttgtatgataatttttaaaatgaaatgtgtactcttcaaactaattaaagcttgaagttttccaggagtcgcattttaaaagtgtttgtacacattttaacacttggatattttctattttggttttgtatatttttatgtatacacaatgtacagacttttttcttgtaaataaaacatgttttcattt

SEQ ID NO: 224693 - DNA, 7275 bp, Artificial Sequence
  derived and/or modified sequence
gcagcctcggtgcgtgggccgggaaccgccgcctctccccggggctcggggccgcggttcctctggccgcgggagccgccgccgcgctgcccgaaacaatgaggcgtgcagcgcggggctgagcgtagcctcccgccggctttgaggccgagccacccgctgtgccccgccgcccgcgcttgcagctgccgccggcgcggagcagcgctggccccggagaggtgatcccgcaggccgcctgggacgggagcgcggggcagctccgagaccccacggtggcaggaggaggactcgagcctgcggcaggacgactcccgccgcgcactcgccttctgcagcccccaagttccgcggcgtgagtcggggaccccggccagggtcccagctctagcgggcgccagcgtgagtgtgggagcgcgtagcgcgcgcacccgagcggctgccggggaataaaatgtgacacgcacgccttggactccagtgccgcgctgccagggggagcaccgagcaccacggtgtcgtgcgcttcgaggcgcggcgtgggaagaaggctggttcattctgccacccatctgcattaagacacaaggtgctgaccgcagagacctgccatgaaaccacacttgaagcaatggagacaacgaatgcttttcggaatattcgcttgggggctcctctttttgctgattttcatctacttcaccgacagcaaccccgctgagcctgtacccagctccctctccttcctggagaccaggaggctcctgccggtgcaggggaagcagcgggccatcatgggcgccgcacatgagccctccccgcctgggggcctggacgcacgccaggcgctgccccgcgcccacccagccggttcctttcatgcggggcctggagacctgcagaaatgggcccagtcccaagatgggtttgaacataaagagtttttttcatcccaggtggggagaaaatctcaaagtgctttctacccggaggatgacgactacttttttgctgctggtcagccagggtggcacagccacactcaggggacattgggattcccttcccccggggagccaggcccacgggagggggcttttccggctgcacaggtccagaggaggcgggtgaagaagaggcaccggaggcagagaaggagccacgtgttggaggagggcgacgacggcgacaggctgtactcctccatgtccagggccttcctgtaccggctctggaaggggaacgtctcttccaaaatgctgaacccgcgcctgcagaaggcgatgaaggattacctgaccgccaacaagcacggggtgcgcttccgcgggaagcgggaggccgggctgagcagggcacagctgctgtgccagctgcggagccgcgcgcgcgtgcggacgctggacggcaccgaggcgcccttttctgcgctgggctggcggcgcctggtgcccgccgtgcccctgagccagctgcacccccgcggcctgcgcagctgcgctgtcgtcatgtctgcaggcgcaatcctcaactcttccttgggcgaggaaatagattctcatgatgcggttttgagatttaactctgctcctacacgtggttatgagaaagatgttgggaataaaaccaccatacgcatcattaattcgcagattctgaccaaccccagccatcacttcattgacagttcactgtataaagacgtcattttggtggcctgggaccctgccccatattccgcaaatcttaacctgtggtacaaaaaaccggattacaacctgttcactccatatattcagcatcgtcagagaaacccaaatcagccattttacattcttcatcctaaatttatatggcagctctgggatattatccaggagaacactaaagagaagattcaaccaaacccaccatcttctggtttcattggaatcctcataatgatgtccatgtgcagagaggtgcacgtgtatgaatatatcccatccgtgcggcagacggagctgtgccactaccacgagctgtactacgacgcagcctgcaccctcggggcgtaccacccactactctatgagaagctcctggtgcagcgcctgaacatgggcacgcagggggatttgcatcgcaagggcaaggtggttcttcccggcttccaggcggtgcactgccctgcaccaagtccagtcattccacactcttaaaaagggtttcttgggaatcaatgtgcaataaggtactactgttgtactcaaagtcacaaaagaatacttgaagatagattttagacagtgtagttttgagtctttaaacagtaatttagtggtggtcatgataatccttctctttctaagccattgagtatgtattactgctttgaacatagaaatggtttttttaaaaaaataaggctcaagaaagatgcaaaaccaaggatagctagaaagaaaacacatgtatgaccatgggtatgatacctccagaaatgttaacaacttattcttctgccatgagtacccctcatcagggttggtttcaatgacaggttttggtgatgttcctgaccatatgaagtggtttatgtttagaaacattcaaattgagggacatcatttacagcatcgagtgtgtcagttatacatgcattcatcattaaatatcctaggttttatgacagacattgaaattatcactcagatgtgtttaacagcaaaaaattcccagcacatcctggcaaaggcttttatttccaaccgttgcattcttcatctctgcctcccattgcccactgaatgctttgctttctgtgcatcaagacagagttctaaaaccagaaaacatccatcttgaaaggtccaagaaaaagccaaattccatatagcaccacagaggaggccctttgtttccctgcagtatttcaaccaggaacattagtatcacatccaccaggaggcacatcactggcaagtaacatagaatcacagggctgcaggtgcccctggacactccccggttctggcttttctgccttgtacctcctcacctgcagatctaccctgcagcttttgcatagtcagtgacacacttgacaattggcacagctgtgctggggaagacgggagacaccttgctccttccaaactagaaggaaagattttggagccatcaccctgtgcttctagggatgcacgcctgtctttattatacaggtttcttgcaggtttttatcagccagtgggaactccacagtgatgagcactgaatcttcactaaatcttcctacagacatttaggaatccagtccttgcttttgcagatatgttttatgtcagcagcatgacaaagccatataattaaataatttatgtgaaagcattgcttattaacaaggaaaatatgtagatgcttcagagggaaaggcagctagagggaaattttcatcccaatatgttagctatattcagggttgattttttctttaatctcaactgtcactgatacattgaaaaatttttgctatgaatatagtgaaacagaaacattctgtaataccttaattaaacatgctattatttcaatgtataaccaaaacatatctccatggtacagttaagacttgttgcaatgacaatagcagcttaattaaatgcgttctcccttgcaaaatgtatgaatgtcaggagagtttagtggaaaagttttctttgtttcaggattggtttcttctagactgttctcaggactactttcttgagcaagaatggcttacagagactgaaggcttctgtttggttagtctattcagcagatatggagctggaaaacaagacatctcctatagcttgctataatagtgaaggagaaattggaaagttttaatcacaataatatccaataaaagcccattttgagagttttgttattaagtcaatgagaagggataggtaactttgtcctatatattaacttatgtctaaatagacatggttaagccatgttcctttctaatttcttttcttttcttttttttttttttttttgagacagtctctcgctctgtcgcccaggctagagtgcagtggtgcgatcttggttcactgccagctctgcctcccacgttcacaccattctcctgcctcagcctcctgagtagctggggactacaggcacccgccaccacgcccagctaattttttgtatttttagtagagacagggtttcaccgtgttagccagggtggtctcgatctcctgaccttgtgatctgcctgcctcggcctcccaaagtgatgggattataggcgtgagccaccaccgcgcccggtcattcctttctaatttcttgaaaaaactttgtcttgtccttatgtttacatgtgtgtaataatttcagcaactctggaatgtgggtgaggtggctgtggtggatgaatattactccctaccctccttggatctttctagatcttccagaccattaaatgcccctgaagctccttttatagttttgcaagtggatttacttgtagacatccttactatccagcataatcccccttggctgacatgagaacttggttagaggagaatttattggggtcagtgtaaatattcaagttcaaaagcctcagaacccaacactttaaagatttttaaatggaattttgtcgtagtcattgtacttttaaaatagtactttcagtttcattgaggttacaagaaagactgaagagtacaaaggaaatttagttacaatttttgcatttattatggccttaaagactcttgggaatcaggctctgttcaacagtcaataaatgtaatacacacattaatatagtactgactgggcgttcttctataaaagtttaagttctttggcttctaagaaaatgttgggcagttacagttaacttgatgactacttctagtattagccaaatgggtcctaagtggcagcattttgccagacattgactaaatccttacatgccacatttactgaattccaataaacatatagttcttctgtggagtagttaacagtaagtggcagctcactgaatttctcccaggttctgtctcttccaaaatcctccatcctctcttatgaagggaagctgataaaaaaaaatcctcttggtgcaagctgaagctgttaaggattccttttttcactctcaggaccaacagacgttcttttgtatttcaagataatttcacctgttgttgttgttgttgttgttgttgttgttgttgttgttgttgttacaaagaaacaaattttgagcagcaatgacaattcaaccatatctagattctccctaccttatttctccagccagtcacaccaggcagacgggtaacctttaacagacctggtgttctcatggaataccgatgctcgtcccagggagctgacctttctcactatgtccttatagagctgctcttacagagaactttgtgctcaggaccaagggatggtcaattaaaagttgcatgtaagcatcaggcttggatgggcaagggagggcttttatacatctttgaacgaccaggtctttccttgtctgcctgaaggcagagcttcgagaaacagcacttcccatgtgtctggtcctcttggtctctcagccagacacttaatcaatcctggactctccagtagtcctcagtcattgtagccatagcatctgcaaaaaaagaaatgctaaaataatcattagcgttttcaaaattaggaaatcaaagtagctgggtcactctcttacatgtgtatgagccagttaattctgctggacagatcatacttacgctgctgattgactcttctgagcagtaacacatctcctgaattaattaggtaggtcccgtttgggtgctttaagtgggatcagtcttagatgagtgccagtatgtgattgaatttcatacgcacaaatgccatgattcaagttctctctccagtttttcttatagatcaacacacagtacatgtggtcagttacttggttgaatttctgcttagctgtggtaagagacagagaaagggagtgaggtgggaccaggggaattatcagaaagacatgagtgaacctattggccaggtagcttccaagtatgttctattgtattgtctgttttgattctgatagtttagaactctttctgatagtttagaactcttacccagtggttacatgactgatcaaggcaactccatctggaaattaattgcttgggtaaaatgtccctgagtttcaacttgtcttttatctctggatattctcttatgagattattatgcatgtttctgtcacatgggcattatttacacacttgataaatgaaaggtatttctctgtccgttcaaggaaataaaatgtaagttcttgttttattaaatgaatgaagccttttggttaaaaaaaaagtaatgtaatatgtttctgttcaaacttgagctaatgacatttaaggaattaaagacattgatctagttcttagtatgaaaagtgtacatgtagatatagttatataattgtgtatatacatatctacacacatggttggttttatattgctttttcatcaatatttttgactgaaacctttacaataaattttattttaattatgtaaccactaatattttgagagaaggaagcaaatgttatatgtccttctgttaaaagaaaaaaaattcagtcctccgccaaccgcttcccacacactcatactctgcacatcttggctacattaaaatggactgacagaattatttaaaaggcactatgaaggtagaacactaccttaatattttatcctagtcagaagcctgatttaacactgaactttgaagggaagcttagctgtagctcatggctttcaaagattagaagaaacatttactggttctatggaaaatagtcttcttgctaggtagattggaaacaaagaaattgcattggtggtgttaaaatctaacatttataacaaatcctgttttattctagatgaaatacttagacaattcttccagtggaaaccagtgaacttttttaacagctttgggaattcttttgtatgataatttttaaaatgaaatgtgtactcttcaaactaattaaagcttgaagttttccaggagtcgcattttaaaagtgtttgtacacattttaacacttggatattttctattttggttttgtatatttttatgtatacacaatgtacagacttttttcttgtaaataaaacatgttttcatttgtct

SEQ ID NO: 224694 - protein, 778 aa, Artificial Sequence
  derived and/or modified sequence
MKPFQLDLLFVCFFLFSQELGLQKRGCCLVLGYMAKDKFRRMNEGQVYSFSQQPQDQVVVSGQPVTLLCAIPEYDGFVLWIKDGLALGVGRDLSSYPQYLVVGNHLSGEHHLKILRAELQDDAVYECQAIQAAIRSRPARLTVLVPPDDPVILGGPVISLRAGDPLNLTCHADNAKPAASIIWLRKGEVINGATYSKTLLRDGKRESIVSTLFISPGDVENGQSIVCRATNKAIPGGKETSVTIDIQHPPLVNLSVEPQPVLEDNVVTFHCSAKANPAVTQYRWAKRGQIIKEASGEVYRTTVDYTYFSEPVSCEVTNALGSTNLSRTVDVYFGPRMTTEPQSLLVDLGSDAIFSCAWTGNPSLTIVWMKRGSGVVLSNEKTLTLKSVRQEDAGKYVCRAVVPRVGAGEREVTLTVNGPPIISSTQTQHALHGEKGQIKCFIRSTPPPDRIAWSWKENVLESGTSGRYTVETISTEEGVISTLTISNIVRADFQTIYNCTAWNSFGSDTEIIRLKEQGSEMKSGAGLEAESVPMAVIIGVAVGAGVAFLVLMATIVAFCCARSQRNLKGVVSAKNDIRVEIVHKEPASGREGEEHSTIKQLMMDRGEFQQDSVLKQLEVLKEEEKEFQNLKDPTNGYYSVNTFKEHHSTPTISLSSCQPDLRPAGKQRVPTGMSFTNIYSTLSGQGRLYDYGQRFVLGMGSSSIELCEREFQRGSLSDSSSFLDTQCDSSVSSSGKQDGYVQFDKASKASASSSHHSQSSSQNSDPSRPLQRRMQTHV

SEQ ID NO: 224695 - DNA, 2337 bp, Artificial Sequence
  derived and/or modified sequence
atgaagccctttcagctagacctactgttcgtctgcttctttctgttctcgcaagaactgggactgcaaaagaggggttgctgcctagtgcttgggtacatggcaaaggataagtttcgcagaatgaacgaaggtcaagtgtattcattctctcaacaacctcaggaccaggtggtggtctcgggccagcctgtcacactcctgtgtgcgataccggagtatgatgggtttgtcctctggataaaagatggcctcgcactgggcgtcgggcgggacctgtcaagttaccctcagtatctcgtggtgggaaatcacctctctggcgagcaccatctgaagattctgcgggctgaacttcaagacgacgctgtatatgaatgtcaggccatccaggccgcaatccgttcacggcctgcaaggctcacagtactggtcccccccgacgaccccgtcattctgggcggacctgtaatttctcttcgggccggggatccgctgaatctcacctgtcacgctgacaacgctaagcctgccgcctcaatcatctggcttcgcaagggcgaggtaataaacggcgcaacatattccaagacactgctgcgcgacgggaaacgagagtccattgtgtccaccctgtttatcagccccggggacgtcgagaacgggcagtctatcgtatgtcgggcaacaaacaaggccatccctggggggaaagaaacatccgtgaccattgacattcagcatcctcctttggtgaacttatcagtagaaccccagcctgttctggaagacaatgttgttacattccattgctccgctaaagcaaacccggccgtgacccagtataggtgggcaaagagaggtcaaatcattaaagaggcctcgggtgaagtttaccgcacgaccgtcgattatacctactttagtgagcccgtgagctgtgaagtgacaaacgcattaggcagtaccaacctcagcagaacggttgatgtatacttcgggccaagaatgacaaccgagccacagtcactcttagttgacctaggaagcgatgcaatctttagctgcgcatggacggggaacccttctctgacaatagtgtggatgaaacgggggagcggggtcgttctaagcaacgagaagaccttaacgctcaagtcagtcagacaggaagacgcgggcaagtatgtgtgcagggccgtggtcccgagggtaggagctggcgaacgcgaggtgaccctgacagtcaatggtcctcctatcatttccagcacccaaacccaacatgcactacatggtgagaagggccagattaaatgcttcatccggtctacccctccacccgacaggatcgcgtggtcctggaaggagaatgtgctggagtcaggtacatcagggagatatacagtggagactatttccactgaggaaggggttatctcaaccctgaccatttcgaacatcgtgagggccgatttccaaactatttataattgcacggcatggaattctttcggttccgacactgagatcatccggttaaaagaacagggctcagagatgaaatctggggccggactcgaggcagagagtgtgcccatggctgtaatcattggcgttgctgttggcgctggggtcgcatttcttgtgctaatggctactatcgtggccttctgctgcgctcgaagtcagcgcaatttaaaaggcgtagtgtccgctaaaaacgacattagagtcgagatagtgcacaaagagccagcatccggaagagagggcgaggagcatagcactattaagcaattaatgatggacagaggggaattccagcaagactctgttctcaaacagctggaggttctgaaagaggaagagaaggaatttcagaaccttaaagaccccaccaacggctactacagcgtaaatacattcaaggaacatcacagcaccccaacgatttccctgtcgagctgccaacctgacttaaggccggcagggaagcaaagagtgccaactggaatgagtttcacaaacatctactcaaccctatctgggcaggggcgcctctacgattatggtcaacgattcgtgctaggtatgggatcctcgagcatcgaattgtgcgaaagagaattccagaggggatctctctccgattcatcctccttcctggacacccaatgcgatagttccgtctcttccagtgggaaacaggacggttatgtgcaatttgacaaagcatccaaagcctccgcttcatcttcccaccactcgcaatcatccagtcagaattctgaccctagccggcctttgcagagacgtatgcaaacccatgtgtag

SEQ ID NO: 224696 - DNA, 3808 bp, Artificial Sequence
  derived and/or modified sequence
cttctccgagtggggacattgctgacaatcccggcttcccgaggcggctaagaacaggcagtttgtgtcggctggctgcagatacccagaggcacaaagagaccgaagccacccggagggacccacggacggacagatggtaggcgcgaacccgagaggaccggcggaggctgagcaccgagagccgccaaggaagagaaactaaccacagccaagttaccccgccggctttccttcgctgcgctaaggaatgaaacccttccagctcgatctgctcttcgtctgcttcttcctcttcagtcaagagctgggcctccagaagagaggatgctgtctggtgctgggctacatggccaaggacaagtttcggagaatgaatgaaggccaagtctattccttcagccagcagccccaggaccaggtggtggtgtcgggacagccagtgacgctactttgcgccatccccgaatacgatggcttcgttctgtggatcaaggacggcttggctctgggtgtgggcagggacctctcaagttacccacagtacctggtggtagggaaccacctgtcaggggagcaccacctgaagatcctgagggcagagctgcaagacgatgcggtgtacgagtgccaggccatccaggccgccatccgctcccgccccgcacgcctcacagtcctggtgccgcctgatgaccccgtcatcctggggggccctgtgatcagcctgcgtgcgggggaccctctcaacctcacctgccacgcagacaatgccaagcctgcagcctccatcatctggttgcgaaagggagaggtcatcaatggggccacctactccaagaccctgcttcgggacggcaagcgggagagcatcgtcagcaccctcttcatctcccctggtgacgtggagaatggccagagcatcgtgtgtcgtgccaccaacaaagccatccccggaggaaaggagacgtcggtcaccattgacatccagcaccctccactggtcaacctctcggtggagccacagccagtgctggaggacaacgtcgtcactttccactgctctgcaaaggccaacccagctgtcacccagtacaggtgggccaagcggggccagatcatcaaggaggcatctggagaggtgtacaggaccacagtggactacacgtacttctcagagcccgtctcctgtgaggtgaccaacgccctgggcagcaccaacctcagccgcacggttgacgtctactttgggccccggatgaccacagaaccccaatccttgctcgtggatctgggctctgatgccatcttcagctgcgcctggaccggcaacccatccctgaccatcgtctggatgaagcggggctccggagtggtcctgagcaatgagaagaccctgaccctcaaatccgtgcgccaggaggacgcgggcaagtacgtgtgccgggctgtggtgccccgtgtgggagccggggagagagaggtgaccctgaccgtcaatggaccccccatcatctccagcacccagacccagcacgccctccacggcgagaagggccagatcaagtgcttcatccggagcacgccgccgccggaccgcatcgcctggtcctggaaggagaacgttctggagtcgggcacatcggggcgctatacggtggagaccatcagcaccgaggagggcgtcatctccaccctgaccatcagcaacatcgtgcgggccgacttccagaccatctacaactgcacggcctggaacagcttcggctccgacactgagatcatccggctcaaggagcaaggttcggaaatgaagtcgggagccgggctggaagcagagtctgtgccgatggccgtcatcattggggtggccgtaggagctggtgtggccttcctcgtccttatggcaaccatcgtggcgttctgctgtgcccgttcccagagaaatctcaaaggtgttgtgtcagccaaaaatgatatccgagtggaaattgtccacaaggaaccagcctctggtcgggagggtgaggagcactccaccatcaagcagctgatgatggaccggggtgaattccagcaagactcagtcctgaaacagctggaggtcctcaaagaagaggagaaagagtttcagaacctgaaggaccccaccaatggctactacagcgtcaacaccttcaaagagcaccactcaaccccgaccatctccctctccagctgccagcccgacctgcgtcctgcgggcaagcagcgtgtgcccacaggcatgtccttcaccaacatctacagcaccctgagcggccagggccgcctctacgactacgggcagcggtttgtgctgggcatgggcagctcgtccatcgagctttgtgagcgggagttccagagaggctccctcagcgacagcagctccttcctggacacgcagtgtgacagcagcgtcagcagcagcggcaagcaggatggctatgtgcagttcgacaaggccagcaaggcttctgcttcctcctcccaccactcccagtcctcgtcccagaactctgaccccagtcgacccctgcagcggcggatgcagactcacgtctaaggatcacacaccgcgggtggggacgggccagggaagaggtcagggcacgttctggttgtccagggacgaggggtactttgcagaggacaccagaattggccacttccaggacagcctcccagcgcctctgccactgccttccttcgaagctctgatcaagcacaaatctgggtccccaggtgctgtgtgccagaggtgggcgggtggggagacagacagaggctgcggctgagtgcgctgtgcttagtgctggacacccgtgtccccggccctttcctggaggcccctctaccacctgctctgcccacaggcacaagtggcagctataactctgctttcatgaaactgcggtccactctctggtctctctgtgggctctacccctcgctgaccagaagctctacctacccctgtgcctgtgctcccatacagccctggggagaaggggatgacgtcttcccagcactgagctgccccagaaaccccggctccccactgctgctcatagcccataccctggaggctgacaagccagaaatggccttggctaaaggagcctctctctcaccaggctggccgggagcccacccccaatttgtttggtgttttgtgtccatactcttgcagttctgtccttggacttgatgccgctgaactctgcggtgggaccggtccggtcagagcctggtgtactggggggagggagggaggagggagcctgtgctgacggagcacctcgccgggtgtgcccctcctgggctgtgtgaccccagcctccccacccacctcctgctttgtgtactcctcccctccccctcagcacaatcggagttcatataagaagtgcgggagcttctctggtcagggttctctgaacacttatggagagagtgcttcctgggaagtgtggcgtttgaaggggctggagggcaggtctttaagatggcgagactgcccttctcagctgataaacacaagaacggcgatcctgtcttcagtaaggctccacgagaagagaggaagtatatctacacctcaaccctcctagtcaccacctgaaataaatgttagggacactactccaacatgtttgttctgttcttttgttcctacaaagccacaggaagaacccaagagctcatagaatgcgttgggaacccaaggttctctgccctcctttgattcaatcttcctagacaataaaggcagttgatagctctg

SEQ ID NO: 224697 - DNA, 2337 bp, Artificial Sequence
  derived and/or modified sequence
atgaagcccttccagctggacctgctgtttgtgtgcttcttcctgttcagccaggagctgggcctgcagaagaggggctgctgcctggtgctgggctacatggccaaggacaagttccggaggatgaatgaaggccaggtgtacagcttcagccagcagccccaggaccaggtggtggtgtctggccagcctgtgaccctgctgtgtgccatcccagaatatgatggctttgtgctgtggatcaaggatggcctggccctgggcgtgggccgggacctgagcagctacccccagtacctggtggtgggcaaccacctgtctggagagcaccacctgaagatcctgcgggcagagctgcaggatgatgctgtgtatgagtgccaggccatccaggccgccatccgcagcaggcctgcccggctgactgtgctggtgcccccagatgaccccgtcatcctgggcggccctgtgatcagcctgcgggccggggaccccctgaacctgacctgccacgccgacaatgccaagccagctgccagcatcatctggctgaggaagggggaggtgatcaatggagccacctacagcaagaccctgctgagagatggcaagcgggagagcatcgtgtccaccctcttcatcagccctggagatgtggagaatggccagagcatcgtgtgccgggccaccaacaaggccatccctgggggcaaggagacctctgtgaccatcgacatccagcacccccccctggtgaacctgtctgtggagccccagcctgtgctggaggacaacgtggtgaccttccactgcagcgccaaggccaacccagctgtgacccagtaccgctgggccaagaggggccagatcatcaaggaggccagcggggaggtgtaccgcaccaccgtggactacacctacttcagcgagcctgtgtcctgtgaggtgaccaatgccctgggcagcaccaacctgagcaggacagtggatgtgtacttcggccccaggatgaccacagagccccagagcctgctggtggacctgggcagtgatgccatcttcagctgtgcctggacaggcaaccccagcctgaccatcgtgtggatgaagaggggcagcggcgtggtgctgagcaatgagaagaccctgaccctgaagtctgtgcggcaggaggatgctgggaagtatgtgtgcagagctgtggtgccccgggtgggcgctggggagcgggaggtgaccctgactgtgaatggaccacccatcatcagcagcacccagacccagcacgccctgcacggggagaagggccagatcaagtgcttcatccgcagcaccccacctccagacagaattgcctggagctggaaggaaaatgtgctggagagcggcaccagcggccgctacacagtggagaccatcagcacagaggagggcgtcatcagcaccctgaccatcagcaacatcgtgcgggctgacttccagaccatctacaactgcacagcctggaacagctttggaagtgacacagagatcatccggctgaaggagcagggcagcgagatgaagtctggagctggcctggaggccgagagcgtgcccatggctgtgatcatcggcgtggccgtgggcgctggggtggccttcctggtgctgatggccaccatcgtggccttctgctgtgcccggagccagaggaacctgaagggcgtggtgtctgccaagaatgacatccgggtggagatcgtgcacaaggagcccgccagcggccgggagggggaggagcacagcaccatcaagcagctgatgatggacagaggagagttccagcaggacagcgtgctgaagcagctggaggtgctgaaggaggaggagaaggagttccagaacctgaaggaccccaccaacggctactacagcgtgaacaccttcaaggagcaccacagcacccccaccatcagcctgagcagctgccagcctgacctgcggcctgctgggaagcagagggtgcccaccggcatgtccttcaccaacatctacagcaccctgagcggccagggccgcctgtatgactatggccagagatttgtgctgggcatgggcagcagcagcattgagctgtgtgagcgggagttccagaggggcagcctgagtgacagcagcagcttcctggacacccagtgtgacagctctgtgagcagcagcggcaagcaggacggctacgtgcagtttgacaaggccagcaaggccagcgccagcagcagccaccacagccagagcagcagccagaacagcgaccccagccggcccctgcagaggaggatgcagacccacgtgtag

SEQ ID NO: 224698 - DNA, 2337 bp, Artificial Sequence
  derived and/or modified sequence
atgaagcccttccagctggacctgctgttcgtgtgcttcttcctgttcagccaagagctgggactccagaagcgcgggtgttgcctagtccttgggtatatggcgaaagataaattccgaaggatgaacgagggccaggtttatagcttcagccagcagccccaggaccaggttgtggtcagtggacagccagtcacactgctctgtgcaatcccggagtatgatgggttcgtgctctggattaaggacggactggcccttggtgttggaagggacctctcttcttacccacagtatttggtcgtagggaatcatcttagcggagaacatcatcttaagatcctgagagcggaactacaagacgatgctgtgtacgagtgccaggcaatacaggccgctattcgtagtagacctgcacgactcacagtcctggtcccgcccgatgaccccgtaatcctcggggggcccgttatatcccttcgtgccggcgatcccttgaatctcacatgccacgctgataatgccaagcctgctgcaagtatcatttggttgcgtaaaggcgaggtgatcaatggtgccacctattctaagaccctgttgcgcgacggcaagagagaaagcattgtttccaccctttttattagccccggcgacgtcgaaaatggtcagtccatcgtatgccgcgccacaaacaaagctatccccgggggcaaagagacctctgtgacaatagatattcaacaccctcctctggtgaatctgagcgttgagccgcaaccagttctggaagacaatgttgtaacatttcattgctctgctaaagctaacccagctgtgacccagtataggtgggccaaacgagggcaaataatcaaggaggcttcaggggaggtctaccgaaccaccgtggattacacttatttcagtgaacctgtctcgtgcgaggtcaccaacgctctgggtagcaccaacttgtcacgcacagtcgatgtgtattttggtcctaggatgaccacagagccgcagtcacttctggtagatttgggaagtgacgctattttttcgtgtgcatggaccggaaatccgagtctgaccattgtatggatgaagagaggatccggagtcgttctttctaatgaaaagaccttaaccctgaaatcggtaaggcaggaggacgccggaaaatatgtgtgccgtgctgtggttcctcgagttggagccggcgaaagagaggtgactctgacagttaatggaccgccaatcatctctagcactcaaacccagcatgctttgcacggcgagaaaggtcagattaaatgctttattaggtcaactccgccaccggaccgtattgcctggagttggaaagagaatgtgctggagagcgggacatccggccgttacacagtcgagactataagcactgaagaaggggtcatttccactttgacaatatccaatatagttagagccgacttccagaccatttacaactgtaccgcctggaatagctttggctctgatactgaaattatccgactgaaagagcaaggttcagagatgaagtccggggccgggctggaggcagaatcagtgcctatggccgtaatcatcggagttgcagtgggggccggcgttgcctttctggtgttgatggccacaatagtggcattttgctgtgctcgaagccagaggaatctgaagggggttgtgagcgccaagaacgacatccgggtggagatcgtacacaaagagcctgcatcaggacgcgaaggggaggagcatagcacaattaaacagctgatgatggaccgaggggagttccagcaggattctgtgctgaaacaactggaggtgctgaaggaagaagaaaaggagttccaaaacctgaaagatcccaccaacggctattattccgtcaacaccttcaaagagcatcactctacacctacaatttctctgtcctcgtgccagccagatctgaggcctgccgggaagcagagggtccctaccgggatgtcttttacaaatatatattcaactctatcaggccaaggcaggctctatgattatggacagcggtttgttttgggaatgggaagttcctctatcgagttgtgcgagcgcgagttccaacgcggctccctttccgattccagcagcttcctggatacacagtgcgattcatcagttagtagcagtggaaaacaggatggctatgtgcagttcgataaagcctctaaggcttctgcttctagcagccatcacagccagagttcttcacagaactcagatccatccaggccgctgcaaaggcggatgcaaacccatgtgtag

SEQ ID NO: 224699 - DNA, 2337 bp, Artificial Sequence
  derived and/or modified sequence
atgaagcctttccagctggatctcctgtttgtgtgcttcttcctgttctcacaggagctgggcctgcaaaagcggggttgctgcctggtgctgggatatatggcaaaggacaagttcagacgcatgaatgaggggcaggtgtacagtttttctcagcagcctcaggatcaggtcgtggtttctggacagccagtcaccctcctgtgcgccatccctgagtatgatgggtttgtgttgtggattaaagatggactcgcacttggtgttggacgtgacttaagcagctatccccaatacttggttgtgggcaaccacctgtccggggagcaccacctgaagattctgcgcgctgagctgcaggacgacgcagtgtatgagtgtcaagcgatccaggccgctatccgcagtcgacccgctcggttgaccgtgctggttcctccagatgatccagtcatcttgggaggcccagtcatctcccttcgagcaggggaccccttgaatctcacatgtcacgcagataatgctaagcctgcagcgtcaatcatatggctccgtaagggcgaagtcataaacggagcgacatactctaaaacactgctccgcgacggtaaacgggagagtatcgtcagcaccttgttcatatctcccggagatgtagagaacggacagtcaattgtatgcagggcaactaacaaagccattcctggaggaaaggagacctcagtgacaattgacatccagcatcctccactggtgaatctgtcagtggagccgcagcccgtcctcgaggacaatgtggttacttttcactgctctgccaaagccaatcctgctgtgacccagtaccggtgggccaaaagagggcaaatcatcaaagaggccagcggcgaagtctatagaaccactgtcgactatacttacttctctgaacctgtctcgtgcgaggtgactaacgccctggggagcactaacctgtctcgcacagttgatgtctacttcgggccacggatgacaacggagcctcagtctttgcttgtcgacctgggcagtgacgcaatcttcagttgcgcgtggacagggaatcctagtcttaccattgtttggatgaagcgaggaagcggcgtggtgttatctaacgagaaaacacttactttgaagtctgtcagacaggaagacgccggaaagtatgtatgtcgcgctgttgtacccagggtgggggctggggaacgcgaagtaactctcacagtcaatggtcctcccatcatatcaagcactcagactcagcatgctctccacggcgagaaagggcaaattaaatgttttatcagatcgaccccccctcccgatcgtatcgcctggtcatggaaggagaatgtcttggagagtggaacctctggtcgttatacagtcgagactatcagcactgaagaaggggtaatcagcacactgacaatctcgaacattgtccgcgcagactttcaaaccatttataactgtactgcatggaatagctttggctctgacactgagattattagattaaaagagcaaggatctgagatgaagagcggtgcaggactggaagccgagtctgtgcccatggcagtcattatcggcgtcgcagttggggctggtgtcgccttcctggtgctaatggccacaatcgtagctttttgttgtgcccgaagccaacgtaatttgaagggggtggtgtccgccaaaaatgatataagagtcgaaattgtacacaaggaacccgctagtggcagggagggagaggaacactcgactatcaagcaactcatgatggaccgcggagagttccaacaagacagcgtgctcaaacaactcgaagtcctcaaggaagaggaaaaggagttccagaacctaaaggatccgactaatggatattacagtgtgaacacttttaaagaacaccactccacgcccacaatctccctgtcctcttgccagcccgacctaagaccagccggtaagcagagagtccctacgggaatgagcttcaccaatatctacagtacactcagtggacaaggtcggctttatgattacggccagcggttcgtgttggggatgggttcctcctctatcgagctgtgcgaacgagaattccaacgaggttcactgagcgatagcagctctttcctggacacgcaatgtgacagttcggtgagctcaagtgggaagcaggacggatacgttcaattcgataaggcgtcaaaagcgtctgcgagctcatcgcatcactctcagtcttccagccagaattccgatcctagtcggccactgcagcggcgtatgcagacacatgtttag

SEQ ID NO: 224700 - DNA, 2337 bp, Artificial Sequence
  derived and/or modified sequence
atgaagccatttcaactagacctccttttcgtgtgcttttttctgttttctcaagagcttggactgcaaaaacggggatgctgcctggtcttaggatacatggccaaggacaagttccggcgcatgaacgaaggacaagtgtactcatttagccaacagccgcaagatcaagtcgtcgttagtggccagcctgttacgttgctctgcgctatccccgagtacgatggatttgtgctttggattaaagacggcctcgctctgggggttgggcgggatctctcatcctatcctcagtacctagtcgtcggaaatcatctatccggggaacatcacctgaaaattctccgcgcggaactgcaggacgatgccgtgtacgaatgtcaggctattcaggccgcaattaggtctagacccgctcggctgactgtgctcgtgcctcccgacgatccagtgatacttgggggccctgtcattagcctgagagcgggggacccactcaatttgacgtgccatgccgataacgctaaacccgcagccagcatcatctggttaaggaagggggaggttatcaacggtgcgacctactcaaagacactgctcagagacgggaagagggagagtatcgtttctactctgtttatcagccctggagatgtcgagaatggtcagagcatcgtctgccgggccacaaataaagctattcccggcggcaaggagacctccgtcactatcgacatccaacacccaccactggtcaatctgagcgtcgagcctcagccagttctagaagataatgtggtaaccttccactgtagcgcaaaggccaaccccgcagtaacgcagtatcgttgggccaaacgcgggcagattatcaaagaagctagcggcgaagtctaccgcacaacagttgactacacttactttagcgagcctgtaagctgcgaagtcactaacgcgttgggctcgaccaatctgagcagaactgtggacgtttatttcggacctcgcatgaccaccgagccacaaagcttactcgttgatcttggcagcgatgcaatcttctcttgcgcatggacaggcaacccctctcttactatagtatggatgaagcgcggatccggggtggtactctccaacgagaagacgcttactctcaaaagcgtgaggcaggaagatgcaggaaagtatgtctgtcgggccgtcgtccctagggtaggcgccggcgaaagagaggtcacccttacagtaaacggaccaccaattattagctcaacgcaaactcaacatgcactccatggcgaaaaaggacagatcaaatgtttcattcgctcaacacctccaccagataggattgcatggtcctggaaggagaatgtcctcgagtcgggcacctctggccgctacacggtggagacaatcagtactgaggaaggcgttatttccacactgacaatttctaatatagtgcgggcggacttccaaaccatttacaattgcactgcctggaattcttttggttccgataccgaaattattcgtctgaaggaacaggggtcggagatgaaatctggggctgggttggaagcagaatcagtacccatggcagttataattggtgttgccgttggcgcaggtgtggctttcctcgttcttatggccactatcgtcgccttctgttgcgcacgttcacaaagaaacctcaagggcgtggttagcgccaagaacgatatccgcgtggagattgtgcataaagaaccggcttctggaagagagggcgaggagcattctaccataaagcaactgatgatggaccgtggggaattccagcaagactcagtgttgaagcaacttgaggtgctcaaggaggaagagaaggagtttcaaaatttgaaagatcccacaaatggatattatagtgtcaataccttcaaagagcatcatagcacgcctaccatttctctctcttcatgtcagcctgatttgagaccagcgggcaagcagagagtacctactggaatgtcgttcactaacatctattctaccctatccggccagggccgcctttatgattacggacaacgttttgtgcttgggatggggagcagctccatagaactctgtgaacgggagtttcagcgaggctcgctgagtgatagtagcagcttcctggacacccagtgcgacagtagtgtcagctccagcggcaagcaggatggctatgtccagttcgacaaggcttctaaggccagcgcttcttctagccatcacagccagtcttcttctcaaaactcagatccatcacgaccgctccaaaggagaatgcagacccatgtttag

SEQ ID NO: 224701 - DNA, 2337 bp, Artificial Sequence
  derived and/or modified sequence
atgaagccgtttcagcttgatctacttttcgtttgtttctttctgttctcccaggagctagggctccagaaaagagggtgttgcctagtccttggatacatggctaaagataaatttcgcagaatgaacgaaggacaggtgtattccttctcccaacaaccacaggaccaggtcgtggtgtctggacagcctgtgactctgctgtgcgccattcccgaatacgatggatttgtgctctggattaaagatggtctggccttaggcgtcggtcgggatctaagcagctacccacagtatctcgtggtcgggaatcacttatcgggtgaacaccacttaaagatcctgagagcagagttacaagacgacgccgtgtacgaatgccaagctattcaggcagccattcgttccagacctgcacgcctgaccgtgctggtacctcctgatgaccctgtgatactcggcggacctgttatttccttgcgcgccggggatccactgaatctaacatgccacgctgacaatgcgaagcccgctgcgagcatcatctggttaagaaaaggcgaggtaatcaacggagccacatacagcaaaactttactacgtgatggaaagcgtgaaagtattgtcagtactctattcattagcccaggagacgtggaaaacggccaaagtatcgtctgtagagccacaaataaagctatcccaggaggtaaggaaactagcgtcacgatcgacatccagcatccgccactggtgaacctgtcagttgagcctcagcccgttcttgaggataacgtagtaacattccattgctccgctaaagccaatccggcagttacacagtaccgttgggcaaaaaggggtcaaatcatcaaggaggcttcgggcgaggtgtatcgcacaaccgttgactacacttatttctcggaacccgtaagctgtgaagtcaccaacgccctgggaagtaccaacctttctagaaccgttgacgtatatttcggaccgagaatgaccaccgaaccacagtcccttctggtggacctcggtagcgacgctattttttcttgcgcttggacgggcaatccatctctgaccattgtgtggatgaaacgaggttcgggtgtcgtgctgagtaacgaaaagacacttacactaaaaagcgttaggcaggaagatgctggtaagtacgtttgcagagctgtcgtccctcgagtgggcgccggagaacgggaagttaccctgacggttaacggaccccccatcatatccagcacacaaactcagcatgcccttcatggagaaaaaggacagatcaagtgcttcattcgctccactccacctcctgatcgcatcgcctggtcatggaaagagaacgtcctcgaatctggaacgtccgggcgctacacagttgagacgatctctacagaagaaggagttatatctaccctcaccatcagtaacattgtgcgagcagattttcagaccatttataactgtacggcctggaattcttttggttccgacactgagataattcggttgaaagagcagggcagcgagatgaagtccggggcagggcttgaagccgaatcagtccctatggcagttataataggagtggcggttggagccggcgtggccttcctggtgctaatggcgactattgttgcattttgctgcgcaagatcccagagaaaccttaaaggcgtggtctccgctaagaacgatataagggtcgagattgtccacaaagaacccgcgagcggccgcgaaggggaggagcatagcacaattaagcagctaatgatggatagaggcgagttccagcaagattccgttctcaaacagttggaagtcttgaaggaggaggagaaagaatttcaaaacctaaaggatcccaccaacggatactacagcgtgaacacctttaaagagcaccactccacccccacaatcagtttaagcagttgtcagccggaccttaggcctgctggtaaacagcgagtcccaacaggaatgtcattcactaatatctactccacattgagcggtcagggcagattgtacgactacggacagcgctttgtgcttggcatggggtcctcctcaatcgaactgtgtgagcgcgaatttcaaaggggctcactttccgactcttcatcatttctcgacacgcagtgtgactcaagcgtttcttcgtccggcaaacaggatgggtacgttcaattcgacaaagctagtaaagcaagtgccagttctagccaccacagccagtcatcctcacaaaattctgatccttctcgcccattacagcggagaatgcaaactcacgtgtag

SEQ ID NO: 224702 - DNA, 2337 bp, Artificial Sequence
  derived and/or modified sequence
atgaagcccttccagctggacctgctgttcgtgtgcttcttcctgttcagccaggagctgggcctgcagaagagaggctgctgcctggtgctgggctacatggccaaggacaagttcagaagaatgaacgagggccaggtgtacagcttcagccagcagccccaggaccaggtggtggtgagcggccagcccgtgaccctgctgtgcgccatccccgagtacgacggcttcgtgctgtggatcaaggacggcctggccctgggcgtgggcagagacctgagcagctacccccagtacctggtggtgggcaaccacctgagcggcgagcaccacctgaagatcctgagagccgagctgcaggacgacgccgtgtacgagtgccaggccatccaggccgccatcagaagcagacccgccagactgaccgtgctggtgccccccgacgaccccgtgatcctgggcggccccgtgatcagcctgagagccggcgaccccctgaacctgacctgccacgccgacaacgccaagcccgccgccagcatcatctggctgagaaagggcgaggtgatcaacggcgccacctacagcaagaccctgctgagagacggcaagagagagagcatcgtgagcaccctgttcatcagccccggcgacgtggagaacggccagagcatcgtgtgcagagccaccaacaaggccatccccggcggcaaggagaccagcgtgaccatcgacatccagcacccccccctggtgaacctgagcgtggagccccagcccgtgctggaggacaacgtggtgaccttccactgcagcgccaaggccaaccccgccgtgacccagtacagatgggccaagagaggccagatcatcaaggaggccagcggcgaggtgtacagaaccaccgtggactacacctacttcagcgagcccgtgagctgcgaggtgaccaacgccctgggcagcaccaacctgagcagaaccgtggacgtgtacttcggccccagaatgaccaccgagccccagagcctgctggtggacctgggcagcgacgccatcttcagctgcgcctggaccggcaaccccagcctgaccatcgtgtggatgaagagaggcagcggcgtggtgctgagcaacgagaagaccctgaccctgaagagcgtgagacaggaggacgccggcaagtacgtgtgcagagccgtggtgcccagagtgggcgccggcgagagagaggtgaccctgaccgtgaacggcccccccatcatcagcagcacccagacccagcacgccctgcacggcgagaagggccagatcaagtgcttcatcagaagcacccccccccccgacagaatcgcctggagctggaaggagaacgtgctggagagcggcaccagcggcagatacaccgtggagaccatcagcaccgaggagggcgtgatcagcaccctgaccatcagcaacatcgtgagagccgacttccagaccatctacaactgcaccgcctggaacagcttcggcagcgacaccgagatcatcagactgaaggagcagggcagcgagatgaagagcggcgccggcctggaggccgagagcgtgcccatggccgtgatcatcggcgtggccgtgggcgccggcgtggccttcctggtgctgatggccaccatcgtggccttctgctgcgccagaagccagagaaacctgaagggcgtggtgagcgccaagaacgacatcagagtggagatcgtgcacaaggagcccgccagcggcagagagggcgaggagcacagcaccatcaagcagctgatgatggacagaggcgagttccagcaggacagcgtgctgaagcagctggaggtgctgaaggaggaggagaaggagttccagaacctgaaggaccccaccaacggctactacagcgtgaacaccttcaaggagcaccacagcacccccaccatcagcctgagcagctgccagcccgacctgagacccgccggcaagcagagagtgcccaccggcatgagcttcaccaacatctacagcaccctgagcggccagggcagactgtacgactacggccagagattcgtgctgggcatgggcagcagcagcatcgagctgtgcgagagagagttccagagaggcagcctgagcgacagcagcagcttcctggacacccagtgcgacagcagcgtgagcagcagcggcaagcaggacggctacgtgcagttcgacaaggccagcaaggccagcgccagcagcagccaccacagccagagcagcagccagaacagcgaccccagcagacccctgcagagaagaatgcagacccacgtgtag

SEQ ID NO: 224703 - protein, 1894 aa, Artificial Sequence
  derived and/or modified sequence
MAPEAGATLRAPRRLSWAALLLLAALLPVASSAAASVDHPLKPRHVKLLSTKMGLKVTWDPPKDATSRPVEHYNIAYGKSLKSLKYIKVNAETYSFLIEDVEPGVVYFVLLTAENHSGVSRPVYRAESPPGGEWIEIDGFPIKGPGPFNETVTEKEVPNKPLRVRVRSSDDRLSVAWKAPRLSGAKSPRRSRGFLLGYGESGRKMNYVPLTRDERTHEIKKLASESVYVVSLQSMNSQGRSQPVYRAALTKRKISEEDELDVPDDISVRVMSSQSVLVSWVDPVLEKQKKVVASRQYTVRYREKGELARWDYKQIANRRVLIENLIPDTVYEFAVRISQGERDGKWSTSVFQRTPESAPTTAPENLNVWPVNGKPTVVAASWDALPETEGKVKEYILSYAPALKPFGAKSLTYPGDTTSALVDGLQPGERYLFKIRATNRRGLGPHSKAFIVAMPTTSKADVEQNTEDNGKPEKPEPSSPSPRAPASSQHPSVPASPQGRNAKDLLLDLKNKILANGGAPRKPQLRAKKAEELDLQSTEITGEEELGSREDSPMSPSDTQDQKRTLRPPSRHGHSVVAPGRTAVRARMPALPRREGVDKPGFSLATQPRPGAPPSASASPAHHASTQGTSHRPSLPASLNDNDLVDSDEDERAVGSLHPKGAFAQPRPALSPSRQSPSSVLRDRSSVHPGAKPASPARRTPHSGAAEEDSSASAPPSRLSPPHGGSSRLLPTQPHLSSPLSKGGKDGEDAPATNSNAPSRSTMSSSVSSHLSSRTQVSEGAEASDGESHGDGDREDGGRQAEATAQTLRARPASGHFHLLRHKPFAANGRSPSRFSIGRGPRLQPSSSPQSTVPSRAHPRVPSHSDSHPKLSSGIHGDEEDEKPLPATVVNDHVPSSSRQPISRGWEDLRRSPQRGASLHRKEPIPENPKSTGADTHPQGKYSSLASKAQDVQQSTDADTEGHSPKAQPGSTDRHASPARPPAARSQQHPSVPRRMTPGRAPQQQPPPPVATSQHHPGPQSRDAGRSPSQPRLSLTQAGRPRPTSQGRSHSSSDPYTASSRGMLPTALQNQDEDAQGSYDDDSTEVEAQDVRAPAHAARAKEAAASLPKHQQVESPTGAGAGGDHRSQRGHAASPARPSRPGGPQSRARVPSRAAPGKSEPPSKRPLSSKSQQSVSAEDDEEEDAGFFKGGKEDLLSSSVPKWPSSSTPRGGKDADGSLAKEEREPAIALAPRGGSLAPVKRPLPPPPGSSPRASHVPSRLPPRSAATVSPVAGTHPWPQYTTRAPPGHFSTTPMLSLRQRMMHARFRNPLSRQPARPSYRQGYNGRPNVEGKVLPGSNGKPNGQRIINGPQGTKWVVDLDRGLVLNAEGRYLQDSHGNPLRIKLGGDGRTIVDLEGTPVVSPDGLPLFGQGRHGTPLANAQDKPILSLGGKPLVGLEVIKKTTHPPTTTMQPTTTTTPLPTTTTPRPTTATTRRTTTTRRTTTRRPTTTVRTTTRTTTTTTPTPTTPIPTCPPGTLERHDDDGNLIMSSNGIPECYAEEDEFSGLETDTAVPTEEAYVIYDEDYEFETSRPPTTTEPSTTATTPRVIPEEGAISSFPEEEFDLAGRKRFVAPYVTYLNKDPSAPCSLTDALDHFQVDSLDEIIPNDLKKSDLPPQHAPRNITVVAVEGCHSFVIVDWDKATPGDVVTGYLVYSASYEDFIRNKWSTQASSVTHLPIENLKPNTRYYFKVQAQNPHGYGPISPSVSFVTESDNPLLVVRPPGGEPIWIPFAFKHDPSYTDCHGRQYVKRTWYRKFVGVVLCNSLRYKIYLSDNLKDTFYSIGDSWGRGEDHCQFVDSHLDGRTGPQSYVEALPTIQGYYRQYRQEPVRFGNIGFGTPYYYVGWYECGVSIPGKW

SEQ ID NO: 224704 - DNA, 492 bp, Artificial Sequence
  derived and/or modified sequence
atgactcaccccctgccacacgactcccacactagcggagcaccccctctggttaacaagagccgagaccttgcaaacggtcccccatttttctcccccctgcagagcttgtgggaagagttcctgcatctgctctttatgggcaccctgctgttctaccgcatagcgaccaaagccctaagaggaaaagcaacattgctgaagagccactcgaagcagcccgctcagccagggtgggaacccggaatcagagcgccaagtccggtccctgcctcttccctgcaggaccactccaggttgacctctctatccagaacaggaaaagagcagcggaggacactgtctctcataagaaagacaagtggcactccaactgagtcgactgttgccactgccgcagcaagtaccacggaggttccgtccaggctcccctgggccgctagggctggttttaaaaggacaaccggagtgtgcatagctctccccacttag

SEQ ID NO: 224705 - DNA, 6552 bp, Artificial Sequence
  derived and/or modified sequence
ctcagtggcggagcgcggctgccggtgtgcggccgggagcgatcgccgcggggcaggggcgcggcgggcaccgcgcagagcgcgcagaacagacggacggcggcggggacccgacggcggcgcctcggcactccccagactccggccagcgcccccctgccagccgcaagcacccagccccggcccaccccgggctctcgatggcccccgaggccggggcgaccctgcgcgcgccgcgccggctgtcctgggcggcgctgctgctcttggccgcgctgctccccgtcgcctcctcggcggcggcctcagttgaccacccactgaagccaaggcatgtgaaactgctgtccactaaaatgggcctgaaagtcacgtgggacccacccaaagatgctaccagtagacctgtggagcattacaacattgcctatgggaagtcactgaaaagtcttaaatacatcaaggtgaatgcggagacatactccttccttattgaggatgtggagccgggggtagtgtactttgtgctgcttactgcagaaaaccacagtggagtgagccgtcctgtttacagagctgaaagcccacctggaggtgaatggatcgagattgatggttttcccattaagggtccaggaccatttaatgaaaccgtcacagaaaaggaagtgcccaacaagcccttgcgtgtgcgtgtccggtcctcagatgacaggctgtccgttgcgtggaaggcaccacgcctgtctggagccaagagtccacgcagatcacggggttttctcctgggctacggggagagtggccggaagatgaattatgttccactgacaagagatgaacggacacacgaaattaaaaagctagcctcggaatccgtgtatgtggtctccctgcagtccatgaactctcagggccggagccaaccagtctacagggctgccctaacaaagcgaaagatttcagaagaggacgaattggatgtacctgacgacatcagcgtccgggttatgtcatctcagtctgtgcttgtgtcctgggtggatcctgttctggaaaaacagaagaaagttgttgcatcaagacagtacaccgtgcgctatcgagagaagggggaattggccaggtgggattataagcagatcgctaacaggcgtgtgctgattgagaacctgattccagacactgtgtatgaatttgcagtccgtatttcacagggtgaaagagatggcaaatggagtacgtcagtcttccaaagaacaccagaatctgcccctaccacagctcctgaaaacttgaacgtctggccagtcaatggcaaacctacagttgtcgctgcatcttgggatgcgctaccagagactgaggggaaagtgaaagaatacattctttcatacgccccggctctcaaaccatttggagcaaagtccctcacctatcctggagacactacttctgccctggtggatggtctgcagcctggggaacgctatcttttcaaaatccgggccacaaacaggagaggcctgggacctcactccaaagccttcattgtcgctatgccaacaaccagtaaggcggatgttgagcagaacacggaggacaatgggaaacccgaaaaacctgagccttcctcaccttctcccagagctccagcttcctcccaacacccctctgtgcctgcttctccccaagggagaaatgccaaggaccttcttcttgacttgaagaacaaaatattggctaatggtggggcgccccgaaaaccccagcttcgcgccaagaaggcagaggagctggatcttcagtcgacagaaatcactggggaggaggagctgggttcccgggaggactcgcccatgtcaccctcagacacccaagaccagaaacggaccctgaggccgccaagtagacacggccactcggtggttgctcccggcaggactgcagtgagggcccggatgccagcgctgccccgaagggaaggcgtagataagcctggcttttccctggccacgcagccccgcccaggggcgcccccctcggcttcggcctctcctgcccaccacgcgtccacccagggcacctctcatcgtccttccctgcctgccagcttgaatgacaacgacttggtggactcagacgaagatgagcgcgctgtgggctccctccaccccaagggcgccttcgcccagccccggccagccctgtcccccagccgccagtccccgtccagcgttctccgcgacagaagctctgtgcaccccggcgcaaagccagcctcgccggcccggaggaccccccattcaggggccgcagaggaagattccagtgcctcagccccaccctcaagactttctccaccccatgggggatcatctcggctgctgcccacccagccacacctgagctctccactttccaagggcgggaaggatggtgaggacgccccagccaccaactccaatgcgccatcacggtccaccatgtcctcctccgtctcttctcatctctcgtccaggacgcaggtctctgagggagcggaggcttctgatggtgaaagccacggtgacggcgatagggaagacggcggaaggcaggcggaggccacggcccagacgctgcgggcccggcctgcctctggacacttccatttgctcagacacaaaccctttgctgccaacgggaggtctccaagcaggttcagcattgggcggggacctcggctgcagccctccagctccccacagtcgactgtgccctcccgagcccaccccagggttccctctcactctgattcccaccctaagcttagctcaggtatccatggagacgaggaggatgagaagccgcttcctgccaccgttgtcaatgaccacgtgccttcctcctccaggcagcccatctcccggggctgggaggacttaaggagaagcccgcagagaggggccagcctgcatcggaaggaacccatcccagagaaccccaaatccacaggggcagatacacatcctcagggcaagtactcctccctggcctccaaggctcaggatgttcaacagagcacagacgcggacacggagggtcattctcccaaagcacagccagggtccacagaccgccacgcgtcccctgctcgtccgcccgcagcacggtcacagcagcatcccagtgttcccagaaggatgacacccggccgggccccacaacagcagccccctcctcccgtcgccacgtcccagcaccacccgggaccccagagcagagacgcgggtcggtcaccttcccagcccaggctctcactgacccaggccgggcggccccgccccacgtcgcagggccgctcccactcctcctcggacccttacacggcgagctccagagggatgctccccacggccctccagaaccaggacgaggatgcccagggcagctacgacgacgacagcacagaagtcgaggcccaggatgtgcgggcccccgcgcacgccgcgcgcgccaaggaggcagctgcgtcccttcccaagcaccagcaggtggagtctcccacaggcgcaggggcaggtggcgaccacaggtcccagcgcggacatgcggcctcccccgccaggcccagccgacccggcggcccccagtcccgcgcccgggtacccagcagggcagcgccggggaagtcggagcctccttccaagcggcccctgtcctccaagtcccagcagtcggtctcagccgaggacgacgaggaggaggacgcgggattttttaaaggcgggaaagaagaccttctgtcttcctctgtgccaaagtggccctcttcctccactcccaggggcggcaaagacgccgatgggagcctcgccaaggaagagagggagcctgccatcgcgcttgcccctcgcggagggagcctggctcctgtgaagcgacctctccccccacctccaggcagctcccccagggcctcccacgtcccttcccgactgccgcctcgcagcgctgccaccgtgagccccgtcgcgggcacccacccctggccgcagtacaccacgcgcgccccacctggccacttctccaccaccccgatgctgtccttgcgccagaggatgatgcatgccagattccgtaaccctctctcccgacagcctgccagaccctcttacagacaaggttataatggcagaccaaatgtagaagggaaagtccttcctggtagtaatggaaaaccgaatggacagagaattatcaatggccctcaaggaacaaagtgggttgtggaccttgatcgtgggttagtattgaatgcagaaggaaggtacctccaagattcacatggaaatcctcttcggattaaactaggaggagatggtcgaaccattgtagatctggaagggacccccgtggtgagtcctgacggcctcccactctttgggcaggggcgacatggcacacctctggccaatgcccaagataagccaattttgagtcttggaggaaagccgctggtgggcttggaggtcatcaaaaaaaccacccatccccctaccactaccatgcagcccaccactactacgacgcccctgcctaccactacaaccccgaggcccaccactgccaccacccgccgcacgaccaccacccgccgcacgaccaccaggcgtccaacaaccacagtccgaaccactacgcggacaaccaccaccaccacccccacacccaccactcccatccccacctgtccccctgggaccttggaacggcacgacgatgatggcaacctgataatgagctccaatgggatcccagagtgctacgctgaagaagatgagttctcaggcttggagactgacactgcagtacctacggaagaggcctacgttatatatgatgaagattatgaatttgagacgtcaaggccaccaaccaccactgagccttcgaccactgctaccacaccgagggtgatcccagaggaaggcgccatcagttcctttcctgaagaagaatttgatctggctggaaggaaacgatttgttgctccttacgtgacgtacctaaataaagacccatcagccccgtgctctctgactgatgcactggatcacttccaagtggacagcctggatgaaatcatccccaatgacctgaagaagagtgacctgcctccccagcatgctccccgcaacatcaccgtggtggccgtggaaggttgccactcatttgtcattgtggactgggacaaagccaccccaggagatgtggtcacaggttacttggtttacagtgcatcctatgaagacttcatcaggaacaagtggtccactcaagcttcatcagtaactcacttgcccattgagaacctaaagcccaacacgaggtattattttaaagtgcaagcacaaaatcctcatggctacggacctatcagcccttcggtctcatttgtcaccgaatcagataatcctctgcttgttgtgaggcccccaggcggtgagcctatctggatcccattcgctttcaaacatgatcccagctacacggactgccatggacggcaatatgtgaagcgcacgtggtatcgaaagttcgtgggagttgttctttgtaattcactgaggtataaaatctacctcagtgacaacctgaaagatacattctacagcattggagacagctggggaagaggtgaagaccattgccaatttgtggattcacaccttgatggaagaacagggcctcagtcctatgtagaagccctccctactattcaaggctactatcgccagtatcgtcaggagcctgtcaggtttgggaacatcggcttcggaaccccctactactatgtgggctggtacgagtgtggggtctccatccctggaaagtggtaatcacaggaccgtcatgctgcaagcttgccctgcccagccccaccaactaagtcgcactaggggctgtgagcaaagacagccagcgtgctcagccccgctgccctaggtgccaggaaggtcatagatggacactggccattctggtcatctcagtctggaactcagtcccacttcttggcctggacaatgaacaggattcagttttgctgttaactttgcttctctacttttttttgtttgtttgtaatagcacatcccagagacatcagaaaccagcaactgattcagtgtgatttccagactttttaggcatgaaattcggacacttcagtatttccaggaatagcatatgcacgctgttcttgcttcatggaatgctacatgctttctgtttttctcattttggatttctccaaaactaactgaatttaagcttcaggtccctttgtatgcagtagaaaggaattattaaaaacaccaccaaagaaaataaatatatcctacttgaaatttactctatggacttacccactgctagaataaatgtatcaaatcttatttgtaaattctcaattttgatatatatatgtatatatgcatatacatatccacacttgtctgcaagaatattgattaaaattgctaaatttgtacttgttcaccagat

SEQ ID NO: 224706 - DNA, 5685 bp, Artificial Sequence
  derived and/or modified sequence
atggcacctgaggctggcgccaccctgcgtgcccccagacgcctgtcttgggccgccttgctacttttggctgcattattacccgtcgcgagctccgccgccgcttccgtggatcaccctctcaaacctagacacgtcaaattactgtctaccaaaatgggccttaaggtcacctgggacccaccaaaagatgctacgagtaggcctgtggaacactacaatatagcctatggcaaatcactgaaatcactgaaatatattaaggttaacgccgaaacttacagcttcctgattgaagatgttgaaccaggagtggtatatttcgttctgctcacagcagagaatcactccggtgtgtctagacccgtgtacagggctgagagccctccaggcggcgaatggatagagattgatggctttcccatcaaagggccagggccatttaatgagaccgtcaccgaaaaggaagtccctaataagcctctgcgcgtcagggtgcgcagttcagacgaccgtctgtcagtggcctggaaggccccaagactgagtggcgcaaagtcaccaaggcgaagcagaggctttcttttaggatacggcgaaagcggccgcaaaatgaattacgtgcctctgactagggatgagcggacacatgagattaaaaagttagctagtgagtctgtgtatgtggtgagcttgcaatccatgaattcacagggaaggagccagccagtgtaccgagccgcccttactaaacgtaagatctccgaggaggatgagttggatgtgccagacgatattagcgttcgagtcatgtcctcacaatctgtcttagtgtcctgggtggacccagtactggagaaacaaaaaaaagttgtggcatctcgtcagtatactgtgaggtatagggagaagggcgagctggcccgatgggactataagcagatcgcaaataggcgggtgcttattgagaacctgatccccgataccgtatacgagttcgctgtgcggatttcacagggtgaaagggatggtaaatggtcaacctcagtctttcagaggactccagaatcagcaccaactaccgcacctgagaacctcaatgtttggcccgtgaacggcaaacccacagtcgttgcggctagctgggacgcccttccagaaacggaaggcaaagtcaaagagtacattttaagttatgcacccgcactgaagcctttcggtgctaaatcactgacatatcctggggacacaacttctgccctggtcgatggtctgcaacccggcgaaaggtacctgttcaaaatcagggcgaccaatcgtcggggccttgggccacactctaaagcatttattgtggctatgcctactacaagcaaggctgatgtagagcagaacacggaagataatggcaagccggagaagcccgaaccttcaagccctagcccccgcgccccagcctcctcccagcacccgagtgtaccagcatctccccaggggcggaacgctaaggacctcctgcttgacctaaaaaataaaattcttgctaatggtggggcccccagaaagccacagcttagagcgaaaaaagcagaagagctcgatctccaatctaccgagattacaggagaagaagagctgggttcccgcgaggatagccccatgtcaccgtctgacacccaggatcaaaagagaacactacgcccgccttcgcgccatggtcattcggtggttgccccaggccgcaccgccgttagagcccggatgccggccctccccagaagagagggagtggacaagccgggcttctcactagctacccagccacgtccgggagctccaccatcagcctcagcttctcccgcccaccacgctagcacacagggcaccagtcatagaccatccctgcccgcttcattgaacgacaacgacctggttgatagtgacgaggatgagagagctgtgggctctctacaccctaagggggcattcgcacagcctcggcctgctctgtccccaagcaggcagtcaccttcatctgtgctgcgggataggagttccgtccatcccggtgccaagccagcgtcccctgcccgccgcacccctcattctggcgccgcagaagaggattcctccgcctcagcgcctccaagcaggctcagtcctccacacggggggtcatctagattactaccgacacagcctcacctcagcagcccattgagtaagggcggtaaggacggagaagacgcccccgccacgaattctaatgccccttcacggagcactatgtccagcagtgtgtcttcccacctgagttcacgaacccaggtgagcgagggggcagaggcatctgacggagagagccatggcgacggtgaccgcgaggacggcggacgccaggctgaagccaccgctcagaccttgagagcaaggcctgccagcgggcacttccatctgctgagacacaaaccttttgccgctaatgggcggagccctagcaggttcagcatcggtcgggggccacgattacaaccttcttcctcaccccaaagcacggtaccctcaagggcccatcctagggtgccctcacactcagactctcatccgaagctgtcatcaggaatccacggagatgaggaagacgagaagcccttgcccgctactgtcgtcaatgaccacgtgccatcctcctcaagacagcccattagcaggggttgggaagacctgcgcaggagcccacagaggggtgccagcctccatagaaaggaacctattccagaaaatccaaagagcaccggggccgacacccaccctcaaggtaagtattcttccttagctagcaaggctcaggacgtgcaacaatccacagacgccgacacagaaggtcattcgccaaaagcgcagcctgggtcaacagataggcatgcgtctccggcaaggccccccgctgctagaagccaacagcacccttcagttcctagacgaatgaccccaggtcgagcgccccaacagcagcccccaccccctgttgcaacctcccagcatcatcctgggccccaaagccgtgacgccgggaggtcaccttctcagccgagactgtccctgacgcaggctggtagaccgaggcccacctcacaaggtcgcagccattctagttccgatccatatactgcatcctcaagaggcatgctgcctaccgcgctgcagaaccaagatgaggatgcccagggcagctatgacgatgacagtaccgaggtagaggcccaggacgtgagggcccccgcacacgccgcaagggcgaaagaggccgccgccagcttgcctaagcatcaacaggtggagtctcctacaggggctggagctggtggtgaccacagaagccagagaggacatgctgcatctcctgcgcggcccagccggcctggaggcccgcagtcccgggctcgggtgcccagtcgcgcagcgccaggaaaatccgagccgccgtccaagagacctcttagttctaagtcacagcagagtgtgagtgccgaggacgacgaagaggaggacgccggttttttcaagggagggaaagaggacttactcagcagctcagttcctaaatggccatcaagtagtacaccacgaggcggaaaagacgccgacgggtccctcgctaaggaagagcgggaacctgccatcgccctcgctccccgcggggggagcctggcgccggtaaagcggcccctgcccccacctcccggcagttccccacgcgcctctcacgtgccttctagactgccgccaagatcagctgctactgtgtctccagtggcgggaacacacccttggccacagtacaccactagagctcccccagggcacttctctacgacccctatgcttagtttaagacaacgtatgatgcatgcacggtttcgaaatcccctgtcacgacaaccagccagaccctcttacaggcaagggtacaatggccggccaaacgtcgaaggaaaggtgttacctggaagtaatgggaagccaaatgggcagagaattattaacggaccacaaggtaccaagtgggtcgtagatctggacagaggactggttctgaatgctgaggggcgttatcttcaagactcccacgggaatcctctacgtattaaattgggtggagatggccggacgattgtggacctcgaggggactccagtcgtgtcccccgacgggcttcccctgtttggacagggtcggcacggcacccccctcgcaaatgcacaggacaaacctatcctgtccctgggaggaaaaccactggttggtctcgaagtcataaagaagaccacccacccccccactactacaatgcagcccaccactacaaccactccacttcctaccacaacaacaccaagacccaccaccgctacgactcgtcgaacaaccaccacccggcgcacgactacacggaggccaaccactaccgtacgaactacaacccgtaccacaacaactaccactcctaccccgaccactcctatcccaacctgccctcccggaacattggaaaggcatgacgacgacgggaatcttatcatgtcctcaaacgggatcccggagtgctatgcggaagaagatgaatttagtggactggagacagataccgccgtgcctaccgaagaagcttatgtaatttacgacgaagattatgagtttgaaacctcaagaccaccaacaaccactgagcccagcactacagcaacaactccccgggtcatccccgaggagggcgcaatttccagtttcccagaagaggagttcgatttagccggtagaaagagatttgtcgcaccctacgtgacttatctcaacaaggatccctctgccccatgttccttgacggacgcactcgatcatttccaagttgacagtcttgacgaaattatccccaatgatctgaagaaatccgaccttccaccccagcacgccccaaggaacattaccgtggtcgcggtcgaggggtgtcactcctttgtgattgtggattgggacaaggccacccctggtgacgttgtaactggttacctggtgtattccgctagctacgaagacttcataagaaacaagtggtccactcaggcttcatcagtgacacacctccctatagaaaacctgaagccaaatacccggtactactttaaggtccaggctcaaaacccccacggatacggccctataagcccatcagtatcctttgtcacagaatcagacaacccactcctggtggtgaggcctccagggggggagccaatctggatcccttttgcttttaaacacgatccaagttatacggactgccacggtcgtcagtacgttaagcgaacctggtatcggaaatttgtcggtgtcgtgctgtgtaattccctgcggtataaaatctacctgagtgataacctgaaggatacattctacagtattggagactcctgggggcgtggagaagatcactgccaatttgtcgactcacacttagatggtcggacagggccccaaagctacgtggaagcattaccaacaattcagggctattacagacagtaccggcaggaacccgtccggttcggcaacataggcttcggaacaccttactactacgtgggctggtatgagtgtggtgtgagtattccaggaaagtggtag

SEQ ID NO: 224707 - DNA, 5685 bp, Artificial Sequence
  derived and/or modified sequence
atggcccctgaggccggggccaccctgcgggccccccggcggctgtcctgggccgccctgctgctgctggccgccctgctgcctgtggccagcagcgctgctgcctctgtggaccaccccctgaagcccaggcatgtgaagctgctgagcaccaagatgggcctgaaggtgacctgggacccccccaaggatgccaccagcaggcctgtggagcactacaacatcgcctacggcaagagcctgaagagcctgaagtacatcaaggtgaatgctgagacctacagcttcctgattgaagatgtggagcccggggtggtgtactttgtgctgctgacagctgagaaccacagcggcgtgtccaggcctgtgtacagagctgagagccccccaggaggagagtggattgaaattgatggcttccccatcaagggccctggccccttcaatgaaacagtgacagagaaggaggtgcccaacaagcccctgcgggtgcgggtgcgcagcagtgatgaccggctgtctgtggcctggaaggccccccggctgagcggggccaagagccccaggaggagccggggcttcctgctgggctacggggagagcggcaggaagatgaactacgtgcccctgaccagagatgagaggacccatgagatcaagaagctggccagcgagagcgtgtatgtggtgtccctgcagagcatgaacagccagggccgcagccagcctgtgtacagagctgccctgaccaagaggaagatcagtgaagaagatgagctggatgtgcctgatgacatctctgtgcgggtgatgagcagccagagcgtgctggtgtcctgggtggaccctgtgctggagaagcagaagaaggtggtggccagccggcagtacacagtgcgctaccgggagaagggggagctggcccgctgggactacaagcagatcgccaacagaagagtgctgattgaaaatctcatcccagacacagtgtatgaatttgctgtgcgcatcagccagggcgagagagatggcaagtggagcacctctgtgttccagaggaccccagagagcgcccccaccacagcccctgagaacctgaatgtgtggcctgtgaatggcaagcccaccgtggtggccgcctcctgggatgccctgcctgagacagagggcaaggtgaaggagtacatcctgtcctatgccccagccctgaagccctttggagccaagagcctgacctacccaggggacaccaccagcgccctggtggatggcctgcagcctggagagcgctacctgttcaagatccgggccaccaacagaagaggcctgggcccccacagcaaggccttcatcgtggccatgcccaccaccagcaaggcagatgtggagcagaacacagaagataatggcaagccagagaagccagagcccagcagccccagcccccgggccccagccagcagccagcaccccagcgtgcctgccagcccccagggcagaaatgccaaggacctgctgctggacctgaagaacaagatcctggccaacggcggggcccccaggaagccccagctgcgggccaagaaggccgaggagctggacctgcagagcacagagatcactggagaggaggagctgggcagccgggaggacagccccatgagccccagcgacacccaggaccagaagaggaccctgcggccccccagccgccacggccacagcgtggtggcccctggccgcacagctgtgcgggccaggatgcctgccctgccccggcgggagggcgtggacaagccaggcttcagcctggccacccagcccaggcctggggcccctccttctgccagcgccagccctgcccaccacgccagcacccagggcaccagccaccggcccagcctgcctgccagcctgaatgacaatgacctggtggacagtgatgaagatgaaagagctgtgggcagcctgcaccccaagggggcctttgcccagcccaggcctgccctgagccccagccggcagagccccagctctgtgctgcgggacaggagctctgtgcaccctggggccaagccagccagccctgcccggaggaccccccacagcggggctgctgaggaggacagcagcgccagcgccccacccagccggctgagcccccctcatggaggcagcagccggctgctgcccacccagccccacctgagcagccccctgagcaagggcggcaaggatggagaagatgccccagccaccaacagcaatgcccccagccgcagcaccatgagcagctctgtgagcagccacctgagcagcaggacccaggtgtctgagggcgctgaggccagtgatggagagagccatggagatggagacagagaagatggcggccggcaggccgaggccacagcccagaccctgcgggcccggcctgccagcggccacttccacctgctgcggcacaagccctttgctgccaacggccgcagccccagccgcttcagcatcggccggggcccccggctgcagcccagcagcagcccccagagcacagtgcccagccgggcccacccccgggtgcccagccacagcgacagccaccccaagctgagcagcggcatccatggagatgaggaggatgagaagcccctgcctgccaccgtggtgaatgaccacgtgcccagcagcagccggcagcccatcagccggggctgggaggacctgcggcgcagcccccagagaggagccagcctgcacaggaaggagcccatccctgagaaccccaagagcactggagctgacacccacccccagggcaagtacagcagcctggccagcaaggcccaggatgtgcagcagagcacagatgctgacacagagggccacagccccaaggcccagcccggcagcacagacagacatgccagccctgcccggcccccagctgcccggagccagcagcaccccagcgtgcccaggaggatgaccccaggccgggccccccagcagcagcccccacctcctgtggccaccagccagcaccaccctggcccccagagcagagatgctggccgcagccccagccagccccggctgagcctgacccaggccggccggccccggcccaccagccagggccgcagccacagcagcagtgacccctacacagccagcagccggggcatgctgcccacagccctgcagaaccaggatgaagatgcccagggcagctatgatgatgacagcacagaggtggaggcccaggatgtgcgggccccagcccatgctgcccgggccaaggaggccgccgccagcctgcccaagcaccagcaggtggagagccccactggagctggagctggaggagaccacaggagccagaggggccacgccgccagccctgcccggcccagcaggcctgggggcccccagagccgggcccgggtgcccagccgggccgcccctgggaagtctgagccccccagcaagaggcccctgagcagcaagagccagcagagcgtgtctgcagaagatgatgaggaggaggatgctggcttcttcaagggcggcaaggaggacctgctgagcagctctgtgcccaagtggcccagcagcagcaccccccggggcggcaaggatgctgatggcagcctggccaaggaggagcgggagcccgccatcgccctggccccccggggcggcagcctggcccctgtgaagaggcccctgcccccacctcctggcagcagcccccgggccagccacgtgcccagccggctgccccccaggtctgctgccaccgtgtcccctgtggccggcacccacccctggccccagtacaccacccgggcccctcctggccacttcagcaccacccccatgctgagcctgcggcagaggatgatgcacgcccgcttcaggaaccccctgagccggcagcctgcccggcccagctaccggcagggctacaacggccggcccaacgtggagggcaaggtgctgcccggcagcaatggcaagcccaacggccagaggatcatcaatggcccccagggcaccaagtgggtggtggacctggaccggggcctggtgctgaatgctgagggccgctacctgcaggacagccacggcaaccccctgcgcatcaagctgggcggagatggccgcaccatcgtggacctggagggcacccctgtggtgtccccagatggcctgcccctgtttggccagggccgccacggcacccccctggccaatgcccaggacaagcccatcctgagcctgggcggcaagcccctggtgggcctggaggtgatcaagaagaccacccacccccccaccaccaccatgcagcccaccaccaccaccacccccctgcccaccaccaccaccccccggcccaccacagccaccaccaggaggaccaccaccaccaggaggaccaccacccggcggcccaccaccaccgtgaggaccaccaccaggaccaccaccaccaccacccccacccccaccacccccatccccacctgccccccaggcaccctggagagacatgatgatgatggcaacctgatcatgagcagcaatggcatcccagaatgttatgcagaggaggatgagttcagcggcctggagacagacacagctgtgcccacagaggaggcctacgtgatctatgatgaagattatgaatttgagaccagccggccccccaccaccacagagcccagcaccacagccaccacccccagggtcatccctgaggagggcgccatcagcagcttccctgaggaggagtttgacctggccggcaggaagagatttgtggccccctacgtgacctacctgaacaaggaccccagcgccccctgcagcctgacagatgccctggaccacttccaggtggacagcctggatgagatcatccccaatgacctgaagaagagtgacctgcccccccagcacgcccccaggaacatcaccgtggtggccgtggagggctgccacagctttgtgattgtggactgggacaaggccaccccaggagatgtggtgacaggctacctggtgtacagcgccagctatgaggacttcatccggaacaagtggagcacccaggccagctctgtgacccacctgcccatcgagaacctgaagcccaacacccgctactacttcaaggtgcaggcccagaacccccacggctacggccccatcagccccagcgtgtcctttgtgacagaaagtgacaaccccctgctggtggtgcggcccccaggaggagagcccatctggatcccctttgccttcaagcatgaccccagctacacagactgccacggccggcagtatgtgaagaggacctggtacaggaagtttgtgggcgtggtgctgtgcaacagcctgcgctacaagatctacctgagtgacaacctgaaggacaccttctacagcattggagacagctggggcagaggagaggaccactgccagtttgtggacagccacctggatggccgcacaggcccccagagctatgtggaggccctgcccaccatccagggctactaccggcagtaccggcaggagcctgtgcgctttggaaacatcggcttcggcaccccctactactacgtgggctggtatgaatgtggggtgtccatccctgggaagtggtag

SEQ ID NO: 224708 - DNA, 5685 bp, Artificial Sequence
  derived and/or modified sequence
atggcccccgaggccggcgccaccctgcgggccccccggcggctgagctgggctgcccttctcctgctggctgcgctcttgcccgtggcgtcctcagctgctgcctcggtggatcatccgcttaaacctaggcatgtgaagctcctgagcaccaagatgggcctcaaggtgacctgggacccgcccaaggacgctaccagtcggcccgtggagcattacaatatcgcatatgggaaaagcttaaagtccctgaagtatattaaggtaaacgcagaaacatattcctttcttattgaggatgttgaacccggcgtagtatattttgtgctccttaccgcagaaaatcattcaggtgtgtctcggcccgtgtaccgcgcggaatcacctccaggcggtgaatggatcgagattgacgggttcccgattaaaggtcctggtccttttaatgaaacagtgactgagaaggaggtccctaacaagcctctaagggtcagagtgaggtcatctgacgatagactcagcgtcgcttggaaggcaccccgtcttagcggggccaagtctcccaggcggtcccggggcttcctgctcggctacggggaaagtgggcgtaagatgaattacgtgcccctgacaagggacgagcgtacccacgaaatcaagaagctggcgtcagaaagtgtgtacgtggtctccctacagagcatgaactctcagggcaggagccaacccgtgtatcgggcagccttaactaaaaggaaaatctctgaggaggatgagcttgatgttccggacgacatctccgtgagagtgatgagcagccagtcggtgctagtgagttgggtggatcctgttctcgagaagcaaaagaaagtagtggcgtcgaggcaatataccgtaaggtatcgtgaaaaaggcgagctggctcgttgggattataaacagattgctaatagacgcgtgctgatagaaaatttaatccctgataccgtctacgagttcgcagtgcggatttcgcagggagaaagagatgggaagtggtccacttctgtgtttcagaggactcctgagtctgccccaaccacggcccccgagaatctcaacgtttggccagttaatgggaaacctactgttgtcgctgcatcttgggatgcgctgccagagaccgaaggtaaggtgaaggagtacatcctaagttatgctcctgcactcaagccgttcggcgcaaaatcgttgacttaccctggggatacaacgtcggccctagttgacggtctgcaaccaggcgaaagatatcttttcaagatacgggcaaccaataggcgaggcctgggccctcattctaaagcatttatcgtcgccatgcccacaacatccaaggcagacgtggagcaaaatactgaagataatggaaagcctgagaagccagaaccaagcagcccttctcccagagcccctgctagctctcagcacccttcggtgccagcctctcctcaaggccggaatgccaaggacctgcttctggacttaaaaaataagatacttgctaatggaggagcacctcgaaagccccagcttagagcaaagaaggctgaggaacttgacctgcaatctacggaaatcacaggtgaagaagaactgggaagcagagaggactcgcccatgtcaccgagtgacactcaggaccagaagcggaccctcagacccccatctcggcacggccatagcgtcgtcgcaccaggacgaactgcagtgagagcacggatgccagctttaccccgtcgggagggcgtcgacaagccaggattctccctcgccacccagccgcgcccaggggcgcctccatcagcgagcgcttctcctgcacaccacgcctccacccaaggaacctcccacagaccatctctgcctgcatctctgaacgacaatgacctggtggatagtgatgaggacgaacgggccgtcgggagtttgcatcctaagggcgccttcgcgcagccgagacctgctctcagtccatctcggcagagcccttcttcggttctccgggacagaagttctgttcatccaggtgctaaacctgccagccctgcgagacgtacgccccacagtggggcagctgaggaggactccagcgcctcagcccctcccagtaggctcagtccccctcatggaggttcgtccagactgctgccaacacagccacacttatccagtcccttatctaagggaggtaaagacggggaggatgcacccgcaactaatagcaatgcccctagtagatcgacaatgagctccagcgtcagctctcatctttcgagcagaacgcaggtctccgagggggccgaggccagcgacggggaaagtcatggtgacggagatagagaagacggcggacgccaggctgaggccaccgcgcaaactctcagggccaggccagccagtggccatttccacttgctgcgacacaagccattcgcagccaacggacgctcaccctctcgcttctccattggtcgcggacctcgactgcagccttcgagctccccacagtctacagttcccagccgcgcccacccccgtgtaccatcgcactccgattctcaccccaagctgtcctccgggattcacggagatgaagaggatgagaagcccctcccggcaaccgtcgtcaacgatcatgtgccttcctctagtcgccagcccataagtagagggtgggaggacctgcgaaggtcgcctcagagaggcgccagtctgcataggaaggagccgatccccgagaaccctaagagcacaggcgccgacactcacccacagggaaagtactcatcattggcgagcaaagctcaggacgtgcagcagagtacagacgctgacacagaaggacacagtcccaaagctcagccgggctcaactgaccgccacgcctcaccagcccgcccacctgcagcgagaagtcagcagcacccatctgtgccccgacgaatgacacctggaagagcaccccagcagcaacctccaccccctgtcgctacatctcagcatcatcccgggccccaaagccgtgacgccggtagaagcccctcccagccccgtctctctctgacacaagccggccgcccacgacctacttctcagggtcggtcacactcctccagcgacccatacaccgcaagctcacgaggcatgttgccaaccgcactccagaatcaagacgaggacgctcagggaagttacgatgacgactcaaccgaagtggaggcacaagacgtacgagcgcccgcgcatgccgcaagagccaaggaagctgcagcttcactgccaaagcatcagcaagtggaatcgcccaccggcgctggcgccggaggtgaccacaggtcacaaagagggcacgctgcgagccctgccaggcccagcaggcccggggggcctcaatctcgcgcaagagttccgtccagagctgcacctgggaagtcagagccgccgagcaaaaggcctctgtccagcaagtcccaacagtctgttagtgccgaggacgatgaggaggaggatgccggtttttttaaaggaggcaaggaggatctgttatcttcatcagttccgaagtggcccagctctagcacccctcgaggagggaaggatgcggatgggtctctagccaaggaagagcgcgaacctgccatagctcttgcgcctagagggggcagcctggcccctgttaagcgccccctccctcctcctcctggctctagccctagggccagccacgtcccctccagactacctccgaggtcagctgccaccgttagtcccgtggctggcacacacccatggccccagtacacaacgagggcccccccaggccacttttcaactactcccatgttgtccctccggcagcggatgatgcacgctcgcttccggaatcccctgtctcggcaacccgccaggccctcttatagacagggatataacgggcggcccaatgtcgaaggaaaggtgttgccgggctctaatggaaagccaaacggccaacggattataaatggaccacagggtaccaagtgggtggtggaccttgacaggggcctggttctgaacgctgaaggcaggtacttgcaggattctcatggcaaccctctgcgtatcaagctcggaggggacgggaggactattgtcgaccttgagggaactccagttgtgtctcctgatggactgcctctcttcggacagggccggcacggaactccactggcaaatgcccaggataaacccatactgtccttgggagggaagcctctcgtcgggcttgaggttataaagaaaaccacacatccccctactaccaccatgcagcctaccactacaactacccccctccctacgacgaccacaccaagacctaccactgccacaacgaggcgcacaacaaccacaagaaggactaccactaggaggccaactaccacagtgcgcaccacaacgcggactacaacgacaaccactccaacccccactaccccaattcctacttgtcctcctggcacgctggagagacacgatgatgacggtaatctaatcatgagttctaatggcattccggaatgctacgctgaagaggatgaattttccggcttggaaacggatacagcagtgcccactgaagaggcctatgttatttatgatgaggactacgaattcgaaacatcccgacctccaacaacaacggagccatctaccacggcaaccacgcctcgggtcatcccagaggaaggcgcaatcagtagcttcccggaggaagagttcgatctggctgggcgaaagagatttgtcgccccctatgtcacttacctcaataaggacccttcggcaccatgcagcctaacagacgccctggatcactttcaggtggacagcctcgatgagatcattcctaacgatctaaagaagagcgatctcccacctcagcatgccccccgaaatatcactgttgtggctgtcgagggctgtcattcctttgttatcgtggactgggacaaggctacacctggagacgtggtaaccggttaccttgtttactctgctagctatgaggactttataagaaataagtggagcacgcaggctagctcagttacccatctgcctatagagaatttgaagccaaacacacgctattattttaaggtccaggcacagaatcctcatggctacgggccaatttctccctcagtcagtttcgtgacagagtctgataatcccctgctggtggtccgaccccccggcggcgaaccaatttggataccctttgcatttaagcacgatccaagctacaccgactgtcatgggcgacagtacgtcaagcgcacttggtacaggaagttcgtcggagtggtactgtgcaacagcctgcgctacaaaatctacctttcggataacctgaaggacaccttctactccattggggacagttggggcaggggcgaagatcattgccagttcgttgacagtcatctggacggtcgtactgggccccagtcttatgtggaggctctgcccactatccagggctattaccgtcaatatagacaggagcccgtgcgttttggcaacatcggatttggaacaccgtattattacgtcggctggtatgagtgcggagtgtctatccctggcaaatggtag

SEQ ID NO: 224709 - DNA, 5685 bp, Artificial Sequence
  derived and/or modified sequence
atggcccctgaagcaggcgcaaccctgagagctcctcggaggcttagttgggcggctctgctgctgctggcagctctgctgcctgtggccagcagcgcagctgcttcggtggaccatcctctgaagcccagacatgtaaagctgctcagcaccaagatgggacttaaagtgacatgggaccctcccaaagatgccacctcaagaccggtggaacactataatattgcctacggtaagtctctgaagtccctgaagtacataaaagtgaatgccgagacatacagtttcttgattgaggacgtggaacctggcgtagtgtacttcgttctgctgacagcggaaaaccactccggcgtctcacgcccagtctaccgcgcagagtccccccctggcggagagtggatcgaaatcgacggctttcctatcaaggggcctggacccttcaacgaaaccgtgacagaaaaggaagtccccaataaaccactgcgagtgcgcgtgcgctccagtgacgaccggttgtcagtggcttggaaagcgccacgccttagcggagccaagagtcccagaaggagcagaggcttcttgctcggttatggtgagtccggcaggaagatgaattacgtgcctctcacgcgcgatgagagaacccatgaaattaaaaagctggcttccgaatccgtctacgttgttagcctacagagtatgaacagccagggcaggagtcagccagtttaccgcgcagctctgaccaagcgaaagatatccgaggaagacgagctggatgtccccgatgatatttctgtgagggtgatgtctagccagtccgtgttggtgagctgggtggaccccgtgctggagaaacagaaaaaagttgtggccagccgtcagtatacagtgcggtatcgtgaaaaaggggaactcgcccgatgggactacaagcagattgcgaacagaagagtacttattgagaatcttatcccagatactgtctacgagttcgcagttaggatctctcaaggggagagagatgggaagtggtctacatctgtgttccagcgtaccccagagagcgcaccaaccactgccccagagaacctgaatgtgtggccggtgaacggaaaaccgaccgtcgtcgctgccagttgggacgcgttacccgaaacagaaggaaaagtgaaggaatacattctgagttatgcccctgccttaaaaccttttggagcgaagagcctgacatatccgggtgatacaacctctgctttagtcgatgggctgcagccaggcgagaggtatctattcaagatccgcgctactaaccgccgaggcctgggtccgcatagtaaggcctttatcgtggccatgccaaccacatccaaggcggatgtagagcagaatacagaggataacggcaaaccagagaagcccgaaccgtcatcaccttcaccacgcgcacctgcttcctcacaacacccatccgtcccggcatctccacagggcagaaatgccaaggacctcctgcttgatcttaaaaataaaatactggctaatggaggagcccctcgaaaaccacagctcagggctaaaaaggcagaggagttggatctgcagagcaccgagatcaccggagaggaagaactgggctctcgtgaggactcccctatgtcaccctccgacacccaggaccaaaagaggacgctccggccaccctcacgccacggccattcagtcgtcgcacccggaagaacagcagtaagagcccgaatgcctgcattgccacggagggagggtgtggataagcccggttttagtctagctactcagcctagaccaggcgcacccccaagtgccagcgcatccccagcccaccatgccagtactcaaggcacaagccatcgccctagcctacctgcttcccttaacgataatgacttggtagatagcgacgaagatgaacgcgcagtgggctcattacatccaaaaggggcattcgcccaacctcgtcctgcccttagtccatcccgccaatctcccagcagcgtgctgcgggataggtcatctgtgcacccaggcgctaaacctgcatcccctgcccgacggacaccgcacagtggcgcagccgaagaggactcatccgcctcagcacccccttccaggctgtctccgccacatggcggtagtagcagattgctcccgacacaaccccacttatctagcccactctctaaaggcggtaaagacggcgaagacgcgccagcaaccaattcaaacgccccaagccgctctaccatgagttcctcagtttcatcacatctgtcctccagaacacaggtcagtgagggggctgaggcgtccgatggagagtcccacggcgatggtgacagggaagacgggggacggcaggccgaggccacagctcagaccctgcgcgctaggcccgcaagcggacatttccacctgttgaggcataagccatttgctgctaacgggaggtcacccagcaggtttagtatcggcaggggacctcgcctgcagccttcgtcatcccctcagagcaccgtgccctcccgggcacacccgagagtgccctctcacagcgactcccaccccaagttgtccagtggcatccacggggacgaggaagacgagaagcccttgccagcaaccgttgtgaatgaccatgtgccatcttcttcccgacagcctatttcccgcggatgggaagacttgagacggtccccgcagcggggtgcctccctgcatagaaaagagcctatccccgagaatcctaagtcaactggggctgatactcatccccagggcaaatacagctccctcgcaagtaaagcccaagacgtgcagcagagtaccgatgccgacacggaaggtcattctccgaaagcccagcccggttctactgataggcacgccagccctgccagaccaccagctgctagaagtcaacagcacccttccgttcctcgtcgcatgacgcccggaagggctccccaacagcaacctcccccacctgtggcgacaagccagcaccatcctggaccccagtctcgcgatgcagggagatccccaagccagccgagactgagcctcacacaagccggacgtcccaggccaacctcacaaggcagatcccatagtagctctgatccctatactgcgagtagcagaggtatgttgcccacggcgcttcagaaccaagatgaggatgctcagggtagttatgatgacgattctacagaggtcgaagcccaggacgttagggctcccgcacatgccgcacgtgcaaaagaagcggcagcgagcctgcccaaacaccagcaggtggaatctcctacaggagcaggtgccggaggcgaccataggagtcagcgcggacacgctgcatcccccgcacgtccatcaaggccagggggtccacaatccagggcgagggtcccatcaagagccgcacccggaaagagtgagccacctagcaagcgccctctgtcatcaaaaagccagcagtccgtgagcgcagaggacgacgaggaggaggacgccggtttcttcaaagggggtaaagaggacctgctctcttcatccgtcccaaaatggccaagttcttctaccccacgtggaggaaaagatgccgatgggtcattagccaaggaggaacgggagcctgctattgctctggctccccgagggggtagcctggcacccgtgaagaggcctctaccacctccaccagggtcaagcccgagagccagccatgtcccgtccaggcttccccctaggtctgcagccactgttagcccagtcgctgggacacatccctggcctcagtatacaactagggctcctcctgggcatttctccaccaccccaatgttgagtctgcggcagcgaatgatgcatgccagatttagaaaccctctaagtcggcagcctgctagaccgagctaccggcaggggtacaacggacgaccaaacgtggaagggaaggtcctaccaggatcaaatggcaaacccaatggccagcggatcataaacgggcctcaaggaacaaagtgggtggttgatctagatcggggactcgtgttgaatgccgagggacggtacctgcaggacagtcatggaaaccctttgaggatcaagttagggggagacggaagaaccatcgtggatctggaaggcactccagtggtgagccctgatgggctcccgctctttggacagggaaggcacggtaccccactcgccaacgctcaggacaagcctatcctgagcctagggggaaaacctctggtagggcttgaggtaatcaaaaaaaccacacacccaccgactactacgatgcaaccaacaacaacaacaacacccctaccaactacaacaactccaagacccaccacagcgactactagaagaactacaactacaagacgcaccaccacccgcagacctacgacaactgtgaggacaactacccgcactacgacaacaactactcctacaccgaccactccgattccaacatgcccccctggaaccttagagcgccacgacgatgacggcaacctgatcatgtctagcaacggcatccctgagtgttacgccgaggaggatgagttctctgggttggagaccgatacagccgtgccaacagaagaggcgtatgttatttatgatgaggactacgagttcgagactagtcgtccaccaacaaccaccgagccctccaccacggccacaactcccagagttatccctgaggaaggagccatcagttcctttcctgaggaggagttcgaccttgccggacggaagaggtttgtggccccttacgtgacttatctgaacaaggatccgtctgctccatgctccttaacagacgccctggaccacttccaggtggatagtttggacgaaatcattcctaacgatcttaagaaaagcgacctgccccctcagcacgcaccacgcaacatcaccgtcgttgctgtggaagggtgccatagcttcgtgattgtggactgggacaaggcaacgcctggtgatgttgtaactggctaccttgtttacagcgcatcatacgaagattttatccgtaacaagtggagtacccaggcatccagcgtcacccacttgcccatagagaacctgaagcccaatacacgctactattttaaggttcaggcgcaaaatccacacggttacggccctatcagccccagcgtgtctttcgtgaccgaatcagacaatccactgctggtcgttagaccccctggtggcgagccaatttggataccgttcgcttttaaacacgatccctcctatacggactgccacggcaggcaatatgttaagcggacatggtatcgaaaatttgtgggggtggtgctttgtaacagcttacgatacaaaatttacttaagcgacaacctcaaagataccttctactctatcggggacagctggggcagaggggaggatcattgccaattcgtcgacagccatcttgacggcaggaccgggcctcagagttacgtggaggctctccccactattcagggctactaccgtcagtacaggcaggaacctgtcagatttggaaatatcggatttggtaccccttattactacgtggggtggtacgaatgcggcgtcagtattcccggtaagtggtat

SEQ ID NO: 224710 - DNA, 5685 bp, Artificial Sequence
  derived and/or modified sequence
atggcccccgaggccggcgccaccctgagagcccccagaagactgagctgggccgccctgctgctgctggccgccctgctgcccgtggccagcagcgccgccgccagcgtggaccaccccctgaagcccagacacgtgaagctgctgagcaccaagatgggcctgaaggtgacctgggacccccccaaggacgccaccagcagacccgtggagcactacaacatcgcctacggcaagagcctgaagagcctgaagtacatcaaggtgaacgccgagacctacagcttcctgatcgaggacgtggagcccggcgtggtgtacttcgtgctgctgaccgccgagaaccacagcggcgtgagcagacccgtgtacagagccgagagcccccccggcggcgagtggatcgagatcgacggcttccccatcaagggccccggccccttcaacgagaccgtgaccgagaaggaggtgcccaacaagcccctgagagtgagagtgagaagcagcgacgacagactgagcgtggcctggaaggcccccagactgagcggcgccaagagccccagaagaagcagaggcttcctgctgggctacggcgagagcggcagaaagatgaactacgtgcccctgaccagagacgagagaacccacgagatcaagaagctggccagcgagagcgtgtacgtggtgagcctgcagagcatgaacagccagggcagaagccagcccgtgtacagagccgccctgaccaagagaaagatcagcgaggaggacgagctggacgtgcccgacgacatcagcgtgagagtgatgagcagccagagcgtgctggtgagctgggtggaccccgtgctggagaagcagaagaaggtggtggccagcagacagtacaccgtgagatacagagagaagggcgagctggccagatgggactacaagcagatcgccaacagaagagtgctgatcgagaacctgatccccgacaccgtgtacgagttcgccgtgagaatcagccagggcgagagagacggcaagtggagcaccagcgtgttccagagaacccccgagagcgcccccaccaccgcccccgagaacctgaacgtgtggcccgtgaacggcaagcccaccgtggtggccgccagctgggacgccctgcccgagaccgagggcaaggtgaaggagtacatcctgagctacgcccccgccctgaagcccttcggcgccaagagcctgacctaccccggcgacaccaccagcgccctggtggacggcctgcagcccggcgagagatacctgttcaagatcagagccaccaacagaagaggcctgggcccccacagcaaggccttcatcgtggccatgcccaccaccagcaaggccgacgtggagcagaacaccgaggacaacggcaagcccgagaagcccgagcccagcagccccagccccagagcccccgccagcagccagcaccccagcgtgcccgccagcccccagggcagaaacgccaaggacctgctgctggacctgaagaacaagatcctggccaacggcggcgcccccagaaagccccagctgagagccaagaaggccgaggagctggacctgcagagcaccgagatcaccggcgaggaggagctgggcagcagagaggacagccccatgagccccagcgacacccaggaccagaagagaaccctgagaccccccagcagacacggccacagcgtggtggcccccggcagaaccgccgtgagagccagaatgcccgccctgcccagaagagagggcgtggacaagcccggcttcagcctggccacccagcccagacccggcgccccccccagcgccagcgccagccccgcccaccacgccagcacccagggcaccagccacagacccagcctgcccgccagcctgaacgacaacgacctggtggacagcgacgaggacgagagagccgtgggcagcctgcaccccaagggcgccttcgcccagcccagacccgccctgagccccagcagacagagccccagcagcgtgctgagagacagaagcagcgtgcaccccggcgccaagcccgccagccccgccagaagaaccccccacagcggcgccgccgaggaggacagcagcgccagcgccccccccagcagactgagccccccccacggcggcagcagcagactgctgcccacccagccccacctgagcagccccctgagcaagggcggcaaggacggcgaggacgcccccgccaccaacagcaacgcccccagcagaagcaccatgagcagcagcgtgagcagccacctgagcagcagaacccaggtgagcgagggcgccgaggccagcgacggcgagagccacggcgacggcgacagagaggacggcggcagacaggccgaggccaccgcccagaccctgagagccagacccgccagcggccacttccacctgctgagacacaagcccttcgccgccaacggcagaagccccagcagattcagcatcggcagaggccccagactgcagcccagcagcagcccccagagcaccgtgcccagcagagcccaccccagagtgcccagccacagcgacagccaccccaagctgagcagcggcatccacggcgacgaggaggacgagaagcccctgcccgccaccgtggtgaacgaccacgtgcccagcagcagcagacagcccatcagcagaggctgggaggacctgagaagaagcccccagagaggcgccagcctgcacagaaaggagcccatccccgagaaccccaagagcaccggcgccgacacccacccccagggcaagtacagcagcctggccagcaaggcccaggacgtgcagcagagcaccgacgccgacaccgagggccacagccccaaggcccagcccggcagcaccgacagacacgccagccccgccagaccccccgccgccagaagccagcagcaccccagcgtgcccagaagaatgacccccggcagagccccccagcagcagccccccccccccgtggccaccagccagcaccaccccggcccccagagcagagacgccggcagaagccccagccagcccagactgagcctgacccaggccggcagacccagacccaccagccagggcagaagccacagcagcagcgacccctacaccgccagcagcagaggcatgctgcccaccgccctgcagaaccaggacgaggacgcccagggcagctacgacgacgacagcaccgaggtggaggcccaggacgtgagagcccccgcccacgccgccagagccaaggaggccgccgccagcctgcccaagcaccagcaggtggagagccccaccggcgccggcgccggcggcgaccacagaagccagagaggccacgccgccagccccgccagacccagcagacccggcggcccccagagcagagccagagtgcccagcagagccgcccccggcaagagcgagccccccagcaagagacccctgagcagcaagagccagcagagcgtgagcgccgaggacgacgaggaggaggacgccggcttcttcaagggcggcaaggaggacctgctgagcagcagcgtgcccaagtggcccagcagcagcacccccagaggcggcaaggacgccgacggcagcctggccaaggaggagagagagcccgccatcgccctggcccccagaggcggcagcctggcccccgtgaagagacccctgccccccccccccggcagcagccccagagccagccacgtgcccagcagactgccccccagaagcgccgccaccgtgagccccgtggccggcacccacccctggccccagtacaccaccagagccccccccggccacttcagcaccacccccatgctgagcctgagacagagaatgatgcacgccagattcagaaaccccctgagcagacagcccgccagacccagctacagacagggctacaacggcagacccaacgtggagggcaaggtgctgcccggcagcaacggcaagcccaacggccagagaatcatcaacggcccccagggcaccaagtgggtggtggacctggacagaggcctggtgctgaacgccgagggcagatacctgcaggacagccacggcaaccccctgagaatcaagctgggcggcgacggcagaaccatcgtggacctggagggcacccccgtggtgagccccgacggcctgcccctgttcggccagggcagacacggcacccccctggccaacgcccaggacaagcccatcctgagcctgggcggcaagcccctggtgggcctggaggtgatcaagaagaccacccacccccccaccaccaccatgcagcccaccaccaccaccacccccctgcccaccaccaccacccccagacccaccaccgccaccaccagaagaaccaccaccaccagaagaaccaccaccagaagacccaccaccaccgtgagaaccaccaccagaaccaccaccaccaccacccccacccccaccacccccatccccacctgcccccccggcaccctggagagacacgacgacgacggcaacctgatcatgagcagcaacggcatccccgagtgctacgccgaggaggacgagttcagcggcctggagaccgacaccgccgtgcccaccgaggaggcctacgtgatctacgacgaggactacgagttcgagaccagcagaccccccaccaccaccgagcccagcaccaccgccaccacccccagagtgatccccgaggagggcgccatcagcagcttccccgaggaggagttcgacctggccggcagaaagagattcgtggccccctacgtgacctacctgaacaaggaccccagcgccccctgcagcctgaccgacgccctggaccacttccaggtggacagcctggacgagatcatccccaacgacctgaagaagagcgacctgcccccccagcacgcccccagaaacatcaccgtggtggccgtggagggctgccacagcttcgtgatcgtggactgggacaaggccacccccggcgacgtggtgaccggctacctggtgtacagcgccagctacgaggacttcatcagaaacaagtggagcacccaggccagcagcgtgacccacctgcccatcgagaacctgaagcccaacaccagatactacttcaaggtgcaggcccagaacccccacggctacggccccatcagccccagcgtgagcttcgtgaccgagagcgacaaccccctgctggtggtgagaccccccggcggcgagcccatctggatccccttcgccttcaagcacgaccccagctacaccgactgccacggcagacagtacgtgaagagaacctggtacagaaagttcgtgggcgtggtgctgtgcaacagcctgagatacaagatctacctgagcgacaacctgaaggacaccttctacagcatcggcgacagctggggcagaggcgaggaccactgccagttcgtggacagccacctggacggcagaaccggcccccagagctacgtggaggccctgcccaccatccagggctactacagacagtacagacaggagcccgtgagattcggcaacatcggcttcggcaccccctactactacgtgggctggtacgagtgcggcgtgagcatccccggcaagtggtag

SEQ ID NO: 224711 - protein, 536 aa, Artificial Sequence
  derived and/or modified sequence
MLHLLALFLHCLPLASGDYDICKSWVTTDEGPTWEFYACQPKVMRLKDYVKVKVEPSGITCGDPPERFCSHENPYLCSNECDASNPDLAHPPRLMFDKEEEGLATYWQSITWSRYPSPLEANITLSWNKTVELTDDVVMTFEYGRPTVMVLEKSLDNGRTWQPYQFYAEDCMEAFGMSARRARDMSSSSAHRVLCTEEYSRWAGSKKEKHVRFEVRDRFAIFAGPDLRNMDNLYTRLESAKGLKEFFTLTDLRMRLLRPALGGTYVQRENLYKYFYAISNIEVIGRCKCNLHANLCSMREGSLQCECEHNTTGPDCGKCKKNFRTRSWRAGSYLPLPHGSPNACTAPSGTFSKDAFLHCECYGHSNRCSYIDFLNVVTCVSCKHNTRGQHCQHCRLGYYRNGSAELDDENVCIECNCNQIGSVHDRCNETGFCECREGAAGPKCDDCLPTHYWRQGCYPNVCDDDQLLCQNGGTCLQNQRCACPRGYTGVRCEQPRCDPADDDGGLDCDRAPGAAPRPATLLGCLLLLGLAARLGR

SEQ ID NO: 224712 - protein, 522 aa, Artificial Sequence
  derived and/or modified sequence
MLHLLALFLHCLPLASGDYDICKSWVTTDEGPTWEFYACQPKVMRLKDYVKVKVEPSGITCGDPPERFCSHENPYLCSNECDASNPDLAHPPRLMFDKEEEGLATYWQSITWSRYPSPLEANITLSWNKTVELTDDVVMTFEYGRPTVMVLEKSLDNGRTWQPYQFYAEDCMEAFGMSARRARDMSSSSAHRVLCTEEYSRWAGSKKEKHVRFEVRDRFAIFAGPDLRNMDNLYTRLESAKGLKEFFTLTDLRMRLLRPALGGTYVQRENLYKYFYAISNIEVIGRCKCNLHANLCSMREGSLQCECEHNTTGPDCGKCKKNFRTRSWRAGSYLPLPHGSPNAYCECYGHSNRCSYIDFLNVVTCVSCKHNTRGQHCQHCRLGYYRNGSAELDDENVCIECNCNQIGSVHDRCNETGFCECREGAAGPKCDDCLPTHYWRQGCYPNVCDDDQLLCQNGGTCLQNQRCACPRGYTGVRCEQPRCDPADDDGGLDCDRAPGAAPRPATLLGCLLLLGLAARLGR

SEQ ID NO: 224713 - protein, 530 aa, Artificial Sequence
  derived and/or modified sequence
MLHLLALFLHCLPLASGDYDICKSWVTTDEGPTWEFYACQPKVMRLKDYVKVKVEPSGITCGDPPERFCSHENPYLCSNECDASNPDLAHPPRLMFDKEEEGLATYWQSITWSRYPSPLEANITLSWNKTVELTDDVVMTFEYGRPTVMVLEKSLDNGRTWQPYQFYAEDCMEAFGMSARRARDMSSSSAHRVLCTEEYSRWAGSKKEKHVRFEVRDRFAIFAGPDLRNMDNLYTRLESAKGLKEFFTLTDLRMRLLRPALGGTYVQRENLYKYFYAISNIEVIGRCKCNLHANLCSMREGSLQCECEHNTTGPDCGKCKKNFRTRSWRAGSYLPLPHGSPNACATAGSFGNCECYGHSNRCSYIDFLNVVTCVSCKHNTRGQHCQHCRLGYYRNGSAELDDENVCIECNCNQIGSVHDRCNETGFCECREGAAGPKCDDCLPTHYWRQGCYPNVCDDDQLLCQNGGTCLQNQRCACPRGYTGVRCEQPRCDPADDDGGLDCDRAPGAAPRPATLLGCLLLLGLAARLGR

SEQ ID NO: 224714 - DNA, 1611 bp, Artificial Sequence
  derived and/or modified sequence
atgctgcacctgctggccctgttcctgcactgcctgcccctggccagcggcgactacgacatctgcaagagctgggtgaccaccgacgagggccccacctgggagttctacgcctgccagcccaaggtgatgagactgaaggactacgtgaaggtgaaggtggagcccagcggcatcacctgcggcgacccccccgagagattctgcagccacgagaacccctacctgtgcagcaacgagtgcgacgccagcaaccccgacctggcccacccccccagactgatgttcgacaaggaggaggagggcctggccacctactggcagagcatcacctggagcagataccccagccccctggaggccaacatcaccctgagctggaacaagaccgtggagctgaccgacgacgtggtgatgaccttcgagtacggcagacccaccgtgatggtgctggagaagagcctggacaacggcagaacctggcagccctaccagttctacgccgaggactgcatggaggccttcggcatgagcgccagaagagccagagacatgagcagcagcagcgcccacagagtgctgtgcaccgaggagtacagcagatgggccggcagcaagaaggagaagcacgtgagattcgaggtgagagacagattcgccatcttcgccggccccgacctgagaaacatggacaacctgtacaccagactggagagcgccaagggcctgaaggagttcttcaccctgaccgacctgagaatgagactgctgagacccgccctgggcggcacctacgtgcagagagagaacctgtacaagtacttctacgccatcagcaacatcgaggtgatcggcagatgcaagtgcaacctgcacgccaacctgtgcagcatgagagagggcagcctgcagtgcgagtgcgagcacaacaccaccggccccgactgcggcaagtgcaagaagaacttcagaaccagaagctggagagccggcagctacctgcccctgccccacggcagccccaacgcctgcaccgcccccagcggcaccttcagcaaggacgccttcctgcactgcgagtgctacggccacagcaacagatgcagctacatcgacttcctgaacgtggtgacctgcgtgagctgcaagcacaacaccagaggccagcactgccagcactgcagactgggctactacagaaacggcagcgccgagctggacgacgagaacgtgtgcatcgagtgcaactgcaaccagatcggcagcgtgcacgacagatgcaacgagaccggcttctgcgagtgcagagagggcgccgccggccccaagtgcgacgactgcctgcccacccactactggagacagggctgctaccccaacgtgtgcgacgacgaccagctgctgtgccagaacggcggcacctgcctgcagaaccagagatgcgcctgccccagaggctacaccggcgtgagatgcgagcagcccagatgcgaccccgccgacgacgacggcggcctggactgcgacagagcccccggcgccgcccccagacccgccaccctgctgggctgcctgctgctgctgggcctggccgccagactgggcagatag

SEQ ID NO: 224715 - DNA, 1569 bp, Artificial Sequence
  derived and/or modified sequence
atgctgcacctgctggccctgttcctgcactgcctgcccctggccagcggcgactacgacatctgcaagagctgggtgaccaccgacgagggccccacctgggagttctacgcctgccagcccaaggtgatgagactgaaggactacgtgaaggtgaaggtggagcccagcggcatcacctgcggcgacccccccgagagattctgcagccacgagaacccctacctgtgcagcaacgagtgcgacgccagcaaccccgacctggcccacccccccagactgatgttcgacaaggaggaggagggcctggccacctactggcagagcatcacctggagcagataccccagccccctggaggccaacatcaccctgagctggaacaagaccgtggagctgaccgacgacgtggtgatgaccttcgagtacggcagacccaccgtgatggtgctggagaagagcctggacaacggcagaacctggcagccctaccagttctacgccgaggactgcatggaggccttcggcatgagcgccagaagagccagagacatgagcagcagcagcgcccacagagtgctgtgcaccgaggagtacagcagatgggccggcagcaagaaggagaagcacgtgagattcgaggtgagagacagattcgccatcttcgccggccccgacctgagaaacatggacaacctgtacaccagactggagagcgccaagggcctgaaggagttcttcaccctgaccgacctgagaatgagactgctgagacccgccctgggcggcacctacgtgcagagagagaacctgtacaagtacttctacgccatcagcaacatcgaggtgatcggcagatgcaagtgcaacctgcacgccaacctgtgcagcatgagagagggcagcctgcagtgcgagtgcgagcacaacaccaccggccccgactgcggcaagtgcaagaagaacttcagaaccagaagctggagagccggcagctacctgcccctgccccacggcagccccaacgcctactgcgagtgctacggccacagcaacagatgcagctacatcgacttcctgaacgtggtgacctgcgtgagctgcaagcacaacaccagaggccagcactgccagcactgcagactgggctactacagaaacggcagcgccgagctggacgacgagaacgtgtgcatcgagtgcaactgcaaccagatcggcagcgtgcacgacagatgcaacgagaccggcttctgcgagtgcagagagggcgccgccggccccaagtgcgacgactgcctgcccacccactactggagacagggctgctaccccaacgtgtgcgacgacgaccagctgctgtgccagaacggcggcacctgcctgcagaaccagagatgcgcctgccccagaggctacaccggcgtgagatgcgagcagcccagatgcgaccccgccgacgacgacggcggcctggactgcgacagagcccccggcgccgcccccagacccgccaccctgctgggctgcctgctgctgctgggcctggccgccagactgggcagatag

SEQ ID NO: 224716 - DNA, 1593 bp, Artificial Sequence
  derived and/or modified sequence
atgctgcacctgctggccctgttcctgcactgcctgcccctggccagcggcgactacgacatctgcaagagctgggtgaccaccgacgagggccccacctgggagttctacgcctgccagcccaaggtgatgagactgaaggactacgtgaaggtgaaggtggagcccagcggcatcacctgcggcgacccccccgagagattctgcagccacgagaacccctacctgtgcagcaacgagtgcgacgccagcaaccccgacctggcccacccccccagactgatgttcgacaaggaggaggagggcctggccacctactggcagagcatcacctggagcagataccccagccccctggaggccaacatcaccctgagctggaacaagaccgtggagctgaccgacgacgtggtgatgaccttcgagtacggcagacccaccgtgatggtgctggagaagagcctggacaacggcagaacctggcagccctaccagttctacgccgaggactgcatggaggccttcggcatgagcgccagaagagccagagacatgagcagcagcagcgcccacagagtgctgtgcaccgaggagtacagcagatgggccggcagcaagaaggagaagcacgtgagattcgaggtgagagacagattcgccatcttcgccggccccgacctgagaaacatggacaacctgtacaccagactggagagcgccaagggcctgaaggagttcttcaccctgaccgacctgagaatgagactgctgagacccgccctgggcggcacctacgtgcagagagagaacctgtacaagtacttctacgccatcagcaacatcgaggtgatcggcagatgcaagtgcaacctgcacgccaacctgtgcagcatgagagagggcagcctgcagtgcgagtgcgagcacaacaccaccggccccgactgcggcaagtgcaagaagaacttcagaaccagaagctggagagccggcagctacctgcccctgccccacggcagccccaacgcctgcgccaccgccggcagcttcggcaactgcgagtgctacggccacagcaacagatgcagctacatcgacttcctgaacgtggtgacctgcgtgagctgcaagcacaacaccagaggccagcactgccagcactgcagactgggctactacagaaacggcagcgccgagctggacgacgagaacgtgtgcatcgagtgcaactgcaaccagatcggcagcgtgcacgacagatgcaacgagaccggcttctgcgagtgcagagagggcgccgccggccccaagtgcgacgactgcctgcccacccactactggagacagggctgctaccccaacgtgtgcgacgacgaccagctgctgtgccagaacggcggcacctgcctgcagaaccagagatgcgcctgccccagaggctacaccggcgtgagatgcgagcagcccagatgcgaccccgccgacgacgacggcggcctggactgcgacagagcccccggcgccgcccccagacccgccaccctgctgggctgcctgctgctgctgggcctggccgccagactgggcagatag

SEQ ID NO: 224717 - DNA, 1611 bp, Artificial Sequence
  derived and/or modified sequence
atgcttcatctccttgccttgttcctgcattgtctccctctggcgtccggggactacgacatttgtaagagctgggtcactaccgatgaaggtcctacttgggagttctacgcttgtcagcccaaggtgatgagactcaaggattacgtcaaggtaaaagtagagccttcaggtatcacttgcggtgaccctccagagcgcttttgttctcacgaaaatccttatctgtgctcaaacgaatgtgacgcctctaaccccgatttggcccatcctccccgcctgatgtttgataaggaggaggagggccttgcaacatactggcagagcataacctggtcacggtatccatccccgctggaggccaatatcacattgtcctggaataagactgtagagttaacagatgacgtggttatgacattcgagtacgggaggcctactgtcatggtactggaaaagtctctggacaatgggaggacatggcaaccctaccagttttacgccgaggactgcatggaggcctttggaatgagcgcccggcgcgcccgcgatatgagtagctcttccgcccatagagtgctgtgcaccgaagagtatagccgttgggcaggatccaagaaagagaaacatgtccgattcgaggttagagatcggttcgcaatcttcgccggtcctgatctgagaaacatggacaatttgtatacacgcctcgaaagtgcaaaagggctgaaagagttcttcaccctgacagacctgaggatgaggctgctgcgccccgctttaggtggaacgtacgtgcaaagggaaaacctgtacaaatatttctatgctatcagcaacatcgaggttatcggacggtgcaagtgtaatctccatgccaacctctgtagcatgagggagggctccttacaatgcgaatgcgagcacaacacaaccggacccgattgcgggaagtgcaagaagaatttcaggacgcgctcctggcgagccgggtcctatctcccactcccacacggtagccctaatgcatgtaccgcccccagcggaactttttccaaagatgctttcttgcactgcgagtgctatgggcattcaaatagatgttcctacatagacttccttaacgtagtgacttgtgtctcttgcaaacacaacacacgagggcagcattgccagcactgtcgcctgggatattaccgcaatggatccgccgagttggacgacgagaacgtatgcattgagtgtaactgtaaccagatcggatctgtgcatgacagatgcaatgagactggattttgcgaatgcagagaaggcgcggccggcccaaaatgtgacgactgtcttccaacacactattggagacaggggtgctatccgaacgtctgcgatgacgatcagctgctatgtcaaaacggtggtacatgtctgcagaaccaacggtgtgcatgcccgaggggctacacaggggtgcggtgtgaacagccaagatgcgacccagcagacgatgatgggggattagactgtgacagagccccaggggccgctcctcgccctgccactcttctcgggtgcctgctgcttctgggcctggctgcacggttggggcgctag

SEQ ID NO: 224718 - DNA, 1569 bp, Artificial Sequence
  derived and/or modified sequence
atgctgcacctcctggcgctgtttctgcactgcctcccactggcctctggcgactatgatatttgtaagtcatgggttactacagatgaggggcccacatgggagttctatgcatgtcaacctaaggtgatgagactgaaggattacgtgaaggttaaggtggaaccttccggaatcacttgtggtgaccctcccgagaggttctgcagccacgagaatccttatctttgcagcaatgaatgtgatgcttctaacccagacctcgcacacccaccacggttgatgttcgataaggaggaggaaggtttagcaacttattggcaatccatcacttggtcccgatatcctagtcctctggaagctaacatcacattgagttggaacaagactgtagagctcacagacgacgtggttatgacctttgagtacggcaggcctacagttatggtcctagagaagtccctggacaatgggcggacttggcagccttaccagttttatgctgaagactgcatggaagcctttggcatgtctgctcggcgggcccgggacatgtcaagtagttccgcccaccgagtgttgtgtacagaggagtactcaaggtgggccggcagcaagaaggaaaagcacgtccggtttgaagttcgagaccgtttcgctattttcgcaggacccgatttgcgcaacatggacaatctgtacacgcgactggaatccgccaagggcctcaaagaattttttactcttacagatttgcgcatgcggctgctaaggcccgcactaggggggacttacgtgcagagggaaaatctgtacaagtatttttacgccatctctaacatagaggtcatcgggaggtgtaaatgcaatctacatgccaacttgtgttccatgagggaggggtctctccagtgtgaatgtgagcataatacaaccggacctgattgtggcaaatgcaagaaaaatttccgaactcgtagttggagggccggatcatacttgcctttaccgcatgggtccccgaacgcctattgcgaatgctatggacacagcaaccgctgctcttacatcgattttctgaacgttgtgacgtgtgtgtcctgcaagcataatactaggggtcagcactgtcagcattgtagacttggctactaccgtaatggcagcgctgagctcgacgacgagaatgtctgcatcgaatgtaattgcaaccaaattggctcggttcatgaccgctgtaatgagacaggtttctgtgaatgtagagagggcgctgccggtcctaagtgtgacgattgccttccgacccactattggcgacagggatgctacccaaatgtgtgtgatgatgaccagctcctgtgccaaaatggcgggacctgcctgcagaatcaaagatgtgcatgcccccgtggctacactggagtccggtgtgagcaacctcggtgcgacccagccgacgacgacgggggtctcgattgtgaccgcgcaccaggtgcagccccacgccctgccactctgctggggtgtctccttctcctgggtttggcagccagactggggcgttag

SEQ ID NO: 224719 - DNA, 1593 bp, Artificial Sequence
  derived and/or modified sequence
atgttacatctacttgccctgtttctgcactgcctgcctctggccagcggcgattacgacatttgtaagagttgggtcacaaccgacgaaggcccaacttgggagttttatgcctgccagccgaaggtaatgagactgaaggactacgtcaaggttaaagtggaaccctctggaatcacgtgtggggaccccccggagaggttctgctcacacgaaaatccgtacctgtgttcaaacgagtgcgatgccagtaatcctgacttggcacacccccccagactcatgtttgacaaagaagaggagggccttgccacgtattggcagtcaatcacctggtctagatatccgtctccgcttgaggcgaacattaccctgagctggaacaagaccgtagagctcacagacgacgtcgtgatgacttttgagtacggaaggcccactgttatggtgttggaaaagtctctggataacggtcggacctggcagccctatcagttttatgctgaggactgcatggaggcctttggaatgtccgctagacgggcgcgcgatatgtcatcttcctcagcccaccgggttctctgcactgaagagtattcccggtgggccggatcgaaaaaagaaaagcatgttcgatttgaggttagggatcgcttcgccattttcgctgggcctgacctaagaaacatggataacttgtatacgcgactggagagtgctaaaggtttaaaagagttcttcaccctaacagacctgcggatgcgcctgctgcgacccgccctggggggtacctacgtgcagagagaaaacctgtataagtacttctacgcaatcagcaatatagaggtcatcgggcgctgcaaatgcaatctccacgccaatctctgttccatgcgggagggatcactgcagtgcgagtgcgagcacaacaccactggccccgactgcggcaaatgtaaaaagaactttagaacgcgttcttggagggccggtagctatttgcccctgcctcacggctcacccaatgcctgtgctacggctgggtcatttggtaattgcgagtgctatggccattctaatcggtgctcttatattgatttcctaaacgtggtcacgtgcgttagttgcaagcataatacgcgtggtcagcactgtcagcattgcagattgggctactataggaacggttcagctgagcttgatgacgagaacgtgtgcattgagtgcaattgcaatcagatcggcagcgttcatgatcggtgcaacgaaaccggcttctgtgagtgccgtgaaggtgcagccggacccaaatgcgacgactgcctgcctacgcattactggagacagggctgttaccctaacgtgtgtgacgacgaccaacttctctgtcaaaatggaggaacgtgcttacagaatcaacggtgtgcctgccctaggggatataccggagtacgctgtgagcaaccgcggtgcgatccggctgacgatgatgggggcctggactgcgatagagctccaggcgctgctccacgtccagcaacgctcctcgggtgcctgttgcttcttgggcttgccgctaggctgggcagatag

SEQ ID NO: 224720 - DNA, 1611 bp, Artificial Sequence
  derived and/or modified sequence
atgctgcacctgctggccctcttcctgcactgcctgcccctggccagcggggactatgacatctgcaagtcctgggtgaccacagatgagggccccacctgggagttctacgcctgccagcccaaggtgatgaggctgaaggactatgtgaaggtgaaggtggagcccagcggcatcacctgtggggaccccccagagcgcttctgcagccatgagaacccctacctgtgcagcaatgaatgtgatgccagcaacccagacctggcccaccccccccggctgatgtttgacaaggaggaggagggcctggccacctactggcagagcatcacctggagccgctaccccagccccctggaggccaacatcaccctgtcctggaacaagacagtggagctgacagatgatgtggtgatgacctttgaatatggccggcccaccgtgatggtgctggagaagagcctggacaatggaagaacctggcagccctaccagttctatgcagaggactgcatggaggccttcggcatgtctgcccggcgggcccgggacatgagcagcagcagcgcccaccgggtgctgtgcacagaggagtacagccgctgggccggcagcaagaaggagaagcacgtgcgctttgaggtgcgggacagatttgccatctttgctggccctgacctgaggaacatggacaacctgtacacccggctggagagcgccaagggcctgaaggagttcttcaccctgacagacctgaggatgaggctgctgcggcctgccctgggcggcacctacgtgcagagagaaaatctctacaagtacttctacgccatcagcaacattgaagtcatcggccgctgcaagtgcaacctgcacgccaacctgtgcagcatgagggagggcagcctgcagtgtgaatgtgagcacaacaccaccggccctgactgtgggaagtgcaagaagaacttccgcaccaggtcctggagggctggcagctacctgcccctgccccacggcagccccaatgcctgcacagcccccagcggcaccttcagcaaggatgccttcctgcactgtgagtgctacggccacagcaaccgctgcagctacatcgacttcctgaatgtggtgacctgtgtgtcctgcaagcacaacacccggggccagcactgccagcactgccgcctgggctactacagaaatggatctgctgagctggatgatgaaaatgtgtgcatcgagtgcaactgcaaccagatcggctctgtgcatgaccgctgcaatgagaccggcttctgtgagtgccgggagggcgccgccggccccaagtgtgatgactgcctgcccacccactactggaggcagggctgctaccccaacgtgtgtgatgatgaccagctgctgtgccagaatggaggcacctgcctgcagaaccagagatgtgcctgcccccggggctacacaggagtgcgctgtgagcagccccgctgtgaccctgcagatgatgatggcggcctggactgtgaccgggcccctggggccgcccccaggcctgccaccctgctgggctgcctgctgctgctgggcctggccgcccggctgggccgctag

SEQ ID NO: 224721 - DNA, 1569 bp, Artificial Sequence
  derived and/or modified sequence
atgctgcacctgctggccctcttcctgcactgcctgcccctggccagcggggactatgacatctgcaagtcctgggtgaccacagatgagggccccacctgggagttctacgcctgccagcccaaggtgatgaggctgaaggactatgtgaaggtgaaggtggagcccagcggcatcacctgtggggaccccccagagcgcttctgcagccatgagaacccctacctgtgcagcaatgaatgtgatgccagcaacccagacctggcccaccccccccggctgatgtttgacaaggaggaggagggcctggccacctactggcagagcatcacctggagccgctaccccagccccctggaggccaacatcaccctgtcctggaacaagacagtggagctgacagatgatgtggtgatgacctttgaatatggccggcccaccgtgatggtgctggagaagagcctggacaatggaagaacctggcagccctaccagttctatgcagaggactgcatggaggccttcggcatgtctgcccggcgggcccgggacatgagcagcagcagcgcccaccgggtgctgtgcacagaggagtacagccgctgggccggcagcaagaaggagaagcacgtgcgctttgaggtgcgggacagatttgccatctttgctggccctgacctgaggaacatggacaacctgtacacccggctggagagcgccaagggcctgaaggagttcttcaccctgacagacctgaggatgaggctgctgcggcctgccctgggcggcacctacgtgcagagagaaaatctctacaagtacttctacgccatcagcaacattgaagtcatcggccgctgcaagtgcaacctgcacgccaacctgtgcagcatgagggagggcagcctgcagtgtgaatgtgagcacaacaccaccggccctgactgtgggaagtgcaagaagaacttccgcaccaggtcctggagggctggcagctacctgcccctgccccacggcagccccaatgcctactgtgagtgctacggccacagcaaccgctgcagctacatcgacttcctgaatgtggtgacctgtgtgtcctgcaagcacaacacccggggccagcactgccagcactgccgcctgggctactacagaaatggatctgctgagctggatgatgaaaatgtgtgcatcgagtgcaactgcaaccagatcggctctgtgcatgaccgctgcaatgagaccggcttctgtgagtgccgggagggcgccgccggccccaagtgtgatgactgcctgcccacccactactggaggcagggctgctaccccaacgtgtgtgatgatgaccagctgctgtgccagaatggaggcacctgcctgcagaaccagagatgtgcctgcccccggggctacacaggagtgcgctgtgagcagccccgctgtgaccctgcagatgatgatggcggcctggactgtgaccgggcccctggggccgcccccaggcctgccaccctgctgggctgcctgctgctgctgggcctggccgcccggctgggccgctag

SEQ ID NO: 224722 - DNA, 1593 bp, Artificial Sequence
  derived and/or modified sequence
atgctgcacctgctggccctcttcctgcactgcctgcccctggccagcggggactatgacatctgcaagtcctgggtgaccacagatgagggccccacctgggagttctacgcctgccagcccaaggtgatgaggctgaaggactatgtgaaggtgaaggtggagcccagcggcatcacctgtggggaccccccagagcgcttctgcagccatgagaacccctacctgtgcagcaatgaatgtgatgccagcaacccagacctggcccaccccccccggctgatgtttgacaaggaggaggagggcctggccacctactggcagagcatcacctggagccgctaccccagccccctggaggccaacatcaccctgtcctggaacaagacagtggagctgacagatgatgtggtgatgacctttgaatatggccggcccaccgtgatggtgctggagaagagcctggacaatggaagaacctggcagccctaccagttctatgcagaggactgcatggaggccttcggcatgtctgcccggcgggcccgggacatgagcagcagcagcgcccaccgggtgctgtgcacagaggagtacagccgctgggccggcagcaagaaggagaagcacgtgcgctttgaggtgcgggacagatttgccatctttgctggccctgacctgaggaacatggacaacctgtacacccggctggagagcgccaagggcctgaaggagttcttcaccctgacagacctgaggatgaggctgctgcggcctgccctgggcggcacctacgtgcagagagaaaatctctacaagtacttctacgccatcagcaacattgaagtcatcggccgctgcaagtgcaacctgcacgccaacctgtgcagcatgagggagggcagcctgcagtgtgaatgtgagcacaacaccaccggccctgactgtgggaagtgcaagaagaacttccgcaccaggtcctggagggctggcagctacctgcccctgccccacggcagccccaatgcctgtgccacagctggcagctttggaaactgtgagtgctacggccacagcaaccgctgcagctacatcgacttcctgaatgtggtgacctgtgtgtcctgcaagcacaacacccggggccagcactgccagcactgccgcctgggctactacagaaatggatctgctgagctggatgatgaaaatgtgtgcatcgagtgcaactgcaaccagatcggctctgtgcatgaccgctgcaatgagaccggcttctgtgagtgccgggagggcgccgccggccccaagtgtgatgactgcctgcccacccactactggaggcagggctgctaccccaacgtgtgtgatgatgaccagctgctgtgccagaatggaggcacctgcctgcagaaccagagatgtgcctgcccccggggctacacaggagtgcgctgtgagcagccccgctgtgaccctgcagatgatgatggcggcctggactgtgaccgggcccctggggccgcccccaggcctgccaccctgctgggctgcctgctgctgctgggcctggccgcccggctgggccgctag

SEQ ID NO: 224723 - DNA, 3109 bp, Artificial Sequence
  derived and/or modified sequence
cgctcagcccgggcgggcgatgcgggcggcgcgggcggccccctcccccggcccgcgtctccgggacggctgcgggcggcccccccggcggccggagggctccctggccccgatctgacggcggcggcggcggcggccacagcggcgggagcggcgcggggaaggagcagcggctcgcagccctcggcccgcgcccccacccagcgccagcccgaggggggaggcgcagcgccggagggtggcggtcctcggccctcccaggtctccgcgccgggaagccgctccgagccggggctggagggttgttttgccgttgtgttgagcacgtcacccattaagagccctttaaagacctggattgattggaaggacaaaaattaaaagcaatctgatccagcctcatgcaggatccctgcggattttctccttatcccatttccatccactgtcacaatttgagaatctgcctgatttgatcagattcacctccaggggaggtgtgataccagggttaggaggacgtgaagttatgggcaactttctgatctgtccatcagcagtctgagaaacgctggctctgaattttccgtgtcggccttttggaaacaacaagttcctcgctgtttgcaaagcttcagtgctcgggtccctgggacaccccggccaccctcgcctggtagatgtggcatttccatgctgaggccgcgagtcccgcctgaccccgtcgctgcctctccagggcttctctgggccgcgcctctgcagactgcgcagccatgctgcatctgctggcgctcttcctgcactgcctccctctggcctctggggactatgacatctgcaaatcctgggtgaccacagatgagggccccacctgggagttctacgcctgccagcccaaggtgatgcgcctgaaggactacgtcaaggtgaaggtggagccctcaggcatcacatgtggagacccccctgagaggttctgctcccatgagaatccctacctatgcagcaacgagtgtgacgcctccaacccggacctggcccacccgcccaggctcatgttcgacaaggaggaggagggcctggccacctactggcagagcatcacctggagccgctaccccagcccgctggaagccaacatcaccctttcgtggaacaagaccgtggagctgaccgacgacgtggtgatgaccttcgagtacggccggcccacggtcatggtcctggagaagtccctggacaacgggcgcacctggcagccctaccagttctacgccgaggactgcatggaggccttcggtatgtccgcccgccgggcccgcgacatgtcatcctccagcgcgcaccgcgtgctctgcaccgaggagtactcgcgctgggcaggctccaagaaggagaagcacgtgcgcttcgaggtgcgggaccgcttcgccatctttgccggccccgacctgcgcaacatggacaacctctacacgcggctggagagcgccaagggcctcaaggagttcttcaccctcaccgacctgcgcatgcggctgctgcgcccggcgctgggcggcacctatgtgcagcgggagaacctctacaagtacttctacgccatctccaacatcgaggtcatcggcaggtgcaagtgcaacctgcacgccaacctgtgctccatgcgcgagggcagcctgcagtgcgagtgcgagcacaacaccaccggccccgactgcggcaagtgcaagaagaatttccgcacccggtcctggcgggccggctcctacctgccgctgccccatggctctcccaacgcctgtacggcaccttccggtaccttttccaaagatgccttcctccactgcgaatgctacggtcactccaaccgctgcagctacattgacttcctgaatgtggtgacctgcgtcagctgcaagcacaacacgcgaggtcagcactgccagcactgccggctgggctactaccgcaacggctcggcagagctggatgatgagaacgtctgcattgagtgtaactgcaaccagataggctccgtgcacgaccggtgcaacgagaccggcttctgcgagtgccgcgagggcgcggcgggccccaagtgcgacgactgcctccccacgcactactggcgccagggctgctaccccaacgtgtgcgacgacgaccagctgctgtgccagaacggaggcacctgcctgcagaaccagcgctgcgcctgcccgcgcggctacaccggcgtgcgctgcgagcagccccgctgcgaccccgccgacgatgacggcggtctggactgcgaccgcgcgcccggggccgccccgcgccccgccaccctgctcggctgcctgctgctgctggggctggccgcccgcctgggccgctgagccccgcccggaggacgctccccgcacccggaggccgggggtcccggggtcccggggcggggccggcgtccgaggccgggcggtgagaagggtgcggcccgaggtgctcccaggtgctactcagcagggccccccgcccggcccgcgctcccgcccgcactgccctccccccgcagcaggggcgccttgggactccggtccccgcgcctgcgatttggtttcgtttttcttttgtattatccgccgcccagttccttttttgtctttctctctctctctttttttttttttttttctggcggtgagccagagggtcgggagaaacgctgctcgccccacaccccgtcctgcctcccaccacacttacacacacgggactgtggccgacaccccctggcctgtgccaggctcacgggcggcggcggaccccgacctccagttgcctacaattccagtcgctgacttggtcctgttttctattctttatttttcctgcaacccaccagaccccaggcctcaccggaggcccggtgaccacggaactcaccgtctgggggaggaggagagaaggaaggggtggggggcctggaaacttcgttctgtagagaactatttttgtttgtattcactgtcccctgcaagggggacggggcgggagcactggtcaccgcgggggccgatggtggagaatccgaggagtaaagagtttgctcactgctgcc

SEQ ID NO: 224724 - DNA, 4768 bp, Artificial Sequence
  derived and/or modified sequence
cgctcagcccgggcgggcgatgcgggcggcgcgggcggccccctcccccggcccgcgtctccgggacggctgcgggcggcccccccggcggccggagggctccctggccccgatctgacggcggcggcggcggcggccacagcggcgggagcggcgcggggaaggagcagcggctcgcagccctcggcccgcgcccccacccagcgccagcccgaggggggaggcgcagcgccggagggtggcggtcctcggccctcccaggtctccgcgccgggaagccgctccgagccggggctggagggttgttttgccgttgtgttgagcacgtcacccattaagagccctttaaagacctggattgattggaaggacaaaaattaaaagcaatctgatccagcctcatgcaggatccctgcggattttctccttatcccatttccatccactgtcacaatttgagaatctgcctgatttgatcagattcacctccaggggaggtgtgataccagggttaggaggacgtgaagttatgggcaactttctgatctgtccatcagcagtctgagaaacgctggctctgaattttccgtgtcggccttttggaaacaacaagttcctcgctgtttgcaaagcttcagtgctcgggtccctgggacaccccggccaccctcgcctggtagatgtggcatttccatgctgaggccgcgagtcccgcctgaccccgtcgctgcctctccagggcttctctgggccgcgcctctgcagactgcgcagccatgctgcatctgctggcgctcttcctgcactgcctccctctggcctctggggactatgacatctgcaaatcctgggtgaccacagatgagggccccacctgggagttctacgcctgccagcccaaggtgatgcgcctgaaggactacgtcaaggtgaaggtggagccctcaggcatcacatgtggagacccccctgagaggttctgctcccatgagaatccctacctatgcagcaacgagtgtgacgcctccaacccggacctggcccacccgcccaggctcatgttcgacaaggaggaggagggcctggccacctactggcagagcatcacctggagccgctaccccagcccgctggaagccaacatcaccctttcgtggaacaagaccgtggagctgaccgacgacgtggtgatgaccttcgagtacggccggcccacggtcatggtcctggagaagtccctggacaacgggcgcacctggcagccctaccagttctacgccgaggactgcatggaggccttcggtatgtccgcccgccgggcccgcgacatgtcatcctccagcgcgcaccgcgtgctctgcaccgaggagtactcgcgctgggcaggctccaagaaggagaagcacgtgcgcttcgaggtgcgggaccgcttcgccatctttgccggccccgacctgcgcaacatggacaacctctacacgcggctggagagcgccaagggcctcaaggagttcttcaccctcaccgacctgcgcatgcggctgctgcgcccggcgctgggcggcacctatgtgcagcgggagaacctctacaagtacttctacgccatctccaacatcgaggtcatcggcaggtgcaagtgcaacctgcacgccaacctgtgctccatgcgcgagggcagcctgcagtgcgagtgcgagcacaacaccaccggccccgactgcggcaagtgcaagaagaatttccgcacccggtcctggcgggccggctcctacctgccgctgccccatggctctcccaacgcctactgcgaatgctacggtcactccaaccgctgcagctacattgacttcctgaatgtggtgacctgcgtcagctgcaagcacaacacgcgaggtcagcactgccagcactgccggctgggctactaccgcaacggctcggcagagctggatgatgagaacgtctgcattgagtgtaactgcaaccagataggctccgtgcacgaccggtgcaacgagaccggcttctgcgagtgccgcgagggcgcggcgggccccaagtgcgacgactgcctccccacgcactactggcgccagggctgctaccccaacgtgtgcgacgacgaccagctgctgtgccagaacggaggcacctgcctgcagaaccagcgctgcgcctgcccgcgcggctacaccggcgtgcgctgcgagcagccccgctgcgaccccgccgacgatgacggcggtctggactgcgaccgcgcgcccggggccgccccgcgccccgccaccctgctcggctgcctgctgctgctggggctggccgcccgcctgggccgctgagccccgcccggaggacgctccccgcacccggaggccgggggtcccggggtcccggggcggggccggcgtccgaggccgggcggtgagaagggtgcggcccgaggtgctcccaggtgctactcagcagggccccccgcccggcccgcgctcccgcccgcactgccctccccccgcagcaggggcgccttgggactccggtccccgcgcctgcgatttggtttcgtttttcttttgtattatccgccgcccagttccttttttgtctttctctctctctctttttttttttttttttctggcggtgagccagagggtcgggagaaacgctgctcgccccacaccccgtcctgcctcccaccacacttacacacacgggactgtggccgacaccccctggcctgtgccaggctcacgggcggcggcggaccccgacctccagttgcctacaattccagtcgctgacttggtcctgttttctattctttatttttcctgcaacccaccagaccccaggcctcaccggaggcccggtgaccacggaactcaccgtctgggggaggaggagagaaggaaggggtggggggcctggaaacttcgttctgtagagaactatttttgtttgtattcactgtcccctgcaagggggacggggcgggagcactggtcaccgcgggggccgatggtggagaatccgaggagtaaagagtttgctcactgctgcctccacggcctgttttctttctgtgttggggacggtgggcaggtgtggggcttacagaggaatccacaacacagccttaaagaaacggtttccctactggggccaccatttccctgggcctttctgtggattccagcaggcagtgccccctccccgcaggcttggctggcagagttttccaccccgcggccaggctgcaggtgccccacctgttaggagcctccccacactgaaaggctgcctccctcctttcccaaaaaagaaatccggagtgtattggcccttttctacagaagtccaagggaaatgactcagggagaatcctagcagaggttgaatccaatgctctgatttatactgtgtctcggtggccacctccgatggatgtgtcatctcagacctgttgcagccggagcctcaagtccaatatcagatgaagctgaacccacaattcggccaccgcctccttccagagtttcagatggccaggtgggcagaggcgggcagtgcagagaccccagacgtgccggccctgtcctccctaccttctcaagattaggaaggggtgctggaggggacaggggcagcttgggagtggtgaggaagctcctagattcggggctcatcccctggggcctctgattcagaggatccagcagttctcccatctccgcttggtgtctccagccctggggccacacttccccctcggtccagcctcctgtccacctatgtttatttcagagcagtgccgggggtccggtcctggttgctaactgctgccactgctccacctgcaggtgctcccagcactggcttctgccaccacacctgttctttcccagctgcgaggtttagacctgggtccttcccttgagtccccaaagctaagctaagaccaagtggaacaaacttggccttggggacagcaggagattacaacacagaaaaggagggggaggcacaacgggacactgcataggactcacagtgtcccgagcccacacaccagcccctcctggcctcctctctctgctcccacccccagcaccctgctgacccggaagtgccttccgacaggccctgcatcctcctgcagctggcccatctctaccctcacattcttccttacgcacagaaccccactgcctgggacccaaagtgcccagataaaataaaacacctctctggggcttcttgtggataggagtggccaggggacacagctctgggcagtgagatgtaagcaggactgatgggtgggcttccagaaagttcttaaaagtcatcccttcctccacgccccacaaagcctcagttgtccaagtttgtggctctggtttttctctctcatccctccctctgctcttcagtcagcaggatggggaaggagccttcttgagacactgagcataacagtgtcaccctcaggatagtgaagggtggagccgggggtggaagttgcagagcctgggacacctgccttggctgcaacctctgcactgcttttatttatctacttatttttatagagttgaggtctcactatgttgcccaggctggtctcaaactcctaggctcaagtgagcctccggccttggcctcccgaagtgctgagattacaggcatgagccaccgcaccacctgcctgtcttactgtgtgagaaaaaaaataaacggtgatgtgattaaaacactagaa

SEQ ID NO: 224725 - DNA, 4792 bp, Artificial Sequence
  derived and/or modified sequence
cgctcagcccgggcgggcgatgcgggcggcgcgggcggccccctcccccggcccgcgtctccgggacggctgcgggcggcccccccggcggccggagggctccctggccccgatctgacggcggcggcggcggcggccacagcggcgggagcggcgcggggaaggagcagcggctcgcagccctcggcccgcgcccccacccagcgccagcccgaggggggaggcgcagcgccggagggtggcggtcctcggccctcccaggtctccgcgccgggaagccgctccgagccggggctggagggttgttttgccgttgtgttgagcacgtcacccattaagagccctttaaagacctggattgattggaaggacaaaaattaaaagcaatctgatccagcctcatgcaggatccctgcggattttctccttatcccatttccatccactgtcacaatttgagaatctgcctgatttgatcagattcacctccaggggaggtgtgataccagggttaggaggacgtgaagttatgggcaactttctgatctgtccatcagcagtctgagaaacgctggctctgaattttccgtgtcggccttttggaaacaacaagttcctcgctgtttgcaaagcttcagtgctcgggtccctgggacaccccggccaccctcgcctggtagatgtggcatttccatgctgaggccgcgagtcccgcctgaccccgtcgctgcctctccagggcttctctgggccgcgcctctgcagactgcgcagccatgctgcatctgctggcgctcttcctgcactgcctccctctggcctctggggactatgacatctgcaaatcctgggtgaccacagatgagggccccacctgggagttctacgcctgccagcccaaggtgatgcgcctgaaggactacgtcaaggtgaaggtggagccctcaggcatcacatgtggagacccccctgagaggttctgctcccatgagaatccctacctatgcagcaacgagtgtgacgcctccaacccggacctggcccacccgcccaggctcatgttcgacaaggaggaggagggcctggccacctactggcagagcatcacctggagccgctaccccagcccgctggaagccaacatcaccctttcgtggaacaagaccgtggagctgaccgacgacgtggtgatgaccttcgagtacggccggcccacggtcatggtcctggagaagtccctggacaacgggcgcacctggcagccctaccagttctacgccgaggactgcatggaggccttcggtatgtccgcccgccgggcccgcgacatgtcatcctccagcgcgcaccgcgtgctctgcaccgaggagtactcgcgctgggcaggctccaagaaggagaagcacgtgcgcttcgaggtgcgggaccgcttcgccatctttgccggccccgacctgcgcaacatggacaacctctacacgcggctggagagcgccaagggcctcaaggagttcttcaccctcaccgacctgcgcatgcggctgctgcgcccggcgctgggcggcacctatgtgcagcgggagaacctctacaagtacttctacgccatctccaacatcgaggtcatcggcaggtgcaagtgcaacctgcacgccaacctgtgctccatgcgcgagggcagcctgcagtgcgagtgcgagcacaacaccaccggccccgactgcggcaagtgcaagaagaatttccgcacccggtcctggcgggccggctcctacctgccgctgccccatggctctcccaacgcctgtgccactgcaggttcctttggcaactgcgaatgctacggtcactccaaccgctgcagctacattgacttcctgaatgtggtgacctgcgtcagctgcaagcacaacacgcgaggtcagcactgccagcactgccggctgggctactaccgcaacggctcggcagagctggatgatgagaacgtctgcattgagtgtaactgcaaccagataggctccgtgcacgaccggtgcaacgagaccggcttctgcgagtgccgcgagggcgcggcgggccccaagtgcgacgactgcctccccacgcactactggcgccagggctgctaccccaacgtgtgcgacgacgaccagctgctgtgccagaacggaggcacctgcctgcagaaccagcgctgcgcctgcccgcgcggctacaccggcgtgcgctgcgagcagccccgctgcgaccccgccgacgatgacggcggtctggactgcgaccgcgcgcccggggccgccccgcgccccgccaccctgctcggctgcctgctgctgctggggctggccgcccgcctgggccgctgagccccgcccggaggacgctccccgcacccggaggccgggggtcccggggtcccggggcggggccggcgtccgaggccgggcggtgagaagggtgcggcccgaggtgctcccaggtgctactcagcagggccccccgcccggcccgcgctcccgcccgcactgccctccccccgcagcaggggcgccttgggactccggtccccgcgcctgcgatttggtttcgtttttcttttgtattatccgccgcccagttccttttttgtctttctctctctctctttttttttttttttttctggcggtgagccagagggtcgggagaaacgctgctcgccccacaccccgtcctgcctcccaccacacttacacacacgggactgtggccgacaccccctggcctgtgccaggctcacgggcggcggcggaccccgacctccagttgcctacaattccagtcgctgacttggtcctgttttctattctttatttttcctgcaacccaccagaccccaggcctcaccggaggcccggtgaccacggaactcaccgtctgggggaggaggagagaaggaaggggtggggggcctggaaacttcgttctgtagagaactatttttgtttgtattcactgtcccctgcaagggggacggggcgggagcactggtcaccgcgggggccgatggtggagaatccgaggagtaaagagtttgctcactgctgcctccacggcctgttttctttctgtgttggggacggtgggcaggtgtggggcttacagaggaatccacaacacagccttaaagaaacggtttccctactggggccaccatttccctgggcctttctgtggattccagcaggcagtgccccctccccgcaggcttggctggcagagttttccaccccgcggccaggctgcaggtgccccacctgttaggagcctccccacactgaaaggctgcctccctcctttcccaaaaaagaaatccggagtgtattggcccttttctacagaagtccaagggaaatgactcagggagaatcctagcagaggttgaatccaatgctctgatttatactgtgtctcggtggccacctccgatggatgtgtcatctcagacctgttgcagccggagcctcaagtccaatatcagatgaagctgaacccacaattcggccaccgcctccttccagagtttcagatggccaggtgggcagaggcgggcagtgcagagaccccagacgtgccggccctgtcctccctaccttctcaagattaggaaggggtgctggaggggacaggggcagcttgggagtggtgaggaagctcctagattcggggctcatcccctggggcctctgattcagaggatccagcagttctcccatctccgcttggtgtctccagccctggggccacacttccccctcggtccagcctcctgtccacctatgtttatttcagagcagtgccgggggtccggtcctggttgctaactgctgccactgctccacctgcaggtgctcccagcactggcttctgccaccacacctgttctttcccagctgcgaggtttagacctgggtccttcccttgagtccccaaagctaagctaagaccaagtggaacaaacttggccttggggacagcaggagattacaacacagaaaaggagggggaggcacaacgggacactgcataggactcacagtgtcccgagcccacacaccagcccctcctggcctcctctctctgctcccacccccagcaccctgctgacccggaagtgccttccgacaggccctgcatcctcctgcagctggcccatctctaccctcacattcttccttacgcacagaaccccactgcctgggacccaaagtgcccagataaaataaaacacctctctggggcttcttgtggataggagtggccaggggacacagctctgggcagtgagatgtaagcaggactgatgggtgggcttccagaaagttcttaaaagtcatcccttcctccacgccccacaaagcctcagttgtccaagtttgtggctctggtttttctctctcatccctccctctgctcttcagtcagcaggatggggaaggagccttcttgagacactgagcataacagtgtcaccctcaggatagtgaagggtggagccgggggtggaagttgcagagcctgggacacctgccttggctgcaacctctgcactgcttttatttatctacttatttttatagagttgaggtctcactatgttgcccaggctggtctcaaactcctaggctcaagtgagcctccggccttggcctcccgaagtgctgagattacaggcatgagccaccgcaccacctgcctgtcttactgtgtgagaaaaaaaataaacggtgatgtgattaaaacactagaa

SEQ ID NO: 224726 - DNA, 1611 bp, Artificial Sequence
  derived and/or modified sequence
atgctgcacctgctggccctgttcctgcactgcctgcccctggcctccggagactacgatatctgcaagtcttgggttaccactgacgagggccctacttgggagttttatgcgtgccagcccaaggtaatgcgattaaaagattacgttaaggtaaaggtcgaaccctctgggattacttgtggagatccacccgaacgcttttgctcacacgagaacccgtacctctgctccaacgagtgcgacgccagtaatcctgacctggctcaccctccccgactgatgtttgacaaagaggaggagggactcgctacttattggcagagcatcacgtggtccagataccccagccctctcgaggccaatataaccctaagctggaataagactgtcgagctgaccgatgacgtggtgatgacctttgagtatggccgaccgactgtgatggtcctcgagaaaagcctcgataatggcaggacctggcaaccatatcaattttatgctgaggattgtatggaggccttcggaatgtcagcccgccgcgcccgagacatgagcagcagttccgcacaccgggtcctgtgcactgaagagtactctagatgggctgggtcaaagaaagaaaagcatgtgaggttcgaggtgcgagacagattcgctattttcgcgggaccagatctgcgaaatatggacaatctgtatacgaggttggaatccgccaaaggtttgaaagaattctttacactgaccgaccttcgcatgagactcctgcggcccgctctgggcggcacctacgtccagagggagaatctctataagtacttttatgctatctcaaacatagaagtcatcgggcggtgcaagtgtaatctgcacgcaaacctgtgcagtatgcgcgagggctctctccaatgcgaatgcgaacataacaccaccggtcccgattgtggaaaatgcaagaaaaacttccggactagatcctggcgggctgggtcttatctccccctccctcacggcagtcctaacgcatgtaccgcccccagcggcacctttagcaaagacgccttcctgcactgtgaatgctacggacatagcaaccgctgctcatacatcgatttcttaaacgtcgtcacatgtgtatcctgtaaacataatactcggggccaacattgccaacattgtcgtctgggctattatagaaatggttccgccgaactggacgatgagaatgtgtgtattgaatgtaactgcaatcaaataggaagcgtgcacgatagatgtaatgaaacaggcttctgcgagtgtagggaaggagcagccggccctaagtgcgacgattgtttacctactcactactggcgtcagggctgctaccctaacgtctgtgacgacgaccagctcctctgccaaaacggcggcacatgtctgcagaatcagagatgtgcctgtcccaggggatacactggggtccgctgcgagcagcctcgatgcgatcccgccgacgatgatggtggtttagattgcgacagagccccaggcgccgcccccaggcctgccacattactgggctgtctcctgctcctgggcctggcagccaggctggggcgttag

SEQ ID NO: 224727 - DNA, 1569 bp, Artificial Sequence
  derived and/or modified sequence
atgctgcacctgctggccctgttcctgcactgcctgcccctggcctctggtgactatgatatttgcaaaagttgggtaacgacagacgaggggcctacttgggagttctatgcgtgccagcctaaagtgatgcggctgaaggattacgtgaaagtgaaagtggaacccagcgggatcacatgtggagatcccccagaaagattctgcagccacgaaaacccatacttgtgctccaatgaatgcgacgcatccaatccggatctcgctcatccgccccgtctgatgttcgacaaggaagaagaaggtctcgctacctattggcagtctatcacctggagccggtacccgagccccctggaggcaaatatcactctatcatggaacaagactgtcgaattaactgacgacgtcgtgatgaccttcgagtacggaaggcccactgtgatggtacttgaaaaatccctggataatggccgtacgtggcaaccctatcagttctacgccgaggattgtatggaggctttcgggatgtcagcgcgccgggcccgggacatgagtagttcgagcgctcacagagtgctctgtacagaggaatacagccgctgggcaggatccaagaaggagaagcacgtgcgttttgaggtcagggaccggttcgctattttcgctggtccagatctgaggaacatggacaacctttacactaggcttgagtctgctaaaggattaaaagaattcttcaccctcacggaccttcggatgaggctactgaggccagcactcggaggcacctatgtgcagcgtgagaatctttacaagtatttttacgcgataagcaacattgaggttataggcagatgtaagtgcaacctccatgcaaacttgtgcagcatgcgcgaagggagcctgcaatgcgaatgcgagcacaataccacgggccccgactgcggcaaatgtaaaaaaaatttccgcactagatcgtggagggcgggcagctatctgcccctgccacatggcagcccaaatgcctattgcgaatgttatggacattccaatagatgcagctacattgatttcctgaacgtggtgacatgcgtgtcctgcaagcacaatacgcgcggacagcattgccagcattgtagattggggtattaccggaatggctcagccgaactagatgacgagaacgtttgtatcgagtgtaactgcaaccagattggcagcgtgcacgatcgctgcaacgaaaccggcttctgcgaatgtcgcgaaggagctgctggccccaagtgtgacgattgccttcccacccattactggagacaaggttgttatcctaacgtctgtgacgatgatcagctgctgtgtcagaacggtggtacttgcctgcagaatcagcgttgcgcctgcccgcgcggctataccggagtgcggtgcgagcagcccagatgtgatccggccgatgacgatggggggttggattgcgaccgggcaccaggcgctgccccaagaccagccacgttgctcggatgtttgctcctactgggcctggcggcaagactggggcgttag

SEQ ID NO: 224728 - DNA, 1593 bp, Artificial Sequence
  derived and/or modified sequence
atgctgcacctgctggccctgttcctgcactgcctgcccctggcctccggcgactatgacatctgtaaatcttgggtgaccacagacgaggggcctacttgggagttctatgcctgccaaccaaaggtcatgcggctgaaggactacgtgaaggtcaaagtcgagccatcagggataacctgtggggaccctcccgaaagattctgctcccacgagaacccatacctttgcagcaacgagtgcgatgcttccaacccagacctggcacatccccccaggctaatgttcgacaaagaagaagaaggactggccacctactggcagtctataacctggtcacggtacccatctcccctcgaggctaacatcacactttcttggaacaaaactgtcgaactcacagacgatgttgtaatgacgtttgagtacggcagacccactgttatggtactggaaaagtccctggacaacggacggacatggcagccttaccagttttacgccgaagactgcatggaagcctttggcatgagcgcacggagagcccgtgatatgagctcctctagcgcacaccgggtgctgtgtacagaagagtactctcgctgggccgggagcaaaaaggagaagcatgtgcggttcgaggttagggacagattcgcaatattcgccgggccggatctgaggaatatggataatctatacacccgtcttgagtccgccaaagggctcaaggagtttttcactctgacagacttgaggatgcggttactgcgccctgcactgggggggacatatgtacagcgggaaaacttatacaaatacttctatgccatcagcaacatcgaggtgattgggcgctgcaagtgtaatctccacgctaacctatgtagcatgcgcgagggctccttgcagtgcgagtgcgaacacaatacaacgggaccagattgcggaaaatgtaaaaaaaactttcggacacggtcatggcgggcaggaagttacctgcccctcccacatggctctccaaacgcatgcgccaccgccgggagtttcggcaattgtgagtgttacgggcactctaaccggtgctcctatatcgactttctcaacgtcgtgacctgtgtatcttgtaagcacaacacacgcgggcagcactgccaacactgccgactgggatactaccggaacggcagcgcagaattggatgatgaaaacgtatgcattgagtgcaattgcaaccagataggtagcgtgcatgataggtgcaatgagactggcttttgcgagtgccgcgaaggtgcagccggcccaaaatgcgacgattgtctcccaacccattactggcgccaaggatgttaccctaacgtgtgtgatgacgaccagttactgtgccaaaacggaggcacctgcctccagaatcagaggtgtgcgtgtcctcgcgggtatacaggggtgaggtgtgaacagccccgctgcgaccctgctgacgacgatggaggtctggattgcgatcgcgcccccggggccgcacccaggcctgccacactgctgggctgcttgttgctgctgggtctggcggccagactcggacggtag

SEQ ID NO: 224729 - DNA, 1611 bp, Artificial Sequence
  derived and/or modified sequence
atgttacatctactagccctgtttctccattgtcttcccctggcgagcggcgactatgacatatgtaagagctgggtcaccacagatgaaggaccaacatgggaattctacgcttgtcagcccaaggttatgaggctgaaagactacgtgaaggtcaaggtggagcctagtggcatcacatgcggtgatccacccgagaggttctgctctcatgagaacccctacctgtgttcaaatgaatgtgatgcctccaatccagatctggcccatcctccacgcctcatgtttgacaaggaggaggaaggcctggcgacctactggcagtcaatcacgtggagccgttatccctcgccgttggaggctaacattactctttcctggaataagaccgtcgagctcaccgatgacgtagtaatgaccttcgagtatggacgccctacagtaatggtgttggaaaaatccctagacaacgggaggacatggcaaccgtaccagttctacgccgaagattgtatggaggccttcgggatgtcagcaaggagagcacgagacatgtcttcctctagcgcccaccgggttctgtgcactgaagagtatagccgctgggctggctcaaagaaagagaagcacgtgaggttcgaagttagggaccgcttcgcaattttcgccggaccagacctgagaaacatggacaacctgtatacccgcctcgagtccgctaagggcttgaaagagttctttacactaacggacctcaggatgcggttgctgcggccagctctggggggtacatacgttcagcgggaaaatctgtacaaatacttctatgccattagcaatatcgaagtcatcggacgttgcaaatgcaatcttcacgccaatctgtgctccatgcgcgaaggctcacttcagtgtgagtgcgaacacaataccactgggccagattgcggcaagtgtaaaaagaatttcaggacccgctcttggcgcgctggatcatatcttccccttccccatggttcaccaaatgcttgcaccgcgccatcaggaacgttctccaaggatgccttcctgcactgtgaatgttacgggcacagcaaccggtgcagctatattgacttcctaaacgtagtcacctgtgtgtcatgcaaacacaatacccgtggacagcattgtcaacattgccgattgggctattaccgaaatggctccgctgagctcgatgatgagaatgtgtgcatcgaatgcaattgcaaccagattgggtccgtgcatgatcgctgcaacgagacagggttttgtgagtgccgcgaaggagccgctggtcctaagtgtgacgactgtctgcccacccactattggcgacagggatgttatccaaatgtttgcgatgatgatcaactgttatgccaaaatgggggtacttgtctgcagaatcagagatgcgcatgtccacggggatacactggggtgaggtgcgagcagccccgatgcgatccggctgacgatgacggaggtctcgattgcgaccgtgcccctggagcagctcctagaccggctaccctccttgggtgtctgctgctgctgggtctcgccgcaaggcttgggcgatag

SEQ ID NO: 224730 - DNA, 1569 bp, Artificial Sequence
  derived and/or modified sequence
atgctgcacctgctggccttatttctgcattgcctccccctggcctccggcgactatgatatttgtaagtcttgggtaactactgacgagggcccaacatgggaattttatgcctgtcagccaaaagtgatgcgcctgaaggactatgtcaaggtgaaagtggaaccttctggaataacttgtggagatcccccagaacgcttctgttcacacgagaacccgtacctgtgctccaacgagtgtgatgcgagcaatcctgacctcgcacatcctccacgcctcatgtttgataaagaagaagaagggctagcgacatattggcaatccatcacatggagcaggtacccaagcccactggaagccaacatcactctctcttggaataaaactgtggaactgactgacgacgtggtaatgacctttgaatacgggaggcccacagtcatggttctggagaagtccctggacaatggtcgcacctggcagccatatcagttttatgccgaagactgtatggaagccttcggtatgtccgccagacgtgcccgtgacatgagttcttccagcgcccatcgagtcttatgcacagaggaatactcaaggtgggcgggatctaaaaaagagaagcatgtccgctttgaggtcagagatcgttttgcgatcttcgccggacccgatctgcgtaacatggacaacctgtatacacgactggagtccgccaaaggactgaaggaatttttcacactgacagacctccggatgcggctccttcgccctgcactgggaggaacgtatgttcagcgagagaacttgtacaaatatttttacgctatcagtaatatcgaagtgattggcaggtgtaagtgtaacctacacgcgaatctttgttcaatgcgggaggggagcctgcaatgcgaatgtgaacacaacacaactgggccagactgcggcaaatgcaagaaaaactttcggacccgctcttggcgagcgggatcctaccttcctctgcctcatggttctcccaacgcctactgtgaatgctatggacactccaaccggtgtagttacatcgactttctgaacgtcgtcacttgtgtgagctgcaaacataatactagagggcagcactgccagcactgccgtttgggctactacaggaatggaagtgctgagctggatgacgagaatgtttgtatcgagtgcaattgtaatcaaataggctccgtgcacgatagatgcaatgaaaccgggttttgtgagtgccgagaaggagcagctggcccaaagtgcgatgattgcctacctactcactactggaggcagggctgctatcctaacgtctgtgacgacgaccaactcctgtgccagaacggcggaacctgcctacagaatcaacgttgtgcctgcccgagggggtataccggcgttcgatgcgaacaaccaaggtgcgaccccgcagatgatgatggcggtctcgactgtgatcgcgctcccggtgccgctcctcgccctgccacactgctcggctgcttgctcttattgggcctggctgcccgtctggggaggtag

SEQ ID NO: 224731 - DNA, 1593 bp, Artificial Sequence
  derived and/or modified sequence
atgttgcacctccttgctctgtttctacattgcctgcccctggctagcggggattatgacatttgcaaatcatgggtgaccacagatgaaggacccacgtgggagttctatgcttgccagccgaaagtgatgaggctgaaggactacgtaaaggtgaaggtcgagccttccggcataacgtgtggcgacccaccagagcgcttctgttcccatgagaacccttacttgtgttccaatgagtgcgacgccagcaaccccgatctcgcccacccaccgagactgatgttcgacaaagaagaggagggacttgccacttactggcagagcattacctggtccaggtatcccagccctctggaggccaatattacactttcttggaacaagacagttgaactgacagacgacgtagtgatgaccttcgaatacgggcgacctactgtgatggtgctggagaagagtctagacaacgggcgaacctggcagccctaccagttttatgctgaggactgtatggaggcattcgggatgagcgctagaagagctagggacatgtcttcctcttccgcccatagggtgctgtgtaccgaggaatacagtaggtgggctggatcaaaaaaagaaaagcatgtgaggttcgaggtgagggacagattcgccattttcgccggaccagacctgcgcaacatggacaatctttacacccgtctggagtcggcaaagggcttgaaagagtttttcaccctgaccgatctgcgaatgcgcctgctgcgacccgctctcgggggaacctacgtacagagggagaacctgtacaaatatttctatgcgattagcaatatagaagtgatcggccgttgtaaatgtaaccttcatgctaacctttgcagtatgcgcgagggatccctgcagtgcgaatgcgagcacaacactacaggcccagattgcggaaagtgcaaaaagaactttcgcacccggagctggcgagctggctcatacttaccattgcctcacggctcacctaacgcttgtgcgactgccggatcatttggcaactgtgaatgttacggacactctaaccgctgttcgtatatcgactttttaaatgtggtgacatgtgtttcgtgcaaacacaacaccagagggcaacactgtcagcactgccgccttgggtattacaggaacgggtcagccgaattggacgacgagaatgtgtgcatcgaatgcaattgcaatcaaatcggatcagttcatgacaggtgcaatgaaacaggcttctgcgagtgcagagaaggtgccgctggaccgaaatgcgatgactgcctgccaacccactattggagacagggttgctacccaaacgtgtgtgacgatgatcaactcctgtgccagaatgggggaacatgccttcagaatcagcgctgcgcatgtcctagagggtacaccggcgtgcggtgcgagcaaccacgctgtgatcccgctgatgacgatgggggactggactgtgatagagcccctggtgccgcacctagacccgctacgctgttaggttgcctgctgttgcttggtctcgcagctaggctcggccgatag

SEQ ID NO: 224732 - protein, 1321 aa, Artificial Sequence
  derived and/or modified sequence
MQCLAAALKDETNMSGGGEQADILPANYVVKDRWKVLKKIGGGGFGEIYEAMDLLTRENVALKVESAQQPKQVLKMEVAVLKKLQGKDHVCRFIGCGRNEKFNYVVMQLQGRNLADLRRSQPRGTFTLSTTLRLGKQILESIEAIHSVGFLHRDIKPSNFAMGRLPSTYRKCYMLDFGLARQYTNTTGDVRPPRNVAGFRGTVRYASVNAHKNREMGRHDDLWSLFYMLVEFAVGQLPWRKIKDKEQVGMIKEKYEHRMLLKHMPSEFHLFLDHIASLDYFTKPDYQLIMSVFENSMKERGIAENEAFDWEKAGTDALLSTSTSTPPQQNTRQTAAMFGVVNVTPVPGDLLRENTEDVLQGEHLSDQENAPPILPGRPSEGLGPSPHLVPHPGGPEAEVWEETDVNRNKLRINIGKSPCVEEEQSRGMGVPSSPVRAPPDSPTTPVRSLRYRRVNSPESERLSTADGRVELPERRSRMDLPGSPSRQACSSQPAQMLSVDTGHADRQASGRMDVSASVEQEALSNAFRSVPLAEEEDFDSKEWVIIDKETELKDFPPGAEPSTSGTTDEEPEELRPLPEEGEERRRLGAEPTVRPRGRSMQALAEEDLQHLPPQPLPPQLSQGDGRSETSQPPTPGSPSHSPLHSGPRPRRRESDPTGPQRQVFSVAPPFEVNGLPRAVPLSLPYQDFKRDLSDYRERARLLNRVRRVGFSHMLLTTPQVPLAPVQPQANGKEEEEEEEEDEEEEEEDEEEEEEEEEEEEEEEEEEEEEEEAAAAVALGEVLGPRSGSSSEGSERSTDRSQEGAPSTLLADDQKESRGRASMADGDLEPEEGSKTLVLVSPGDMKKSPVTAELAPDPDLGTLAALTPQHERPQPTGSQLDVSEPGTLSSVLKSEPKPPGPGAGLGAGTVTTGVGGVAVTSSPFTKVERTFVHIAEKTHLNVMSSGGQALRSEEFSAGGELGLELASDGGAVEEGARAPLENGLALSGLNGAEIEGSALSGAPRETPSEMATNSLPNGPALADGPAPVSPLEPSPEKVATISPRRHAMPGSRPRSRIPVLLSEEDTGSEPSGSLSAKERWSKRARPQQDLARLVMEKRQGRLLLRLASGASSSSSEEQRRASETLSGTGSEEDTPASEPAAALPRKSGRAAATRSRIPRPIGLRMPMPVAAQQPASRSHGAAPALDTAITSRLQLQTPPGSATAADLRPKQPPGRGLGPGRAQAGARPPAPRSPRLPASTSAARNASASPRSQSLSRRESPSPSHQARPGVPPPRGVPPARAQPDGTPSPGGSKKGPRGKLQAQRATTKGRAGGAEGRAGAR

SEQ ID NO: 224733 - protein, 622 aa, Artificial Sequence
  derived and/or modified sequence
MDLLTRENVALKVESAQQPKQVLKMEVAVLKKLQGKDHVCRFIGCGRNEKFNYVVMQLQGRNLADLRRSQPRGTFTLSTTLRLGKQILESIEAIHSVGFLHRDIKPSNFAMGRLPSTYRKCYMLDFGLARQYTNTTGDVRPPRNVAGFRGTVRYASVNAHKNREMGRHDDLWSLFYMLVEFAVGQLPWRKIKDKEQVGMIKEKYEHRMLLKHMPSEFHLFLDHIASLDYFTKPDYQLIMSVFENSMKERGIAENEAFDWEKAGTDALLSTSTSTPPQQNTRQTAAMFGVVNVTPVPGDLLRENTEDVLQGEHLSDQENAPPILPGRPSEGLGPSPHLVPHPGGPEAEVWEETDVNRNKLRINIGKSPCVEEEQSRGMGVPSSPVRAPPDSPTTPVRSLRYRRVNSPESERLSTADGRVELPERRSRMDLPGSPSRQACSSQPAQMLSVDTGHADRQASGRMDVSASVEQEALSNAFRSVPLAEEEDFDSKEWVIIDKETELKDFPPGAEPSTSGTTDEEPEELRPLPEEGEERRRLGAEPPFPLTPALGTPPSTERVGPHRPTETVGGGQTLGALPPAVQPPATTGVLRVLLLHAGDGALPSPRRRRLLGLLRFPHSAQPLG

SEQ ID NO: 224734 - DNA, 1869 bp, Artificial Sequence
  derived and/or modified sequence
atggacctgctgaccagagagaacgtggccctgaaggtggagagcgcccagcagcccaagcaggtgctgaagatggaggtggccgtgctgaagaagctgcagggcaaggaccacgtgtgcagattcatcggctgcggcagaaacgagaagttcaactacgtggtgatgcagctgcagggcagaaacctggccgacctgagaagaagccagcccagaggcaccttcaccctgagcaccaccctgagactgggcaagcagatcctggagagcatcgaggccatccacagcgtgggcttcctgcacagagacatcaagcccagcaacttcgccatgggcagactgcccagcacctacagaaagtgctacatgctggacttcggcctggccagacagtacaccaacaccaccggcgacgtgagaccccccagaaacgtggccggcttcagaggcaccgtgagatacgccagcgtgaacgcccacaagaacagagagatgggcagacacgacgacctgtggagcctgttctacatgctggtggagttcgccgtgggccagctgccctggagaaagatcaaggacaaggagcaggtgggcatgatcaaggagaagtacgagcacagaatgctgctgaagcacatgcccagcgagttccacctgttcctggaccacatcgccagcctggactacttcaccaagcccgactaccagctgatcatgagcgtgttcgagaacagcatgaaggagagaggcatcgccgagaacgaggccttcgactgggagaaggccggcaccgacgccctgctgagcaccagcaccagcacccccccccagcagaacaccagacagaccgccgccatgttcggcgtggtgaacgtgacccccgtgcccggcgacctgctgagagagaacaccgaggacgtgctgcagggcgagcacctgagcgaccaggagaacgccccccccatcctgcccggcagacccagcgagggcctgggccccagcccccacctggtgccccaccccggcggccccgaggccgaggtgtgggaggagaccgacgtgaacagaaacaagctgagaatcaacatcggcaagagcccctgcgtggaggaggagcagagcagaggcatgggcgtgcccagcagccccgtgagagccccccccgacagccccaccacccccgtgagaagcctgagatacagaagagtgaacagccccgagagcgagagactgagcaccgccgacggcagagtggagctgcccgagagaagaagcagaatggacctgcccggcagccccagcagacaggcctgcagcagccagcccgcccagatgctgagcgtggacaccggccacgccgacagacaggccagcggcagaatggacgtgagcgccagcgtggagcaggaggccctgagcaacgccttcagaagcgtgcccctggccgaggaggaggacttcgacagcaaggagtgggtgatcatcgacaaggagaccgagctgaaggacttcccccccggcgccgagcccagcaccagcggcaccaccgacgaggagcccgaggagctgagacccctgcccgaggagggcgaggagagaagaagactgggcgccgagccccccttccccctgacccccgccctgggcaccccccccagcaccgagagagtgggcccccacagacccaccgagaccgtgggcggcggccagaccctgggcgccctgccccccgccgtgcagccccccgccaccaccggcgtgctgagagtgctgctgctgcacgccggcgacggcgccctgcccagccccagaagaagaagactgctgggcctgctgagattcccccacagcgcccagcccctgggctag

SEQ ID NO: 224735 - DNA, 3966 bp, Artificial Sequence
  derived and/or modified sequence
atgcagtgcctggctgccgcacttaaagacgagacgaacatgtccggaggaggagaacaggcagatatcttgccagccaactatgtggtaaaagatcgttggaaggtgcttaaaaagataggtggcgggggcttcggggagatttatgaggccatggacctgcttacccgggagaatgtcgcactgaaggtggagagtgcccaacagcccaaacaggtcctcaagatggaagtggccgtactgaaaaagctgcagggcaaggatcacgtgtgtcggttcatagggtgtgggaggaatgaaaagttcaactacgtagtgatgcagcttcaagggcggaacctggctgaccttagacgaagccagcctagagggactttcaccctatctactacgcttcggcttggaaagcagatattagagagtattgaggccatccactcagtcggttttttgcatcgggatattaaaccctcaaactttgccatgggtcgtttgccttctacctaccgcaagtgttacatgctggactttggcctagctcgccagtataccaacactactggcgatgtgcgacccccaagaaacgtggccggttttagagggacagtacgctatgcctctgtcaatgctcataagaatagggaaatgggcaggcacgacgatttgtggagcctgttttacatgctggttgaattcgctgtgggccagttgccgtggcggaagatcaaggacaaagaacaggtggggatgatcaaggaaaagtacgagcaccggatgcttctgaagcacatgcccagtgaatttcacctgttcctagatcatatcgcttccttggactattttaccaaacctgactaccaactgattatgagcgtctttgagaactctatgaaggagcggggaattgcagaaaatgaagcgttcgactgggagaaggctggcactgatgcgctcctctccacaagcaccagcactcccccccaacaaaacaccaggcagaccgctgccatgtttggagtggtgaacgtcacaccagtccccggggatttgcttcgggagaacaccgaagacgtgctgcagggggagcatctgtccgaccaggagaatgctcctccaattcttcctgggcggccaagcgagggattagggcccagtccccacctagttccccacccgggtggaccagaagctgaggtctgggaggagactgacgttaatcggaacaaattgagaatcaatattggcaaatcgccgtgtgtggaagaagagcagtccaggggaatgggagtgccttccagtccagtccgtgcgccacccgactcacctactaccccagtccgctctctgaggtaccgcagagtcaacagccctgagagcgagagactgtcgaccgctgatggacgggtggaactccctgaacgcagatcccgcatggatctgcctggcagtccctcccgtcaggcatgctcatctcaaccggcccagatgctctcagtcgatacaggccacgctgaccgccaggccagcggcaggatggacgtgtccgcatccgtcgaacaggaagccctgtcaaatgccttcaggagtgtgcctttggccgaagaggaggatttcgactccaaggagtgggtcatcattgataaggagacggaattgaaggatttccccccaggagctgaacccagtactagtggcacaaccgacgaggagcccgaggagctgcgtccactccctgaggaaggcgaggagaggcggcggctcggagccgagcccacagtcaggcccaggggtcgctcaatgcaggccctggcagaggaggacctgcagcacctgcccccccagcccctgccaccacagctgagccagggcgatggtaggtccgaaacctcccagcctcctacacccgggagtccctctcatagtccactgcattccgggcccagacctaggcgacgcgagagtgatccaacgggtccccagcgacaggtgtttagcgtcgcacctccttttgaagtgaacggattgcccagggccgtgcctctgagcttaccttaccaggactttaagagggacctaagcgactaccgcgaaagggcacggcttctgaacagagtgcgacgcgtcgggttcagccatatgctgctcactacaccccaggtgcccctcgccccagtccagcctcaggccaacggcaaagaagaagaggaagaggaggaggaagatgaagaggaagaggaagaagacgaagaggaggaagaagaggaggaagaggaggaagaggaagaggaggaggaggaggaagaagaggaagaggctgccgccgccgtggcgctgggggaagtgttgggcccacggtctggatcatccagcgaaggatctgagcgctccacagaccgaagccaggagggcgcccctagcacgctcttggcagacgaccaaaaggagagccgcggacgggcatctatggcagatggagacctggagcccgaggaaggatctaaaaccctggtgctcgtgtccccaggtgacatgaagaaatccccagttaccgcagagctggcccctgatcctgatttgggcactctcgcggcccttacgccgcagcatgaacgtcctcagcctaccgggagccagctggatgtaagcgagccaggcacactttcgtcagttttaaaatctgaacctaagcctccaggtcctggagcggggctcggggcagggacagttacaacaggagtaggcggggtggcagtgaccagctctccgtttactaaggtggaacggacatttgtccacatcgccgaaaaaactcacctgaacgtcatgagtagtggcggacaggcactcagaagcgaggagttctctgccggtggagagctcgggctagagcttgccagtgatgggggcgctgttgaggaaggagctagggccccgctggagaacggcctcgctctctcaggcttgaatggggccgagatcgaaggctcagctctgtccggtgctccccgggagacccctagtgagatggcaaccaactcactccccaacggcccagctctggctgacggtccagcacccgtgtccccgctggagccttcccccgaaaaggtggcaacaatttcccccaggcggcacgctatgcctggcagcagaccacgcagtagaataccagtgctgctgagcgaagaggataccggcagtgagccatccgggagcttaagcgctaaagagcgatggagtaaacgtgcccggcctcagcaggacctggctcggctggtgatggaaaaacggcaaggtagacttctgctccggctggcatcaggggcctccagcagctcttctgaggagcagagacgtgcatccgaaaccctgtctgggacgggctccgaggaagatacgccggcgtcggagccagctgcagctctccctcgtaaatccgggagagcagcagccacacggagtagaattcctcgtcccatcggcttaagaatgcctatgcctgttgctgcccagcagccagcttctcgctctcacggcgccgcgcccgcattagacacggctattacttctagactgcaactgcagaccccgcccgggtcggcaactgcggccgacttgcgtccaaaacagccaccaggcaggggtctcggacccggacgcgcacaggccggcgctcgtccccctgccccacgaagccccaggctgccggcctccaccagcgccgcaaggaacgcttccgcctcccccaggagccagtcattgtctaggcgtgagagcccctccccttcgcatcaggctagaccaggcgtgccacccccacggggcgtcccaccagccagggcccagcccgacggcaccccaagtccgggcggatccaaaaagggcccccgcggcaaactccaggcccagcgggccactactaagggaagggccggcggcgccgaaggcagagcaggagcccgttag

SEQ ID NO: 224736 - DNA, 1869 bp, Artificial Sequence
  derived and/or modified sequence
atggatttactaacaagggagaatgtagcgctcaaggtagaatctgctcagcagcccaagcaggtgctcaaaatggaggtggcagtattgaagaagcttcagggcaaggaccacgtttgccggttcatcggatgcggccggaatgagaaattcaattacgtggtgatgcagctgcaagggcgaaatctggcagacttgcggcgcagccaacctaggggtacattcactctctcaactacactcaggctaggcaagcaaattctggaatcaatagaagctatccatagcgtcgggtttcttcatcgcgacatcaaaccctccaactttgcaatgggcaggctgccctcaacttacaggaaatgttacatgctggactttggattggcccggcaatacactaacaccaccggagacgtgcgcccgcctcgtaacgtggccggcttcagaggaaccgtgagatatgcttctgttaacgcacataagaatagagagatgggccgtcacgatgacctgtggtcactgttctacatgctggtagagttcgcggttggacaactcccctggcgtaagatcaaagacaaggaacaggtgggcatgattaaagagaagtatgaacaccggatgctgctgaaacacatgcccagtgagttccacctgttcctcgaccacattgcgtccctagactactttacgaaaccagactatcagctgattatgagcgtgtttgagaattccatgaaggaacgcggaatcgccgagaatgaagccttcgactgggagaaggcggggactgacgccctgctttcaactagtaccagcacacccccacaacagaatacgcgtcaaactgccgctatgtttggcgtggtgaacgtgacacccgtacctggcgatctccttcgcgaaaatacagaagatgtgctgcagggcgaacacctcagcgatcaggaaaacgctccccccatactcccaggaagaccttccgagggccttggacctagcccacatctggtgccacacccgggcggtccagaggccgaagtgtgggaggagacagacgtcaatagaaataaactgcgcatcaatattggtaagagtccctgtgtcgaggaagaacagtccagaggaatgggtgttccatctagcccggtcagggcacctcccgatagtcccaccacgccagtccgctctcttcgttatcggcgcgtgaactctcctgaaagtgaacgcctgtctacagctgatgggcgggtcgagctgcctgagcggaggtcccggatggatctccccggatcaccttctaggcaggcttgctcatcccagcccgcccagatgttgtcggttgataccgggcatgccgaccgtcaggcttcagggaggatggacgtgtccgcctcagtggagcaggaggcattgagcaacgccttccggagcgtccctctcgccgaggaagaggactttgattccaaagagtgggtcataattgataaagagactgagctcaaggatttccccccgggcgctgaaccatccacgtctgggacgaccgacgaggagcctgaggaactgcggcctttaccggaggagggcgaggaacggcggcgcttaggtgctgaaccaccattcccactgactcccgctcttggtaccccacccagtactgaacgcgtgggaccccaccgcccaaccgagacagtgggcgggggccagaccctgggtgccttgcccccagctgtccagcccccggccactacaggggtactccgcgtgctgctactgcacgcgggggacggggctctgccaagtccaagacggcgacggttgctggggctgcttcggtttccccacagcgcccagccccttgggtag

SEQ ID NO: 224737 - DNA, 3966 bp, Artificial Sequence
  derived and/or modified sequence
atgcagtgcctggccgccgccctgaaggatgagaccaacatgtctgggggcggggagcaggccgacatcctgcctgccaactacgtggtgaaggaccgctggaaggtgctgaagaagattggaggcggcggctttggagagatctatgaggccatggacctgctgacccgggagaatgtggccctgaaggtggagagcgcccagcagcccaagcaggtgctgaagatggaggtggccgtgctgaagaagctgcagggcaaggaccacgtgtgccgcttcatcggctgcggcagaaatgagaagttcaactacgtggtgatgcagctgcagggcaggaacctggccgacctgcggcgcagccagccccggggcaccttcaccctgagcaccaccctgcggctgggcaagcagatcctggagagcattgaggccatccacagcgtgggcttcctgcaccgggacatcaagcccagcaactttgccatgggccgcctgcccagcacctacaggaagtgctacatgctggactttggcctggcccggcagtacaccaacaccactggagatgtgcggcccccaagaaatgtggccggcttccggggcaccgtgcgctatgcctctgtgaatgcccacaagaaccgggagatgggcagacatgatgacctgtggagcctcttctacatgctggtggagtttgctgtgggccagctgccctggaggaagatcaaggacaaggagcaggtgggcatgatcaaggagaagtatgagcacaggatgctgctgaagcacatgcccagcgagttccacctgttcctggaccacatcgccagcctggactacttcaccaagccagactaccagctgatcatgtctgtgtttgagaacagcatgaaggagcggggcattgctgaaaatgaggcctttgactgggagaaggccggcacagatgccctgctgagcaccagcaccagcaccccaccccagcagaacacccggcagacagctgccatgtttggagtggtgaatgtgacccctgtgcctggggacctgctgagagaaaatacagaagatgtgctgcagggcgagcacctgagtgaccaggagaatgccccacccatcctgcccggccggcccagcgagggcctgggccccagcccccacctggtgccccaccctgggggccctgaggccgaggtgtgggaggagacagatgtgaacagaaacaagctgcgcatcaacatcggcaagagcccctgtgtggaggaggagcagagccggggcatgggcgtgcccagcagccctgtgcgggcccccccagacagccccaccacccctgtgcgcagcctgcgctaccgccgggtgaacagccctgagagcgagcggctgagcacagcagatggccgggtggagctgcctgagcggcgcagcaggatggacctgcccggcagccccagccggcaggcctgcagcagccagcctgcccagatgctgtctgtggacaccggccacgccgaccggcaggccagcggccgcatggatgtgtctgcctctgtggagcaggaggccctgagcaatgccttccgctctgtgcccctggccgaggaggaggactttgacagcaaggagtgggtgatcatcgacaaggagacagagctgaaggacttccccccaggagctgagcccagcaccagcggcaccacagatgaggagcctgaggagctgcggcccctgcctgaggagggggaggagcggcggcggctgggcgctgagcccaccgtgcggccccggggccgctccatgcaggccctggccgaggaggacctgcagcacctgcccccccagcccctgcccccccagctgagccagggagatggccgctctgagaccagccagccccccaccccaggcagccccagccacagccccctgcacagcggcccccggcccaggagaagagaaagtgaccccaccggcccccagaggcaggtgttttctgtggcccccccatttgaggtgaatggcctgcccagggctgtgcccctgagcctgccctaccaggacttcaagagggacctgagtgactaccgggagcgggcccggctgctgaacagagtgcggcgggtgggcttcagccacatgctgctgaccaccccccaggtgcccctggcccctgtgcagccccaggccaacgggaaggaggaggaggaggaggaggaggaggatgaggaggaggaggaggaggatgaggaggaggaggaggaggaggaggaggaggaggaggaggaggaggaggaggaggaggaggaggaggaggccgctgctgctgtggccctgggggaggtgctgggccccaggagcggcagcagcagcgagggcagcgagaggagcacagacaggagccaggagggcgcccccagcaccctgctggctgatgaccagaaggagagccggggccgggcctccatggctgatggagacctggagcctgaggagggcagcaagaccctggtgctggtgtcccctggggacatgaagaagagccctgtgacagctgagctggccccagaccctgacctgggcaccctggccgccctgaccccccagcacgagcggccccagcccaccggcagccagctggatgtgtctgagcccggcaccctgagctctgtgctgaagtctgagcccaagcccccaggccctggggccggcctgggcgccggcaccgtgaccactggagtgggcggcgtggccgtgaccagcagccccttcaccaaggtggagaggacctttgtgcacatcgccgagaagacccacctgaatgtgatgagcagcggcggccaggccctgcggtctgaggagttctctgctggaggagagctgggcctggagctggccagtgatggaggagctgtggaggagggcgcccgggcccccctggagaatggcctggccctgagcggcctgaatggagctgagattgagggcagcgccctgagcggggccccccgggagaccccatctgagatggccaccaacagcctgcccaacggccctgccctggctgatggccctgcccctgtgagccccctggagcccagccctgagaaggtggccaccatcagccccaggagacatgccatgcctggcagccggcccaggagccgcatccctgtgctgctgtctgaagaagatactggaagtgagcccagcggcagcctgagcgccaaggagcgctggagcaagagggcccggccccagcaggacctggcccggctggtgatggagaagaggcagggccgcctgctgctgcggctggccagcggggccagcagcagcagcagcgaggagcagaggcgggccagcgagaccctgtctggaactggaagtgaggaggacaccccagccagcgagcctgctgctgccctgcccaggaagagcggccgggccgccgccaccaggagccgcatcccccggcccatcggcctgaggatgcccatgcctgtggccgcccagcagcctgccagccgcagccacggggccgccccagccctggacacagccatcaccagccggctgcagctgcagaccccacctggcagcgccacagctgctgacctgcggcccaagcagcccccaggccggggcctgggccctggccgggcccaggccggggcccggcccccagcccccaggagcccccggctgcctgccagcaccagcgctgccagaaatgccagcgccagccccaggagccagagcctgagccggcgggagagccccagccccagccaccaggcccggcctggggtgcccccaccccggggcgtgcccccagcccgggcccagccagatggcacccccagccctgggggcagcaagaagggcccccggggcaagctgcaggcccagagggccaccaccaagggccgggccggcggcgctgagggccgggccggggccaggtag

SEQ ID NO: 224738 - DNA, 1869 bp, Artificial Sequence
  derived and/or modified sequence
atggacctgctgaccagagaaaatgtggccctgaaggtggagagcgcccagcagcccaagcaggtgctgaagatggaggtggccgtgctgaagaagctgcagggcaaggaccacgtgtgccgcttcatcggctgcggcagaaatgagaagttcaactacgtggtgatgcagctgcagggcaggaacctggccgacctgcggcgcagccagccccggggcaccttcaccctgagcaccaccctgcggctgggcaagcagatcctggagagcattgaggccatccacagcgtgggcttcctgcaccgggacatcaagcccagcaactttgccatgggccgcctgcccagcacctacaggaagtgctacatgctggactttggcctggcccggcagtacaccaacaccactggagatgtgcggcccccaagaaatgtggccggcttccggggcaccgtgcgctatgcctctgtgaatgcccacaagaaccgggagatgggcagacatgatgacctgtggagcctcttctacatgctggtggagtttgctgtgggccagctgccctggaggaagatcaaggacaaggagcaggtgggcatgatcaaggagaagtatgagcacaggatgctgctgaagcacatgcccagcgagttccacctgttcctggaccacatcgccagcctggactacttcaccaagccagactaccagctgatcatgtctgtgtttgaaaattccatgaaggagcggggcattgctgaaaatgaggcctttgactgggagaaggccggcacagatgccctgctgagcaccagcaccagcaccccaccccagcagaacacccggcagacagctgccatgtttggagtggtgaatgtgacccctgtgcctggggacctgctgcgggagaacacagaagatgtgctgcagggcgagcacctgagtgaccaggagaatgccccacccatcctgcccggccggcccagcgagggcctgggccccagcccccacctggtgccccaccctgggggccctgaggccgaggtgtgggaggagacagatgtgaacagaaacaagctgcgcatcaacatcggcaagagcccctgtgtggaggaggagcagagccggggcatgggcgtgcccagcagccctgtgcgggcccccccagacagccccaccacccctgtgcgcagcctgcgctacagaagagtgaacagccctgagagcgagcggctgagcacagcagatggccgggtggagctgcctgagaggaggagcaggatggacctgcccggcagccccagccggcaggcctgcagcagccagcctgcccagatgctgtctgtggacaccggccatgctgaccggcaggccagcggccgcatggatgtgtctgcctctgtggagcaggaggccctgagcaatgccttccgctctgtgcccctggccgaggaggaggactttgacagcaaggagtgggtgatcatcgacaaggagacagagctgaaggacttccccccaggagctgagcccagcaccagcggcaccacagatgaggagcctgaggagctgcggcccctgcctgaggagggggaggagcggcggcggctgggcgctgagccccccttccccctgaccccagccctgggcaccccacccagcacagagcgggtgggcccccaccggcccacagaaacagtgggcggcggccagaccctgggcgccctgcccccagctgtgcagcccccagccaccactggagtgctgcgggtgctgctgctgcatgctggagatggagccctgcccagccccaggagaagaaggctgctgggcctgctgcgcttcccccacagcgcccagcccctgggctag

SEQ ID NO: 224739 - DNA, 3966 bp, Artificial Sequence
  derived and/or modified sequence
atgcagtgcctggccgccgccctgaaggacgagaccaacatgagcggaggaggagagcaggccgatatactgccagccaattacgtggtgaaggatcggtggaaagtgctgaagaagattgggggcggcggtttcggcgagatctacgaggctatggacctgcttactcgtgagaatgttgccctcaaggttgaaagtgcacagcagcccaagcaagttcttaaaatggaggtggccgtgcttaagaaattgcagggtaaagaccatgtatgtcgcttcatcggctgtggccgcaatgaaaagtttaactatgtggtgatgcagctccagggacggaacctagccgacctcaggcgaagccagcctagaggaacctttacactcagtacaaccttaagactggggaagcagattctcgaaagcatagaagcaattcattccgtggggtttctgcaccgagacatcaaaccatctaatttcgcgatgggaagattgccctccacatatcggaagtgctacatgctagactttggtcttgcccgccagtacactaacaccacgggcgacgttcggccacccaggaacgtcgcaggattcagggggaccgtgaggtatgcttctgtgaacgctcacaagaatcgagaaatgggcagacatgacgatttgtggtcactcttctatatgctggtggaattcgcagtgggccagttgccctggcgcaaaatcaaggataaagaacaggtcgggatgattaaggagaagtacgaacatcgaatgctactgaagcacatgccatccgaatttcaccttttcctggaccacatcgccagcctcgattactttaccaagcctgactaccagttgatcatgtctgtttttgagaacagtatgaaggaacgaggtatcgccgaaaacgaggcttttgattgggaaaaagcggggacagatgctctgctgagcacctccacttccacacctccccagcagaatacccgacagaccgccgcaatgtttggtgtggtaaacgtgacaccggtccctggtgatctgctgagggagaataccgaagacgtccttcagggtgaacacctgagcgaccaggaaaatgcccccccaatcctgcctgggcgtccaagcgaagggctcggtccgtctccacatctggtgcctcacccagggggccccgaggccgaagtatgggaggaaaccgatgtcaaccgcaataagctgcgtattaatatcgggaagagcccatgcgtggaagaggagcagtccagggggatgggtgtcccgtcctcccctgttcgagcaccgccagacagcccaacgactccagtgaggagcctcagatatcgccgagttaactcaccagagtccgaaagactttccaccgcagatggacgcgtcgagttgccagaaaggaggtcaagaatggacctgcctggctccccctctagacaggcctgcagtagccagcctgcacaaatgctgtctgtcgacactggacacgcggacagacaggcgagcggcaggatggatgtaagcgcttctgttgaacaggaagctttatcaaatgcttttcggtcagtccctctggctgaagaagaggacttcgactctaaggagtgggtcatcatcgataaagaaactgaattaaaggattttccacctggcgctgagccaagtacatccggcaccacagatgaagaacccgaagagttgcgcccattgcctgaggaaggcgaggagaggcgccggcttggcgcggaaccaacagttcggcctaggggacgttcaatgcaggcgcttgccgaggaggacttgcagcacttaccaccccagcctcttccaccacaactgtcacagggtgacggtaggagcgagacgtcccagccaccgacaccggggtctccaagccacagtcccctccactccggccctaggccgaggaggcgggagagcgacccgactggcccccagcggcaggtttttagcgtggcgccgccgtttgaagttaacggcctgccccgggccgttccactcagcctcccttatcaagacttcaaacgcgatctttctgattatagggagcgagcgcggctcctgaatagagtccgacgggttggtttctcccacatgttgctgactacgccacaggttcctctggctccagtgcagcctcaagccaacggcaaggaagaggaagaggaagaagaagaggacgaagaggaggaggaggaagatgaagaggaggaggaggaggaggaagaagaagaagaggaggaagaggaggaagaggaagaagaggaggaggctgcagcagcggtggctctgggcgaggtgcttggccccaggagcggaagtagctctgagggttcagaacggtcaacagacagatctcaggaaggcgctccctctacactcctcgcagacgaccaaaaagagtcgaggggccgggcgtcgatggccgacggagatcttgagccagaggaaggaagtaagacactagtgctcgtttcgcctggggatatgaaaaagtctcctgtcacggccgagctcgcgcctgatccagacctgggaactctcgcagctctcacaccacagcatgagagaccccagccgacgggttcacagttggacgtgtccgagccgggaaccctgtcttccgtcctgaagagtgagcccaaaccccccgggcccggagctggcctcggagccggaaccgtgaccacgggagtgggaggggtcgctgtcaccagtagtccgttcaccaaagtcgagaggacatttgttcacattgctgagaagacccatctaaacgtcatgagttcaggcggtcaagctctgcggtccgaagagttttcggctggcggagagttggggctggagttggcctccgacgggggagccgtggaggagggcgctcgagctcccctcgagaatggcctcgccctgagcggactcaatggtgctgagattgaaggatcagccttatcaggggccccccgggaaacccctagtgagatggccacaaacagtcttccaaatggcccagccctggcggacggccctgcccccgtcagccccctggagcctagccccgaaaaggtggccactatcagccccaggcggcatgcgatgccgggctcacggcctagatccagaattcccgtactcctatcagaagaggacacaggctctgaaccttctgggagcctgagcgccaaggagaggtggtcaaaaagggccagaccccagcaggatttggcaagactggtgatggagaaacgtcagggccgtctgctgctaagattagccagtggagcttcaagctcctcctctgaagagcagaggcgggcctctgagactctgagcgggacgggctccgaggaagatacccctgcctccgaacctgcagccgcactgccgagaaagtctggcagggccgccgccacacggagcagaattccccggccgataggcctgcgcatgccaatgccagttgccgcccagcagcctgcttcccggagtcacggagctgcgcctgccttggacaccgccatcacttctaggttgcaacttcagaccccaccggggagtgccactgctgccgacctgagacctaagcaacctcccggaaggggactaggacctggccgggcccaagctggagcgcgtccccccgcaccgaggtcgccccgtttgcccgccagtactagcgccgcacgaaatgcaagtgcttctcctcgcagccagtcattaagcagaagggaaagtccttcacctagtcaccaggcgcggccgggagtacctccaccacgtggggtccctccagccagggcccagcccgacggaacgccttcccctggcgggtcaaaaaagggccccagggggaagctgcaggcgcagagggccaccactaaggggagggcaggtggcgcggaggggagggcaggagctcggtag

SEQ ID NO: 224740 - DNA, 1869 bp, Artificial Sequence
  derived and/or modified sequence
atggacctgctgacccgggagaacgtggccctgaaggtggagagcgcccagcaaccaaagcaggtgctcaagatggaggtcgccgtcctaaaaaagctccaggggaaggaccacgtgtgcaggttcatcggctgtgggcggaatgaaaaattcaattatgtggtaatgcagttgcagggcaggaacctggctgacctgcggagatcccagccgaggggaacgttcacactcagtactacactgcgactcggcaaacaaatcctcgaaagtattgaagctatccattccgtgggattccttcaccgggatatcaaacctagtaattttgctatggggcgcttgccttctacatacaggaaatgttacatgttggactttggcttagctagacagtataccaacactacaggcgacgtgcggccaccccgcaacgtcgcagggtttagagggaccgtgcggtatgcctctgtgaatgctcataaaaatcgggaaatgggacgccatgacgacttatggtccttattctatatgctagtggaatttgccgttggccaattaccctggaggaaaattaaggataaggagcaggtgggaatgattaaagagaagtacgaacataggatgttgcttaagcacatgccttccgagtttcatctatttctcgaccatatcgcctcactggattacttcactaagccggactaccagttaatcatgagtgtgtttgagaatagtatgaaagaaaggggcatcgctgaaaatgaggcttttgattgggagaaggctggcacagacgccttgctgtcaaccagtactagtacccctccacagcagaacacaaggcagaccgctgccatgtttggcgtggttaacgtgacacctgtccccggtgacctcctgcgggagaacaccgaggacgtcctgcagggggaacacctgagtgatcaggagaacgcccccccaatactgcctggccggccctctgaagggctgggtccatcccctcatcttgtgcctcaccccggtggcccggaagccgaggtctgggaggagactgatgtgaataggaacaaacttcgcatcaacatcgggaagtccccgtgcgtggaggaagagcagtctcggggaatgggcgtcccctcgagcccagtgcgtgcgcctcccgattctcctacaacacccgttcggagcctcaggtaccgcagagtgaattctccagagagcgagcgtctgtctacagccgacggtagagtcgaattacctgagaggaggtctaggatggaccttcctggcagcccttctagacaggcatgtagcagccagcccgcacagatgctgtccgttgatactggccacgccgataggcaggcaagcggccgtatggatgtatctgcctctgtggagcaggaagcactatccaacgcattcagaagcgtgccgctggcagaggaggaggactttgactccaaagagtgggtgataatcgacaaagagacagaactaaaagacttcccccctggcgccgagcctagcacatctggcacgacagacgaagagcccgaggaattgcggcctctgccagaagagggtgaagaacgccgacgcttaggcgccgagccgccatttccgttgacgccagcactggggactccaccctctacggagcgcgtagggccacacaggcccacagaaactgtcgggggtggccagaccctcggcgcacttccgcccgccgttcagccccctgccactactggagtgctgcgcgtcctcctccttcatgccggtgacggcgccttaccgtccccacggcgcaggcggctattgggtctcctgaggttccctcactctgctcagccactgggatag

SEQ ID NO: 224741 - DNA, 3966 bp, Artificial Sequence
  derived and/or modified sequence
atgcaatgcctggccgcagcgctgaaggacgaaaccaatatgtccggagggggagaacaggctgatatactgcccgcaaattacgtggttaaagacagatggaaagttctgaaaaagattggtggaggtggatttggtgagatctacgaggctatggatcttttaacgcgtgagaacgttgccctcaaagtggagtccgctcagcagcccaagcaggtcctcaagatggaggtggctgtcctgaaaaaactgcagggaaaggatcacgtctgcaggtttatcggatgcggtagaaacgaaaagttcaattacgttgttatgcagctgcagggtcggaatctagccgacctgaggcggtcccagcctcggggaacttttacactgagtacgaccttacgcctcgggaagcaaatattagagtctatcgaggccattcactctgttgggtttctgcatcgagatataaagccatctaattttgccatgggacgcttgccttccacctaccgaaagtgctacatgctcgactttggtctggcgcgacagtacaccaacaccaccggtgacgtcaggcctccgagaaacgtggccggattccgaggaaccgtaaggtacgcttccgtcaacgctcacaagaacagggagatgggcagacacgacgatctgtggtctctgttttacatgctggtggaatttgccgttggacaactaccttggaggaaaatcaaagataaagagcaagttgggatgatcaaagagaagtatgagcaccggatgctgctgaagcatatgcccagcgaattccacctgttcttggaccatattgcaagtcttgactacttcacaaagcccgactatcagttgataatgtccgtctttgagaactcaatgaaggaacgcggaattgccgagaacgaggccttcgactgggagaaggccggtacagacgccttgctgtccacttccacctcgacgcctccccagcaaaatacgcggcagactgctgcaatgttcggagttgttaacgttactcccgtgcccggagacctgctgcgtgaaaataccgaagatgttctgcaaggggaacacctgagtgatcaagaaaacgcgcctcctatactgccaggaagaccaagcgagggtctcgggccttcacctcacctcgtccctcatcccggaggccctgaagctgaagtgtgggaggaaaccgacgttaataggaataagcttaggatcaatatcggaaagagcccttgcgttgaggaggaacagtccaggggaatgggcgtcccatcctcccctgttcgtgcccctcctgactcacccactacacctgtgcgttccctgcgttatcgaagggtcaactcccccgagagcgagcggctgagcacagcagatggaagggtggaacttcccgagcggagaagtagaatggacctgcctggaagtcccagccgacaggcttgctcatcgcagccagcacagatgctgagcgtggacacgggccatgcggaccggcaggcatcaggcagaatggacgtcagtgcctccgtggaacaagaggctctctctaatgcgtttcgtagtgtgcccttggcagaggaagaagattttgatagtaaggaatgggtaattatcgataaagagacagaactgaaggattttcctcctggggcagagcccagcacctctggaacaaccgatgaggaacctgaggaactgagacccctgccggaggaaggggaggaacgtcgcagactaggcgcagaacccactgtgagacccagaggcaggagcatgcaagcactggccgaggaggacctccagcaccttccaccacagcctctgcctccacagttgagccagggagacggtcgtagtgaaaccagtcagccaccaacgcctggcagtcctagccactccccgttacacagcgggccaaggccaagaaggagagagagcgatccaacaggaccacagcgccaggtcttttccgtggctcccccattcgaggtgaacggcctgcctcgggctgtgcctctttcattaccttaccaggactttaagagggatctgtccgattatcgggagcgagcccgtctattaaacagagtacgaagggtcggtttctctcacatgttactgacaacaccgcaagtccctttagccccagttcagccccaggctaacggtaaggaagaggaggaggaagaagaagaagatgaggaagaggaagaagaggacgaagaagaggaagaagaagaggaggaggaagaagaggaagaagaggaggaggaagaggaggaggaggaggctgctgctgctgtcgcacttggcgaggttctcggtccacggagtggctctagcagtgagggctccgagagatccactgaccggagccaggaaggagccccaagtactcttctggctgacgaccagaaggaatcccgcggaagagcctcaatggcggatggggacctggagccagaagaaggctccaagacactggtattagtgtcgccaggggacatgaagaaatctccagttactgctgaacttgcgccagaccctgatctgggaaccctcgctgcactcactccacaacacgaaagaccacagcccaccggtagccaactggatgtcagcgaacctggcaccctgagcagcgtccttaaatccgaacctaaacctcctggccctggcgcaggtctgggcgcagggactgtcaccacaggagtcggcggtgtggctgtcaccagctcccccttcaccaaagtggaaaggactttcgtgcacatcgcagagaaaacacacctcaatgtcatgtcaagcgggggtcaggcactgagatctgaagagttctccgccggaggcgagctgggactggagctggcaagtgacggaggcgctgtcgaggagggcgctcgcgctcctttggaaaatggactggctctaagtggcttgaacggagccgaaatcgaggggtcagccctgtccggggcacccagagagaccccctcagagatggcaactaactccctgcctaatggaccagcactagcggacgggcctgccccagtttctccactcgaaccttctccagagaaggtcgccacgattagcccaaggagacacgcaatgccgggatcacgccctcggagtaggatccctgtcctgcttagtgaggaggacacagggtcagaaccttccggctcgctgagcgccaaagaacggtggtcgaagcgggctaggccacagcaagatttagcgaggcttgtcatggagaagagacaggggaggctgcttctgaggttggcctctggggcaagcagctcttcgagcgaagagcagcgccgagcctctgaaacgttgagcggcaccggctccgaagaggatactcccgctagtgaacccgctgcagcccttcccaggaaatctggtagggctgctgcgactcggtccagaatccccaggccaatcggcttgcgcatgcccatgcctgtggccgctcagcaacctgccagtcggagtcatggagccgcacctgccctggacactgcgatcacatcacgcttgcagcttcagactccgcctggtagcgctaccgcagctgatctccgtccgaaacaacctcccggacgcggtctcggccctggaagggcacaagccggagctcgccctccagcccctcgctctcctaggctaccagctagcacctccgccgctcgcaacgcaagcgcgagtcccaggagtcagagcctgtctcgcagggaatcaccctccccgagccaccaagcgaggccaggggttcccccacccagaggcgtgccccctgcgagggcacaacccgacggaacaccttcacccggaggaagcaagaaggggccaagaggaaagctccaggctcagagggctacgacaaagggacgagcagggggagctgagggacgagcaggcgctcgttag

SEQ ID NO: 224742 - DNA, 1869 bp, Artificial Sequence
  derived and/or modified sequence
atggacctgctgactcgggaaaatgtggcactgaaggtggaaagcgcccagcagccaaaacaggtccttaagatggaggtggccgtgcttaagaaactgcagggaaaggaccatgtttgcagatttatcggttgcgggagaaacgagaaattcaactacgtcgtgatgcagctgcagggcagaaacctcgcagatctgcgtcggtcccagcctaggggtacctttacactgtccactaccctgagactgggtaagcagattctggagtctatcgaggccatccacagtgtcggctttctacaccgggacattaaaccctccaatttcgcaatgggccgactgccatcaacgtatagaaagtgttacatgttagattttggcctggctcggcaatacactaacacaaccggcgacgtgcgccctcccagaaacgtggccggattccgcggaacagtgaggtacgccagcgtcaatgctcacaaaaaccgcgaaatgggtaggcacgatgatctgtggtctctcttttatatgttggtggaatttgctgtcggccagctcccatggcgtaagatcaaggacaaagaacaagtcggaatgatcaaagagaagtatgagcaccgtatgcttttgaaacacatgccgagtgagtttcatctattcctcgatcatatcgccagtctggactatttcacaaaaccggactaccaactgatcatgtctgtctttgaaaacagcatgaaggaacggggtatcgctgaaaacgaggcctttgactgggaaaaggccggaaccgatgcgctgttgtctacctccacaagtacaccaccccagcagaatactagacaaaccgccgcaatgttcggggtggtgaatgttaccccagtgcccggtgaccttctgcgcgaaaatacagaagacgttttgcaaggagagcatttgagcgatcaggagaacgcccctccgattcttccagggaggccaagcgaaggtcttgggccatctccgcatctcgtcccccatccaggaggacccgaggccgaggtatgggaggaaaccgacgttaatcgcaataagctgcgtattaacatcggaaagagcccctgcgttgaggaggaacagtcccggggtatgggggtcccctctagccccgtacgcgctcctcctgatagccccacaacccccgtgcgtagtctaagatacaggcgggtaaattctccagagtccgagcggctctcaactgcagatggcagagttgaactgcctgaacgaagatcaaggatggacctccctgggtcgccatctcggcaagcctgttccagccagccagctcagatgcttagtgtggatactggccatgcagatcgccaagcaagtggcagaatggatgtgagcgcttcagttgagcaggaagccctgagcaatgcatttcgcagcgttccattggctgaggaggaggattttgatagtaaagaatgggtgattattgacaaggagaccgagcttaaagattttcccccaggcgcagagccttccacatccgggacaaccgatgaggaaccagaggagctgcggccattacctgaggaaggggaagagcgtcgaagactgggagcagagcccccattccctctgactcccgctttgggaactcccccttctaccgagcgtgtcggtccacacagacccactgaaacggtcggcggagggcagacactgggcgctttaccccctgccgttcagcctcccgcaaccacgggtgtgcttcgcgtgctgctcctgcatgcaggcgacggagctcttcctagccctcggcgaagaagattgttaggtctgctcagatttccccactctgcacaacccttgggatag

SEQ ID NO: 224743 - DNA, 3966 bp, Artificial Sequence
  derived and/or modified sequence
atgcagtgcctggccgccgccctgaaggacgagaccaacatgagcggcggcggcgagcaggccgacatcctgcccgccaactacgtggtgaaggacagatggaaggtgctgaagaagatcggcggcggcggcttcggcgagatctacgaggccatggacctgctgaccagagagaacgtggccctgaaggtggagagcgcccagcagcccaagcaggtgctgaagatggaggtggccgtgctgaagaagctgcagggcaaggaccacgtgtgcagattcatcggctgcggcagaaacgagaagttcaactacgtggtgatgcagctgcagggcagaaacctggccgacctgagaagaagccagcccagaggcaccttcaccctgagcaccaccctgagactgggcaagcagatcctggagagcatcgaggccatccacagcgtgggcttcctgcacagagacatcaagcccagcaacttcgccatgggcagactgcccagcacctacagaaagtgctacatgctggacttcggcctggccagacagtacaccaacaccaccggcgacgtgagaccccccagaaacgtggccggcttcagaggcaccgtgagatacgccagcgtgaacgcccacaagaacagagagatgggcagacacgacgacctgtggagcctgttctacatgctggtggagttcgccgtgggccagctgccctggagaaagatcaaggacaaggagcaggtgggcatgatcaaggagaagtacgagcacagaatgctgctgaagcacatgcccagcgagttccacctgttcctggaccacatcgccagcctggactacttcaccaagcccgactaccagctgatcatgagcgtgttcgagaacagcatgaaggagagaggcatcgccgagaacgaggccttcgactgggagaaggccggcaccgacgccctgctgagcaccagcaccagcacccccccccagcagaacaccagacagaccgccgccatgttcggcgtggtgaacgtgacccccgtgcccggcgacctgctgagagagaacaccgaggacgtgctgcagggcgagcacctgagcgaccaggagaacgccccccccatcctgcccggcagacccagcgagggcctgggccccagcccccacctggtgccccaccccggcggccccgaggccgaggtgtgggaggagaccgacgtgaacagaaacaagctgagaatcaacatcggcaagagcccctgcgtggaggaggagcagagcagaggcatgggcgtgcccagcagccccgtgagagccccccccgacagccccaccacccccgtgagaagcctgagatacagaagagtgaacagccccgagagcgagagactgagcaccgccgacggcagagtggagctgcccgagagaagaagcagaatggacctgcccggcagccccagcagacaggcctgcagcagccagcccgcccagatgctgagcgtggacaccggccacgccgacagacaggccagcggcagaatggacgtgagcgccagcgtggagcaggaggccctgagcaacgccttcagaagcgtgcccctggccgaggaggaggacttcgacagcaaggagtgggtgatcatcgacaaggagaccgagctgaaggacttcccccccggcgccgagcccagcaccagcggcaccaccgacgaggagcccgaggagctgagacccctgcccgaggagggcgaggagagaagaagactgggcgccgagcccaccgtgagacccagaggcagaagcatgcaggccctggccgaggaggacctgcagcacctgcccccccagcccctgcccccccagctgagccagggcgacggcagaagcgagaccagccagccccccacccccggcagccccagccacagccccctgcacagcggccccagacccagaagaagagagagcgaccccaccggcccccagagacaggtgttcagcgtggccccccccttcgaggtgaacggcctgcccagagccgtgcccctgagcctgccctaccaggacttcaagagagacctgagcgactacagagagagagccagactgctgaacagagtgagaagagtgggcttcagccacatgctgctgaccaccccccaggtgcccctggcccccgtgcagccccaggccaacggcaaggaggaggaggaggaggaggaggaggacgaggaggaggaggaggaggacgaggaggaggaggaggaggaggaggaggaggaggaggaggaggaggaggaggaggaggaggaggaggaggccgccgccgccgtggccctgggcgaggtgctgggccccagaagcggcagcagcagcgagggcagcgagagaagcaccgacagaagccaggagggcgcccccagcaccctgctggccgacgaccagaaggagagcagaggcagagccagcatggccgacggcgacctggagcccgaggagggcagcaagaccctggtgctggtgagccccggcgacatgaagaagagccccgtgaccgccgagctggcccccgaccccgacctgggcaccctggccgccctgaccccccagcacgagagaccccagcccaccggcagccagctggacgtgagcgagcccggcaccctgagcagcgtgctgaagagcgagcccaagccccccggccccggcgccggcctgggcgccggcaccgtgaccaccggcgtgggcggcgtggccgtgaccagcagccccttcaccaaggtggagagaaccttcgtgcacatcgccgagaagacccacctgaacgtgatgagcagcggcggccaggccctgagaagcgaggagttcagcgccggcggcgagctgggcctggagctggccagcgacggcggcgccgtggaggagggcgccagagcccccctggagaacggcctggccctgagcggcctgaacggcgccgagatcgagggcagcgccctgagcggcgcccccagagagacccccagcgagatggccaccaacagcctgcccaacggccccgccctggccgacggccccgcccccgtgagccccctggagcccagccccgagaaggtggccaccatcagccccagaagacacgccatgcccggcagcagacccagaagcagaatccccgtgctgctgagcgaggaggacaccggcagcgagcccagcggcagcctgagcgccaaggagagatggagcaagagagccagaccccagcaggacctggccagactggtgatggagaagagacagggcagactgctgctgagactggccagcggcgccagcagcagcagcagcgaggagcagagaagagccagcgagaccctgagcggcaccggcagcgaggaggacacccccgccagcgagcccgccgccgccctgcccagaaagagcggcagagccgccgccaccagaagcagaatccccagacccatcggcctgagaatgcccatgcccgtggccgcccagcagcccgccagcagaagccacggcgccgcccccgccctggacaccgccatcaccagcagactgcagctgcagaccccccccggcagcgccaccgccgccgacctgagacccaagcagccccccggcagaggcctgggccccggcagagcccaggccggcgccagaccccccgcccccagaagccccagactgcccgccagcaccagcgccgccagaaacgccagcgccagccccagaagccagagcctgagcagaagagagagccccagccccagccaccaggccagacccggcgtgcccccccccagaggcgtgccccccgccagagcccagcccgacggcacccccagccccggcggcagcaagaagggccccagaggcaagctgcaggcccagagagccaccaccaagggcagagccggcggcgccgagggcagagccggcgccagatag

SEQ ID NO: 224744 - DNA, 600 bp, Artificial Sequence
  derived and/or modified sequence
gcccccggcagactggccagcagacccccccccccccccgccagaagatggagactggccgcccccagatacagcagcgccagcggccccagcggccccgccgccagactgtgcgccgagacccagggcgaggcccccagaggccccagagccgtgggcggcagcggcggcgccggcgagcccagatggagcagaggccccgcccagagagagagactgctgggctgcagctgctgcttccccagcttcttcaccggcacctgcagcttcagaaccagctggagcgccttcaccctggagctgaccagcagcatccccgcccccctgccccccccccccgccgccctgagcctgagccagcagcagggcaagagcagaagaaaggaggccagcacccccctgacccccgccgaggcccccgcctacagcagagccagacccagaagacagggcagccccagcgccggccccgaggcccccctggccaccgacgagccccccccccagagaagaagcggcatcagaggcggcagcgccaacatcagaagcctgcagcccagcagcctgagacccagcgcccacagaggcagcgccctgtag

SEQ ID NO: 224745 - DNA, 600 bp, Artificial Sequence
  derived and/or modified sequence
gccccaggacgcttggcatccagaccgcctccaccaccagcacggaggtggaggttggctgcccctcggtatagcagtgcatctggccctagcgggcccgctgctcgtctgtgcgccgagacgcagggcgaggcacccagaggcccacgtgcagtggggggttccggcggtgctggcgaaccccggtggtcgcggggccctgcacaacgcgaacgcttgcttgggtgctcctgctgtttccctagttttttcacagggacctgctcattccggacttcatggagcgcattcactttagagctgacttcttccatccccgcccctctacctccgcctcccgctgctctgtcattgtcacaacagcagggaaaaagcagacgcaaggaagcgtcaactccactgacccccgcggaggcccccgcttactcccgtgcaaggccaaggagacagggcagcccgtctgcgggcccagaggcccctctggcaacggacgaaccaccgcctcaacgacggtctggaatccgtggtggaagcgcaaatattagatctctccaaccaagttcattgcggccttccgcacacagaggaagtgcgttgtag

SEQ ID NO: 224746 - DNA, 600 bp, Artificial Sequence
  derived and/or modified sequence
gcccctggccgcctggccagcaggcctcctcctcctccagcccggcgctggaggctggccgccccccgctacagcagcgccagcggccccagcggccctgctgcccggctgtgtgccgagacccagggcgaggccccccggggccccagggctgtgggcggcagcggcggggccggggagccccgctggagccggggccctgcccagcgggagcggctgctgggctgcagctgctgcttccccagcttcttcaccggcacctgcagcttccgcacctcctggagcgccttcaccctggagctgaccagcagcatcccagcccccctgcccccacctcctgctgccctgagcctgagccagcagcagggcaagagcaggaggaaggaggccagcacccccctgaccccagctgaggccccagcctacagccgggcccggccccggcggcagggcagccccagcgctggccctgaggcccccctggccacagatgagcccccaccccagaggaggagcggcatccggggcggcagcgccaacatccgcagcctgcagcccagcagcctgcggcccagcgcccaccggggcagcgccctgtag

SEQ ID NO: 224747 - DNA, 600 bp, Artificial Sequence
  derived and/or modified sequence
gctcctggcagactcgcctcccggccacctccccctcccgcaagacgatggcgccttgcagccccacgctacagtagtgcctctggcccaagcggtcccgctgctcgtctctgtgcagagacacagggcgaggctcctagaggccctagggccgtcggcggatctggaggcgctggcgagcccaggtggtcgcggggacccgcacagagagagcgactgctggggtgctcatgttgtttcccgtcatttttcacagggacctgcagctttcggaccagttggagtgcttttacgctggagttgacctctagcatccctgcacccctgcccccaccccctgctgcactctcgttgagccagcagcagggcaagtcccggagaaaagaggcttctactcccttaacaccggctgaagccccagcttacagcagggcgaggccaaggcggcagggctcaccgtctgcaggaccggaagcccctttggcgaccgatgagcctcccccacagcgacggtctggcatacgaggtggatccgcaaacattcgttccctgcagccttcttccctaagaccgtcagcccatcggggatcggctctgtag

SEQ ID NO: 224748 - protein, 845 aa, Artificial Sequence
  derived and/or modified sequence
MLSGVWFLSVLTVAGILQTESRKTAKDICKIRCLCEEKENVLNINCENKGFTTVSLLQPPQYRIYQLFLNGNLLTRLYPNEFVNYSNAVTLHLGNNGLQEIRTGAFSGLKTLKRLHLNNNKLEILREDTFLGLESLEYLQADYNYISAIEAGAFSKLNKLKVLILNDNLLLSLPSNVFRFVLLTHLDLRGNRLKVMPFAGVLEHIGGIMEIQLEENPWNCTCDLLPLKAWLDTITVFVGEIVCETPFRLHGKDVTQLTRQDLCPRKSASDSSQRGSHADTHVQRLSPTMNPALNPTRAPKASRPPKMRNRPTPRVTVSKDRQSFGPIMVYQTKSPVPLTCPSSCVCTSQSSDNGLNVNCQERKFTNISDLQPKPTSPKKLYLTGNYLQTVYKNDLLEYSSLDLLHLGNNRIAVIQEGAFTNLTSLRRLYLNGNYLEVLYPSMFDGLQSLQYLYLEYNVIKEIKPLTFDALINLQLLFLNNNLLRSLPDNIFGGTALTRLNLRNNHFSHLPVKGVLDQLPAFIQIDLQENPWDCTCDIMGLKDWTEHANSPVIINEVTCESPAKHAGEILKFLGREAICPDSPNLSDGTVLSMNHNTDTPRSLSVSPSSYPELHTEVPLSVLILGLLVVFILSVCFGAGLFVFVLKRRKGVPSVPRNTNNLDVSSFQLQYGSYNTETHDKTDGHVYNYIPPPVGQMCQNPIYMQKEGDPVAYYRNLQEFSYSNLEEKKEEPATPAYTISATELLEKQATPREPELLYQNIAERVKELPSAGLVHYNFCTLPKRQFAPSYESRRQNQDRINKTVLYGTPRKCFVGQSKPNHPLLQAKPQSEPDYLEVLEKQTAISQL

SEQ ID NO: 224749 - protein, 724 aa, Artificial Sequence
  derived and/or modified sequence
MLSGVWFLSVLTVAGILQTESRKTAKDICKIRCLCEEKENVLNINCENKGFTTVSLLQPPQYRIYQLFLNGNLLTRLYPNEFVNYSNAVTLHLGNNGLQEIRTGAFSGLKTLKRLHLNNNKLEILREDTFLGLESLEYLQADYNYISAIEAGAFSKLNKLKVLILNDNLLLSLPSNVFRFVLLTHLDLRGNRLKVMPFAGVLEHIGGIMEIQLEENPWNCTCDLLPLKAWLDTITVFVGEIVCETPFRLHGKDVTQLTRQDLCPRKSASDSSQRGSHADTHVQRLSPTMNPALNPTRAPKASRPPKMRNRPTPRVTVSKDRQSFGPIMVYQTKSPVPLTCPSSCVCTSQSSDNGLNVNCQERKFTNISDLQPKPTSPKKLYLTGNYLQTVYKNDLLEYSSLDLLHLGNNRIAVIQEGAFTNLTSLRRLYLNGNYLEVLYPSMFDGLQSLQYLYLEYNVIKEIKPLTFDALINLQLLFLNNNLLRSLPDNIFGGTALTRLNLRNNHFSHLPVKGVLDQLPAFIQIDLQENPWDCTCDIMGLKDWTEHANSPVIINEVTCESPAKHAGEILKFLGREAICPDSPNLSDGTVLSMNHNTDTPRSLSVSPSSYPELHTEVPLSVLILGLLVVFILSVCFGAGLFVFVLKRRKGVPSVPRNTNNLDVSSFQLQYGSYNTETHDKTDGHVYNYIPPPVGQMCQNPIYMQKEGDPVAYYRNLQEFSYSNLE

SEQ ID NO: 224750 - DNA, 2538 bp, Artificial Sequence
  derived and/or modified sequence
atgctgagcggcgtgtggttcctgagcgtgctgaccgtggccggcatcctgcagaccgagagcagaaagaccgccaaggacatctgcaagatcagatgcctgtgcgaggagaaggagaacgtgctgaacatcaactgcgagaacaagggcttcaccaccgtgagcctgctgcagcccccccagtacagaatctaccagctgttcctgaacggcaacctgctgaccagactgtaccccaacgagttcgtgaactacagcaacgccgtgaccctgcacctgggcaacaacggcctgcaggagatcagaaccggcgccttcagcggcctgaagaccctgaagagactgcacctgaacaacaacaagctggagatcctgagagaggacaccttcctgggcctggagagcctggagtacctgcaggccgactacaactacatcagcgccatcgaggccggcgccttcagcaagctgaacaagctgaaggtgctgatcctgaacgacaacctgctgctgagcctgcccagcaacgtgttcagattcgtgctgctgacccacctggacctgagaggcaacagactgaaggtgatgcccttcgccggcgtgctggagcacatcggcggcatcatggagatccagctggaggagaacccctggaactgcacctgcgacctgctgcccctgaaggcctggctggacaccatcaccgtgttcgtgggcgagatcgtgtgcgagacccccttcagactgcacggcaaggacgtgacccagctgaccagacaggacctgtgccccagaaagagcgccagcgacagcagccagagaggcagccacgccgacacccacgtgcagagactgagccccaccatgaaccccgccctgaaccccaccagagcccccaaggccagcagaccccccaagatgagaaacagacccacccccagagtgaccgtgagcaaggacagacagagcttcggccccatcatggtgtaccagaccaagagccccgtgcccctgacctgccccagcagctgcgtgtgcaccagccagagcagcgacaacggcctgaacgtgaactgccaggagagaaagttcaccaacatcagcgacctgcagcccaagcccaccagccccaagaagctgtacctgaccggcaactacctgcagaccgtgtacaagaacgacctgctggagtacagcagcctggacctgctgcacctgggcaacaacagaatcgccgtgatccaggagggcgccttcaccaacctgaccagcctgagaagactgtacctgaacggcaactacctggaggtgctgtaccccagcatgttcgacggcctgcagagcctgcagtacctgtacctggagtacaacgtgatcaaggagatcaagcccctgaccttcgacgccctgatcaacctgcagctgctgttcctgaacaacaacctgctgagaagcctgcccgacaacatcttcggcggcaccgccctgaccagactgaacctgagaaacaaccacttcagccacctgcccgtgaagggcgtgctggaccagctgcccgccttcatccagatcgacctgcaggagaacccctgggactgcacctgcgacatcatgggcctgaaggactggaccgagcacgccaacagccccgtgatcatcaacgaggtgacctgcgagagccccgccaagcacgccggcgagatcctgaagttcctgggcagagaggccatctgccccgacagccccaacctgagcgacggcaccgtgctgagcatgaaccacaacaccgacacccccagaagcctgagcgtgagccccagcagctaccccgagctgcacaccgaggtgcccctgagcgtgctgatcctgggcctgctggtggtgttcatcctgagcgtgtgcttcggcgccggcctgttcgtgttcgtgctgaagagaagaaagggcgtgcccagcgtgcccagaaacaccaacaacctggacgtgagcagcttccagctgcagtacggcagctacaacaccgagacccacgacaagaccgacggccacgtgtacaactacatccccccccccgtgggccagatgtgccagaaccccatctacatgcagaaggagggcgaccccgtggcctactacagaaacctgcaggagttcagctacagcaacctggaggagaagaaggaggagcccgccacccccgcctacaccatcagcgccaccgagctgctggagaagcaggccacccccagagagcccgagctgctgtaccagaacatcgccgagagagtgaaggagctgcccagcgccggcctggtgcactacaacttctgcaccctgcccaagagacagttcgcccccagctacgagagcagaagacagaaccaggacagaatcaacaagaccgtgctgtacggcacccccagaaagtgcttcgtgggccagagcaagcccaaccaccccctgctgcaggccaagccccagagcgagcccgactacctggaggtgctggagaagcagaccgccatcagccagctgtag

SEQ ID NO: 224751 - DNA, 2538 bp, Artificial Sequence
  derived and/or modified sequence
atgctcagcggagtgtggttcctctccgtgctgaccgtagccgggattttgcaaacggagagcagaaagaccgccaaagacatctgtaagattcgatgtctgtgtgaggaaaaagaaaatgtactgaatatcaactgtgagaacaagggctttactactgtatctctgctgcagccccctcagtaccgaatatatcagctctttctcaacggcaatctgctgacacgtctatatcccaacgagttcgtaaactactccaatgccgtgaccctacatcttgggaacaacggactccaagaaatccgcaccggggccttcagcggcctaaagactctgaaaaggctccatttgaacaacaacaaactcgagatcctaagagaggataccttcctcggcctcgaatcactggaatacttgcaagccgattacaattacatatccgccattgaggccggtgccttctcaaagcttaacaaactcaaggtgctgatcttgaacgacaatttgctcctctcactacccagcaatgtgtttagattcgtgttgctaacccacctggacctgcgggggaatcgcctgaaagtcatgccctttgccggggtgctggagcacattggtgggatcatggagatccagctcgaagagaatccgtggaattgcacctgcgacctgctccccctaaaggcgtggctggacacgatcactgtgtttgtgggtgagatcgtgtgcgagacgccatttcgcctgcacggaaaggatgtgacacagctgacccgccaagatctgtgtccaagaaagtctgctagcgactccagtcaaagagggtctcacgctgacactcatgttcaacggctatccccgacgatgaatcccgccctcaaccctacacgagcaccgaaagccagcagaccgccaaaaatgcgcaacagaccaactccccgggtgaccgtgtccaaggatcgccagtcgtttgggcccatcatggtttaccagacgaagtcccccgtgcccctgacctgtccaagctcttgtgtctgcacctcacagtcaagcgataatggactcaacgtgaattgccaggaaagaaagtttactaacatctcagaccttcagcctaaaccaacctctcctaaaaagttatatctgactgggaattaccttcagaccgtgtacaagaacgaccttctggagtatagctccctcgatctgttgcatttgggcaataatagaattgccgtgatacaagagggagcattcactaatctgacttcactgcgcaggctgtacctcaacggaaattatttagaggttctgtatccgtccatgttcgatggccttcagagcctgcaatacttgtacctggagtacaacgttatcaaagagatcaagccactgacgttcgatgcacttattaatcttcagctgctgtttcttaataacaatctcctgaggagcctgccagacaatatttttggtggcacggctcttacgcgccttaacctcaggaacaatcatttctcacacttgcccgtgaagggcgtcctggaccagttacctgccttcattcagattgatctccaggagaatccatgggattgtacctgcgatataatggggctcaaggattggacagaacacgccaattcacctgtgattatcaacgaggtcacctgtgagtcccctgccaagcatgccggcgaaatcctgaagtttctcggacgtgaggctatctgtccagactctccgaacctgtccgatgggactgttctgtccatgaatcacaacaccgatacacctcgctccctttctgtgagcccctcttcatatcccgaattacataccgaagtgccattatctgtactcattctcggactgcttgtcgttttcatcctgtctgtctgttttggggccgggctctttgtcttcgtgttaaaacgacggaaaggcgttccaagcgttccacgcaataccaataatctggacgtgagttcctttcaattgcagtatgggtcctacaacacagagactcatgataaaaccgatgggcacgtctacaactatatcccaccccctgtggggcagatgtgtcaaaatcctatatatatgcaaaaggagggagaccccgttgcctactacagaaacctccaggaattcagctacagtaacctggaagaaaagaaggaggagcccgccacccctgcttacacaatcagtgctacagaactgctcgaaaagcaggcaaccccccgggagccagagcttctatatcagaacatcgcagaaagggtgaaggaactgcccagcgccggattggtccattataatttctgcactctgccaaaaaggcagttcgctcctagctatgagagcaggcgacagaatcaggaccgcattaacaaaacagtgctgtacggcaccccccggaaatgctttgtggggcagtccaagccaaatcaccccctccttcaggcaaagccccagagcgagccagactacctggaagttcttgagaagcaaacagccatttcacagttatag

SEQ ID NO: 224752 - DNA, 2538 bp, Artificial Sequence
  derived and/or modified sequence
atgctgtcaggggtctggttcctgagcgttctcaccgtggctggaatactgcagaccgagtcacggaagaccgccaaggacatttgcaagatccgctgcctctgtgaggagaaagagaacgttttgaacattaattgcgagaacaaaggcttcacaactgtaagcctgttgcagcccccccaatatcgtatctaccagctttttcttaacggcaacctgcttacgagactctatccaaacgaatttgtcaactatagcaacgccgtcaccctccacctcggcaataatgggttgcaagagatcaggaccggcgccttcagtggcttgaagacactgaaacgattgcatctgaataacaataaactggaaattctccgcgaggacacttttttggggcttgaatctctggagtacttacaggctgattacaactacatctctgccatcgaggccggggcctttagcaagcttaataagctgaaggtcttgattctaaacgataacttgttactgagtctgccatctaatgtgttccgttttgtcttactgacccacctagacctgcgcgggaaccgtctcaaggtgatgccttttgccggcgtcttagaacacatcggaggaatcatggagattcagctcgaagaaaacccatggaattgcacctgcgacctgctgccccttaaagcatggcttgataccattactgtgtttgtgggcgagatagtttgcgaaacaccttttagactgcatggaaaagacgtgacacagttgacacgccaggacctctgtcccagaaaatcagcatcagactcttctcagaggggaagtcacgccgacactcatgtgcaacggcttagcccgactatgaatccagccctgaaccctacacgggcccccaaggcctccagaccccccaagatgaggaatagaccaactccccgcgtgaccgtgagcaaggaccgtcagagtttcggacctattatggtctatcagacgaagtcaccagttccactcacatgcccatcctcatgtgtgtgcacctctcagagcagcgataatggattgaatgtgaactgccaggaacgaaagttcacaaatatctcagatctacagccaaaacctacgagccccaaaaagctataccttacaggaaattatttgcaaaccgtatataaaaacgacctgctggagtacagctccctggacctacttcacctggggaataataggatcgcggtgatccaggagggggctttcacgaacttgacgtcactccggcggctgtatctcaacggcaactacctggaggtcttgtatccatctatgtttgacggactccagagccttcagtatctatacctggagtataatgtgataaaggaaatcaagcccttgacctttgacgctctgatcaatctgcagttgctgttccttaataacaacctccttaggtccctgccggacaacatattcgggggtaccgcacttacaaggctcaacttacgcaacaatcacttttctcacctcccggtaaaaggcgtgctggaccagcttccagcgttcatccaaatcgatctgcaggagaatccctgggactgcacctgtgacatcatgggactgaaggattggaccgagcacgccaatagtcccgtgattatcaatgaagttacctgtgagtctccagccaagcatgcaggagaaattctgaagtttctgggccgagaagcaatctgtccggatagtcctaacctcagtgacggaaccgtcctgagtatgaaccacaataccgacactcctcgctccttgtccgtctcaccctcctcctatcctgaactgcatacagaggtccctcttagcgtcttaatcttgggtttactggtggtgttcatcctgtctgtatgtttcggcgcgggtctgttcgtttttgttctgaagagaaggaaaggggtgccctccgtgcctagaaatacaaacaacttggatgtttcgtcattccaactgcaatacggtagctataatacagagacccacgacaagacggacggccatgtgtataattacattcccccacccgtgggccagatgtgccagaaccccatctacatgcagaaagagggagaccccgtcgcgtactacaggaacttgcaggaattctcctattccaacctcgaagaaaaaaaagaagagccggccaccccagcctatactatttcagccaccgagttgctagagaaacaggctacaccaagggaacccgaactcctgtatcaaaatatcgcagaaagagtgaaagaactgccctccgcgggtttagtgcactacaacttttgcacgttgcctaagcgccaatttgctccctcatatgaatcccgaaggcagaatcaggaccggattaacaagacagtgctctacgggactccaaggaaatgctttgtgggccagagcaagcctaatcatcccctcctccaggcaaaaccacagagtgaacccgattacctagaagtgctggagaagcagaccgcaatctcccagctgtag

SEQ ID NO: 224753 - DNA, 2538 bp, Artificial Sequence
  derived and/or modified sequence
atgctgtctggagtttggtttctgtcagtcctcaccgtcgcagggatactgcagaccgaaagcagaaagacagcaaaggatatatgcaagatccggtgtctctgtgaagaaaaagaaaacgtactgaatatcaattgcgagaacaaggggttcaccacagtgagtctgctccagccccctcagtaccggatttaccagttgtttctgaatggaaatctccttacccggctataccccaacgagtttgtcaactactctaacgctgtgactcttcacctgggaaacaacgggcttcaggagatcagaactggcgctttctctggactgaagaccctgaaaaggcttcatctaaataataacaagctggagatcctgcgggaggatacctttctaggtcttgaatccctcgagtacctgcaggcggactataactacatttccgctatagaagctggtgccttttcgaagcttaacaagctgaaagttctcatcctgaatgacaatctgctgttatcactaccaagcaacgtctttcgcttcgttttgcttacacatttggatctgcggggaaatcgactgaaagtgatgccgtttgcaggcgtcctggaacacattggcggcattatggaaatacagctggaagagaatccgtggaattgcacctgtgaccttcttcccctgaaagcatggttggatactatcactgtctttgttggggagatagtctgtgagacaccattccgcctgcacggcaaagatgtgacacagctgaccaggcaggatctgtgcccccgaaagagcgctagcgactcttcacagagagggtcccacgcagacacccacgtccagaggttgagcccaacaatgaatcccgctctaaatccgacaagggcccctaaggcctcccgcccaccaaaaatgcggaacagacctacccctcgcgtaaccgtctccaaggataggcagagctttgggcccattatggtgtaccagactaaaagtcctgtgcctctgacttgtccatcaagctgtgtctgcacctcacaaagtagtgacaatggtctgaacgtcaactgccaggaacgcaagttcacaaacataagtgacctccagcctaaacctaccagccctaaaaaactttatctgactggaaactacctgcagacagtgtacaaaaacgatctcctggaatatagctccctcgatctgttacacctcgggaataatagaatagctgtaatccaggaaggggccttcaccaacttaacaagcctcagaaggctgtacttaaacggtaactatctggaagtcctgtacccatccatgtttgatggcctgcagagtttgcaatatttgtacctcgagtacaatgtgatcaaggagattaaacccctcactttcgacgcactgattaatctgcaactgcttttcctaaacaataatttgctgaggtctttgcctgacaatattttcggcggcacggcacttacccgtctgaacctcagaaataaccacttctcacacctgccagtgaagggcgtcctggatcagttgccggcctttatccagatcgatctccaggaaaatccatgggactgtacatgcgatattatgggtttaaaagattggaccgaacacgccaatagcccagtaattatcaacgaggtcacttgtgaatccccggctaagcatgccggggaaattctgaaatttctgggacgggaagccatatgccccgactccccgaacctgtcagacgggaccgttctctccatgaatcacaatacggacacccctaggagtttgtccgtatccccatcaagctaccctgagctgcacacagaggtacccctgtccgtcctgatcctcggattgctggtagtgtttatcttaagtgtttgtttcggcgctggcttattcgtgttcgtacttaaacgtaggaaaggcgtaccgagtgtgccccggaacaccaacaacttggacgtctcttcctttcagctgcaatatggctcttacaatacagagacacatgataagacggacggtcatgtgtacaactatatccctccccctgtcggccagatgtgtcagaatcctatctacatgcaaaaggagggagaccccgttgcctactaccgcaacctccaggagttttcttactccaatctggaagaaaaaaaggaagaaccagctacacctgcttataccatcagcgctaccgaactacttgagaaacaagccacccctagggagcccgagttactctaccagaacattgcagagagggtgaaggaactgccctcagccggcttagtccactataacttctgcaccctgccgaagcgccaattcgctcccagctacgaatctaggagacagaatcaggatcggatcaacaagacagtgctgtatggcactccaaggaaatgcttcgtcggccagagcaagccaaatcatcccttgctccaggcaaaaccccagtccgagccggattatctagaggttctggaaaaacaaaccgctattagccagctttag

SEQ ID NO: 224754 - DNA, 2538 bp, Artificial Sequence
  derived and/or modified sequence
atgctgtctggagtgtggttcctgtctgtgctgactgtggccggcatcctgcagacagagagcaggaagacagccaaggacatctgcaagatccgctgcctgtgtgaggagaaggaaaatgtgctgaacatcaactgtgaaaataaaggcttcaccaccgtgtccctgctgcagcccccccagtaccgcatctaccagctgttcctgaatggaaacctgctgacccggctgtacccaaatgaatttgtgaactacagcaatgctgtgaccctgcacctgggcaacaacggcctgcaggagatcagaactggagccttcagcggcctgaagaccctgaagaggctgcacctgaacaacaacaagctggagatcctgcgggaggacaccttcctgggcctggagagcctggagtacctgcaggccgactacaactacatcagcgccattgaagctggggccttcagcaagctgaacaagctgaaggtgctgatcctgaatgacaacctgctgctgagcctgcccagcaatgtgttccgctttgtgctgctgacccacctggacctgcggggcaaccggctgaaggtgatgccctttgctggggtgctggagcacatcggcggcatcatggagatccagctggaggagaacccctggaactgcacctgtgacctgctgcccctgaaggcctggctggacaccatcaccgtgtttgtgggggagatcgtgtgtgagacccccttccggctgcacggcaaggatgtgacccagctgacccggcaggacctgtgccccaggaagagcgccagtgacagcagccagaggggcagccacgccgacacccacgtgcagaggctgagccccaccatgaacccagccctgaaccccacccgggcccccaaggccagccggccccccaagatgaggaaccggcccaccccccgggtgacagtgtccaaggaccggcagagctttggccccatcatggtgtaccagaccaagagccctgtgcccctgacctgccccagcagctgtgtgtgcaccagccagagcagtgacaatggcctgaatgtgaactgccaggagaggaagttcaccaacatcagtgacctgcagcccaagcccaccagccccaagaagctgtacctgactggaaactacctgcagacagtgtacaagaatgacctgctggagtacagcagcctggacctgctgcacctgggcaacaacagaattgctgtgatccaggagggcgccttcaccaacctgaccagcctgcggcggctgtacctgaatggaaactacctggaggtgctgtaccccagcatgtttgatggcctgcagagcctgcagtacctgtacctggagtacaacgtcatcaaggagatcaagcccctgacctttgatgccctgatcaacctgcagctgctcttcctgaacaacaacctgctgcggagcctgcctgacaacatctttggaggaacagccctgacccggctgaacctgaggaacaaccacttcagccacctgcctgtgaagggcgtgctggaccagctgcctgccttcatccagattgacctgcaggagaacccctgggactgcacctgtgacatcatgggcctgaaggactggacagagcacgccaacagccctgtgatcatcaatgaggtgacctgtgagagccctgccaagcatgctggggagatcctgaagttcctgggccgggaggccatctgcccagacagccccaacctgagtgatggcaccgtgctgtccatgaaccacaacacagacacccccaggagcctgtctgtgagccccagcagctacccagagctgcacacagaggtgcccctgtctgtgctgatcctgggcctgctggtggtgttcatcctgtctgtgtgctttggagctggcctgtttgtgtttgtgctgaagaggaggaagggcgtgcccagcgtgcccaggaacaccaacaacctggatgtgagcagcttccagctgcagtatggcagctacaacacagagacccatgacaagacagatggccacgtgtacaactacatccccccacctgtgggccagatgtgccagaaccccatctacatgcagaaggagggggaccctgtggcctactacagaaacctgcaggagttctcctacagcaacctggaggagaagaaggaggagcccgccaccccagcctacaccatcagcgccacagagctgctggagaagcaggccaccccccgggagcctgagctgctgtaccagaacattgctgagcgggtgaaggagctgcccagcgctggcctggtgcactacaacttctgcaccctgcccaagaggcagtttgcccccagctatgagagccggcggcagaaccaggaccgcatcaacaagacagtgctgtatggcacccccaggaaatgttttgtgggccagagcaagcccaaccaccccctgctgcaggccaagccccagagcgagccagactacctggaggtgctggagaagcagacagccatcagccagctgtag

SEQ ID NO: 224755 - DNA, 2538 bp, Artificial Sequence
  derived and/or modified sequence
atgctgagcggcgtgtggttcctgagcgtgctgaccgtggccggcatcctgcaaaccgagagccgcaagactgcaaaggacatttgcaagattaggtgtctgtgcgaagaaaaggagaacgtcctgaacatcaattgcgagaacaaagggttcacgaccgtgtctcttctgcaacccccccaataccgtatttaccaactttttctgaatggcaatctcctgacccgtctgtaccccaatgagttcgtcaattacagcaatgctgtaaccctgcatctgggtaataatgggcttcaggaaattcggaccggggctttttccggactgaagacacttaaaagattacaccttaacaataacaagctggagattctgcgcgaggatacattcttgggcctcgagtcattagagtatctgcaggctgactacaactacatctctgccatcgaagccggggcctttagcaagctgaataagctgaaggtgttgatccttaacgacaatctgctgttgtcactgcccagcaacgtgtttcggtttgtactgctgacgcatttagacctgcgcgggaaccggctgaaagtgatgccattcgcgggagtgctggagcacattggaggcatcatggaaatccagcttgaggaaaacccgtggaactgcacatgtgatctgctgcctctgaaggcatggttagatacaattacagtcttcgtcggagagattgtctgtgagaccccttttagattgcacggaaaggacgtgactcagctgactcgccaggatctttgtcctcggaagtcagccagcgattctagccaacggggctcccacgccgacactcacgtgcagcgcctgtcaccaaccatgaatcccgctctcaatccaaccagggcccccaaagcttccaggccccccaagatgagaaatcgccccacgccgagagttaccgtgagtaaagaccgtcagtcatttggcccaatcatggtatatcaaacgaagtcaccggtcccactgacctgcccctcctcttgcgtgtgtacaagccagtcttccgacaatgggctgaatgtcaactgccaagaacgcaagttcacgaacatctcagaccttcagcctaaaccaacttccccgaaaaaattgtacttgacaggaaattatctgcagaccgtctacaagaacgacctccttgagtactcctcactagatctgttgcacctcggcaataatcggattgcagttatccaagagggggcttttaccaacctgactagcctgcgccgcctctacctgaacggcaactatttggaagtgctgtatcctagcatgttcgatggtttgcagagccttcagtatctgtacttggagtacaacgtgattaaggaaattaaacctctgactttcgatgccctgattaacctgcagctgttattcctgaacaacaaccttcttagaagtttaccagataacattttcggaggcactgctttaactagactgaatttacgtaacaaccacttctctcatctgccagtaaagggagtgcttgatcagctccccgctttcattcagattgatttacaggagaacccgtgggattgcacttgcgacattatgggtctgaaagactggaccgagcacgcaaatagccctgtcattatcaatgaagtgacttgcgagtcccctgctaagcacgctggggagatcttgaaattcctgggaagggaggccatatgtccggattcccccaacctgtctgacggcaccgtgcttagtatgaatcacaatacagacactcccagaagcttgtctgtttctccctcaagctatcccgagctacatacggaggtgccgctgagcgtgcttatcttgggtctgctggtggtgtttatcctatctgtctgttttggcgcagggctgttcgtcttcgtgttaaaaagaagaaagggcgtgccctctgtgccccggaataccaacaacctcgacgtttcttcatttcagctgcaatacggatcatataacacggagacccacgataaaacagacggtcatgtgtacaactatatcccgccccccgtgggccagatgtgtcaaaatcctatttacatgcagaaggaaggtgacccagttgcatactatcgcaacctacaggaatttagctatagcaacctggaagagaaaaaggaggagccggctactccagcgtacactatttcagctaccgagctcctggagaaacaggcaacccccagagaacctgagctgctctatcagaacattgccgagagagtgaaggagttacccagcgccggactggtgcactacaacttctgcaccctgcctaaacgccaatttgcaccatcttacgaatccaggagacagaaccaggaccggattaataagaccgtcttatacggcacaccccgaaaatgctttgtcgggcagagcaagcccaaccatcccctcctccaagctaagccacagtccgagccggactacctggaggtcctcgagaagcaaacggccatctcacagctgtag

SEQ ID NO: 224756 - DNA, 2538 bp, Artificial Sequence
  derived and/or modified sequence
atgctgagcggcgtgtggttcctgagcgtgctgaccgtggccggcatactgcagactgagtctcgtaaaactgctaaggatatctgcaaaatccgctgtctgtgcgaagagaaagagaacgtgctgaacatcaattgtgagaataagggtttcaccacagtgagccttctgcagccaccgcaatatcggatctatcagctatttttaaatggcaatcttttaactaggctttacccaaacgagttcgtgaactatagcaacgcagttacgctgcacctggggaacaacggccttcaggagatacgaacaggggcattttcaggtctcaagacactgaagagacttcatcttaataacaacaaactcgagattctccgggaggataccttcttaggcttggagagcctggagtacctccaggctgattacaattacatctcagcaattgaggcaggggccttcagcaagctgaacaagctgaaggtcttaattcttaacgacaatctcttactcagcctgccttcaaacgtctttcgcttcgtgcttttgacacatctggatctccgaggaaatagattgaaagtgatgccatttgcgggggtgctcgaacacatcggagggatcatggaaatacagttggaggaaaacccttggaattgcacatgcgacttactgccactgaaagcttggctggacacgattacggtgttcgttggggagatcgtttgcgaaactccctttaggttgcacggcaaggatgtgacacagttaacccggcaagacctgtgccccagaaagtctgcaagtgactcctctcagagaggaagccacgcagacacccacgtccaacgactgagccccacaatgaaccctgccctgaacccaactcgcgccccaaaggcctccaggccgcccaagatgaggaacagacccactccacgcgtcactgtcagcaaggatagacagtcctttggcccaatcatggtgtatcaaactaagagccccgtgccgctgacctgcccgagttcatgcgtatgtaccagtcaatcgtctgacaacggtctgaacgtgaattgtcaagaacgtaaattcacaaacatctccgatctgcagcctaagcccacttcccccaaaaagctctatctgaccggtaactatttgcaaaccgtctataagaacgatctgctcgagtattcatcactagacctgctacaccttgggaacaaccgcatcgcagtgattcaagagggcgcctttactaacttaacctcgcttcgacgactttacttgaatggcaactacctggaggtgttgtatccctccatgtttgacggtttgcagtcactccaatacctctacctggaatataatgttatcaaggagattaaacccttgacctttgatgccctgatcaacctccagctgcttttcctgaacaacaacctgctaagatcactgcctgacaatatcttcggaggcactgcccttacgaggctcaacctgagaaataaccacttttcgcacttgcccgtcaaaggtgtcttggatcagctacccgccttcatccagatcgacctccaggagaacccttgggattgcacgtgtgacatcatgggccttaaagattggactgagcatgcaaacagtccagtcatcataaacgaggtcacttgtgaatcccccgccaagcacgcaggagaaattttgaaatttcttggacgcgaagctatctgcccagactctcccaatctgagtgacggcaccgtgctgtctatgaatcacaacaccgatacaccgcgctccctgtctgtctcacccagctcctaccctgagctccacactgaagtgccattatctgtgctcatcctgggcctgctggtcgtgtttatactgtctgtttgcttcggtgccggactttttgtttttgtactgaagcgcagaaaaggcgtgccttccgtgccaagaaacacgaataacctggacgtttcatcatttcagctgcagtacggctcgtacaatacagagacccacgataagactgacggccacgtgtataactatattcctccccctgtaggccaaatgtgtcaaaacccaatctacatgcagaaagagggagacccagtcgcatactacagaaatcttcaggaattctcctactcaaatcttgaggagaaaaaagaggagcccgctactccagcatatactattagtgccacagagttactcgagaagcaggccaccccgagagagccagaactgctgtaccagaacatcgcagagcgcgtgaaggagctaccttcagcaggtcttgtccactataacttctgcaccctgcctaagagacagttcgctcctagctacgagtcgaggagacagaaccaggacaggattaataaaacagttctctacggcactcccagaaagtgctttgtggggcaaagtaagcctaaccatccgttgctgcaggcgaagccacaaagcgagcctgactacctcgaggttttggaaaagcagacggcaatttctcaattgtag

SEQ ID NO: 224757 - DNA, 2538 bp, Artificial Sequence
  derived and/or modified sequence
atgctgagcggcgtgtggttcctgagcgtgctgaccgtggccggcatattacagaccgagagccgcaagactgcgaaagatatttgcaagatcaggtgcctgtgtgaggagaaggagaacgtactcaacattaattgtgagaacaagggctttacaacagtgtccctcctccagccacctcagtaccgtatctatcaactctttttgaatggaaatctgttgacacgcttgtacccgaacgaatttgtgaactattcaaatgctgtcacactacatctgggaaataatgggttgcaagagatccgtactggagcattctccggcctcaaaacacttaaaaggcttcacttaaacaacaataaactggagattttgcgcgaagacacattcctaggcctggagagcctggaatatctacaggccgactacaactacatctctgccatcgaggccggagcatttagcaaactgaacaagttaaaggtgttgatcttgaatgacaacctccttctgtctttaccgagtaacgtgtttcgatttgtcctgttgactcaccttgacctccgaggcaatcggctaaaggtgatgcctttcgctggcgtgttggaacacataggcggcatcatggagatccagcttgaggagaatccctggaactgtacctgcgatttgctgcccttgaaggcctggctggacacgataaccgttttcgtgggagagatcgtgtgcgagacgccttttcgcctccacgggaaggacgtgacccaactgacccgacaggacttatgtccaagaaaatccgcatctgattctagtcagagaggcagccacgcagacacccatgttcagagactgtcgcccaccatgaatcctgcactgaaccccacccgcgcccccaaagcatctcgcccaccaaagatgagaaatcgcccaactccgcgggttactgtatcaaaagacaggcaatcttttggcccgataatggtttatcaaacaaaaagtcccgttcctttgacgtgtcccagcagctgcgtttgcaccagccagtcttctgataacggtttgaatgtaaattgccaggaaagaaaattcacaaacatcagcgatcttcagcccaagcccacttccccgaagaaactttatctgaccggaaattacctacagaccgtgtataagaacgatttgctagagtactcctcgctggatctgctccatctaggcaataataggattgctgtgatacaggaaggagcatttacaaaccttacctctcttcggcgcttgtaccttaacggaaattacctggaagtactgtatcccagcatgtttgatggtctccagtcactgcagtatctgtatttggagtacaacgttataaaagagattaagccactgactttcgacgctctcatcaatctgcagctgctgttcttgaataataatctgctcaggtctcttcccgataatatcttcggcggcactgcactcactcgactcaacctgcggaacaaccacttctcccatttaccagttaagggcgtgctggatcaacttcctgcttttatacagatagacctgcaggaaaacccatgggattgcacttgtgacattatggggctgaaggattggactgagcacgcaaatagtccagtgatcatcaatgaagtaacgtgtgagagcccagcaaaacatgcaggcgagattctaaaattcctgggtagagaagccatctgtcccgacagtcccaatctgtctgacggaacagtcctgtccatgaaccacaacacggatactcccaggtctcttagtgtgagcccctcgtcttatcccgagctgcacactgaagtgcccctgagtgtgctgatactggggcttctcgtggtcttcatcttgtcggtgtgtttcggggccggtctgttcgtgttcgttcttaaacgcaggaagggggttccttctgtgccgcggaatacgaacaatctggatgtcagttcttttcaacttcagtacggttcttacaacactgaaacacacgacaaaaccgatggtcatgtgtacaactacattcccccccctgtcgggcagatgtgtcagaaccccatttatatgcaaaaggagggcgacccggtagcttactaccgaaacttgcaggaattcagctactcaaatcttgaggagaaaaaggaggaacccgctacaccagcttacaccatcagtgcaactgagctgttagaaaagcaggctaccccacgcgagcccgagctactttatcagaatattgccgagcgtgtcaaggagctgccttctgccggactggtacactataatttttgcactctcccaaaacggcagttcgcccccagctatgaatcacgtcgccagaaccaggatcggataaataaaacagttctttatggtacccccagaaaatgcttcgtgggtcagtccaagcccaaccaccccctcctccaggctaaaccccagtcggagccagactatttggaagtcttggaaaaacagaccgcaattagccaactatag

SEQ ID NO: 224758 - DNA, 2538 bp, Artificial Sequence
  derived and/or modified sequence
atgctcagcggtgtatggtttttgtccgttctcacagtggctggcatcttgcagactgaatcccggaaaactgccaaagacatctgtaagattcgctgcctatgcgaagaaaaggaaaacgtcctgaacatcaactgcgaaaacaaaggctttacaactgtgtccctgttgcagccaccccagtatcgcatatatcagctcttcctgaacggcaacttgctgacccggttgtatccaaatgaatttgtgaactattctaacgctgtcactctgcacctgggcaacaatggattacaggagatccggacaggcgcattcagcggtttaaaaactctgaagcgtcttcacttgaacaacaacaaactggaaattttacgtgaagacacattcctgggtctggagtccctggaatatctgcaagccgactacaactatataagtgctatcgaggcaggagccttttctaaactgaataaactcaaggtactaatactaaacgacaacttgttgcttagcctgccaagcaatgtcttccggttcgtcttactgactcacctagacttaagaggtaaccggctaaaggttatgcctttcgctggggtcctggagcatataggcggaattatggaaatacaattggaagaaaacccgtggaattgcacgtgtgatctgctgcccctgaaggcatggctggatacgataacggtctttgtcggagaaatcgtttgcgagacccccttcagactgcacggaaaagacgtgacacagctgactagacaggatctttgtcccaggaagagcgcgtctgactcttcacagcgcggtagccatgccgacacacacgtgcagagactctctcctacaatgaatcccgctctaaacccaacgcgcgctccgaaggcctctcgcccaccgaaaatgaggaatcggccaacgcccagagtgacagtatcaaaggacaggcagtctttcggtccgattatggtctatcagacaaaaagcccagtgcctctgacgtgtccctcaagttgtgtctgtacctcacagtcctcagacaatggactgaatgtgaattgccaggagcggaagtttaccaacatctcagatctgcagccaaaaccaacttctcccaagaagctgtatttaacaggcaactatctgcagactgtctataagaacgacctgctagaatactcctcgctggacttattgcacctgggaaataaccgcatcgctgtcatacaggaaggagccttcactaacttaacaagtctgaggcgattgtacctgaacggaaactatctggaggtgctctatccaagcatgtttgacggtctgcagtctctgcagtacctgtatctcgaatacaatgtgattaaagagataaaacctctgaccttcgacgccctcataaacctccagcttctgtttctcaacaacaacctgttgcgcagtctacccgacaacatttttggaggaaccgccctcactagactgaatttgaggaataatcatttttcacatttacccgtgaagggtgtcttggaccaactgcccgctttcattcaaatcgacctgcaggaaaacccctgggactgtacatgtgatatcatggggcttaaggattggaccgagcacgcaaacagcccagtaatcattaacgaagtgacttgcgagagtccggctaagcatgccggagagatccttaagtttctgggcagagaggctatttgccccgattctcctaatctgtccgacgggacagtactctccatgaaccacaacacagataccccacgatcactgagcgtttccccaagctcctacccagagctgcacactgaagtgcccctctctgtgcttatactgggactactcgtggtcttcatactctccgtatgcttcggagccggacttttcgtttttgtgttaaagcgcaggaagggcgtgccgagcgtccctcgcaataccaataatctcgacgtttcatctttccaattacagtacggaagttataacaccgaaactcatgataagaccgacggtcacgtttataattatatccctcctccagttggtcaaatgtgccagaatccgatctacatgcaaaaggaaggggatccggtagcttactatagaaatctgcaggagttctcatacagtaatctagaagagaaaaaagaagaaccagcaacccccgcttatactatcagtgccaccgaactactagagaagcaagctacgcccagggagcctgaattgctgtaccagaacatagccgaacgcgtaaaagagctgcccagtgcaggcctggtgcactataatttttgcacattgccaaagcgtcaattcgcaccctcctacgaaagccggcgacagaaccaagaccgcattaataagacagtgctctatggtacaccaaggaagtgcttcgtcggacagtctaaaccaaatcaccctctgctgcaagccaaaccgcagtctgagccagactatctggaggtcctggagaaacagaccgcaatctcacagctgtag

SEQ ID NO: 224759 - DNA, 2538 bp, Artificial Sequence
  derived and/or modified sequence
atgttatcgggtgtgtggtttctgtctgtcctcacggtggccggaatcctacaaacggaaagcagaaagactgccaaggacatttgcaaaatccgctgcctgtgtgaggagaaggaaaacgttctaaacattaactgtgaaaacaagggattcacaacggtatccttgctccaacctccgcaataccgcatctatcagttgtttcttaatggcaatctccttacaaggctgtaccccaacgagttcgtcaactactctaacgctgtgactctacaccttggtaataacgggctgcaggaaatccggaccggcgctttcagcgggctcaagacgctgaaaagacttcaccttaataataacaagcttgagattttgcgagaggacaccttcctggggttagagtcccttgaatatctccaggctgactacaactatatcagcgccatcgaggctggagcatttagcaagctgaacaagttgaaggtgctgattcttaatgacaacctcttgctgagtctcccgtccaacgtgtttcgcttcgtgttgctgacacacctggatctccgcggaaaccgcctgaaagtcatgccctttgccggagtcctggaacatatcggcggaataatggaaattcaacttgaggagaatccatggaactgcacttgcgatctcctacctctcaaagcttggctcgacaccataacagtgtttgttggtgagattgtgtgtgagacacccttccgtctgcacggtaaagacgtgacccaactgacaagacaagacctgtgtcccaggaaatctgcaagcgatagctcacagaggggctcacatgctgacacacatgtgcagaggctaagcccaaccatgaacccagctctgaatcctacgagagcaccgaaagctagtcggcctcctaagatgcggaataggccaaccccacgggtgacagtttccaaagaccggcagtctttcggtcctattatggtataccagacaaaaagtccagtgccccttacatgtcccagttcgtgtgtgtgtacctcccagagctccgacaacgggctgaacgttaattgccaagagcggaaattcacgaacatttccgacctccagccgaaaccaactagccctaaaaaactgtatctcacgggaaactatcttcagacagtatacaagaacgatctgctcgagtactcctctctcgatctgcttcacctgggtaataatcgcatcgctgttatacaagaaggcgcatttaccaatctaacctccctacgacgcctttatctgaatgggaactacctcgaagtgctctacccatccatgttcgacggccttcagtcactgcagtatctgtacctcgaatacaatgtcattaaggaaataaagccgctcacctttgacgctctcattaaccttcaactcctgttcctgaacaacaatttactacggagcttacctgacaatatcttcgggggaacagccctaacccgcttgaacttacgaaacaatcacttctcacacctcccagtgaagggtgtcttggaccagcttcctgcatttatccagatcgacctgcaagaaaacccctgggactgtacgtgtgacataatgggtctgaaagattggacagagcacgctaacagtcctgtaatcatcaacgaggtgacttgcgagtcccccgctaagcacgccggtgaaatccttaaattcctggggagagaggctatttgccctgactcacccaacttgagcgacggtacagtactctctatgaatcataataccgacacccctcgatcgctgagtgtgagcccatcgagttaccctgaattgcacaccgaggtcccattgtctgtacttatcctggggttacttgtggtctttatactcagcgtctgctttggtgctggcctgtttgtctttgtcctcaagcggcgaaagggggtaccatccgttccgagaaataccaataatcttgatgtttctagctttcagctacaatacgggagttacaataccgaaactcatgacaaaactgacgggcacgtttacaattacatcccacccccagtcggacagatgtgccagaatcccatctatatgcagaaagagggggatccggtcgcctactataggaatctgcaggagttctcctactccaaccttgaagagaaaaaagaggaacctgccacacctgcatacacaattagcgcaacggagctcctggagaaacaagctacacctagggagccagaattgctttaccaaaatattgccgagcgagtgaaggagctgccatctgccggtctcgtgcactataacttctgtacgctcccaaaacgccaattcgcccctagttatgaatctcgcagacagaatcaagaccggatcaacaaaaccgtcctgtacggaacccctaggaagtgctttgtggggcaaagtaagcccaatcaccccctcctgcaggcaaagccacagtccgaaccagactacttggaagtacttgagaagcagacagctatttcccaactatag

SEQ ID NO: 224760 - DNA, 2538 bp, Artificial Sequence
  derived and/or modified sequence
atgctgtcaggtgtttggtttctgagtgttctcaccgtggccggaatcctgcaaaccgaaagcagaaagaccgctaaggacatttgtaagatccggtgcctctgcgaggaaaaagagaacgttttaaacattaactgcgagaacaagggctttactacagtgagcctccttcagcccccacagtatcggatctatcagctgttcctaaatggcaacctcctcacccggctctatccgaatgaattcgtgaactactctaacgcagttaccctgcacttgggaaataatggactccaggagatccggacgggagcgttcagtggcttgaagactctcaaaagactccatctgaacaacaataagctcgaaattcttcgagaggacacttttctgggattggagagtctggaataccttcaagcagactataattacatcagcgcaattgaggctggcgctttctcaaagcttaacaagctcaaggtgctgatcctcaacgataacttactgctgagtctgccatccaacgtgtttcgatttgtgcttctgacccaccttgatcttcggggaaatcgattaaaagtgatgcccttcgcaggggtattggagcatattgggggaattatggagattcagctggaggaaaatccctggaactgcacctgtgacttgttgcccctgaaggcttggctcgataccatcaccgtattcgtaggggaaatcgtctgtgagactccttttcggctgcatggcaaagatgtgacccagctcacacgacaagatctttgtcctagaaagagtgcatcagactctagccagcggggatctcatgctgacacacacgtgcaacgattatcccctactatgaatccagccctgaaccctaccagggcacccaaagccagtcgcccaccaaaaatgaggaataggccaaccccacgcgtgacagtcagcaaagatagacagagttttgggcctattatggtttaccagaccaaatctcccgtgccattaacctgccccagtagctgcgtgtgtaccagtcagtcaagtgataacgggctcaatgtaaattgtcaggagagaaagttcactaacatctcagacctgcagccaaagccaacctcaccaaaaaaattgtatctcaccggaaactacctgcagactgtgtacaagaatgacctgttggagtacagttcactggatctgttgcatctggggaacaacaggatcgctgtcatacaagagggtgcctttaccaacctcacaagtttaagacgtctgtaccttaacgggaactaccttgaggtgctctatccatcaatgttcgacgggttacaaagcctccagtatctttatctggaatacaacgtgattaaagaaatcaagcccttgaccttcgatgcccttatcaacctacaactactgttcttgaataataacctcctccgatctctccccgacaatatttttggcggtacagccttaactcgtctgaatcttagaaacaaccacttcagccacctgcccgtaaagggcgtgctcgaccaactccccgcattcattcaaattgacttgcaggagaatccctgggattgtacgtgcgacattatggggctgaaggactggactgaacatgccaatagcccggtgataattaacgaggtgacatgtgaatcccccgcaaagcatgccggtgagatactgaagtttctgggcagagaggccatttgtcctgacagtccaaatctgagtgacggaactgttctctcaatgaatcataatactgacacgccaaggtcactcagtgtctcacccagttcgtaccccgagctccatacagaggttccactgtcggtgctgatcctgggccttctggttgtcttcatcctgagcgtctgtttcggagctggactttttgtgtttgtgcttaaacgacgcaaaggggtgccctcagtacctagaaacacaaataatctggacgtgagctcctttcagctccagtacgggtcctacaatacagagacgcatgacaaaaccgacggccacgtgtacaattacatcccaccacccgtggggcagatgtgccagaatcctatctatatgcaaaaggagggcgatcctgtggcctactatcgcaatttgcaggaattctcgtactctaacctagaggaaaaaaaggaagaaccggctaccccggcttatacaatatccgccactgagctgctggagaagcaggcaaccccacgggagcctgagctcctgtaccagaacatcgcggaaagggtgaaggagcttccatctgccggactggttcattataacttctgtaccctacccaagcgacagtttgcaccatcttatgagagcaggagacaaaatcaagaccgaatcaataaaactgtactctatggcactcctcgtaagtgctttgtgggccaatcaaaacctaaccacccactgttacaagctaaaccccagtctgagcccgactatctagaggttctcgagaaacaaaccgctatcagtcagctgtag

SEQ ID NO: 224761 - DNA, 4154 bp, Artificial Sequence
  derived and/or modified sequence
gttggaggtggagtagttcagaatcaactgacgcagccgggaattgagctttgcaaagccacttgcaaggaagggaagcatctgcccaaccctcccccaccgcgcgccctggatcctctgcctgccccctcccccgtgacgtcaccctagtcctgtcccggggagcctgcaaagcctctcagattcaaactgctagacgcactgctgccaccgccaccgaattggaaacgcgcgcccaggctccgtcgtcgccttcgcccgccgaccgggccagccggctctccgacctccctacagaatcgcaccccagtccctccctggcagctcggcttccctcagctccaactcttctcttccgctcctgcctcctgtcggatttttaatttctgcgcacccccagtcaaattaaatcaaccaacaaaaagcagggcatcccccctggaagcagcgtcttattttaccttgttctcccacttcctgaagatgctaaactcctggtggactgcagaggagagggattcagtcttctcctgatgtcgattgcgatttctgctgggagctcaagacgggcgagctgcccgagatctcttcgagataccccaggggaggaggagatgggcaggatttagtaggacaactcggttactaatgacttggcggctggctgcgaccccccgggaaatcaggtgcaagcatgtttgcctgtaggtacctgagttgacaccgaaggtgcctaaagatgctgagcggcgtttggttcctcagtgtgttaaccgtggccgggatcttacagacagagagtcgcaaaactgccaaagacatttgcaagatccgctgtctgtgcgaagaaaaggaaaacgtactgaatatcaactgtgagaacaaaggatttacaacagttagcctgctccagcccccccagtatcgaatctatcagctttttctcaatggaaacctcttgacaagactgtatccaaacgaatttgtcaattactccaacgcggtgactcttcacctaggtaacaacgggttacaggagatccgaacgggggcattcagtggcctgaaaactctcaaaagactgcatctcaacaacaacaagcttgagatattgagggaggacaccttcctaggcctggagagcctggagtatctccaggccgactacaattacatcagtgccatcgaggctggggcattcagcaaacttaacaagctcaaagtgctcatcctgaatgacaaccttctgctttcactgcccagcaatgtgttccgctttgtcctgctgacccacttagacctcagggggaataggctaaaagtaatgccttttgctggcgtccttgaacatattggagggatcatggagattcagctggaggaaaatccatggaattgcacttgtgacttacttcctctcaaggcctggctagacaccataactgtttttgtgggagagattgtctgtgagactccctttaggttgcatgggaaagacgtgacccagctgaccaggcaagacctctgtcccagaaaaagtgccagtgattccagtcagaggggcagccatgctgacacccacgtccaaaggctgtcacctacaatgaatcctgctctcaacccaaccagggctccgaaagccagccggccgcccaaaatgagaaatcgtccaactcctcgagtgactgtgtcaaaggacaggcaaagttttggacccatcatggtgtaccagaccaagtctcctgtgcctctcacctgtcccagcagctgtgtctgcacctctcagagctcagacaatggtctgaatgtaaactgccaagaaaggaagttcactaatatctctgacctgcagcccaaaccgaccagtccaaagaaactctacctaacagggaactatcttcaaactgtctataagaatgacctcttagaatacagttctttggacttactgcacttaggaaacaacaggattgcagtcattcaggaaggtgcctttacaaacctgaccagtttacgcagactttatctgaatggcaattaccttgaagtgctgtacccttctatgtttgatggactgcagagcttgcaatatctctatttagagtataatgtcattaaggaaattaagcctctgacctttgatgctttgattaacctacagctactgtttctgaacaacaaccttcttcggtccttacctgataatatatttggggggacggccctaaccaggctgaatctgagaaacaaccatttttctcacctgcccgtgaaaggggttctggatcagctcccggctttcatccagatagatctgcaggagaacccctgggactgtacctgtgacatcatggggctgaaagactggacagaacatgccaattcccctgtcatcattaatgaggtgacttgcgaatctcctgctaagcatgcaggggagatactaaaatttctggggagggaggctatctgtccagacagcccaaacttgtcagatggaaccgtcttgtcaatgaatcacaatacagacacacctcggtcgcttagtgtgtctcctagttcctatcctgaactacacactgaagttccactgtctgtcttaattctgggattgcttgttgttttcatcttatctgtctgttttggggctggtttattcgtctttgtcttgaaacgccgaaagggagtgccgagcgttcccaggaataccaacaacttagacgtaagctcctttcaattacagtatgggtcttacaacactgagactcacgataaaacagacggccatgtctacaactatatccccccacctgtgggtcagatgtgccaaaaccccatctacatgcagaaggaaggagacccagtagcctattaccgaaacctgcaagagttcagctatagcaacctggaggagaaaaaagaagagccagccacacctgcttacacaataagtgccactgagctgctagaaaagcaggccacaccaagagagcctgagctgctgtatcaaaatattgctgagcgagtcaaggaacttcccagcgcaggcctagtccactataacttttgtaccttacctaaaaggcagtttgccccttcctatgaatctcgacgccaaaaccaagacagaatcaataaaaccgttttatatggaactcccaggaaatgctttgtggggcagtcaaaacccaaccaccctttactgcaagctaagccgcaatcagaaccggactacctcgaagttctggaaaaacaaactgcaatcagtcagctgtgaagggaaatcatttacaaccctaaggcatcagaggatgctgctccgaactgttggaaacaaggacattagcttttgtgtttgtttttgttctccctttcccagtgttaatgggggactttgaaaatgtttgggagataggatgaagtcatgattttgcttttgcaagttttcctttaaattatttctctctcgctctcctcccctccttttttttttttttttttttttctttttcccttctcttcttaggaaccatcagtggacatgaatgtttctacaatgcatttcttcatagattttgtttatggttttgtttcttttttcttctttgtttttcagtgtgggagtgggaagaggagattatagtgactgaagaaagaataggcaaacttttcaaatgaaaatggatatttagtgtattttgtagaagatctccaaagatcttttgtgactacaacttcttttgtaaataatgatatatggtatttccatcgtcagttaccgagtatagccactgggtatcactactttgtgttaaagtgccttcgcactttaagtacattacttaaatgttgcttttagctttgataaattgaaaatattttaatgtgttgtatttttgaaattgaaaacactgtaaaatagattgatgtgtcagctatattaagtcaacgtacagtttgcttgagttatagaaaccagcctgtcatcaaatgattctagttctaggactttgtaggcttaactataaaatatttcctttcctctgggtttaagtgattttatttaagtcaactaaggggatttaacagtggactagaggtaataagccacctcagtcaggattaataattcattaataaaatatatttaaccc

SEQ ID NO: 224762 - DNA, 3995 bp, Artificial Sequence
  derived and/or modified sequence
gttggaggtggagtagttcagaatcaactgacgcagccgggaattgagctttgcaaagccacttgcaaggaagggaagcatctgcccaaccctcccccaccgcgcgccctggatcctctgcctgccccctcccccgtgacgtcaccctagtcctgtcccggggagcctgcaaagcctctcagattcaaactgctagacgcactgctgccaccgccaccgaattggaaacgcgcgcccaggctccgtcgtcgccttcgcccgccgaccgggccagccggctctccgacctccctacagaatcgcaccccagtccctccctggcagctcggcttccctcagctccaactcttctcttccgctcctgcctcctgtcggatttttaatttctgcgcacccccagtcaaattaaatcaaccaacaaaaagcagggcatcccccctggaagcagcgtcttattttaccttgttctcccacttcctgaagatgctaaactcctggtggactgcagaggagagggattcagtcttctcctgatgtgtttgcctgtaggtacctgagttgacaccgaaggtgcctaaagatgctgagcggcgtttggttcctcagtgtgttaaccgtggccgggatcttacagacagagagtcgcaaaactgccaaagacatttgcaagatccgctgtctgtgcgaagaaaaggaaaacgtactgaatatcaactgtgagaacaaaggatttacaacagttagcctgctccagcccccccagtatcgaatctatcagctttttctcaatggaaacctcttgacaagactgtatccaaacgaatttgtcaattactccaacgcggtgactcttcacctaggtaacaacgggttacaggagatccgaacgggggcattcagtggcctgaaaactctcaaaagactgcatctcaacaacaacaagcttgagatattgagggaggacaccttcctaggcctggagagcctggagtatctccaggccgactacaattacatcagtgccatcgaggctggggcattcagcaaacttaacaagctcaaagtgctcatcctgaatgacaaccttctgctttcactgcccagcaatgtgttccgctttgtcctgctgacccacttagacctcagggggaataggctaaaagtaatgccttttgctggcgtccttgaacatattggagggatcatggagattcagctggaggaaaatccatggaattgcacttgtgacttacttcctctcaaggcctggctagacaccataactgtttttgtgggagagattgtctgtgagactccctttaggttgcatgggaaagacgtgacccagctgaccaggcaagacctctgtcccagaaaaagtgccagtgattccagtcagaggggcagccatgctgacacccacgtccaaaggctgtcacctacaatgaatcctgctctcaacccaaccagggctccgaaagccagccggccgcccaaaatgagaaatcgtccaactcctcgagtgactgtgtcaaaggacaggcaaagttttggacccatcatggtgtaccagaccaagtctcctgtgcctctcacctgtcccagcagctgtgtctgcacctctcagagctcagacaatggtctgaatgtaaactgccaagaaaggaagttcactaatatctctgacctgcagcccaaaccgaccagtccaaagaaactctacctaacagggaactatcttcaaactgtctataagaatgacctcttagaatacagttctttggacttactgcacttaggaaacaacaggattgcagtcattcaggaaggtgcctttacaaacctgaccagtttacgcagactttatctgaatggcaattaccttgaagtgctgtacccttctatgtttgatggactgcagagcttgcaatatctctatttagagtataatgtcattaaggaaattaagcctctgacctttgatgctttgattaacctacagctactgtttctgaacaacaaccttcttcggtccttacctgataatatatttggggggacggccctaaccaggctgaatctgagaaacaaccatttttctcacctgcccgtgaaaggggttctggatcagctcccggctttcatccagatagatctgcaggagaacccctgggactgtacctgtgacatcatggggctgaaagactggacagaacatgccaattcccctgtcatcattaatgaggtgacttgcgaatctcctgctaagcatgcaggggagatactaaaatttctggggagggaggctatctgtccagacagcccaaacttgtcagatggaaccgtcttgtcaatgaatcacaatacagacacacctcggtcgcttagtgtgtctcctagttcctatcctgaactacacactgaagttccactgtctgtcttaattctgggattgcttgttgttttcatcttatctgtctgttttggggctggtttattcgtctttgtcttgaaacgccgaaagggagtgccgagcgttcccaggaataccaacaacttagacgtaagctcctttcaattacagtatgggtcttacaacactgagactcacgataaaacagacggccatgtctacaactatatccccccacctgtgggtcagatgtgccaaaaccccatctacatgcagaaggaaggagacccagtagcctattaccgaaacctgcaagagttcagctatagcaacctggaggagaaaaaagaagagccagccacacctgcttacacaataagtgccactgagctgctagaaaagcaggccacaccaagagagcctgagctgctgtatcaaaatattgctgagcgagtcaaggaacttcccagcgcaggcctagtccactataacttttgtaccttacctaaaaggcagtttgccccttcctatgaatctcgacgccaaaaccaagacagaatcaataaaaccgttttatatggaactcccaggaaatgctttgtggggcagtcaaaacccaaccaccctttactgcaagctaagccgcaatcagaaccggactacctcgaagttctggaaaaacaaactgcaatcagtcagctgtgaagggaaatcatttacaaccctaaggcatcagaggatgctgctccgaactgttggaaacaaggacattagcttttgtgtttgtttttgttctccctttcccagtgttaatgggggactttgaaaatgtttgggagataggatgaagtcatgattttgcttttgcaagttttcctttaaattatttctctctcgctctcctcccctccttttttttttttttttttttttctttttcccttctcttcttaggaaccatcagtggacatgaatgtttctacaatgcatttcttcatagattttgtttatggttttgtttcttttttcttctttgtttttcagtgtgggagtgggaagaggagattatagtgactgaagaaagaataggcaaacttttcaaatgaaaatggatatttagtgtattttgtagaagatctccaaagatcttttgtgactacaacttcttttgtaaataatgatatatggtatttccatcgtcagttaccgagtatagccactgggtatcactactttgtgttaaagtgccttcgcactttaagtacattacttaaatgttgcttttagctttgataaattgaaaatattttaatgtgttgtatttttgaaattgaaaacactgtaaaatagattgatgtgtcagctatattaagtcaacgtacagtttgcttgagttatagaaaccagcctgtcatcaaatgattctagttctaggactttgtaggcttaactataaaatatttcctttcctctgggtttaagtgattttatttaagtcaactaaggggatttaacagtggactagaggtaataagccacctcagtcaggattaataattcattaataaaatatatttaaccc

SEQ ID NO: 224763 - DNA, 4142 bp, Artificial Sequence
  derived and/or modified sequence
gttggaggtggagtagttcagaatcaactgacgcagccgggaattgagctttgcaaagccacttgcaaggaagggaagcatctgcccaaccctcccccaccgcgcgccctggatcctctgcctgccccctcccccgtgacgtcaccctagtcctgtcccggggagcctgcaaagcctctcagattcaaactgctagacgcactgctgccaccgccaccgaattggaaacgcgcgcccaggctccgtcgtcgccttcgcccgccgaccgggccagccggctctccgacctccctacagaatcgcaccccagtccctccctggcagctcggcttccctcagctccaactcttctcttccgctcctgcctcctgtcggatttttaatttctgcgcacccccagtcaaattaaatcaaccaacaaaaagcagggcatcccccctggaagcagcgtcttattttaccttgttctcccacttcctgaagatgctaaactcctggtggactgcagaggagagggattcagtcttctcctgatgtcgattgcgatttctgctgggagctcaagacgggcgagctgcccgagatctcttcgagataccccaggggaggaggagatgggcaggatttagtaggacaactcggttactaatgacttggcggctggctgcgaccccccgggaaatcaggtgcaagcatgtacctgagttgacaccgaaggtgcctaaagatgctgagcggcgtttggttcctcagtgtgttaaccgtggccgggatcttacagacagagagtcgcaaaactgccaaagacatttgcaagatccgctgtctgtgcgaagaaaaggaaaacgtactgaatatcaactgtgagaacaaaggatttacaacagttagcctgctccagcccccccagtatcgaatctatcagctttttctcaatggaaacctcttgacaagactgtatccaaacgaatttgtcaattactccaacgcggtgactcttcacctaggtaacaacgggttacaggagatccgaacgggggcattcagtggcctgaaaactctcaaaagactgcatctcaacaacaacaagcttgagatattgagggaggacaccttcctaggcctggagagcctggagtatctccaggccgactacaattacatcagtgccatcgaggctggggcattcagcaaacttaacaagctcaaagtgctcatcctgaatgacaaccttctgctttcactgcccagcaatgtgttccgctttgtcctgctgacccacttagacctcagggggaataggctaaaagtaatgccttttgctggcgtccttgaacatattggagggatcatggagattcagctggaggaaaatccatggaattgcacttgtgacttacttcctctcaaggcctggctagacaccataactgtttttgtgggagagattgtctgtgagactccctttaggttgcatgggaaagacgtgacccagctgaccaggcaagacctctgtcccagaaaaagtgccagtgattccagtcagaggggcagccatgctgacacccacgtccaaaggctgtcacctacaatgaatcctgctctcaacccaaccagggctccgaaagccagccggccgcccaaaatgagaaatcgtccaactcctcgagtgactgtgtcaaaggacaggcaaagttttggacccatcatggtgtaccagaccaagtctcctgtgcctctcacctgtcccagcagctgtgtctgcacctctcagagctcagacaatggtctgaatgtaaactgccaagaaaggaagttcactaatatctctgacctgcagcccaaaccgaccagtccaaagaaactctacctaacagggaactatcttcaaactgtctataagaatgacctcttagaatacagttctttggacttactgcacttaggaaacaacaggattgcagtcattcaggaaggtgcctttacaaacctgaccagtttacgcagactttatctgaatggcaattaccttgaagtgctgtacccttctatgtttgatggactgcagagcttgcaatatctctatttagagtataatgtcattaaggaaattaagcctctgacctttgatgctttgattaacctacagctactgtttctgaacaacaaccttcttcggtccttacctgataatatatttggggggacggccctaaccaggctgaatctgagaaacaaccatttttctcacctgcccgtgaaaggggttctggatcagctcccggctttcatccagatagatctgcaggagaacccctgggactgtacctgtgacatcatggggctgaaagactggacagaacatgccaattcccctgtcatcattaatgaggtgacttgcgaatctcctgctaagcatgcaggggagatactaaaatttctggggagggaggctatctgtccagacagcccaaacttgtcagatggaaccgtcttgtcaatgaatcacaatacagacacacctcggtcgcttagtgtgtctcctagttcctatcctgaactacacactgaagttccactgtctgtcttaattctgggattgcttgttgttttcatcttatctgtctgttttggggctggtttattcgtctttgtcttgaaacgccgaaagggagtgccgagcgttcccaggaataccaacaacttagacgtaagctcctttcaattacagtatgggtcttacaacactgagactcacgataaaacagacggccatgtctacaactatatccccccacctgtgggtcagatgtgccaaaaccccatctacatgcagaaggaaggagacccagtagcctattaccgaaacctgcaagagttcagctatagcaacctggaggagaaaaaagaagagccagccacacctgcttacacaataagtgccactgagctgctagaaaagcaggccacaccaagagagcctgagctgctgtatcaaaatattgctgagcgagtcaaggaacttcccagcgcaggcctagtccactataacttttgtaccttacctaaaaggcagtttgccccttcctatgaatctcgacgccaaaaccaagacagaatcaataaaaccgttttatatggaactcccaggaaatgctttgtggggcagtcaaaacccaaccaccctttactgcaagctaagccgcaatcagaaccggactacctcgaagttctggaaaaacaaactgcaatcagtcagctgtgaagggaaatcatttacaaccctaaggcatcagaggatgctgctccgaactgttggaaacaaggacattagcttttgtgtttgtttttgttctccctttcccagtgttaatgggggactttgaaaatgtttgggagataggatgaagtcatgattttgcttttgcaagttttcctttaaattatttctctctcgctctcctcccctccttttttttttttttttttttttctttttcccttctcttcttaggaaccatcagtggacatgaatgtttctacaatgcatttcttcatagattttgtttatggttttgtttcttttttcttctttgtttttcagtgtgggagtgggaagaggagattatagtgactgaagaaagaataggcaaacttttcaaatgaaaatggatatttagtgtattttgtagaagatctccaaagatcttttgtgactacaacttcttttgtaaataatgatatatggtatttccatcgtcagttaccgagtatagccactgggtatcactactttgtgttaaagtgccttcgcactttaagtacattacttaaatgttgcttttagctttgataaattgaaaatattttaatgtgttgtatttttgaaattgaaaacactgtaaaatagattgatgtgtcagctatattaagtcaacgtacagtttgcttgagttatagaaaccagcctgtcatcaaatgattctagttctaggactttgtaggcttaactataaaatatttcctttcctctgggtttaagtgattttatttaagtcaactaaggggatttaacagtggactagaggtaataagccacctcagtcaggattaataattcattaataaaatatatttaaccc

SEQ ID NO: 224764 - DNA, 2175 bp, Artificial Sequence
  derived and/or modified sequence
atgctgtctggggtgtggttcctgagtgtgctgaccgtagcaggaattctgcagacagagtcacgcaaaaccgctaaggatatctgtaaaataaggtgcctttgtgaagaaaaagagaatgtgctcaacattaactgtgaaaacaaagggttcacaaccgttagtctgctgcagccaccgcagtaccgaatatatcaacttttcctcaacggaaacctgcttacgcggctgtaccccaatgaatttgtgaattattccaacgccgttaccctgcacctgggcaacaacgggctgcaggagattcgtacaggcgcattttccggactcaagacccttaagagactccatctaaataacaacaagctcgaaattctgcgagaggatacttttttagggctggagtcgctagagtacctccaagccgactacaattacattagcgccatcgaagcgggggccttctccaagctcaataagctcaaggttctgatcctaaacgacaatctacttctttcattgccctccaacgtttttcgctttgtgttgttgacacatttagacctgcgcggcaacaggctgaaggttatgccattcgccggggtgcttgaacatattggggggattatggaaatacagctggaagagaacccatggaactgcacatgtgatctgctacctctgaaagcgtggcttgatactatcacagtatttgtgggcgaaattgtgtgcgagaccccctttaggctgcacggaaaggacgtaactcagctgacacgccaagatctgtgtcccaggaaaagtgccagtgacagtagccagcgtggatcccacgccgacactcacgttcaaagactgagcccaaccatgaatcctgcgcttaaccctacaagggcacccaaggcaagtaggccaccaaagatgcggaaccgaccgactccccgggttacagtgtccaaagatagacagtccttcggccccatcatggtgtatcagacaaaatcgccagtccctctgacttgtccaagctcttgtgtctgcacatcacagtcaagtgacaatggcctgaatgttaattgtcaggagagaaagtttacaaacataagcgatttacagcctaaaccaacaagccccaaaaagctctacctgactgggaactatctgcagaccgtgtacaagaacgatctgcttgagtattcatccctcgatttactgcacctgggtaataataggatcgccgtgatccaggagggagcgtttacaaacctcacgagcctccgcagactttatctgaacggcaactaccttgaggtgctgtatcctagcatgtttgatgggctgcagagccttcagtacctgtacctggagtataatgtcatcaaggaaattaagccgctcactttcgacgcactgataaatttacaactcctgttccttaacaacaacctcctgaggagcctacctgacaatatttttggcgggacagcgctcacacgtcttaatctccggaataaccactttagccatcttcctgtaaagggcgtgctggaccaactgcccgcttttattcagattgatcttcaagagaatccatgggactgcacatgcgatatcatggggctgaaggattggaccgagcacgcaaatagtccagttattataaacgaggtgacctgcgagtctcccgcgaagcacgctggcgagattctgaagttcttggggagggaggctatttgtcccgactctcccaatctgtccgacggtacagtgctgtccatgaaccacaacacggatacaccccgctctctctcagtgtccccaagctcttacccagagctgcacaccgaagtgcctctgtctgtcctgattttgggcctgttagtcgtcttcattctctcagtgtgttttggggccgggctgtttgtcttcgtgctgaaaagacggaaaggggtcccctctgtgcccagaaacacgaacaacctcgacgtctcttcattccagctgcagtatggaagttataacacagagacacacgacaagacggacgggcacgtgtataattacatccctccgccggtcggacaaatgtgccagaatcccatttacatgcaaaaagagggcgatcctgtagcctattatagaaatttgcaagagttttcctactcaaaccttgaatag

SEQ ID NO: 224765 - DNA, 2538 bp, Artificial Sequence
  derived and/or modified sequence
atgcttagcggagtatggttcctctcagtgttaactgttgccggcatccttcaaacagagtcccggaagaccgctaaggacatttgtaagatcaggtgcttatgtgaggagaaagagaatgttctcaatatcaactgtgaaaataaaggtttcaccaccgtgtctcttctgcaacctccacagtaccggatttaccagctgttcttaaatggcaatctcctgacccgtctgtacccaaatgagtttgtcaactacagtaacgccgtaacgctccatctgggcaataacgggctgcaggagatccggaccggcgcattctccggtcttaaaacactcaaaaggctgcacttaaacaacaataaactggagatactccgagaagacaccttcttgggcttggagtctctggagtacctgcaggctgattataattacataagtgccattgaagctggggcttttagtaaactcaacaagctaaaagtcttaatcctgaatgacaacctgttgctgagtctcccgtctaacgttttccggtttgtgctcctgacccacctcgatcttcggggtaacaggctcaaagtcatgccattcgccggagtcctggaacacatcgggggcatcatggaaattcagcttgaagaaaacccctggaactgcacctgcgacctgctcccactgaaggcgtggctggacaccattacagtgttcgtgggagagatagtgtgcgagaccccattccggttgcacggtaaagacgtgacccagctgaccaggcaggacctctgccctaggaagagcgcgtctgactccagtcaaagaggatcccacgctgacacacatgtacagcgcctcagccccacaatgaatcccgcactgaatccaacccgggcacccaaagcctccagaccacctaagatgagaaatagaccaactccaagagttactgtgtctaaggaccgccagagcttcggacccatcatggtctatcagacaaagtcccccgtacctctcacctgtccgagctcatgcgtatgcacgagccagtcttcggataacggcctgaacgtaaattgccaagagaggaagtttaccaacatttctgacttgcagcctaagcctaccagtcccaagaaattgtacttgaccgggaactacctccagacagtttacaagaacgacctcctcgagtactccagcctggacttgctgcatctgggtaacaaccggattgccgtgattcaagaaggcgccttcacaaatctgacatccctgcgacgcctgtatctcaatggcaactacctggaagttctttacccaagcatgttcgacgggctccagtccctccagtatctctacttagagtacaacgtgatcaaagagatcaagccactgacgttcgacgccctgatcaacttgcagctgctcttcttgaacaacaacttgttacgaagtctacccgataacatattcggcgggactgctctcaccagactcaatctgcggaataatcatttctctcacctgcccgtgaagggcgtgctcgatcagctcccggcatttattcagatcgatctgcaggagaatccatgggactgtacttgtgacattatgggtctcaaggactggacggagcacgctaactcccctgtcattatcaatgaagtgacatgtgaatcaccggccaagcacgcaggggagatcctgaaatttctcggccgtgaagccatttgcccagatagtcccaacttgagcgacggtacggtgctgagcatgaaccacaataccgacaccccacgctccctgtccgtgagtccatcttcctatccggaactacacacagaagttcccttgtcagttctcattcttgggcttctggtcgtgttcattctgtccgtgtgcttcggtgcaggactcttcgtcttcgttctaaagagacggaaaggtgtacccagtgtaccaaggaacaccaacaacctggacgtgtctagcttccagttgcaatatggttcatacaacacggaaacccatgataaaacggatggccacgtctacaactatatcccaccccctgtaggtcaaatgtgccagaacccaatttatatgcaaaaagaaggtgacccagtggcctattatagaaatctccaagagttctcctattctaatctcgaggaaaaaaaggaggagcctgccaccccggcatacactatttctgcaactgagttacttgagaaacaagcaactccgagagagcctgagttactctaccaaaacatcgcggagcgtgtgaaagaactgccaagcgcaggactggtccactacaatttctgcacactgcctaaacgacagttcgcaccatcatatgagtcaagaagacagaatcaggatcgcataaacaaaaccgtgctgtacggtaccccccggaagtgttttgtggggcagtccaaacctaatcacccgctgcttcaagccaaaccccaatctgagccagactatctcgaagtgctggaaaagcaaaccgctattagtcagctgtag

SEQ ID NO: 224766 - DNA, 2538 bp, Artificial Sequence
  derived and/or modified sequence
atgctatccggagtgtggttcctgagtgtgctgactgtggctgggattctgcagacagaatcacgaaagaccgctaaggacatctgcaaaatccggtgcctgtgtgaggagaaagagaacgtcctgaacatcaactgcgagaacaagggattcaccacggtatcactcttgcaaccccctcagtacaggatctatcagctctttttaaatggaaatctcttgacaagactatatcctaatgaattcgtgaactattcaaacgccgtaactttgcacctgggcaacaacgggctgcaagagatacggaccggggcatttagcggcctgaaaacgttaaagcggcttcacctcaacaacaataagcttgagattctgagggaggataccttcctcggactcgaatccctggagtacctgcaggcagactacaattatatctcagccatcgaggccggtgctttttcaaaactcaataaactgaaagttctcatcctgaacgacaacctcctgctttcccttccaagcaacgtgtttcgatttgtgcttctcactcacctcgatctgagagggaatcgccttaaagtgatgccatttgctggcgtgctcgagcacatcggcgggataatggaaattcagttagaagaaaacccctggaactgtacatgcgatctgttgccgctgaaggcctggctggacaccattaccgttttcgtcggagaaattgtctgtgagaccccattcagactccatggaaaagacgtcacacagttaactagacaggacctgtgcccgcgtaagtcagctagcgatagtagtcaacgaggatcccacgctgatacgcatgtccagcgcctctcccccaccatgaacccggccctgaaccctactcgggcaccgaaagcctcacgcccaccaaagatgaggaatcggccgacccccagggtgaccgtgtctaaagaccggcagagcttcgggcccatcatggtctaccagactaaaagtcccgtgccactgacgtgcccatcaagctgcgtttgcaccagccagtcctcagataatggcctgaacgtgaattgccaggagcgcaaattcacaaacatcagcgacctccagcccaaacctacatcaccaaagaaactctatctcaccgggaactacttacagaccgtatacaaaaatgatctgttagagtatagttcccttgacctcctgcacctgggaaataaccgcatagccgtgattcaggagggcgcctttaccaatcttacttcccttcgtcggttgtacctgaacgggaactaccttgaagtgctctatcccagcatgtttgatggattgcagtccctgcaatacctctatctcgagtacaacgtcataaaagaaatcaaacccctgacctttgacgcattgattaatttacagcttctctttctgaataacaacctgctccgcagcctgcccgacaatatctttggcggtaccgcacttacacgtctgaacctgaggaataaccacttttcacacctcccagtcaagggtgttcttgaccaactgcccgcctttattcagattgatctgcaggagaatccctgggattgcacatgtgacataatgggactgaaagattggaccgaacacgccaattccccagtgattatcaatgaagtgacctgcgaatcccctgcaaaacacgcaggcgagatcttgaagttccttggacgtgaggctatctgccccgacagcccgaatttgagcgacggcacagtgctgagcatgaaccacaacaccgatacacctcggtctcttagcgtgagtccgagcagttaccctgagttgcatactgaggtgcccctgtctgtgctgattctaggattactggtggtgttcatactctctgtctgctttggcgcaggactgttcgttttcgtgctaaagcgaagaaaaggagtgccctcagtgccccgcaacacaaataaccttgatgtgagttcctttcagctgcagtacggttcatacaatacagaaacccacgacaagaccgatggacatgtttacaactatatcccccctccggtaggtcagatgtgtcagaaccccatatacatgcagaaagaaggtgaccccgttgcttattaccgcaacctgcaggagttcagctacagcaatctcgaggagaagaaggaggagcccgccacccctgcttataccatctcagccacggaattactggagaaacaggccactcctcgagaacccgagctgctttaccagaatatcgccgagcgagtgaaagagctgccttctgctggcctcgttcattataacttctgtacattgccgaagagacagtttgcccccagttatgagagtcggcgacaaaatcaggacaggattaacaaaactgtgctgtacggcacccccaggaagtgttttgtgggtcagtccaaaccaaatcatcctctacttcaggctaaacctcagtccgagccggactatctggaagtgcttgagaaacagactgcgatctcgcagttatag

SEQ ID NO: 224767 - DNA, 2538 bp, Artificial Sequence
  derived and/or modified sequence
atgctcagtggtgtgtggttcctgtctgtgctgaccgtggctggcatcctgcaaacagagtctcgaaagaccgcaaaggatatctgcaagatcaggtgtttgtgtgaagagaaggaaaacgtgttaaacattaactgtgagaacaagggcttcactaccgtgagtctcctgcagccgccacagtataggatttatcaactgttcttgaatgggaatctcctcacgcgcctgtatccaaacgaatttgtgaactactccaatgcagtgaccttgcatctcgggaacaatggactgcaggaaataaggacaggggcattctcaggcctgaagaccttgaagaggctacacttgaataacaacaagctagagatattaagagaagacacctttctgggcctcgagagcctcgaatatttgcaagctgattacaattatataagtgctatcgaagctggcgcctttagtaagctgaacaagctgaaagtgctgattcttaatgacaatcttctcctgagcctgccctcaaacgtgtttagattcgttttactgacccacctagatctccggggcaaccgtctcaaggtaatgcctttcgctggtgtacttgagcacatcggagggattatggaaatccagctggaagaaaatccttggaactgcacttgcgatctgctgcctctgaaagcgtggctcgacacaatcactgtctttgtgggagagattgtttgtgaaacccccttccgactgcatgggaaagacgtaactcagctgaccaggcaggacctgtgcccccggaagtcagcgagcgatagttcacaacggggatcccacgcggacactcatgtgcaaagactgtcgccaactatgaatcctgctctgaatccgaccagagcccccaaggcatctcgacccccaaagatgcgtaatcgccccaccccacgagttactgtcagcaaggaccggcaatctttcggccccatcatggtgtaccagacaaagagtccggttcctctcacctgcccctcaagttgcgtatgcacctcacaatcttctgacaacggtctcaatgtgaactgtcaggagagaaagtttaccaatatatctgatctgcagcccaaacccaccagccccaaaaagctgtacctgaccggcaattatctccagacagtgtacaagaatgatctgttagagtatagttccctcgacttactgcatctgggtaataatcggattgcagttatacaggagggtgctttcaccaatctgacaagtctgcgccggctctatctgaatgggaactatctggaagtgttgtacccgtcaatgtttgacgggttgcaatccctgcagtacctctatcttgaatacaacgtgattaaggagattaagccactgactttcgacgcattaatcaacctgcaactgctgtttctaaacaacaacctattgcgatcactgcccgataacatcttcggcggcacggccctgactcgactcaaccttcgtaataatcatttctcccacctgccagttaaaggggtcctcgatcagctgccagcatttatccagatcgatctgcaagagaatccttgggactgcacctgtgacatcatgggcctcaaagactggactgagcacgccaacagcccagtgattataaatgaggtcacctgcgaaagccccgccaagcacgctggtgaaattttgaagttcctgggacgcgaagcaatctgtccggacagccctaacttgtccgacggcacggtgctgagcatgaatcataatacggatacaccacgatccctgagcgtgagccctagttcctatcccgagctccatacggaggtaccattatctgtgctcatcttaggattgctcgtagtctttattctgagcgtttgcttcggagcgggactgtttgttttcgtgctgaaacgacggaagggagtcccatccgtgccgcgcaatacaaataatttggacgtgtcctcctttcagttacagtacgggtcttacaatacagaaactcacgacaagactgatgggcatgtgtataattacatacccccgccggtgggacagatgtgtcagaacccaatttatatgcagaaggaaggagatcctgtggcttattacaggaatctgcaggagttctcgtactctaatctggaagaaaagaaggaggaacccgccacaccagcctacactatatcagcaactgagcttctggagaaacaggccacaccaagagagccagaattgttgtatcagaatattgccgaacgtgtgaaggaactgccctcagcaggactagtccattataatttttgcacgctaccgaagcgccagtttgctccaagctacgaatctcgcaggcagaaccaggaccgaataaataagactgtcttgtacggcacacccaggaaatgttttgtaggtcagtcaaaaccaaatcaccctttactccaggccaagccgcagtccgagcctgactatttggaggttctggagaagcaaaccgcaattagtcagctttag

SEQ ID NO: 224768 - DNA, 2538 bp, Artificial Sequence
  derived and/or modified sequence
atgctgtccggcgtttggttcctgtcagtgttgaccgtggccggcattctgcagaccgaaagcagaaagacagcaaaagatatctgtaaaatccggtgcctgtgtgaggagaaggaaaacgtgctgaatatcaattgtgagaacaaaggttttacaaccgtgtcccttctccagccaccccagtatcgaatctaccagttattcctcaatggcaatcttctcacccggctgtatcccaatgaattcgttaattacagtaacgccgtaaccctacaccttggcaacaacggcttgcaggagattagaactggcgccttctcaggacttaagacactgaagaggctgcaccttaacaacaataagctggagatcctgcgcgaagacacctttctcggcttggagtctttagaatatttacaagcagattacaattatattagcgcgatcgaagcgggcgccttcagcaaactgaacaaactcaaagtgctgatactgaatgataatcttctactgagcctcccatcaaacgttttccgcttcgtgctgctgacccatctggacctccggggaaacaggctcaaggtcatgccttttgccggggtgcttgaacacatcggtggtatcatggagatccagctggaggagaatccgtggaattgtacctgcgatctccttcccctgaaggcctggttggatacaattactgtatttgtcggtgagattgtgtgtgagaccccttttcgattacatgggaaggacgtgacacagctgactcgtcaggacttatgtcctagaaagtcagcttccgattcctcgcagagaggctcacatgccgatacccacgtccagcggctatctcccacaatgaaccccgccctcaatcctacccgcgctccgaaggcctcacgcccccctaagatgaggaacagaccaacgcccagggtgacggtctcaaaggatcgtcagtcttttggaccaattatggtttaccaaactaaaagtccggtcccccttacgtgcccatcctcgtgcgtgtgcacctcacagtctagcgacaatggtttgaatgtcaactgccaagagcgcaagtttacaaatatcagcgatctgcaacccaagccaacctcgcctaaaaagctttaccttactggcaactatctacagaccgtgtacaagaatgatcttcttgaatactccagtcttgacctgctgcatctgggcaataataggattgcagtgattcaggaaggagctttcaccaatcttacctccctgagacggctctatttgaacgggaattatttagaggttctgtatcccagtatgttcgatgggctgcaaagcctccagtatctttacctggagtataacgtgattaaggagatcaaaccattgacatttgatgctctgatcaacctgcaactcctgttcctcaacaacaatttgcttagatcgctccccgataatatatttggaggcaccgccctgacgcgactcaaccttcggaacaatcacttttcccaccttccagtgaagggggtactggaccagttaccagcttttatccagattgatttgcaagaaaacccatgggactgcacctgcgacataatggggctgaaggattggaccgaacacgccaactcccccgtgattataaatgaggttacgtgcgagtctcccgctaaacacgccggtgagatactgaaattccttggaagagaagccatttgtcctgactcccccaacctgtcagatggcaccgttctatcaatgaaccacaataccgacactccacggtccctatcagtcagtcccagttcatatcccgaattgcacactgaagttcccttatcagtgttaattcttggacttttggttgtgtttattttgagtgtgtgttttggcgccgggctgttcgtgttcgtgcttaaacgcagaaagggggtgcccagtgtcccccgcaacacaaacaacctggacgtttcttccttccagctccagtatgggtcatataatactgagacccatgacaaaaccgacggccacgtctacaactacataccccctcctgtaggccagatgtgccagaaccccatctacatgcaaaaggaaggggaccccgtggcttactataggaatctgcaggaattttcttactctaatctagaggagaagaaagaggagcctgccacacctgcgtatactatctctgcaactgagctgctggaaaaacaagccacaccacgtgaaccagaactgctctaccaaaatatcgccgaacgagtgaaagagctgccctccgcgggccttgtgcactataacttttgtaccctgcccaagcgtcagttcgcgcccagctacgagtcaagacgacaaaaccaagatagaattaataagaccgtgctgtacgggactccccggaaatgtttcgtgggccaaagcaaaccaaatcatcctctcctgcaggctaagcctcagtccgaacctgattacttggaggtcctagagaaacagaccgcaatctcccagctgtag

SEQ ID NO: 224769 - DNA, 2538 bp, Artificial Sequence
  derived and/or modified sequence
atgttgagtggggtgtggttcttgtccgtacttacagtcgcaggtatcctgcagactgaatccagaaagactgccaaagatatctgcaagattcgatgcctgtgtgaggaaaaagaaaatgttttgaacatcaattgcgaaaataaaggcttcactacagtctccctgctgcagccgccacagtaccggatctatcagctgttccttaacgggaatctgttgacccgactctatcccaatgagttcgtgaattattcgaatgccgttaccctgcatctcggaaataatggcctacaggagattcgcaccggtgcctttagtgggctcaagacccttaagcgcctgcacctaaacaataataaattggagatacttagggaagatacttttcttggactcgagtccctggagtatcttcaggcagactataactacatctcagcaatagaggccggcgcgtttagcaaattaaacaaactgaaagtactgatcctgaatgataacctgttgcttagcctcccctcaaatgtcttccgcttcgtcttgctcacccacttggacttaagaggtaaccgcctaaaagttatgccattcgcaggggtgctggagcacataggagggattatggagattcagcttgaagagaatccctggaattgcacatgtgaccttcttccgctcaaagcatggttagatacaatcacagtgttcgtgggggaaattgtgtgtgaaaccccttttagactccacggaaaagatgtgacgcagctcacccgtcaagatttgtgtccgaggaaaagcgcatcagactcttcacagagaggttcccacgccgatacacatgtgcagagactgtctcccaccatgaaccccgctcttaaccctacaagagcgccaaaggcaagtcgccctcctaagatgcgaaaccggccaaccccccgggtgacagtgtcaaaagataggcagtcttttggacccatcatggtgtaccagaccaagtcacctgtgcctctgacttgcccttcgagctgcgtctgcacaagtcaatcttccgacaatggtcttaatgttaattgtcaggagcgcaaattcaccaacattagcgatttgcagcccaagccaacctccccaaagaagttgtatctgactggcaactatcttcagaccgtgtacaaaaatgaccttctggaatattctagcctagatctgctacatcttggaaacaaccgcatcgccgtgatccaggagggggcattcaccaaccttacctctctgcgcagactttatttgaacggaaactacttggaggtcctgtatccttccatgttcgatggactgcaatctctccagtacctgtatctggaatacaatgtgattaaagagataaaacctctcactttcgatgcactaatcaacctgcaattgctctttctgaacaataatctgctgaggtccctgccagacaacatcttcggcgggaccgctttgaccagactcaaccttaggaataaccacttctcccacctgcctgtcaagggtgtgttggatcagctgcccgcattcatccagatcgatctccaagaaaacccctgggactgcacgtgtgatattatgggacttaaggattggacagagcacgcaaacagccccgtgattatcaacgaagtcacatgcgaatctcccgcgaagcacgccggagaaatcctgaagtttcttgggcgagaggctatttgccccgatagcccgaacttgtcggatgggacagtcctctccatgaaccacaatactgacaccccacgctccctctctgtgagccctagttcctacccagagctgcacaccgaggtaccactttcagtgctcatactaggcctcctggtggtcttcattttgtccgtctgttttggtgccggcctgtttgtcttcgttctcaagagacggaagggcgtcccaagcgttcccagaaacaccaataatctagacgtcagtagctttcagttacagtacggttcatataataccgagacccacgacaaaactgacggacatgtctataattacataccaccgccagtgggtcagatgtgccaaaatcctatctacatgcagaaagagggggatccagtcgcatactaccgaaacctgcaggagtttagttacagcaacctggaagaaaagaaggaagaacctgcaacccccgcgtacacaatttccgctaccgagctgctggaaaagcaagccacgcctagagagccagagctcctgtaccagaatatagccgagcgcgtgaaagaactccccagtgcaggactagtgcactataacttttgtaccttgccaaagcgccagttcgcaccatcatacgagagtagaagacagaaccaagataggatcaacaagaccgtgctctacggtactccacgaaaatgttttgtaggacagtctaaacccaaccacccactcctacaagccaaaccccaatccgagcctgattaccttgaagtcctggagaaacagaccgctattagtcagctctag

SEQ ID NO: 224770 - DNA, 2175 bp, Artificial Sequence
  derived and/or modified sequence
atgctgtctggagtgtggttcctgtctgtgctgactgtggccggcatcctgcagacagagagcaggaagacagccaaggacatctgcaagatccgctgcctgtgtgaggagaaggaaaatgtgctgaacatcaactgtgaaaataaaggcttcaccaccgtgtccctgctgcagcccccccagtaccgcatctaccagctgttcctgaatggaaacctgctgacccggctgtacccaaatgaatttgtgaactacagcaatgctgtgaccctgcacctgggcaacaacggcctgcaggagatcagaactggagccttcagcggcctgaagaccctgaagaggctgcacctgaacaacaacaagctggagatcctgcgggaggacaccttcctgggcctggagagcctggagtacctgcaggccgactacaactacatcagcgccattgaagctggggccttcagcaagctgaacaagctgaaggtgctgatcctgaatgacaacctgctgctgagcctgcccagcaatgtgttccgctttgtgctgctgacccacctggacctgcggggcaaccggctgaaggtgatgccctttgctggggtgctggagcacatcggcggcatcatggagatccagctggaggagaacccctggaactgcacctgtgacctgctgcccctgaaggcctggctggacaccatcaccgtgtttgtgggggagatcgtgtgtgagacccccttccggctgcacggcaaggatgtgacccagctgacccggcaggacctgtgccccaggaagagcgccagtgacagcagccagaggggcagccacgccgacacccacgtgcagaggctgagccccaccatgaacccagccctgaaccccacccgggcccccaaggccagccggccccccaagatgaggaaccggcccaccccccgggtgacagtgtccaaggaccggcagagctttggccccatcatggtgtaccagaccaagagccctgtgcccctgacctgccccagcagctgtgtgtgcaccagccagagcagtgacaatggcctgaatgtgaactgccaggagaggaagttcaccaacatcagtgacctgcagcccaagcccaccagccccaagaagctgtacctgactggaaactacctgcagacagtgtacaagaatgacctgctggagtacagcagcctggacctgctgcacctgggcaacaacagaattgctgtgatccaggagggcgccttcaccaacctgaccagcctgcggcggctgtacctgaatggaaactacctggaggtgctgtaccccagcatgtttgatggcctgcagagcctgcagtacctgtacctggagtacaacgtcatcaaggagatcaagcccctgacctttgatgccctgatcaacctgcagctgctcttcctgaacaacaacctgctgcggagcctgcctgacaacatctttggaggaacagccctgacccggctgaacctgaggaacaaccacttcagccacctgcctgtgaagggcgtgctggaccagctgcctgccttcatccagattgacctgcaggagaacccctgggactgcacctgtgacatcatgggcctgaaggactggacagagcacgccaacagccctgtgatcatcaatgaggtgacctgtgagagccctgccaagcatgctggggagatcctgaagttcctgggccgggaggccatctgcccagacagccccaacctgagtgatggcaccgtgctgtccatgaaccacaacacagacacccccaggagcctgtctgtgagccccagcagctacccagagctgcacacagaggtgcccctgtctgtgctgatcctgggcctgctggtggtgttcatcctgtctgtgtgctttggagctggcctgtttgtgtttgtgctgaagaggaggaagggcgtgcccagcgtgcccaggaacaccaacaacctggatgtgagcagcttccagctgcagtatggcagctacaacacagagacccatgacaagacagatggccacgtgtacaactacatccccccacctgtgggccagatgtgccagaaccccatctacatgcagaaggagggggaccctgtggcctactacagaaacctgcaggagttctcctacagcaacctggagtag

SEQ ID NO: 224771 - DNA, 2175 bp, Artificial Sequence
  derived and/or modified sequence
atgctgagcggcgtgtggttcctgagcgtgctgaccgtggccggcatcctgcagacagagtctcgaaagaccgcgaaggatatttgtaagattagatgcctctgcgaagaaaaggagaacgtgctgaacatcaactgcgaaaataaaggcttcacgaccgtgtctctgctgcagccaccacagtaccggatctatcaactatttttaaacgggaacctgttaacccgactgtaccccaatgagttcgtgaattatagcaatgccgttacactgcatctcggcaacaacggccttcaggaaatcaggactggcgccttttcaggtctcaaaactttgaaaaggctccacctgaacaacaataagctcgaaatcctgcgggaggatacatttctgggattggaaagtttggagtatctccaagccgactacaattacatttccgctatagaggccggggcattcagcaagctcaacaagctgaaagtgctgattctcaatgacaatctgcttctatccttgccaagcaacgtgttcagattcgtgctgctcactcacctggatctccgggggaataggctcaaggtgatgccgttcgcaggcgttttagaacacataggagggatcatggagatccagctcgaagaaaatccgtggaattgtacctgcgacctgctgccattgaaggcttggctggacaccatcactgtgtttgtgggagagattgtctgtgaaacccctttccgactccatgggaaagacgtgactcaactaaccagacaggacctgtgtccacgtaagtctgcctccgacagctctcaacgcggcagccacgctgatactcacgttcagcgcctgtctcctaccatgaatcctgcactgaaccccacccgagccccgaaagcatctcgccctcccaagatgcgcaaccgcccaactccgagggtaaccgtctctaaagacaggcagtcctttggcccgattatggtgtatcagaccaagtcacctgtccccctcacctgtccttcttcttgcgtgtgcacttctcagtcatctgacaacgggcttaacgttaactgtcaagaaagaaagtttacaaacattagcgacctgcaaccaaaacccacttcacctaaaaagctttacctcaccggaaattacctgcaaacagtgtacaagaatgacctcctggagtattcctccctagacttacttcacctcgggaacaaccgaattgcagtgatacaggagggggcttttaccaatctcacatctctccgccgtttatatttaaatggaaattacctcgaggtgctctacccttctatgtttgatggcttgcaatctttgcagtacctgtatcttgaatacaacgttattaaagaaataaagccactgacattcgatgccctgatcaatcttcagctgctttttctgaacaacaatttgctcaggtctctgcctgataacatttttggagggacagctctcactaggctgaacctgaggaataaccacttctctcatctgcctgtgaagggggtgctcgaccagctacctgctttcattcagatcgatctgcaggagaatccgtgggattgtacctgtgatataatgggtcttaaagactggactgagcatgccaactctccggtgataatcaatgaagtcacctgcgaatctccggccaaacacgcgggagagatcctgaaatttctggggagagaggctatctgccccgacagccccaatctttccgacgggacagtgctctccatgaaccacaacactgacacgccacggtccttatccgtatctccttcttcctaccctgaattacatacagaagttccattaagtgtgctaattttaggcctcctggtggtgtttatattgtctgtctgcttcggcgccggcctgttcgtatttgtgctcaaacggaggaagggggtgccatccgtgccacgcaataccaacaatcttgacgttagctccttccagctccagtacggatcctataatacagagactcacgataagaccgacggccacgtttataactatatcccacctccagtgggacagatgtgccagaatcctatttacatgcagaaagaaggtgaccccgtggcatactacaggaacctgcaagaattttcctactctaacctggaatag

SEQ ID NO: 224772 - DNA, 2538 bp, Artificial Sequence
  derived and/or modified sequence
atgctgagcggcgtgtggttcctgagcgtgctgaccgtggccggcatcctgcagactgaatcgaggaagaccgcgaaagacatctgtaaaattcgctgtctctgtgaagagaaggaaaatgtactgaatataaattgtgagaacaagggctttactactgtgtctctcctgcaacccccgcagtataggatctatcagctgtttttaaacggtaacctgctaactagactgtacccgaatgagtttgttaattacagtaatgctgtgacactgcaccttggaaacaatggtttgcaagagatcagaactggcgccttttctggcttaaaaactctgaagaggctgcaccttaacaataataagctcgaaattctgcgcgaagatacattcttgggcctggaaagtctcgaatacttacaggccgactacaattatatcagcgctatcgaggccggagcgttcagcaaactcaacaagctcaaggtcctgatcctcaatgacaacttgctgctctccctgccctccaatgtctttagattcgtgttgctgacccatttagatctgcgaggaaacagactaaaggtgatgccattcgccggagtgttggaacatatcggaggcatcatggaaatccagctggaggaaaatccctggaactgtacctgtgatctgctgccacttaaggcctggctggacacaattacggttttcgtgggtgagattgtttgtgaaacgccatttaggctgcacgggaaagacgttacccagttgacccgccaggacctttgccctcgcaaaagtgcatccgactcttctcagcggggctcgcacgctgacacccacgtccaacgcttgtcgccaactatgaatcccgctcttaatcccaccagagcacccaaggcgtctcgccctccgaagatgcgcaatcggcccaccccaagggttaccgtgtctaaggatcggcagtcattcggacctattatggtctaccagaccaagagccccgtaccacttacctgccctagtagctgtgtgtgcacctctcagtcctcagataatggtctgaatgtaaattgccaggaaaggaagtttacaaatatatcagaccttcagcccaaacccacgagcccaaagaagctttaccttaccggaaattacctgcaaacagtgtacaaaaatgatctgctcgaatattcgtccttggacctccttcacttggggaataatagaattgcagtcatccaggaaggcgcctttaccaatttgacttcactccggcgtctgtatctgaatggcaattacctggaagtcttgtacccatcaatgttcgatggccttcagtctttacagtacctgtacctggaatataatgtgatcaaggagatcaaacccctgacgttcgacgctctgattaaccttcagctgctgttcctaaacaataatttgctgagatctctccctgataacatcttcggagggacagccctgacacgcttgaacctgagaaataaccatttttcccacctccctgtaaagggtgtcttagatcagctgccggcttttattcagattgatctgcaggaaaatccttgggactgtacctgtgatattatgggcttgaaagactggacagagcacgcaaattcccccgtgataattaacgaagtgacctgtgagagccctgccaagcatgcaggtgaaatcttgaagtttctgggtcgcgaggccatctgtcccgatagccccaatctcagtgatggtacagtgctctcgatgaaccacaataccgacacacctcggtcattaagcgtgtccccctcatcttaccctgaactgcataccgaagtccctttgagtgtcttaattctgggactccttgttgtgtttatcctatccgtatgctttggggctggcctgtttgtttttgtcctgaagcggcggaaaggagtcccctccgtacccagaaacacaaacaacctggacgtcagttcctttcagctgcagtacgggtcctacaatacagaaactcatgacaagacggacggtcacgtctacaactatataccccctccagtggggcaaatgtgtcagaatcccatatacatgcagaaagagggcgatcccgtcgcgtattacaggaatctccaagaatttagctactctaatctggaggaaaaaaaggaagagcccgccacgcctgcttacactatatctgccactgagctgctcgagaagcaggcgacaccccgggaacccgagttactgtatcaaaacattgctgaaagggtgaaagagctgccttcagctggattggtgcattataacttttgcacactgccaaagaggcagtttgctccctcctacgagtcaaggcgccagaatcaggatcgaatcaataaaacagtgctatacggtacgcctcggaagtgctttgtgggccagtccaaacccaatcacccactgctgcaggccaaaccacagtccgaaccagactacctggaggtcctggagaaacagaccgcaatctctcagctgtag

SEQ ID NO: 224773 - DNA, 2538 bp, Artificial Sequence
  derived and/or modified sequence
atgctgagcggcgtgtggttcctgagcgtgctgaccgtggccggcatcttacagaccgagtcccggaaaacagcaaaggacatctgcaaaattcggtgcctgtgtgaagagaaggaaaatgtccttaatatcaactgcgaaaataagggatttactacagtgtctctccttcagcctcctcaataccggatctaccaactgtttctgaatggcaaccttctgacgcgtttatatccgaacgagtttgtgaactacagcaacgccgtgactctgcacctcgggaataacggcctacaagaaatccgtactggggccttctccggactcaagaccctgaaaaggctgcatctgaacaacaacaagctggagattctcagggaagataccttcttgggcctggaaagcctcgagtacctgcaggccgattataactacatcagtgccattgaagcaggagcttttagcaagctgaataagctgaaagtgctgatccttaacgataacctgttgctaagtctgccaagcaatgtcttccgctttgtgctcctcacccatcttgatctccgtggaaatcggcttaaggtgatgccctttgctggcgtgctggagcatatcgggggcatcatggaaatacaactggaagagaacccatggaactgtacatgcgaccttctccctcttaaggcatggctggataccataactgtgttcgtgggagagatcgtctgtgaaacgccctttcgactgcatggaaaggatgttacacaacttactaggcaagacctgtgcccgcgcaaatccgcctctgatagctctcagagaggcagtcacgctgacacacacgtgcaacggctctctccaactatgaaccccgccctcaaccccaccagggcaccaaaagcatcccggccaccgaaaatgcgcaacagacccacaccacgggtgaccgtctccaaggacagacagtcgttcgggcctatcatggtctaccagacaaaatcacccgtgcctctcacctgtccctctagttgcgtgtgtacttcacagtctagcgataatggacttaatgtaaattgccaggaaagaaagtttaccaacatcagcgacttacaaccgaagcctacttcaccgaagaagctctacctgaccggaaattatctccagactgtgtataagaatgacctgctggaatattcttccctcgatctgcttcatttgggaaataatcgaatcgctgtgattcaggagggggcattcactaacctcacatcactgcgacgattgtatctgaacgggaattatctggaggtactctacccctcaatgttcgacgggctgcaatcattacagtatctgtacctggaatacaatgtgataaaggagatcaagccactgaccttcgatgcactgataaatctgcagctgctgtttctcaataacaatttgctgcgtagcttacccgataatattttcggcgggactgcactgacgcgactgaacctgcggaacaaccacttctctcatctgcctgtgaagggtgtgctggaccagctaccggccttcattcagatcgatcttcaggaaaatccttgggactgtacctgcgacattatgggactgaaagactggaccgaacatgccaattcaccagtgatcataaatgaagtcacctgtgaatcgccggccaagcacgcgggtgagatactgaaatttctgggtcgcgaagcaatctgtcctgattcacccaatctgagtgatggcaccgtactgtctatgaaccacaatactgataccccccgttcactttcagtgtccccatcctcttacccagagttgcacaccgaggtgccattatctgtcctgattctgggactcttggtggtgtttattttgagtgtctgctttggagccgggctattcgtgttcgttctcaaacgtcgtaagggagttccgtcagtcccacggaatactaacaacctggacgtcagcagcttccagctgcagtacgggtcctacaataccgaaacacatgataaaacggatgggcacgtatacaactacatccctccccccgtgggccagatgtgtcaaaaccccatctatatgcagaaggaaggcgaccctgttgcctattacaggaatttacaggaattcagttattctaatctggaggagaagaaggaagaaccagcgactccagcgtacactatatctgccaccgagctcctggaaaagcaagcaaccccacgggaaccggagctactataccaaaatattgccgagcgcgtaaaagagctgccatctgccgggctcgttcactataacttctgcacactgcccaagagacaatttgcaccctcatatgaaagccgtagacagaaccaggaccggatcaacaagacagtgttgtatgggacgcccagaaaatgtttcgtggggcaaagtaagcccaaccacccgctgctgcaagctaaacctcagtctgagccggattacttggaggtgctggaaaagcaaaccgccattagtcagctatag

SEQ ID NO: 224774 - DNA, 2538 bp, Artificial Sequence
  derived and/or modified sequence
atgctgagcggcgtgtggttcctgagcgtgctgaccgtggccggcattctgcaaacagagtccagaaaaaccgcaaaggatatatgcaaaattagatgcctctgcgaagagaaggaaaatgtactaaacattaactgtgagaataaagggtttactactgtgtccctgctgcaacccccccagtaccggatctatcagttattcctgaacggtaatctcctgactcgcctctatcctaacgaattcgtgaactacagcaatgccgttaccctacacctgggcaacaacggactgcaggagatccgcacaggagcgttttcggggctcaagacccttaagcgcttacacttgaacaacaataagctcgagatcttgcgggaggacaccttcttaggtttagagagcctggaatatcttcaggcggattataactacatcagtgcgatagaggcaggggcctttagtaagctcaacaagttaaaggtcttaattctgaacgacaacctgctgctgtccctcccgagcaatgttttccgttttgtcttgctcactcacctcgacctcagaggtaacagactcaaagtgatgccctttgcgggagtgctggagcacatcggtggaattatggaaatccaactagaagagaatccctggaattgcacctgcgatctgctcccactgaaagcgtggctggatacgatcactgtatttgtcggcgagattgtgtgcgagacaccgttccgcctccacggcaaggacgtgactcagctgaccagacaggatctctgtcctagaaagtcagcgtccgatagtagtcaaagggggtcacatgccgacacacatgtacagagactgagtcccacaatgaatcctgcgttgaatcccacgagggcccctaaggcatcccggcctcctaaaatgagaaaccggcctacccctcgagtgacagtctcaaaagaccggcagagctttggcccgatcatggtctaccagaccaaaagcccggtaccgttgacatgccctagctcttgtgtctgcacatcccagtcttctgacaatggcctgaatgtgaattgccaagagcgaaaattcaccaacatctccgacctgcagcctaagcctacatctcccaaaaaactctacctgactggcaactacctgcagactgtttataagaacgacctcctagaatatagctcccttgacctgttgcacctaggcaacaaccgcatagccgtgatccaggagggcgccttcaccaacctcacctcgctgcgccgtctctacctaaacggaaattatctggaggtcctgtacccttccatgtttgacggcctgcagtctctgcagtacctgtacttggagtataatgtgatcaaggaaattaaacccttgaccttcgacgctctcatcaatttgcaattactcttcctgaataataaccttttaagatctcttcctgataacatttttggagggaccgcactgacgcgattgaatttgaggaacaaccacttctcacacctccctgtcaagggcgtgttggaccagctcccagcatttatccagattgacctgcaagaaaacccctgggactgcacgtgtgacatcatgggcttgaaggactggactgagcacgccaattcacctgttatcatcaacgaggttacgtgtgaaagccccgcgaagcacgccggggagatcctcaagtttctgggacgggaagctatttgtccagacagtcctaatctgtcagacggcacagtgctgagtatgaaccacaacactgacacgcccaggagtctgtcagtgtcccctagtagttacccagagttgcatacggaagtccctcttagcgtcctgatcctcggattactagtcgtgttcattcttagcgtatgctttggcgccgggctgtttgtctttgtcttgaagaggcgtaaaggcgtgcctagcgttccaaggaataccaacaatcttgacgtcagcagtttccagctccaatatggcagctacaacactgagactcatgacaaaacagatgggcatgtctacaactacattcctccccccgtgggccaaatgtgccagaaccctatctacatgcaaaaagagggggaccccgtggcctactaccgaaatctgcaggaattctcctatagcaatctcgaagagaaaaaagaagaaccggctacacctgcctatacaatctctgccactgagctcctggagaagcaggcgaccccacgggaaccagaactcctgtaccagaacatcgctgaaagagttaaagagcttccttctgctggcctggtgcactataatttctgtacccttccaaagcgtcagtttgcacctagttacgaatcccgtcggcagaatcaggatcgcattaacaagaccgtcctctacggtacacccaggaagtgctttgtcggtcagtccaaacctaaccatcctctgcttcaggctaaacctcagagtgagcctgactacttggaagtgttggagaagcagaccgccataagtcagctatag

SEQ ID NO: 224775 - DNA, 2538 bp, Artificial Sequence
  derived and/or modified sequence
atgctgagcggcgtgtggttcctgagcgtgctgaccgtggccggcattcttcagacagagagcaggaaaacagcaaaggatatttgcaagatacggtgcctgtgcgaagagaaggaaaacgtcctaaacattaattgcgagaacaaaggctttactactgtaagtctgcttcagcctccccagtatcggatttaccagcttttcctaaacgggaacctgctgacccgactgtacccgaatgaatttgtgaactattccaatgcggtgactctccacctggggaataacgggctacaagagattagaaccggggctttcagcgggctcaagacgctaaaaagactgcacctgaataacaataaactggaaatcctgcgggaggacaccttcctcggtctcgaatccctcgaataccttcaggctgattataactacattagcgccattgaagccggtgcattttcaaagctcaacaagctgaaagtgctgatcctgaatgacaacctgctgctgtcattaccaagtaatgttttcagatttgtcttattgactcatctggaccttcgagggaacaggctgaaggtgatgccattcgccggagttctcgagcacatcggggggatcatggaaatacagcttgaagagaacccttggaattgcacatgtgatttgctgcccttgaaggcttggttggacacaataactgtgtttgtgggagaaatcgtgtgtgaaacacccttcaggctacacggtaaggatgtgacccagttaactagacaggatttatgccctcgcaagtccgcgagtgatagctcacaaaggggtagtcatgcggatacacacgtccagagactgtcacctacgatgaaccctgcactgaatcctaccagagcccctaaagccagcaggccgccgaagatgagaaaccgaccaacacctcgggtcaccgtgagcaaagatagacagtctttcggccctattatggtgtatcagaccaagtctcccgtgcccctaacgtgcccctcaagttgcgtgtgcacgtctcagtcaagcgataatggcttgaatgtcaattgtcaggaacgtaaatttaccaatattagtgaccttcagcctaagcccacctctcctaagaagctgtacctgacaggaaattacttgcaaaccgtttataagaacgacttgctagagtactcttcactcgatctcctgcatttaggaaacaatagaattgctgttatccaggaaggagctttcacaaatttgacaagtcttcgacgcctctacctcaacggtaactatttagaggttttataccctagtatgtttgacgggcttcagagcctacagtatttgtacctggaatacaacgtcattaaggagatcaagccattgacattcgacgccctaattaatctgcaactacttttcttaaataataacctgttgcggagtttgccggataatatcttcggtggaaccgccctgacacgcctgaatctccggaataaccacttttcccatctgccggtcaagggggtcctggatcaactgccagcatttattcagatagacctgcaggaaaatccatgggattgtacttgcgatataatgggccttaaagattggaccgagcatgccaacagtccagtcataatcaatgaagtgacttgcgagtctccggccaaacacgctggcgagatcctgaaattcctgggccgagaggcgatatgcccagactcccctaatctcagtgacggtactgtactctccatgaaccacaataccgacacaccccgttctctgtcagtgagtccaagttcataccccgagctccacactgaagtcccactcagcgtcctaatactcggcctgctggtcgttttcattctaagcgtctgctttggcgctggccttttcgtttttgtcttaaaacgccggaagggagtgccgtccgtcccccggaacactaataatctggacgttagcagtttccagctgcagtacggcagctacaacaccgaaacccacgacaagacagacggccacgtttacaattacatcccaccacccgtcgggcagatgtgccagaatcccatttacatgcagaaagagggagaccccgtcgcttattaccgcaacctgcaggaattttcctatagtaaccttgaagagaaaaaagaggaacccgcaactccggcatacacaatctccgccaccgaactgctcgagaagcaggccaccccgagggagcctgaacttctataccagaatatcgctgaaagagtgaaagaactgcctagtgccgggctggtgcattacaacttttgcactttacccaagaggcagtttgccccatcctacgaatccaggcgtcagaatcaagaccggatcaacaagaccgtcctatacggaacccccagaaaatgtttcgttggtcagagtaagccaaatcatccactcttacaggctaagccccaatccgaaccagactacttagaagtgttggaaaagcaaaccgccataagtcaactgtag

SEQ ID NO: 224776 - DNA, 2538 bp, Artificial Sequence
  derived and/or modified sequence
atgctgagcggcgtgtggttcctgagcgtgctgaccgtggccggcatccttcaaacggagtcaagaaaaaccgcaaaggacatttgcaaaatcaggtgcctgtgtgaggagaaggaaaacgttctgaatattaactgtgagaataaaggcttcaccacagtcagcctgctgcagcccccccagtatagaatataccagctgttcctgaatgggaacttactgaccaggctctatcccaacgagttcgtcaactattctaatgctgtgaccctccacctgggtaacaatggactgcaggagattcgcacaggggcttttagcggcttaaaaacactgaagagacttcatctcaacaacaataaactcgagatcctcagggaggatacttttctgggactcgagtcgctcgaatacctgcaggccgactataactacatctcagccattgaggccggggccttttccaagctgaacaagctgaaggtgctcatcctcaatgacaacctgctgttatccctgccttcgaatgtgttccgctttgtgctactaacccacctagatctgcgcggtaaccgactgaaggtgatgcccttcgccggagttttggaacacatcgggggaattatggaaatccagctggaagagaacccctggaactgcacatgtgatctgctgccactgaaggcctggttggacaccatcaccgtgttcgttggggaaatagtgtgcgagacaccctttaggttacacggtaaagatgtaacacaactgacgaggcaggacctctgccctcggaaatccgctagtgattcaagtcaaagaggatcacatgccgacacccacgtccaacgcctgagtccaacaatgaatcccgcattaaatcccaccagagctcctaaagctagcagacctcctaaaatgagaaaccgaccaacgcctcgtgtgactgtatctaaggaccgccaatcttttggacccataatggtctaccagactaagtctcccgtgccgttaacctgcccttcctcctgcgtgtgtacatcgcaaagcagtgacaacgggctcaacgtgaactgtcaggagcggaagttcacaaatattagtgacctgcaaccgaagcccacttctccaaaaaagctgtatcttacaggcaattaccttcaaacagtgtacaagaatgacctgctggaatacagtagtctagacctacttcatctgggcaacaacaggattgcagtcattcaggagggggcgttcacaaacctcacatctctcagacgtctttacctgaatggcaactatttggaggttctgtatcccagtatgtttgacggcttgcagagtctgcagtatctgtacctcgagtataatgtaatcaaggagataaagccccttacttttgatgcgctcataaatctgcagctgttgttccttaataataatttactgcgttccctccccgataacatctttggcggcacagccttgacgagattgaatctgagaaataaccacttctcccaccttcccgtcaagggagttctggaccagttgccagctttcattcagattgatctgcaggaaaacccttgggattgtacctgtgacattatggggttgaaggactggacagagcatgctaactcacccgtgattattaacgaagtgacatgtgaatcccccgcaaaacacgcaggagagatcctaaagttcctggggagggaggcaatctgtcctgacagcccaaacctgtccgatgggactgtcctgtctatgaatcataacacagatactcccaggtccctgtcagtctcaccatcatcttatcctgaactgcataccgaagttcctctgtccgtgctgatcctgggccttctcgtcgtctttattttatcggtttgctttggagcgggcttgttcgtgttcgtgctcaaaagaagaaaaggggtcccctctgtgccgaggaacacaaataacttggatgtctccagcttccaactacagtacgggagctacaacacagagactcatgataaaacagacggccatgtgtacaattacatccctcccccggtagggcagatgtgtcagaatcccatctacatgcaaaaagagggggatcctgttgcctattaccggaacttacaggagttctcctattcaaatctcgaggaaaagaaggaagagccggcgacccctgcctataccatatcagccaccgaattgctcgagaagcaggctacaccaagggaacccgaactactgtatcagaacattgcggagagagttaaggaattaccctcagccggcctggtacactataatttctgtaccctccctaagcgacagtttgcacccagctacgagtccagacgccagaatcaagaccggattaataagacagttctttacggcacgcccagaaagtgcttcgtgggccagagcaaacccaatcaccccctgttgcaggcgaagccacagtctgagcctgattacctggaagtcctggaaaaacagacggctatcagccagttgtag

SEQ ID NO: 224777 - DNA, 2175 bp, Artificial Sequence
  derived and/or modified sequence
atgctgtcgggcgtgtggtttctctctgtcctgactgtggctggtatcctgcaaacagaaagtaggaagactgccaaggacatttgtaaaatccgctgtttgtgtgaggagaaggagaacgtgcttaacattaactgcgaaaacaaaggcttcaccactgtgtcactgttgcagcccccacagtatagaatctaccagttattcctgaatgggaatctgttgaccagattgtatcctaacgagttcgttaattattccaacgctgtcaccctgcatctcgggaataatggcctgcaggagattcggactggggcattttctgggctcaaaaccctgaaacggttgcatctcaacaacaacaaactggaaatccttagagaggatacttttttgggactcgaaagtctggagtatttacaggcagactacaactatatttctgccatcgaagcgggagccttctctaagcttaataagctgaaggtacttattctcaacgacaacctgctgctgtcactgcccagtaacgtgtttcggttcgtgctcttgacccacctggacctacgtggtaatagactaaaagtaatgcccttcgcaggagtcctcgagcacataggaggcatcatggagatacagcttgaggagaatccgtggaactgtacatgtgacctcctacctttgaaagcctggctggataccatcaccgttttcgtgggagaaattgtgtgtgagactccttttcggctgcatggcaaagatgtgacacaactaacgcggcaagacctgtgccctcgcaagtctgctagtgacagctctcagcgcggttcccatgctgacacacatgtacagaggctgagccctacgatgaacccggctcttaatcccaccagagccccaaaagcttcccgaccaccgaagatgcgcaataggcccacgcccagggtcaccgtgtcaaaagatagacagtcttttggcccaatcatggtgtatcagaccaagtcccctgtgccattgacctgcccctccagttgtgtatgcacaagtcagtcctccgataacggtttaaacgttaattgtcaggaaagaaagttcaccaacatttcggaccttcaacccaagcctacctcccccaaaaagctatacctgactgggaattacctgcagactgtttataagaacgacctgcttgagtattcttctcttgatctgttgcatcttggtaacaaccgcatagctgtgatccaggagggggctttcaccaaccttacttccctgcgcaggctgtatctgaatggtaattaccttgaagttctttatccttcaatgttcgacgggctccagagtctacagtacttatatttggagtataatgtgatcaaggagatcaagccactgactttcgatgccttgatcaaccttcagctactgtttctaaacaacaatcttctgcgctccctgcctgataatatcttcgggggaacagccttaaccaggctgaacctgaggaataaccatttctctcacctgcccgtgaagggggtgttggatcagctgcctgctttcatccagattgatttacaggagaacccttgggactgcacctgtgatataatgggcctgaaagattggactgagcatgcaaactccccagtcattatcaatgaggtgacatgtgagtcacccgcaaagcacgccggagaaattctcaaattcttaggaagggaggcaatctgtcccgactcccccaacctctccgatgggactgtactgagtatgaatcacaacacggacacacctcgctctctctctgtttctccaagctcctatcctgaactgcacactgaagttccgttgagcgtgctgatcttgggcctgcttgtggtgttcattctcagtgtctgtttcggggctgggctgtttgtgttcgttctaaagcgccgaaagggtgtgcccagcgtgccacggaacacgaacaatctggacgtcagtagctttcagctccaatatggcagctacaacacggaaacccacgataagactgacgggcatgtttacaactacatcccccctccagtcggtcaaatgtgccaaaatcccatctatatgcagaaggagggtgatcccgtcgcgtactatagaaatctgcaggagtttagctactccaatcttgagtag

SEQ ID NO: 224778 - DNA, 2538 bp, Artificial Sequence
  derived and/or modified sequence
atgctatccggggtgtggttcctgtccgtgctcaccgtagccggtatattgcagacagagtcacgcaagaccgcaaaagatatttgcaagatcagatgcctctgcgaggagaaagagaacgtcctcaatatcaactgcgagaacaaaggattcactaccgtgtcactgctgcagccccctcagtatcggatctaccaactgttcctgaacggaaatctgctgacacgcttatatccaaacgaatttgtgaactattctaacgctgtgactctccacctcggaaataatggattacaagagatcaggacaggtgctttcagcgggctgaagacactcaagcggctccacctgaataacaacaagctggagattctccgggaagacaccttcttggggctggaatcccttgagtacctccaggctgattacaactacatctccgctattgaggcgggtgcatttagtaagttgaacaaattgaaagtcctaattttgaatgataacctgctcctgagcctaccctccaatgtctttcggttcgttttgctgactcatctggatctacgcggaaacaggctcaaagttatgccttttgctggtgtgttggaacatattggaggcatcatggagatccagctcgaggaaaacccttggaactgcacatgtgacctgctgcctttgaaggcttggttggacaccatcaccgtcttcgttggggaaattgtgtgtgagactcctttccggctgcatggaaaggatgtgactcagttgactcgtcaggatctgtgccctcgcaagagcgcttcagactcaagtcagcggggttcccatgccgacacccacgtgcagagactaagtcctacgatgaatcccgcactgaaccctacccgggcacccaaggccagccgaccgccaaaaatgagaaaccgcccaactccacgcgtgaccgtgagcaaagatcggcagtcctttgggcctattatggtgtatcagaccaaaagcccagttcctctgacctgcccttccagctgtgtttgcacatctcagtccagtgataacggactaaacgttaactgccaagaaaggaaattcacaaatattagcgatctccagcctaagcccacctctcctaaaaagctctacttgaccgggaattatctccagaccgtttataagaatgacctgctagagtacagttctcttgacctgttgcatttgggcaataatagaatcgctgtaatacaggagggcgcattcactaatctgacctctctgaggcggctttatctgaatggaaactacctggaggtcctttatccctcgatgttcgacggccttcagagcttgcagtacctgtatctggagtataacgtcatcaaggaaattaagccgcttacctttgacgcgcttatcaatctacagctgctgttcctgaacaacaacttgctgcgcagcctcccagataatatattcgggggaaccgccttgaccaggctgaaccttagaaataatcatttctcacaccttcccgtgaagggggttctggaccagctgcctgcctttatccagattgacttgcaggagaacccctgggattgtacctgtgacatcatgggtctcaaagactggacagaacacgcgaactcaccagtaatcatcaacgaagttacttgcgaatctcccgctaaacacgccggagagattcttaaattcctgggcagggaggccatctgtcccgactccccgaatttatccgatggtactgtgctgtccatgaaccacaatactgacacgccgagatccctgtcagtgtcgccgagttcttacccagagctgcacacagaggtcccactttcagtgttgatcttggggttgctggtcgtgtttatcctaagcgtgtgttttggtgccggtctgttcgtgttcgtgctgaaacgtcgcaaaggagtacctagcgttccaaggaatactaataacctcgatgtctcctcttttcagcttcaatacggttcatacaacacagaaacacacgataagaccgacggccatgtttacaactacatccctccacccgtgggccaaatgtgtcagaatcccatctatatgcagaaagagggagatcccgtggcatattaccgcaatcttcaggaattttcatattcaaaccttgaggaaaagaaagaagagccggcaacccccgcatacactatttctgccacagagcttctagagaagcaggccactcctcgcgaaccggagctcctgtaccagaatattgccgagagggtcaaggagctgcccagcgcgggactggtgcactacaatttttgtaccttaccaaagcgccagttcgccccttcttatgaaagccgaaggcagaaccaggatagaatcaataaaactgtgctgtatggaacacccaggaaatgttttgttggacaaagcaagccaaatcatccattgctacaagcaaaaccccagtccgagcctgattatctggaagtgctggaaaagcagaccgctatcagccaactctag

SEQ ID NO: 224779 - DNA, 2538 bp, Artificial Sequence
  derived and/or modified sequence
atgctttcaggtgtgtggttcttgtcagtactgaccgttgctggtattctacaaacagagtccaggaagaccgcaaaggacatatgtaagatcagatgtctctgcgaggagaaggagaatgtgctgaacatcaactgtgagaacaagggcttcaccactgtgtcattgttgcaaccaccccaataccgtatttatcagctctttctgaacggaaatctgttaacccggttatatcctaacgagtttgtgaactacagcaatgccgtgactctgcatctgggcaacaacggcctgcaggagattcgtaccggggcattctctggcctgaagacactgaagagactgcatttaaacaataacaagctggaaatactcagagaagacactttcctcggattggaaagcctggagtatctgcaggcggactataactacatttcagcaatcgaagccggtgctttctcaaagttgaacaaacttaaggttctgatactgaacgacaacctgctattgagtctaccatctaatgtgtttcgatttgtcctgctaacccatctcgaccttaggggaaatcgcttgaaggtgatgcccttcgccggagtcctcgagcatattgggggtatcatggagatccagcttgaagaaaacccctggaactgtacgtgcgatctgctgccccttaaagcgtggctggatactatcaccgtattcgtcggagagattgtctgcgaaaccccgttcaggctgcacgggaaggacgtgacgcagttgacccgacaagatttatgcccgaggaaaagtgcctctgacagtagtcagcgtggcagccatgcggacacccatgtgcagcggcttagtccgactatgaaccctgccctcaaccctacccgagcgcctaaggctagtcgccctccgaaaatgagaaacagacctacccctagagttacggttagtaaagatcgacagagctttggacccatcatggtctatcaaacaaaatctccggtgccattgacgtgccccagctcctgcgtgtgtacgagccagtcttcagacaacgggctcaatgtgaattgccaggaacgaaaatttacgaacatatccgacctccagcctaagcccacttctcctaagaaactgtatctgactggcaattatctgcagacagtctacaagaacgacctattggagtatagctctctggatttgttacatctcggcaataaccgtattgccgtcattcaggagggtgcttttactaacctgacctcactgcgccgactctatctaaacggcaactacctggaggtgctgtaccctagtatgtttgacggcttacagtccctgcagtatctataccttgaatacaacgtgatcaaagaaattaaaccgctgaccttcgatgcactgattaacctccagctgcttttcctcaacaataacctgctccggagcttgccagacaacatctttggtggcacagcactgactaggctgaacttgcgcaataaccacttttctcacctccctgtgaaaggtgtgctcgaccagctgcctgctttcatccagatcgatctccaagagaacccctgggattgcacctgcgatatcatgggactgaaagactggaccgagcacgccaactcacctgttatcataaacgaggttacctgcgagtctccagccaagcatgcaggggagatcctgaaattcctcggaagggaagcaatctgtccagacagccctaacctgagcgacggcaccgtcctatcaatgaaccacaacacggatactcctcggtcactgagtgtgagtcctagttcctaccctgagctgcacacggaagtgccactctcagttcttattctgggcctgcttgtggtctttatcctgtctgtttgctttggcgcaggcctctttgtgttcgtactgaagagaaggaaaggagtgccttccgtcccgcgtaatacaaacaacttagatgtatcctcctttcagctccaatatggctcttataatacagagacgcatgacaagaccgacgggcatgtatacaactatattccaccacctgtggggcagatgtgccagaatcccatctacatgcagaaggaaggagatcccgtggcatactaccgaaacctgcaggaattctcatactctaatctggaagaaaagaaggaggaaccagccacaccggcttacaccatctccgccactgagctactggagaagcaggctacccctcgggaacccgagcttctgtatcaaaacatcgcagagcgtgttaaggagcttcccagcgctggcctagtccactataatttttgcactcttcctaagagacagtttgcacccagctatgaatcccgacgccaaaatcaagatcgtattaacaagaccgtgttatatggaacaccaagaaaatgtttcgtcggacagtccaagcctaaccacccccttctccaggcaaaaccccagtccgaacccgactatctggaggtgctggagaagcaaacagccatctcccagctgtag

SEQ ID NO: 224780 - DNA, 2538 bp, Artificial Sequence
  derived and/or modified sequence
atgctctctggggtatggtttttgagtgtgctgactgtggctggcatcctgcagaccgaatctcgtaagaccgccaaggatatttgtaaaatccgatgtctgtgcgaagagaaggagaacgtgctcaacattaactgcgaaaacaagggattcactaccgtcagcttgctgcagcctccacagtaccgaatctatcagctgtttctcaatgggaaccttctgacgcgcctctaccctaatgaattcgtcaattactctaacgctgtaactctgcaccttggtaacaatggtctgcaggaaattcggacaggggcattttccggcttgaaaaccttgaagcggctccatctaaacaacaataaattagaaattctccgcgaggacaccttcctggggttggaaagtctggaatacctgcaggccgactacaactacatcagcgcaattgaagcaggtgcgttctctaagctgaacaagctcaaagttctaatcctgaacgataacctgctcctctccctgcccagcaatgtctttcggttcgtcctgctgacacatctagacctccggggtaaccggctcaaggtgatgccatttgcaggggttctcgaacacatcggaggcattatggagattcagcttgaggaaaatccttggaattgcacatgtgacctgcttccactcaaagcctggcttgacaccatcacggtcttcgtgggcgagatcgtatgcgagaccccgttccggctccatggtaaggatgttacccagctgactcgtcaggatctttgccccagaaaaagtgcatcagacagctcccaacgcggatcacatgctgacactcacgtccagcggctgtcaccaacgatgaatccagccctaaatcctacaagagcgcctaaggcttctagacccccaaagatgaggaaccgtcccacacccagagtgacggtcagcaaggaccgtcagagcttcggaccgattatggtgtaccagacaaaaagccctgtgccgctgacatgcccgagtagctgcgtgtgcacctcccagtcgtccgataacggcctgaacgtgaactgtcaggaacggaagttcactaatatctccgacctgcagccaaagccaacaagccctaaaaaactctatctgacagggaactacttgcagaccgtatataagaatgatctcctcgagtattcttcacttgacctgttgcaccttgggaataacaggatcgcggtgatacaagaaggagccttcactaatctcacttccctaaggcgcctctacctgaacgggaactacctggaggtcctgtacccctccatgttcgacggattgcagtcgttgcagtatctgtacctggaatacaacgtcattaaagagattaaaccactgactttcgacgctttaatcaacttacaattgttgtttcttaacaacaacctgctgcgcagtttgcccgacaacatctttggtgggacagctctcaccagactgaatctgcgcaataatcacttttcacacctaccagtgaagggcgtcctggatcagttaccagcgtttatccaaattgatctgcaggagaacccgtgggactgcacctgtgatattatgggcctcaaagattggaccgagcacgccaatagtcccgtgataatcaacgaggtgacctgtgagagcccagccaaacacgccggagaaattttgaaatttctcggcagggaagcaatttgcccggactctcccaatctgtcagatgggacagttttgagtatgaatcataatacagatacccctcgttccttgtcggtatcaccaagtagttaccccgagctgcacacagaggtgcccttaagcgtgctgatacttggcctgctcgtcgtgtttatcttaagtgtgtgtttcggtgccggacttttcgtgtttgtgcttaaacgacgcaagggcgtcccttccgtcccccgaaatactaacaaccttgatgtgtctagcttccagttgcaatacggtagctacaacactgagacccatgataagacggacggtcatgtgtacaattatatccctcctcctgtcgggcagatgtgccagaaccctatttacatgcaaaaggagggtgatcccgtcgcatactaccggaacctgcaggagttttcctatagcaatctcgaggagaagaaggaggaacctgcaactccagcctataccattagcgccacagagctattagagaaacaagcaacaccaagggagcccgaattgttgtaccaaaacatcgctgagagggtcaaggaactgccttccgctggccttgtgcactacaatttctgtaccctgccaaaacggcaatttgccccttcttatgaatccaggcgtcaaaatcaggataggattaataaaaccgtcttgtacggaactcccagaaagtgctttgtagggcagtctaaaccaaatcaccccctgctgcaagccaaaccacagagcgagccagactatcttgaagtgctcgaaaagcagaccgccatctctcagctgtag

SEQ ID NO: 224781 - DNA, 2538 bp, Artificial Sequence
  derived and/or modified sequence
atgctgagcggggtatggttcttaagcgtgctcacagtcgccggaatcctgcagacagagagccggaagactgccaaagatatatgtaagatccgctgtctctgcgaggaaaaggagaatgtgctgaatataaattgcgaaaacaaaggcttcactactgtgagtctactccagccacctcagtaccgcatctaccagctgtttcttaatggcaacctccttaccagactgtatcccaatgaattcgtcaactattccaatgcagttaccctgcacctcggcaataacggcctgcaggaaataaggacaggagctttctccggattgaaaaccctcaagaggttgcacctgaataacaacaagctcgagatactgcgggaggacacattcttgggcctcgagtccttggaatatctgcaggcggattataattacattagtgccatcgaagcaggcgctttctccaaactcaacaagcttaaggtactcatcttaaatgataatcttctgttgagtctgccaagcaacgtttttcgtttcgtactcctgactcacctggacctccggggaaaccgtcttaaggttatgccattcgctggggtgctcgaacacattgggggaatcatggaaattcagctcgaagaaaatccctggaattgcacctgcgacctgttgcccctcaaggcctggttagacacaattacagtgtttgtaggcgaaatcgtatgtgagaccccattcagactccacggaaaggacgttacccaactgacaaggcaggacctgtgcccacgcaagagtgcctccgattcttctcagcgagggtctcatgcagacactcacgtgcaacgtcttagcccaacaatgaaccctgcactcaatcctactagagccccaaaggcaagtcgccctccgaagatgagaaataggcctacccctcgcgttactgtgtctaaggatagacagtctttcggaccaataatggtgtaccaaacgaagtctcccgtcccactcacgtgcccctctagctgcgtctgtacctctcagagctcagacaacggccttaatgtgaactgtcaggaaaggaagtttaccaacatctccgatctacagcctaaaccgaccagcccaaagaaactctacctgactggtaactatttgcagacggtttataagaatgacctgctcgagtatagcagtttagaccttctacacctgggaaataaccggattgcagtcattcaggaaggcgcttttaccaatcttacatctctccgtaggttgtatcttaatggcaactatctagaggtgctttaccccagtatgttcgacggactgcaatcacttcagtatttatacctcgaatacaacgtgatcaaagagattaagccgctcacctttgacgccctgatcaacttgcagttgctgttcttgaataacaacctactgcggagtttgcccgataatatctttggtggaacagccctgacaagactgaatttgcggaacaatcacttttctcatctccccgtgaagggagtgctggatcagctccccgcttttattcagatcgaccttcaggagaacccatgggactgcacatgcgacatcatgggacttaaggattggacggagcacgcaaactcccctgtcatcataaacgaagttacgtgtgagtctcccgcaaagcatgcgggtgagattttgaaattcctcggaagagaagcaatctgcccggatagtcccaatttgtccgacggcactgtgctgagtatgaaccacaacactgacactcctaggtccctctcagtgtctccttcaagctatccagagctgcatacagaagtgccactttctgtgctcattctcggactgctcgtggtatttattttgtctgtgtgtttcggtgcgggactgttcgtttttgttctgaagaggcggaagggcgtgccaagcgtccctcggaatacaaacaatcttgatgtgtcctccttccagctacagtatggtagctacaacactgaaacacacgacaagaccgatggtcatgtatacaattacatccctcccccagtggggcagatgtgtcaaaatcccatatatatgcagaaagagggggatccagtcgcttattaccgtaacctacaggaattctcctattctaacctcgaggagaagaaggaggaacccgctacccccgcttacaccatcagcgcaacggaacttctggagaagcaggccactccgagagagcctgaattactgtatcagaacatagctgaacgggtgaaagagctgccgagtgctggtttggtgcactacaacttttgcacactgcccaagcgacaattcgctccaagttacgaatcccggagacagaaccaagaccgcattaacaagactgtgttgtatggaacacctcgtaagtgctttgtgggccagtcaaaaccaaaccacccccttctacaggcaaaaccgcagtccgagcccgattacctcgaggtcttggaaaaacaaaccgcgatttcacaactctag

SEQ ID NO: 224782 - DNA, 2538 bp, Artificial Sequence
  derived and/or modified sequence
atgctttctggagtttggtttctgtcggtcttaactgttgccggaatcttgcagacagagagccgcaaaaccgccaaggacatctgtaaaattcgctgtctgtgtgaggaaaaggagaacgtactgaatattaactgcgagaacaaaggctttactactgtttcactcttgcagcctccccaatacagaatttaccaattatttctgaatggtaacctgctgacacggttataccccaacgagttcgtgaactacagcaatgcagtcacactccatctcggcaacaacggtcttcaggagattcgaacaggcgctttctctggactgaagacacttaagcgccttcatttgaataacaacaaacttgagatcctacgggaggatacttttttggggctggagagtctcgaataccttcaggctgattacaattacatctccgcaattgaagccggagctttcagcaaacttaataaactgaaggtgctcatcctcaatgacaatctgcttctgtctcttccatcaaacgtgtttaggttcgtgctgctaacacaccttgatctgcgcggaaatcggttgaaggtgatgcccttcgcaggggtgctggaacacatcgggggaatcatggagatccagctggaggagaacccgtggaactgcacatgcgacctgctgcccctcaaggcgtggctggacacgataaccgtcttcgtgggcgaaattgtttgtgagacgccatttaggctgcacgggaaggacgtcacgcagttgacacggcaggatctgtgtcccaggaagtcggcttctgactcatctcagaggggcagtcacgccgatacacatgtgcagaggctgagtccaactatgaaccccgcactgaatccaaccagggcacccaaggcgtccaggcccccaaagatgagaaacagacccacgcctagagtgacagtctctaaggacagacaatctttcggccctatcatggtctatcaaaccaagtcacctgtccccctcacttgcccttcatcatgtgtctgtacctctcaatcttctgataacggcctcaacgtcaattgtcaggagcgtaagttcacaaatatctctgacctccaacctaaaccaacctctcccaaaaaactttatctcactggcaactacctgcaaactgtatataaaaatgacctgcttgagtattccagtcttgacctcctacacttagggaacaatcggatcgccgtcatccaggagggggctttcacaaatctgacaagcctgaggagattatatcttaatggtaactacttagaagtgctgtacccctctatgttcgatggcctgcagtccctccagtacttgtacctggaatataatgtgatcaaagagattaaacctcttacatttgacgctctgatcaatctccagctgctgtttctgaacaataaccttctgcgctccctaccggacaacatctttggaggaacagcactgacaagattaaatcttagaaacaatcatttctcccacctcccagtgaaaggcgtgctggatcagctccctgcattcattcaaatcgatctgcaggagaacccatgggactgtacttgtgacatcatgggcctgaaagattggaccgagcacgctaattctcctgtgattatcaatgaagttacttgtgagtcccctgcaaagcacgcaggcgaaattttgaagtttctaggaagagaagccatctgcccagacagtcccaatttgtctgatggcaccgttctttctatgaatcacaatacagatacacctcgctctctgtctgtgagcccgagctcctatcctgagctacataccgaggtgcctctgagcgtgttgattctgggtctcttggtggtgtttatcttatccgtgtgctttggcgctgggctgtttgtctttgtgctgaagcgacgaaagggcgtaccatctgttccaaggaacactaacaatttggacgtctcttcgttccaacttcaatatggttcttacaacactgaaacacacgataagactgacggccacgtgtacaactacatccccccacctgtggggcagatgtgtcagaatccaatctacatgcagaaggaaggcgatcctgtcgcatattatcgtaatctgcaggagttttcctactcaaacctcgaagaaaagaaggaggaacccgcaacgcctgcttacacgatttccgctacagagctcctggagaagcaggccacccccagagaacccgaactgctgtatcagaatatcgccgagcgtgtaaaggaacttccgagcgccggtctggtgcattataatttttgcaccctgccaaagcgccaatttgcccctagttacgagtctcgcagacagaatcaggacaggattaataagactgtgctgtacggcacgcccaggaagtgcttcgtgggccagtctaaaccaaaccaccctctgctgcaggcgaaaccccagagtgagcctgattatcttgaggttctggagaagcagaccgccatttcacagctttag

SEQ ID NO: 224783 - DNA, 3159 bp, Artificial Sequence
  derived and/or modified sequence
cttcctgcaagaagcgttgcccgttggctagctgctcggtggggatctgcctgccctgggggcgccgcccgcgctccccgcggtgctctcgctcctgggctgcgccagtccgaggcggtgccggctcctttgcctccccgagtcgcagatgctgcgggcgcctccgggaaaagatctgggcggcgcgctcgctcgatggacacaggaagatccagaagctagtggcacatctagcaacagagccagatcagaacccaggttggaggtggagtagttcagaatcaactgacgcagccgggaattgagctttgcaaagccacttgcaaggaagggaagcatctgcccaaccctcccccaccgcgcgccctggatcctctgcctgccccctcccccgtgacgtcaccctagtcctgtcccggggagcctgcaaagcctctcagattcaaactgctagacgcactgctgccaccgccaccgaattggaaacgcgcgcccaggctccgtcgtcgccttcgcccgccgaccgggccagccggctctccgacctccctacagaatcgcaccccagtccctccctggcagctcggcttccctcagctccaactcttctcttccgctcctgcctcctgtcggatttttaatttctgcgcacccccagtcaaattaaatcaaccaacaaaaagcagggcatcccccctggaagcagcgtcttattttaccttgttctcccacttcctgaagatgctaaactcctggtggactgcagaggagagggattcagtcttctcctgatgtcgattgcgatttctgctgggagctcaagacgggcgagctgcccgagatctcttcgagataccccaggggaggaggagatgggcaggatttagtaggacaactcggttactaatgacttggcggctggctgcgaccccccgggaaatcaggtttgcctgtaggtacctgagttgacaccgaaggtgcctaaagatgctgagcggcgtttggttcctcagtgtgttaaccgtggccgggatcttacagacagagagtcgcaaaactgccaaagacatttgcaagatccgctgtctgtgcgaagaaaaggaaaacgtactgaatatcaactgtgagaacaaaggatttacaacagttagcctgctccagcccccccagtatcgaatctatcagctttttctcaatggaaacctcttgacaagactgtatccaaacgaatttgtcaattactccaacgcggtgactcttcacctaggtaacaacgggttacaggagatccgaacgggggcattcagtggcctgaaaactctcaaaagactgcatctcaacaacaacaagcttgagatattgagggaggacaccttcctaggcctggagagcctggagtatctccaggccgactacaattacatcagtgccatcgaggctggggcattcagcaaacttaacaagctcaaagtgctcatcctgaatgacaaccttctgctttcactgcccagcaatgtgttccgctttgtcctgctgacccacttagacctcagggggaataggctaaaagtaatgccttttgctggcgtccttgaacatattggagggatcatggagattcagctggaggaaaatccatggaattgcacttgtgacttacttcctctcaaggcctggctagacaccataactgtttttgtgggagagattgtctgtgagactccctttaggttgcatgggaaagacgtgacccagctgaccaggcaagacctctgtcccagaaaaagtgccagtgattccagtcagaggggcagccatgctgacacccacgtccaaaggctgtcacctacaatgaatcctgctctcaacccaaccagggctccgaaagccagccggccgcccaaaatgagaaatcgtccaactcctcgagtgactgtgtcaaaggacaggcaaagttttggacccatcatggtgtaccagaccaagtctcctgtgcctctcacctgtcccagcagctgtgtctgcacctctcagagctcagacaatggtctgaatgtaaactgccaagaaaggaagttcactaatatctctgacctgcagcccaaaccgaccagtccaaagaaactctacctaacagggaactatcttcaaactgtctataagaatgacctcttagaatacagttctttggacttactgcacttaggaaacaacaggattgcagtcattcaggaaggtgcctttacaaacctgaccagtttacgcagactttatctgaatggcaattaccttgaagtgctgtacccttctatgtttgatggactgcagagcttgcaatatctctatttagagtataatgtcattaaggaaattaagcctctgacctttgatgctttgattaacctacagctactgtttctgaacaacaaccttcttcggtccttacctgataatatatttggggggacggccctaaccaggctgaatctgagaaacaaccatttttctcacctgcccgtgaaaggggttctggatcagctcccggctttcatccagatagatctgcaggagaacccctgggactgtacctgtgacatcatggggctgaaagactggacagaacatgccaattcccctgtcatcattaatgaggtgacttgcgaatctcctgctaagcatgcaggggagatactaaaatttctggggagggaggctatctgtccagacagcccaaacttgtcagatggaaccgtcttgtcaatgaatcacaatacagacacacctcggtcgcttagtgtgtctcctagttcctatcctgaactacacactgaagttccactgtctgtcttaattctgggattgcttgttgttttcatcttatctgtctgttttggggctggtttattcgtctttgtcttgaaacgccgaaagggagtgccgagcgttcccaggaataccaacaacttagacgtaagctcctttcaattacagtatgggtcttacaacactgagactcacgataaaacagacggccatgtctacaactatatccccccacctgtgggtcagatgtgccaaaaccccatctacatgcagaaggaaggagacccagtagcctattaccgaaacctgcaagagttcagctatagcaacctggag

SEQ ID NO: 224784 - DNA, 7672 bp, Artificial Sequence
  derived and/or modified sequence
gcggccgccctctaccctcaatccccactggagattcctcaccccgggaccgtccgcgcgggcgtggtcgggctccgcgcctcgcgcagcggggtggcacaggcggccagggagggcccacgcacccggcgcgagctagaagcctccggtcggcctgcagtgcccaagtcccatggcgagggcagcccgagtggccgtcgcggctgtaggtccgcatgccgggcaccgcaccaggcgtctagcaggtaggggcagggaaggtagggctgcgctggcggccggtgcccagttaccggcgatcggggacgctcggagacacctggtctcccggaagcgcccttcggaaatgggattcgacccggcttgcgggcggcgggtgtttagaagaagaggctgcgggcaagcagtgccccctctctggttccccggactcctcttagccccctcgtggcctgatgggcggccgggacggaggtgggctgtaagcccgccggcacccaccgtgtcctgtggaaggcttggagacctgagccaggctctactcggttagatgcgagtgagacaggcgacggagttcgtctttaagcctcccttgcctcagcaaggagagggagcgttttccttattttaatgaccgcctttccctcccttggggtcccagttcaccctgaacctttccacagccttaaaagcccgctctccctagcggagtgctgcggcagttcttcagaagacacggggccaaatgaaacttacttaaagtggttatcgcgtttcaggctgatttgttcctagtaactacgttttggaaagcagctgtggactctcaaggacaggcaggaacgaagacctccttagggtccgagtgtcgcttcccacagttagattacccatgaatttccttgattctgtaggtctcaagaatctcatgagcccccaaccacctccacctttctctctgaatctctctcctgtctctgaaattcttcgcaaaaataatctgtcctcaaggaatattgaaagcgtcatcaatgtcttgaaggaaattactgtatctgagaaccgaaactagtatttgatgtttcactttcaaatacatttttttttaataaaaaggatacctttaagtaaaacactaccactgctatttacgtttaagtagatttttaattcatattaagcagtagtgtgctttttggaaagatgatggactgggactcataatccctgggttttgtttctatttgtagtttcttgagtaagtcagcactttccctggttaagaaatgacctcatctgtaaaatgaacctgacttctaaggtcttgttcggctctcacgtctttacttcagttaaatattgacataatacatgtttgttgaatgaatgactgaatgaataaatcttattgctctaggaactatgtgcttttaacctttggaaatacatagaaacaaatgcctcctttgctaggaaagggagcttaattgtgctcccactgcatcagactgcttccatctaatgatgcaattgcaatacagggtgggaggccatccacagggctgtccctctgcctcagagctcatctcaagtttgcccttctctatggagaaggaaaatttgagtctccagaaggaaagtattttgctaaacgccaagcaagaattagagggtaagggggcttctgatgcctggtccaaggctcttagaagaagaagaaggagaaagggagaaagctcaagaaaataatgcacagatcaccagctacaggtggccctagtgcctaagtttataaactacccccgcccttcccggagagaaaggagcttgtataaagggaacaatcctagaacctaggcttaacaaggaaggagaaggggagaagcaagggtcattctgttctcaagtggtttgttgtatctgtgtgtttatctattccacatttggccaggcagtgggactccgggaaagcaagctgaagtgttttgtgggacaggcacatcatttggtcaactccttttccctggttgattccctccttttcctgacccatctcccccttcctaccagaggcaaccaaggcctttccaggcaacagcagacattatttaccccttgcgaattgattccacaatggaagactcttgggtccaaggagctgtaagataattaaggagaaaacagataatgaaggcaaaaatccaacacctggccattagcaatgctctggaaaggctatttaaacccgcattggatatcagagctgggagggcccatacagtctacctacctgccttttgcagatggacacaggaagatccagaagctagtggcacatctagcaacagagccagatcagaacccaggtaagctcggtctcaggccaggattccttttccatctcctctctttctcaggagccagtcttcctgcaccagcttcctcttttctcctagctcccctgcccctgcagcctggagggctcaaccacccttcctttggctcccactcccagctgaggctcagcctggcagtgcttttctgacacccacttcttttctccttcctccaggcaagaagtgcacgtttaaacctcattatctggctaagtataaacctcagggagaaaaggggtttgtttttgtttttctcagtctataagctaacattgagctgactttcagagtccaggcaaatatgtttggtgggtcaccacccagaaaggaattctcttagcactgaatcagggctctgtatgtaaagtataaatcccctaagagaactcctcaccctcctacacagacacattggtgcatgcacacacaccccactctctgcacagagagcatctgagctaggagctggcaagtggggcaccagtcctgtagcaaagaggcacaccacacacacacacacacacacacacacacactctctctctctctctctctcactcacacacacacacacacacacacacacacgcttctcccttgcttgggaatctgggagaagaaccccccacccccacccctgccctccataggcattgtgtaggtgagagaaagagggaggagtgagagagaacacacagaggggcccaaggaggtgccaggccattagcagggcccctccttgagaaacccctctgcaggagcttctcctgccgccagccaggttggaggtggagtagttcagaatcaactgacgcagccgggaattgagctttgcaaagccacttgcaaggaagggaagcatctgcccaaccctcccccaccgcgcgccctggatcctctgcctgccccctcccccgtgacgtcaccctagtcctgtcccggggagcctgcaaagcctctcagattcaaactgctagacgcactgctgccaccgccaccgaattggaaacgcgcgcccaggctccgtcgtcgccttcgcccgccgaccgggccagccggctctccgacctccctacagaatcgcaccccagtccctccctggcagctcggcttccctcagctccaactcttctcttccgctcctgcctcctgtcggatttttaatttctgcgcacccccagtcaaattaaatcaaccaacaaaaagcagggcatcccccctggaagcagcgtcttattttaccttgttctcccacttcctgaagatgctaaactcctggtggactgcagaggagagggattcagtcttctcctgatgtgtgagtaacccccacctcgcactgtctttcccatctctatctctcctctacacctgccgccagccccctgattcctgattttcccaccccctttttgcgctttttttttttttcctaaagcgattgcgatttctgctgggagctcaagacgggcgagctgcccgagatctcttcgagataccccaggggaggaggagatgggcaggatttagtaggacaactcggttactaatgacttggcggctggctgcgaccccccgggaaatcaggtgcaagcatgtgtgttcccggggcgcgtgtgtgggtggcctcgggatgggggaatagggagcggagaaaagaaaccgctttggaaaatgcaatgatttcattctgccgtgttgctaaccccctcattctccctcgctcccactccgcctccttgctttaccatttttaatcgggcttccttgtttctttcttccctgcacccgcttcttccccctgcccccacctaaggtttgcctgtaggtacctgagttgacaccgaaggtgcctaaagatgctgagcggcgtttggttcctcagtgtgttaaccgtggccgggatcttacagacagagagtcgcaaaactgccaaagacatttgcaagatccgctgtctgtgcgaagaaaaggaaaacgtactgaatatcaactgtgagaacaaaggatttacaacagttagcctgctccagcccccccagtatcgaatctatcagctttttctcaatggaaacctcttgacaagactgtatccaaacgaatttgtcaattactccaacgcggtgactcttcacctaggtaacaacgggttacaggagatccgaacgggggcattcagtggcctgaaaactctcaaaagactgcatctcaacaacaacaagcttgagatattgagggaggacaccttcctaggcctggagagcctggagtatctccaggccgactacaattacatcagtgccatcgaggctggggcattcagcaaacttaacaagctcaaagtgctcatcctgaatgacaaccttctgctttcactgcccagcaatgtgttccgctttgtcctgctgacccacttagacctcagggggaataggctaaaagtaatgccttttgctggcgtccttgaacatattggagggatcatggagattcagctggaggaaaatccatggaattgcacttgtgacttacttcctctcaaggcctggctagacaccataactgtttttgtgggagagattgtctgtgagactccctttaggttgcatgggaaagacgtgacccagctgaccaggcaagacctctgtcccagaaaaagtgccagtgattccagtcagaggggcagccatgctgacacccacgtccaaaggctgtcacctacaatgaatcctgctctcaacccaaccagggctccgaaagccagccggccgcccaaaatgagaaatcgtccaactcctcgagtgactgtgtcaaaggacaggcaaagttttggacccatcatggtgtaccagaccaagtctcctgtgcctctcacctgtcccagcagctgtgtctgcacctctcagagctcagacaatggtctgaatgtaaactgccaagaaaggaagttcactaatatctctgacctgcagcccaaaccgaccagtccaaagaaactctacctaacagggaactatcttcaaactgtctataagaatgacctcttagaatacagttctttggacttactgcacttaggaaacaacaggattgcagtcattcaggaaggtgcctttacaaacctgaccagtttacgcagactttatctgaatggcaattaccttgaagtgctgtacccttctatgtttgatggactgcagagcttgcaatatctctatttagagtataatgtcattaaggaaattaagcctctgacctttgatgctttgattaacctacagctactgtttctgaacaacaaccttcttcggtccttacctgataatatatttggggggacggccctaaccaggctgaatctgagaaacaaccatttttctcacctgcccgtgaaaggggttctggatcagctcccggctttcatccagatagatctgcaggagaacccctgggactgtacctgtgacatcatggggctgaaagactggacagaacatgccaattcccctgtcatcattaatgaggtgacttgcgaatctcctgctaagcatgcaggggagatactaaaatttctggggagggaggctatctgtccagacagcccaaacttgtcagatggaaccgtcttgtcaatgaatcacaatacagacacacctcggtcgcttagtgtgtctcctagttcctatcctgaactacacactgaagttccactgtctgtcttaattctgggattgcttgttgttttcatcttatctgtctgttttggggctggtttattcgtctttgtcttgaaacgccgaaagggagtgccgagcgttcccaggaataccaacaacttagacgtaagctcctttcaattacagtatgggtcttacaacactgagactcacgataaaacagacggccatgtctacaactatatccccccacctgtgggtcagatgtgccaaaaccccatctacatgcagaaggaaggagacccagtagcctattaccgaaacctgcaagagttcagctatagcaacctggaggagaaaaaagaagagccagccacacctgcttacacaataagtgccactgagctgctagaaaagcaggccacaccaagagagcctgagctgctgtatcaaaatattgctgagcgagtcaaggaacttcccagcgcaggcctagtccactataacttttgtaccttacctaaaaggcagtttgccccttcctatgaatctcgacgccaaaaccaagacagaatcaataaaaccgttttatatggaactcccaggaaatgctttgtggggcagtcaaaacccaaccaccctttactgcaagctaagccgcaatcagaaccggactacctcgaagttctggaaaaacaaactgcaatcagtcagctgtgaagggaaatcatttacaaccctaaggcatcagaggatgctgctccgaactgttggaaacaaggacattagcttttgtgtttgtttttgttctccctttcccagtgttaatgggggactttgaaaatgtttgggagataggatgaagtcatgattttgcttttgcaagttttcctttaaattatttctctctcgctctcctcccctccttttttttttttttttttttttctttttcccttctcttcttaggaaccatcagtggacatgaatgtttctacaatgcatttcttcatagattttgtttatggttttgtttcttttttcttctttgtttttcagtgtgggagtgggaagaggagattatagtgactgaagaaagaataggcaaacttttcaaatgaaaatggatatttagtgtattttgtagaagatctccaaagatcttttgtgactacaacttcttttgtaaataatgatatatggtatttccatcgtcagttaccgagtatagccactgggtatcactactttgtgttaaagtgccttcgcactttaagtacattacttaaatgttgcttttagctttgataaattgaaaatattttaatgtgttgtatttttgaaattgaaaacactgtaaaatagattgatgtgtcagctatattaagtcaacgtacagtttgcttgagttatagaaaccagcctgtcatcaaatgattctagttctaggactttgtaggcttaactataaaatatttcctttcctctgggtttaagtgattttatttaagtcaactaaggggatttaacagtggactagaggtaataagccacctcagtcaggattaataattcattaataaaatatatttaacccaa

SEQ ID NO: 224785 - DNA, 5431 bp, Artificial Sequence
  derived and/or modified sequence
gcctccccgagtcgcagatgctgcgggcgcctccgggaaaagatctgggcggcgcgctcgctcgatggacacaggaagatccagaagctagtggcacatctagcaacagagccagatcagaacccaggtaagctcggtctcaggccaggattccttttccatctcctctctttctcaggagccagtcttcctgcaccagcttcctcttttctcctagctcccctgcccctgcagcctggagggctcaaccacccttcctttggctcccactcccagctgaggctcagcctggcagtgcttttctgacacccacttcttttctccttcctccaggcaagaagtgcacgtttaaacctcattatctggctaagtataaacctcagggagaaaaggggtttgtttttgtttttctcagtctataagctaacattgagctgactttcagagtccaggcaaatatgtttggtgggtcaccacccagaaaggaattctcttagcactgaatcagggctctgtatgtaaagtataaatcccctaagagaactcctcaccctcctacacagacacattggtgcatgcacacacaccccactctctgcacagagagcatctgagctaggagctggcaagtggggcaccagtcctgtagcaaagaggcacaccacacacacacacacacacacacacacacactctctctctctctctctctcactcacacacacacacacacacacacacacacgcttctcccttgcttgggaatctgggagaagaaccccccacccccacccctgccctccataggcattgtgtaggtgagagaaagagggaggagtgagagagaacacacagaggggcccaaggaggtgccaggccattagcagggcccctccttgagaaacccctctgcaggagcttctcctgccgccagccaggttggaggtggagtagttcagaatcaactgacgcagccgggaattgagctttgcaaagccacttgcaaggaagggaagcatctgcccaaccctcccccaccgcgcgccctggatcctctgcctgccccctcccccgtgacgtcaccctagtcctgtcccggggagcctgcaaagcctctcagattcaaactgctagacgcactgctgccaccgccaccgaattggaaacgcgcgcccaggctccgtcgtcgccttcgcccgccgaccgggccagccggctctccgacctccctacagaatcgcaccccagtccctccctggcagctcggcttccctcagctccaactcttctcttccgctcctgcctcctgtcggatttttaatttctgcgcacccccagtcaaattaaatcaaccaacaaaaagcagggcatcccccctggaagcagcgtcttattttaccttgttctcccacttcctgaagatgctaaactcctggtggactgcagaggagagggattcagtcttctcctgatgtgtgagtaacccccacctcgcactgtctttcccatctctatctctcctctacacctgccgccagccccctgattcctgattttcccaccccctttttgcgctttttttttttttcctaaagcgattgcgatttctgctgggagctcaagacgggcgagctgcccgagatctcttcgagataccccaggggaggaggagatgggcaggatttagtaggacaactcggttactaatgacttggcggctggctgcgaccccccgggaaatcaggtgcaagcatgtgtgttcccggggcgcgtgtgtgggtggcctcgggatgggggaatagggagcggagaaaagaaaccgctttggaaaatgcaatgatttcattctgccgtgttgctaaccccctcattctccctcgctcccactccgcctccttgctttaccatttttaatcgggcttccttgtttctttcttccctgcacccgcttcttccccctgcccccacctaaggtttgcctgtaggtacctgagttgacaccgaaggtgcctaaagatgctgagcggcgtttggttcctcagtgtgttaaccgtggccgggatcttacagacagagagtcgcaaaactgccaaagacatttgcaagatccgctgtctgtgcgaagaaaaggaaaacgtactgaatatcaactgtgagaacaaaggatttacaacagttagcctgctccagcccccccagtatcgaatctatcagctttttctcaatggaaacctcttgacaagactgtatccaaacgaatttgtcaattactccaacgcggtgactcttcacctaggtaacaacgggttacaggagatccgaacgggggcattcagtggcctgaaaactctcaaaagactgcatctcaacaacaacaagcttgagatattgagggaggacaccttcctaggcctggagagcctggagtatctccaggccgactacaattacatcagtgccatcgaggctggggcattcagcaaacttaacaagctcaaagtgctcatcctgaatgacaaccttctgctttcactgcccagcaatgtgttccgctttgtcctgctgacccacttagacctcagggggaataggctaaaagtaatgccttttgctggcgtccttgaacatattggagggatcatggagattcagctggaggaaaatccatggaattgcacttgtgacttacttcctctcaaggcctggctagacaccataactgtttttgtgggagagattgtctgtgagactccctttaggttgcatgggaaagacgtgacccagctgaccaggcaagacctctgtcccagaaaaagtgccagtgattccagtcagaggggcagccatgctgacacccacgtccaaaggctgtcacctacaatgaatcctgctctcaacccaaccagggctccgaaagccagccggccgcccaaaatgagaaatcgtccaactcctcgagtgactgtgtcaaaggacaggcaaagttttggacccatcatggtgtaccagaccaagtctcctgtgcctctcacctgtcccagcagctgtgtctgcacctctcagagctcagacaatggtctgaatgtaaactgccaagaaaggaagttcactaatatctctgacctgcagcccaaaccgaccagtccaaagaaactctacctaacagggaactatcttcaaactgtctataagaatgacctcttagaatacagttctttggacttactgcacttaggaaacaacaggattgcagtcattcaggaaggtgcctttacaaacctgaccagtttacgcagactttatctgaatggcaattaccttgaagtgctgtacccttctatgtttgatggactgcagagcttgcaatatctctatttagagtataatgtcattaaggaaattaagcctctgacctttgatgctttgattaacctacagctactgtttctgaacaacaaccttcttcggtccttacctgataatatatttggggggacggccctaaccaggctgaatctgagaaacaaccatttttctcacctgcccgtgaaaggggttctggatcagctcccggctttcatccagatagatctgcaggagaacccctgggactgtacctgtgacatcatggggctgaaagactggacagaacatgccaattcccctgtcatcattaatgaggtgacttgcgaatctcctgctaagcatgcaggggagatactaaaatttctggggagggaggctatctgtccagacagcccaaacttgtcagatggaaccgtcttgtcaatgaatcacaatacagacacacctcggtcgcttagtgtgtctcctagttcctatcctgaactacacactgaagttccactgtctgtcttaattctgggattgcttgttgttttcatcttatctgtctgttttggggctggtttattcgtctttgtcttgaaacgccgaaagggagtgccgagcgttcccaggaataccaacaacttagacgtaagctcctttcaattacagtatgggtcttacaacactgagactcacgataaaacagacggccatgtctacaactatatccccccacctgtgggtcagatgtgccaaaaccccatctacatgcagaaggaaggagacccagtagcctattaccgaaacctgcaagagttcagctatagcaacctggaggagaaaaaagaagagccagccacacctgcttacacaataagtgccactgagctgctagaaaagcaggccacaccaagagagcctgagctgctgtatcaaaatattgctgagcgagtcaaggaacttcccagcgcaggcctagtccactataacttttgtaccttacctaaaaggcagtttgccccttcctatgaatctcgacgccaaaaccaagacagaatcaataaaaccgttttatatggaactcccaggaaatgctttgtggggcagtcaaaacccaaccaccctttactgcaagctaagccgcaatcagaaccggactacctcgaagttctggaaaaacaaactgcaatcagtcagctgtgaagggaaatcatttacaaccctaaggcatcagaggatgctgctccgaactgttggaaacaaggacattagcttttgtgtttgtttttgttctccctttcccagtgttaatgggggactttgaaaatgtttgggagataggatgaagtcatgattttgcttttgcaagttttcctttaaattatttctctctcgctctcctcccctccttttttttttttttttttttttctttttcccttctcttcttaggaaccatcagtggacatgaatgtttctacaatgcatttcttcatagattttgtttatggttttgtttcttttttcttctttgtttttcagtgtgggagtgggaagaggagattatagtgactgaagaaagaataggcaaacttttcaaatgaaaatggatatttagtgtattttgtagaagatctccaaagatcttttgtgactacaacttcttttgtaaataatgatatatggtatttccatcgtcagttaccgagtatagccactgggtatcactactttgtgttaaagtgccttcgcactttaagtacattacttaaatgttgcttttagctttgataaattgaaaatattttaatgtgttgtatttttgaaattgaaaacactgtaaaatagattgatgtgtcagctatattaagtcaacgtacagtttgcttgagttatagaaaccagcctgtcatcaaatgattctagttctaggactttgtaggcttaactataaaatatttcctttcctctgggtttaagtgattttatttaagtcaactaaggggatttaacagtggactagaggtaataagccacctcagtcaggattaataattcattaataaaatatatttaaccc

SEQ ID NO: 224786 - DNA, 2175 bp, Artificial Sequence
  derived and/or modified sequence
atgctgagcggcgtgtggttcctgagcgtgctgaccgtggccggcatcctgcagaccgagagcagaaagaccgccaaggacatctgcaagatcagatgcctgtgcgaggagaaggagaacgtgctgaacatcaactgcgagaacaagggcttcaccaccgtgagcctgctgcagcccccccagtacagaatctaccagctgttcctgaacggcaacctgctgaccagactgtaccccaacgagttcgtgaactacagcaacgccgtgaccctgcacctgggcaacaacggcctgcaggagatcagaaccggcgccttcagcggcctgaagaccctgaagagactgcacctgaacaacaacaagctggagatcctgagagaggacaccttcctgggcctggagagcctggagtacctgcaggccgactacaactacatcagcgccatcgaggccggcgccttcagcaagctgaacaagctgaaggtgctgatcctgaacgacaacctgctgctgagcctgcccagcaacgtgttcagattcgtgctgctgacccacctggacctgagaggcaacagactgaaggtgatgcccttcgccggcgtgctggagcacatcggcggcatcatggagatccagctggaggagaacccctggaactgcacctgcgacctgctgcccctgaaggcctggctggacaccatcaccgtgttcgtgggcgagatcgtgtgcgagacccccttcagactgcacggcaaggacgtgacccagctgaccagacaggacctgtgccccagaaagagcgccagcgacagcagccagagaggcagccacgccgacacccacgtgcagagactgagccccaccatgaaccccgccctgaaccccaccagagcccccaaggccagcagaccccccaagatgagaaacagacccacccccagagtgaccgtgagcaaggacagacagagcttcggccccatcatggtgtaccagaccaagagccccgtgcccctgacctgccccagcagctgcgtgtgcaccagccagagcagcgacaacggcctgaacgtgaactgccaggagagaaagttcaccaacatcagcgacctgcagcccaagcccaccagccccaagaagctgtacctgaccggcaactacctgcagaccgtgtacaagaacgacctgctggagtacagcagcctggacctgctgcacctgggcaacaacagaatcgccgtgatccaggagggcgccttcaccaacctgaccagcctgagaagactgtacctgaacggcaactacctggaggtgctgtaccccagcatgttcgacggcctgcagagcctgcagtacctgtacctggagtacaacgtgatcaaggagatcaagcccctgaccttcgacgccctgatcaacctgcagctgctgttcctgaacaacaacctgctgagaagcctgcccgacaacatcttcggcggcaccgccctgaccagactgaacctgagaaacaaccacttcagccacctgcccgtgaagggcgtgctggaccagctgcccgccttcatccagatcgacctgcaggagaacccctgggactgcacctgcgacatcatgggcctgaaggactggaccgagcacgccaacagccccgtgatcatcaacgaggtgacctgcgagagccccgccaagcacgccggcgagatcctgaagttcctgggcagagaggccatctgccccgacagccccaacctgagcgacggcaccgtgctgagcatgaaccacaacaccgacacccccagaagcctgagcgtgagccccagcagctaccccgagctgcacaccgaggtgcccctgagcgtgctgatcctgggcctgctggtggtgttcatcctgagcgtgtgcttcggcgccggcctgttcgtgttcgtgctgaagagaagaaagggcgtgcccagcgtgcccagaaacaccaacaacctggacgtgagcagcttccagctgcagtacggcagctacaacaccgagacccacgacaagaccgacggccacgtgtacaactacatccccccccccgtgggccagatgtgccagaaccccatctacatgcagaaggagggcgaccccgtggcctactacagaaacctgcaggagttcagctacagcaacctggagtag

SEQ ID NO: 224787 - protein, 223 aa, Artificial Sequence
  derived and/or modified sequence
MTWRHHVRLLFTVSLALQIINLGNSYQREKHNGGREEVTKVATQKHRQSPLNWTSSHFGEVTGSAEGWGPEEPLPYSRAFGEGASARPRCCRNGGTCVLGSFCVCPAHFTGRYCEHDQRRSECGALEHGAWTLRACHLCRCIFGALHCLPLQTPDRCDPKDFLASHAHGPSAGGAPSLLLLLPCALLHRLLRPDAPAHPRSLVPSVLQRERRPCGRPGLGHRL

SEQ ID NO: 224788 - DNA, 672 bp, Artificial Sequence
  derived and/or modified sequence
atgacctggagacatcatgttagactgttattcaccgtcagccttgcattgcagataatcaatctgggcaattcctaccagagagagaagcacaatggcgggagagaggaggtgacaaaggtggcgacacagaagcaccgccagagcccattaaactggacctctagccatttcggggaggtgactgggagcgctgaggggtggggaccggaagagccattgccctactcaagagcatttggggaaggagcatccgctcgtccacggtgctgtcggaacgggggaacgtgcgtcttaggatcattctgtgtttgtcctgcgcactttacagggagatactgtgagcacgaccaaaggaggagcgaatgtggcgcactggaacacggagcttggactctgcgtgcttgccacctctgtagatgcatttttggggcgttgcattgcctgcccctgcagactcctgaccgctgtgatcctaaggatttcttggccagccacgcccacggtccttccgcaggcggggcacccagcctgcttctccttctgccatgtgccttattgcacagactgctgcgccccgacgctcctgcccacccaagatccctggtgccctcagtgctacagcgggagcgcagaccctgcggcaggcccggcctggggcaccgcttatag

SEQ ID NO: 224789 - DNA, 672 bp, Artificial Sequence
  derived and/or modified sequence
atgacctggaggcaccacgtgcggctgctcttcaccgtgtccctggccctgcagatcatcaacctgggcaacagctaccagcgggagaagcacaacggcggccgggaggaggtgaccaaggtggccacccagaagcaccggcagagccccctgaactggaccagcagccactttggagaggtgacaggcagcgctgagggctggggccctgaggagcccctgccctacagccgggccttcggggagggcgccagcgcccggccccgctgctgcagaaatggaggcacctgtgtgctgggcagcttctgtgtgtgcccagcccacttcaccggccgctactgtgaacatgaccagaggagaagtgaatgtggggccctggagcacggggcctggaccctgcgggcctgccacctgtgccgctgcatctttggagccctgcactgcctgcccctgcagaccccagacagatgtgaccccaaggacttcctggccagccacgcccacggccccagcgctgggggcgcccccagcctgctgctgctgctgccctgtgccctgctgcaccggctgctgcggccagatgccccagcccaccccaggagcctggtgcccagcgtgctgcagcgggagcggcggccctgtggccggcccggcctgggccaccggctgtag

SEQ ID NO: 224790 - DNA, 672 bp, Artificial Sequence
  derived and/or modified sequence
atgacctggcggcaccacgtgcggctgctgttcaccgtgagcctggccctgcagatcatcaatctgggtaacagctatcaacgagagaaacacaacggaggacgggaagaggttacaaaggtagcaacccagaaacacaggcagtcacctctcaactggacaagctcacactttggcgaagtaacagggtcagcagagggttggggcccagaagagccattaccatactcaagagcctttggcgagggggctagcgcgcgccctaggtgctgtagaaacgggggtacatgcgttctgggctctttttgcgtttgccctgctcactttactggcagatactgtgagcacgatcagaggcgaagcgagtgcggagcactcgagcatggcgcttggacactgcgcgcctgccacctgtgtcggtgcatttttggggcgctgcactgtctgcctctacagacacctgatcgatgtgatccaaaagacttcctagcatcccacgcgcacggcccttcagcagggggagccccatctctgctgttgctgctaccgtgtgcactgttacaccggcttctacgccctgacgcacccgcccatcctcggagcctcgtgccgtccgtcctccagcgcgagaggagaccctgcgggaggcccggcctgggccacagactctag

SEQ ID NO: 224791 - DNA, 672 bp, Artificial Sequence
  derived and/or modified sequence
atgacttggcgacatcatgtcaggttacttttcacggtgtcactcgccctgcagattattaatctgggcaacagttatcagcgggagaagcacaatgggggacgggaggaagtaaccaaagttgccactcagaaacacaggcagtctcctttgaactggaccagctctcatttcggtgaagtgacgggctcagcagaaggctggggacctgaagagcctctgccctactctagggccttcggtgaaggggcaagcgctagacccagatgctgccgtaacgggggtacatgcgtcctcggttccttctgcgtgtgtcccgctcatttcacagggaggtactgtgaacatgatcagaggcggagtgaatgtggagccctagagcatggggcatggaccttgcgggcttgtcacctgtgtcgctgcatcttcggagcattgcattgcctgcccctccaaacacccgatagatgcgatcctaaggactttctggcgagtcacgctcacggcccttctgctggtggagccccttcccttctgctactcttgccatgtgccctcctgcaccggctattgaggccagacgcacctgcccacccaaggtctctggttcccagcgtattgcaaagagaaagacggccatgcggtcggcctggcctcggccacagactgtag

SEQ ID NO: 224792 - DNA, 1046 bp, Artificial Sequence
  derived and/or modified sequence
atagagggaattgttcttcaggctcggaggggcctgcctgtcactgcgcccccgaccctagctcagggactgcagaactcaagataccatcccgtttctcctggctgaggaagggaagggaacatccacatcttctgtactcgtccattctgtgtccccggggcctggagtaaagacaccttcaaatgcagagactcttcagattcagctttcctggaaactgatcttcaatgcactaagagaaggagactctcaaaccaaaaatgacctggaggcaccatgtcaggcttctgtttacggtcagtttggcattacagatcatcaatttgggaaacagctatcaaagagagaaacataacggcggtagagaggaagtcaccaaggttgccactcagaagcaccgacagtcaccgctcaactggacctccagtcatttcggagaggtgactgggagcgccgagggctgggggccggaggagccgctcccctactcccgggctttcggagagggtgcgtccgcgcggccgcgctgctgcaggaacggcggtacctgcgtgctgggcagcttctgcgtgtgcccggcccacttcaccggccgctactgcgagcatgaccagaggcgcagtgaatgcggcgccctggagcacggagcctggaccctccgcgcctgccacctctgcaggtgcatcttcggggccctgcactgcctccccctccagacgcctgaccgctgtgacccgaaagacttcctggcctcccacgctcacgggccgagcgccgggggcgcgcccagcctgctactcttgctgccctgcgcactcctgcaccgcctcctgcgcccggatgcgcccgcgcaccctcggtccctggtcccttccgtcctccagcgggagcggcgcccctgcggaaggccgggacttgggcatcgcctttaattttctatgttgtaaataatagatgtgtttagtttaccgtaagctgaagcactgggtgaatatttttattgggtaataaatattttcatgaaagcgcctttggctccagat

SEQ ID NO: 224793 - DNA, 672 bp, Artificial Sequence
  derived and/or modified sequence
atgacctggagacaccacgtgagactgctgttcaccgtgagcctggccctgcagatcatcaacctgggcaacagctaccagagagagaagcacaacggcggcagagaggaggtgaccaaggtggccacccagaagcacagacagagccccctgaactggaccagcagccacttcggcgaggtgaccggcagcgccgagggctggggccccgaggagcccctgccctacagcagagccttcggcgagggcgccagcgccagacccagatgctgcagaaacggcggcacctgcgtgctgggcagcttctgcgtgtgccccgcccacttcaccggcagatactgcgagcacgaccagagaagaagcgagtgcggcgccctggagcacggcgcctggaccctgagagcctgccacctgtgcagatgcatcttcggcgccctgcactgcctgcccctgcagacccccgacagatgcgaccccaaggacttcctggccagccacgcccacggccccagcgccggcggcgcccccagcctgctgctgctgctgccctgcgccctgctgcacagactgctgagacccgacgcccccgcccaccccagaagcctggtgcccagcgtgctgcagagagagagaagaccctgcggcagacccggcctgggccacagactgtag

SEQ ID NO: 224794 - protein, 814 aa, Artificial Sequence
  derived and/or modified sequence
MERYKALEQLLTELDDFLKILDQENLSSTALVKKSCLAELLRLYTKSSSSDEEYIYMNKVTINKQQNAESQGKAPEEQGLLPNGEPSQHSSAPQKSLPDLPPPKMIPERKQLAIPKTESPEGYYEEAEPYDTSLNEDGEAVSSSYESYDEEDGSKGKSAPYQWPSPEAGIELMRDARICAFLWRKKWLGQWAKQLCVIKDNRLLCYKSSKDHSPQLDVNLLGSSVIHKEKQVRKKEHKLKITPMNADVIVLGLQSKDQAEQWLRVIQEVSGLPSEGASEGNQYTPDAQRFNCQKPDIAEKYLSASEYGSSVDGHPEVPETKDVKKKCSAGLKLSNLMNLGRKKSTSLEPVERSLETSSYLNVLVNSQWKSRWCSVRDNHLHFYQDRNRSKVAQQPLSLVGCEVVPDPSPDHLYSFRILHKGEELAKLEAKSSEEMGHWLGLLLSESGSKTDPEEFTYDYVDADRVSCIVSAAKNSLLLMQRKFSEPNTYIDGLPSQDRQEELYDDVDLSELTAAVEPTEEATPVADDPNERESDRVYLDLTPVKSFLHGPSSAQAQASSPTLSCLDNATEALPADSGPGPTPDEPCIKCPENLGEQQLESLEPEDPSLRITTVKIQTEQQRISFPPSCPDAVVATPPGASPPVKDRLRVTSAEIKLGKNRTEAEVKRYTEEKERLEKKKEEIRGHLAQLRKEKRELKETLLKCTDKEVLASLEQKLKEIDEECRGEESRRVDLELSIMEVKDNLKKAEAGPVTLGTTVDTTHLENPKAVTPASAPDCTPVNSATTLKNRPLSVVVTGKGTVLQKAKEWEKKGAS

SEQ ID NO: 224795 - protein, 841 aa, Artificial Sequence
  derived and/or modified sequence
QRVRALEQLLTELDDFLKILDQENLSSTALVKKSCLAELLRLYTKSSSSDEEYIYMNKVTINKQQNAESQGKAPEEQGLLPNGEPSQHSSAPQKSLPDLPPPKMIPERKQLAIPKTESPEGYYEEAEPYDTSLNGHSGGFLPTGVPRWVQVPEGVIYATITLEDGEAVSSSYESYDEEDGSKGKSAPYQWPSPEAGIELMRDARICAFLWRKKWLGQWAKQLCVIKDNRLLCYKSSKDHSPQLDVNLLGSSVIHKEKQVRKKEHKLKITPMNADVIVLGLQSKDQAEQWLRVIQEVSGLPSEGASEGNQYTPDAQRFNCQKPDIAEKYLSASEYGSSVDGHPEVPETKDVKKKCSAGLKLSNLMNLGRKKSTSLEPVERSLETSSYLNVLVNSQWKSRWCSVRDNHLHFYQDRNRSKVAQQPLSLVGCEVVPDPSPDHLYSFRILHKGEELAKLEAKSSEEMGHWLGLLLSESGSKTDPEEFTYDYVDADRVSCIVSAAKNSLLLMQRKFSEPNTYIDGLPSQDRQEELYDDVDLSELTAAVEPTEEATPVADDPNERESDRVYLDLTPVKSFLHGPSSAQAQASSPTLSCLDNATEALPADSGPGPTPDEPCIKCPENLGEQQLESLEPEDPSLRITTVKIQTEQQRISFPPSCPDAVVATPPGASPPVKDRLRVTSAEIKLGKNRTEAEVKRYTEEKERLEKKKEEIRGHLAQLRKEKRELKETLLKCTDKEVLASLEQKLKEIDEECRGEESRRVDLELSIMEVKDNLKKAEAGPVTLGTTVDTTHLENPKAVTPASAPDCTPVNSATTLKNRPLSVVVTGKGTVLQKAKEWEKKGAS

SEQ ID NO: 224796 - DNA, 2445 bp, Artificial Sequence
  derived and/or modified sequence
atggagaggtacaaagccctggaacagttgttaacggagctggacgacttcctcaagatcctggaccaggaaaacttaagttcaacagccctggtaaaaaaaagttgccttgccgaactgctccggctttacaccaaaagtagctctagcgatgaggagtacatttacatgaacaaagtgactattaacaaacagcaaaacgctgaatcgcaggggaaagctccagaggaacagggactcctgccaaatggtgagcccagtcagcacagtagcgcccctcagaagagtttgcctgatctaccaccccccaaaatgattcccgagaggaaacaactggctattccaaagacagaaagccccgagggatactatgaggaagccgaaccatatgatacctccctcaacgaggacggagaagctgtgtcatcctcctacgagtcatacgatgaggaggatggcagcaaaggcaaatccgccccttaccagtggccatcacctgaagctgggatcgagcttatgagagacgctcggatctgcgcctttctgtggagaaaaaaatggctcggccagtgggctaagcagctatgcgtaatcaaggataatagactattatgttataaaagcagcaaagaccacagcccgcaattagacgtgaacctattggggagttctgtgattcacaaggaaaagcaggtgcgcaaaaaggagcacaaacttaagataacacccatgaatgccgatgttatcgttctcggcctccaatcaaaagatcaagcagaacagtggctgcgagttatccaggaggtctctgggctgccatctgagggagcatctgagggaaaccagtacacacctgacgcacagcggttcaattgccagaagcccgacattgcagagaagtacctgtccgcatccgagtatggttcctccgtggacggacatcccgaggtacccgagactaaagacgtgaagaaaaaatgctctgcagggttaaaactgtcaaacttgatgaatctcggccggaagaagtctaccagcctggagcctgtcgagcgatccctcgaaacgtcgtcatatctgaatgtcctggttaatagtcagtggaaatcgaggtggtgctctgttagggacaaccatctccacttctatcaggaccgcaacaggtctaaggtggcacagcagcccctatccctggtggggtgtgaggtggttccggatccctctcccgaccatctgtactcttttaggatcttacacaagggtgaggaactggctaagctggaggctaagtcatcagaagagatgggacattggctgggtcttttactgagcgagagcggcagtaagaccgatcctgaagaatttacctacgactacgtcgatgccgacagagtttcttgcattgtgtctgcagccaaaaacagtctccttctgatgcagcgaaaattctcggagcccaatacatatatagacggccttccttctcaggatagacaggaggaattgtacgatgatgtggatctatctgagctcactgcggctgtggaacccacagaagaggccactcccgtggcggatgaccctaacgagcgggagagcgacagagtctatctcgatctgacacccgttaagtctttcctgcacggtccctcatcagctcaggctcaggcctcctctccaacactgtcttgtctggacaacgccacagaggcactccccgctgatagcggccccgggcccacgcccgacgaaccatgcattaagtgtcccgagaacctaggtgaacagcagctcgaatctcttgagccagaggacccgagtctgcgcattacaaccgtcaagatacagaccgaacaacaaagaatcagcttcccaccatcgtgtccggacgccgtcgttgccactccccccggtgcaagccctccagttaaagatagactaagagttactagcgcagaaattaagctaggaaaaaaccgcactgaggcagaagtcaagaggtatactgaggaaaaagaacggctcgagaagaaaaaggaggagattcgagggcacttggcacagctgcgaaaggagaagagagaactgaaagagaccctgctgaagtgcactgataaagaggttctggcctccctggaacagaaactgaaggagattgacgaagagtgccgcggagaagagagcagacgcgtggacctcgagttaagtatcatggaggtgaaagataacttgaaaaaagctgaggctgggccagttacacttggcactaccgtggacactacccacctggagaacccaaaggctgtgacaccagcctcagcgcccgattgtacgccagttaattcggccacgaccctgaaaaacaggccgctctcggtggtggtgacaggaaaaggtaccgttctgcagaaagccaaggagtgggagaaaaaaggagcaagctag

SEQ ID NO: 224797 - DNA, 2526 bp, Artificial Sequence
  derived and/or modified sequence
cagcgtgttcgggctctggaacagcttctcactgagttggatgacttccttaagattctcgaccaggagaacctgtccagcacagcattagtcaaaaaatcctgtctggctgagctactaaggctgtacactaaatcgtcctcgtctgacgaggagtacatctacatgaacaaagtgactattaacaagcagcagaacgcggaaagtcagggaaaagcccctgaggaacaggggttgctacctaacggtgagccttcccagcattcatccgccccacagaagagcttgccagacttgccaccacccaaaatgatccccgagagaaagcagttagcgatccccaagacagaatctcctgaaggctactatgaggaggccgaaccatatgatacatccttgaatggacatagcgggggatttctccctaccggggtgccccggtgggtgcaagtccctgagggtgtcatttacgcgaccataactttggaggatggtgaggctgtttcaagcagttacgagtcttatgacgaagaggacggctcgaaaggaaagtctgcgccctatcaatggccgtccccggaggctggaatagaactgatgcgagatgctaggatctgcgcttttctttggagaaagaagtggctgggccagtgggccaagcagctctgcgtgattaaagacaataggcttctatgctataaatcaagcaaagatcacagtccacagctcgacgtgaatctgctaggctcgagcgtcatccataaagaaaaacaggttcgaaagaaggagcacaaattgaaaataacgcccatgaacgccgacgtgatcgtactcggcttacagtccaaagaccaggcagagcagtggctgcgtgtcatccaggaagtaagcgggctcccctcagagggtgcaagtgagggcaatcagtataccccagacgcccagaggtttaattgccagaaaccagacatcgccgaaaagtacctgtccgcaagcgaatatggcagcagcgtggatgggcatcctgaagttcccgaaactaaggacgtcaaaaagaagtgtagtgcagggctcaagctgagtaatttgatgaacttaggccggaaaaagtctacttcccttgaacctgtggagaggagtcttgagaccagcagctacctgaacgtgcttgtcaattcacagtggaaaagccgttggtgcagcgtgcgcgacaaccacctccacttttatcaggacagaaatcggtccaaagtcgcacagcagcccctgtctctggttggttgtgaagtcgtgcctgatccctcccctgatcacctgtatagttttcgcatccttcacaagggcgaggaactggctaaactggaggctaaaagctctgaagagatgggtcactggctcggcctgttgctgagtgagtctgggagtaaaacagacccagaagagtttacctatgactacgtggacgcagatcgggtttcctgtatagtgtccgccgcaaaaaattccctgctgctgatgcaaaggaagttttcggagcccaacacctatatcgatgggctccccagtcaggaccgacaagaagaactgtacgatgatgtggatctgtccgagctgactgccgccgtggaaccaaccgaggaggccacgccagtcgcggatgatccaaacgaaagagagagcgaccgcgtttacttagacctgacccctgtcaagagtttcctccacgggcccagttctgcacaggcccaagcctcctctccgacactgtcgtgcctggacaacgccaccgaggcactgccagcagacagcggccccggccccacccccgatgagccctgtatcaagtgccctgaaaacttgggggagcaacagctggagtccctagagcccgaggaccccagtttgcgcataacaacagtgaagattcagacggagcagcagcggatatctttccccccctcctgtcccgacgcggttgtggccacccctcccggagcctccccgcctgtgaaagatcgcctgagggtgacttcagccgagataaaactggggaaaaaccgtaccgaggccgaagtgaaaagatacacagaagaaaaagagcgattagaaaaaaaaaaagaagaaattcgcggacatctcgcgcagctgagaaaggagaaaagggagctaaaggagaccctgctcaaatgtacagataaagaggtactggcatccctggagcagaagctcaaggaaattgacgaggaatgtcggggcgaggagtcgcggcgcgtggacctcgaactgtcgatcatggaggtgaaggacaatcttaagaaagctgaggccggcccagtgacattaggcactactgttgacactacacaccttgagaaccccaaggctgtaacccccgcatccgcccctgactgtacacccgtgaactccgccaccaccctgaagaatcgccctttgtctgtagtggttacgggaaagggcaccgtgctccagaaagcaaaagagtgggaaaaaaaaggcgcgtcatag

SEQ ID NO: 224798 - DNA, 2445 bp, Artificial Sequence
  derived and/or modified sequence
atggagcgctacaaggccctggagcagctgctgacagagctggatgacttcctgaagatcctggaccaggagaacctgagcagcacagccctggtgaagaagagctgcctggccgagctgctgcggctgtacaccaagagcagcagcagtgatgaggagtacatctacatgaacaaggtgaccatcaacaagcagcagaatgctgagagccagggcaaggcccctgaggagcagggcctgctgcccaatggagagcccagccagcacagcagcgccccccagaagagcctgcctgacctgcccccacccaagatgatccctgagaggaagcagctggccatccccaagacagagagccctgagggctactatgaggaggccgagccctatgacaccagcctgaatgaagatggagaggccgtgagcagcagctatgagagctatgatgaagaagatggcagcaagggcaagagcgccccctaccagtggcccagccctgaggccggcatcgagctgatgagagatgcccgcatctgtgccttcctgtggaggaagaagtggctgggccagtgggccaagcagctgtgtgtgatcaaggacaaccggctgctgtgctacaagagcagcaaggaccacagcccccagctggatgtgaacctgctgggcagcagcgtcatccacaaggagaagcaggtgaggaagaaggagcacaagctgaagatcacccccatgaatgctgatgtgattgtgctgggcctgcagagcaaggaccaggccgagcagtggctgcgggtcatccaggaggtgtctggcctgcccagcgagggcgccagcgagggcaaccagtacaccccagatgcccagcgcttcaactgccagaagccagacattgctgagaagtacctgagcgcctctgaatatggcagctctgtggatggccaccctgaggtgcctgagaccaaggatgtgaagaagaagtgcagcgctggcctgaagctgagcaacctgatgaacctgggcaggaagaagagcaccagcctggagcctgtggagaggagcctggagaccagcagctacctgaatgtgctggtgaacagccagtggaagagccgctggtgcagcgtgcgggacaaccacctgcacttctaccaggacaggaacagaagcaaggtggcccagcagcccctgagcctggtgggctgtgaggtggtgcctgaccccagcccagaccacctgtacagcttccgcatcctgcacaagggggaggagctggccaagctggaggccaagagcagcgaggagatgggccactggctgggcctgctgctgtctgagagcggcagcaagacagatcctgaggagttcacctatgactatgtggatgctgacagagtgtcctgcatcgtgtctgctgccaagaacagcctgctgctgatgcagaggaagttcagcgagcccaacacctacattgatggcctgcccagccaggaccggcaggaggagctgtatgatgatgtggacctgtctgagctgacagctgctgtggagcccacagaggaggccacccctgtggctgatgaccccaatgaaagagaaagtgacagagtgtacctggacctgacccctgtgaagagcttcctgcacggccccagcagcgcccaggcccaggccagcagccccaccctgagctgcctggacaatgccacagaggccctgcctgctgacagcggccctggccccaccccagatgagccctgcatcaagtgcccagagaacctgggggagcagcagctggagagcctggagcctgaggaccccagcctgcgcatcaccaccgtgaagatccagacagagcagcagaggatctccttcccccccagctgcccagatgctgtggtggccaccccacctggggccagcccccctgtgaaggaccggctgcgggtgaccagcgctgagatcaagctgggcaagaacagaacagaagctgaggtgaagcgctacacagaggagaaggagcggctggagaagaagaaggaggagatccggggccacctggcccagctgaggaaggagaagcgggagctgaaggagaccctgctgaagtgcacagacaaggaggtgctggccagcctggagcagaagctgaaggagattgatgaggagtgccgcggggaggagagcagaagagtggacctggagctgagcatcatggaggtgaaggacaacctgaagaaggccgaggccggccctgtgaccctgggcaccaccgtggacaccacccacctggagaaccccaaggctgtgaccccagccagcgccccagactgcacccctgtgaacagcgccaccaccctgaagaaccggcccctgtctgtggtggtgacaggcaagggcaccgtgctgcagaaggccaaggagtgggagaagaagggggccagctag

SEQ ID NO: 224799 - DNA, 2526 bp, Artificial Sequence
  derived and/or modified sequence
cagagggtgcgggccctggagcagctgctgacagagctggatgacttcctgaagatcctggaccaggagaacctgagcagcacagccctggtgaagaagagctgcctggccgagctgctgcggctgtacaccaagagcagcagcagtgatgaggagtacatctacatgaacaaggtgaccatcaacaagcagcagaatgctgagagccagggcaaggcccctgaggagcagggcctgctgcccaacggggagcccagccagcacagcagcgccccccagaagagcctgcctgacctgcccccacccaagatgatccctgagaggaagcagctggccatccccaagacagagagccctgagggctactatgaggaggccgagccctatgacaccagcctgaatggccacagcggcggcttcctgcccactggagtgccccgctgggtgcaggtgcctgagggcgtcatctatgccaccatcaccctggaggatggagaggccgtgagcagcagctatgagagctatgatgaggaggatggcagcaagggcaagagcgccccctaccagtggcccagccctgaggccggcatcgagctgatgagagatgcccgcatctgtgccttcctgtggaggaagaagtggctgggccagtgggccaagcagctgtgtgtgatcaaggacaaccggctgctgtgctacaagagcagcaaggaccacagcccccagctggatgtgaacctgctgggcagcagcgtcatccacaaggagaagcaggtgaggaagaaggagcacaagctgaagatcacccccatgaatgctgatgtgattgtgctgggcctgcagagcaaggaccaggccgagcagtggctgcgggtcatccaggaggtgtctggcctgcccagcgagggcgccagcgagggcaaccagtacaccccagatgcccagcgcttcaactgccagaagccagacattgctgagaagtacctgagcgcctctgaatatggcagctctgtggatggccaccctgaggtgcctgagaccaaggatgtgaagaagaagtgcagcgctggcctgaagctgagcaacctgatgaacctgggcaggaagaagagcaccagcctggagcctgtggagaggagcctggagaccagcagctacctgaatgtgctggtgaacagccagtggaagagccgctggtgcagcgtgcgggacaaccacctgcacttctaccaggacaggaacagaagcaaggtggcccagcagcccctgagcctggtgggctgtgaggtggtgcctgaccccagcccagaccacctgtacagcttccgcatcctgcacaagggggaggagctggccaagctggaggccaagagcagcgaggagatgggccactggctgggcctgctgctgtctgagagcggcagcaagacagatcctgaggagttcacctatgactatgtggatgctgacagagtgtcctgcatcgtgtctgctgccaagaacagcctgctgctgatgcagaggaagttcagcgagcccaacacctacattgatggcctgcccagccaggaccggcaggaggagctgtatgatgatgtggacctgtctgagctgacagctgctgtggagcccacagaggaggccacccctgtggctgatgaccccaatgaaagagaaagtgacagagtgtacctggacctgacccctgtgaagagcttcctgcacggccccagcagcgcccaggcccaggccagcagccccaccctgagctgcctggacaatgccacagaggccctgcctgctgacagcggccctggccccaccccagatgagccctgcatcaagtgcccagagaacctgggggagcagcagctggagagcctggagcctgaggaccccagcctgcgcatcaccaccgtgaagatccagacagagcagcagaggatctccttcccccccagctgcccagatgctgtggtggccaccccacctggggccagcccccctgtgaaggaccggctgcgggtgaccagcgctgagatcaagctgggcaagaacagaacagaggccgaggtgaagcgctacacagaggagaaggagcggctggagaagaagaaggaggagatccggggccacctggcccagctgaggaaggagaagcgggagctgaaggagaccctgctgaagtgcacagacaaggaggtgctggccagcctggagcagaagctgaaggagattgatgaagaatgtagaggagaggagagccggcgggtggacctggagctgagcatcatggaggtgaaggacaacctgaagaaggccgaggccggccctgtgaccctgggcaccaccgtggacaccacccacctggagaaccccaaggctgtgaccccagccagcgccccagactgcacccctgtgaacagcgccaccaccctgaagaaccggcccctgtctgtggtggtgactggaaaaggaacagtgctgcagaaggccaaggagtgggagaagaagggggccagctag

SEQ ID NO: 224800 - DNA, 2445 bp, Artificial Sequence
  derived and/or modified sequence
atggagcggtacaaggccctggagcagctgctgaccgagctggacgattttttaaagatcctggatcaggaaaatcttagtagtaccgctctagttaagaagtcatgcctcgcagagctcctgcggctctataccaaaagctcttcctccgatgaagagtacatttacatgaataaggtgacaattaacaagcaacagaacgctgaatcccaaggaaaggcacccgaagagcagggtttactgcccaacggagagcctagccagcattcgtcggcccctcaaaaaagtctccctgacttacccccgcccaagatgatccctgagagaaaacagctggcaatcccaaagaccgagtctccggaaggttactatgaagaggctgaaccctacgacactagtcttaatgaggacggcgaggccgtgtcttccagctacgaaagctatgatgaggaggatgggagcaaaggaaaaagtgccccttatcagtggccatcccccgaggccggcattgagctgatgagggacgcgaggatctgcgcttttctctggcgcaagaaatggctcgggcagtgggctaagcaactgtgcgtgatcaaggacaatagactgctttgctacaaaagctctaaggatcatagtccccagctggacgtgaaccttctgggatccagcgtgatccataaagaaaagcaggtgcggaagaaagaacataaattgaagatcacccccatgaatgctgatgtcattgtccttggcctacagtctaaagaccaggcggagcaatggctcagggtcattcaggaggtgtccgggctgcccagcgaaggagcctctgagggaaatcaatacactccagacgcccagcggtttaattgccagaagcctgacattgccgagaagtatctgagtgccagcgaatatggcagctctgtcgacggtcatcctgaagttcctgagactaaagatgtcaaaaagaagtgtagcgccgggctgaaactcagtaaccttatgaacctcggaaggaaaaagtctacctcgttggagcccgtagagcgcagtctcgaaacgtcctcctacctgaatgttctggtgaactctcagtggaagagtcgctggtgttctgtaagagacaaccatttgcatttctaccaggataggaataggtctaaagtggcacagcaacctttgtcccttgtgggctgtgaagtggtcccggacccttcaccggaccatctgtactctttccgtatcctgcataagggggaggaactggcaaaacttgaggctaaatcttcagaggagatgggacattggttgggcctgctgctgagcgaaagcgggtcaaaaactgatcccgaggaattcacctatgactacgttgatgctgaccgagtgtcctgcattgttagcgcggcaaagaattcattgctcctgatgcagcggaagtttagcgagcctaacacttacattgatgggcttccttctcaagaccgccaggaggagctctatgacgatgtagatctgtccgagctgactgccgcagtcgagcccaccgaggaagcaacccccgtggctgatgaccctaacgaacgggagtctgatagagtgtaccttgacctcacacctgtgaagtcctttctgcacgggcctagttccgcacaggctcaggcctcctctccgaccctctcgtgtttggacaatgccacggaagcactccccgcagattccggaccaggccctacccctgacgaaccctgcattaagtgtcccgaaaatctgggggaacagcagttggaaagtttggagcctgaggatccttcgctccggataactactgtgaaaatccagacagaacaacagagaattagttttcccccttcttgtccagatgctgttgtcgccacacctcctggcgcttctccgcctgtgaaggaccgtcttagggtcacttctgccgaaataaaattaggcaaaaaccgtacagaagccgaggtaaaacgctatacggaagagaaggagcggctggagaaaaagaaggaagaaatcagaggtcacctggcacagctgcgcaaagagaagagggaattgaaagaaacactcctgaagtgcacggacaaagaggtgctggccagtctcgaacagaaattaaaagaaattgacgaagagtgcaggggcgaggaatccaggcgggttgatctggagctttcaattatggaggtgaaggataaccttaagaaggcggaggccggtccagtcacgctggggaccaccgtagacactacccatctggagaacccaaaagctgtaactcccgccagcgctccagactgcactccagtgaacagtgcaacgactctaaaaaacagacccctttctgtggtggtgacaggcaagggtactgtcttgcagaaggctaaggagtgggagaagaagggtgcatcttag

SEQ ID NO: 224801 - DNA, 2526 bp, Artificial Sequence
  derived and/or modified sequence
cagcgggtgcgggccctggagcagctgctgaccgagctggacgactttctcaaaatactcgatcaggaaaatctcagcagcacagccttggttaagaaaagctgtcttgccgaactcttgaggctttacaccaagagttcctccagtgacgaggaatacatctacatgaataaggtaacaatcaacaaacaacagaacgctgagagccagggaaaggctccagaagagcaagggctgctgcccaacggagagccctcacaacactcctcagcaccacagaagtccctgcccgatctgcctcctcctaaaatgattcccgagaggaagcagctggcaattccaaagacagagtccccggaggggtactatgaagaggcagaaccctatgatacatcactgaacgggcacagcggaggcttcctgcccaccggggtgcctagatgggtccaagtgcctgagggagtgatctacgcgacaatcacactagaggatggtgaagccgtctcaagcagttacgaatcttacgatgaggaagatggttctaagggaaagtccgctccctatcagtggccaagcccagaggccggtattgaacttatgagggacgccaggatatgtgccttcctctggcgtaaaaagtggttgggccagtgggcgaaacagctctgcgtgatcaaggacaaccgtctgctctgttataaatcaagtaaggatcatagtcctcagctggacgtaaacctccttggcagctcggtgatccacaaagaaaagcaggtccggaaaaaggaacacaagttgaaaattacccctatgaacgccgacgtgattgtgcttggactgcagtccaaagaccaagccgagcagtggctacgggtgattcaagaagtatctggcctcccttctgaaggggcctcggaggggaaccagtacaccccagatgcgcagcggtttaattgccagaaacctgacatcgccgaaaagtatctgagtgctagcgagtacgggagctccgttgatggacaccccgaggtgcccgagactaaggacgtcaagaagaaatgcagtgctggcctcaaactgtctaatctgatgaacctgggaagaaaaaagtccacttcactagagcccgtggagcgttctttggagacctcttcgtatctcaatgttctggttaacagccaatggaagtctaggtggtgcagcgtgcgtgataaccacctgcatttttaccaggacagaaaccggagtaaggtcgcacagcagcccttgagtcttgtgggctgtgaggtggtccccgatccctcaccagaccacctatattcctttcgcatcctacacaaaggagaggaacttgctaagctcgaggccaagtcctcagaagaaatggggcactggctcgggctcctgctgagcgagagcgggtcaaagaccgatcccgaagagttcacctacgattatgtggacgctgatcgggtgtcttgtatcgtttcggccgctaagaactccctcttacttatgcagcgcaagttctccgagcctaacacttatattgacggactgcctagtcaagaccggcaggaagaactctacgacgatgtggacctcagcgagttgactgcagcagtagagccaactgaggaagcaacccccgtcgccgatgatcccaacgaaagagagagcgaccgcgtgtacctggacttgactcctgtcaaaagctttttgcatgggccctcatccgcccaggcccaggcatcctccccaactttgtcatgcctcgataatgcgactgaggctctacccgcggattcaggccccggaccaactcctgatgagccatgtatcaaatgccctgagaatttgggagagcagcagctggaaagtctggaacctgaggacccctctctgagaattaccacggtgaagattcagaccgaacagcagagaatatctttccccccctcttgtcccgacgctgtggttgccaccccccctggcgcctccccccccgttaaggaccggctgagggtgacctctgccgagattaagctggggaaaaacaggaccgaggctgaggtcaaaaggtatactgaggaaaaagaaaggctggagaaaaagaaggaagaaatcagaggacatctcgctcagctgaggaaagagaagagagagctcaaggaaactttactcaagtgcacggataaggaagtcctggcctccctggagcaaaagctgaaagagattgacgaagaatgcaggggcgaagagtcccgcagagtcgacttagagctctccatcatggaagtcaaagacaatctgaaaaaagcagaggcaggccctgtaactctcggaacgaccgtagacacaacacatctcgagaatcctaaggcggtgacgccggcttccgcaccagactgcactccagtgaactcagccactaccctcaagaaccgtccattgtccgtcgtcgttacggggaaaggaacagtacttcagaaagcaaaagagtgggagaaaaagggtgcatcatag

SEQ ID NO: 224802 - DNA, 2445 bp, Artificial Sequence
  derived and/or modified sequence
atggaacggtacaaggccctggaacagctgctgaccgaattggatgacttcctgaagattctggaccaggaaaatctctctagcacagcattggtaaagaagtcctgcctcgctgagttgctccgattgtatacgaaaagtagttctagtgacgaagagtacatctatatgaataaggtgactattaataaacagcagaacgcggagagtcagggtaaggcaccagaggagcaaggtttgctaccaaacggggagccctcccaacactccagtgctccccaaaaatctctgccagacctaccacctcccaagatgattcctgagaggaaacagctggcaattcctaaaaccgaatcccctgaagggtactatgaggaggccgagccttacgacacgagtcttaatgaggatggtgaggccgtaagttcctcctacgaatcctatgacgaggaggatggctctaaagggaaaagcgcaccataccagtggccttctcctgaagctggcatcgagctcatgcgagacgccagaatctgcgccttcctttggagaaaaaaatggctggggcagtgggcaaagcagttgtgcgtcatcaaagataaccgccttctgtgttataagtcatctaaggatcatagcccgcagcttgacgtgaatctgctaggttcatctgtgatccacaaggaaaaacaggtgcgaaagaaggagcataaactaaagataactcctatgaatgccgacgtaattgtcctcggattacagtccaaggatcaagctgagcagtggctccgggtcatccaggaagtgagcgggttgccatctgagggtgccagcgagggcaatcagtacaccccagacgctcagcgcttcaactgccagaagcctgacattgccgaaaagtacctgtcagcctctgagtatgggtcatctgttgatggccacccagaagttccagaaactaaggacgttaagaagaaatgcagcgctggcctgaaactctctaatctcatgaaccttgggaggaagaaatctacaagcctggagcccgtcgaaagatcactggaaacatcctcctacttgaatgttttggtgaattcgcagtggaagagccgatggtgcagtgtcagggacaaccacctgcacttctaccaggacagaaatagaagtaaagtagctcaacagcccttatcgctggtgggatgtgaggtggtccctgatccctcccctgatcatctctatagtttccgcattcttcataaaggagaggaacttgccaagcttgaagccaagtccagcgaggaaatggggcactggttgggtctcctgttgagcgaaagcgggtcaaaaaccgatcctgaggagtttacttacgactatgtcgacgccgacagggtgagctgtatcgtgtcggcagcaaagaacagcctgctcctcatgcagaggaagttctcagaaccgaacacttacatcgatggactgcccagccaggacaggcaagaggaactttacgatgatgtggatctctccgagttgacggcagccgtggagcctaccgaggaggctacacccgttgccgatgaccccaatgagcgggagtcagacagagtgtatcttgacctgactcccgttaagtccttcctgcacggcccatcttcggcccaagcccaggcctcgagcccgacactcagctgcctggacaacgctacagaggcactgcccgctgacagcgggccaggccctactcccgacgagccatgcatcaaatgccccgagaatctcggcgaacaacagctggaatcccttgagcccgaggatcctagtcttagaatcacaacggttaagattcagaccgagcagcagcgtatctcatttcccccttcctgtccagacgccgtcgtggcaaccccccctggtgctagtcccccagtgaaagatcgtctgcgtgtgacctctgctgaaatcaaattaggtaaaaatcgcacagaggcggaagttaaaagatacaccgaggagaaggagcgcctggaaaagaaaaaagaagagattaggggccatctggcgcagctgcggaaagaaaagagagagctcaaggagacactcctcaagtgcaccgataaagaggtgctcgccagtctcgaacagaaactcaaagaaatcgatgaggaatgtcgtggcgaggaatctagacgggtcgacctggagctctccattatggaggtcaaggacaatcttaagaaggccgaagccggacccgtgacccttgggaccactgtggacactactcatttggagaacccgaaggcagtcacccctgcatcagccccagattgcacacccgtgaacagtgcaaccacgctaaaaaatagaccgctaagcgtggtggtcacagggaaaggcactgtcctacagaaggcaaaagagtgggagaaaaagggggcttcctag

SEQ ID NO: 224803 - DNA, 2526 bp, Artificial Sequence
  derived and/or modified sequence
cagcgggtaagggcactggagcaattgctcacagaactggacgacttcttgaagattctggaccaggaaaatctatcttctaccgctctggtgaaaaagtcctgtctcgcggagctgttgcggctgtataccaaaagttcttccagcgatgaagagtacatatacatgaataaggtcaccattaataaacagcagaatgccgagagtcaaggaaaagcgcctgaagaacagggactgctgcctaacggggaaccaagccagcacagtagcgctcctcaaaaaagcctgcctgacctcccgccacccaagatgatccctgaaagaaaacaactcgctattcctaaaactgaatccccggagggctactacgaggaagccgagccctacgacacctcccttaacggccactccggaggatttctcccaaccggggtgccacgctgggttcaggtccctgaaggggtgatatatgccaccatcacactcgaagatggggaggcagtgtcaagttcatatgagtcttacgacgaagaggatggctcaaaagggaagtccgctccatatcagtggccttctcctgaagctggaatcgagctgatgagagacgcccgtatttgcgccttcttgtggcggaagaagtggcttgggcaatgggccaaacagctttgtgttattaaggacaatcgcctgctatgctataagtcctcaaaagaccatagtccccaattggatgtaaaccttttgggcagcagtgtaatccacaaagagaaacaggtgaggaaaaaagagcacaagctgaagattactcccatgaacgcagatgtaatcgtacttggtctgcagtccaaagatcaggctgagcagtggcttcgggtgatacaagaggtgtctgggttgccatccgagggggcatctgagggaaaccagtacactccagacgcacagagatttaattgtcagaagccggatatcgcagagaagtacctgtctgccagtgagtacggaagcagcgtcgacggacaccccgaggtaccagagaccaaggatgtcaagaagaaatgtagcgcgggtttgaagctttctaatctgatgaatctcggtagaaaaaaatccactagtctcgaacccgtagaacggagcctcgagacaagtagctatctgaatgtccttgtgaattcccagtggaagtctaggtggtgctccgtgagggataatcacctccacttttatcaggaccggaatcgttcaaaggtggctcagcaaccacttagtttggtcggatgcgaagtggtgcctgacccaagtcccgatcatctttactcctttcgaatcctgcacaagggtgaagaactcgccaaacttgaagccaagtcgagtgaggaaatgggccattggctgggactgctcctgagcgaaagtggcagtaagactgaccccgaggaatttacctatgactatgtggacgctgatcgagtctcttgcattgtgtccgcagccaaaaactccctgctccttatgcagcgaaagttcagtgaaccaaacacttatattgacgggctcccatcacaggacaggcaagaggagttgtacgatgatgtggatctctcagagttgactgcagccgtagagccgacagaggaggccacacctgtggccgatgaccccaacgagcgagaatcggatcgggtgtacctagacctcaccccagtgaaaagttttcttcacgggccaagcagcgcccaggcccaggcctcttcacccaccttgtcctgccttgacaatgctaccgaagccttacctgccgactccggaccgggaccaacacccgatgagccgtgcataaagtgccccgaaaaccttggagaacaacagttggagtctctggaaccagaagaccccagccttaggatcaccaccgtgaaaatccagactgagcagcagagaatttcgtttccacctagttgtcctgacgcagtggtggcgacccctccaggagcctctcctccagtcaaggaccgccttagagtaacctcagctgagatcaagttgggtaaaaaccggactgaagccgaagtgaaaagatacactgaagagaaggaacgcttggagaaaaaaaaggaagaaatcagaggacatctagcccaactgcgaaaagaaaaaagggaactgaaagagacactcttaaagtgcactgataaggaagtgcttgcaagcctagaacagaaactcaaggagatcgacgaagagtgtcggggagaggagtcacgcagagttgatctggagctgtctattatggaggtcaaagataacttgaagaaagccgaggctgggcctgtcacccttgggaccaccgttgacaccacccatctggaaaacccaaaggcagttactcccgctagtgcacccgattgcaccccagttaattcagctactaccctgaagaaccgcccactctccgttgttgtcaccggcaaggggactgtcctgcagaaagcaaaagagtgggagaagaaaggcgctagctag

SEQ ID NO: 224804 - DNA, 3964 bp, Artificial Sequence
  derived and/or modified sequence
gtgccaaggcggccgggggcggcgagcggggccgcgggcgcgcaccgactcaagagccgactgtcagcctcggcgggccggagttctccggcgctgggacaggggcgctgggacaggggcgctgggggcgagccctggcgggggccaggtccgaggaccctgggcgcggcggccccgccaggaggtccggccgcgagcgtgacctcacggggaggggccagcgcggcggcctgggcgctgagccgagcgccgggagagcagcgcagaagccgagccgcgaggagcgcactccgtggccccgatggagcggtacaaagccctggaacagctgctgacagagttggatgacttcctcaagattcttgaccaggagaacctgagcagcacagcactggtgaagaagagctgcctggcggagctcctccggctttacaccaaaagcagcagctctgatgaggagtacatttatatgaacaaagtgaccatcaacaagcaacagaatgcagagtctcaaggcaaagcgcctgaggagcagggcctgctacccaatggggagcccagccagcactcctcggcccctcagaagagccttccagacctcccgccacccaagatgattccagaacggaaacagcttgccatcccaaagacggagtctccagagggctactatgaagaggctgagccatatgacacatccctcaatgaggacggagaggctgtgagcagctcctacgagtcctacgatgaagaggacggcagcaagggcaagtcggccccttaccagtggccctcgccggaggccggcatcgagctgatgcgtgacgcccgcatctgcgccttcctgtggcgcaagaagtggctgggacagtgggccaagcagctctgtgtcatcaaggacaacaggcttctgtgctacaaatcctccaaggaccacagccctcagctggacgtgaacctactgggcagcagcgtcattcacaaggagaagcaagtgcggaagaaggagcacaagctgaagatcacgccgatgaatgccgatgtgattgtgctgggcctgcagagcaaggaccaggctgagcagtggctcagggtcatccaggaagtgagcggcctgccttccgaaggagcatctgaaggaaaccagtacaccccggatgcccagcgctttaactgccagaaaccagatatagctgagaagtacctgtcggcttcagagtatgggagctccgtggatggccaccctgaggtcccagaaaccaaagacgtcaagaagaaatgttctgctggcctcaaactgagcaacctaatgaatctgggcaggaagaaatccacctcactggagcctgtggagaggtccctcgagacatccagttacctgaacgtgctggtgaacagccagtggaagtctcgctggtgctctgtcagggacaatcacctgcacttctaccaggaccggaaccggagcaaggtggcccagcaacccctcagcctggtgggctgcgaggtggtcccagaccccagccccgaccacctctactccttccgcatcctccacaagggcgaggagctggccaagcttgaggccaagtcttccgaggaaatgggccactggctgggtctcctgctctctgagtcaggctccaagacagacccagaagagttcacctacgactatgtggatgccgatagggtctcctgtattgtgagtgcggccaaaaactctctcttactgatgcagagaaagttctcagagcccaacacttacatcgatggcctgcctagccaggaccgccaggaggagctgtatgacgacgtggacctgtcagagctcacagctgcggtggagcctaccgaggaagccacccctgttgcagatgacccaaatgagagagaatctgaccgagtgtacctggacctcacacctgtcaagtcctttctgcatggccccagcagtgcacaggcccaggcctcctccccgacgttgtcctgcctggacaatgcaactgaggccctcccggcagactcaggcccaggtcccaccccagatgagccctgcataaagtgtccagagaacctgggagaacagcagctggagagtttggagccagaggatccttccctgagaatcaccaccgtcaaaatccagacggaacagcagagaatctccttcccaccgagctgcccggatgccgtggtggccaccccacctggtgccagcccacctgtgaaggacaggttgcgcgtgaccagtgcagagatcaagcttggcaagaatcggacagaagctgaggtgaagcggtacacagaggagaaggagaggcttgaaaagaagaaggaagaaatccgggggcacctggctcagctccggaaagagaaacgggagctaaaggaaaccctactgaaatgcacagacaaggaagtcctggcgagcctggagcagaagctgaaggaaattgacgaggagtgccggggcgaggagagcaggcgcgtggacctggagctcagcatcatggaggtgaaggacaacctgaagaaggctgaggcagggcctgtgacgttaggcaccaccgtggacaccacccacctggagaatcccaaagctgtcacacctgcctctgccccagactgtaccccagtcaactctgcaaccacactcaagaacaggcctctctcggtcgtggtcacaggcaaaggcactgtactccagaaagccaaggaatgggagaagaaaggagcaagttagaaaacaagcttcatctaaagactctcatgtcaatgtggaccttggtgacaatcctgctttgttaaagcaaaaactatgcgaaagggtgagtctgtttagaagaaaaagcaaagactgaggtactgtgaatggagagcttcagctaagaggaggctctgtcccttttcagagccaaaggaaataatacaacaaaaaggaggcttctttggagacctaagtctattggatgtaaacaagacgttgtatttagggatgttctgtgtttctttcttttttgaagttgtcatcaattgctttactaagatttttaaatagtgaaaacctcctgtttagactttggtggaagatgaatcaaggaagcagggccctgtcttatgggtcacgtgtctttggtgagtgagaagacctaaactcctggccatcatctcttatccaatacttagcagttggggattaaaccatccttgccttcagttctctccaatattaccaggcccaactcagtcttcagtgattttaaacagcattgacatcatctgtaaaaccatcatctgtaaaaccatctatgacatgagttttgagaaacaataatggggaaaatatttgggaccaagctgaagcactaatcccactaagttaaagacttctttccagtccaaggcaggcctgaatcaactgtctttaaataaaattttaagtgatgctgtattatatataggaaaaaatgcttaaaatcctgtcatttagaacagtgaaaagtatcttttgagattaaagtgactctttactgtaggaaaaatattactctgtgtttacagattcattgctgtggtcaggccatttttaagggaagagttatttaatataaatagtctctgattttaagttctgtttaatgttcattctccttccaagaacaaagtggtgatttttggttagggtgatcgccctcttaaaattggcagtgctgttccttgtgctgcccctgtcttttcctctgatggcatttttttttttttttttttaacacaggttgaaacatttcatctattatctctgcctcatttctggagggttgtgtatcagttctctaacacttgttcctgagaactaaatgtcttttttattcttatttcctctctcataaacatttggtgaccttttaccaagtggtgagttagttaggttttttaaaataaaatgttcattgtatttgaa

SEQ ID NO: 224805 - DNA, 3742 bp, Artificial Sequence
  derived and/or modified sequence
cagagggttcgagccctggaacagctgctgacagagttggatgacttcctcaagattcttgaccaggagaacctgagcagcacagcactggtgaagaagagctgcctggcggagctcctccggctttacaccaaaagcagcagctctgatgaggagtacatttatatgaacaaagtgaccatcaacaagcaacagaatgcagagtctcaaggcaaagcgcctgaggagcagggcctgctacccaatggggagcccagccagcactcctcggcccctcagaagagccttccagacctcccgccacccaagatgattccagaacggaaacagcttgccatcccaaagacggagtctccagagggctactatgaagaggctgagccatatgacacatccctcaatggtcactctggcggatttctccccactggagtccccagatgggtgcaggtgcccgaaggagtcatttatgccacgatcaccttggaggacggagaggctgtgagcagctcctacgagtcctacgatgaagaggacggcagcaagggcaagtcggccccttaccagtggccctcgccggaggccggcatcgagctgatgcgtgacgcccgcatctgcgccttcctgtggcgcaagaagtggctgggacagtgggccaagcagctctgtgtcatcaaggacaacaggcttctgtgctacaaatcctccaaggaccacagccctcagctggacgtgaacctactgggcagcagcgtcattcacaaggagaagcaagtgcggaagaaggagcacaagctgaagatcacgccgatgaatgccgatgtgattgtgctgggcctgcagagcaaggaccaggctgagcagtggctcagggtcatccaggaagtgagcggcctgccttccgaaggagcatctgaaggaaaccagtacaccccggatgcccagcgctttaactgccagaaaccagatatagctgagaagtacctgtcggcttcagagtatgggagctccgtggatggccaccctgaggtcccagaaaccaaagacgtcaagaagaaatgttctgctggcctcaaactgagcaacctaatgaatctgggcaggaagaaatccacctcactggagcctgtggagaggtccctcgagacatccagttacctgaacgtgctggtgaacagccagtggaagtctcgctggtgctctgtcagggacaatcacctgcacttctaccaggaccggaaccggagcaaggtggcccagcaacccctcagcctggtgggctgcgaggtggtcccagaccccagccccgaccacctctactccttccgcatcctccacaagggcgaggagctggccaagcttgaggccaagtcttccgaggaaatgggccactggctgggtctcctgctctctgagtcaggctccaagacagacccagaagagttcacctacgactatgtggatgccgatagggtctcctgtattgtgagtgcggccaaaaactctctcttactgatgcagagaaagttctcagagcccaacacttacatcgatggcctgcctagccaggaccgccaggaggagctgtatgacgacgtggacctgtcagagctcacagctgcggtggagcctaccgaggaagccacccctgttgcagatgacccaaatgagagagaatctgaccgagtgtacctggacctcacacctgtcaagtcctttctgcatggccccagcagtgcacaggcccaggcctcctccccgacgttgtcctgcctggacaatgcaactgaggccctcccggcagactcaggcccaggtcccaccccagatgagccctgcataaagtgtccagagaacctgggagaacagcagctggagagtttggagccagaggatccttccctgagaatcaccaccgtcaaaatccagacggaacagcagagaatctccttcccaccgagctgcccggatgccgtggtggccaccccacctggtgccagcccacctgtgaaggacaggttgcgcgtgaccagtgcagagatcaagcttggcaagaatcggacagaagctgaggtgaagcggtacacagaggagaaggagaggcttgaaaagaagaaggaagaaatccgggggcacctggctcagctccggaaagagaaacgggagctaaaggaaaccctactgaaatgcacagacaaggaagtcctggcgagcctggagcagaagctgaaggaaattgacgaggagtgccggggcgaggagagcaggcgcgtggacctggagctcagcatcatggaggtgaaggacaacctgaagaaggctgaggcagggcctgtgacgttaggcaccaccgtggacaccacccacctggagaatcccaaagctgtcacacctgcctctgccccagactgtaccccagtcaactctgcaaccacactcaagaacaggcctctctcggtcgtggtcacaggcaaaggcactgtactccagaaagccaaggaatgggagaagaaaggagcaagttagaaaacaagcttcatctaaagactctcatgtcaatgtggaccttggtgacaatcctgctttgttaaagcaaaaactatgcgaaagggtgagtctgtttagaagaaaaagcaaagactgaggtactgtgaatggagagcttcagctaagaggaggctctgtcccttttcagagccaaaggaaataatacaacaaaaaggaggcttctttggagacctaagtctattggatgtaaacaagacgttgtatttagggatgttctgtgtttctttcttttttgaagttgtcatcaattgctttactaagatttttaaatagtgaaaacctcctgtttagactttggtggaagatgaatcaaggaagcagggccctgtcttatgggtcacgtgtctttggtgagtgagaagacctaaactcctggccatcatctcttatccaatacttagcagttggggattaaaccatccttgccttcagttctctccaatattaccaggcccaactcagtcttcagtgattttaaacagcattgacatcatctgtaaaaccatcatctgtaaaaccatctatgacatgagttttgagaaacaataatggggaaaatatttgggaccaagctgaagcactaatcccactaagttaaagacttctttccagtccaaggcaggcctgaatcaactgtctttaaataaaattttaagtgatgctgtattatatataggaaaaaatgcttaaaatcctgtcatttagaacagtgaaaagtatcttttgagattaaagtgactctttactgtaggaaaaatattactctgtgtttacagattcattgctgtggtcaggccatttttaagggaagagttatttaatataaatagtctctgattttaagttctgtttaatgttcattctccttccaagaacaaagtggtgatttttggttagggtgatcgccctcttaaaattggcagtgctgttccttgtgctgcccctgtcttttcctctgatggcatttttttttttttttttttaacacaggttgaaacatttcatctattatctctgcctcatttctggagggttgtgtatcagttctctaacacttgttcctgagaactaaatgtcttttttattcttatttcctctctcataaacatttggtgaccttttaccaagtggtgagttagttaggttttttaaaataaaatgttcattgtatttg

SEQ ID NO: 224806 - DNA, 2445 bp, Artificial Sequence
  derived and/or modified sequence
atggagagatacaaggccctggagcagctgctgaccgagctggacgacttcctgaagatcctggaccaggagaacctgagcagcaccgccctggtgaagaagagctgcctggccgagctgctgagactgtacaccaagagcagcagcagcgacgaggagtacatctacatgaacaaggtgaccatcaacaagcagcagaacgccgagagccagggcaaggcccccgaggagcagggcctgctgcccaacggcgagcccagccagcacagcagcgccccccagaagagcctgcccgacctgcccccccccaagatgatccccgagagaaagcagctggccatccccaagaccgagagccccgagggctactacgaggaggccgagccctacgacaccagcctgaacgaggacggcgaggccgtgagcagcagctacgagagctacgacgaggaggacggcagcaagggcaagagcgccccctaccagtggcccagccccgaggccggcatcgagctgatgagagacgccagaatctgcgccttcctgtggagaaagaagtggctgggccagtgggccaagcagctgtgcgtgatcaaggacaacagactgctgtgctacaagagcagcaaggaccacagcccccagctggacgtgaacctgctgggcagcagcgtgatccacaaggagaagcaggtgagaaagaaggagcacaagctgaagatcacccccatgaacgccgacgtgatcgtgctgggcctgcagagcaaggaccaggccgagcagtggctgagagtgatccaggaggtgagcggcctgcccagcgagggcgccagcgagggcaaccagtacacccccgacgcccagagattcaactgccagaagcccgacatcgccgagaagtacctgagcgccagcgagtacggcagcagcgtggacggccaccccgaggtgcccgagaccaaggacgtgaagaagaagtgcagcgccggcctgaagctgagcaacctgatgaacctgggcagaaagaagagcaccagcctggagcccgtggagagaagcctggagaccagcagctacctgaacgtgctggtgaacagccagtggaagagcagatggtgcagcgtgagagacaaccacctgcacttctaccaggacagaaacagaagcaaggtggcccagcagcccctgagcctggtgggctgcgaggtggtgcccgaccccagccccgaccacctgtacagcttcagaatcctgcacaagggcgaggagctggccaagctggaggccaagagcagcgaggagatgggccactggctgggcctgctgctgagcgagagcggcagcaagaccgaccccgaggagttcacctacgactacgtggacgccgacagagtgagctgcatcgtgagcgccgccaagaacagcctgctgctgatgcagagaaagttcagcgagcccaacacctacatcgacggcctgcccagccaggacagacaggaggagctgtacgacgacgtggacctgagcgagctgaccgccgccgtggagcccaccgaggaggccacccccgtggccgacgaccccaacgagagagagagcgacagagtgtacctggacctgacccccgtgaagagcttcctgcacggccccagcagcgcccaggcccaggccagcagccccaccctgagctgcctggacaacgccaccgaggccctgcccgccgacagcggccccggccccacccccgacgagccctgcatcaagtgccccgagaacctgggcgagcagcagctggagagcctggagcccgaggaccccagcctgagaatcaccaccgtgaagatccagaccgagcagcagagaatcagcttcccccccagctgccccgacgccgtggtggccaccccccccggcgccagcccccccgtgaaggacagactgagagtgaccagcgccgagatcaagctgggcaagaacagaaccgaggccgaggtgaagagatacaccgaggagaaggagagactggagaagaagaaggaggagatcagaggccacctggcccagctgagaaaggagaagagagagctgaaggagaccctgctgaagtgcaccgacaaggaggtgctggccagcctggagcagaagctgaaggagatcgacgaggagtgcagaggcgaggagagcagaagagtggacctggagctgagcatcatggaggtgaaggacaacctgaagaaggccgaggccggccccgtgaccctgggcaccaccgtggacaccacccacctggagaaccccaaggccgtgacccccgccagcgcccccgactgcacccccgtgaacagcgccaccaccctgaagaacagacccctgagcgtggtggtgaccggcaagggcaccgtgctgcagaaggccaaggagtgggagaagaagggcgccagctag

SEQ ID NO: 224807 - DNA, 2526 bp, Artificial Sequence
  derived and/or modified sequence
cagagagtgagagccctggagcagctgctgaccgagctggacgacttcctgaagatcctggaccaggagaacctgagcagcaccgccctggtgaagaagagctgcctggccgagctgctgagactgtacaccaagagcagcagcagcgacgaggagtacatctacatgaacaaggtgaccatcaacaagcagcagaacgccgagagccagggcaaggcccccgaggagcagggcctgctgcccaacggcgagcccagccagcacagcagcgccccccagaagagcctgcccgacctgcccccccccaagatgatccccgagagaaagcagctggccatccccaagaccgagagccccgagggctactacgaggaggccgagccctacgacaccagcctgaacggccacagcggcggcttcctgcccaccggcgtgcccagatgggtgcaggtgcccgagggcgtgatctacgccaccatcaccctggaggacggcgaggccgtgagcagcagctacgagagctacgacgaggaggacggcagcaagggcaagagcgccccctaccagtggcccagccccgaggccggcatcgagctgatgagagacgccagaatctgcgccttcctgtggagaaagaagtggctgggccagtgggccaagcagctgtgcgtgatcaaggacaacagactgctgtgctacaagagcagcaaggaccacagcccccagctggacgtgaacctgctgggcagcagcgtgatccacaaggagaagcaggtgagaaagaaggagcacaagctgaagatcacccccatgaacgccgacgtgatcgtgctgggcctgcagagcaaggaccaggccgagcagtggctgagagtgatccaggaggtgagcggcctgcccagcgagggcgccagcgagggcaaccagtacacccccgacgcccagagattcaactgccagaagcccgacatcgccgagaagtacctgagcgccagcgagtacggcagcagcgtggacggccaccccgaggtgcccgagaccaaggacgtgaagaagaagtgcagcgccggcctgaagctgagcaacctgatgaacctgggcagaaagaagagcaccagcctggagcccgtggagagaagcctggagaccagcagctacctgaacgtgctggtgaacagccagtggaagagcagatggtgcagcgtgagagacaaccacctgcacttctaccaggacagaaacagaagcaaggtggcccagcagcccctgagcctggtgggctgcgaggtggtgcccgaccccagccccgaccacctgtacagcttcagaatcctgcacaagggcgaggagctggccaagctggaggccaagagcagcgaggagatgggccactggctgggcctgctgctgagcgagagcggcagcaagaccgaccccgaggagttcacctacgactacgtggacgccgacagagtgagctgcatcgtgagcgccgccaagaacagcctgctgctgatgcagagaaagttcagcgagcccaacacctacatcgacggcctgcccagccaggacagacaggaggagctgtacgacgacgtggacctgagcgagctgaccgccgccgtggagcccaccgaggaggccacccccgtggccgacgaccccaacgagagagagagcgacagagtgtacctggacctgacccccgtgaagagcttcctgcacggccccagcagcgcccaggcccaggccagcagccccaccctgagctgcctggacaacgccaccgaggccctgcccgccgacagcggccccggccccacccccgacgagccctgcatcaagtgccccgagaacctgggcgagcagcagctggagagcctggagcccgaggaccccagcctgagaatcaccaccgtgaagatccagaccgagcagcagagaatcagcttcccccccagctgccccgacgccgtggtggccaccccccccggcgccagcccccccgtgaaggacagactgagagtgaccagcgccgagatcaagctgggcaagaacagaaccgaggccgaggtgaagagatacaccgaggagaaggagagactggagaagaagaaggaggagatcagaggccacctggcccagctgagaaaggagaagagagagctgaaggagaccctgctgaagtgcaccgacaaggaggtgctggccagcctggagcagaagctgaaggagatcgacgaggagtgcagaggcgaggagagcagaagagtggacctggagctgagcatcatggaggtgaaggacaacctgaagaaggccgaggccggccccgtgaccctgggcaccaccgtggacaccacccacctggagaaccccaaggccgtgacccccgccagcgcccccgactgcacccccgtgaacagcgccaccaccctgaagaacagacccctgagcgtggtggtgaccggcaagggcaccgtgctgcagaaggccaaggagtgggagaagaagggcgccagctag

SEQ ID NO: 224808 - protein, 398 aa, Artificial Sequence
  derived and/or modified sequence
MHTVATSGPNASWGAPANASGCPGCGANASDGPVPSPRAVDAWLVPLFFAALMLLGLVGNSLVIYVICRHKPMRTVTNFYIANLAATDVTFLLCCVPFTALLYPLPGWVLGDFMCKFVNYIQQVSVQATCATLTAMSVDRWYVTVFPLRALHRRTPRLALAVSLSIWVGSAAVSAPVLALHRLSPGPRAYCSEAFPSRALERAFALYNLLALYLLPLLATCACYAAMLRHLGRVAVRPAPADSALQGQVLAERAGAVRAKVSRLVAAVVLLFAACWGPIQLFLVLQALGPAGSWHPRSYAAYALKTWAHCMSYSNSALNPLLYAFLGSHFRQAFRRVCPCAPRRPRRPRRPGPSDPAAPHAELLRLGSHPAPARAQKPGSSGLAARGLCVLGEDNAPL

SEQ ID NO: 224809 - DNA, 1197 bp, Artificial Sequence
  derived and/or modified sequence
atgcacaccgtggccaccagcggccccaacgccagctggggcgcccccgccaacgccagcggctgccccggctgcggcgccaacgccagcgacggccccgtgcccagccccagagccgtggacgcctggctggtgcccctgttcttcgccgccctgatgctgctgggcctggtgggcaacagcctggtgatctacgtgatctgcagacacaagcccatgagaaccgtgaccaacttctacatcgccaacctggccgccaccgacgtgaccttcctgctgtgctgcgtgcccttcaccgccctgctgtaccccctgcccggctgggtgctgggcgacttcatgtgcaagttcgtgaactacatccagcaggtgagcgtgcaggccacctgcgccaccctgaccgccatgagcgtggacagatggtacgtgaccgtgttccccctgagagccctgcacagaagaacccccagactggccctggccgtgagcctgagcatctgggtgggcagcgccgccgtgagcgcccccgtgctggccctgcacagactgagccccggccccagagcctactgcagcgaggccttccccagcagagccctggagagagccttcgccctgtacaacctgctggccctgtacctgctgcccctgctggccacctgcgcctgctacgccgccatgctgagacacctgggcagagtggccgtgagacccgcccccgccgacagcgccctgcagggccaggtgctggccgagagagccggcgccgtgagagccaaggtgagcagactggtggccgccgtggtgctgctgttcgccgcctgctggggccccatccagctgttcctggtgctgcaggccctgggccccgccggcagctggcaccccagaagctacgccgcctacgccctgaagacctgggcccactgcatgagctacagcaacagcgccctgaaccccctgctgtacgccttcctgggcagccacttcagacaggccttcagaagagtgtgcccctgcgcccccagaagacccagaagacccagaagacccggccccagcgaccccgccgccccccacgccgagctgctgagactgggcagccaccccgcccccgccagagcccagaagcccggcagcagcggcctggccgccagaggcctgtgcgtgctgggcgaggacaacgcccccctgtag

SEQ ID NO: 224810 - DNA, 1197 bp, Artificial Sequence
  derived and/or modified sequence
atgcacaccgtagcaacctccggacctaatgcgtcctggggggctcccgcgaatgccagcggctgtccagggtgtggagccaatgcatccgacggccccgttccatcgccccgcgctgtcgatgcctggctcgtacctctgttttttgctgccctgatgttgttaggattggtgggaaacagtctggtgatttatgtaatttgcaggcacaagccaatgcgcactgtcaccaacttctacatcgccaatctggctgccaccgacgtaactttcctactctgctgtgtgcccttcactgcattgctgtacccattgccgggctgggttcttggggatttcatgtgcaaatttgtgaattacatccagcaggttagcgtccaggcaacctgcgccactttaacagcgatgagcgtggatcgctggtatgtaaccgtgtttcctctgagggccctgcatcggcggaccccccgtctggctctggctgtgagcctatctatttgggtggggtccgccgctgtgagtgcacctgtgttagcgctccaccggctaagccctggtcctcgcgcctactgcagcgaagccttcccgtcgcgcgcattggaaagggcttttgctctctacaacctgctggccctgtacctcttgcccctgttagccacttgcgcatgctacgcagccatgctgaggcacctgggcagggtggctgtgagacccgcgcctgccgactctgctttacaggggcaggtactggcagaacgagctggtgccgtgcgggccaaggtctctcgcctcgtagcagctgtggtcctgctgtttgccgcctgttggggcccaatacagctgttcctggtcttgcaggccttgggaccagcaggcagctggcacccacgttcgtatgccgcctatgctctgaaaacatgggcccactgtatgagctactctaacagcgctctcaatcccctactctacgcattcctaggaagtcacttcaggcaagccttcagaagggtctgcccatgcgcaccacgacgaccaagacggccccggcggcctggacctagcgacccggccgcgccccatgcagaactactccggctcgggtcccatcctgctccggctcgcgcccaaaagcccggcagtagtgggctagcggcccgagggctgtgtgtgctgggagaggataacgcccccctctag

SEQ ID NO: 224811 - DNA, 1197 bp, Artificial Sequence
  derived and/or modified sequence
atgcacacagtggccaccagcggccccaatgcctcctggggcgccccagccaatgccagcggctgccccggctgtggggccaatgccagtgatggccctgtgcccagccccagggctgtggatgcctggctggtgcccctcttctttgctgccctgatgctgctgggcctggtgggcaacagcctggtgatctacgtgatctgccgccacaagcccatgaggacagtgaccaacttctacatcgccaacctggccgccacagatgtgaccttcctgctgtgctgcgtgcccttcaccgccctgctgtaccccctgcccggctgggtgctgggggacttcatgtgcaagtttgtgaactacatccagcaggtgtctgtgcaggccacctgtgccaccctgacagccatgtctgtggaccgctggtacgtgaccgtcttccccctgcgggccctgcacaggaggaccccccggctggccctggccgtgtccctgagcatctgggtgggcagcgctgctgtgtctgcccctgtgctggccctgcaccggctgagccctggcccccgggcctactgcagcgaggccttccccagccgggccctggagcgggcctttgccctgtacaacctgctggccctgtacctgctgcccctgctggccacctgtgcctgctatgctgccatgctgcggcacctgggccgggtggccgtgcggcctgccccagctgacagcgccctgcagggccaggtgctggccgagcgggccggggctgtgcgggccaaggtgtcccggctggtggccgctgtggtgctgctgtttgctgcctgctggggccccatccagctgttcctggtgctgcaggccctgggccctgctggctcctggcaccccaggagctatgctgcctatgccctgaagacctgggcccactgcatgagctacagcaacagcgccctgaaccccctgctgtatgccttcctgggcagccacttccggcaggccttcagaagagtgtgcccctgtgccccccggcggccccggcggcccaggaggcctggccccagcgaccctgctgcccctcatgctgagctgctgcggctgggcagccacccagccccagcccgggcccagaagccaggcagcagcggcctggccgcccggggcctgtgtgtgctgggagaagataatgcccccctgtag

SEQ ID NO: 224812 - DNA, 1197 bp, Artificial Sequence
  derived and/or modified sequence
atgcacaccgtggccaccagcggccccaacgccagctggggcgcccctgccaacgcctctggttgccctggatgcggagcaaatgctagtgacggaccagtgccatcacctagagcggtggacgcctggcttgtgcccctcttcttcgccgccctgatgttgctgggcctggttggaaattctctggtcatatatgtgatttgccgtcataaaccgatgcgaaccgtcactaacttctacatcgccaatttagccgcaacggatgtgacatttctgctctgttgtgtgccattcactgctctgctgtacccattacccgggtgggtgctgggtgactttatgtgcaagtttgtgaactacatccaacaggtgagtgtccaagcaacctgcgctacccttacagccatgtctgtggatcggtggtacgtcacggtgtttcccctacgcgcgcttcacagacgcacccctcgcctagctttggctgtttccctcagtatttgggtggggtctgccgctgtaagcgcccccgttctggcactgcaccgcctatcccccgggcctagagcctattgttctgaggcttttccctctcgggccctagagcgcgcattcgccctgtacaacttacttgcactctatctgttacctttgttggccacatgtgcctgttatgcagcaatgttacgacacctgggccgggtggctgtccggccagcgcctgccgactcagcactgcaggggcaagttctggcggagcgcgccggcgccgtccgcgccaaagttagccggctcgtagcggcagtcgtccttctatttgctgcatgctggggtcccatccagttgtttctcgtcctgcaggctctgggtcctgctggtagctggcatccacggtcttacgccgcatacgccctcaagacgtgggctcattgcatgagctactccaactccgccctcaaccccttgctttacgcattcctgggatcacacttccggcaggccttccgacgcgtgtgcccctgcgcccccagacggccacgcagaccccgcaggcctggaccatctgatcctgccgcaccgcatgcagagctcctccggctgggctcccacccggctccggctagggctcagaagcccggctcgtccggtctcgcagcacgaggcctgtgcgtgctgggcgaggacaacgcaccattgtag

SEQ ID NO: 224813 - DNA, 1197 bp, Artificial Sequence
  derived and/or modified sequence
atgcacacggtcgctacttctgggcctaatgcttcttggggcgcacctgctaacgcaagcggctgtccaggctgcggggcaaatgcgtctgacgggcctgtgccatcacctagagcagttgacgcatggcttgtgccactcttctttgccgctttgatgttgctggggctcgtgggcaattccctcgtgatatacgtgatttgtcggcacaagcctatgcgcacagtgaccaatttctatatcgccaatcttgctgcgaccgatgtgacattcctgctgtgctgcgttccatttaccgctctcttatatccactgcccggttgggtgctgggcgacttcatgtgtaagtttgtgaattacattcagcaggtcagtgtgcaggcaacctgtgcaacccttaccgcgatgagcgttgacagatggtacgtcacagtgtttccactcagagctcttcacaggagaacccctcgtttggccctggccgtcagcttgtctatatgggtcggcagtgctgcggtgtctgctcctgtgcttgctttgcaccggctgtctcctggccctcgggcttattgttccgaagcatttccatcaagagctcttgaaagggcatttgcactgtacaacctgttggccctgtatctgttacctctgctggccacatgtgcctgctacgctgcaatgttacgccacttaggcagagtcgcagttcgccctgctccagctgacagcgcgctgcaaggccaggtgttagctgaacgcgctggagcagtgcgggcaaaggtcagtcggctcgtcgctgccgtggtgctgctttttgccgcttgttggggaccaatccagctgttcttggtgctccaagctcttggaccagcgggaagctggcatccacggtcttacgcagcctacgcgctgaaaacctgggcacactgcatgtcctatagtaactctgctctgaatcccctgctgtatgctttcttaggatcccatttcaggcaagctttcagacgcgtgtgcccttgcgctcccagacgcccacgcaggccacgacgaccgggaccttccgaccctgcagctccacacgctgaattgctgaggctcggtagtcatccagctccagccagagctcagaagccgggttcttcaggcttagcagctagagggctctgcgtactgggcgaagacaatgcccctctctag

SEQ ID NO: 224814 - DNA, 1624 bp, Artificial Sequence
  derived and/or modified sequence
gccgagcccagcacagctgccctctggaccctgcggaccccagccgagccccttcctgagttccacaggcgcagcccccgggcggtcgggcggaggggtccccggggcggtgccagggcgcaatcctggagggcggccgggaggaggaggtgcgcgcggccatgcacaccgtggctacgtccggacccaacgcgtcctggggggcaccggccaacgcctccggctgcccgggctgtggcgccaacgcctcggacggcccagtcccttcgccgcgggccgtggacgcctggctcgtgccgctcttcttcgcggcgctgatgctgctgggcctggtggggaactcgctggtcatctacgtcatctgccgccacaagccgatgcggaccgtgaccaacttctacatcgccaacctggcggccacggacgtgaccttcctcctgtgctgcgtccccttcacggccctgctgtacccgctgcccggctgggtgctgggcgacttcatgtgcaagttcgtcaactacatccagcaggtctcggtgcaggccacgtgtgccactctgaccgccatgagtgtggaccgctggtacgtgacggtgttcccgttgcgcgccctgcaccgccgcacgccccgcctggcgctggctgtcagcctcagcatctgggtaggctctgcggcggtgtctgcgccggtgctcgccctgcaccgcctgtcacccgggccgcgcgcctactgcagtgaggccttccccagccgcgccctggagcgcgccttcgcactgtacaacctgctggcgctgtacctgctgccgctgctcgccacctgcgcctgctatgcggccatgctgcgccacctgggccgggtcgccgtgcgccccgcgcccgccgatagcgccctgcaggggcaggtgctggcagagcgcgcaggcgccgtgcgggccaaggtctcgcggctggtggcggccgtggtcctgctcttcgccgcctgctggggccccatccagctgttcctggtgctgcaggcgctgggccccgcgggctcctggcacccacgcagctacgccgcctacgcgcttaagacctgggctcactgcatgtcctacagcaactccgcgctgaacccgctgctctacgccttcctgggctcgcacttccgacaggccttccgccgcgtctgcccctgcgcgccgcgccgcccccgccgcccccgccggcccggaccctcggaccccgcagccccacacgcggagctgctccgcctggggtcccacccggcccccgccagggcgcagaagccagggagcagtgggctggccgcgcgcgggctgtgcgtcctgggggaggacaacgcccctctctgagcggacccggtgggaatccgagcggctccctcgggagcggggactgctggaacagcggctattcttctgttattagtatttttcttactgtccaagatcaactgtggaaatattttggtctcttgtgacgttcggtgcagtttcgttgtgaagtttgctattgatattgaaattatgacttctgtgtttcctgaaattaaacatgtgtcaacacaggactttctggatcattccagaaagtgtcagacgttttctcattgtcttgt

SEQ ID NO: 224815 - protein, 1132 aa, Artificial Sequence
  derived and/or modified sequence
MEPDSLLDQDDSYESPQERPGSRRSLPGSLSEKSPSMEPSAATPFRVTGFLSRRLKGSIKRTKSQPKLDRNHSFRHILPGFRSAAAAAADNERSHLMPRLKESRSHESLLSPSSAVEALDLSMEEEVVIKPVHSSILGQDYCFEVTTSSGSKCFSCRSAAERDKWMENLRRAVHPNKDNSRRVEHILKLWVIEAKDLPAKKKYLCELCLDDVLYARTTGKLKTDNVFWGEHFEFHNLPPLRTVTVHLYRETDKKKKKERNSYLGLVSLPAASVAGRQFVEKWYPVVTPNPKGGKGPGPMIRIKARYQTITILPMEMYKEFAEHITNHYLGLCAALEPILSAKTKEEMASALVHILQSTGKVKDFLTDLMMSEVDRCGDNEHLIFRENTLATKAIEEYLKLVGQKYLQDALGEFIKALYESDENCEVDPSKCSAADLPEHQGNLKMCCELAFCKIINSYCVFPRELKEVFASWRQECSSRGRPDISERLISASLFLRFLCPAIMSPSLFNLLQEYPDDRTARTLTLIAKVTQNLANFAKFGSKEEYMSFMNQFLEHEWTNMQRFLLEISNPETLSNTAGFEGYIDLGRELSSLHSLLWEAVSQLEQSIVSKLGPLPRILRDVHTALSTPGSGQLPGTNDLASTPGSGSSSISAGLQKMVIENDLSGLIDFTRLPSPTPENKDLFFVTRSSGVQPSPARSSSYSEANEPDLQMANGGKSLSMVDLQDARTLDGEAGSPAGPDVLPTDGQAAAAQLVAGWPARATPVNLAGLATVRRAGQTPTTPGTSEGAPGRPQLLAPLSFQNPVYQMAAGLPLSPRGLGDSGSEGHSSLSSHSNSEELAAAAKLGSFSTAAEELARRPGELARRQMSLTEKGGQPTVPRQNSAGPQRRIDQPPPPPPPPPPAPRGRTPPNLLSTLQYPRPSSGTLASASPDWVGPSTRLRQQSSSSKGDSPELKPRAVHKQGPSPVSPNALDRTAAWLLTMNAQLLEDEGLGPDPPHRDRLRSKDELSQAEKDLAVLQDKLRISTKKLEEYETLFKCQEETTQKLVLEYQARLEEGEERLRRQQEDKDIQMKGIISRLMSVEEELKKDHAEMQAAVDSKQKIIDAQEKRIASLDAANARLMSALTQLKESMH

SEQ ID NO: 224816 - protein, 1069 aa, Artificial Sequence
  derived and/or modified sequence
SQPKLDRNHSFRHILPGFRSAAAAAADNERSHLMPRLKESRSHESLLSPSSAVEALDLSMEEEVVIKPVHSSILGQDYCFEVTTSSGSKCFSCRSAAERDKWMENLRRAVHPNKDNSRRVEHILKLWVIEAKDLPAKKKYLCELCLDDVLYARTTGKLKTDNVFWGEHFEFHNLPPLRTVTVHLYRETDKKKKKERNSYLGLVSLPAASVAGRQFVEKWYPVVTPNPKGGKGPGPMIRIKARYQTITILPMEMYKEFAEHITNHYLGLCAALEPILSAKTKEEMASALVHILQSTGKVKDFLTDLMMSEVDRCGDNEHLIFRENTLATKAIEEYLKLVGQKYLQDALGEFIKALYESDENCEVDPSKCSAADLPEHQGNLKMCCELAFCKIINSYCVFPRELKEVFASWRQECSSRGRPDISERLISASLFLRFLCPAIMSPSLFNLLQEYPDDRTARTLTLIAKVTQNLANFAKFGSKEEYMSFMNQFLEHEWTNMQRFLLEISNPETLSNTAGFEGYIDLGRELSSLHSLLWEAVSQLEQSIVSKLGPLPRILRDVHTALSTPGSGQLPGTNDLASTPGSGSSSISAGLQKMVIENDLSGLIDFTRLPSPTPENKDLFFVTRSSGVQPSPARSSSYSEANEPDLQMANGGKSLSMVDLQDARTLDGEAGSPAGPDVLPTDGQAAAAQLVAGWPARATPVNLAGLATVRRAGQTPTTPGTSEGAPGRPQLLAPLSFQNPVYQMAAGLPLSPRGLGDSGSEGHSSLSSHSNSEELAAAAKLGSFSTAAEELARRPGELARRQMSLTEKGGQPTVPRQNSAGPQRRIDQPPPPPPPPPPAPRGRTPPNLLSTLQYPRPSSGTLASASPDWVGPSTRLRQQSSSSKGDSPELKPRAVHKQGPSPVSPNALDRTAAWLLTMNAQLLEDEGLGPDPPHRDRLRSKDELSQAEKDLAVLQDKLRISTKKLEEYETLFKCQEETTQKLVLEYQARLEEGEERLRRQQEDKDIQMKGIISRLMSVEEELKKDHAEMQAAVDSKQKIIDAQEKRIASLDAANARLMSALTQLKESMH

SEQ ID NO: 224817 - DNA, 3399 bp, Artificial Sequence
  derived and/or modified sequence
atggagcccgacagcctgctggaccaggacgacagctacgagagcccccaggagagacccggcagcagaagaagcctgcccggcagcctgagcgagaagagccccagcatggagcccagcgccgccacccccttcagagtgaccggcttcctgagcagaagactgaagggcagcatcaagagaaccaagagccagcccaagctggacagaaaccacagcttcagacacatcctgcccggcttcagaagcgccgccgccgccgccgccgacaacgagagaagccacctgatgcccagactgaaggagagcagaagccacgagagcctgctgagccccagcagcgccgtggaggccctggacctgagcatggaggaggaggtggtgatcaagcccgtgcacagcagcatcctgggccaggactactgcttcgaggtgaccaccagcagcggcagcaagtgcttcagctgcagaagcgccgccgagagagacaagtggatggagaacctgagaagagccgtgcaccccaacaaggacaacagcagaagagtggagcacatcctgaagctgtgggtgatcgaggccaaggacctgcccgccaagaagaagtacctgtgcgagctgtgcctggacgacgtgctgtacgccagaaccaccggcaagctgaagaccgacaacgtgttctggggcgagcacttcgagttccacaacctgccccccctgagaaccgtgaccgtgcacctgtacagagagaccgacaagaagaagaagaaggagagaaacagctacctgggcctggtgagcctgcccgccgccagcgtggccggcagacagttcgtggagaagtggtaccccgtggtgacccccaaccccaagggcggcaagggccccggccccatgatcagaatcaaggccagataccagaccatcaccatcctgcccatggagatgtacaaggagttcgccgagcacatcaccaaccactacctgggcctgtgcgccgccctggagcccatcctgagcgccaagaccaaggaggagatggccagcgccctggtgcacatcctgcagagcaccggcaaggtgaaggacttcctgaccgacctgatgatgagcgaggtggacagatgcggcgacaacgagcacctgatcttcagagagaacaccctggccaccaaggccatcgaggagtacctgaagctggtgggccagaagtacctgcaggacgccctgggcgagttcatcaaggccctgtacgagagcgacgagaactgcgaggtggaccccagcaagtgcagcgccgccgacctgcccgagcaccagggcaacctgaagatgtgctgcgagctggccttctgcaagatcatcaacagctactgcgtgttccccagagagctgaaggaggtgttcgccagctggagacaggagtgcagcagcagaggcagacccgacatcagcgagagactgatcagcgccagcctgttcctgagattcctgtgccccgccatcatgagccccagcctgttcaacctgctgcaggagtaccccgacgacagaaccgccagaaccctgaccctgatcgccaaggtgacccagaacctggccaacttcgccaagttcggcagcaaggaggagtacatgagcttcatgaaccagttcctggagcacgagtggaccaacatgcagagattcctgctggagatcagcaaccccgagaccctgagcaacaccgccggcttcgagggctacatcgacctgggcagagagctgagcagcctgcacagcctgctgtgggaggccgtgagccagctggagcagagcatcgtgagcaagctgggccccctgcccagaatcctgagagacgtgcacaccgccctgagcacccccggcagcggccagctgcccggcaccaacgacctggccagcacccccggcagcggcagcagcagcatcagcgccggcctgcagaagatggtgatcgagaacgacctgagcggcctgatcgacttcaccagactgcccagccccacccccgagaacaaggacctgttcttcgtgaccagaagcagcggcgtgcagcccagccccgccagaagcagcagctacagcgaggccaacgagcccgacctgcagatggccaacggcggcaagagcctgagcatggtggacctgcaggacgccagaaccctggacggcgaggccggcagccccgccggccccgacgtgctgcccaccgacggccaggccgccgccgcccagctggtggccggctggcccgccagagccacccccgtgaacctggccggcctggccaccgtgagaagagccggccagacccccaccacccccggcaccagcgagggcgcccccggcagaccccagctgctggcccccctgagcttccagaaccccgtgtaccagatggccgccggcctgcccctgagccccagaggcctgggcgacagcggcagcgagggccacagcagcctgagcagccacagcaacagcgaggagctggccgccgccgccaagctgggcagcttcagcaccgccgccgaggagctggccagaagacccggcgagctggccagaagacagatgagcctgaccgagaagggcggccagcccaccgtgcccagacagaacagcgccggcccccagagaagaatcgaccagccccccccccccccccccccccccccccccgcccccagaggcagaaccccccccaacctgctgagcaccctgcagtaccccagacccagcagcggcaccctggccagcgccagccccgactgggtgggccccagcaccagactgagacagcagagcagcagcagcaagggcgacagccccgagctgaagcccagagccgtgcacaagcagggccccagccccgtgagccccaacgccctggacagaaccgccgcctggctgctgaccatgaacgcccagctgctggaggacgagggcctgggccccgaccccccccacagagacagactgagaagcaaggacgagctgagccaggccgagaaggacctggccgtgctgcaggacaagctgagaatcagcaccaagaagctggaggagtacgagaccctgttcaagtgccaggaggagaccacccagaagctggtgctggagtaccaggccagactggaggagggcgaggagagactgagaagacagcaggaggacaaggacatccagatgaagggcatcatcagcagactgatgagcgtggaggaggagctgaagaaggaccacgccgagatgcaggccgccgtggacagcaagcagaagatcatcgacgcccaggagaagagaatcgccagcctggacgccgccaacgccagactgatgagcgccctgacccagctgaaggagagcatgcactag

SEQ ID NO: 224818 - DNA, 876 bp, Artificial Sequence
  derived and/or modified sequence
atggagcccgacagcctgctggaccaggacgacagctacgagagcccccaggagagacccggcagcagaagaagcctgcccggcagcctgagcgagaagagccccagcatggagcccagcgccgccacccccttcagagtgaccggcttcctgagcagaagactgaagggcagcatcaagagaaccaagagccagcccaagctggacagaaaccacagcttcagacacatcctgcccggcttcagaagcgccgccgccgccgccgccgacaacgagagaagccacctgatgcccagactgaaggagagcagaagccacgagagcctgctgagccccagcagcgccgtggaggccctggacctgagcatggaggaggaggtggtgatcaagcccgtgcacagcagcatcctgggccaggactactgcttcgaggtgaccaccagcagcggcagcaagtgcttcagctgcagaagcgccgccgagagagacaagtggatggagaacctgagaagagccgtgcaccccaacaaggacaacagcagaagagtggagcacatcctgaagctgtgggtgatcgaggccaaggacctgcccgccaagaagaagtacctgtgcgagctgtgcctggacgacgtgctgtacgccagaaccaccggcaagctgaagaccgacaacgtgttctggggcgagcacttcgagttccacaacctgccccccctgagaaccgtgaccgtgcacctgtacagagagaccgacaagaagaagaagaaggagagaaacagctacctgggcctggtgagcctgcccgccgccagcgtggccggcagacagttcgtggagaagtggtaccccgtggtgacccccaaccccaagtag

SEQ ID NO: 224819 - DNA, 5451 bp, Artificial Sequence
  derived and/or modified sequence
cccagacgctcatggagacagcctcggttcataaatcaggtggggccaggggctgggggcccacacgccatggagcccgactcccttctggaccaagacgactcctacgagtcgcctcaagaaaggccgggctctcggcgcagcctgcctggcagcctttccgagaagagccccagcatggagccctcggccgccacgccgttccgggtcacgggcttcctcagccgccgcctcaagggctccatcaagcgcaccaagagccagcccaagctggaccgcaaccacagcttccgccacatcctgccggggttccggagcgccgccgccgccgccgcggacaatgagaggtcccatctgatgccgaggctgaaggagtctcgctcccacgagtccctgctcagccccagcagtgcggtggaggcgctggacctcagcatggaggaagaggtggtcatcaagcccgtgcacagcagcatccttggccaggactactgcttcgaggtgacgacgtcatcaggaagcaagtgcttttcctgccggtctgcagctgagcgggataagtggatggagaacctccggcgagcggtgcatcccaacaaggacaacagccggcgtgtggagcacatcctgaagctgtgggtgatcgaggccaaggacctgccagccaagaagaagtacctgtgcgagctgtgcctggacgatgtgctctatgcccgcaccacgggcaagctcaagacggacaatgttttctggggcgagcacttcgagttccacaacttgccgcctctgcgcacggtcactgtccacctgtaccgggagaccgacaagaagaagaagaaggagcgcaacagttacctgggcctggtgagcctacctgctgcctcggtggccgggcggcagttcgtggagaagtggtacccggtggtgacgcccaaccccaagggcggcaagggccctggacccatgatccgcatcaaggcgcgctaccaaaccatcaccatcctgcccatggagatgtacaaagagttcgctgagcacatcaccaaccactacctggggctgtgtgcagccctcgagcccatcctcagtgccaagaccaaggaggagatggcatctgccctggtgcacatcctgcagagcacgggcaaggtgaaggacttcctgacagacctgatgatgtcagaggtggaccgctgcggggacaacgagcacctcatcttccgggagaacacactggccaccaaggccattgaggagtacctcaagctagtgggccagaagtacctgcaggacgccctaggtgagttcatcaaagcgctgtatgagtcagatgagaactgcgaagtggatcccagcaagtgctcggccgctgacctcccagagcaccagggcaacctcaagatgtgctgcgagctggccttctgcaagatcatcaactcctactgtgtcttcccacgggagttgaaagaggtgtttgcctcgtggaggcaggagtgcagcagtcgcggccgcccggacatcagtgagcggctcatcagcgcctccctcttcctgcgcttcctctgcccagccatcatgtcgccctcactcttcaacctgctgcaggagtaccctgatgaccgcactgcccgcaccctcaccctcatcgccaaggtcacccagaacctggccaactttgccaaatttggcagcaaggaggaatacatgtccttcatgaaccagttcctagagcatgagtggaccaacatgcagcgcttcctgctggagatctccaaccccgagaccctctccaatacagccggcttcgagggctacatcgacctgggccgcgagctctccagcctgcactcactgctctgggaggccgtcagccagctggagcagagcatagtatccaaactgggacccctgcctcggatcctgagggacgtccacacagcactgagcaccccaggtagcgggcagctcccagggaccaatgacctggcctccacaccgggctctggcagcagcagcatctcagctgggctgcagaagatggtgattgagaacgatctttccggtctgatagatttcacccggttaccgtctccaacccccgaaaacaaggacttgttttttgtcacaaggtcctccggggtccagccctcacctgcccgcagctcgagttactcggaagccaacgagcctgatcttcagatggccaacggtggcaagagcctctccatggtggacctccaggacgcccgcacgctggatggggaggcaggctccccggcgggccccgacgtcctccccacagatgggcaggccgctgcagctcagctggtggccgggtggccggcccgggcaaccccagtgaacctggcagggctggccacggtgcggcgggcaggccagacaccaaccacaccaggcacctccgagggcgcgccaggccggccccagctgttggcaccgctctccttccagaaccctgtgtaccagatggcggctggcctgccgctgtcaccccgtggccttggcgactcaggctctgagggccacagctccctgagctcacacagcaacagcgaggagttggcggctgctgccaagctgggaagtttcagcactgccgcggaggagctggctcggcggcccggtgagctggcacggcgacagatgtcactgactgaaaaaggcgggcagcccacggtgccacggcagaacagtgctggcccccagaggaggatcgaccagcctccgcccccacccccgccgccacctcctgccccccgcggccggacgccccccaacctgctgagcaccctgcagtacccaagaccctcaagcggaaccctggcgtcggcctcacctgattgggtgggccccagtacccgcctgaggcagcagtcctcttcctccaagggggacagcccagaactgaagccacgggcagtgcacaagcagggcccttcacctgtgagccccaatgccctggaccgcacagccgcttggctcttgaccatgaacgcgcagttgttagaagacgagggcctgggcccagaccccccccacagggataggctaaggagtaaggacgagctcagccaagcagaaaaggacctggcggtgctgcaggacaagctgcgaatctccaccaagaagctggaggagtatgagaccctgttcaagtgccaggaggagacgacgcagaagctggtgctggagtaccaggcacggctggaggagggcgaggagcggctgcggcggcagcaggaggacaaggacatccagatgaagggcatcatcagcaggttgatgtccgtggaggaagaactgaagaaggaccacgcagagatgcaagcggctgtggactccaaacagaagatcattgatgcccaggagaagcgcattgcctcgttggatgccgccaatgcccgcctcatgagtgccctgacccagctgaaagagagtatgcattagaaacaaaagcccgcttgctcgcttgctggaacacaggggccttttaagttgagcgtgcgcactgcatgggaaatagcggccctggaggatgttagacttgctccctctccaagacagcagcagcctgcacctgccccgtgtgtgtggccggcctcctcctcacccttcccggcccccggccaaggacccaggcgctgcatacaggggaggggcgcaccccacagctggggccggttttcctcagctctaggctgttctgtagcttatctgcccctcccccactttcaagacagatgagcaggagcttgggtctctctcggcccctgtctgttcccagcccctgcagattctgagcaaaggccctgggtaagaagggtgggagtggggcctttgccagcagagccagggcagggcgagctgcaggaatcacccctctgcccctgcagctggaatgtgccacagaggccccacctgaagggtggatgtgctggaggggtggcccagagccatactgcgtccaccctgagctcggggacaggtgacagtggctgctctgggaaggggcttttagatgtaacctacaattcagttaggctagagacagatgctggtggaggaagggctgggccaccagggatcacagaccacaggaagatgggaggtggaagcagaggccctgcccccaccccttcctgtctcactcttctgtcttgtccccacccatgcgccttcgtgcctgagaccagggtggccacacaggcagggcctggctccagtctcatcctcccattgcccagtgagccctgctcttctctccccagccccctcccaccgctgcctcgtagagtgacctcggacagagcccccctagcaatacagggaggctcccggggcctggacaggcgggctcggaggctacccgctgtggccggtgccagctgcccttgcagggtgggtgagctctcaggccgagagccttatttacctagtgcaaaaactgtaaaagtgtacagactcttcacagatttttatcttaattgcaagtctgccgattttgtaaatgttcttggtgtttgactgtaatgtaactatctcacctaatggttgtacatatcctttggtcctggtgctgccgagggctggccgggactgctgctctcccaagggttttattttatttctgaatctagagaacagtattgggcaggaggaaaaggcttggtgtctgcggggggtgtcttccctgcctgtggcatttgtgtgttggctttgcagctgctgtctgagtagtggccactggggtgccttcactgggccagtcaacggggggctcctgcccaggccacagagaacctgagttcccgggagctgggccctgcctgcagccagggctggggttgccagaggccctggagggaaggacagtccctgctggggaagaacagccccggggccccctggtcaccgagactcagcctctgctggagaaagccacgccctccctgctagcacagaggcctgactgacttttttgcttaacttccatgttctgggtgatggaaactgccaaacctcctgtcagtgaggactctttccgactgcccagaaagtgggggtggaggaccgaggctacagctccacacgccccggtcccccagagcatctgccccaggtacacctccccctgcgccccgcacgactgcgggagccagactgtccagggaaacagcctctctcttttctacacactcagccacaaagccccccagctcccacaccgcgtcccagctcccctcttttgtaagtatgtgaaaaggaaaaaatgcaaacgttggagtttgggctggagctcctccctccagctgcgacttttaactatgtaataatgtacagaggaagctgttggtgttctaagactctgtgtggctgtgcaatttctgtacatttgcaattagaaatattaaagatttatttagctatttt

SEQ ID NO: 224820 - DNA, 1006 bp, Artificial Sequence
  derived and/or modified sequence
tgcttgcaggaatacccagtcatctagttggaaaagccgccagatggaatacaaaaggaggaacccagacgctcatggagacagcctcggttcataaatcaggtggggccaggggctgggggcccacacgccatggagcccgactcccttctggaccaagacgactcctacgagtcgcctcaagaaaggccgggctctcggcgcagcctgcctggcagcctttccgagaagagccccagcatggagccctcggccgccacgccgttccgggtcacgggcttcctcagccgccgcctcaagggctccatcaagcgcaccaagagccagcccaagctggaccgcaaccacagcttccgccacatcctgccggggttccggagcgccgccgccgccgccgcggacaatgagaggtcccatctgatgccgaggctgaaggagtctcgctcccacgagtccctgctcagccccagcagtgcggtggaggcgctggacctcagcatggaggaagaggtggtcatcaagcccgtgcacagcagcatccttggccaggactactgcttcgaggtgacgacgtcatcaggaagcaagtgcttttcctgccggtctgcagctgagcgggataagtggatggagaacctccggcgagcggtgcatcccaacaaggacaacagccggcgtgtggagcacatcctgaagctgtgggtgatcgaggccaaggacctgccagccaagaagaagtacctgtgcgagctgtgcctggacgatgtgctctatgcccgcaccacgggcaagctcaagacggacaatgttttctggggcgagcacttcgagttccacaacttgccgcctctgcgcacggtcactgtccacctgtaccgggagaccgacaagaagaagaagaaggagcgcaacagttacctgggcctggtgagcctacctgctgcctcggtggccgggcggcagttcgtggagaagtggtacccggtggtgacgcccaaccccaagg

SEQ ID NO: 224821 - DNA, 3399 bp, Artificial Sequence
  derived and/or modified sequence
atggagcctgactctctgttagaccaggacgattcctatgagagcccacaggaacgtcccggcagtcgaagatccctccccggcagcctgagtgaaaaaagtccgagtatggagccaagcgccgccacacccttccgcgtcacaggcttcctctcacgtcggctgaaagggtcaatcaagcggaccaaaagccagcctaagttagatcggaaccactccttcaggcacattctgcccgggtttcggagtgctgctgcagcggcggcggataatgagcgctcccacttaatgccccgactcaaggagagcagaagtcacgagtccttactgtcgccatcctccgcggtggaggccttagatctgtctatggaggaagaagtggtgatcaaacccgttcacagttcaatcctgggccaagattactgctttgaggtcaccacttctagtggttcaaagtgttttagttgccggtcagcggcagaaagggataaatggatggaaaatcttagaagggccgtgcaccctaacaaggataatagcagaagggtggagcatatcctgaagctatgggtcatagaggcaaaagatctacctgcgaaaaaaaagtatctgtgtgaattgtgtctcgacgatgtcctgtacgcgaggactacaggcaaactgaaaacggacaacgttttctggggtgagcacttcgagtttcacaatctgccgcctctccggacggttaccgttcacctttatagagagactgacaagaaaaaaaaaaaggaacgaaactcgtatcttgggctcgtgagtctgccagccgccagtgtcgcaggacgtcagttcgtggagaagtggtacccggtagtaacaccaaaccctaaggggggtaagggacctggaccaatgatcaggattaaagcaagataccaaactatcaccatcctacccatggaaatgtacaaggagtttgcggaacatataaccaatcattacctggggctgtgtgctgcacttgaacccattctgtcggccaagacaaaagaggagatggcctctgcgttggttcacatcctccagtcaactggcaaagtaaaagatttcctcaccgatctcatgatgtccgaagtcgaccgatgcggagataatgagcacctgatcttccgggagaatactctggcaacgaaggccatcgaggaatatctgaagctggtgggacagaaatacttgcaggatgcgctgggggaatttatcaaggcactgtacgagtctgacgaaaactgcgaggtggatccttctaaatgctcggcagctgacctgcccgagcaccagggtaacctgaaaatgtgttgtgagcttgccttctgtaaaattattaacagttactgcgttttcccccgggaactgaaggaagtttttgcctcgtggagacaggagtgctctagccgcggcagaccagacatctccgaacggctgatctccgcttccttatttctgaggttcctgtgtccggcaatcatgtccccctctttgtttaacttgctacaggagtatcctgacgacagaacagccaggactttaaccttgatagcgaaggtaacacaaaatcttgctaactttgccaaattcggctccaaagaggagtacatgtctttcatgaatcagttcctcgagcacgagtggacaaacatgcaaagattcctgctcgaaatcagtaaccccgaaaccctgtcaaatacagcaggctttgagggctacatagacctgggcagggaattgtcctccctccattcccttctgtgggaagcagtttctcaactggaacaaagcatcgtgtctaagctcggcccacttccacggatcctgagggatgtacacaccgcgttgtctactcctggcagtggacaactcccaggaacgaatgacctagcaagcacgccagggtccggaagctccagcattagcgcaggcctgcagaagatggtaatcgagaacgatctgagtggattgatcgactttaccaggctcccatcaccaaccccagaaaacaaggatctgttctttgtcacccggtctagcggagtgcaaccctctcccgccagaagcagctcttactctgaagccaacgagcctgatctgcagatggctaacggcgggaagagcctgagcatggtcgacctccaagacgctcgtactctggatggagaggcaggcagtcctgctggcccggacgttttaccaacagatggtcaggccgctgcagcacagcttgtggccggatggccggcacgggctacacctgttaatctggctggcctagccaccgtgcgacgtgctgggcagacccctaccacaccaggcacttcagaaggagctccgggccggcctcagttactcgcccccctttcctttcagaacccagtataccagatggctgctgggcttccactctctcccagaggtctgggcgattccggtagtgaagggcactcttccctgtcatctcactcaaattcagaggagctggctgcagcagccaagctcggctctttctccaccgccgcagaggaactagcgagacgccccggagagctggcaaggaggcagatgtctctcacagaaaagggcggccagccgacagtgcctaggcaaaacagtgctggtccacagcgccggatcgaccagccacccccaccccctcctccccccccccctgcccctaggggcagaactccccctaaccttttgagtaccctgcagtatcctaggccatcatcagggacactcgcttccgcctcccccgactgggtcgggccatccacgagactgaggcagcagtcctcaagctcaaagggagatagccctgagctgaagcctagagctgtgcacaagcaggggccttcaccagtctctccaaacgccctggaccgcacagctgcctggctgctgacaatgaatgcccagcttctggaggacgagggcttgggacctgatcctccccaccgagaccgactgaggagtaaagatgaacttagccaggccgaaaaggacttggccgttttacaggacaagctgaggatctctactaagaaactggaagaatatgagaccctgttcaagtgccaggaggaaacgacacagaagctggtgctcgaataccaagctagacttgaggagggtgaggaaaggttgagacggcagcaggaggacaaagacatccagatgaaggggattattagcagactcatgtctgtagaagaggaactgaagaaagaccacgcagaaatgcaggccgctgttgatagtaaacaaaaaatcatcgacgcgcaagaaaagagaatagcttccctggatgctgcaaatgctcgcctgatgtccgctttgactcaactcaaggagtccatgcattag

SEQ ID NO: 224822 - DNA, 876 bp, Artificial Sequence
  derived and/or modified sequence
atggagccagactctttacttgaccaggatgacagttatgagtccccccaggagcgaccggggagcaggcggtccctccccggatccctgtcagagaagagtccttcaatggaaccaagcgcagcaaccccctttcgggtgaccgggttcctgtctaggagactaaagggcagtatcaaaaggaccaaatcgcaaccgaaactggaccggaaccatagcttccgacatatcctccctggattcagatcagcagcagcagcggctgcagataatgagcgatctcatttgatgccacggctcaaagagtctcggtctcatgaatctcttttgtccccgtcatctgcagtggaggcactcgatctctccatggaagaggaggtcgtgattaagcccgtccacagctccatccttgggcaggattactgcttcgaggtgaccaccagctccggcagtaaatgcttctcgtgtcggtccgccgcagagcgtgataaatggatggaaaatctgagacgggcggtgcaccctaataaggacaacagtcgccgggtcgaacatattctcaagctttgggttatcgaggctaaggatctgcctgccaaaaagaagtacctctgtgagttgtgcctggacgatgtactctacgccagaaccacaggaaaactgaaaacggataacgtgttttggggagagcacttcgaatttcacaatctgccgcccctccgaactgtaaccgtgcacctctatagagagacagacaaaaaaaaaaaaaaagagcggaatagctacctcggtctcgtgtcacttccagctgcatcagtcgcaggcagacaattcgtcgagaagtggtatcccgtagtcacacccaaccctaagtag

SEQ ID NO: 224823 - DNA, 3399 bp, Artificial Sequence
  derived and/or modified sequence
atggagccagacagcctgctggaccaggatgacagctatgagagcccccaggagcggcccggcagcagaagaagcctgcccggcagcctgtctgagaagagccccagcatggagcccagcgctgccacccccttccgggtgacaggcttcctgagccggcggctgaagggcagcatcaagaggaccaagagccagcccaagctggacaggaaccacagcttccgccacatcctgcccggcttccgctctgctgctgctgctgctgctgacaatgaaagaagccacctgatgccccggctgaaggagagccgcagccatgagagcctgctgagccccagcagcgctgtggaggccctggacctgtccatggaggaggaggtggtgatcaagcctgtgcacagcagcatcctgggccaggactactgctttgaggtgaccaccagcagcggcagcaagtgcttcagctgccgctctgctgctgagcgggacaagtggatggagaacctgcggcgggctgtgcaccccaacaaggacaacagcagaagagtggagcacatcctgaagctgtgggtgattgaggccaaggacctgcctgccaagaagaagtacctgtgtgagctgtgcctggatgatgtgctgtatgcccggaccaccgggaagctgaagacagacaacgtgttctggggcgagcactttgagttccacaacctgccccccctgaggacagtgacagtgcacctgtaccgggagacagacaagaagaagaagaaggagagaaattcctacctgggcctggtgtccctgcctgctgcctctgtggccggccggcagtttgtggagaagtggtaccctgtggtgacccccaaccccaagggcggcaagggccctggccccatgatccgcatcaaggcccgctaccagaccatcaccatcctgcccatggagatgtacaaggagtttgctgagcacatcaccaaccactacctgggcctgtgtgccgccctggagcccatcctgagcgccaagaccaaggaggagatggccagcgccctggtgcacatcctgcagagcacaggcaaggtgaaggacttcctgacagacctgatgatgtctgaggtggacagatgtggggacaatgagcacctgatcttccgggagaacaccctggccaccaaggccatcgaggagtacctgaagctggtgggccagaagtacctgcaggatgccctgggggagttcatcaaggccctgtatgaaagtgatgagaactgtgaggtggaccccagcaagtgcagcgctgctgacctgcctgagcaccagggcaacctgaagatgtgctgtgagctggccttctgcaagatcatcaacagctactgtgtgttcccccgggagctgaaggaggtgtttgcctcctggaggcaggagtgcagcagccggggccgcccagacatcagcgagcggctcatcagcgccagcctcttcctgcgcttcctgtgcccagccatcatgagccccagcctcttcaacctgctgcaggagtacccagatgacagaacagcccggaccctgaccctcatcgccaaggtgacccagaacctggccaactttgccaagtttggcagcaaggaggagtacatgtccttcatgaaccagttcctggagcacgagtggaccaacatgcagcgcttcctgctggagatcagcaaccctgagaccctgagcaacacagctggctttgagggctacatcgacctgggccgggagctgagcagcctgcacagcctgctgtgggaggccgtgtcccagctggagcagagcatcgtgtccaagctgggccccctgccccgcatcctgagagatgtgcacacagccctgagcaccccaggcagcggccagctgcccggcaccaatgacctggccagcaccccaggcagcggcagcagcagcatctctgctggcctgcagaagatggtgattgaaaatgacctgagcggcctgattgacttcacccggctgcccagccccaccccagagaacaaggacctcttctttgtgaccaggagcagtggagtgcagcccagccctgcccggagcagcagctacagcgaggccaatgaaccagacctgcagatggccaatggaggcaagagcctgtccatggtggacctgcaggatgcccggaccctggatggagaggccggcagccctgctggcccagatgtgctgcccacagatggccaggccgccgccgcccagctggtggccggctggccagcccgggccacccctgtgaacctggccggcctggccaccgtgagaagagctggccagacccccaccaccccaggcaccagcgagggcgcccctggccggccccagctgctggcccccctgtccttccagaaccctgtgtaccagatggctgctggcctgcccctgagcccccggggcctgggggacagcggcagcgagggccacagcagcctgagcagccacagcaacagcgaggagctggccgctgctgccaagctgggcagcttcagcacagctgctgaggagctggcccggcggcctggagagctggcccggcggcagatgagcctgacagagaagggcggccagcccaccgtgccccggcagaacagcgctggcccccagaggagaattgaccagcccccacctcctcctcctcctcctcctccagccccccggggccgcaccccacccaacctgctgagcaccctgcagtacccccggcccagcagcggcaccctggccagcgccagcccagactgggtgggccccagcacccggctgcggcagcagagcagcagcagcaaaggagacagccctgagctgaagcccagggctgtgcacaagcagggccccagccctgtgagccccaatgccctggacagaacagctgcctggctgctgaccatgaatgcccagctgctggaggatgagggcctgggccctgaccccccccaccgggaccggctgcggagcaaggatgagctgagccaggccgagaaggacctggccgtgctgcaggacaagctgcgcatcagcaccaagaagctggaggagtatgagaccctcttcaagtgccaggaggagaccacccagaagctggtgctggagtaccaggcccggctggaggagggggaggagcggctgcggcggcagcaggaggacaaggacatccagatgaagggcatcatcagccggctgatgtctgtggaggaggagctgaagaaggaccacgccgagatgcaggccgctgtggacagcaagcagaagatcattgatgcccaggagaagagaattgccagcctggatgctgccaatgcccggctgatgtctgccctgacccagctgaaggagagcatgcactag

SEQ ID NO: 224824 - DNA, 876 bp, Artificial Sequence
  derived and/or modified sequence
atggagccagacagcctgctggaccaggatgacagctatgagagcccccaggagcggcccggcagcagaagaagcctgcccggcagcctgtctgagaagagccccagcatggagcccagcgctgccacccccttccgggtgacaggcttcctgagccggcggctgaagggcagcatcaagaggaccaagagccagcccaagctggacaggaaccacagcttccgccacatcctgcccggcttccgctctgctgctgctgctgctgctgacaatgaaagaagccacctgatgccccggctgaaggagagccgcagccatgagagcctgctgagccccagcagcgctgtggaggccctggacctgtccatggaggaggaggtggtgatcaagcctgtgcacagcagcatcctgggccaggactactgctttgaggtgaccaccagcagcggcagcaagtgcttcagctgccgctctgctgctgagcgggacaagtggatggagaacctgcggcgggctgtgcaccccaacaaggacaacagcagaagagtggagcacatcctgaagctgtgggtgattgaggccaaggacctgcctgccaagaagaagtacctgtgtgagctgtgcctggatgatgtgctgtatgcccggaccaccgggaagctgaagacagacaacgtgttctggggcgagcactttgagttccacaacctgccccccctgaggacagtgacagtgcacctgtaccgggagacagacaagaagaagaagaaggagagaaattcctacctgggcctggtgtccctgcctgctgcctctgtggccggccggcagtttgtggagaagtggtaccctgtggtgacccccaaccccaagtag

SEQ ID NO: 224825 - DNA, 3399 bp, Artificial Sequence
  derived and/or modified sequence
atggagcccgacagcctgctggaccaggacgacagctacgagagccctcaggagcggcccggatctcgccgaagcttgcctggaagcctgtctgagaagagcccaagcatggagccctcagcagccacaccctttcgggtgactgggttcctgagcagaaggcttaaggggtctatcaaacgaactaagagtcaaccaaagctagacagaaatcactcattcaggcacatccttccaggcttccgctcggctgctgctgctgcggctgacaacgagcgaagtcacctgatgccacggctgaaggagagtcggagtcacgaaagtttgttatcaccatcttccgcagtggaagcgctggatctcagcatggaagaggaggtggtcatcaaacctgtgcattccagcatcctcgggcaggattattgctttgaagtgaccactagttctggttctaaatgcttctcctgcaggagcgccgcagagcgcgataagtggatggagaacctgcggcgcgctgtgcaccctaataaagacaattcccggcgggtggagcacatcttaaaactgtgggtgatcgaagcaaaagatcttccggccaagaaaaagtacctgtgcgagctctgcctggatgatgtgctatatgcgagaaccaccgggaagctgaaaactgataacgtgttttggggggagcatttcgagttccacaatctaccacctctgcgaacggtgacagtgcatctctaccgggaaaccgacaagaaaaagaagaaggagcgtaatagctacctcggccttgtgtccttgcccgccgccagcgtcgccggacgtcagttcgtggagaagtggtatcccgtcgttacacctaatccgaagggaggcaaaggccccggacctatgataaggataaaagctcgctatcagacaatcaccatcctgccaatggagatgtacaaggagtttgccgaacacataactaaccactacctgggattgtgtgctgcactggaaccgattctgagcgccaaaactaaagaagaaatggcaagtgctctcgttcatatacttcagagtacaggcaaagtgaaagacttccttaccgatctcatgatgagtgaagttgatcgctgcggcgacaacgaacacttgatcttccgtgagaatacacttgcgacgaaggcgattgaggagtacctgaagctggtcggacagaagtacctgcaggatgctctgggggaatttattaaggcgctttatgaatctgacgagaactgcgaagtggacccgagcaaatgttctgccgccgatttacccgaacaccagggtaacctcaaaatgtgttgcgaactcgctttttgtaagatcatcaacagctattgcgtgttcccaagagaactgaaggaagtgttcgcctcttggaggcaagaatgttcaagcagaggacgacccgatatttccgaacggttaatttctgccagcctgttcctgcggttcctgtgccccgcaattatgagtccaagcctgttcaatctgctccaggaatatccagatgacagaaccgcccgcactctcacactgatagcgaaggtaacccagaatctggccaatttcgcgaagtttggctccaaggaagaatacatgtctttcatgaatcagttcctggaacatgagtggacgaatatgcaacggttcctgctggagatttccaatccggagacccttagcaataccgcaggttttgaaggatacatcgatctcggcagggagctctcctcactgcacagcttgctgtgggaggccgtgtcccagctggagcaaagtatcgtcagcaagctcgggccgcttccgagaattttgagagacgtgcatactgcccttagtacccccggaagcggacagctgcctggaacgaatgacctcgcctcaacccccggatctggctcttcctctatcagcgccggcctgcagaagatggtgattgagaatgacctttcaggtctaatagactttacaaggctcccaagccctactcctgagaacaaggatctgtttttcgtgactcgttcttctggggtccaaccttctccagctagaagctcctcttacagtgaggcaaacgaaccagatctacagatggctaatggcggcaaatcactgtccatggtcgacctgcaagatgcgaggactctcgacggggaagccgggtccccagccggaccagatgtcctacctaccgatggacaggccgctgctgctcagctagttgctggttggcccgctcgagcaacccctgtgaaccttgctggacttgccacagtgcgccgcgcaggtcaaacccctactacaccgggcacctctgaaggtgcccctggccggccgcagctgctggcccctctgtctttccagaatccggtgtaccaaatggctgccggactgcctttgagccctagaggcttgggggacagcgggagtgaggggcattctagtctgtcctcacacagcaacagtgaggagctagccgctgctgccaagctcggaagtttctccacagccgcagaggagctcgcgagacgccccggggagctcgcgaggaggcagatgagcctgacagagaagggtggacagcctacagtcccccgtcagaattctgctggccctcagcgcagaatcgaccagccaccccccccaccccccccacctcccccagccccacgcggccggactcccccaaacctgctttccactttgcaataccctcgccccagttccggaacgttagccagcgcctcccccgactgggtagggcccagcacaaggcttagacagcagtcatcttctagtaagggggattctcccgaacttaaacctcgggccgtccataagcaaggcccgtccccggtctcccccaatgccctcgacagaacagctgcctggctgctgaccatgaacgcacagctgcttgaagacgagggtcttggacccgacccacctcaccgcgataggttgcgctctaaggatgagctttcacaggctgagaaagacctggctgttctccaggataagcttcgcattagcaccaagaaactggaggagtatgaaaccctgtttaaatgccaggaggagacaacccagaagttagtcctggagtaccaagccagactcgaagaaggggaggagaggctgcgacggcaacaggaggacaaggatatacagatgaaggggatcatctctcggctgatgtcagttgaggaagagctcaaaaaagatcacgccgagatgcaggccgccgttgattccaaacagaaaattattgatgcacaggagaagcgcatagcctctctggatgccgccaatgcacgacttatgtctgccctcacccagctaaaggaatccatgcactag

SEQ ID NO: 224826 - DNA, 876 bp, Artificial Sequence
  derived and/or modified sequence
atggagcccgacagcctgctggaccaggacgacagctacgagagcccccaggagcgccctggatctaggcggagcctgcccggatccctttccgaaaaatcccccagcatggaaccatccgccgccaccccctttagagtcactggattcctgtcccggcggttgaagggctcaatcaaaaggacaaagagccagcccaagctcgatagaaaccactcatttagacacattctccccggattcagatccgccgctgcggccgctgcggacaacgaaagatctcacctgatgcctcggttgaaggaaagtcggtcccatgaaagcctgttgtcaccttctagcgccgtagaagcgctcgacctgagcatggaggaagaggtggtaattaagcctgtgcactctagtattctgggacaggactactgttttgaagttaccacaagttcgggtagcaaatgcttctcatgccgctccgcagcagaacgcgacaagtggatggagaatctgcggagagccgtgcaccccaataaagacaacagcagacgtgttgaacatatcctcaagttgtgggtgatagaggccaaagacctgcctgcaaagaagaaatatttgtgtgagctgtgcctggacgacgtgctgtacgcgcggaccacaggcaagctgaagaccgacaacgtcttctggggcgaacactttgagttccataacctgccacccttgcggacagtgaccgtgcatctgtaccgggaaactgacaaaaaaaaaaagaaggaaagaaacagttatttggggttagtgagccttcctgctgcaagcgtggcaggacgccagtttgtggagaagtggtaccccgtggtcacacccaaccctaaatag

SEQ ID NO: 224827 - DNA, 3399 bp, Artificial Sequence
  derived and/or modified sequence
atggagcccgacagccttctggaccaggatgattcttacgagtcccctcaggagcgaccaggatctcgccgaagtctccctggatccctcagtgagaaatcccctagcatggagccctcagcagccacgcctttcagagtcactggattcttatctaggagactgaaagggtcgatcaaaaggacaaagagccaaccaaagctcgaccggaaccactcctttagacatattttaccgggattcaggtccgcagcagccgctgccgctgacaatgaacgcagccatttgatgccacgactgaaggagtcacggtcccacgagtctctgctgtcaccatcctcagctgtggaagcgctggacctaagcatggaggaggaggtagtcattaaaccagtgcattctagtatccttggccaggactactgcttcgaagtcaccacatcttccggcagcaaatgcttcagttgccggagcgctgcagagcgcgacaaatggatggaaaacctacgccgagccgtgcatccaaacaaggataattcccgcagggtcgagcacatcttgaagctctgggtgatagaggctaaggacctccccgcaaaaaagaagtacctttgcgaactctgtcttgatgacgtgctctacgcccgaactactggcaaactcaaaaccgataacgtcttctggggtgaacatttcgaatttcataatctcccccctttaaggacagtaaccgttcacctgtaccgggaaacagataagaagaaaaaaaaggaacggaacagctacctggggctggtaagtctccccgcagcttcagtcgctggtagacaattcgtagaaaagtggtacccggtggttacccctaacccaaagggagggaaggggccaggacctatgatccgtataaaggcaagataccagaccataaccatccttccaatggagatgtataaggaattcgcagagcacatcacgaatcattacttgggactttgcgccgcactggagcctattctgagcgccaaaacaaaggaggagatggcaagcgccctggtacacatactgcagagcaccggtaaagtcaaggatttccttaccgacctgatgatgagcgaagtggaccgttgcggggacaatgaacacctgattttccgggaaaatacccttgccaccaaggcaatagaggagtacctgaaattggtgggccaaaagtacctccaagacgccttaggtgaattcattaaggccctttatgaaagtgatgaaaattgtgaggttgatcctagcaagtgctccgccgcagaccttcccgagcatcaggggaacttaaagatgtgttgcgagttagcgttttgcaaaatcatcaacagttattgcgtgttccctcgagagctgaaagaagtgtttgccagctggaggcaagaatgctcgtccaggggaagaccggacatttccgagagattaatctctgctagcctgtttttgagattcctttgcccagccattatgtcaccctctctgttcaatctcctgcaggagtacccagacgacaggaccgccagaaccctgactttgatcgccaaggttactcagaatctggcgaattttgcaaagtttggttcaaaggaggaatatatgagctttatgaaccaatttctcgagcatgagtggacaaacatgcagaggttcctgctagagattagtaacccagaaacactgtctaacactgccggttttgaggggtatattgacctgggcagggagcttagcagtctgcattcacttctgtgggaggcagtgtcccagcttgagcagtccatcgtgagcaagctcggacccctgcctcgcatccttcgcgatgttcacactgctctatccaccccaggctcagggcagttgcccggaaccaatgatctggcctccaccccaggaagtggctctagctccattagcgccggacttcagaaaatggtgattgagaacgacctgtccgggctaattgacttcactaggctgccatctcctacacctgagaacaaggatctcttttttgttactcggagctcaggcgtacagcctagtcctgcccgttccagtagttatagcgaggcgaacgagcccgatcttcagatggcgaatgggggaaagtccctctctatggtggatcttcaggacgccagaactctggatggggaagcaggaagcccagccggtccagacgtcctgcctactgatgggcaggccgcagctgcgcagctcgttgctggctggcccgcaagagctacccctgtgaatctcgctggtctagccactgtgagaagggcgggacagacacccacaacacccggaacttctgagggcgcaccaggcaggccccagttactggcacccttgagttttcagaaccccgtgtatcagatggccgctggcctgcctctgtccccaagaggtctgggagattctggcagcgagggccactcaagtctttcgagccattcaaatagtgaggagctggccgctgctgccaaactggggtcattctcaaccgccgctgaagaactcgccagaaggccgggtgaactcgccagacgacagatgagcctaacagagaaaggtggccaacctaccgtgccaagacagaactctgcaggacctcagcgacggatagaccaaccccctccaccccctccccctccaccacctgccccacgcggtagaaccccgccaaatctgctgtctacccttcaatacccgcgacctagttctggcaccctggcatctgccagcccggactgggtcgggccttccacaaggctccgccagcaatcatccagctcgaagggagattccccagaactgaagcctcgggctgtccataagcagggtccgagcccagtgagtcccaacgctttggataggactgccgcttggttgctcaccatgaatgcacaactgttagaggacgaaggcctgggcccagaccccccacatagagatagactgcgtagtaaggatgaattaagccaggctgaaaaggacctcgccgtgctgcaggataaactgcggatatcaacaaaaaagttagaagagtatgaaactctgtttaaatgtcaggaggagaccacgcagaaacttgtccttgagtaccaggccaggttggaagaaggcgaggagaggctccgccgacagcaggaggacaaagacatccagatgaaaggcatcatcagcaggttaatgagcgtcgaagaggagcttaaaaaggaccacgcagaaatgcaggccgctgtggactccaagcagaagattattgatgctcaggaaaagcgtatcgccagccttgatgcggctaatgcacgactaatgtcagctttgactcagctcaaggaaagcatgcattag

SEQ ID NO: 224828 - DNA, 876 bp, Artificial Sequence
  derived and/or modified sequence
atggagcctgattcattgctggatcaggatgactcttatgagagtcctcaggagcggcctggtagccgccgtagtctgccaggaagtctgtcggagaagtcaccatcgatggaaccctccgctgccactcctttccgcgtcactgggttcctctctaggcgactcaagggttctatcaagcgcactaaaagccagccaaaactggacagaaaccattccttcagacacatccttcccggattcaggtcagcagccgcagccgctgcagataatgaacggtcccacctgatgcctagacttaaggaaagtaggagtcatgaaagcctgctctctccctctagtgctgtcgaggcacttgacctgtccatggaagaggaagtggtgataaagccagtgcactcgtcaatcttgggacaggattattgcttcgaggtaacgacctcctctggtagtaagtgtttctcctgtcgctccgctgccgagcgggataaatggatggaaaatttgcggagagccgtgcatcccaataaagacaacagtaggcgggtagaacacatcctgaagctgtgggtgattgaagctaaggatctgcccgcaaaaaaaaaatacttatgtgaactgtgcctggacgatgtgctgtacgccagaactaccgggaagcttaagactgacaacgtgttttggggtgaacactttgaattccataacttgccacctctgagaaccgtgactgtgcacctctaccgcgagactgataagaaaaagaaaaaggaaaggaactcctatctgggattagtttcacttccggcagcctctgtggcagggcgacaattcgtggaaaagtggtatcctgtggtgaccccaaaccctaaatag

SEQ ID NO: 224829 - protein, 333 aa, Artificial Sequence
  derived and/or modified sequence
MPANYTCTRPDGDNTDFRYFIYAVTYTVILVPGLIGNILALWVFYGYMKETKRAVIFMINLAIADLLQVLSLPLRIFYYLNHDWPFGPGLCMFCFYLKYVNMYASIYFLVCISVRRFWFLMYPFRFHDCKQKYDLYISIAGWLIICLACVLFPLLRTSDDTSGNRTKCFVDLPTRNVNLAQSVVMMTIGELIGFVTPLLIVLYCTWKTVLSLQDKYPMAQDLGEKQKALKMILTCAGVFLICFAPYHFSFPLDFLVKSNEIKSCLARRVILIFHSVALCLASLNSCLDPVIYYFSTNEFRRRLSRQDLHDSIQLHAKSFVSNHTASTMTPELC

SEQ ID NO: 224830 - DNA, 1002 bp, Artificial Sequence
  derived and/or modified sequence
atgcccgccaactacacctgcaccagacccgacggcgacaacaccgacttcagatacttcatctacgccgtgacctacaccgtgatcctggtgcccggcctgatcggcaacatcctggccctgtgggtgttctacggctacatgaaggagaccaagagagccgtgatcttcatgatcaacctggccatcgccgacctgctgcaggtgctgagcctgcccctgagaatcttctactacctgaaccacgactggcccttcggccccggcctgtgcatgttctgcttctacctgaagtacgtgaacatgtacgccagcatctacttcctggtgtgcatcagcgtgagaagattctggttcctgatgtaccccttcagattccacgactgcaagcagaagtacgacctgtacatcagcatcgccggctggctgatcatctgcctggcctgcgtgctgttccccctgctgagaaccagcgacgacaccagcggcaacagaaccaagtgcttcgtggacctgcccaccagaaacgtgaacctggcccagagcgtggtgatgatgaccatcggcgagctgatcggcttcgtgacccccctgctgatcgtgctgtactgcacctggaagaccgtgctgagcctgcaggacaagtaccccatggcccaggacctgggcgagaagcagaaggccctgaagatgatcctgacctgcgccggcgtgttcctgatctgcttcgccccctaccacttcagcttccccctggacttcctggtgaagagcaacgagatcaagagctgcctggccagaagagtgatcctgatcttccacagcgtggccctgtgcctggccagcctgaacagctgcctggaccccgtgatctactacttcagcaccaacgagttcagaagaagactgagcagacaggacctgcacgacagcatccagctgcacgccaagagcttcgtgagcaaccacaccgccagcaccatgacccccgagctgtgctag

SEQ ID NO: 224831 - DNA, 1258 bp, Artificial Sequence
  derived and/or modified sequence
caccattaggcaaagatagtttctctagagagaatcatgcctgctaattacacgtgtaccaggccagatggagacaatacagattttcgatactttatttatgcagtgacatacactgtcattcttgtgccaggtctcatagggaatatattagccctgtgggtattctatggttatatgaaagaaacaaaacgagctgtgatatttatgataaacttagccattgctgacttactacaagttctttccttgccactgaggatcttctactacttgaatcatgactggccatttgggcctggtctctgcatgttctgtttctacctgaagtatgtcaacatgtatgcaagcatctacttcttggtctgcatcagtgtgcgacgattttggtttctcatgtacccctttcgcttccatgactgcaaacagaaatatgacctgtacatcagcattgctggctggctgatcatctgccttgcctgtgtactctttccactcctcagaaccagtgatgatacctctggcaataggaccaaatgctttgtggatcttcctaccaggaatgtcaacctggcccagtccgttgttatgatgaccattggcgagttgattgggtttgtaactccgcttctgattgtcctatattgtacctggaagacggttttatcactgcaagataaatatcccatggcccaagatcttggagagaaacagaaagccttgaagatgattctaacctgtgcaggggtattcctaatttgctttgcaccttatcatttcagttttcctttagatttcctggtgaagtccaatgaaattaaaagctgcctagccagaagggtgattctaatatttcattctgtggcattgtgtcttgctagtctgaattcatgtcttgacccagtcatatactacttttccactaatgagttccgaagacggctttcaagacaagatttgcatgacagcatccaactccatgcaaaatcctttgtgagtaaccatacagcttccaccatgacacctgaattatgctaaaacaaaaaaccaaactgaatgtgacctgaaatgcaagtacatcagaacatatctgcaatacccaagccacagggaagaacttgcaaaacaacacagcttttcagttctgctctatcttactgctatggggaattcacttcttcaaagcaggacctatttggagcattacgatccacgattattgatgttgacatgtccatgtagtaatttttcttcaagt

SEQ ID NO: 224832 - DNA, 1002 bp, Artificial Sequence
  derived and/or modified sequence
atgcctgccaactacacctgtacacgccccgacggggataacaccgattttagatatttcatttacgcagtcacctatactgtaatactggttcctggcctgatcggcaacattcttgcactgtgggttttttacgggtatatgaaagagactaagcgcgcagttatatttatgatcaatctggccatagcggacctccttcaggtcctttccctgcctctgaggattttctactacttgaaccatgattggccatttggcccagggctgtgcatgttttgcttctacctgaagtacgtgaatatgtatgccagcatttattttctcgtatgtatttcagtgcgaagattttggttcctgatgtaccccttccgtttccatgactgtaaacagaaatatgacctatacatttctattgccgggtggcttattatttgtcttgcgtgcgtgctgttccctctgttgcgcaccagtgatgacacctccggaaatcgaactaaatgcttcgtcgatctgcctactcgcaatgtaaacttagcacagtccgttgttatgatgactattggggaacttattggcttcgtgacaccactcctgattgttctgtattgcacatggaagacagtgctatccctgcaggacaagtaccccatggctcaggacctcggcgagaaacagaaggccctcaagatgatcctgacctgcgctggcgtcttcttgatctgcttcgctccttatcattttagcttccccttggactttctggttaaatccaacgaaatcaaaagctgtctcgctcggcgcgtgatcctgattttccacagcgtagcactctgcctagcaagtctcaattcttgtttagacccagtcatctactactttagtacaaatgagtttcgacgccgcttatcacgacaggaccttcacgattctatccaactgcatgcaaagagcttcgtgagtaaccatacggcttcaacgatgacgcccgagctctgttag

SEQ ID NO: 224833 - DNA, 1002 bp, Artificial Sequence
  derived and/or modified sequence
atgcctgccaactacacctgcaccaggccagatggagacaacacagacttccgctacttcatctatgctgtgacctacaccgtcatcctggtgcccggcctgattggcaacatcctggccctgtgggtgttctacggctacatgaaggagaccaagagagctgtgatcttcatgatcaacctggccatcgctgacctgctgcaggtgctgagcctgcccctgcgcatcttctactacctgaaccacgactggcccttcggccctggcctgtgcatgttctgcttctacctgaagtatgtgaacatgtatgccagcatctacttcctggtgtgcatctctgtgcggcgcttctggttcctgatgtaccccttccgcttccatgactgcaagcagaagtatgacctgtacatcagcattgctggctggctgatcatctgcctggcctgtgtgctcttccccctgctgcggaccagtgatgacaccagcggcaacagaaccaagtgctttgtggacctgcccaccagaaatgtgaacctggcccagagcgtggtgatgatgaccatcggggagctgattggatttgtgacccccctgctgattgtgctgtactgcacctggaagacagtgctgagcctgcaggacaagtaccccatggcccaggacctgggggagaagcagaaggccctgaagatgatcctgacctgtgccggggtcttcctgatctgctttgccccctaccacttctccttccccctggacttcctggtgaagagcaatgagatcaagagctgcctggcccggcgggtcatcctgatcttccacagcgtggccctgtgcctggccagcctgaacagctgcctggaccctgtgatctactacttcagcaccaatgagttcagaagaaggctgagccggcaggacctgcatgacagcatccagctgcacgccaagagctttgtgagcaaccacacagccagcaccatgaccccagagctgtgctag

SEQ ID NO: 224834 - DNA, 1002 bp, Artificial Sequence
  derived and/or modified sequence
atgcccgccaactacacctgcacccggcccgacggcgacaacaccgacttcaggtatttcatatacgcggtgacttacactgtgatcttggtgcctggcctgatagggaacattctggccctgtgggttttctatggatacatgaaggaaactaaaagggcagtcatatttatgatcaacctcgctattgccgacctcttgcaagtgctgagcctgcctctgagaatcttttattatctaaaccacgattggccctttggccccggtctgtgcatgttttgtttctacctgaagtatgtcaacatgtatgcttccatatactttcttgtgtgtatttccgtcagaagattctggtttttaatgtacccttttcgcttccacgattgcaaacagaagtacgatctgtacatctccatcgccgggtggttgataatatgcttagcctgcgttttgttccctctgctgcgaacgagtgacgacacgagcgggaaccgcaccaagtgcttcgtcgatctgcccacgagaaatgttaatctcgcacagtcagtggtgatgatgacgataggggaactcataggattcgtgacccccttacttatcgtgctgtactgcacttggaaaacagtcctctctctgcaggacaagtatccaatggcccaggacctaggggaaaagcagaaggccctgaagatgatactgacctgtgcgggagtgtttctgatatgctttgctccataccacttttcgtttccactggattttttagttaagagcaatgagattaagagctgcctcgcccgcagggttattcttatatttcattccgtggccctttgcctggctagtctgaattcctgcctcgatcccgttatttattatttctctaccaacgagtttcgcagacgcctaagtcgacaggacttgcatgactcgatccaattacacgctaagagcttcgtgtctaaccatactgcttcgactatgactccagagctgtgttag

SEQ ID NO: 224835 - DNA, 1002 bp, Artificial Sequence
  derived and/or modified sequence
atgcctgctaactatacttgtactcgacctgatggcgacaacaccgattttagatactttatatacgctgtcacatataccgtgattcttgttccgggactgattggtaatattcttgcattgtgggtgttttatgggtatatgaaggaaaccaaaagggcagtgatcttcatgataaatctcgccatcgccgacttactccaggtgttaagtcttcccctgagaatcttctactacctgaatcatgactggccttttggacctgggttgtgcatgttttgtttttaccttaagtatgttaacatgtatgccagtatctattttctggtgtgcatcagcgttagaaggttctggtttttgatgtatccttttcgctttcacgattgcaagcagaagtatgacttgtatatatctattgccggatggcttattatctgtctagcctgcgtcctattcccgcttctgcgtacctccgacgacacatccggaaataggaccaaatgctttgttgacctccccacgaggaatgtcaacctggctcagtcagtcgtgatgatgacaataggcgagctgatcggcttcgttacacccctacttatcgtcctatactgcacatggaaaaccgtattgagcttgcaagataagtatccaatggcacaagacctgggagagaaacagaaagctctgaagatgattctgacatgcgctggagttttcttgatctgcttcgccccataccatttctcttttccgctggacttcctggtaaagtccaatgagataaagagttgcctggccagacgggtgatcctgatcttccacagcgtggctctatgtcttgcaagcctcaactcctgcctagatccagtcatttactactttagcacgaacgaatttcgcagacgcctcagcaggcaggacctccatgattcaattcagttacacgccaagagttttgttagcaatcacaccgcttcgactatgacacccgagctctgttag

SEQ ID NO: 224836 - protein, 346 aa, Artificial Sequence
  derived and/or modified sequence
MYNGSCCRIEGDTISQVMPPLLIVAFVLGALGNGVALCGFCFHMKTWKPSTVYLFNLAVADFLLMICLPFRTDYYLRRRHWAFGDIPCRVGLFTLAMNRAGSIVFLTVVAADRYFKVVHPHHAVNTISTRVAAGIVCTLWALVILGTVYLLLENHLCVQETAVSCESFIMESANGWHDIMFQLEFFMPLGIILFCSFKIVWSLRRRQQLARQARMKKATRFIMVVAIVFITCYLPSVSARLYFLWTVPSSACDPSVHGALHITLSFTYMNSMLDPLVYYFSSPSFPKFYNKLKICSLKPKQPGHSKTQRPEEMPISNLGRRSCISVANSFQSQSDGQWDPHIVEWH

SEQ ID NO: 224837 - DNA, 1041 bp, Artificial Sequence
  derived and/or modified sequence
atgtacaacggcagctgctgcagaatcgagggcgacaccatcagccaggtgatgccccccctgctgatcgtggccttcgtgctgggcgccctgggcaacggcgtggccctgtgcggcttctgcttccacatgaagacctggaagcccagcaccgtgtacctgttcaacctggccgtggccgacttcctgctgatgatctgcctgcccttcagaaccgactactacctgagaagaagacactgggccttcggcgacatcccctgcagagtgggcctgttcaccctggccatgaacagagccggcagcatcgtgttcctgaccgtggtggccgccgacagatacttcaaggtggtgcacccccaccacgccgtgaacaccatcagcaccagagtggccgccggcatcgtgtgcaccctgtgggccctggtgatcctgggcaccgtgtacctgctgctggagaaccacctgtgcgtgcaggagaccgccgtgagctgcgagagcttcatcatggagagcgccaacggctggcacgacatcatgttccagctggagttcttcatgcccctgggcatcatcctgttctgcagcttcaagatcgtgtggagcctgagaagaagacagcagctggccagacaggccagaatgaagaaggccaccagattcatcatggtggtggccatcgtgttcatcacctgctacctgcccagcgtgagcgccagactgtacttcctgtggaccgtgcccagcagcgcctgcgaccccagcgtgcacggcgccctgcacatcaccctgagcttcacctacatgaacagcatgctggaccccctggtgtactacttcagcagccccagcttccccaagttctacaacaagctgaagatctgcagcctgaagcccaagcagcccggccacagcaagacccagagacccgaggagatgcccatcagcaacctgggcagaagaagctgcatcagcgtggccaacagcttccagagccagagcgacggccagtgggacccccacatcgtggagtggcactag

SEQ ID NO: 224838 - DNA, 1041 bp, Artificial Sequence
  derived and/or modified sequence
atgtacaatggatcttgttgcagaatcgagggggacaccattagccaggtgatgcccccgctcctgattgttgcgttcgtgctgggagctctcggcaatggcgttgccctgtgtgggttttgcttccatatgaaaacatggaagccttccaccgtgtatctgtttaacctggctgtcgcagatttcctgctaatgatctgcctccccttcagaaccgattattacctgcgccgtcggcattgggcatttggagacatcccctgtcgcgtgggactgttcaccctcgctatgaaccgagccgggtcaattgttttcctcaccgtggtggcggctgaccgttacttcaaagtggtgcatccacaccacgcagttaatacaatctcaacccgagtggccgctggaatcgtgtgcacgctgtgggcgttggtaatcttgggcactgtatacctcttgttagaaaatcatctctgcgtgcaagaaacagcggtgagttgcgagagctttataatggagtctgcaaacgggtggcatgatatcatgtttcagctcgagttctttatgcctttggggattattctgttttgttcatttaagatagtatggtcactgcggagaagacagcaactggcaagacaggctagaatgaaaaaagctaccaggttcatcatggttgtggcaatcgtgttcattacctgctacctgcccagtgtctcagctaggctgtatttcctatggaccgtgccctcctccgcgtgcgatccatcagtgcatggggcacttcatatcaccttgtcatttacatacatgaatagcatgttagacccgctcgtctattacttctcaagtcctagcttccccaagttttacaacaagcttaagatttgcagcctgaagcccaagcagcctggacatagtaaaacgcagcggccggaggagatgccaattagcaacctgggccggcggagctgcatcagtgtggcaaatagctttcagtcccagtcagacggtcagtgggatcctcacatcgtggaatggcattag

SEQ ID NO: 224839 - DNA, 1041 bp, Artificial Sequence
  derived and/or modified sequence
atgtataatggaagctgctgcagaatcgaaggagatactatatctcaggttatgccccctctgctgatcgtggcattcgtgcttggcgccctgggaaatggtgtggccctgtgcggattttgctttcatatgaagacctggaaaccatccaccgtgtatcttttcaacctcgccgtggcggacttcctcctgatgatttgcctcccttttcgcactgactactaccttcggaggagacattgggccttcggcgatattccctgtcgagtaggactgttcacattagctatgaaccgggctggaagcattgtgttcctcacagtcgtcgccgcagaccgatattttaaggtggttcacccgcaccatgccgtgaataccatcagtacaagagtagccgccggcatcgtgtgtaccctgtgggccttagtgatccttgggaccgtgtaccttctgctggagaaccacctgtgcgtgcaggaaactgctgtgtcttgcgagtcatttatcatggaatctgccaacggttggcacgatatcatgtttcagctcgagttttttatgcccctgggcattatcctcttttgctcattcaagatcgtgtggtctctacgacggcgtcagcagttggcccgccaggccaggatgaaaaaggctaccagattcatcatggtggtggccatcgttttcattacatgttatcttccatcagtttccgctcgcttatactttctgtggactgtcccgtcctctgcatgtgacccgtccgtgcatggtgcactgcacattacactgagctttacctatatgaactcaatgctcgacccacttgtatactacttcagtagccccagttttcctaagttttataataagctcaaaatctgctccctgaaaccaaagcaacctggccattccaagacacagcgtccagaggagatgccaatttctaacttggggcgcagaagctgcatttcagtagccaattcattccaaagccagagcgatggtcagtgggaccctcacattgttgaatggcactag

SEQ ID NO: 224840 - DNA, 1041 bp, Artificial Sequence
  derived and/or modified sequence
atgtataacggtagctgctgccggatcgaaggcgacaccataagccaagtgatgccacctctgctgatcgtggctttcgtactcggggcactcgggaatggagtggcgctctgtggcttttgttttcacatgaagacttggaaaccaagtactgtctacttatttaatctcgctgtcgccgacttcctgctgatgatttgcctccccttccgtacagattattatcttcggcgacggcattgggcattcggcgacataccctgtagagttggtctgtttaccctggccatgaatcgggccgggtcaatcgtttttctgacagtggttgccgcagataggtattttaaagtggtgcacccccatcatgcggttaacaccatctctactagagtcgccgccggcattgtgtgtaccctgtgggcgctggtaattctcggaaccgtgtatctgctcctggagaaccatttgtgcgtgcaggagacggcggtcagctgtgagagtttcataatggagagtgctaacggatggcatgatataatgtttcagctcgaattcttcatgcctttagggatcatcctgttctgcagcttcaaaatagtgtggtcactcagacgcagacagcagttagcacgccaggcgcggatgaaaaaggcgacgcgctttatcatggtagtggcaatcgtttttattacttgttatctcccttctgttagcgctcgcctatactttttatggaccgtgcccagctctgcatgcgacccatcagtgcatggagccctgcacatcaccctgtcatttacctacatgaatagcatgttagacccactcgtttattatttttcttcgcctagcttccccaaattctacaataagctgaaaatttgctccctgaaacctaagcagccagggcacagcaaaactcagcgacccgaggagatgccaatcagcaatctggggcgccggtcttgtatttctgtcgctaatagttttcagtctcaaagcgacgggcagtgggaccctcacattgtggaatggcactag

SEQ ID NO: 224841 - DNA, 2747 bp, Artificial Sequence
  derived and/or modified sequence
aatgtttggatttctccaccaggagggaggacaaacaagctttcttcttgccttctgggcagctttgtgtgctctccagcacggagtccgaggaggaacagcgaagctgaaaatgaaaattactctggcgctggacccaatcgctcctctacggcatcaatctcatcggacccccccaccctaccgcctctcagaaatgaccacttttgcaaaattgcatgcatttccaagcttcatccggctccaggcttggcctctcccagaggcaggcggcttgtgagacgggctccagagaaaggacctccctgggtctctcatttcctggctgaagtttctcttctcgctgctgtggcagcatccaacccacacacacaggacccgcatcctgggtgatgaagtcagacacgcagcagctgggtgagtgctaacgctcagataagcatctgtgccattgtggggactccctgggctgctctgcacccggacacttgctctgtccccgccatgtacaacgggtcgtgctgccgcatcgagggggacaccatctcccaggtgatgccgccgctgctcattgtggcctttgtgctgggcgcactaggcaatggggtcgccctgtgtggtttctgcttccacatgaagacctggaagcccagcactgtttaccttttcaatttggccgtggctgatttcctccttatgatctgcctgccttttcggacagactattacctcagacgtagacactgggcttttggggacattccctgccgagtggggctcttcacgttggccatgaacagggccgggagcatcgtgttccttacggtggtggctgcggacaggtatttcaaagtggtccacccccaccacgcggtgaacactatctccacccgggtggcggctggcatcgtctgcaccctgtgggccctggtcatcctgggaacagtgtatcttttgctggagaaccatctctgcgtgcaagagacggccgtctcctgtgagagcttcatcatggagtcggccaatggctggcatgacatcatgttccagctggagttctttatgcccctcggcatcatcttattttgctccttcaagattgtttggagcctgaggcggaggcagcagctggccagacaggctcggatgaagaaggcgacccggttcatcatggtggtggcaattgtgttcatcacatgctacctgcccagcgtgtctgctagactctatttcctctggacggtgccctcgagtgcctgcgatccctctgtccatggggccctgcacataaccctcagcttcacctacatgaacagcatgctggatcccctggtgtattatttttcaagcccctcctttcccaaattctacaacaagctcaaaatctgcagtctgaaacccaagcagccaggacactcaaaaacacaaaggccggaagagatgccaatttcgaacctcggtcgcaggagttgcatcagtgtggcaaatagtttccaaagccagtctgatgggcaatgggatccccacattgttgagtggcactgaacaagcagaccaacaacactgaggaagatagagtggtgacttagaattaactcgtgctaaggggtcgggggctttgaaaatgccacccccctttcttattgcaagacggcttctcgcacatgaactgcatccttctcattctgtcggaaatgaaattcacacaactataccttttggggaggttccagttgattgaacagggtgttgccaactcatggtgcatggattcaaatgcaataaacagtcctggggagatgtcccgctcctgtagccccatcatgggtgtctgatttgaccctgtactcgatggatcagctggcaccacccggatcgataaactggctcatctggtcttgtggccctcacccaggaactgattcaggacaagaggacatctttgactccctgtgatttcatctccaacctgaccaatcagcactccccactttctgaaccgctatcggccaagttatccttaaaaacccagatccaggccgggcacagtggttcacgcctgtaatcccagcactttgggaggccgaggcgggtggatcacctgaggtgagaagttcgagaccagcctggccaacatagcgaaactccatctctacaaaaatacaaaaattagccaggcgtggtggcacaagcctgtagtccaaactacttgggaggctaagagtgttccaaccacatcctccagggaaaatccctcgaccaagagtccaatctgattttgcacttccctgacttcttgctaagccgtctacaccaggagggtttgctgaaatgaaaatgcgaccttttgcaagggacatgcaagatgaaaccttctatttccttggcagcccagaggaatcatgtgcacgataccttaatttgctggtgtcttttctctgagtggggcatgagcatcagacaagctaatgcaaaagccggaagttctaactggatatactgcctggcgactccgatcaggtcaagatcacctgagactggacatcttcgagagagaacattaattagttaataatctggcagattcactagattatattggcctttctagctttccatagtcatctgcctgtccaagttttcaataattttaaacactaaagtgctggtgcatgacatatgcttaggaatgagtaacacaagtctttgacagcactctacacagaataaaagaatttacccatggg

SEQ ID NO: 224842 - DNA, 3612 bp, Artificial Sequence
  derived and/or modified sequence
agaggcaggcggcttgtgagacgggctccagagaaaggacctccctgggtctctcatttcctggctgaagtttctcttctcgctgctgtggcagcatccaacccacacacacaggacccgcatcctgggtgatgaagtcagacacgcagcagctgggtgagtgctaacgctcagataagcatctgtgccattgtggggactccctgggctgctctgcacccggacacttgctctgtccccgccatgtacaacgggtcgtgctgccgcatcgagggggacaccatctcccaggtgatgccgccgctgctcattgtggcctttgtgctgggcgcactaggcaatggggtcgccctgtgtggtttctgcttccacatgaagacctggaagcccagcactgtttaccttttcaatttggccgtggctgatttcctccttatgatctgcctgccttttcggacagactattacctcagacgtagacactgggcttttggggacattccctgccgagtggggctcttcacgttggccatgaacagggccgggagcatcgtgttccttacggtggtggctgcggacaggtatttcaaagtggtccacccccaccacgcggtgaacactatctccacccgggtggcggctggcatcgtctgcaccctgtgggccctggtcatcctgggaacagtgtatcttttgctggagaaccatctctgcgtgcaagagacggccgtctcctgtgagagcttcatcatggagtcggccaatggctggcatgacatcatgttccagctggagttctttatgcccctcggcatcatcttattttgctccttcaagattgtttggagcctgaggcggaggcagcagctggccagacaggctcggatgaagaaggcgacccggttcatcatggtggtggcaattgtgttcatcacatgctacctgcccagcgtgtctgctagactctatttcctctggacggtgccctcgagtgcctgcgatccctctgtccatggggccctgcacataaccctcagcttcacctacatgaacagcatgctggatcccctggtgtattatttttcaagcccctcctttcccaaattctacaacaagctcaaaatctgcagtctgaaacccaagcagccaggacactcaaaaacacaaaggccggaagagatgccaatttcgaacctcggtcgcaggagttgcatcagtgtggcaaatagtttccaaagccagtctgatgggcaatgggatccccacattgttgagtggcactgaacaagcagaccaacaacactgaggaagatagagtggtgacttagaattaactcgtgctaaggggtcgggggctttgaaaatgccacccccctttcttattgcaagacggcttctcgcacatgaactgcatccttctcattctgtcggaaatgaaattcacacaactataccttttggggaggttccagttgattgaagtgagttggctgcattttcttatctgatcacaatggcaggggacagaatgtgcatggagtggagcatgtgtgtgttgggaggggggctaggaactgcacagcccttgtgtaattttcgttgtttgtttttgttttgagacagagtctcactctgtgtcccaggctggagtgcagtggcacagtctcggctcactgcaacctctgcctcccgggttcaagcaattctcctgcctcagcctcccgagtagctgggattagaggcgccagccaacacacccggctaatttttgtatttttagtagagacagggttttgccatgttggccaggctggtctcgagctcctgacctcaggtgatccgcctgccttggcctcccaaagtggtgggatcacaggcgtgagccaccgtgcctggcctcccctgtgtcattttaaatggctaagtaaatgggtatatgtgtttgaatggggcatgttcactctcttaggggctatggggcagttagcagcatttcctatcctctgaccttaaatcattccttatctcagaaaacagaaaccgggctcagtcaatcaatgctttatttcaggccgaatgaggctctttagattgggatctattgatctatcaattttcatctttacatttctttgtacatctgtacattttgtccaaatgtacatctgtacgtctgtcatcattgtgacttcctggtagcccaagaagaacaacaacaaaacaatctgctctgaccttcttcaaatctttgtatttcaaagaaggtgctgagggatctgtttccttgccctggcttctccagtgggatgtgctgagtccaatacaattgcttttataattgcttttgacaacttgtcatgtgactgtgaattgaaattattcacttattttccaagtatttactgaattcgtatttggtggcaggcagtatactgtgtaatttttagtggagggtcattagtcaactcttatgtgacagtaaagttttttgggggggtggggacagagaagttaagagctttcatcctttcacggaatacagtttctagaccgattctgtgtgaacatcagttttgtcctcttattgcaagactccctcatacacatgagtttcccaaatgtgtacctggacccctcgaaacagaggactctacgaaatgacaagctgcccctgccctgaattagggggaaacattccaggccaactctagctcctttctcaagctacaaagtggtgaacatggttctcaactccttaatttatactctctcaaatgcccaggatactctacccacttaagaaccttgccaacttctgggggttgggcatggtggctcacgcttgtgatcccagcactttgggagactgaggcggatcacctgaggtcaggagttctagaccagcctgaccaacatggagaaacctcgtctctactaaaaattcaaaattagcctggtgtggtggcgcatgcctataatcccagcctccagagtagctgggactacgggcgccccaccaccacgcccggctaattttttgtatttttagtacagacggggtttcattgtgttagccgggatggtcttgatctcctgacttgtgatccgcctgcctcggcctcccaaagtgcttggattacaggtgtaagccaccgcaccccgcccagcctggcagattttatttaatcatttgtagcttcattttcctcgtctgtcaaacagggatactgtaatacaacctcagtgtgtcattgggcagtttaaatgaatgtacattcctgaggcatcagaactttgttcactgttatatacccaatgcctagaagaggacctgcacatagcaggtgctcagtaaatgtttgttgaatgaatgattaagtgcatgtaaagcattaagcatagcgcctggcagtaagtgctcaatattatgacttcttatattaacacgttttacatataaagaaatggaggcaagaaagcatttcctttggggtttagagcgcttaagttgttcctctgttatcatgcctgaattcccccgcccctcagttacctggggaagagtaaaggcaagaattcttaccagcattagtcatacatcctcctgatagg

SEQ ID NO: 224843 - DNA, 2639 bp, Artificial Sequence
  derived and/or modified sequence
aatgtttggatttctccaccaggagggaggacaaacaagctttcttcttgccttctgggcagctttgtgtgctctccagcacggagtccgaggaggaacagcgaagctgaaaatgaaaattactctggcgctggacccaatcgctcctctacggcatcaatctcatcggacccccccaccctaccgcctctcagaaatgaccacttttgcaaaattgcatgcatttccaagcttcatccggctccaggcttggcctctcccagaggcaggcggcttgtgagacgggctccagagaaaggacctccctgggtctctcatttcctggctgaagtttctcttctcgctgctgtggcagcatccaacccacacacacaggacccgcatcctgggtgatgaagtcagacacgcagcagctgggtgagtgctaacgctcagataagcatctgtgccattgtggggactccctgggctgctctgcacccggacacttgctctgtccccgccatgtacaacgggtcgtgctgccgcatcgagggggacaccatctcccaggtgatgccgccgctgctcattgtggcctttgtgctgggcgcactaggcaatggggtcgccctgtgtggtttctgcttccacatgaagacctggaagcccagcactgtttaccttttcaatttggccgtggctgatttcctccttatgatctgcctgccttttcggacagactattacctcagacgtagacactgggcttttggggacattccctgccgagtggggctcttcacgttggccatgaacagggccgggagcatcgtgttccttacggtggtggctgcggacaggtatttcaaagtggtccacccccaccacgcggtgaacactatctccacccgggtggcggctggcatcgtctgcaccctgtgggccctggtcatcctgggaacagtgtatcttttgctggagaaccatctctgcgtgcaagagacggccgtctcctgtgagagcttcatcatggagtcggccaatggctggcatgacatcatgttccagctggagttctttatgcccctcggcatcatcttattttgctccttcaagattgtttggagcctgaggcggaggcagcagctggccagacaggctcggatgaagaaggcgacccggttcatcatggtggtggcaattgtgttcatcacatgctacctgcccagcgtgtctgctagactctatttcctctggacggtgccctcgagtgcctgcgatccctctgtccatggggccctgcacataaccctcagcttcacctacatgaacagcatgctggatcccctggtgtattatttttcaagcccctcctttcccaaattctacaacaagctcaaaatctgcagtctgaaacccaagcagccaggacactcaaaaacacaaaggccggaagagatgccaatttcgaacctcggtcgcaggagttgcatcagtgtggcaaatagtttccaaagccagtctgatgggcaatgggatccccacattgttgagtggcactgaacaagcagaccaacaacactgaggaagatagagtggtgacttagaattaactcgtgctaaggggtcgggggctttgaaaatgccacccccctttcttattgcaagacggcttctcgcacatgaactgcatccttctcattctgtcggaaatgaaattcacacaactataccttttggggaggttccagttgattgaagtgagttggctgcattttcttatctgatcacaatggcaggggacagaatgtgcatggagtggagcatgtgtgtgttgggaggggggctaggaactgcacagcccttgtgtaattttcgttgtttgtttttgttttgagacagagtctcactctgtgtcccaggctggagtgcagtggcacagtctcggctcactgcaacctctgcctcccgggttcaagcaattctcctgcctcagcctcccgagtagctgggattagaggcgccagccaacacacccggctaatttttgtatttttagtagagacagggttttgccatgttggccaggctggtctcgagctcctgacctcaggtgatccgcctgccttggcctcccaaagtggtgggatcacaggcgtgagccaccgtgcctggcctcccctgtgtcattttaaatggctaagtaaatgggtatatgtgtttgaatggggcatgttcactctcttaggggctatggggcagttagcagcatttcctatcctctgaccttaaatcattccttatctcagaaaacagaaaccgggctcagtcaatcaatgctttatttcaggccgaatgaggctctttagattgggatctattgatctatcaattttcatctttacatttctttgtacatctgtacattttgtccaaatgtacatctgtacgtctgtcatcattgtgacttcctggtagcccaagaagaacaacaacaaaacaatctgctctgaccttcttcaaatctttgtatttcaaagaaggtgctgagggatctgtttccttgccctggcttctccagtgggatgtgctgagtccaatacaattgcttttataattgcttttgacaacttgtcatgtgactgtgaattgaaatt

SEQ ID NO: 224844 - DNA, 1041 bp, Artificial Sequence
  derived and/or modified sequence
atgtacaacggcagctgctgcagaattgaaggagacaccatcagccaggtgatgccacccctgctgattgtggcctttgtgctgggcgccctgggcaatggagtggccctgtgtggcttctgcttccacatgaagacctggaagcccagcacagtgtacctgttcaacctggccgtggccgacttcctgctgatgatctgcctgcccttcagaacagactactacctgcggcggcggcactgggcctttggagacatcccctgccgggtgggcctcttcaccctggccatgaacagagctggcagcatcgtgttcctgactgtggtggccgctgaccgctacttcaaggtggtgcacccccaccacgctgtgaacaccatcagcaccagggtggccgccggcatcgtgtgcaccctgtgggccctggtgatcctgggcaccgtgtacctgctgctggagaaccacctgtgtgtgcaggagacagctgtgtcctgtgagagcttcatcatggagagcgccaacggctggcatgacatcatgttccagctggagttcttcatgcccctgggcatcatcctcttctgcagcttcaagatcgtgtggagcctgcggcggcggcagcagctggcccggcaggccaggatgaagaaggccacccgcttcatcatggtggtggccatcgtgttcatcacctgctacctgcccagcgtgtctgcccggctgtacttcctgtggacagtgcccagcagcgcctgtgaccccagcgtgcatggagccctgcacatcaccctgtccttcacctacatgaacagcatgctggaccccctggtgtactacttcagcagccccagcttccccaagttctacaacaagctgaagatctgcagcctgaagcccaagcagcccggccacagcaagacccagaggcctgaggagatgcccatcagcaacctgggccgccgcagctgcatctctgtggccaacagcttccagagccagagtgatggccagtgggacccccacatcgtggagtggcactag

SEQ ID NO: 224845 - DNA, 1041 bp, Artificial Sequence
  derived and/or modified sequence
atgtacaacggcagctgctgccggatcgagggcgacaccatcagccaagttatgcctccgcttctgattgtggctttcgtgctgggtgctttgggtaatggggttgctctttgtggcttttgcttccatatgaaaacttggaaacccagcaccgtctatctgttcaacttagctgtggcagattttttgctcatgatttgtctgccatttcgtactgactactatctgagaagacgtcactgggcctttggagacatcccatgccgggtaggtctctttaccctcgccatgaatcgggcgggaagtatcgtattcttgacagtggttgcagccgacagatacttcaaagtggtgcatccgcaccatgccgtgaacactataagcactagagtggcagctgggatcgtgtgtaccctttgggcgctcgtgatactcgggacagtctatcttttgctagagaaccacctgtgtgtccaagagacagctgtgtcctgcgagtcctttattatggaatcagcgaacggctggcatgacataatgtttcagcttgagtttttcatgccgctggggataatcctattctgttccttcaaaatcgtctggtccttacgtaggcggcaacagctcgcgcgtcaggcaaggatgaaaaaggccacccgcttcatcatggttgtggcaatagtctttataacctgttacttgcccagtgtctctgctcggttgtacttcctgtggaccgtaccaagcagcgcatgcgacccctctgttcatggtgccctccatataactctgtcatttacatacatgaatagcatgttggatcccttagtctattatttctcaagccctagctttccaaaattttacaacaaacttaagatttgttctttgaagcctaagcagcccggccactccaagacccagcggcccgaagaaatgccaatctccaacctgggacggcgctcctgcatctccgttgcaaactctttccagagtcagagtgacggccaatgggatccacacatcgtggaatggcactag

SEQ ID NO: 224846 - DNA, 1041 bp, Artificial Sequence
  derived and/or modified sequence
atgtacaacggcagctgctgccggatcgagggcgacaccatcagccaggtgatgccaccactgctcatcgtggctttcgtgcttggtgcactgggcaacggtgtcgctctgtgcggcttttgcttccacatgaaaacatggaagccaagcaccgtataccttttcaacctcgcggtcgctgatttcctgctaatgatctgtttgcccttcaggaccgattactatttgagaaggaggcattgggccttcggcgacatcccatgtagggtggggctgttcacactcgcaatgaatcgcgcaggtagcatcgttttcctgacggtggtagctgcagatagatatttcaaggtcgtacatccgcaccatgctgtgaatacaatttcaacacgggttgccgccggtattgtgtgtacactctgggctctcgtgattctgggcaccgtctatttattactggaaaatcacctgtgcgtgcaggaaactgccgttagttgtgagtcatttattatggaatcagcaaatgggtggcacgacatcatgtttcaacttgagttttttatgccgctgggcattatcctgttctgcagttttaaaattgtctggagcttgcggaggcgccagcagcttgcccggcaggcaagaatgaagaaggccacacgctttataatggttgtggcgattgtgttcatcacctgctatctgccatctgtctccgcccggctgtacttcctgtggaccgtgcctagctccgcatgtgacccctctgtgcacggagctctccatataactctgagctttacatacatgaattcgatgttggacccactggtctactacttcagcagtcccagtttccctaagttttacaacaagctcaaaatctgtagcctgaagccaaagcagcccgggcatagtaaaactcagaggccagaagaaatgcccatatcaaatctcgggagaagatcgtgcatcagtgtggcaaactcatttcagtctcaatcagacggccagtgggaccctcacattgtcgaatggcactag

SEQ ID NO: 224847 - DNA, 1041 bp, Artificial Sequence
  derived and/or modified sequence
atgtacaacggcagctgctgccggatcgagggcgacaccatcagccaggtgatgccgcctttattgattgtggcctttgtgctgggagccctgggcaatggggtggccctctgcgggttttgttttcacatgaaaacctggaaaccttctaccgtatacttatttaacttggcagtggctgatttcctgctgatgatatgtctcccctttcgtaccgattactatctgcgcagacggcattgggcctttggagacatcccttgtcgagtgggcctgttcaccttggctatgaatagagccggttccatcgtgtttctgactgtagtggctgccgaccgctacttcaaagtggtgcacccacatcatgctgttaataccatcagcaccagggtcgcagcaggaatcgtatgcactttgtgggcactagttatattgggcactgtgtatctgctcttagagaaccacctctgtgtgcaggagaccgctgtgagttgcgaaagcttcatcatggagagtgccaacggctggcacgacatcatgtttcagctagaatttttcatgccactaggcattattcttttttgcagcttcaagattgtctggagtctcagacggagacagcagctggccaggcaggcccgcatgaaaaaggccactcgattcatcatggttgtcgcaatagtgtttatcacttgttacttgccaagcgtttcagccagactttactttctttggactgtgccttcttctgcatgcgacccctccgtccatggagctttgcacatcacactttccttcacctacatgaatagcatgctcgatcccctggtctattacttcagcagcccttcttttccaaaattttataataagctgaaaatttgttccctcaagcctaaacaaccgggtcattcgaagactcagagaccagaggagatgccgatctcaaatttaggaaggcgctcctgcatctcggtcgctaactcttttcagtcccagtccgacggtcagtgggacccccatatagtcgagtggcactag

SEQ ID NO: 224848 - DNA, 1041 bp, Artificial Sequence
  derived and/or modified sequence
atgtacaatggaagttgctgccgcattgagggggacaccatcagccaggtgatgcccccactgctgattgtcgctttcgtgctcggggctttgggaaacggagtcgctctgtgtggattctgttttcacatgaaaacttggaagccgtcaaccgtatatttattcaatctagccgttgccgattttctcctcatgatatgcctgcctttccggaccgattattatctgcgcagaaggcattgggcctttggggatatcccatgccgcgtgggcctcttcacactcgccatgaatagagccggaagtatcgtattcctcactgttgtcgccgctgaccgttacttcaaggtggtacaccctcatcacgcagtgaacacgatcagcaccagagtcgccgctgggattgtttgtacgctgtgggcccttgtcattctggggaccgtgtacctgctgctggagaatcatttgtgtgtgcaggaaaccgccgtgagctgtgagagtttcataatggagtcagccaatgggtggcatgacattatgtttcagttagagttttttatgccgcttggtattattctgttttgttcttttaagatcgtctggagtctgcgacgaagacagcagcttgccaggcaggcccgaatgaaaaaggcaacacgttttatcatggtcgtggcaattgtctttataacgtgttacctcccatctgtaagtgctcgactatactttctctggacggtaccaagcagcgcctgtgatccttcagtacatggtgccttgcacatcaccctgagcttcacctatatgaactccatgctggaccccttagtctactattttagcagtcctagtttccccaaattctataacaagctcaaaatttgctctttgaagcctaagcagcccggacactcgaagactcaacgccctgaggaaatgcccattagcaacctaggtcgacgaagctgtatctccgtcgctaactctttccaaagccagtctgacggacagtgggatccgcatatcgttgaatggcattag

SEQ ID NO: 224849 - DNA, 1041 bp, Artificial Sequence
  derived and/or modified sequence
atgtacaacggaagctgctgccgaattgagggggatactatttctcaggtcatgcctccactactgatagtggcattcgtgctgggcgcactcggtaacggagtagcgctgtgtggtttctgtttccacatgaagacctggaaacctagcacagtgtatctgtttaacctggccgtagccgacttccttctgatgatctgtcttccgttccggactgattactacctgcgccgtagacattgggcctttggagatataccttgtcgggtcgggttattcaccctggcaatgaatcgcgcagggtcaattgtcttcttaacggttgtggcagcggaccgctactttaaggtggtacacccccatcacgctgttaatactatctcaaccagggttgcggctggaatcgtgtgtaccctctgggcgctggtgatcctaggcaccgtttacttactcctggagaaccacctgtgcgtgcaagaaacagccgtctcttgcgagtcatttattatggagtccgcaaatgggtggcatgacatcatgttccaattggaatttttcatgcctctgggcatcatcctcttctgtagctttaagatcgtgtggagcctgcgtcggaggcagcagctcgcacggcaggcacgcatgaagaaggccaccaggtttatcatggtagttgctattgtgtttattacctgctacctgccatccgtctctgccagattgtacttcctctggactgtgccttccagcgcttgtgatccgtctgttcatggggctctgcatatcaccttgagttttacatacatgaatagtatgctcgaccctctcgtgtactacttttccagccctagcttccccaagttctacaacaagcttaagatttgcagcctaaagcccaaacaaccaggccacagtaagacccaacgccctgaagagatgccaataagcaatctaggacggagaagctgcatatccgtggccaatagtttccaaagtcaaagtgatgggcaatgggatcctcatatcgtcgagtggcactag

SEQ ID NO: 224850 - DNA, 1041 bp, Artificial Sequence
  derived and/or modified sequence
atgtacaacggcagttgctgtagaatcgaaggtgatacgatttcccaggtgatgcccccattgctgatcgtggcctttgtgctcggcgcactcggtaacggggtggccttgtgtggtttctgctttcacatgaagacctggaagccttctacggtctacttgttcaatctggccgtggccgattttctgctgatgatctgccttccctttcgtactgactattacctgcgccgacgccactgggctttcggagatattccctgtagagttggcctttttacgttagcaatgaatcgtgcgggaagtatcgtgttcctgacagtagtggcagctgatcgatactttaaagtggtgcacccgcatcatgccgtgaacaccatctccacgcgggtcgctgccggtatagtctgcactctgtgggccctcgtaattctagggactgtctacctgttactggagaatcacctgtgtgtgcaggaaacagctgtatcctgtgaaagctttattatggagagtgcaaacggatggcacgatattatgttccaacttgaatttttcatgcccctggggatcattcttttctgcagctttaaaatagtgtggtccctgaggcgcaggcagcagcttgcgaggcaggctcggatgaagaaggcgaccagattcattatggtcgtcgccatcgtcttcatcacctgttacctacccagcgtttccgctcggctctacttcctgtggactgtaccttcttcggcatgtgacccaagtgtccacggtgccctgcacataactctcagcttcacttatatgaactccatgctggatcctctagtatactacttttcgtccccatcttttccaaaattctataataagctcaagatttgttcattgaagcctaagcagcccggacatagcaagactcagagacctgaagaaatgcccattagcaatctggggagacggtcctgtatttcagtggccaactccttccagtcccagtccgatggacagtgggacccccatatcgttgagtggcactag

SEQ ID NO: 224851 - protein, 152 aa, Artificial Sequence
  derived and/or modified sequence
MCSLPMARYYISFLPEPLPAKSLQHGVPLSLDSSLSSLLEKICILPNRGLARTKVPIFLGIQGGSRCLACVETEEGPSLQLEDVNIEELYKGGEEATRFTFFQSSSGSAFRLEAAAWPGWFLCGPAEPQQPVQLTKESEPSARTKFYFEQSW

SEQ ID NO: 224852 - protein, 152 aa, Artificial Sequence
  derived and/or modified sequence
MCSLPMARYYIIKYADQKALYTRDGQLLVGDPVADNCCAEKICILPNRGLARTKVPIFLGIQGGSRCLACVETEEGPSLQLEDVNIEELYKGGEEATRFTFFQSSSGSAFRLEAAAWPGWFLCGPAEPQQPVQLTKESEPSARTKFYFEQSW

SEQ ID NO: 224853 - DNA, 459 bp, Artificial Sequence
  derived and/or modified sequence
atgtgcagcctgcccatggccagatactacatcagcttcctgcccgagcccctgcccgccaagagcctgcagcacggcgtgcccctgagcctggacagcagcctgagcagcctgctggagaagatctgcatcctgcccaacagaggcctggccagaaccaaggtgcccatcttcctgggcatccagggcggcagcagatgcctggcctgcgtggagaccgaggagggccccagcctgcagctggaggacgtgaacatcgaggagctgtacaagggcggcgaggaggccaccagattcaccttcttccagagcagcagcggcagcgccttcagactggaggccgccgcctggcccggctggttcctgtgcggccccgccgagccccagcagcccgtgcagctgaccaaggagagcgagcccagcgccagaaccaagttctacttcgagcagagctggtag

SEQ ID NO: 224854 - DNA, 459 bp, Artificial Sequence
  derived and/or modified sequence
atgtgcagcctgcccatggccagatactacatcatcaagtacgccgaccagaaggccctgtacaccagagacggccagctgctggtgggcgaccccgtggccgacaactgctgcgccgagaagatctgcatcctgcccaacagaggcctggccagaaccaaggtgcccatcttcctgggcatccagggcggcagcagatgcctggcctgcgtggagaccgaggagggccccagcctgcagctggaggacgtgaacatcgaggagctgtacaagggcggcgaggaggccaccagattcaccttcttccagagcagcagcggcagcgccttcagactggaggccgccgcctggcccggctggttcctgtgcggccccgccgagccccagcagcccgtgcagctgaccaaggagagcgagcccagcgccagaaccaagttctacttcgagcagagctggtag

SEQ ID NO: 224855 - DNA, 459 bp, Artificial Sequence
  derived and/or modified sequence
atgtgctcacttcccatggctcgttactatatctcttttctgcctgagcctcttcccgccaagtcactccaacacggcgtgccactctccttggactcttcactgtcgagcctgctcgagaagatctgcatcctgcctaatcgcggtttggcaagaacaaaggtccccattttcctgggcatccaaggcggttcacgatgcctcgcctgtgtcgagacagaggagggcccttcacttcagttggaggatgtcaacatcgaagagctgtacaaaggaggcgaagaggccacacgattcaccttctttcagtctagttcaggctcggcctttaggctggaagcggccgcctggccggggtggttcctttgtggtcctgccgagcctcagcagccagtgcaactgacaaaagaatccgaaccttcggcacgcaccaaattttactttgaacagtcttggtag

SEQ ID NO: 224856 - DNA, 459 bp, Artificial Sequence
  derived and/or modified sequence
atgtgtagtctcccaatggcacggtattacatcataaaatacgcggaccagaaggctctttacacaagggatggccaactgctggtcggagatcccgtggcagacaactgttgtgctgaaaaaatatgcattctgccaaaccggggtctcgctaggacaaaagtgcccatatttctagggattcaggggggatctcgctgtctcgcttgcgtggaaacagaggaggggccgagtttgcagctagaggatgtgaacattgaggagttgtacaagggcggcgaagaggctactcgctttaccttttttcagtctagtagcggatcagcatttagactagaggctgcagcatggcctggttggtttctgtgcggtccagccgagccccagcagccggtgcaactcactaaggaatctgaaccttctgcgcgcacaaagttctacttcgagcaaagctggtag

SEQ ID NO: 224857 - DNA, 459 bp, Artificial Sequence
  derived and/or modified sequence
atgtgcagtcttcctatggctcggtattacatcatcaagtatgctgatcaaaaggccctgtacacccgcgacgggcagctactagtcggcgacccagtagcggacaactgttgtgccgagaagatatgtatactgcctaatcgcggcttggcacgcacaaaggtgcccattttcttaggcatccagggggggagtcggtgcctcgcttgcgtcgaaactgaagagggcccttctcttcagctggaagatgttaatatcgaggagctatacaaagggggggaggaagcaacaagattcacattcttccaaagttcctccggctccgcctttcgccttgaggccgctgcttggcctggctggtttctgtgcgggccagctgaaccccagcaacccgtgcagcttaccaaagagtctgaaccctctgccaggaccaagttctattttgaacagtcatggtag

SEQ ID NO: 224858 - DNA, 459 bp, Artificial Sequence
  derived and/or modified sequence
atgtgcagcctgcccatggcccgctactacatctccttcctgcctgagcccctgcctgccaagagcctgcagcacggcgtgcccctgagcctggacagcagcctgagcagcctgctggagaagatctgcatcctgcccaacagaggcctggcccggaccaaggtgcccatcttcctgggcatccagggcggcagccgctgcctggcctgtgtggagacagaggagggccccagcctgcagctggaggatgtgaacatcgaggagctgtacaagggcggggaggaggccacccgcttcaccttcttccagagcagcagcggcagcgccttccggctggaggccgccgcctggccaggctggttcctgtgtggccctgctgagccccagcagcctgtgcagctgaccaaggagagcgagcccagcgcccggaccaagttctactttgagcagagctggtag

SEQ ID NO: 224859 - DNA, 459 bp, Artificial Sequence
  derived and/or modified sequence
atgtgcagcctgcccatggcccgctactacatcatcaagtatgctgaccagaaggccctgtacaccagagatggccagctgctggtgggggaccctgtggccgacaactgctgtgccgagaagatctgcatcctgcccaacagaggcctggcccggaccaaggtgcccatcttcctgggcatccagggcggcagccgctgcctggcctgtgtggagacagaggagggccccagcctgcagctggaggatgtgaacatcgaggagctgtacaagggcggggaggaggccacccgcttcaccttcttccagagcagcagcggcagcgccttccggctggaggccgccgcctggccaggctggttcctgtgtggccctgctgagccccagcagcctgtgcagctgaccaaggagagcgagcccagcgcccggaccaagttctactttgagcagagctggtag

SEQ ID NO: 224860 - DNA, 459 bp, Artificial Sequence
  derived and/or modified sequence
atgtgcagcctgcccatggcccggtactacatcagcttcctgcccgagccattacccgccaagagtcttcagcacggagtgccactatccctcgattcttctctgtcctcgctcctggagaagatttgcatactccccaacagagggcttgccaggaccaaagtgcctatcttccttggcattcaggggggctctcgatgtctggcgtgtgtcgagaccgaggagggacccagcttacagctcgaagacgtgaacatcgaggagctgtacaagggcggagaagaggctacccgtttcacattctttcagtctagttccggatcggccttcagactcgaggctgctgcatggcccgggtggttcctgtgtggtcctgccgaaccccagcagccagttcagctgacgaaggaatccgagcccagtgcaagaactaaattttactttgagcagagctggtag

SEQ ID NO: 224861 - DNA, 459 bp, Artificial Sequence
  derived and/or modified sequence
atgtgcagcctgcccatggcccggtactacatcatcaagtacgccgatcagaaggccctgtatacacgcgacggccagcttctcgtgggggatcctgttgcagataactgctgcgctgagaagatttgtatacttccaaacagaggtctggctcggacaaaagtccccatttttctgggtatccagggtggttcgagatgtctggcctgcgtggagaccgaagaagggccatcactgcagctcgaggatgtgaacatcgaagagctgtacaaggggggcgaggaggcaactcgcttcactttttttcaatcctcctcgggcagcgctttccgcttagaagccgcggcttggcccgggtggtttttgtgcgggcccgctgagccccagcaacccgtgcagcttacgaaagagtcagagccgtccgctcgtaccaagttctacttcgaacagagctggtag

SEQ ID NO: 224862 - DNA, 459 bp, Artificial Sequence
  derived and/or modified sequence
atgtgcagcctgcccatggcccggtactacatcatcaagtacgccgatcagaaagcactgtatactcgtgacggtcagttgttagtgggtgaccccgtagctgacaactgctgcgccgaaaagatctgtatcctgccgaaccgggggctagccagaactaaagtgcccatcttcctcggcatccagggaggctcacgctgtctggcatgcgtggaaaccgaagagggccccagtctccagctggaggatgtcaatatcgaggaactctacaagggcggagaagaggccacccgctttactttcttccagtcatcttctgggagtgctttccgtctggaagccgccgcttggcccggatggttcctatgcggccccgcggaacctcagcagccagtgcagttaaccaaagagagcgaacccagtgccagaacgaagttttacttcgaacagagctggtag

SEQ ID NO: 224863 - DNA, 459 bp, Artificial Sequence
  derived and/or modified sequence
atgtgctctctgcccatggccagatactatataagtttcctgcccgaacctttgccagctaaatctctgcagcacggcgtgcctttgtccctggacagcagtctatcttcccttttggagaaaatctgtatcctgcccaaccgaggcttggctcgcaccaaagtcccaatttttctaggtattcagggtggtagccgttgtcttgcgtgcgtggaaactgaagaggggccatcgttacagttagaagatgtgaacatcgaagagctctacaaaggaggcgaggaagccacccgattcactttctttcagtccagctcggggtcagcctttagacttgaagcagccgcttggcccggttggttcctttgtggacccgcagagccacagcagccagtacagttaaccaaggagagcgagccatccgccagaacaaaattctatttcgagcagagttggtag

SEQ ID NO: 224864 - DNA, 459 bp, Artificial Sequence
  derived and/or modified sequence
atgtgtagcctgcctatggcccgatactatatcatcaagtatgctgaccagaaggcgctttacacccgcgatggccagcttctcgtgggcgatccagttgccgataactgttgtgcagaaaagatctgcatactgcccaacagggggttagctcgcactaaggttccaatcttcctgggtatccagggcggttcacggtgtctggcctgcgtggagacagaagaaggaccgtcgttacagttggaggacgtgaacattgaggaattgtataaaggcggtgaagaggccacccggttcacatttttccagtcaagctccggcagcgctttcaggctggaggccgcagcgtggcccggatggttcctctgtggcccagcagagcctcagcagcctgtgcagctgaccaaagagagtgagccgtcagcacgcaccaagttttactttgaacaatcttggtag

SEQ ID NO: 224865 - DNA, 459 bp, Artificial Sequence
  derived and/or modified sequence
atgtgcagtcttcccatggccagatactatatcatcaagtacgcagatcagaaagctctgtatacccgagatggccagcttctggtgggcgatcccgtcgctgataactgttgcgcagaaaagatttgtattctgcccaataggggactcgcgagaaccaaggtccctattttcctgggtattcaggggggaagtagatgcttagcttgtgtggagactgaggagggccctagcctccaactggaggacgttaatatcgaggagctgtataaagggggagaggaggcgacccgtttcactttttttcagtcttccagtgggtctgccttccggctggaagctgctgcatggccaggttggttcctgtgtgggccagccgagccacagcagccggtgcagctgaccaaagagtccgagccttcagccaggacaaagttctattttgaacagagctggtag

SEQ ID NO: 224866 - DNA, 459 bp, Artificial Sequence
  derived and/or modified sequence
atgtgctcactgccaatggccagatactacatctctttcctcccagaacctctgcccgccaaatctttgcagcacggcgtgccactgtcgctagactcctccctgtcatcactgctagaaaagatctgtatccttcccaatcgaggcttggcacgtacaaaggtccctattttcctgggaatccaaggcggctcccgttgtctggcttgcgtggagacggaggagggtccttctttacaattagaagatgtcaatattgaggaactgtacaaaggtggagaggaggcgacaaggtttaccttctttcagtcttcatcggggtcggcgtttcgccttgaagccgccgcctggcctggctggtttctgtgtggtccagcggaaccacagcagcccgtccaactgaccaaagagtctgagccgagcgcgaggactaaattttattttgaacagtcatggtag

SEQ ID NO: 224867 - DNA, 459 bp, Artificial Sequence
  derived and/or modified sequence
atgtgcagcttaccaatggctagatactacattattaagtacgcagatcaaaaagccctgtatacacgagatggacaactgcttgtcggtgatcccgtagctgacaattgttgtgcagaaaagatttgtattttgccaaatcggggactcgctaggaccaaagtacccatttttcttggcatacaagggggttcaaggtgcttggcatgtgtggaaaccgaggaaggtccgagtttgcaactggaagatgttaacatagaggaactgtataaaggcggcgaagaggccacgcgatttaccttctttcaaagcagcagtggatcagccttcagactggaggccgctgcttggcctggctggttcttgtgcgggcccgctgagccccaacagccagttcaactaactaaggagagcgagcctagtgcccgtaccaagttttattttgagcagtcgtggtag

SEQ ID NO: 224868 - DNA, 459 bp, Artificial Sequence
  derived and/or modified sequence
atgtgttcgttacccatggccagatactatatcattaaatacgccgatcagaaagctttatacactcgagacggacaactgctcgtgggcgatcccgtggctgataactgctgtgcagaaaagatatgcattcttccaaatcgcggcttggctaggacgaaggtaccaatctttctagggatccaagggggttcgaggtgtctcgcttgtgtggaaacagaagagggccccagccttcagcttgaagatgtgaacattgaagagctctataaaggaggagaggaggccacgcggtttacattttttcagtcctcctcaggctccgctttcagactcgaagccgctgcgtggccaggatggtttctctgtggtcccgctgaaccacagcagcctgtgcaactgacaaaagaatctgaaccaagcgcaaggacaaagttttactttgagcagtcgtggtag

SEQ ID NO: 224869 - DNA, 459 bp, Artificial Sequence
  derived and/or modified sequence
atgtgttcactccctatggcccgatattatatttctttcttgccagaacccctgcctgcaaagagtctccagcatggtgtgcccttgagcctcgattcctcactctcatctttgctagaaaaaatctgtatccttccaaatcgcggcctcgccagaacaaaggtccctatatttcttggcatacaaggcggcagtcggtgcctggcttgtgtcgaaaccgaggaggggcccagtttacagttggaggacgttaacatcgaggaattatacaaagggggagaagaggccacccgattcaccttttttcagtcgtcatccggtagcgctttccgtcttgaagccgcagcatggccaggttggtttctgtgcggcccagctgaaccccagcagcctgttcagcttactaaagagagcgaaccttcagcgagaaccaagttctacttcgagcagtcctggtag

SEQ ID NO: 224870 - DNA, 459 bp, Artificial Sequence
  derived and/or modified sequence
atgtgctccctcccgatggccagatactacatcataaagtatgctgaccagaaagccttatatactagagatggacagctgctcgttggtgatccagtggccgacaactgctgcgccgagaaaatatgcatattgccaaaccgaggcttagcaagaacaaaggtccccattttcttaggaatccaagggggatcacgatgccttgcatgtgtggagacagaggaaggaccatcactacagctggaggatgtaaatatagaggagctctacaaaggcggtgaagaggcgacccgttttacgtttttccaatcctcttcgggttccgcatttagactggaagcggcagcttggcctggctggttcctctgcggaccggcagaaccccaacagcccgttcaactcactaaagaatccgaaccctcggctaggacgaagttctatttcgaacaatcatggtag

SEQ ID NO: 224871 - DNA, 459 bp, Artificial Sequence
  derived and/or modified sequence
atgtgcagcctaccgatggcacgttattacattatcaaatacgccgaccaaaaggctctttatacaagagacggacagctcttagttggagatccggtggccgataattgctgcgccgagaagatttgcatcctcccaaatcgtggcctggcacgtactaaagtacccatatttttgggaatccagggcggctcccgttgtcttgcttgcgttgaaactgaggagggcccctccctacaacttgaagatgtgaacattgaggaactctacaagggcggagaagaagcaaccaggttcactttttttcagtcctcctcaggctccgctttcagactcgaagccgctgcgtggccaggatggtttctctgtggtcccgctgaaccacagcagcctgtgcaactgacaaaagaatctgaaccaagcgcaaggacaaagttttactttgagcagtcgtggtag

SEQ ID NO: 224872 - DNA, 1018 bp, Artificial Sequence
  derived and/or modified sequence
agttggagtctccagggatcagggttccaggaactcaggatctgcagtgaggaccagacaccactgattgcaggaatgtgttccctccccatggcaagatactacatttccttcctgcctgagcctttacctgccaagagcctgcaacatggggttcccttgtcccttgactcttctctctcttccctcctagagaagatctgcatacttcctaacagaggcttggcccgcaccaaggtccccattttcctggggatccagggagggagccgctgcctggcatgtgtggagacagaagaggggccttccctacagctggaggatgtgaacattgaggaactgtacaaaggtggtgaagaggccacacgcttcaccttcttccagagcagctcaggctccgccttcaggcttgaggctgctgcctggcctggctggttcctgtgtggcccggcagagccccagcagccagtacagctcaccaaggagagtgagccctcagcccgtaccaagttttactttgaacagagctggtagggagacaggaaactgcgttttagccttgtgcccccaaaccaagctcatcctgctcagggtctatggtaggcagaataatgtcccccgaaatatgtccacatcctaatcccaagatctgtgcatatgttaccatacatgtccaaagaggttttgcaaatgtgattatgttaaggatcttgaaatgaggagacaatcctgggttatccttgtgggctcagtttaatcacaagaaggaggcaggaagggagagtcagagagagaatggaagataccatgcttctaattttgaagatggagtgaggggccttgagccaacaaatgcaggtgtttttagaaggtggaaaagccaagggaacggattctcctctagagtctccggaaggaacacagctcttgacacatggatttcagctcagtgacacccatttcagacttctgacctccacaactataaaataataaacttgtgttattgtaaacctct

SEQ ID NO: 224873 - DNA, 1013 bp, Artificial Sequence
  derived and/or modified sequence
agttggagtctccagggatcagggttccaggaactcaggatctgcagtgaggaccagacaccactgattgcaggaatgtgttccctccccatggcaagatactacataattaaatatgcagaccagaaggctctatacacaagagatggccagctgctggtgggagatcctgttgcagacaactgctgtgcagagaagatctgcatacttcctaacagaggcttggcccgcaccaaggtccccattttcctggggatccagggagggagccgctgcctggcatgtgtggagacagaagaggggccttccctacagctggaggatgtgaacattgaggaactgtacaaaggtggtgaagaggccacacgcttcaccttcttccagagcagctcaggctccgccttcaggcttgaggctgctgcctggcctggctggttcctgtgtggcccggcagagccccagcagccagtacagctcaccaaggagagtgagccctcagcccgtaccaagttttactttgaacagagctggtagggagacaggaaactgcgttttagccttgtgcccccaaaccaagctcatcctgctcagggtctatggtaggcagaataatgtcccccgaaatatgtccacatcctaatcccaagatctgtgcatatgttaccatacatgtccaaagaggttttgcaaatgtgattatgttaaggatcttgaaatgaggagacaatcctgggttatccttgtgggctcagtttaatcacaagaaggaggcaggaagggagagtcagagagagaatggaagataccatgcttctaattttgaagatggagtgaggggccttgagccaacaaatgcaggtgtttttagaaggtggaaaagccaagggaacggattctcctctagagtctccggaaggaacacagctcttgacacatggatttcagctcagtgacacccatttcagacttctgacctccacaactataaaataataaacttgtgttattgtaaa

SEQ ID NO: 224874 - DNA, 1366 bp, Artificial Sequence
  derived and/or modified sequence
ggcagtgggactgggtttgagctgggcttatcctccaactgtgagggaggctacagcacactccaccccactctcagggctgggaattgttgtggctcagctatttgggggaatctgttttccagtttctcagaaccagcgcaagcacacacatcccaggctcacacccctggtggctggacttgctcccggatagcctcagtcagggagaggcagagctgcctggagcctgctgggctggtggaagccttggtggattctggcaggccaattatagacgaatggcctggggaacccgtgcagcccttggctgagtggttctaagccccagcacgtctgcctctggcttcacccagcctccttttctaactgcccttctctcctccccatcagtgaggaccagacaccactgattgcaggaatgtgttccctccccatggcaagatactacataattaaatatgcagaccagaaggctctatacacaagagatggccagctgctggtgggagatcctgttgcagacaactgctgtgcagagaagatctgcatacttcctaacagaggcttggcccgcaccaaggtccccattttcctggggatccagggagggagccgctgcctggcatgtgtggagacagaagaggggccttccctacagctggaggatgtgaacattgaggaactgtacaaaggtggtgaagaggccacacgcttcaccttcttccagagcagctcaggctccgccttcaggcttgaggctgctgcctggcctggctggttcctgtgtggcccggcagagccccagcagccagtacagctcaccaaggagagtgagccctcagcccgtaccaagttttactttgaacagagctggtagggagacaggaaactgcgttttagccttgtgcccccaaaccaagctcatcctgctcagggtctatggtaggcagaataatgtcccccgaaatatgtccacatcctaatcccaagatctgtgcatatgttaccatacatgtccaaagaggttttgcaaatgtgattatgttaaggatcttgaaatgaggagacaatcctgggttatccttgtgggctcagtttaatcacaagaaggaggcaggaagggagagtcagagagagaatggaagataccatgcttctaattttgaagatggagtgaggggccttgagccaacaaatgcaggtgtttttagaaggtggaaaagccaagggaacggattctcctctagagtctccggaaggaacacagctcttgacacatggatttcagctcagtgacacccatttcagacttctgacctccacaactataaaataataaacttgtgttattgtaaacctctaa

SEQ ID NO: 224875 - RNA, 459 nt, Artificial Sequence
  derived and/or modified sequence
augugcucacugccaauggccagauacuacaucucuuuccucccagaaccucugcccgccaaaucuuugcagcacggcgugccacugucgcuagacuccucccugucaucacugcuagaaaagaucuguauccuucccaaucgaggcuuggcacguacaaaggucccuauuuuccugggaauccaaggcggcucccguugucuggcuugcguggagacggaggaggguccuucuuuacaauuagaagaugucaauauugaggaacuguacaaagguggagaggaggcgacaagguuuaccuucuuucagucuucaucggggucggcguuucgccuugaagccgccgccuggccuggcugguuucugugugguccagcggaaccacagcagcccguccaacugaccaaagagucugagccgagcgcgaggacuaaauuuuauuuugaacagucaugguag

SEQ ID NO: 224876 - RNA, 459 nt, Artificial Sequence
  derived and/or modified sequence
augugcagcuuaccaauggcuagauacuacauuauuaaguacgcagaucaaaaagcccuguauacacgagauggacaacugcuugucggugaucccguagcugacaauuguugugcagaaaagauuuguauuuugccaaaucggggacucgcuaggaccaaaguacccauuuuucuuggcauacaaggggguucaaggugcuuggcauguguggaaaccgaggaagguccgaguuugcaacuggaagauguuaacauagaggaacuguauaaaggcggcgaagaggccacgcgauuuaccuucuuucaaagcagcaguggaucagccuucagacuggaggccgcugcuuggccuggcugguucuugugcgggcccgcugagccccaacagccaguucaacuaacuaaggagagcgagccuagugcccguaccaaguuuuauuuugagcagucgugguag

SEQ ID NO: 224877 - RNA, 459 nt, Artificial Sequence
  derived and/or modified sequence
auguguucguuacccauggccagauacuauaucauuaaauacgccgaucagaaagcuuuauacacucgagacggacaacugcucgugggcgaucccguggcugauaacugcugugcagaaaagauaugcauucuuccaaaucgcggcuuggcuaggacgaagguaccaaucuuucuagggauccaaggggguucgaggugucucgcuuguguggaaacagaagagggccccagccuucagcuugaagaugugaacauugaagagcucuauaaaggaggagaggaggccacgcgguuuacauuuuuucaguccuccucaggcuccgcuuucagacucgaagccgcugcguggccaggaugguuucucuguggucccgcugaaccacagcagccugugcaacugacaaaagaaucugaaccaagcgcaaggacaaaguuuuacuuugagcagucgugguag

SEQ ID NO: 224878 - RNA, 459 nt, Artificial Sequence
  derived and/or modified sequence
auguguucacucccuauggcccgauauuauauuucuuucuugccagaaccccugccugcaaagagucuccagcauggugugcccuugagccucgauuccucacucucaucuuugcuagaaaaaaucuguauccuuccaaaucgcggccucgccagaacaaaggucccuauauuucuuggcauacaaggcggcagucggugccuggcuugugucgaaaccgaggaggggcccaguuuacaguuggaggacguuaacaucgaggaauuauacaaagggggagaagaggccacccgauucaccuuuuuucagucgucauccgguagcgcuuuccgucuugaagccgcagcauggccagguugguuucugugcggcccagcugaaccccagcagccuguucagcuuacuaaagagagcgaaccuucagcgagaaccaaguucuacuucgagcaguccugguag

SEQ ID NO: 224879 - RNA, 459 nt, Artificial Sequence
  derived and/or modified sequence
augugcucccucccgauggccagauacuacaucauaaaguaugcugaccagaaagccuuauauacuagagauggacagcugcucguuggugauccaguggccgacaacugcugcgccgagaaaauaugcauauugccaaaccgaggcuuagcaagaacaaagguccccauuuucuuaggaauccaagggggaucacgaugccuugcauguguggagacagaggaaggaccaucacuacagcuggaggauguaaauauagaggagcucuacaaaggcggugaagaggcgacccguuuuacguuuuuccaauccucuucggguuccgcauuuagacuggaagcggcagcuuggccuggcugguuccucugcggaccggcagaaccccaacagcccguucaacucacuaaagaauccgaacccucggcuaggacgaaguucuauuucgaacaaucaugguag

SEQ ID NO: 224880 - RNA, 459 nt, Artificial Sequence
  derived and/or modified sequence
augugcagccuaccgauggcacguuauuacauuaucaaauacgccgaccaaaaggcucuuuauacaagagacggacagcucuuaguuggagauccgguggccgauaauugcugcgccgagaagauuugcauccucccaaaucguggccuggcacguacuaaaguacccauauuuuugggaauccagggcggcucccguugucuugcuugcguugaaacugaggagggccccucccuacaacuugaagaugugaacauugaggaacucuacaagggcggagaagaagcaaccagguucacuuuuuuucaguccuccucaggcuccgcuuucagacucgaagccgcugcguggccaggaugguuucucuguggucccgcugaaccacagcagccugugcaacugacaaaagaaucugaaccaagcgcaaggacaaaguuuuacuuugagcagucgugguag

SEQ ID NO: 224881 - protein, 673 aa, Artificial Sequence
  derived and/or modified sequence
MASQFCLPESPCLSPLKPLKPHFGDIQEGIYVAIQRSDKRIHLAVVTEINRENYWVTVEWVEKAVKKGKKIDLETILLLNPALDSAEHPMPPPPLSPLALAPSSAIRDQRTATKWVAMIPQKNQTASGDSLDVRVPSKPCLMKQKKSPCLWEIQKLQEQREKRRRLQQEIRARRALDVNTRNPNYEIMHMIEEYRRHLDSSKISVLEPPQEHRICVCVRKRPLNQRETTLKDLDIITVPSDNVVMVHESKQKVDLTRYLQNQTFCFDHAFDDKASNELVYQFTAQPLVESIFRKGMATCFAYGQTGSGKTYTMGGDFSGTAQDCSKGIYALVAQDVFLLLRNSTYEKLDLKVYGTFFEIYGGKVYDLLNWKKKLQVLEDGNQQIQVVGLQEKEVCCVEEVLNLVEIGNSCRTSRQTPVNAHSSRSHAVFQIILKSGRIMHGKFSLVDLAGNERGADTTKASRKRQLEGAEINKSLLALKECILALGQNKPHTPFRASKLTLVLRDSFIGQNSSTCMIATISPGMTSCENTLNTLRYANRVKKLNVDVRPYHRGHYPIGHEAPRMLKSHIGNSEMSLQRDEFIKIPYVQSEEQKEIEEVETLPTLLGKDTTISGKGSSQWLENIQERAGGVHHDIDFCIARSLSILEQKIDALTEIQKKLKLLLADLHVKSKVE

SEQ ID NO: 224882 - protein, 561 aa, Artificial Sequence
  derived and/or modified sequence
MASQFCLPESPCLSPPPLSPLALAPSSAIRDQRTATKWVAMIPQKNQTASGDSLDVRVPSKPCLMKQKKSPCLWEIQKLQEQREKRRRLQQEIRARRALDVNTRNPNYEIMHMIEEYRRHLDSSKISVLEPPQEHRICVCVRKRPLNQRETTLKDHAFDDKASNELVYQFTAQPLVESIFRKGMATCFAYGQTGSGKTYTMGGDFSGTAQDCSKGIYALVAQDVFLLLRNSTYEKLDLKVYGTFFEIYGGKVYDLLNWKKKLQVLEDGNQQIQVVGLQEKEVCCVEEVLNLVEIGNSCRTSRQTPVNAHSSRSHAVFQIILKSGRIMHGKFSLVDLAGNERGADTTKASRKRQLEGAEINKSLLALKECILALGQNKPHTPFRASKLTLVLRDSFIGQNSSTCMIATISPGMTSCENTLNTLRYANRVKKLNVDVRPYHRGHYPIGHEAPRMLKSHIGNSEMSLQRDEFIKIPYVQSEEQKEIEEVETLPTLLGKDTTISGKGSSQWLENIQERAGGVHHDIDFCIARSLSILEQKIDALTEIQKKLKLLLADLHVKSKVE

SEQ ID NO: 224883 - DNA, 1686 bp, Artificial Sequence
  derived and/or modified sequence
atggccagccagttctgcctgcccgagagcccctgcctgagccccccccccctgagccccctggccctggcccccagcagcgccatcagagaccagagaaccgccaccaagtgggtggccatgatcccccagaagaaccagaccgccagcggcgacagcctggacgtgagagtgcccagcaagccctgcctgatgaagcagaagaagagcccctgcctgtgggagatccagaagctgcaggagcagagagagaagagaagaagactgcagcaggagatcagagccagaagagccctggacgtgaacaccagaaaccccaactacgagatcatgcacatgatcgaggagtacagaagacacctggacagcagcaagatcagcgtgctggagcccccccaggagcacagaatctgcgtgtgcgtgagaaagagacccctgaaccagagagagaccaccctgaaggaccacgccttcgacgacaaggccagcaacgagctggtgtaccagttcaccgcccagcccctggtggagagcatcttcagaaagggcatggccacctgcttcgcctacggccagaccggcagcggcaagacctacaccatgggcggcgacttcagcggcaccgcccaggactgcagcaagggcatctacgccctggtggcccaggacgtgttcctgctgctgagaaacagcacctacgagaagctggacctgaaggtgtacggcaccttcttcgagatctacggcggcaaggtgtacgacctgctgaactggaagaagaagctgcaggtgctggaggacggcaaccagcagatccaggtggtgggcctgcaggagaaggaggtgtgctgcgtggaggaggtgctgaacctggtggagatcggcaacagctgcagaaccagcagacagacccccgtgaacgcccacagcagcagaagccacgccgtgttccagatcatcctgaagagcggcagaatcatgcacggcaagttcagcctggtggacctggccggcaacgagagaggcgccgacaccaccaaggccagcagaaagagacagctggagggcgccgagatcaacaagagcctgctggccctgaaggagtgcatcctggccctgggccagaacaagccccacacccccttcagagccagcaagctgaccctggtgctgagagacagcttcatcggccagaacagcagcacctgcatgatcgccaccatcagccccggcatgaccagctgcgagaacaccctgaacaccctgagatacgccaacagagtgaagaagctgaacgtggacgtgagaccctaccacagaggccactaccccatcggccacgaggcccccagaatgctgaagagccacatcggcaacagcgagatgagcctgcagagagacgagttcatcaagatcccctacgtgcagagcgaggagcagaaggagatcgaggaggtggagaccctgcccaccctgctgggcaaggacaccaccatcagcggcaagggcagcagccagtggctggagaacatccaggagagagccggcggcgtgcaccacgacatcgacttctgcatcgccagaagcctgagcatcctggagcagaagatcgacgccctgaccgagatccagaagaagctgaagctgctgctggccgacctgcacgtgaagagcaaggtggagtag

SEQ ID NO: 224884 - DNA, 2022 bp, Artificial Sequence
  derived and/or modified sequence
atggccagtcagttttgcctgcctgagtctccctgtctgtctccactcaagccactgaagcctcattttggtgacatccaggagggaatttacgtagctatccagcgctctgataagcgaattcaccttgccgtcgtgacagagatcaatcgcgaaaactactgggttacagtcgaatgggtggagaaagcagtcaagaaaggaaaaaagattgacctggaaaccatcttactcctcaacccggcattagatagtgctgaacatccgatgcccccccctccactgtccccactggcactagcccccagctcagctattcgggaccaacgcactgcaactaagtgggtggccatgataccacaaaagaatcagacagcaagcggggacagtctcgacgttcgtgtgccttctaaaccttgcctaatgaaacaaaaaaagagtccctgcctgtgggagatacaaaaacttcaggaacagcgcgaaaagaggcgccggctgcagcaggaaattcgggcacgaagagccctggacgtgaatacccgcaaccccaattacgagattatgcatatgatcgaggaatatcggcgtcaccttgattcttcaaaaatctccgtgcttgagccaccccaagaacataggatctgtgtttgcgtgcggaaaagaccactgaaccaacgcgagaccaccctgaaggatcttgatattatcaccgtccccagtgataatgtggttatggtgcacgaatctaaacagaaggtggacttgacccggtacctgcagaatcagactttctgctttgaccacgcatttgacgataaggccagtaatgaactggtctatcagtttaccgctcagccgctggtcgagtctatctttcgaaaaggaatggccacatgtttcgcctacgggcaaacaggttccggaaagacttacactatgggcggcgacttttccgggaccgcccaggactgctccaaaggcatctacgccctcgtcgcgcaagatgtgtttctgcttttgcggaattctacatacgaaaagctggacctaaaagtttatggtactttttttgagatctacggcggcaaggtgtatgacctgctgaactggaagaagaagttgcaggtgctggaggatggcaaccagcaaattcaggtggtggggttacaggaaaaggaggtctgctgtgtcgaagaggtacttaacctcgtagagatcggcaattcttgccgaacatcccgccagacacccgtcaacgcacactctagtagatcccacgccgtattccaaattatcttaaaatcgggaagaatcatgcacggcaaattttcacttgtagacttggccggtaacgaacgtggggctgatacaacaaaggcaagtagaaagaggcaactggagggagctgaaattaacaaatccctgctcgcactgaaggaatgcatccttgccctgggccagaataagccgcatacgccattcagagcctccaagctcacactggtgttgagggacagcttcattgggcaaaattccagtacctgtatgatcgctacaatctcacccggaatgacctcttgtgaaaacacgctcaatactctgcgctacgctaatcgggtcaaaaaacttaacgtggacgtgcgcccctaccaccgcggccattatccaattgggcatgaagcaccacggatgctgaaaagccacattggcaattcggagatgtctctgcagcgtgacgagtttattaagattccatacgtgcagagtgaggagcagaaagagatcgaagaggtcgagacccttcccactctgctaggtaaggacactaccatcagcggaaagggaagcagccagtggctggagaatatccaggagagagccggtggagtccaccacgacatagatttttgcattgccaggtctctgagtatcttggagcagaagatcgatgcactgactgagatacaaaagaagttaaaactgctcctagccgatttacacgtaaagtcgaaagtggagtag

SEQ ID NO: 224885 - DNA, 1686 bp, Artificial Sequence
  derived and/or modified sequence
atggcctctcagttctgtctgccagaatcaccgtgtctctctcctccacccctcagcccacttgccctggcccctagttctgcgattcgggatcaaaggacagccacaaaatgggtggcaatgatccctcagaaaaatcagactgcctccggggacagcttggacgtacgggtgccatccaagccttgcctgatgaaacagaagaaaagcccttgtttatgggaaatccagaagctccaggaacagcgagagaagcgccgacggcttcaacaagagatccgcgctaggagagcactcgatgtgaatacaagaaaccctaattatgaaatcatgcatatgattgaggaatatcgtaggcatttggactctagcaaaatttcggtactcgagccacctcaggagcacaggatttgtgtttgtgtgcgcaaacggccgctcaaccagagggagaccaccctgaaagatcatgcgttcgacgataaggcctcaaacgagctagtgtaccagtttactgcccagcccttagtggagagcatattcagaaaaggcatggccacatgcttcgcttacggtcagacaggatccggaaaaacctacacaatgggaggcgacttctccggcacagctcaggactgtagcaaggggatttatgcgttagtagctcaggatgtttttctcctgctgcgtaattcgacatatgaaaaactggatctaaaagtgtatggcacattctttgagatttatggaggaaaggtgtatgacctgcttaactggaagaagaagctgcaagtcttagaagatggtaaccagcagatccaggtagtcgggctccaggagaaggaggtgtgttgcgtcgaagaggtgctgaatctcgtggaaatcgggaattcatgtagaacaagccgacaaactcccgtgaacgcccactcatcacgctcccatgccgtatttcagataatcctgaagagtggaagaatcatgcatggtaagtttagcttggttgacctggcgggcaacgaacggggtgccgacactacaaaggcatcccggaaaaggcagttagagggggccgagatcaacaaatctctgctcgcgctcaaagagtgcatactcgcacttggtcagaataagccgcatacaccttttcgggcatctaaactgaccctggtcctgcgggatagctttatcgggcagaattcctcaacctgtatgattgccacaatctcgcccggaatgacctcttgcgaaaatacactgaatacattgcgttacgccaatcgggtcaagaaacttaacgtagacgttcgtccctatcatcggggacattatccaattggtcatgaggcacctaggatgttaaagagccatattggcaactcagagatgtctcttcagcgtgatgagtttatcaagatcccatatgtgcagtcggaagagcaaaaagagattgaagaggtagagacccttccgacgttattggggaaggatacaaccatctccggcaaaggcagcagccagtggcttgaaaatattcaggagagggccgggggcgtgcaccatgatatcgatttttgcattgcacgctctctctcgatactggagcagaagattgacgcactgacagaaatccaaaaaaagctcaaactgctgctggctgacctccacgttaagtctaaagtggagtag

SEQ ID NO: 224886 - DNA, 2022 bp, Artificial Sequence
  derived and/or modified sequence
atggccagccagttctgcctgcctgagagcccctgcctgagccccctgaagcccctgaagccccactttggagacatccaggagggcatctacgtggccatccagaggagtgacaagaggatccacctggccgtggtgacagagatcaaccgggagaactactgggtgacagtggagtgggtggagaaggctgtgaagaagggcaagaagattgacctggagaccatcctgctgctgaacccagccctggacagcgctgagcaccccatgcctcctccacccctgagccccctggccctggcccccagcagcgccatccgggaccagaggacagccaccaagtgggtggccatgatcccccagaagaaccagacagccagcggggacagcctggatgtgcgggtgcccagcaagccctgcctgatgaagcagaagaagagcccctgcctgtgggagatccagaagctgcaggagcagcgggagaagagaagaaggctgcagcaggagatccgggcccggcgggccctggatgtgaacaccaggaaccccaactatgagatcatgcacatgattgaggagtacagaagacacctggacagcagcaagatctctgtgctggagcccccccaggagcaccgcatctgtgtgtgtgtgaggaagaggcccctgaaccagcgggagaccaccctgaaggacctggacatcatcaccgtgcccagcgacaacgtggtgatggtgcatgagagcaagcagaaggtggacctgacccgctacctgcagaaccagaccttctgctttgaccacgcctttgatgacaaggccagcaatgagctggtgtaccagttcaccgcccagcccctggtggagagcatcttcaggaagggcatggccacctgctttgcctacggccagacaggcagcggcaagacctacaccatgggcggggacttcagcggcacagcccaggactgcagcaagggcatctatgccctggtggcccaggatgtgttcctgctgctgaggaacagcacctatgagaagctggacctgaaggtgtatggcaccttctttgagatctacggcggcaaggtgtatgacctgctgaactggaagaagaagctgcaggtgctggaggatggcaaccagcagatccaggtggtgggcctgcaggagaaggaggtgtgctgcgtggaggaggtgctgaacctggtggagatcggcaacagctgcaggaccagccggcagacccctgtgaatgcccacagcagccgcagccatgctgtgttccagatcatcctgaagagcggccgcatcatgcacggcaagttcagcctggtggacctggccggaaatgaaagaggagctgacaccaccaaggccagcaggaagaggcagctggagggcgctgagatcaacaagagcctgctggccctgaaggagtgcatcctggccctgggccagaacaagccccacacccccttccgggccagcaagctgaccctggtgctgcgggacagcttcatcggccagaacagcagcacctgcatgattgccaccatcagccctggcatgaccagctgtgagaacaccctgaacaccctgcgctatgccaacagagtgaagaagctgaatgtggatgtgcggccctaccaccggggccactaccccatcggccacgaggcccccaggatgctgaagagccacatcggcaacagcgagatgagcctgcagagagatgagttcatcaagatcccctacgtgcagagcgaggagcagaaggagattgaggaggtggagaccctgcccaccctgctgggcaaggacaccaccatcagcggcaagggcagcagccagtggctggagaacatccaggagagagctggaggagtgcaccacgacatcgacttctgcatcgcccggagcctgagcatcctggagcagaagattgatgccctgacagagatccagaagaagctgaagctgctgctggccgacctgcacgtgaagagcaaggtggagtag

SEQ ID NO: 224887 - DNA, 1686 bp, Artificial Sequence
  derived and/or modified sequence
atggccagccagttctgcctgcctgagagcccctgcctgagccccccacccctgagccccctggccctggcccccagcagcgccatccgggaccagaggacagccaccaagtgggtggccatgatcccccagaagaaccagacagccagcggggacagcctggatgtgcgggtgcccagcaagccctgcctgatgaagcagaagaagagcccctgcctgtgggagatccagaagctgcaggagcagcgggagaagagaagaaggctgcagcaggagatccgggcccggcgggccctggatgtgaacaccaggaaccccaactatgagatcatgcacatgattgaggagtaccgccgccacctggacagcagcaagatctctgtgctggagcccccccaggagcaccgcatctgtgtgtgtgtgaggaagaggcccctgaaccagcgggagaccaccctgaaggaccacgcctttgatgacaaggccagcaatgagctggtgtaccagttcaccgcccagcccctggtggagagcatcttcaggaagggcatggccacctgctttgcctacggccagacaggcagcggcaagacctacaccatgggcggggacttcagcggcacagcccaggactgcagcaagggcatctatgccctggtggcccaggatgtgttcctgctgctgaggaacagcacctatgagaagctggacctgaaggtgtatggcaccttctttgagatctacggcggcaaggtgtatgacctgctgaactggaagaagaagctgcaggtgctggaggatggcaaccagcagatccaggtggtgggcctgcaggagaaggaggtgtgctgcgtggaggaggtgctgaacctggtggagatcggcaacagctgcaggaccagccggcagacccctgtgaatgcccacagcagccgcagccatgctgtgttccagatcatcctgaagagcggccgcatcatgcacggcaagttcagcctggtggacctggccggaaatgaaagaggagctgacaccaccaaggccagcaggaagaggcagctggagggcgctgagatcaacaagagcctgctggccctgaaggagtgcatcctggccctgggccagaacaagccccacacccccttccgggccagcaagctgaccctggtgctgcgggacagcttcatcggccagaacagcagcacctgcatgattgccaccatcagccctggcatgaccagctgtgagaacaccctgaacaccctgcgctatgccaacagagtgaagaagctgaatgtggatgtgcggccctaccaccggggccactaccccatcggccacgaggcccccaggatgctgaagagccacatcggcaacagcgagatgagcctgcagagagatgagttcatcaagatcccctacgtgcagagcgaggagcagaaggagattgaggaggtggagaccctgcccaccctgctgggcaaggacaccaccatcagcggcaagggcagcagccagtggctggagaacatccaggagagagctggaggagtgcaccacgacatcgacttctgcatcgcccggagcctgagcatcctggagcagaagattgatgccctgacagagatccagaagaagctgaagctgctgctggccgacctgcacgtgaagagcaaggtggagtag

SEQ ID NO: 224888 - DNA, 2022 bp, Artificial Sequence
  derived and/or modified sequence
atggccagccagttctgcctgcccgagagcccctgcctgagccccctcaaaccacttaagcctcactttggcgacatccaggaggggatatatgtagccatccagcgttcagacaagcgtattcatctcgccgtagttaccgagattaaccgagaaaactattgggtgaccgtagaatgggttgagaaagccgtcaagaaggggaaaaagattgacctggagaccatcctcctcctcaatcccgccctcgactcagcagagcatcccatgccccccccacctttgtcgcccctggcccttgccccctcatcagccatccgagaccagcgcacggcgacgaagtgggtggcaatgattccgcagaaaaaccagaccgcgtctggcgacagtctcgatgtcagggtgccctccaaaccatgccttatgaagcagaagaaatccccttgcctctgggaaatccagaaactccaagaacaaagagaaaagaggaggcgcctccaacaagagattcgggctagaagggccttagacgtgaacactagaaacccaaactatgaaataatgcacatgattgaagagtatcggcgccatttggacagctccaagattagcgtcctggagcctcctcaggaacaccgaatatgcgtctgtgtacgtaaaagacccttgaatcagcgtgagaccacactgaaggacttggatatcataactgttccctcagacaatgttgtgatggtgcacgagtcaaaacagaaggtggatttgacgcggtaccttcagaaccagacgttctgttttgaccatgcattcgatgataaagctagtaatgagcttgtttatcaatttacagctcagcccctggtcgagtccatcttcaggaaaggtatggctacttgtttcgcctatggtcaaacaggctcagggaagacctacaccatgggaggcgatttttccgggacggcacaggactgctctaaaggaatatacgcactggtggctcaggacgtgttcctgctactgcggaactctacctacgagaaattggatcttaaagtatacggcacgttcttcgagatttacggaggcaaggtgtacgatctcctgaactggaagaagaaactgcaagtgttggaggacggcaatcaacagatccaggtggtcggcctccaggaaaaggaggtgtgttgtgtggaggaggtcctgaacctggtcgagattgggaatagctgcaggacaagcagacagaccccggttaacgctcactcttcccggtcccacgcagtgttccagatcattctcaaatctggaagaattatgcatggcaagttcagtttggtggatctggccgggaacgaaagaggggccgataccactaaagctagtagaaaacgccagctcgaaggtgctgaaattaacaaatcattacttgcactgaaggagtgcatactggctcttggtcaaaataagccacacacgccatttagggcatccaagctgacactcgtactccgagatagcttcattggccagaactcctcaacctgtatgatcgccaccatctctcctggcatgacatcttgcgaaaatacactgaacacacttcggtatgcaaatcgggtgaagaagttaaacgtggatgtgcgtccataccaccgcggtcactacccaatcggtcacgaagcaccccgcatgcttaagagtcatatagggaatagcgagatgagcctgcagagggacgaatttatcaaaatcccctacgttcagtctgaagaacagaaagagattgaagaggtggaaacactccccactctgctgggcaaagacacaacaatttctggtaagggaagctcccaatggcttgaaaacatccaagaacgtgccggcggtgtccatcatgatattgatttttgtatagcgcgctccctctccatccttgagcagaaaattgatgcgctcactgagatacaaaagaagctcaagctgttgctcgccgatttacatgtaaaatccaaggtggagtag

SEQ ID NO: 224889 - DNA, 1686 bp, Artificial Sequence
  derived and/or modified sequence
atggccagccagttctgcctgcccgagagcccctgcctgagccccccacccttgagcccactggcactggcacctagctccgccattagagaccaaagaactgccaccaagtgggtggcaatgattccacagaaaaatcagacggcctctggcgactcattagacgtgcgcgtgccttccaaaccctgcctgatgaaacagaaaaagagtccttgcctgtgggaaatacagaaattgcaagaacagagagagaagcgcaggcggctgcagcaggaaattagggcacggagagcactagacgtgaatacccggaatccaaactacgaaattatgcatatgatcgaagagtatcgcagacacctggattctagtaagataagcgttcttgagcccccacaggagcatcgcatctgtgtatgcgtgcggaagcggccattaaaccagcgggaaaccacactgaaagaccatgcatttgatgataaagctagtaatgagctggtgtaccaattcacagcacagcccctggtggagtcgatctttaggaaggggatggcaacttgtttcgcttacgggcagactggatctggtaagacttataccatgggcggagacttcagcggcaccgctcaggactgcagcaaggggatctatgctctcgtggcacaggatgtatttttactgctgaggaatagcacttacgagaagctggatctcaaggtgtatggcacattcttcgagatctacggtggcaaagtttatgacctgctgaactggaagaaaaagcttcaggttttagaggacgggaaccagcagatacaggtcgtgggcctccaggagaaagaagtgtgctgcgtcgaggaagtcttaaatttggtggagattggcaattcctgtcggacttcccgccaaactcctgtaaacgctcattcgtcccgttcccacgctgtcttccagatcattctcaaaagcggcagaatcatgcatggaaagttctcccttgtggatctagctgggaatgagcgaggcgctgatactaccaaggcttcgcgcaagcgtcagctcgaaggtgccgagatcaataagagcctattagcgcttaaggaatgcatcctggccctgggacagaacaagcctcataccccattcagggccagtaagttgactctggtgctgagggactcattcattggacagaactcttctacatgtatgatcgctaccatttcccctggaatgacctcttgtgagaatacattaaatacgctgaggtatgcaaaccgagtcaagaagctgaacgtggacgttcgaccataccaccgcggccactaccccattggtcacgaggcgccaaggatgctgaagtcacacattggaaatagcgaaatgtcgttgcagcgggatgagttcatcaagattccatatgttcagagcgaggaacagaaggaaatcgaggaggttgagacacttccgacgctgctgggcaaagataccacaatcagcggcaaaggtagtagccagtggctcgagaacatccaggaacgggcaggaggggtgcaccatgatatcgacttttgtatagcacgatcgctttccatcttggagcagaaaatcgacgcccttaccgaaatacagaagaaactgaaacttctgctggccgacctccacgtgaagagtaaagtggagtag

SEQ ID NO: 224890 - DNA, 2022 bp, Artificial Sequence
  derived and/or modified sequence
atggcctcccagttctgcctacctgagtctccttgcctgtcccctttaaaaccacttaagccacattttggggacatccaggagggtatttatgtagctattcagcggtctgataagaggatccatctagcggtggtgacagagattaaccgcgagaactattgggtcacggtagagtgggtggagaaggccgtgaagaaggggaaaaaaatcgacctcgagaccatcctgctcctgaaccctgccctggattccgctgaacacccaatgcccccacctccgttgtcacccctggcattggctccctccagcgctatccgagaccagcgcaccgctacaaagtgggtcgctatgattccccagaagaatcagactgcatccggagattcactggatgtgcgggttcctagcaaaccctgtctgatgaaacagaaaaaatcaccctgcctgtgggagattcagaaacttcaggaacagagagaaaaaaggagacgtctgcagcaggaaatacgggctcgtcgggcactggacgttaacactaggaacccgaattacgagatcatgcatatgattgaagagtatcgccgtcacctcgacagctctaaaatcagcgtgctcgagcctcctcaggaacatcgaatctgtgtttgcgtgagaaaacgaccattgaaccagagagagaccacactgaaagacctggacataatcactgtaccgagcgataacgtagtgatggtacatgagtccaagcagaaggtggaccttacacgctatctccaaaatcagactttctgttttgatcatgcgttcgatgataaggcaagcaatgagctcgtttaccagtttaccgctcagcctctggtggaatccatattccgtaagggaatggcaacttgcttcgcatacgggcagaccggcagtgggaagacctacaccatgggaggagatttcagcggtacggcgcaggactgctctaagggcatctatgcattggttgctcaagacgttttcctcttgttgagaaactccacatatgagaaactggacctgaaagtttatggaaccttctttgaaatttacggcggtaaggtgtatgatttactgaactggaaaaagaagctgcaggtgctcgaagatggtaaccagcagatccaggtggtgggccttcaggagaaagaggtctgttgtgtcgaggaagtgctcaacctcgtcgaaattggtaactcctgtcgaacatcgcggcagaccccagtcaacgcccattcctcccgctcacacgcggtgttccaaattatcctgaagagtgggagaatcatgcatggcaagttttcactggtggacctggctggaaatgagcgtggggctgacaccaccaaggcgtcccgcaaacgccagcttgagggggcagagataaataaatcactgctggcacttaaagaatgcatcttggccctgggtcagaacaaacctcacacacctttccgcgcttcaaaactgaccctcgtcctcagagattcctttattggtcagaactcatccacatgcatgatcgccacgatcagcccaggtatgacgtcttgtgaaaatacgctaaatacccttaggtatgcaaaccgcgtcaagaagcttaacgtggatgtccgaccttatcatcgcggtcactaccctatagggcacgaagctccgaggatgctgaaatcccacatcgggaactccgagatgtccctccagcgggatgagttcattaaaattccgtacgtccagagcgaggaacagaaagagattgaagaagtggagactctccccactcttctcggcaaggacacaaccatttcaggaaaagggtcttctcagtggttggaaaatatccaggaacgcgcaggaggtgtccatcacgacatcgatttttgcatcgcacggtctctatcgatcttggagcagaagatcgacgcactcactgaaatccaaaaaaaactgaaacttctcttggccgatctgcatgtgaaatctaaagtcgagtag

SEQ ID NO: 224891 - DNA, 1911 bp, Artificial Sequence
  derived and/or modified sequence
agtgctccgggcgcttcaggctggcttgggtcctgctgctccaaccccaagggccctggagcgctccctgatacctccatcactcaccatggccagccagttctgcctccctgaatccccatgtctctcgcccccgcccttatcccccttggctctggcgccctcttcggccatcagggaccagcgtaccgccacgaaatgggttgcgatgatcccccagaaaaaccaaacagcctcaggggacagcctggatgtgagggtccccagcaaaccttgtctgatgaagcagaaaaagtctccctgcctctgggaaatccagaaactgcaggagcagcgggaaaagcgcaggcggctgcagcaggagatccgagctagacgcgccctcgatgtcaataccagaaaccccaactacgaaatcatgcacatgatcgaagagtatcgcaggcacctggacagcagcaagatctcagtcctggagcccccgcaagaacatcgcatctgcgtctgcgtgaggaagcggcctctcaaccagcgagagacaaccttaaaggaccatgccttcgatgacaaagcctccaacgagttggtgtaccagttcaccgcccagccactggtggagtccatcttccgcaagggcatggccacctgctttgcctatgggcagacgggaagtgggaagacgtacaccatgggtggagacttttcaggaacggcccaagattgttctaagggcatttatgctctggtggcacaggatgtctttctcctgctcagaaactccacatatgagaagctggacctcaaagtctatgggacattttttgagatttatgggggcaaggtgtatgatttgttgaactggaagaagaagctgcaagtccttgaggatggcaatcagcaaatccaagtggtcgggctgcaggagaaagaggtgtgttgtgtggaggaagtgctgaacctggtggaaatagggaatagctgtcggacttccaggcaaacacctgtcaacgctcactcatccaggagccatgcagtgttccagatcatcctgaagtcaggacggataatgcatggcaagttttccctcgttgatttagctgggaatgaaagaggagcagatacaaccaaggccagccggaaaaggcagctggaaggggcagagattaacaagagtcttctagccctcaaagaatgtattctggctttgggtcagaacaagcctcacaccccattcagagccagcaaactcacactggtgctccgggactcctttataggccagaactcctccacttgcatgattgctaccatctctccggggatgacctcttgtgaaaacactctcaacactttaagatatgcaaacagagtaaaaaaattaaatgtagatgtaaggccctaccatcgtggccactatccgattggacatgaggcaccaaggatgttaaaaagtcacatcggaaattcagaaatgtcccttcagagggatgaatttattaaaataccttatgtacagagtgaggagcagaaagagattgaagaggttgaaacattacccactctgttagggaaggataccacaatttcagggaagggatctagccaatggctggaaaacatccaggagagagctggtggagtacaccatgatattgatttttgcattgcccggtctttgtccattttggagcagaaaattgatgctctgaccgagatccaaaagaaactgaaattattactagctgacctccacgtgaagagcaaggtagagtgaagccaatggcgagagatcaggtccgaaatgctgcattgctgcagtttccaccactcttatacaggaaaactgtccaaattatctaaagatcctcctgagaagcttaaaacatcttaaaatacactgatgggaaacat

SEQ ID NO: 224892 - DNA, 1686 bp, Artificial Sequence
  derived and/or modified sequence
atggccagccaattctgcttgcccgaatcaccctgtttaagtccaccgcctttgagtcctcttgcacttgcacccagctccgcaatcagggatcaacgcactgcgaccaaatgggttgcaatgattccacagaaaaaccagacggcttctggagattccctggacgtgcgagtgccgagcaagccatgcctgatgaaacagaaaaaaagcccgtgcctgtgggaaatccagaagttacaggaacagcgagagaagcgaagaaggctccagcaggagataagagccaggcgggctctggacgtgaacacacgtaaccccaactacgagattatgcacatgattgaagaatatagacggcacttagactcatcaaagatctcagtgctggagccaccacaggagcatcgcatctgtgtttgtgtcagaaagaggcctctaaaccagcgagaaaccactttaaaggatcacgccttcgacgacaaagcctccaatgagttagtttatcagttcactgcacagcctctggttgagtccatattccgtaaaggtatggccacatgttttgcttacggccagaccgggagtgggaaaacttacaccatgggaggcgatttcagcggaacagcacaggattgctctaagggaatctacgccctggtggcccaggacgtgttcctgttgctgcgtaatagcacctacgaaaagctggacctgaaggtgtacggcacctttttcgaaatctatgggggaaaagtgtatgatctcctaaattggaagaaaaaactgcaggtgctcgaagacggaaatcagcagattcaggtcgtgggcctgcaagagaaagaagtctgttgcgtcgaggaggtcctgaacctcgtggagatcggaaactcttgcagaactagccggcagactccagtgaatgctcattccagcagaagtcacgccgtttttcagatcatactcaagagcggacgcattatgcatgggaaattttcattagtggatctcgcaggcaacgaaaggggagcggataccaccaaagcctctagaaaacgccaacttgagggagccgaaatcaataagtcactgcttgctcttaaggaatgtatcctggcactcggacagaacaagccacacacacccttccgagctagcaaactgacgttagtgctgcgggactccttcatcgggcagaattccagcacatgcatgattgcgaccatatctccaggcatgaccagttgtgagaacactttgaacactttgaggtatgccaatcgcgtgaaaaaactgaacgtagatgtccgcccatatcacaggggtcattaccccatcggtcatgaggcaccgaggatgctcaaatcccacatcggaaacagcgagatgtctttacagcgcgatgagttcataaaaattccctacgtacaatccgaggaacagaaggaaatcgaggaggtggagaccctccccactctgttgggcaaggacaccaccatctcagggaagggcagctcacagtggctcgaaaacattcaggaaagagctggaggagtccatcacgatatcgacttttgcattgccaggagtctctccattctcgagcagaaaatagatgctctcaccgaaatccagaaaaaacttaaactcctcctagcagatctccacgtcaaatctaaggtcgaatag

SEQ ID NO: 224893 - DNA, 2335 bp, Artificial Sequence
  derived and/or modified sequence
gtagtggccccagtccgggccccggcgcgctaggctcacaaaggcaggcacagactgcaaccctgctcagtgctccgggcgcttcaggctggcttgggtcctgctgctccaaccccaagggccctggagcgctccctgatacctccatcactcaccatggccagccagttctgcctccctgaatccccatgtctctcgcccctgaaacccttgaagccacatttcggagacatccaagagggcatctacgtggcgatccagcgcagtgacaagcggatccacctcgctgtggtcacggagatcaacagagaaaactattgggtcacggtagagtgggtggagaaagcagtcaaaaaaggcaagaagattgacctggagaccatactcctgctgaatccagctctggactctgctgaacaccccatgccgcccccgcccttatcccccttggctctggcgccctcttcggccatcagggaccagcgtaccgccacgaaatgggttgcgatgatcccccagaaaaaccaaacagcctcaggggacagcctggatgtgagggtccccagcaaaccttgtctgatgaagcagaaaaagtctccctgcctctgggaaatccagaaactgcaggagcagcgggaaaagcgcaggcggctgcagcaggagatccgagctagacgcgccctcgatgtcaataccagaaaccccaactacgaaatcatgcacatgatcgaagagtatcgcaggcacctggacagcagcaagatctcagtcctggagcccccgcaagaacatcgcatctgcgtctgcgtgaggaagcggcctctcaaccagcgagagacaaccttaaaggacctggatatcatcaccgtcccctcggacaatgtggttatggtgcatgagtccaagcaaaaggtggacctcactcgctacctgcagaaccagaccttctgcttcgaccatgccttcgatgacaaagcctccaacgagttggtgtaccagttcaccgcccagccactggtggagtccatcttccgcaagggcatggccacctgctttgcctatgggcagacgggaagtgggaagacgtacaccatgggtggagacttttcaggaacggcccaagattgttctaagggcatttatgctctggtggcacaggatgtctttctcctgctcagaaactccacatatgagaagctggacctcaaagtctatgggacattttttgagatttatgggggcaaggtgtatgatttgttgaactggaagaagaagctgcaagtccttgaggatggcaatcagcaaatccaagtggtcgggctgcaggagaaagaggtgtgttgtgtggaggaagtgctgaacctggtggaaatagggaatagctgtcggacttccaggcaaacacctgtcaacgctcactcatccaggagccatgcagtgttccagatcatcctgaagtcaggacggataatgcatggcaagttttccctcgttgatttagctgggaatgaaagaggagcagatacaaccaaggccagccggaaaaggcagctggaaggggcagagattaacaagagtcttctagccctcaaagaatgtattctggctttgggtcagaacaagcctcacaccccattcagagccagcaaactcacactggtgctccgggactcctttataggccagaactcctccacttgcatgattgctaccatctctccggggatgacctcttgtgaaaacactctcaacactttaagatatgcaaacagagtaaaaaaattaaatgtagatgtaaggccctaccatcgtggccactatccgattggacatgaggcaccaaggatgttaaaaagtcacatcggaaattcagaaatgtcccttcagagggatgaatttattaaaataccttatgtacagagtgaggagcagaaagagattgaagaggttgaaacattacccactctgttagggaaggataccacaatttcagggaagggatctagccaatggctggaaaacatccaggagagagctggtggagtacaccatgatattgatttttgcattgcccggtctttgtccattttggagcagaaaattgatgctctgaccgagatccaaaagaaactgaaattattactagctgacctccacgtgaagagcaaggtagagtgaagccaatggcgagagatcaggtccgaaatgctgcattgctgcagtttccaccactcttatacaggaaaactgtccaaattatctaaagatcctcctgagaagcttaaaacatcttaaaatacactgatgggaaacatgctctttcttctgcctctgt

SEQ ID NO: 224894 - DNA, 2022 bp, Artificial Sequence
  derived and/or modified sequence
atggccagccagttctgcctgcccgagagcccctgcctgagccccctgaagcccctgaagccccacttcggcgacatccaggagggcatctacgtggccatccagagaagcgacaagagaatccacctggccgtggtgaccgagatcaacagagagaactactgggtgaccgtggagtgggtggagaaggccgtgaagaagggcaagaagatcgacctggagaccatcctgctgctgaaccccgccctggacagcgccgagcaccccatgccccccccccccctgagccccctggccctggcccccagcagcgccatcagagaccagagaaccgccaccaagtgggtggccatgatcccccagaagaaccagaccgccagcggcgacagcctggacgtgagagtgcccagcaagccctgcctgatgaagcagaagaagagcccctgcctgtgggagatccagaagctgcaggagcagagagagaagagaagaagactgcagcaggagatcagagccagaagagccctggacgtgaacaccagaaaccccaactacgagatcatgcacatgatcgaggagtacagaagacacctggacagcagcaagatcagcgtgctggagcccccccaggagcacagaatctgcgtgtgcgtgagaaagagacccctgaaccagagagagaccaccctgaaggacctggacatcatcaccgtgcccagcgacaacgtggtgatggtgcacgagagcaagcagaaggtggacctgaccagatacctgcagaaccagaccttctgcttcgaccacgccttcgacgacaaggccagcaacgagctggtgtaccagttcaccgcccagcccctggtggagagcatcttcagaaagggcatggccacctgcttcgcctacggccagaccggcagcggcaagacctacaccatgggcggcgacttcagcggcaccgcccaggactgcagcaagggcatctacgccctggtggcccaggacgtgttcctgctgctgagaaacagcacctacgagaagctggacctgaaggtgtacggcaccttcttcgagatctacggcggcaaggtgtacgacctgctgaactggaagaagaagctgcaggtgctggaggacggcaaccagcagatccaggtggtgggcctgcaggagaaggaggtgtgctgcgtggaggaggtgctgaacctggtggagatcggcaacagctgcagaaccagcagacagacccccgtgaacgcccacagcagcagaagccacgccgtgttccagatcatcctgaagagcggcagaatcatgcacggcaagttcagcctggtggacctggccggcaacgagagaggcgccgacaccaccaaggccagcagaaagagacagctggagggcgccgagatcaacaagagcctgctggccctgaaggagtgcatcctggccctgggccagaacaagccccacacccccttcagagccagcaagctgaccctggtgctgagagacagcttcatcggccagaacagcagcacctgcatgatcgccaccatcagccccggcatgaccagctgcgagaacaccctgaacaccctgagatacgccaacagagtgaagaagctgaacgtggacgtgagaccctaccacagaggccactaccccatcggccacgaggcccccagaatgctgaagagccacatcggcaacagcgagatgagcctgcagagagacgagttcatcaagatcccctacgtgcagagcgaggagcagaaggagatcgaggaggtggagaccctgcccaccctgctgggcaaggacaccaccatcagcggcaagggcagcagccagtggctggagaacatccaggagagagccggcggcgtgcaccacgacatcgacttctgcatcgccagaagcctgagcatcctggagcagaagatcgacgccctgaccgagatccagaagaagctgaagctgctgctggccgacctgcacgtgaagagcaaggtggagtag

SEQ ID NO: 224895 - protein, 195 aa, Artificial Sequence
  derived and/or modified sequence
MKLASGFLVLWLSLGGGLAQSDTSPDTEESYSDWGLRHLRGSFESVNSYFDSFLELLGGKNGVCQYRCRYGKAPMPRPGYKPQEPNGCGSYFLGLKVPESMDLGIPAMTKCCNQLDVCYDTCGANKYRCDAKFRWCLHSICSDLKRSLGFVSKVEAACDSLVDTVFNTVWTLGCRPFMNSQRAACICAEEEKEEL

SEQ ID NO: 224896 - DNA, 588 bp, Artificial Sequence
  derived and/or modified sequence
atgaagctggccagcggcttcctggtgctgtggctgagcctgggcggcggcctggcccagagcgacaccagccccgacaccgaggagagctacagcgactggggcctgagacacctgagaggcagcttcgagagcgtgaacagctacttcgacagcttcctggagctgctgggcggcaagaacggcgtgtgccagtacagatgcagatacggcaaggcccccatgcccagacccggctacaagccccaggagcccaacggctgcggcagctacttcctgggcctgaaggtgcccgagagcatggacctgggcatccccgccatgaccaagtgctgcaaccagctggacgtgtgctacgacacctgcggcgccaacaagtacagatgcgacgccaagttcagatggtgcctgcacagcatctgcagcgacctgaagagaagcctgggcttcgtgagcaaggtggaggccgcctgcgacagcctggtggacaccgtgttcaacaccgtgtggaccctgggctgcagacccttcatgaacagccagagagccgcctgcatctgcgccgaggaggagaaggaggagctgtag

SEQ ID NO: 224897 - DNA, 588 bp, Artificial Sequence
  derived and/or modified sequence
atgaaactggcttcaggtttcctcgtgctgtggctaagcctcggaggtgggttggcacagtctgataccagccccgatactgaggagtcgtactcggattggggcctccgccaccttagagggagtttcgaatctgttaatagctattttgacagctttctggagctgctcggtggaaagaatggcgtctgccagtacaggtgtcgctacggcaaggctcctatgcctcgccccggttacaaaccccaggagcccaacggatgcggatcttattttctcggtctgaaggtacctgagtctatggacttgggcatcccggccatgactaagtgttgcaatcagcttgacgtgtgttacgacacatgcggagcaaacaagtaccgttgtgacgccaagtttcggtggtgtcttcattcaatctgttcagatctgaagagatccctcggatttgtgagtaaggttgaggccgcatgcgactccctggtggacacggtgtttaataccgtgtggactttggggtgtaggcccttcatgaatagtcagagagccgcctgcatttgcgctgaggaggagaaagaggagttgtag

SEQ ID NO: 224898 - DNA, 588 bp, Artificial Sequence
  derived and/or modified sequence
atgaagctggccagcggcttcctggtgctgtggctgagcctgggcggcggcctggcccagagcgacaccagcccagacacagaggagagctacagcgactggggcctgcggcacctgcggggcagctttgaatctgtgaacagctactttgacagcttcctggagctgctgggcggcaagaatggagtgtgccagtaccgctgccgctatggcaaggcccccatgccccggcccggctacaagccccaggagcccaacggctgcggcagctacttcctgggcctgaaggtgcctgagagcatggacctgggcatcccagccatgaccaagtgctgcaaccagctggatgtgtgctatgacacctgtggggccaacaagtaccgctgtgatgccaagttccgctggtgcctgcacagcatctgcagcgacctgaagaggagcctgggctttgtgtccaaggtggaggccgcctgtgacagcctggtggacaccgtcttcaacacagtgtggaccctgggctgccggcccttcatgaacagccagagagctgcctgcatctgtgccgaggaggagaaggaggagctgtag

SEQ ID NO: 224899 - DNA, 588 bp, Artificial Sequence
  derived and/or modified sequence
atgaagctggccagcggcttcctggtgctgtggctgagcctgggcggaggcctggctcagagcgacacaagtcccgacaccgaggagtcctactccgattggggcttgcgtcacctgagggggagctttgaaagcgtgaatagctactttgacagtttcctggaactgctgggtgggaaaaatggcgtgtgtcagtacagatgtcgctacgggaaggctcccatgccgagacctggttacaagccccaggagcctaacggatgcgggtcttattttctaggccttaaagttcctgagagtatggacctgggcatccctgcaatgacaaagtgttgtaaccagctggatgtttgctacgacacttgcggggctaataagtatagatgtgacgccaagtttcgttggtgtctgcactctatctgttcggatctcaagagatctctgggctttgtatcaaaggtggaggccgcttgtgactctctcgttgacacagttttcaacactgtttggacacttggttgcaggcccttcatgaattcccagagagccgcttgcatctgcgcagaggaagaaaaggaagaactgtag

SEQ ID NO: 224900 - DNA, 588 bp, Artificial Sequence
  derived and/or modified sequence
atgaagcttgccagcggtttcctagtgctgtggctgtccctgggcggtggattggcccaaagcgatacttctccagatacagaggagagttactccgattggggcttgaggcatcttcggggatcattcgaaagtgtgaactcctatttcgacagcttcctagagctgctgggcggaaaaaacggagtgtgccagtacagatgccggtacggcaaagcgcctatgcctcgccctggctacaagccacaggaaccaaatggctgcgggtcctattttctgggcctgaaggtgcctgagtccatggaccttggtatcccagctatgacaaaatgctgcaatcagctggatgtgtgctatgacacgtgtggagccaacaagtaccggtgtgatgccaaattccgctggtgtctccactccatctgctctgatctcaaaagatctcttggatttgtttcgaaagtagaggccgcatgtgactcgctcgtggatacagtgttcaatactgtctggactctgggttgcaggcccttcatgaacagccagagagctgcttgtatttgtgccgaggaagagaaggaggagctgtag

SEQ ID NO: 224901 - DNA, 1128 bp, Artificial Sequence
  derived and/or modified sequence
cctgcctgacatctgggtagggggtttgtccctggaattctgggacactggctggggtttgaggagagaagccagtacctacctggctgcaggatgaagctggccagtggcttcttggttttgtggctcagccttgggggtggcctggctcagagcgacacgagccctgacacggaggagtcctattcagactggggccttcggcacctccggggaagctttgaatccgtcaatagctacttcgattcttttctggagctgctgggagggaagaatggagtctgtcagtacaggtgccgatatggaaaggcaccaatgcccagacctggctacaagccccaagagcccaatggctgcggctcctatttcctgggtctcaaggtaccagaaagtatggacttgggcattccagcaatgacaaagtgctgcaaccagctggatgtctgttatgacacttgcggtgccaacaaatatcgctgtgatgcaaaattccgatggtgtctccactcgatctgctctgaccttaagcggagtctgggctttgtctccaaagtggaagcagcctgtgattccctggttgacactgtgttcaacaccgtgtggaccttgggctgccgcccctttatgaatagtcagcgggcagcttgcatctgtgcagaggaggagaaggaagagttatgaggaagaagtgattccttcctggttttgagtgacaccacagctgtcagccttcaagatgtcaagtcttcgagtcagcgtgactcattcattcttccaacagtttggacaccacaaagcaggagaaagggaacatttttctacagctggaaagtgagtcctatcctttgaggaaatttgaaaaaagacatggagtggtttgaaagctactcttcatttaagactgctctccccaaccaagacacatttgcctggaaattcagttcttagcttaaagactaaaatgcaagcaaaccctgcaattcctggacctgatagttatattcatgagtgaaattgtggggagtccagccatttgggaggcaatgactttctgctggcccatgtttcagttgccagtaagcttctcacatttaataaagtgtactttttagaacatttggaaagaga

SEQ ID NO: 224902 - protein, 92 aa, Artificial Sequence
  derived and/or modified sequence
MSCQQNQQQCQPPPKCPSPKCPPKSPVQCLPPASSGCAPSSGGCGPSSEGGCFLNHHRRHHRCRRQRPNSCDRGSGQQGGGSGCGHGSGGCC

SEQ ID NO: 224903 - protein, 388 aa, Artificial Sequence
  derived and/or modified sequence
MKTLIAAYSGVLRGERQAEADRSQRSHGGPALSREGSGRWGTGSSILSALQDLFSVTWLNRSKVEKQLQVISVLQWVLSFLVLGVACSAILMYIFCTDCWLIAVLYFTWLVFDWNTPKKGGRRSQWVRNWAVWRYFRDYFPIQLVKTHNLLTTRNYIFGYHPHGIMGLGAFCNFSTEATEVSKKFPGIRPYLATLAGNFRMPVLREYLMSGGICPVSRDTIDYLLSKNGSGNAIIIVVGGAAESLSSMPGKNAVTLRNRKGFVKLALRHGADLVPIYSFGENEVYKQVIFEEGSWGRWVQKKFQKYIGFAPCIFHGRGLFSSDTWGLVPYSKPITTVVGEPITIPKLEHPTQQDIDLYHTMYMEALVKLFDKHKTKFGLPETEVLEVN

SEQ ID NO: 224904 - DNA, 1167 bp, Artificial Sequence
  derived and/or modified sequence
atgaagaccctgatcgccgcctacagcggcgtgctgagaggcgagagacaggccgaggccgacagaagccagagaagccacggcggccccgccctgagcagagagggcagcggcagatggggcaccggcagcagcatcctgagcgccctgcaggacctgttcagcgtgacctggctgaacagaagcaaggtggagaagcagctgcaggtgatcagcgtgctgcagtgggtgctgagcttcctggtgctgggcgtggcctgcagcgccatcctgatgtacatcttctgcaccgactgctggctgatcgccgtgctgtacttcacctggctggtgttcgactggaacacccccaagaagggcggcagaagaagccagtgggtgagaaactgggccgtgtggagatacttcagagactacttccccatccagctggtgaagacccacaacctgctgaccaccagaaactacatcttcggctaccacccccacggcatcatgggcctgggcgccttctgcaacttcagcaccgaggccaccgaggtgagcaagaagttccccggcatcagaccctacctggccaccctggccggcaacttcagaatgcccgtgctgagagagtacctgatgagcggcggcatctgccccgtgagcagagacaccatcgactacctgctgagcaagaacggcagcggcaacgccatcatcatcgtggtgggcggcgccgccgagagcctgagcagcatgcccggcaagaacgccgtgaccctgagaaacagaaagggcttcgtgaagctggccctgagacacggcgccgacctggtgcccatctacagcttcggcgagaacgaggtgtacaagcaggtgatcttcgaggagggcagctggggcagatgggtgcagaagaagttccagaagtacatcggcttcgccccctgcatcttccacggcagaggcctgttcagcagcgacacctggggcctggtgccctacagcaagcccatcaccaccgtggtgggcgagcccatcaccatccccaagctggagcaccccacccagcaggacatcgacctgtaccacaccatgtacatggaggccctggtgaagctgttcgacaagcacaagaccaagttcggcctgcccgagaccgaggtgctggaggtgaactag

SEQ ID NO: 224905 - DNA, 1167 bp, Artificial Sequence
  derived and/or modified sequence
atgaagaccctgattgctgcatattctggcgtactgaggggagaaaggcaggccgaagcagatcgtagtcagcgatctcatggagggccggcgcttagccgggaaggctccggacgatggggaacaggcagctccatactgtctgctctccaggacctttttagcgtgacttggctgaatcgcagtaaagttgagaaacagcttcaggtgatctccgtgctacagtgggtgttatcctttctggttcttggtgtggcatgttccgctattctgatgtatatcttttgtaccgactgttggctgatcgccgtgctgtattttacctggctcgtgtttgactggaacaccccaaagaaaggcggacggagaagtcagtgggtacgaaactgggcggtatggaggtacttccgcgattattttcccatccaactcgtaaagacacataatttattgactactcgtaattacatcttcggctaccatcctcatggaattatgggactaggagctttttgcaatttctccactgaggcgacggaggtgagtaaaaagttcccaggcatcaggccatatctagctacactcgcgggcaatttccgcatgcccgttctgcgagaatatctgatgtctggcggcatctgtcccgtcagccgggataccatcgactacttactctcaaagaacgggtcggggaacgcgattatcatcgtagtgggcggagccgctgagagcctctctagcatgccaggtaagaacgcggttaccttgagaaaccgaaaaggattcgtgaagctcgctctgaggcatggtgccgaccttgtacccatctactcttttggcgaaaatgaggtctacaagcaggtgattttcgaagagggcagctggggtcgctgggtgcagaagaaatttcaaaaatatatcggatttgcaccatgcatctttcacggacgcgggctgttttcttctgatacatggggactcgtgccttatagtaagccaatcaccaccgtggtgggggagcccatcaccatccctaaactggagcatccaacgcagcaggacatcgatttatatcatacgatgtatatggaggctcttgtcaagctcttcgataagcacaagacaaagttcggcctcccggagacggaagtcctggaggtcaactag

SEQ ID NO: 224906 - DNA, 1167 bp, Artificial Sequence
  derived and/or modified sequence
atgaagaccctgattgctgcctacagcggcgtgctgcggggggagcggcaggccgaggccgacaggagccagaggagccatggaggccctgccctgagccgggagggcagcggccgctggggcaccggcagcagcatcctgagcgccctgcaggacctcttctctgtgacctggctgaacagaagcaaggtggagaagcagctgcaggtgatctctgtgctgcagtgggtgctgtccttcctggtgctgggcgtggcctgcagcgccatcctgatgtacatcttctgcacagactgctggctgattgctgtgctgtacttcacctggctggtgtttgactggaacacccccaagaagggcggccgccgcagccagtgggtgaggaactgggccgtgtggagatacttccgggactacttccccatccagctggtgaagacccacaacctgctgaccaccaggaactacatcttcggctaccacccccacggcatcatgggcctgggcgccttctgcaacttcagcacagaggccacagaggtgtccaagaagtttcctggcatccggccctacctggccaccctggccggcaacttcaggatgcctgtgctgcgggagtacctgatgtctgggggcatctgccctgtgtcccgggacaccatcgactacctgctgagcaagaatggcagcggaaatgccatcatcatcgtggtgggcggcgctgctgagagcctgagctccatgcctgggaagaatgctgtgaccctgaggaacaggaagggctttgtgaagctggccctgcggcatggagctgacctggtgcccatctacagctttggagaaaatgaggtgtacaagcaggtgatctttgaggagggctcctggggccgctgggtgcagaagaagttccagaagtacatcggctttgccccctgcatcttccacggccggggcctcttcagcagtgacacctggggcctggtgccctacagcaagcccatcaccaccgtggtgggggagcccatcaccatccccaagctggagcaccccacccagcaggacatcgacctgtaccacaccatgtacatggaggccctggtgaagctgtttgacaagcacaagaccaagtttggcctgcctgagacagaggtgctggaggtgaactag

SEQ ID NO: 224907 - DNA, 1167 bp, Artificial Sequence
  derived and/or modified sequence
atgaagaccctgatcgccgcctacagcggcgtgctgcggggcgagcggcaggccgaggctgatagatctcagcgatctcacggaggcccagcactgagccgggaaggctcaggtcgctgggggactgggagttcaatcctctcggcactgcaggatctcttctccgttacgtggctgaataggtccaaggtcgagaagcaactccaagtgatctctgtgctccaatgggtactgtcctttcttgttctgggcgtagcttgttccgcgatcctgatgtacatcttctgcacagattgctggctaattgcagttctctacttcacatggctagtgttcgactggaatacccctaagaaaggcggccgaaggtctcagtgggtgaggaattgggctgtgtggaggtatttccgagactactttccaatccaactggtaaaaactcacaacctactcacaacacgcaattatatattcggataccatccccacggcatcatgggtctaggcgccttctgcaactttagtactgaagccacagaagtctcgaaaaaatttccaggaatccgtccttacctggcaactctggcgggaaactttaggatgcctgttctccgggagtatttgatgagcggtggtatttgccctgtgtccagggacactatcgactacttgcttagcaaaaacggaagcgggaatgcaatcatcatcgtggttggaggagccgccgagtccctgagtagcatgcctggaaaaaacgccgttaccttgcgcaatagaaaaggattcgtcaaactggctcttaggcacggagctgacctcgtgcccatctacagctttggcgaaaatgaggtgtacaaacaggtcatttttgaagagggatcctggggtcggtgggtgcagaaaaaattccaaaaatatatcggttttgccccttgtatttttcatgggcggggcttgttcagctcagatacctggggactcgtcccgtattctaagcctataacaacagtagtgggcgaaccgatcacaatcccaaagcttgagcatcccacccagcaagacatagatctgtatcacactatgtatatggaggctctggttaagctgttcgataagcataagacaaaattcggtctgcccgaaactgaggtcctggaagtgaactag

SEQ ID NO: 224908 - DNA, 1167 bp, Artificial Sequence
  derived and/or modified sequence
atgaaaacccttatcgctgcttactctggggttctgaggggcgagcggcaggcggaagcagacaggtcacagcgcagccatggaggacccgctttaagtcgggagggatcaggccgatggggcacaggctctagcatcctgtctgccctgcaggacctctttagtgtgacctggctgaaccgcagtaaagttgagaaacagctacaggtgatctccgtcttacagtgggtcttaagcttcctcgtgttgggggtcgcgtgctcggcaattttgatgtacatcttctgtactgactgttggctgattgcagtgctctatttcacgtggcttgtctttgactggaacacccccaaaaagggaggccgtaggagccagtgggtgagaaattgggcagtgtggcggtattttcgcgactatttccccatccaattagtgaaaacgcacaacttgctaacaacccggaactacatattcggataccatcctcatggcatcatggggttgggagccttttgcaacttcagtaccgaagccaccgaagtctcaaagaaatttcctggcatccgcccttacctggccacacttgcaggaaactttagaatgcctgtgttacgggagtatctgatgagcggaggtatctgtccggtgagcagagatactattgattatctgctgtccaaaaacggtagcggaaacgctattataattgttgtggggggagcagccgaatccttgtcttccatgcccggaaaaaatgctgtcactctgcgaaacagaaagggtttcgtgaaattggccctgcgtcacggggcagatctggtgcccatttactcttttggcgagaatgaagtctacaaacaggtgatatttgaggagggatcatggggacgctgggtgcagaagaagtttcagaagtatatcggcttcgctccatgtatcttccacgggcgtggactcttctcgtccgacacatggggtttagtaccctacagcaagcccatcacaacggtggtgggggagcccatcacaattccaaaactggagcaccccacacaacaggatatcgatctgtatcacaccatgtacatggaggcactcgtgaagctgttcgacaagcacaaaactaagttcgggctgcccgagacagaagttctggaggttaactag

SEQ ID NO: 224909 - DNA, 2453 bp, Artificial Sequence
  derived and/or modified sequence
ctgccccgttgtgaggtgataaagtgttgcgctccgggacgccagcgccgcggctgccgcctctgctggggtctaggctgtttctctcgcgccaccactggccgccggccgcagctccaggtgtcctagccgcccagcctcgacgccgtcccgggacccctgtgctctgcgcgaagccctggccccgggggccggggcatgggccaggggcgcggggtgaagcggcttcccgcggggccgtgactgggcgggcttcagccatgaagaccctcatagccgcctactccggggtcctgcgcggcgagcgtcaggccgaggctgaccggagccagcgctctcacggaggacctgcgctgtcgcgcgaggggtctgggagatggggcactggatccagcatcctctccgccctccaggacctcttctctgtcacctggctcaataggtccaaggtggaaaagcagctacaggtcatctcagtgctccagtgggtcctgtccttccttgtactgggagtggcctgcagtgccatcctcatgtacatattctgcactgattgctggctcatcgctgtgctctacttcacttggctggtgtttgactggaacacacccaagaaaggtggcaggaggtcacagtgggtccgaaactgggctgtgtggcgctactttcgagactactttcccatccagctggtgaagacacacaacctgctgaccaccaggaactatatctttggataccacccccatggtatcatgggcctgggtgccttctgcaacttcagcacagaggccacagaagtgagcaagaagttcccaggcatacggccttacctggctacactggcaggcaacttccgaatgcctgtgttgagggagtacctgatgtctggaggtatctgccctgtcagccgggacaccatagactatttgctttcaaagaatgggagtggcaatgctatcatcatcgtggtcgggggtgcggctgagtctctgagctccatgcctggcaagaatgcagtcaccctgcggaaccgcaagggctttgtgaaactggccctgcgtcatggagctgacctggttcccatctactcctttggagagaatgaagtgtacaagcaggtgatcttcgaggagggctcctggggccgatgggtccagaagaagttccagaaatacattggtttcgccccatgcatcttccatggtcgaggcctcttctcctccgacacctgggggctggtgccctactccaagcccatcaccactgttgtgggagagcccatcaccatccccaagctggagcacccaacccagcaagacatcgacctgtaccacaccatgtacatggaggccctggtgaagctcttcgacaagcacaagaccaagttcggcctcccggagactgaggtcctggaggtgaactgagccagccttcggggccaattccctggaggaaccagctgcaaatcacttttttgctctgtaaatttggaagtgtcatgggtgtctgtgggttatttaaaagaaattataacaattttgctaaaccattacaatgttaggtcttttttaagaaggaaaaagtcagtatttcaagttctttcacttccagcttgccctgttctaggtggtggctaaatctgggcctaatctgggtggctcagctaacctctcttcttcccttcctgaagtgacaaaggaaactcagtcttcttggggaagaaggattgccattagtgacttggaccagttagatgattcactttttgcccctagggatgagaggcgaaagccacttctcatacaagcccctttattgccactaccccacgctcgtctagtcctgaaactgcaggaccagtttctctgccaaggggaggagttggagagcacagttgccccgttgtgtgagggcagtagtaggcatctggaatgctccagtttgatctcccttctgccacccctacctcacccctagtcactcatatcggagcctggactggcctccaggatgaggatgggggtggcaatgacaccctgcaggggaaaggactgccccccatgcaccattgcagggaggatgccgccaccatgagctaggtggagtaactggtttttcttgggtggctgatgacatggatgcagcacagactcagccttggcctggagcacatgcttactggtggcctcagtttaccttccccagatcctagattctggatgtgaggaagagatccctcttcagaaggggcctggccttctgagcagcagattagttccaaagcaggtggcccccgaacccaagcctcacttttctgtgccttcctgagggggttgggccggggaggaaacccaaccctctcctgtgtgttctgttatctcttgatgagatcattgcaccatgtcagacttttgtatatgccttgaaaataaatgaaagtgagaatcctc

SEQ ID NO: 224910 - protein, 206 aa, Artificial Sequence
  derived and/or modified sequence
MGAEWELGAEAGGSLLLCAALLAAGCALGLRLGRGQGAADRGALIWLCYDALVHFALEGPFVYLSLVGNVANSDGLIASLWKEYGKADARWVYFDPTIVSVEILTVALDGSLALFLIYAIVKEKYYRHFLQITLCVCELYGCWMTFLPEWLTRSPNLNTSNWLYCWLYLFFFNGVWVLIPGLLLWQSWLELKKMHQKETSSVKKFQ

SEQ ID NO: 224911 - protein, 86 aa, Artificial Sequence
  derived and/or modified sequence
MGAEWELGAEAGGSLLLCAALLAAGCALGLRLGRGQGAADRGALIWLCYDALVHFALERVGKTTNQESAGVLGSTEWNFKNTDKLL

SEQ ID NO: 224912 - DNA, 621 bp, Artificial Sequence
  derived and/or modified sequence
atgggcgccgagtgggagctgggcgccgaggccggcggcagcctgctgctgtgcgccgccctgctggccgccggctgcgccctgggcctgagactgggcagaggccagggcgccgccgacagaggcgccctgatctggctgtgctacgacgccctggtgcacttcgccctggagggccccttcgtgtacctgagcctggtgggcaacgtggccaacagcgacggcctgatcgccagcctgtggaaggagtacggcaaggccgacgccagatgggtgtacttcgaccccaccatcgtgagcgtggagatcctgaccgtggccctggacggcagcctggccctgttcctgatctacgccatcgtgaaggagaagtactacagacacttcctgcagatcaccctgtgcgtgtgcgagctgtacggctgctggatgaccttcctgcccgagtggctgaccagaagccccaacctgaacaccagcaactggctgtactgctggctgtacctgttcttcttcaacggcgtgtgggtgctgatccccggcctgctgctgtggcagagctggctggagctgaagaagatgcaccagaaggagaccagcagcgtgaagaagttccagtag

SEQ ID NO: 224913 - DNA, 914 bp, Artificial Sequence
  derived and/or modified sequence
tgctttcctctgccgcatggtcctgggccgttggcgtcggaagcctgaagcatgggcgctgagtgggagctgggggccgaggctggcggttcgctgctgctgtgcgccgcgctgctggcggcgggctgcgccctgggcctgcgcctgggccgcgggcagggggcggcggaccgcggggcgctcatctggctctgctacgacgcgctggtgcacttcgcgctggaaggcccttttgtctacttgtctttagtaggaaacgttgcaaattccgatggcttgattgcttctttatggaaagaatatggcaaagctgatgcaagatgggtttattttgatccaaccattgtgtctgtggaaattctgaccgtcgccctggatgggtctctggcattgttcctcatttatgccatagtcaaagaaaaatattaccggcatttcctgcagatcaccctgtgcgtgtgcgagctgtatggctgctggatgaccttcctcccagagtggctcaccagaagccccaacctcaacaccagcaactggctgtactgttggctttacctgtttttttttaacggtgtgtgggttctgatcccaggactgctactgtggcagtcatggctagaactcaagaaaatgcatcagaaagaaaccagttcagtgaagaagtttcagtgaactttcaaaaccataaacaccattatctaacttcatgaaccagaatgaatcaaatctttttgtttggccaaaatgtaatacattccagtctacactttgtttttgtattgttgctcctgaacaacctgtttcaaattggttttaaggcgaccagttttcgttgtattgttgttcaattaaatggtgatatagggaaaagagaacaaatttgaatttgtaataataaaatgtttaattataca

SEQ ID NO: 224914 - DNA, 1042 bp, Artificial Sequence
  derived and/or modified sequence
cgtttctctccctgctttcctctgccgcatggtcctgggccgttggcgtcggaagcctgaagcatgggcgctgagtgggagctgggggccgaggctggcggttcgctgctgctgtgcgccgcgctgctggcggcgggctgcgccctgggcctgcgcctgggccgcgggcagggggcggcggaccgcggggcgctcatctggctctgctacgacgcgctggtgcacttcgcgctggagagagtgggaaagaccacgaaccaggagagtgctggggtcctgggatccacagaatggaatttcaagaacactgataaattgctgtagcaccattaaaaaaaaagaaagaaaataaaaggaaggcccttttgtctacttgtctttagtaggaaacgttgcaaattccgatggcttgattgcttctttatggaaagaatatggcaaagctgatgcaagatgggtttattttgatccaaccattgtgtctgtggaaattctgaccgtcgccctggatgggtctctggcattgttcctcatttatgccatagtcaaagaaaaatattaccggcatttcctgcagatcaccctgtgcgtgtgcgagctgtatggctgctggatgaccttcctcccagagtggctcaccagaagccccaacctcaacaccagcaactggctgtactgttggctttacctgtttttttttaacggtgtgtgggttctgatcccaggactgctactgtggcagtcatggctagaactcaagaaaatgcatcagaaagaaaccagttcagtgaagaagtttcagtgaactttcaaaaccataaacaccattatctaacttcatgaaccagaatgaatcaaatctttttgtttggccaaaatgtaatacattccagtctacactttgtttttgtattgttgctcctgaacaacctgtttcaaattggttttaaggcgaccagttttcgttgtattgttgttcaattaaatggtgatatagggaaaagagaacaaatttgaatttgtaataataaaatgtttaatt

SEQ ID NO: 224915 - DNA, 621 bp, Artificial Sequence
  derived and/or modified sequence
atgggtgccgaatgggagctgggcgctgaggcaggaggatccctcctcctgtgcgccgctttacttgccgctggttgcgccttgggtctaaggctaggccgcgggcagggagcagcagatagaggcgctttgatatggctctgctatgacgccctggtgcatttcgccctggagggcccgttcgtgtacctgagtctcgtcggcaatgttgcaaatagtgatggactcatagccagcctgtggaaagagtacgggaaggccgatgctaggtgggtgtacttcgatcccacgatagtcagtgtcgagatcctcacagttgctctagatggaagtctggctttgtttcttatttacgctattgttaaagagaaatattaccgccattttctgcaaatcactctctgcgtgtgcgagctctacgggtgctggatgacattcctgccagaatggctgacccgcagccccaacctgaacacttccaattggctgtactgctggctgtatctgttttttttcaatggggtttgggtgcttatcccagggctgttactctggcagtcttggctggagctgaaaaagatgcatcagaaggaaacctcctccgtcaaaaaattccagtag

SEQ ID NO: 224916 - DNA, 621 bp, Artificial Sequence
  derived and/or modified sequence
atgggcgctgagtgggagctgggcgctgaggccggcggcagcctgctgctgtgtgccgccctgctggccgccggctgtgccctgggcctgcggctgggccggggccagggcgctgctgacagaggagccctgatctggctgtgctatgatgccctggtgcactttgccctggagggcccctttgtgtacctgagcctggtgggcaatgtggccaacagtgatggcctgattgccagcctgtggaaggagtatggcaaggcagatgcccgctgggtgtactttgaccccaccatcgtgtctgtggagatcctgactgtggccctggatggcagcctggccctcttcctgatctatgccatcgtgaaggagaagtactaccgccacttcctgcagatcaccctgtgtgtgtgtgagctgtatggctgctggatgaccttcctgcctgagtggctgaccaggagccccaacctgaacaccagcaactggctgtactgctggctgtacctgttcttcttcaatggagtgtgggtgctgatccctggcctgctgctgtggcagagctggctggagctgaagaagatgcaccagaaggagaccagctctgtgaagaagttccagtag

SEQ ID NO: 224917 - DNA, 621 bp, Artificial Sequence
  derived and/or modified sequence
atgggcgccgagtgggagctgggcgccgaggccggcggcagcctgctgctctgcgctgcattacttgcagcaggctgcgccctgggcctcagactgggacgcgggcagggcgccgcggacaggggagcccttatctggttatgttacgatgcgctggtacattttgccttggagggccccttcgtttatttgagtctcgtcggcaatgttgctaacagtgacggcctcatcgcatctctgtggaaagaatatggcaaagccgacgcacgatgggtgtatttcgatcccaccatcgtctctgtggaaattttaacggttgctctggatggcagcctggcccttttccttatctatgcgattgtcaaggaaaagtactatcgtcattttctgcagattaccctgtgtgtatgcgaattatatggctgctggatgacgttcctcccagagtggttaacgcgctcccccaatcttaacacaagtaattggctgtactgctggctgtatctctttttcttcaatggtgtatgggtgcttatcccgggtttgttgctgtggcaaagctggcttgaattgaaaaaaatgcaccagaaggagacatcttccgttaagaaattccaatag

SEQ ID NO: 224918 - DNA, 621 bp, Artificial Sequence
  derived and/or modified sequence
atgggcgcagagtgggaacttggcgcagaagccggaggatcactgctgctctgcgcggctctgctggctgccggttgtgccctgggattaagactggggaggggacaaggggcagctgataggggggcactgatctggctctgttacgatgctctggttcactttgctctggaaggtccgtttgtttatctctctctagtgggaaatgttgcaaatagtgacgggttgatagcatctttgtggaaggagtatggaaaggctgatgccagatgggtgtactttgatcccacaatcgtgagcgtcgagatattaaccgtagctctggacgggagtcttgcactcttcctgatttacgcgattgtgaaggaaaagtactaccggcactttttacagataaccctgtgtgtgtgtgagctctacgggtgttggatgactttcctgcccgagtggttgactcgttctcccaacctcaacacatccaattggttgtactgctggctgtatttatttttcttcaacggcgtttgggtgctgattcccggtcttttactgtggcagtcgtggctggaactgaaaaagatgcatcaaaaggaaacctcctctgtcaagaagttccagtag

SEQ ID NO: 224919 - DNA, 579 bp, Artificial Sequence
  derived and/or modified sequence
ggtcctgggccgttggcgtcggaagcctgaagcatgggcgctgagtgggagctgggggccgaggctggcggttcgctgctgctgtgcgccgcgctgctggcggcgggctgcgccctgggcctgcgcctgggccgcgggcagggggcggcggaccgcggggcgctcatctggctctgctacgacgcgctggtgcacttcgcgctggcatttcctgcagatcaccctgtgcgtgtgcgagctgtatggctgctggatgaccttcctcccagagtggctcaccagaagccccaacctcaacaccagcaactggctgtactgttggctttacctgtttttttttaacggtgtgtgggttctgatcccaggactgctactgtggcagtcatggctagaactcaagaaaatgcatcagaaagaaaccagttcagtgaagaagtttcagtgaactttcaaaaccataaacaccattatctaacttcatgaaccagaatgaatcaaatctttttgtttggccaaaatgtaatacattccagtctacactttgtttttgtattgttgctcctgaacaacctgtttcaa

SEQ ID NO: 224920 - protein, 85 aa, Artificial Sequence
  derived and/or modified sequence
MKITGGLLLLCTVVYFCSSSEAASLSPKKVDCSIYKKYPVVAIPCPITYLPVCGSDYITYGNECHLCTESLKSNGRVQFLHDGSC

SEQ ID NO: 224921 - DNA, 258 bp, Artificial Sequence
  derived and/or modified sequence
atgaaaatcaccggcggtctgctgctgctgtgcacagtcgtatacttttgtagctcctccgaggctgcttccttatctccaaagaaggtggattgctccatctacaagaaatatcccgtggttgcgattccttgtcctatcacatacttgcctgtgtgcggcagcgactacattacgtatggtaacgaatgtcatctttgtactgaatctctcaaaagtaatgggcgagtgcagttcctgcatgacggctcttgttag

SEQ ID NO: 224922 - DNA, 258 bp, Artificial Sequence
  derived and/or modified sequence
atgaaaatcacaggcgggctcctcctgctttgcaccgtcgtgtacttttgcagttcctccgaagctgccagtttaagcccaaagaaagtcgattgtagtatctataaaaaatatccggtagttgccattccctgtcctattacttaccttccagtgtgcggaagcgactacataacttacggaaatgagtgccatttatgcacggaaagtctcaaaagcaatggtcgcgtccagttcctgcacgatgggtcttgttag

SEQ ID NO: 224923 - DNA, 557 bp, Artificial Sequence
  derived and/or modified sequence
atggtcgatgcagctgtagtgacaatctcagagcagcttctacaccacagccatttccagcatgaagatcactgggggtctccttctgctctgtacagtggtctatttctgtagcagctcagaagctgctagtctgtctccaaaaaaagtggactgcagcatttacaagaagtatccagtggtggccatcccctgccccatcacatacctaccagtttgtggttctgactacatcacctatgggaatgaatgtcacttgtgtaccgagagcttgaaaagtaatggaagagttcagtttcttcacgatggaagttgctaaattctccatggacatagagagaaaggaatgatattctcatcatcatcttcatcatcccaggctctgactgagtttctttcagttttactgatgttctgggtgggggacagagccagattcagagtaatcttgactgaatggagaaagtttctgtgctacccctacaaacccatgcctcactgacagaccagcattttttttttaacacgtcaataaaaaaataatctcccagaaagtt

SEQ ID NO: 224924 - DNA, 258 bp, Artificial Sequence
  derived and/or modified sequence
atgaagatcaccggcggcctgctgctgctgtgcaccgtggtgtacttctgcagcagcagcgaggccgccagcctgagccccaagaaggtggactgcagcatctacaagaagtaccccgtggtggccatcccctgccccatcacctacctgcccgtgtgcggcagcgactacatcacctacggcaacgagtgccacctgtgcaccgagagcctgaagagcaacggcagagtgcagttcctgcacgacggcagctgctag

SEQ ID NO: 224925 - DNA, 258 bp, Artificial Sequence
  derived and/or modified sequence
atgaaaattactggcggactcttattgttgtgcacggtggtgtatttctgtagctccagtgaagcggcgtcgctttccccaaaaaaggtagactgcagtatctacaagaagtacccagtagtcgccatcccttgtccaattacctaccttccagtatgtgggagcgactatattacgtacggaaacgaatgtcacctttgcacggagtcacttaaatcaaatggccgcgtgcagttcctccatgacggctcgtgctag

SEQ ID NO: 224926 - DNA, 258 bp, Artificial Sequence
  derived and/or modified sequence
atgaagatcaccggcggcctgctgctgctgtgcaccgtggtgtacttctgcagcagcagcgaggccgccagcctgagccccaagaaggtggactgcagcatctacaagaagtaccctgtggtggccatcccctgccccatcacctacctgcctgtgtgtggcagtgactacatcacctatggaaatgaatgccacctgtgcacagagagcctgaagagcaatggccgggtgcagttcctgcatgatggcagctgctag

SEQ ID NO: 224927 - DNA, 258 bp, Artificial Sequence
  derived and/or modified sequence
atgaagatcaccggcggcctgctgctgctgtgcaccgtggtgtacttctgctccagcagcgaagccgcctccttgtcgcctaagaaggtagattgtagtatctacaagaagtatcccgtcgtggctatcccgtgtccaatcacctacctgcctgtctgtggctcagactacataacctatggtaatgagtgccacctgtgcaccgagagtctgaaatctaacgggagggttcagttcctccacgatggttcctgttag

SEQ ID NO: 224928 - RNA, 258 nt, Artificial Sequence
  derived and/or modified sequence
augaaaaucacaggcgggcuccuccugcuuugcaccgucguguacuuuugcaguuccuccgaagcugccaguuuaagcccaaagaaagucgauuguaguaucuauaaaaaauauccgguaguugccauucccuguccuauuacuuaccuuccagugugcggaagcgacuacauaacuuacggaaaugagugccauuuaugcacggaaagucucaaaagcaauggucgcguccaguuccugcacgaugggucuuguuag

SEQ ID NO: 224929 - protein, 430 aa, Artificial Sequence
  derived and/or modified sequence
MASSAKSAEMPTISKTVNPTPDPHQEYLDPRITIALFEIGSHSPSSWGSLPFLKNSSHQVTEQQTAQKFNNLLKEIKDILKNMAGFEEKITEAKELFEETNITEDVSAHKENIRGLDKINEMLSTNLPVSLAPEKEDNEKKQEMILETNITEDVSAHKENIRGLDKINEMLSTNLPVSLAPEKEDNEKKQQMIMENQNSENTAQVFARDLVNRLEEKKVLNETQQSQEKAKNRLNVQEETMKIRNNMEQLLQEAEHWSKQHTELSKLIKSYQKSQKDISETLGNNGVGFQTQPNNEVSAKHELEEQVKKLSHDTYSLQLMAALLENECQILQQRVEILKELHHQKQGTLQEKPIQINYKQDKKNQKPSEAKKVEMYKQNKQAMKGTFWKKDRSCRSLDVCLNKKACNTQFNIHVARKALRGKMRSASSLR

SEQ ID NO: 224930 - protein, 234 aa, Artificial Sequence
  derived and/or modified sequence
MASSAKSAEMPTISKTVNPTPDPHQEYLDPRITIALFEIGSHSPSSWGSLPFLKNSSHQVTEQQTAQKFNNLLKEIKDILKNMAGFEEKITEAKELFEETNITEDVSAHKENIRGLDKINEMLSTNLPVSLAPEKEDNEKKQEMILETNITEDVSAHKENIRGLDKINEMLSTNLPVSLAPEKEDNEKKQQMIMENQNSENTAQVFARDLVNRLEEKKVLNETQQSQEKAKNRL

SEQ ID NO: 224931 - DNA, 705 bp, Artificial Sequence
  derived and/or modified sequence
atggccagcagcgccaagagcgccgagatgcccaccatcagcaagaccgtgaaccccacccccgacccccaccaggagtacctggaccccagaatcaccatcgccctgttcgagatcggcagccacagccccagcagctggggcagcctgcccttcctgaagaacagcagccaccaggtgaccgagcagcagaccgcccagaagttcaacaacctgctgaaggagatcaaggacatcctgaagaacatggccggcttcgaggagaagatcaccgaggccaaggagctgttcgaggagaccaacatcaccgaggacgtgagcgcccacaaggagaacatcagaggcctggacaagatcaacgagatgctgagcaccaacctgcccgtgagcctggcccccgagaaggaggacaacgagaagaagcaggagatgatcctggagaccaacatcaccgaggacgtgagcgcccacaaggagaacatcagaggcctggacaagatcaacgagatgctgagcaccaacctgcccgtgagcctggcccccgagaaggaggacaacgagaagaagcagcagatgatcatggagaaccagaacagcgagaacaccgcccaggtgttcgccagagacctggtgaacagactggaggagaagaaggtgctgaacgagacccagcagagccaggagaaggccaagaacagactgtag

SEQ ID NO: 224932 - DNA, 1293 bp, Artificial Sequence
  derived and/or modified sequence
atggccagtagcgccaagagtgccgagatgccgaccatctccaagacagtgaatccgactccagatccacaccaagagtatcttgatccccgcatcacaattgccctgttcgaaattggtagtcacagcccgagcagttgggggtctctcccgtttctgaaaaattcaagccatcaagttaccgaacagcaaacagctcagaaattcaataatctcctgaaagaaataaaagacatcctgaaaaatatggccggtttcgaagaaaagattaccgaagccaaggagctgtttgaggagaccaatatcacagaggatgtttctgcacacaaggagaatattaggggtctagataagatcaatgaaatgctgagtactaacttacccgtgtccctggctcccgagaaagaagacaacgagaaaaagcaggagatgattctggagaccaacatcacggaggatgtctccgctcacaaggagaacattcggggcctggataaaattaacgagatgctgagcactaatctccctgtgagtctcgcccctgaaaaggaagataatgagaagaagcagcagatgataatggaaaaccagaactcagaaaataccgcccaggtgttcgcccgtgatctggtaaaccgattggaggagaaaaaagttctgaacgaaacacaacagtctcaggaaaaggccaagaacagactgaacgtgcaggaggaaacgatgaagatacgcaataacatggaacagttgttacaagaagccgaacattggagcaaacagcatacagagctgtcaaaacttatcaaatcctaccagaaatctcagaaggatattagcgaaactttggggaataatggggttggattccagacgcagccaaacaatgaggtctctgccaagcatgagctagaagagcaggtgaagaagctctcccacgacacatactccctgcagctgatggccgcactgctggagaatgagtgtcagatccttcaacaaagggtggagatccttaaggagctccaccaccagaagcagggcacgctgcaggaaaaaccgatccaaatcaactataaacaggacaagaagaatcagaagcctagtgaagcaaaaaaagtcgagatgtataagcagaacaagcaagcaatgaagggtaccttctggaaaaaggacaggagctgccgaagccttgatgtgtgcctgaacaagaaggcgtgcaacacccaatttaatatccatgtggctcgaaaggccctcagaggaaagatgagatctgcatcaagtctgcggtag

SEQ ID NO: 224933 - DNA, 705 bp, Artificial Sequence
  derived and/or modified sequence
atggcctcttccgccaaatccgctgagatgcctacaatctccaaaaccgtgaatcccactcccgacccccaccaggaatatctcgacccaagaataaccatagcactgtttgagatcggttctcattcccccagcagttgggggagcctgccctttctgaaaaattcatctcatcaggtgaccgaacagcagaccgcccaaaagtttaacaatctgctgaaagaaatcaaggacatcttaaagaatatggccggctttgaggagaagatcacagaggcaaaggaactgtttgaagaaaccaatatcacggaagatgtctcggcccacaaagaaaacatccggggactcgacaaaattaacgagatgctaagtacaaatctgccggtctccctcgctccagaaaaggaggacaacgagaagaagcaggagatgatactggagaccaatatcacagaagacgtgtccgcccacaaggagaacattcgtgggctggacaaaattaatgagatgttgtcaacaaatctgccagtctctctggctcctgagaaggaagacaatgaaaagaagcagcaaatgattatggagaaccagaattctgagaatactgcacaggtattcgcccgtgacctggtgaacagactggaagagaagaaggtcctcaacgagactcaacagagtcaagagaaggccaagaatagactatag

SEQ ID NO: 224934 - DNA, 1293 bp, Artificial Sequence
  derived and/or modified sequence
atggccagcagcgccaagtctgctgagatgcccaccatcagcaagacagtgaaccccaccccagacccccaccaggagtacctggacccccgcatcaccatcgccctgtttgaaattggcagccacagccccagctcctggggcagcctgcccttcctgaagaacagcagccaccaggtgacagagcagcagacagcccagaagttcaacaacctgctgaaggagatcaaggacatcctgaagaacatggccggctttgaggagaagatcacagaggccaaggagctgtttgaggagaccaacatcacagaagatgtgtctgcccacaaggagaacatccggggcctggacaagatcaatgagatgctgagcaccaacctgcctgtgtccctggcccctgagaaggaggacaatgagaagaagcaggagatgatcctggagaccaacatcacagaagatgtgtctgcccacaaggagaacatccggggcctggacaagatcaatgagatgctgagcaccaacctgcctgtgtccctggcccctgagaaggaggacaatgagaagaagcagcagatgatcatggagaaccagaacagcgagaacacagcccaggtgtttgcccgggacctggtgaaccggctggaggagaagaaggtgctgaatgagacccagcagagccaggagaaggccaagaaccggctgaatgtgcaggaggagaccatgaagatccggaacaacatggagcagctgctgcaggaggccgagcactggagcaagcagcacacagagctgagcaagctgatcaagagctaccagaagagccagaaggacatcagcgagaccctgggcaacaatggagtgggcttccagacccagcccaacaatgaggtgtctgccaagcatgagctggaggagcaggtgaagaagctgagccatgacacctacagcctgcagctgatggccgccctgctggagaatgaatgccagatcctgcagcagagggtggagatcctgaaggagctgcaccaccagaagcagggcaccctgcaggagaagcccatccagatcaactacaagcaggacaagaagaaccagaagcccagcgaggccaagaaggtggagatgtacaagcagaacaagcaggccatgaagggcaccttctggaagaaggacaggagctgccgcagcctggatgtgtgcctgaacaagaaggcctgcaacacccagttcaacatccacgtggccaggaaggccctgcggggcaagatgaggtctgccagcagcctgaggtag

SEQ ID NO: 224935 - DNA, 705 bp, Artificial Sequence
  derived and/or modified sequence
atggccagcagcgccaagtctgctgagatgcccaccatcagcaagacagtgaaccccaccccagacccccaccaggagtacctggacccccgcatcaccatcgccctgtttgaaattggcagccacagccccagctcctggggcagcctgcccttcctgaagaacagcagccaccaggtgacagagcagcagacagcccagaagttcaacaacctgctgaaggagatcaaggacatcctgaagaacatggccggctttgaggagaagatcacagaggccaaggagctgtttgaggagaccaacatcacagaagatgtgtctgcccacaaggagaacatccggggcctggacaagatcaatgagatgctgagcaccaacctgcctgtgtccctggcccctgagaaggaggacaatgagaagaagcaggagatgatcctggagaccaacatcacagaagatgtgtctgcccacaaggagaacatccggggcctggacaagatcaatgagatgctgagcaccaacctgcctgtgtccctggcccctgagaaggaggacaatgagaagaagcagcagatgatcatggagaaccagaacagcgagaacacagcccaggtgtttgcccgggacctggtgaaccggctggaggagaagaaggtgctgaatgagacccagcagagccaggagaaggccaagaaccggctgtag

SEQ ID NO: 224936 - DNA, 1293 bp, Artificial Sequence
  derived and/or modified sequence
atggccagcagcgccaagagcgccgagatgcccaccatcagcaagacggtcaatcctacccctgatccccaccaggaatacctcgatccgcgtatcaccatcgccctgttcgagatcgggtcccacagcccgtcaagttggggtagcttgccatttctaaagaactcctctcatcaggtgacggagcagcagacagcacaaaagtttaacaatctactgaaggaaatcaaagatatattgaaaaatatggctggctttgaggaaaaaatcacagaagcaaaggaactgtttgaagaaactaacatcacagaggatgtgtcagcgcataaggagaacatccgcggcctggataaaattaatgagatgttatccacaaatttgcctgtatctcttgctcccgaaaaggaggataatgagaagaagcaggagatgattttagagacgaatatcaccgaggacgtgtccgctcacaaggagaacatcaggggtctagataagattaacgagatgctgagcactaatttaccagtgtctttggcacccgagaaagaggacaacgaaaagaagcagcagatgatcatggagaatcaaaatagcgaaaatacagcccaagtgtttgccagggatttggtgaacagactggaagagaaaaaggtcctcaatgagacccagcagtcccaggagaaagcgaaaaaccggctgaatgtgcaggaggaaacgatgaagatcaggaataacatggagcaactcctgcaagaagctgagcactggagcaagcaacataccgagctcagcaaactaattaagagctaccagaagtctcaaaaagatatatccgagacgctaggaaataatggagtaggttttcagacgcaacctaataacgaagtgtccgcgaaacacgaactggaggagcaggttaagaaactctctcatgatacctacagcctgcaactcatggcggcactgttggaaaacgagtgtcaaatattgcaacagcgcgtggaaattctgaaggagctgcaccaccagaaacaaggaactctgcaggaaaagcccatacagatcaactacaaacaggacaagaagaatcagaagcccagtgaagcaaagaaggttgagatgtataaacagaacaagcaggcgatgaaaggcacattctggaaaaaagatcgtagttgtagatccctggatgtttgcctgaacaaaaaagcgtgtaacacacagttcaatattcatgtggcacgcaaggctcttcgcgggaagatgcgcagcgcttcatcccttagatag

SEQ ID NO: 224937 - DNA, 705 bp, Artificial Sequence
  derived and/or modified sequence
atggccagcagcgccaagagcgccgagatgcccaccatcagcaagacagttaacccaacgccagaccctcaccaagaatatttggatcctagaataacaatcgcactattcgagatcggatcacactccccctctagctggggctcactgcctttcttaaagaattcctcgcaccaagtcaccgaacagcaaactgcgcagaagtttaacaacttgctcaaagagattaaagacatcttaaagaatatggccggcttcgaggaaaagattaccgaagccaaagagctcttcgaggaaacgaatattaccgaagacgtctccgcacacaaggagaacattcggggtctggacaagatcaatgagatgctctcaactaatctgcctgtgtcactcgcaccagaaaaggaggataatgagaaaaagcaggagatgattctggaaaccaacataacagaggacgtaagcgcacataaggagaacattcgcgggctggataagatcaacgagatgctctctactaatcttccggttagcctggcccccgaaaaagaggacaacgagaagaaacaacaaatgattatggagaaccagaactcagagaacacagcccaggtgttcgcaagggacctcgtcaaccggctggaagagaaaaaagtgttgaatgagacccagcagtcacaagagaaggctaagaataggctgtag

SEQ ID NO: 224938 - DNA, 1293 bp, Artificial Sequence
  derived and/or modified sequence
atggcgagctcggccaagtccgccgagatgccaactatctctaaaactgtaaaccctactcccgatccacaccaggagtatctggatccaagaataacaatcgccttattcgaaattggtagccactccccaagttcttggggttcccttccattccttaagaattcttcccaccaggtgacagagcaacagaccgcccagaaattcaacaacctcctaaaagaaataaaggacatcctcaaaaatatggcagggttcgaggaaaaaattactgaggccaaagaattgttcgaggagacaaacattacagaggacgtgtctgcccataaggaaaacatccggggattagataagataaacgaaatgctatctactaacctgcctgtgtccttggctcctgagaaggaagataatgaaaaaaaacaggaaatgatcctggaaacgaatatcacagaagacgtcagtgcacacaaagagaacattagaggcctggacaagatcaatgagatgctgagtacaaatctgccggtttcactcgctccagagaaagaggacaatgaaaaaaaacagcagatgatcatggagaaccagaacagtgagaataccgcacaggtattcgcacgagacctagtgaaccggctggaggaaaagaaggtgcttaatgagacccagcagagtcaagaaaaagccaagaaccgacttaacgtccaagaggagaccatgaaaatcagaaacaacatggagcagttactgcaggaagccgagcattggagtaaacagcacacagaattatctaaactgatcaagagctaccagaagagccagaaagacatatctgagactctcggtaataatggtgtgggtttccaaacgcaaccaaacaacgaggtgtcagccaagcacgaactggaggagcaggtcaaaaagctgtcacatgacacatatagcctgcagctgatggccgcattattggaaaacgagtgccagatcctgcagcagcgcgtcgaaattctgaaggagttacatcaccagaaacagggcaccctccaagaaaaaccgatacagatcaactacaagcaggacaaaaagaaccaaaagccttccgaggccaagaaagtggaaatgtataagcagaataagcaggctatgaagggaactttctggaaaaaggaccgatcctgccggtcactggacgtctgtctgaacaagaaagcgtgcaatactcagttcaacattcatgtagcacgcaaagcacttcgcggtaagatgagaagcgcttcaagccttcgctag

SEQ ID NO: 224939 - DNA, 705 bp, Artificial Sequence
  derived and/or modified sequence
atggccagcagtgctaagtctgccgagatgcccacaattagcaagactgttaatcctactcctgacccccaccaggaatatttagatccacgtatcaccatcgccctgtttgagatcggcagccacagtccaagcagctggggatctctcccatttttgaaaaactcatcacaccaagttacagaacaacagaccgctcagaaattcaataacctactgaaggagatcaaagacattctgaagaatatggccggattcgaagagaagattacggaggcgaaggagctatttgaggaaacaaatatcaccgaggacgtctccgctcataaagagaatatccggggtctggataaaataaacgagatgctttctacgaacctgccggtgtccctcgcgccagagaaggaggacaacgagaagaaacaggagatgatccttgagactaacataacagaggatgtaagcgcacacaaggaaaatataagaggtctcgacaagattaatgagatgctcagcactaaccttccagtgtcgttagccccagaaaaagaagataatgagaagaagcagcagatgattatggaaaatcagaatagtgaaaacaccgcccaggtgtttgccagggaccttgtcaatagactggaggaaaagaaagtcctgaatgagacccaacagtcgcaggagaaggccaaaaacaggctgtag

SEQ ID NO: 224940 - DNA, 859 bp, Artificial Sequence
  derived and/or modified sequence
atgaaaggatggggacctcaccagagaggactggtctcagcaatgtccttaagtggtcaaaacatgctgcggttgagtctccacccacatttgcacaaaggaccatcacctgtccttcctggaatctctaaagttttctgctttccttctgtcctgatggccagctctgctaagtcagctgagatgcccaccatctccaaaaccgttaaccctactcctgatcctcatcaagaatatctggaccctaggattaccattgccttattcgaaattggatcacattccccttcctcctggggctctctccctttcctaaagaatagcagccatcaagttacagaacaacagactgcacagaagtttaacaatctcttaaaagaaattaaagatattcttaaaaatatggcaggttttgaagagaagatcacagaagcaaaagaactttttgaggaaaccaatattactgaggatgtgtcagcccacaaagaaaatatcagaggacttgacaaaatcaatgaaatgttatcaacaaacctgcctgttagtttagccccagagaaagaagacaatgaaaagaaacaggagatgatattggaaaccaatattactgaggatgtgtcagcccacaaagaaaatatcagaggacttgacaaaatcaatgaaatgttatcaacaaacctgcctgttagtttagccccagagaaagaagacaatgaaaagaaacagcagatgataatggaaaaccagaactctgagaacaccgcacaagtttttgcaagagatttggtaaatcgtttagaagaaaaaaaagtccttaacgaaactcaacaaagtcaggaaaaagcaaaaaacagactta

SEQ ID NO: 224941 - DNA, 1872 bp, Artificial Sequence
  derived and/or modified sequence
gaataaacaccgggtgcctagaggagaagagatggagccccagccttggtcccctttcccacccttcctccccacaaggctgtctgagatgccaccttccacctaaacatcatctcccaaattttaatccttaactttggtctctgacttctgcttgattccacagtctccacccacatttgcacaaaggaccatcacctgtccttcctggaatctctaaagttttctgctttccttctgtcctgatggccagctctgctaagtcagctgagatgcccaccatctccaaaaccgttaaccctactcctgatcctcatcaagaatatctggaccctaggattaccattgccttattcgaaattggatcacattccccttcctcctggggctctctccctttcctaaagaatagcagccatcaagttacagaacaacagactgcacagaagtttaacaatctcttaaaagaaattaaagatattcttaaaaatatggcaggttttgaagagaagatcacagaagcaaaagaactttttgaggaaaccaatattactgaggatgtgtcagcccacaaagaaaatatcagaggacttgacaaaatcaatgaaatgttatcaacaaacctgcctgttagtttagccccagagaaagaagacaatgaaaagaaacaggagatgatattggaaaccaatattactgaggatgtgtcagcccacaaagaaaatatcagaggacttgacaaaatcaatgaaatgttatcaacaaacctgcctgttagtttagccccagagaaagaagacaatgaaaagaaacagcagatgataatggaaaaccagaactctgagaacaccgcacaagtttttgcaagagatttggtaaatcgtttagaagaaaaaaaagtccttaacgaaactcaacaaagtcaggaaaaagcaaaaaacagacttaatgttcaagaagaaactatgaaaattaggaacaacatggagcagttactacaggaagcagaacactggagtaaacaacatactgagctcagtaaactgataaaatcctatcagaaatctcagaaagacataagtgaaactcttggaaataatggagtcggtttccaaacccagccaaataatgaagtgtcggctaagcatgagctggaggaacaggtgaagaaactgagccatgacacctattcattgcagttgatggcagctttgctagagaatgaatgccaaatcttacagcagagagtagagattctcaaggaactccatcatcagaaacagggaactctgcaagagaagccaattcagataaactataaacaggacaagaaaaatcagaagccatcagaagcaaagaaagtagaaatgtataagcagaacaagcaagcaatgaagggtacattttggaaaaaagacagatcctgtagaagcctggatgtttgtcttaataagaaagcttgcaatacccagttcaatattcatgttgcaagaaaagctcttaggggaaaaatgaggtcagctagcagcctaagatagaaaataccaaaagcagatgaaaaggtgaatccttaaaaaactacatctgttacctccaacttgtcagtcatgatcaatcatcaaaccttgggcagatctgctggttcaaccaagaaagagctatagaataaggagattgacacttatattactcattacttcagcagttatgtaagtctggtctttaatgaccattgtgtctacatcaagttcataacttttcacctttacaatctgcttgttttttttgtaattattagatagacagcctagagtgagaagttaaaggtccaattaagtaaagatctaaataaaaaccagaatacaagggaaa

SEQ ID NO: 224942 - DNA, 1293 bp, Artificial Sequence
  derived and/or modified sequence
atggccagcagcgccaagagcgccgagatgcccaccatcagcaagaccgtgaaccccacccccgacccccaccaggagtacctggaccccagaatcaccatcgccctgttcgagatcggcagccacagccccagcagctggggcagcctgcccttcctgaagaacagcagccaccaggtgaccgagcagcagaccgcccagaagttcaacaacctgctgaaggagatcaaggacatcctgaagaacatggccggcttcgaggagaagatcaccgaggccaaggagctgttcgaggagaccaacatcaccgaggacgtgagcgcccacaaggagaacatcagaggcctggacaagatcaacgagatgctgagcaccaacctgcccgtgagcctggcccccgagaaggaggacaacgagaagaagcaggagatgatcctggagaccaacatcaccgaggacgtgagcgcccacaaggagaacatcagaggcctggacaagatcaacgagatgctgagcaccaacctgcccgtgagcctggcccccgagaaggaggacaacgagaagaagcagcagatgatcatggagaaccagaacagcgagaacaccgcccaggtgttcgccagagacctggtgaacagactggaggagaagaaggtgctgaacgagacccagcagagccaggagaaggccaagaacagactgaacgtgcaggaggagaccatgaagatcagaaacaacatggagcagctgctgcaggaggccgagcactggagcaagcagcacaccgagctgagcaagctgatcaagagctaccagaagagccagaaggacatcagcgagaccctgggcaacaacggcgtgggcttccagacccagcccaacaacgaggtgagcgccaagcacgagctggaggagcaggtgaagaagctgagccacgacacctacagcctgcagctgatggccgccctgctggagaacgagtgccagatcctgcagcagagagtggagatcctgaaggagctgcaccaccagaagcagggcaccctgcaggagaagcccatccagatcaactacaagcaggacaagaagaaccagaagcccagcgaggccaagaaggtggagatgtacaagcagaacaagcaggccatgaagggcaccttctggaagaaggacagaagctgcagaagcctggacgtgtgcctgaacaagaaggcctgcaacacccagttcaacatccacgtggccagaaaggccctgagaggcaagatgagaagcgccagcagcctgagatag

SEQ ID NO: 224943 - protein, 128 aa, Artificial Sequence
  derived and/or modified sequence
KPKGMTSSQWFKIQHMQPSPQACNSAMKNINKHTKRCKDLNTFLHEPFSSVAATCQTPKIACKNGDKNCHQSHGAVSLTMCKLTSGKHPNCRYKEKRQNKSYVVACKPPQKKDSQQFHLVPVHLDRVL

SEQ ID NO: 224944 - protein, 156 aa, Artificial Sequence
  derived and/or modified sequence
MAPARAGFCPLLLLLLLGLWVAEIPVSAKPKGMTSSQWFKIQHMQPSPQACNSAMKNINKHTKRCKDLNTFLHEPFSSVAATCQTPKIACKNGDKNCHQSHGAVSLTMCKLTSGKHPNCRYKEKRQNKSYVVACKPPQKKDSQQFHLVPVHLDRVL

SEQ ID NO: 224945 - DNA, 471 bp, Artificial Sequence
  derived and/or modified sequence
atggcccccgccagagccggcttctgccccctgctgctgctgctgctgctgggcctgtgggtggccgagatccccgtgagcgccaagcccaagggcatgaccagcagccagtggttcaagatccagcacatgcagcccagcccccaggcctgcaacagcgccatgaagaacatcaacaagcacaccaagagatgcaaggacctgaacaccttcctgcacgagcccttcagcagcgtggccgccacctgccagacccccaagatcgcctgcaagaacggcgacaagaactgccaccagagccacggcgccgtgagcctgaccatgtgcaagctgaccagcggcaagcaccccaactgcagatacaaggagaagagacagaacaagagctacgtggtggcctgcaagcccccccagaagaaggacagccagcagttccacctggtgcccgtgcacctggacagagtgctgtag

SEQ ID NO: 224946 - DNA, 471 bp, Artificial Sequence
  derived and/or modified sequence
atggcgccagcgagagctgggttctgcccacttttgctgcttcttctcctgggactgtgggtcgccgagattcctgtcagtgctaaacccaagggcatgaccagcagccagtggtttaagatccaacacatgcagccgtcgccacaggcatgcaactccgcgatgaaaaacattaataagcacacgaaaaggtgcaaggacctcaatactttcctacacgaacctttctcttccgtggccgcgacatgtcagacaccaaagatcgcgtgtaagaacggggataagaattgtcatcagagtcatggagccgtgtccttgacaatgtgtaagctcacaagcggtaaacaccccaactgcagatataaggagaaaaggcagaacaaatcgtacgttgtcgcgtgcaaaccaccacagaaaaaggatagccagcagtttcatcttgtaccagtccacctggaccgggtgctgtag

SEQ ID NO: 224947 - DNA, 471 bp, Artificial Sequence
  derived and/or modified sequence
atggcgccggcccgcgcggggttctgtccacttctgctgctcctcctactgggactttgggtggccgagattccagtgagtgcaaaacccaagggcatgacttcttcacagtggttcaaaattcagcacatgcaaccatcaccccaggcctgcaactccgccatgaaaaatatcaacaaacacaccaagcggtgcaaggacctgaatacttttctgcacgagccattctcgtccgtcgccgccacctgtcagacaccgaagattgcttgtaagaacggagataaaaactgtcaccagtcacatggcgctgtttccttaactatgtgcaagctgacttctggaaagcatcccaattgcagatacaaagagaagagacagaacaagtcctacgttgtcgcatgtaaaccgcctcagaaaaaagactctcagcagtttcatttggtgcccgtccacctggatcgggtgctctag

SEQ ID NO: 224948 - DNA, 471 bp, Artificial Sequence
  derived and/or modified sequence
atggccccagcccgggccggcttctgccccctgctgctgctgctgctgctgggcctgtgggtggccgagatccctgtgtctgccaagcccaagggcatgaccagcagccagtggttcaagatccagcacatgcagcccagcccccaggcctgcaacagcgccatgaagaacatcaacaagcacaccaagcgctgcaaggacctgaacaccttcctgcacgagcccttcagctctgtggccgccacctgccagacccccaagatcgcctgcaagaatggagacaagaactgccaccagagccatggagctgtgtccctgaccatgtgcaagctgaccagcggcaagcaccccaactgccgctacaaggagaagaggcagaacaagagctatgtggtggcctgcaagccaccccagaagaaggacagccagcagttccacctggtgcctgtgcacctggacagagtgctgtag

SEQ ID NO: 224949 - DNA, 471 bp, Artificial Sequence
  derived and/or modified sequence
atggcccccgcccgggccggcttctgccccctgctgctgctgctgcttctcggactgtgggtagctgaaatccctgtgagcgctaaacccaaagggatgacgtcaagccagtggttcaagatccagcacatgcaacctagtcctcaggcctgtaactcagcaatgaagaacattaataagcatacgaagcgatgcaaggatctgaacacatttcttcatgaacctttctcctcagtagctgccacttgccaaacccccaaaatcgcatgtaagaatggggataagaactgtcaccagtctcacggtgccgtctccctcaccatgtgcaagctcacctcaggcaagcaccccaactgtcgctataaggagaaacggcaaaataaatcttacgtggtagcttgcaaacctccacagaagaaggattcacagcaattccatctcgtgcccgtacacctggaccgtgtactgtag

SEQ ID NO: 224950 - DNA, 471 bp, Artificial Sequence
  derived and/or modified sequence
atggcccccgcccgggccggcttctgccccctgctgctgctgctgctcctgggactatgggtggcagagatcccagtgtcagccaaacctaagggcatgacatcgtcccagtggttcaaaattcaacacatgcaaccctctccgcaggcatgtaacagcgctatgaaaaacatcaataaacacacaaagaggtgcaaggacctgaacacatttctgcacgagcccttttcctcagtggcggctacttgtcaaacccccaaaattgcgtgtaagaatggggacaaaaattgccatcagagtcacggggccgtctccctcacaatgtgtaaactcacgagcggaaaacaccctaactgcagatataaggagaaacgccagaacaaatcatatgttgtggcttgcaagcccccccagaagaaagattcccagcagtttcatctggtccctgtccacctggacagagttttgtag

SEQ ID NO: 224951 - DNA, 471 bp, Artificial Sequence
  derived and/or modified sequence
atggctccggcacgcgcaggcttttgcccgttgcttctgttgcttctcctgggcctctgggtggccgaaatacctgtgtcggcaaaacctaagggcatgacctcttcccagtggttcaagatacagcatatgcagccgtctccccaggcttgtaattcagcaatgaagaatattaacaaacacacaaaaaggtgcaaggacttgaatacttttctccacgaaccattctctagtgttgcggctacttgtcagacacccaaaatcgcttgtaaaaatggagataagaactgtcatcagtcgcatggtgccgtgagcctcacaatgtgcaagttgacctcaggcaagcatccgaactgcagatacaaagagaagcgacagaacaagtcttatgtggttgcgtgcaagcctcctcagaaaaaagattctcagcagttccatctagttcctgtgcatcttgatagagtcctatag

SEQ ID NO: 224952 - DNA, 471 bp, Artificial Sequence
  derived and/or modified sequence
atggccccagccagagctgggttctgccccctgttgctgttgttgctgctagggttgtgggtagccgagatccctgtgtctgctaaaccaaaaggcatgacttctagccagtggttcaagatccagcacatgcagcccagccctcaggcttgtaattccgctatgaagaatataaataagcatacaaagcggtgcaaagacctgaataccttcctgcacgaaccattttcgagtgtcgccgcaacttgtcagacccctaagatcgcctgcaagaatggggacaagaattgccaccaatctcacggtgctgtgtcactcaccatgtgcaagctgaccagcggtaaacaccccaactgtcggtataaggagaagagacaaaataaatcgtacgtcgtggcctgcaagcccccacaaaaaaaggattcccaacagtttcatctcgtccccgtgcatctggatcgagtcctgtag

SEQ ID NO: 224953 - DNA, 471 bp, Artificial Sequence
  derived and/or modified sequence
atggcacctgcccgggccgggttttgcccccttctgctcctcctgctgcttgggctgtgggtggctgaaattccagtgtccgccaaaccaaagggcatgacttcctcacaatggttcaagattcaacacatgcaaccatcgcctcaggcctgtaatagtgccatgaaaaatatcaataaacatacaaagaggtgcaaagatcttaacacatttctccacgaacccttttcatccgtagccgccacatgccaaacccctaagatcgcctgcaagaatggcgacaaaaactgccatcagagccacggcgcagtgtcgttgaccatgtgcaagctcacttccggcaagcaccctaattgcagatataaggagaaacgtcagaacaagagctacgtagttgcttgcaaacccccacagaagaaggactcccagcagtttcacctggttcccgtccacttagaccgcgtattgtag

SEQ ID NO: 224954 - DNA, 471 bp, Artificial Sequence
  derived and/or modified sequence
atggcccccgcccgcgctggattctgccctctgctgcttctgcttctactggggctgtgggtcgccgagatccccgtgtcagccaaacctaagggaatgacctcctctcagtggtttaaaatccaacacatgcaaccatctccccaggcatgcaactccgccatgaaaaacattaacaaacacactaagcgttgcaaagatctcaacactttcctccacgagccttttagcagcgtcgccgcgacctgccaaacccccaagattgcctgtaagaacggcgataagaactgtcatcagtcccatggagccgtaagcctcacaatgtgcaaacttacctcaggaaagcatcctaactgccgctacaaggagaaacgccagaacaaatcctatgttgtggcctgtaagcccccacagaaaaaggactctcagcagttccatttggttccggtccatcttgacagagtattatag

SEQ ID NO: 224955 - DNA, 471 bp, Artificial Sequence
  derived and/or modified sequence
atggcccccgcgcgcgctggcttttgtcccctgctgctgctgctcctactaggattatgggtcgcagagattcccgtttccgcaaagcctaaagggatgacctcaagccaatggtttaagatacagcacatgcagccctccccgcaggcctgtaacagcgctatgaagaatattaacaaacacactaaaaggtgcaaagatcttaacactttcctccacgagccattttcgtctgtcgctgcaacctgccaaactcccaagatcgcatgtaagaatggagataaaaattgtcaccagtctcatggggcagtctcactcacaatgtgcaagttaacaagcggcaagcacccaaactgtagatacaaagaaaaaaggcagaataaatcttatgtcgtcgcctgtaagccaccgcaaaaaaaggactcacagcagttccacctcgtcccggtgcatcttgatcgcgtcctgtag

SEQ ID NO: 224956 - DNA, 471 bp, Artificial Sequence
  derived and/or modified sequence
atggcccccgcccgcgctggattctgccctctgctgcttctgcttctactggggctgtgggtcgccgagatccccgtgtcagccaaacctaagggaatgacctcctctcagtggtttaaaatccaacacatgcaaccatctccccaggcatgcaactccgccatgaaaaacattaacaaacacactaagcgttgcaaagatctcaacactttcctccacgagccttttagcagcgtcgccgcgacctgccaaacccccaagattgcctgtaagaacggcgataagaactgtcatcagtcccacggagcagtaagccttacaatgtgtaagctcacatcaggaaagcatccaaattgccgttataaggaaaaacggcagaacaaatcttacgtcgtagcctgtaagcctcctcagaagaaagactcccaacaattccacctggtaccagtccatctcgatagggtattgtag

SEQ ID NO: 224957 - DNA, 1498 bp, Artificial Sequence
  derived and/or modified sequence
gtatttgggacatgtaagtggagaggcatgaacctgattcatttcctgatccagtgatgctcccagcccacccccaaacagacacagcgtagcccgggccagctcttaaggagttcaggagtgagaagaggccctcagagatctgacagcctaggagtgcgtggacaccacctcagcccactgagcaggagtcacagcacgaagaccaagcgcaaagcgacccctgccctccatcctgactgctcctcctaagagagatggcaccggccagagcaggattctgcccccttctgctgcttctgctgctggggctgtgggtggcagagatcccagtcagtgccaagcccaagggcatgacctcatcacagtggtttaaaattcagcacatgcagcccagccctcaagcatgcaactcagccatgaaaaacattaacaagcacacaaaacggtgcaaagacctcaacaccttcctgcacgagcctttctccagtgtggccgccacctgccagacccccaaaatagcctgcaagaatggcgataaaaactgccaccagagccacggggccgtgtccctgaccatgtgtaagctcacctcagggaagcatccgaactgcaggtacaaagagaagcgacagaacaagtcttacgtagtggcctgtaagcctccccagaaaaaggactctcagcaattccacctggttcctgtacacttggacagagtcctttaggtttccagactggcttgctctttggctgaccttcaattccctctccaggactccgcaccactcccctacacccagagcattctcttcccctcatctcttggggctgttcctggttcagcctctgctgggaggctgaagctgacactctggtgagctgagctctagagggatggcttttcatctttttgttgctgttttcccagatgcttatccccaagaaacagcaagctcaggtctgtgggttccctggtctatgccattgcacatgtctcccctgccccctggcattagggcagcatgacaaggagaggaaataaatggaaagggggcatatgggatttgtggacacagctgtttctgttcctgaactagaagtcttccccagctctgacgtggcagtgaggtgacctgaaggaaagaaaaatataaataaataccacttcatatttgtatagaatcctctaatcccttgtgacatagacttgacagggattgtatgccttctttatggatgaggaaattaaggttttagaaagcttaatgaattaaagagcttgtctaattagttagtagcagaacctggacttgaacctaggtctccttgctctaaatacagtgtaccttctactctaccagttgcgcaagaaagaagtcactgttacagaggcaagcggtgaactaggtaagagttcactcatgaagaaacgagtgctctgaagagccagttaccctgtgttggctgcaataaaggtcattacctctctagccaa

SEQ ID NO: 224958 - DNA, 922 bp, Artificial Sequence
  derived and/or modified sequence
agcccgggccagctcttaaggagttcaggagtgagaagaggccctcagagatctgacagcctaggagtgcgtggacaccacctcagcccactgagcaggagtcacagcacgaagaccaagcgcaaagcgacccctgccctccatcctgactgctcctcctaagagagatggcaccggccagagcaggattctgcccccttctgctgcttctgctgctggggctgtgggtggcagagatcccagtcagtgccaagcccaagggcatgacctcatcacagtggtttaaaattcagcacatgcagcccagccctcaagcatgcaactcagccatgaaaaacattaacaagcacacaaaacggtgcaaagacctcaacaccttcctgcacgagcctttctccagtgtggccgccacctgccagacccccaaaatagcctgcaagaatggcgataaaaactgccaccagagccacggggccgtgtccctgaccatgtgtaagctcacctcagggaagcatccgaactgcaggtacaaagagaagcgacagaacaagtcttacgtagtggcctgtaagcctccccagaaaaaggactctcagcaattccacctggttcctgtacacttggacagagtcctttaggtttccagactggcttgctctttggctgaccttcaattccctctccaggactccgcaccactcccctacacccagagcattctcttcccctcatctcttggggctgttcctggttcagcctctgctgggaggctgaagctgacactctgttgcgcaagaaagaagtcactgttacagaggcaagcggtgaactaggtaagagttcactcatgaagaaacgagtgctctgaagagccagttaccctgtgttggctgcaataaaggtcattacctctctagccaag

SEQ ID NO: 224959 - RNA, 471 nt, Artificial Sequence
  derived and/or modified sequence
auggcaccugcccgggccggguuuugcccccuucugcuccuccugcugcuugggcuguggguggcugaaauuccaguguccgccaaaccaaagggcaugacuuccucacaaugguucaagauucaacacaugcaaccaucgccucaggccuguaauagugccaugaaaaauaucaauaaacauacaaagaggugcaaagaucuuaacacauuucuccacgaacccuuuucauccguagccgccacaugccaaaccccuaagaucgccugcaagaauggcgacaaaaacugccaucagagccacggcgcagugucguugaccaugugcaagcucacuuccggcaagcacccuaauugcagauauaaggagaaacgucagaacaagagcuacguaguugcuugcaaacccccacagaagaaggacucccagcaguuucaccugguucccguccacuuagaccgcguauuguag

SEQ ID NO: 224960 - RNA, 471 nt, Artificial Sequence
  derived and/or modified sequence
auggcccccgcccgcgcuggauucugcccucugcugcuucugcuucuacuggggcugugggucgccgagauccccgugucagccaaaccuaagggaaugaccuccucucagugguuuaaaauccaacacaugcaaccaucuccccaggcaugcaacuccgccaugaaaaacauuaacaaacacacuaagcguugcaaagaucucaacacuuuccuccacgagccuuuuagcagcgucgccgcgaccugccaaacccccaagauugccuguaagaacggcgauaagaacugucaucagucccauggagccguaagccucacaaugugcaaacuuaccucaggaaagcauccuaacugccgcuacaaggagaaacgccagaacaaauccuauguuguggccuguaagcccccacagaaaaaggacucucagcaguuccauuugguuccgguccaucuugacagaguauuauag

SEQ ID NO: 224961 - RNA, 471 nt, Artificial Sequence
  derived and/or modified sequence
auggcccccgcgcgcgcuggcuuuuguccccugcugcugcugcuccuacuaggauuaugggucgcagagauucccguuuccgcaaagccuaaagggaugaccucaagccaaugguuuaagauacagcacaugcagcccuccccgcaggccuguaacagcgcuaugaagaauauuaacaaacacacuaaaaggugcaaagaucuuaacacuuuccuccacgagccauuuucgucugucgcugcaaccugccaaacucccaagaucgcauguaagaauggagauaaaaauugucaccagucucauggggcagucucacucacaaugugcaaguuaacaagcggcaagcacccaaacuguagauacaaagaaaaaaggcagaauaaaucuuaugucgucgccuguaagccaccgcaaaaaaaggacucacagcaguuccaccucgucccggugcaucuugaucgcguccuguag

SEQ ID NO: 224962 - RNA, 471 nt, Artificial Sequence
  derived and/or modified sequence
auggcccccgcccgcgcuggauucugcccucugcugcuucugcuucuacuggggcugugggucgccgagauccccgugucagccaaaccuaagggaaugaccuccucucagugguuuaaaauccaacacaugcaaccaucuccccaggcaugcaacuccgccaugaaaaacauuaacaaacacacuaagcguugcaaagaucucaacacuuuccuccacgagccuuuuagcagcgucgccgcgaccugccaaacccccaagauugccuguaagaacggcgauaagaacugucaucagucccacggagcaguaagccuuacaauguguaagcucacaucaggaaagcauccaaauugccguuauaaggaaaaacggcagaacaaaucuuacgucguagccuguaagccuccucagaagaaagacucccaacaauuccaccugguaccaguccaucucgauaggguauuguag

SEQ ID NO: 224963 - protein, 99 aa, Artificial Sequence
  derived and/or modified sequence
MEPEQMLEGQTQVAENPHSEYGLTDNVERIVENEKINAEKSSKQKVDLQSLPTRAYLDQTVVPILLQGLAVLAKERPPNPIEFLASYLLKNKAQFEDRN

SEQ ID NO: 224964 - DNA, 300 bp, Artificial Sequence
  derived and/or modified sequence
atggaacctgagcaaatgttggagggccaaacccaagtcgctgagaaccctcatagtgaatacggacttactgataatgttgaacgcattgtcgaaaacgagaaaataaacgccgagaagagctcgaaacaaaaagtggatctgcagagcctgcccacacgggcctaccttgatcagactgtagtgcctattctcctccaggggctcgccgtcctcgccaaggaaagacccccgaacccaatcgagttcttggccagctacctcctgaagaataaagcccagtttgaagaccgcaattag

SEQ ID NO: 224965 - DNA, 300 bp, Artificial Sequence
  derived and/or modified sequence
atggaacccgagcagatgttggagggccagacgcaggtggctgaaaatccacactccgaatatggactgacggataacgtggaacggatagtggaaaatgaaaaaataaacgctgagaaatcaagtaagcagaaggtggatctgcagtccttgcctacccgggcttatctcgatcagacagtcgttcctattttgttgcagggcctcgctgtgctggctaaggagcggccaccaaacccaatcgagtttctggcctcctacctgctcaagaataaggcccagttcgaggataggaattag

SEQ ID NO: 224966 - DNA, 300 bp, Artificial Sequence
  derived and/or modified sequence
atggagcctgagcagatgctggagggccagacccaggtggccgagaacccccacagtgaatatggcctgacagacaacgtggagcgcatcgtggagaatgagaagatcaatgctgagaagagcagcaagcagaaggtggacctgcagagcctgcccacccgggcctacctggaccagacagtggtgcccatcctgctgcagggcctggccgtgctggccaaggagaggcctcccaaccccatcgagttcctggccagctacctgctgaagaacaaggcccagtttgaggacaggaactag

SEQ ID NO: 224967 - DNA, 300 bp, Artificial Sequence
  derived and/or modified sequence
atggagcccgagcagatgctggagggccagacccaggtggccgagaatccccactcagaatacgggttaaccgacaatgtggagaggatcgtggagaacgaaaagataaatgccgaaaagtcttctaaacaaaaggtcgacctccagtccctgccaacacgggcctatctcgaccagaccgtcgtccccattttattgcagggcctcgctgtgctagccaaagagagaccgcctaatccaatcgagttcctggcgtcctacctgttgaaaaacaaggcccagttcgaggaccgcaattag

SEQ ID NO: 224968 - DNA, 300 bp, Artificial Sequence
  derived and/or modified sequence
atggagcccgagcagatgctggagggccagacccaggtggccgagaatcctcactcggagtacgggctgaccgacaacgttgaacggattgtggagaatgagaagatcaacgcggagaaatctagtaagcagaaggtggatttgcaatctcttccaacaagagcttacttagaccaaactgtggtcccaatactgctgcaaggtctggccgtgctggccaaagagcgacccccgaatcccatcgaattcctggcttcttatcttttgaaaaataaagcccagttcgaagaccgcaattag

SEQ ID NO: 224969 - DNA, 300 bp, Artificial Sequence
  derived and/or modified sequence
atggaaccggagcagatgctcgaaggccagacccaggtcgccgagaatcctcatagtgagtatggattgactgacaatgtggaaagaatagtcgaaaacgagaagataaatgctgaaaagagttctaaacagaaagtggacttgcagtctctgccaaccagggcctacctcgaccaaaccgtggtacccattctccttcaaggcctcgctgtacttgccaaagagaggcctccaaatccaatagagtttctagcttcatatctgctcaaaaataaagcccagtttgaggacagaaactag

SEQ ID NO: 224970 - DNA, 300 bp, Artificial Sequence
  derived and/or modified sequence
atggagccagaacagatgttggaaggtcaaactcaagtggcagagaatccgcattctgagtatgggcttacagacaatgtggagagaatagtggaaaacgagaagattaatgcagagaagtcatccaagcagaaggtggacctgcaatctttgccaacacgagcctacttggaccagactgtggtccctattctgttgcaaggtctggcagtactggcgaaagaaagacccccaaaccccatagaatttctggctagctacctcctgaagaacaaggcgcagtttgaggatagaaactag

SEQ ID NO: 224971 - DNA, 300 bp, Artificial Sequence
  derived and/or modified sequence
atggagcccgagcagatgctggagggccagacccaggtggccgagaacccccacagcgagtacggcctgaccgacaacgtggagagaatcgtggagaacgagaagatcaacgccgagaagagcagcaagcagaaggtggacctgcagagcctgcccaccagagcctacctggaccagaccgtggtgcccatcctgctgcagggcctggccgtgctggccaaggagagaccccccaaccccatcgagttcctggccagctacctgctgaagaacaaggcccagttcgaggacagaaactag

SEQ ID NO: 224972 - DNA, 631 bp, Artificial Sequence
  derived and/or modified sequence
acggccggagctgtttgtgctgggagctggtggcgcggtgcagggctcttaagaacgaacggcttgggcgcgggtaatcagctccctttcccccactttctcacttattctaggtacttgggactgtcgtagagtttccagaccccatgtaggcgcccagtcgtggactgtcccactctgctgctctactgctcgtggtgctcccgcgcccagactggtatccggggactgtgacttgcagggtccgccatggagccagagcagatgctggagggacaaacgcaggttgcagaaaatcctcactctgagtacggtctcacagacaacgttgagagaatagtagaaaatgagaagattaatgcagaaaagtcatcaaagcagaaggtagatctccagtctttgccaactcgtgcctacctggatcagacagttgtgcctatcttattacagggacttgctgtgcttgcaaaggaaagaccaccaaatcccattgaatttctagcatcttatcttttaaaaaacaaggcacagtttgaagatcgaaactgacttaatgggaagaacagaaaaatttagttgctactgtagatttacatgattaagaggcagctttaattgccatgatcattcc

SEQ ID NO: 224973 - DNA, 708 bp, Artificial Sequence
  derived and/or modified sequence
gtcacttacggccggagctgtttgtgctgggagctggtggcgcggtgcagggctcttaagaacgaacggcttgggcgcggactggtatccggggactgtgacttgcagggtccgccatggagccagagcagatgctggagggacaaacgcaggttgcagaaaatcctcactctgagtacggtctcacagacaacgttgagagaatagtagaaaatgagaagattaatgcagaaaagtcatcaaagcagaaggtagatctccagtctttgccaactcgtgcctacctggatcagacagttgtgcctatcttattacagggacttgctgtgcttgcaaaggaaagaccaccaaatcccattgaatttctagcatcttatcttttaaaaaacaaggcacagtttgaagatcgaaactgacttaatgggaagaacagaaaaatttagttgctactgtagatttacatgattaagaggcagctttaattgccatgatcattccctctttttggatgtataagaaccttccggacaacagaacctatttctggaattgcagaagataacatatttcccttattttgatttaatcaccataaaccatacctatttaatgagtgtattctgtgcaatttttttctcagattgtctttaactttgtttttaaaatgaccttcaaaataaactgtcaaaacaccattattttaaagta

SEQ ID NO: 224974 - protein, 111 aa, Artificial Sequence
  derived and/or modified sequence
MGPSSCLLLILIPLLQLINPGSTQCSLDSVMDKKIKDVLNSLEYSPSPISKKLSCASVKSQGRPSSCPAGMAVTGCACGYGCGSWDVQLETTCHCQCSVVDWTTARCCHLT

SEQ ID NO: 224975 - DNA, 336 bp, Artificial Sequence
  derived and/or modified sequence
atggggccatcttcttgtctgctgctgattctgatcccactactgcagctcattaacccaggaagtacacaatgcagccttgacagtgtgatggacaaaaagattaaggatgtgttaaacagcctggagtatagccctagccctatttcaaaaaagctgtcctgtgctagcgtgaaaagtcaagggaggccatcttcttgtccagcgggaatggccgtaacaggatgtgcctgtggttatgggtgtggtagctgggatgtgcaactggagaccacctgtcattgccagtgctctgtggtggactggactacagccagatgttgccatctgacctag

SEQ ID NO: 224976 - DNA, 336 bp, Artificial Sequence
  derived and/or modified sequence
atgggccctagttcttgtcttcttctgatcctaattccccttctgcagctaataaaccccggatctactcaatgtagcctcgacagcgtcatggataagaagatcaaagatgtcctcaatagcctggaatatagccccagcccaattagcaaaaaattatcttgcgcatcagtgaaatcccaagggcgtcctagctcttgtcccgctggcatggccgtgacagggtgtgcatgcggctacggttgtggtagttgggatgtgcaattggagacaacttgccactgtcagtgctctgtcgtggattggacaactgcacgctgttgccaccttacctag

SEQ ID NO: 224977 - DNA, 336 bp, Artificial Sequence
  derived and/or modified sequence
atggggccttcttcttgcctgctgcttattctgatcccactcctacagctaatcaatcctggcagtactcagtgttccttggactcagtaatggacaagaaaattaaagatgtgttgaacagcctggagtactctcccagtccaatttccaaaaagttgtcctgcgcctccgtcaaatcccagggacgcccttcatcatgccccgccggaatggctgtcacaggatgtgcctgcggttatgggtgtgggtcatgggacgtccagctcgaaaccacatgtcactgtcagtgtagtgtagtggattggactaccgcgcgttgctgccacctaacctag

SEQ ID NO: 224978 - DNA, 676 bp, Artificial Sequence
  derived and/or modified sequence
aataaatctgttcttcagcaaccctacctgcttctccaaactgcctaaagagatccagtactgatgacgctgttcttccatctttactccctggaaactaaccacgttgtcttctttccttcaccaccacccaggagctcagagatctaagctgctttccatcttttctcccagccccaggacactgactctgtacaggatggggccgtcctcttgcctccttctcatcctaatcccccttctccagctgatcaacccggggagtactcagtgttccttagactccgttatggataagaagatcaaggatgttctcaacagtctagagtacagtccctctcctataagcaagaagctctcgtgtgctagtgtcaaaagccaaggcagaccgtcctcctgccctgctgggatggctgtcactggctgtgcttgtggctatggctgtggttcgtgggatgttcagctggaaaccacctgccactgccagtgcagtgtggtggactggaccactgcccgctgctgccacctgacctgacagggaggaggctgagaactcagttttgtgaccatgacagtaatgaaaccagggtcccaaccaagaaatctaactcaaacgtcccacttcatttgttccattcctgattcttgggtaataaagacaaactttgtacctctc

SEQ ID NO: 224979 - DNA, 336 bp, Artificial Sequence
  derived and/or modified sequence
atgggccccagcagctgcctgctgctgatcctgatccccctgctgcagctgatcaaccccggcagcacccagtgcagcctggacagcgtgatggacaagaagatcaaggacgtgctgaacagcctggagtacagccccagccccatcagcaagaagctgagctgcgccagcgtgaagagccagggcagacccagcagctgccccgccggcatggccgtgaccggctgcgcctgcggctacggctgcggcagctgggacgtgcagctggagaccacctgccactgccagtgcagcgtggtggactggaccaccgccagatgctgccacctgacctag

SEQ ID NO: 224980 - DNA, 336 bp, Artificial Sequence
  derived and/or modified sequence
atgggtccctcctcctgcctgctgctaatactgatccccctgctccagctgataaatcccgggtctacccagtgcagcctggattctgttatggacaaaaagatcaaagacgtgcttaactcacttgagtactcacccagcccaataagcaagaagttgagttgcgcatctgtcaagagccagggtcggccttcgtcctgtccagcaggaatggctgttaccgggtgcgcctgtgggtacgggtgcggcagctgggacgtccaactagaaactacgtgccactgtcagtgctcagtggttgactggacaaccgcgaggtgctgtcacctaacctag

SEQ ID NO: 224981 - DNA, 336 bp, Artificial Sequence
  derived and/or modified sequence
atgggccccagcagctgcctgctgctgatcctgatccccctgctgcagctgatcaaccctggcagcacccagtgcagcctggacagcgtgatggacaagaagatcaaggatgtgctgaacagcctggagtacagccccagccccatcagcaagaagctgagctgtgcctctgtgaagagccagggccggcccagcagctgcccagctggcatggctgtgacaggctgtgcctgtggctacggctgcggctcctgggatgtgcagctggagaccacctgccactgccagtgcagcgtggtggactggaccacagcccgctgctgccacctgacctag

SEQ ID NO: 224982 - DNA, 336 bp, Artificial Sequence
  derived and/or modified sequence
atgggccccagcagctgcctgctgctgatcctgatccccctgctgcagctgatcaatccaggttcaacgcagtgcagcctggacagcgttatggataaaaagataaaagacgtcctgaattcgctggaatattccccatctcctatctctaaaaaactctcttgcgcatcagtgaagtcgcaaggccgtccatctagctgccccgctggcatggccgttaccggatgcgcgtgtgggtacggttgcggatcctgggacgtgcagcttgaaaccacctgtcattgccagtgcagcgtggtggactggaccacagctaggtgttgccacctcacttag

SEQ ID NO: 224983 - RNA, 336 nt, Artificial Sequence
  derived and/or modified sequence
augggcccuaguucuugucuucuucugauccuaauuccccuucugcagcuaauaaaccccggaucuacucaauguagccucgacagcgucauggauaagaagaucaaagauguccucaauagccuggaauauagccccagcccaauuagcaaaaaauuaucuugcgcaucagugaaaucccaagggcguccuagcucuugucccgcuggcauggccgugacagggugugcaugcggcuacgguugugguaguugggaugugcaauuggagacaacuugccacugucagugcucugucguggauuggacaacugcacgcuguugccaccuuaccuag

SEQ ID NO: 224984 - RNA, 336 nt, Artificial Sequence
  derived and/or modified sequence
auggggccuucuucuugccugcugcuuauucugaucccacuccuacagcuaaucaauccuggcaguacucaguguuccuuggacucaguaauggacaagaaaauuaaagauguguugaacagccuggaguacucucccaguccaauuuccaaaaaguuguccugcgccuccgucaaaucccagggacgcccuucaucaugccccgccggaauggcugucacaggaugugccugcgguuaugggugugggucaugggacguccagcucgaaaccacaugucacugucaguguaguguaguggauuggacuaccgcgcguugcugccaccuaaccuag

SEQ ID NO: 224985 - protein, 225 aa, Artificial Sequence
  derived and/or modified sequence
MVTRDRAENRDGPKMLKPLVEKRRRDRINRSLEELRLLLLERTRDQNLRNPKLEKAEILEFAVGYLRERSRVEPPGVPRSPVQDAEALASCYLSGFRECLLRLAAFAHDASPAARAQLFSALHGYLRPKPPRPKPVDPRPPAPRPSLDPAAPALGPALHQRPPVHQGHPSPRCAWSPSLCSPRAGDSGAPAPLTGLLPPPPPPHRQDGAPKAPLPPPPAFWRPWP

SEQ ID NO: 224986 - DNA, 1684 bp, Artificial Sequence
  derived and/or modified sequence
gaggagcaatggtcacccgggatcgagctgagaatagggacggccccaagatgctcaagccgcttgtggagaagcggcgccgggaccgcatcaaccgcagcctggaagagctgaggctgctgctgctggagcggacccgggaccagaacctccggaacccgaagctggagaaagcggagatattggagttcgccgtgggctacttgagggagcgaagccgggtggagcccccgggggttccccggtccccagtccaggacgccgaggcgctcgccagctgctacttgtccggtttccgcgagtgcctgcttcgcttggcggccttcgcgcacgacgccagcccggccgcccgcgcccagctcttctccgcgctgcacggctatctgcgccccaaaccgccccggcccaagccggtagatccgaggcctccagcgccgcgcccatccctggaccccgccgcaccggcccttggccctgcgctgcaccagcgccccccagtgcaccagggccaccctagcccgcgctgcgcatggtccccatccctctgctccccgcgcgccggggattctggcgcgccggcgcccctcaccggactgctgccgccgccaccgccgcctcacagacaagacggggcgcccaaggccccgctgcccccgccgcccgctttctggagaccttggccctgagccttggggggtggtgggggcggggtctaggggtggggtagagactccagcccgagggcagcagagggacccgggcgtccgggcgagcaggtgttggggagggcagtggggcgcgcgggctcagcgcgcgggtgagatgtggtctatattagagtatctatataaatatatatttccctggttcctgtcccttttccctgccccaacttctcccttgcgtctaggattgtactctctctgcccctcagcccagtcccagtcccttcccgagtccctagtgcatggaataaagtggttattaaatccccgtgtgtccccgagccaggggcctgcctttatctcgacgtccacgcccactttcccttcccttctgtctcccaccctcagtcctgctctccatggcccaagccccggggcagacaggtaagtaaagaagagagcagagcgggaactgagatcgaaattgaaaccaggtggaaagagagagatagggtagggggagaagggatgggggcctttaagaaaaaaacggataaaaaggaaaaattgaaataaaatcgactctggtgggattcgaacccacaacctttgaattgctctattcgtcactagaagtccaatgcgctatccattgcgccacagagccacccgacgaacggcggcgtcttgtagcttacgggtactagagtgggaatggggcagggttggggagcggggctaagggacttgggcgggacatgccaggagggcgcggtttggatctcagaggccaagccaggtagaggtagcgggcgcaaagcatgttagccaggtgagagagagggcgcacatgggtcgaaaaaacagggagggagagcaaccgaaaatggctgagcgagcgagtgcagagctccggctgcccgcttggggggtgtttccggctcaggcgctccccactcccagatatagtcccacccaaataaactagttttgttgtaaattaaaaaaaaaaaaaaaaa

SEQ ID NO: 224987 - DNA, 678 bp, Artificial Sequence
  derived and/or modified sequence
atggtgacgagagatagagcggagaacagagacgggccgaagatgctgaagccattggtggagaagaggcgccgtgatcggatcaataggagtctggaggagctgcggctgctgctgctagaaaggacgcgcgaccagaacctccgaaacccgaagcttgaaaaggccgaaatactggaatttgccgtgggctatctgcgagaacgttctagggttgaacctccaggggtgcctaggagcccagtccaggatgctgaggcattggcttcttgctacttgtccggattcagggaatgcctccttagactggcggctttcgcacatgatgcgagcccagctgcacgggcgcagcttttctccgcattgcatggctatcttcgccctaaacctcctagacccaagcccgtggaccctcgaccaccagccccgaggccttcgctcgaccccgctgcaccagcactcgggcctgccctgcatcagcggcccccggtgcaccagggccatccctcccctcggtgtgcttggtccccctcgctgtgttcacctagggcgggtgattctggggcccccgccccactgactggattgttgccgcctccgccccccccccacaggcaggacggagctccaaaggcccccttgcctccgccaccagctttctggcgaccttggccttag

SEQ ID NO: 224988 - DNA, 1667 bp, Artificial Sequence
  derived and/or modified sequence
gaggagcaatggtcacccgggatcgagctgagaatagggacggccccaagatgctcaagccgcttgtggagaagcggcgccgggaccgcatcaaccgcagcctggaagagctgaggctgctgctgctggagcggacccgggaccagaacctccggaacccgaagctggagaaagcggagatattggagttcgccgtgggctacttgagggagcgaagccgggtggagcccccgggggttccccggtccccagtccaggacgccgaggcgctcgccagctgctacttgtccggtttccgcgagtgcctgcttcgcttggcggccttcgcgcacgacgccagcccggccgcccgcgcccagctcttctccgcgctgcacggctatctgcgccccaaaccgccccggcccaagccggtagatccgaggcctccagcgccgcgcccatccctggaccccgccgcaccggcccttggccctgcgctgcaccagcgccccccagtgcaccagggccaccctagcccgcgctgcgcatggtccccatccctctgctccccgcgcgccggggattctggcgcgccggcgcccctcaccggactgctgccgccgccaccgccgcctcacagacaagacggggcgcccaaggccccgctgcccccgccgcccgctttctggagaccttggccctgagccttggggggtggtgggggcggggtctaggggtggggtagagactccagcccgagggcagcagagggacccgggcgtccgggcgagcaggtgttggggagggcagtggggcgcgcgggctcagcgcgcgggtgagatgtggtctatattagagtatctatataaatatatatttccctggttcctgtcccttttccctgccccaacttctcccttgcgtctaggattgtactctctctgcccctcagcccagtcccagtcccttcccgagtccctagtgcatggaataaagtggttattaaatccccgtgtgtccccgagccaggggcctgcctttatctcgacgtccacgcccactttcccttcccttctgtctcccaccctcagtcctgctctccatggcccaagccccggggcagacaggtaagtaaagaagagagcagagcgggaactgagatcgaaattgaaaccaggtggaaagagagagatagggtagggggagaagggatgggggcctttaagaaaaaaacggataaaaaggaaaaattgaaataaaatcgactctggtgggattcgaacccacaacctttgaattgctctattcgtcactagaagtccaatgcgctatccattgcgccacagagccacccgacgaacggcggcgtcttgtagcttacgggtactagagtgggaatggggcagggttggggagcggggctaagggacttgggcgggacatgccaggagggcgcggtttggatctcagaggccaagccaggtagaggtagcgggcgcaaagcatgttagccaggtgagagagagggcgcacatgggtcgaaaaaacagggagggagagcaaccgaaaatggctgagcgagcgagtgcagagctccggctgcccgcttggggggtgtttccggctcaggcgctccccactcccagatatagtcccacccaaataaactagttttgttgtaaatt

SEQ ID NO: 224989 - DNA, 678 bp, Artificial Sequence
  derived and/or modified sequence
atggtgacccgggacagagctgagaacagagatggccccaagatgctgaagcccctggtggagaagagaagaagagaccgcatcaacagaagcctggaggagctgcggctgctgctgctggagaggacccgggaccagaacctgaggaaccccaagctggagaaggccgagatcctggagtttgctgtgggctacctgcgggagaggagccgggtggagcccccaggagtgcccaggagccctgtgcaggatgctgaggccctggccagctgctacctgagcggcttccgggagtgcctgctgcggctggccgcctttgcccatgatgccagccctgctgcccgggcccagctgttcagcgccctgcacggctacctgcggcccaagccaccccggcccaagcctgtggacccccggcccccagccccccggcccagcctggaccctgctgccccagccctgggccctgccctgcaccagaggcctcctgtgcaccagggccaccccagcccccgctgtgcctggagccccagcctgtgcagcccccgggccggggacagcggggccccagcccccctgaccggcctgctgcccccacctcctccaccccaccggcaggatggagcccccaaggcccccctgcccccacctccagccttctggaggccctggccctag

SEQ ID NO: 224990 - DNA, 678 bp, Artificial Sequence
  derived and/or modified sequence
atggtgacccgggaccgggccgagaaccgggacggccccaagatgctgaagccgctggtggaaaaaagaaggcgcgataggattaaccgttcgctggaggaacttcgtcttctgctcctagagcgcacccgagaccaaaacctgcgcaatcctaagcttgaaaaggccgaaatacttgagtttgccgtgggttatctgcgcgaacgctctcgcgttgaacctcctggagtgcctcggagcccggtacaggacgcagaggcattagcgagctgctacctgtctggtttcagagagtgcttgctgcgcctggcagcgtttgcacacgacgctagtcctgccgcgcgtgcgcaattattttccgcgctgcatggatacctgagacccaaacccccccgccccaaacctgtggatccacgacctcctgccccacggccttccttggacccagcagcacctgctctcggaccggctctccaccagaggcctcctgtccatcagggccatccatcccctagatgcgcatggtcccccagcctatgctcccctcgggcaggagattccggcgctcctgcaccgctgacaggcttgcttccgccgccccctcctcctcatcgacaagatggcgctcctaaagctcctctgcctccaccaccagcgttctggcggccctggccatag

SEQ ID NO: 224991 - DNA, 678 bp, Artificial Sequence
  derived and/or modified sequence
atggttaccagagatcgcgcagagaaccgcgacgggcctaagatgctaaagcctctggtagagaagcgaagaagggatcgaatcaaccgaagtcttgaagagctgcgactgctgttgctagagagaaccagggaccagaatttacgcaatcctaagctggagaaggcggagattctggaatttgcagtgggctacctgcgagaaagatcaagggtggagcccccaggcgtgccgagaagtcctgtgcaggatgccgaggcactcgcaagttgttatctctctggattccgggagtgtctgctgcgcttagcagcattcgcacacgacgccagccctgctgctcgggcacagttgttctcagctctacacggataccttagaccaaagcctcctagacctaaacccgttgaccccaggccacctgcacccagaccttctttagacccagctgcccctgcactgggcccagccctgcatcagcgccctcctgtccatcaagggcaccccagtcccagatgcgcatggagcccctcactgtgctctcctcgggctggagattcaggggcaccagcaccgttgaccgggctactacccccacctccaccaccccacagacaggatggggcacccaaggccccactgccaccacctccggctttctggcgcccatggccttag

SEQ ID NO: 224992 - DNA, 678 bp, Artificial Sequence
  derived and/or modified sequence
atggtgaccagagacagagccgagaacagagacggccccaagatgctgaagcccctggtggagaagagaagaagagacagaatcaacagaagcctggaggagctgagactgctgctgctggagagaaccagagaccagaacctgagaaaccccaagctggagaaggccgagatcctggagttcgccgtgggctacctgagagagagaagcagagtggagccccccggcgtgcccagaagccccgtgcaggacgccgaggccctggccagctgctacctgagcggcttcagagagtgcctgctgagactggccgccttcgcccacgacgccagccccgccgccagagcccagctgttcagcgccctgcacggctacctgagacccaagccccccagacccaagcccgtggaccccagaccccccgcccccagacccagcctggaccccgccgcccccgccctgggccccgccctgcaccagagaccccccgtgcaccagggccaccccagccccagatgcgcctggagccccagcctgtgcagccccagagccggcgacagcggcgcccccgcccccctgaccggcctgctgcccccccccccccccccccacagacaggacggcgcccccaaggcccccctgccccccccccccgccttctggagaccctggccctag

SEQ ID NO: 224993 - protein, 521 aa, Artificial Sequence
  derived and/or modified sequence
MFTSEKGVVEEWLSEFKTLPETSLPNYATNLKDKSSLVSSLYKVIQEPQSELLEPVCHQLFEFYRSGEEQLLQFTLQFLPELIWCYLAVSASRNVHSSGCIEALLLGVYNLEIVDKQGHTKVLSFTIPSLSKPSVYHEPSSIGSMALTESALSQHGLSKVVYSGPHPQREMLTAQNRFEVLTFLLLCYNAALTYMPSVSLQSLCQICSRICVCGYPRQHVRKYKGISSRIPVSSGFMVQMLTGIYFAFYNGEWDLAQKALDDIIYRAQLELYPEPLLVANAIKASLPHGPMKSNKEGTRCIQVEITPTSSRISRNAVTSMSIRGHRWKRHGNTELTGQEELMEISEVDEGFYSRAASSTSQSGLSNSSHNCSNKPSIGKNHRRSGGSKTGGKEKETTGESCKDHFARKQTQRAQSENLELLSLKRLTLTTSQSLPKPSSHGLAKTAATVFSKSFEQVSGVTVPHNPSSAVGCGAGTDANRFSACSLQEEKLIYVSERTELPMKHQSGQQRPPSISITLSTD

SEQ ID NO: 224994 - DNA, 6129 bp, Artificial Sequence
  derived and/or modified sequence
gagaggctggcggcagtggtggctctcccggctgggttgtcagtcagtgagaggagggggaagatggctcaccgggacccgttctgctaggaagaaggggagcaggtggtgctgctactcgggaggaagcagagcagcctccgtcgctgtcgctgagagcctcacgagtcgaggtcctgcaggtggagctccggcagccgccctggttgaaggtttagaacagatgtggaaaaatgtttacttcagagaaaggggttgtggaggaatggttgtcagagtttaagacattaccagaaacatctttaccaaattatgccacaaatttgaaagacaagagttctttagtttcatctctctataaagttatccaggagccacaaagtgagttgctagaacctgtctgtcaccagctctttgaattctatcgcagtggagaggagcagttgcttcaatttacgctgcaatttctcccagaactaatttggtgctaccttgcagtctcagccagcagaaatgtgcatagcagtggatgcattgaagctcttcttctaggggtttacaatttggaaatagttgacaaacagggacataccaaagtattgagttttacgattccatctttatccaaaccatctgtataccatgaaccttccagcattgggtccatggctctgactgagagtgcactatcccagcatggtttgtcaaaagtggtatacagtggacctcatcctcaaagggagatgctgacagcacagaatcggtttgaagtgttgacattccttttgttgtgttacaatgctgccttaacttacatgcccagtgtttctcttcagtcactgtgtcaaatttgttcaagaatctgtgtttgtggatatcctcgacaacatgtaagaaaatataaaggtataagtagcaggataccagtttcttcaggattcatggtgcaaatgttaacagggatttattttgccttttataatggagaatgggatctagctcaaaaagcactggatgatattatatacagagcccagctagaattatatccagagccattgctggttgctaatgcaataaaggcttcattgcctcatggtcccatgaaatctaataaggaaggtacaaggtgtattcaagttgaaatcacaccaacttcctctcgaatatcaagaaatgcagtaaccagcatgtcaataaggggtcataggtggaaaagacatggaaatacagaattaacaggtcaagaagaactgatggagatatctgaagttgacgagggattttattccagggctgcgtctagtaccagccagtcgggtttatcaaacagtagtcacaattgtagtaacaagccaagtataggaaagaaccacagacggtcaggaggaagcaaaactggaggaaaagaaaaagaaactacaggggaatcttgcaaagatcactttgctcgaaaacaaactcagagagcccaaagtgagaatcttgagcttctctctttgaagagacttactttaacaaccagccaatccctacctaagcctagtagccatggtttggctaagaccgcagcgactgtatttagtaaatcctttgaacaagtcagtggtgtcacagtcccacataacccgtcatctgctgttggttgtggggctgggacagatgccaataggttttccgcttgtagtctccaagaagaaaagcttatttacgtttcagaaagaactgaacttccaatgaagcatcaatcaggtcagcagagacctcctagtattagcattactctgtccacagattaattagtaacatatttttctcccataacctagtgaacctggaaatacaactttgcttctttatgaaagtaccctgggtctttcatccgtattcctgacaggagccctgatgtcttaaattctgaaggctcccctgactttatgaagggaagattgtctaggttgcagtaagttgaaatatggttttgttatttcttgattaagattttttccccttggtttgagtcttttttttccctcctcttatttgttattgttgccctaagattgtcagtgacaataaattttgacaggttgtctaatcaagttggttatgtctcatgtgaggttgtaaggtggtttttcttgttttggtttggtttggttttttaatagctcctattttgatggctgtgtgtttggccttcagagtcaaagggagtctgcatgtatgggaactgttttatagagaatggggcagaggcacaactccaggaattctctagctcctggtcaggaagccaatctgaaaacaggcatgtggaaacacaaaaatgatgtgtatgaaaagcacctgatgaaaatatttgtaagcagatcatctttatgattagaacaatttgctcaaagccctggaaaatgcctggtaacccagtgcctagaatattatatgattccaggggatggctagaggcatttctgttgttatctctgaaacatttttatatcaaaaatcagattgctggtaggtgtgttgttttgaagtgttttatctggatttagcatgtgaagatccctttcaattattaaggtataataggctgtaaagctgatttaccctactgctggactttggaaatcctagttagtttggactcctataattcagagcatacgtcattggaagacttcctggaaatcagtgtaaatcttgcaacatagctctcaagataccactgtataatatgtaattgtttgtctgcaaatgcatttttcatctataaaatgtcatgaaagaaaataaaggtagtgaaatatggacaaaggacatttatatattaactaaagttgtttatgtttgtgttcttaaatttaaaacacgaagaaaaagaaatgtctttcttgttagtgaacaggcctgttttaaatatcttagtatgatatcaaaagaataatcaatttagttacctcccaactaaaaagtaaaaatgaaaaagacgacatggcagaagttgaaacaaacttgtatgtatctgtatgtgacctctagatggaaataaaagtttgatgtttgctagccgtggtccttttggctatggttgcggttcccctgtaaagcaaatgtacttaagtcatcattcagagtgagagagagaaagcacggctgaggctgagtcagttgaccgttgaggaagacctaaggagctgtccagttcttggctctttttcactgtgactgcacagcggtttccttcttcatagtcccttgctgtagtcaccaagagagcatgctagtgttttcctcttgttcctgcttatgcagagctcagatatatgaaaaatttgtatgctttgaaggctgccaaagcatttatactctggacatagttttaactgcaactgctttggctaccagtttaaaccgagttcttcaaaaagcatgaactcgttttcattcattagccctgtttacaatgtggattttgacataaatgaatttgattttcttttagctccagtaacagaatggaataagatctattgccataaattgtagttaagaactgtaaggcaatcgggcagtgaaacttgatattgtattaacttaataggaaccctgtgtacaatttaaaatatttgtaaaatatcactgtgaatttacagatgtctttttgtcattctttaacaatgaatttcccctgtgcatagttattaatagtattggtattattaaaaactaatttggcattttaagattggcattttaagcaagttgaggtgcttaggaaacattgtagaataagtttggggaaatgttagctgacagagctgagagatcagattttcatgttctatcactgtaatggaacctcatttagacctctctagacctttgctagctgtgtggtctgaggaccagtaagtaggattggcattatctggtatcttgttaaaaatgcagaatttcatgccactctaggtctactaaatcagaatttgcattcttaacaaggttcccaagtgatttttatgagaagaaagtatcagagtgcaaacaaattactcgtctaatatgtagaattcccagtggtctcacagccctagatcaaatgtgtcagacactagatcattataatcttcattggttttgacagctaattaattagtttaataatattgacatatggcttcttaagtatttgaattctagattgctaatgatccttatttttgcagtaaaaaagtaacactttatatttttcttgttaactataaatggaatcagagctgtaaatgcctgaaattttaagtgtgaaaaggggtgccacccttttatatactgcacaacaaatttgcatttgtatattctttttaaaaaatctctgaagacttgctcagtgaaatggttctgattttttgcttcaaatgatttgcactaattgattttctggagagcggagttacgttaacaacaaaattcttttatagttcctttgatactatttcaaataaggattacacattgaaagtttttatagaaattatgaaaattggataatcttaactatggtaaccattactattatccatactactttctccccactgaactttcaaatttgaaaattggggtagcttttgtaggtcactttcttataaagatgctgatggtcacagatctcctaagtatccagaataatatttttatcatgagaaggattccacacaaaattggggtcttgcaccccatatttcagaggatctgaacagaaattgtggcttcattgcacattttaaatctctatagattcttgaaatcacccaacctctcacatttgaaaacccaacggcctggagtattctggtggcactggagccagcactagctttttggaatccaagtggggagagaaacaaaaatagacttttcaagggactgtcccagactacccagggcaaatgtcttcccttcccttcctgaagccacaggaaagcaccctggagtcctttgtataccactatggaaatttttaaggcaagctctcaagacttgaagagttggaattctcggcatttaaatgatgcctgaagtttgttttgaaaaagcaatatttcattgctcttttcaattgtgaagcaactgctcagcaaatattactcatttttttaaaaagttgaattaaagggaaatatatttttaaaaccaaaatagatcaaaatgatcccagttttaagggattttgcctattttggaagaataaaactaaaatgttaaaactgttgaattacagagaacagatgtactctgagacataattttaaacaaatatttaaaataaggcaggttaacatttgcgtttaggcacaataaatctgtattaaagggaagcacatcaaggaaatatatacatgttgaataatgtaactgaaaaatattttttaaaaaccacttaaaaagaaaaataatttgatgggtactttaagcattgtagatagaaattaatgtataatagtgtcctcccagtctttgtatgaaaaattaaaactctctagtcctttaatgagcatgaatttatacttctacatttgttgcttagtaaaattatactcagtactttgagttattcagatttatgtttaatattgttaaattcttcatcagagagcataaatatattgtcttctatactttgtaacttgtgcatatctaaagaaactaacaacgaacattttgggagatgtttttgtgtttttttatagtagagttttagagtacatttgtcttaataggaagtttttaccataaacccaagattttatttcacgtattgttgctttctcttatatggaacttattgtgtacctcttacctttatttctaatcatttagtgatactaatcttttcatagtaaatatatttgtttctaattgtattcctagagtttacattcctaaagaataaacgacgactttggctatttttgtgtgttccctaccttcttaaggctatggaaataaactggagtttagttttttgaatttttgtatatttgtgtaaatgttctccatatgtagtactttatacaacaagtgttgcctcttgttttattgaaataaaaactgaaaaaaata

SEQ ID NO: 224995 - DNA, 1566 bp, Artificial Sequence
  derived and/or modified sequence
atgttcacatctgagaagggagtggtggaggaatggctgtcggaatttaaaaccctgccagagactagtctgcccaactacgcaaccaacctcaaggataagtcatctctcgtgagttcgttgtacaaggttattcaggagcctcagagtgaactccttgaacccgtgtgccaccagctcttcgagttctatagatctggagaagaacagttgctccagtttacgttgcagttccttcccgaacttatctggtgttacctggccgtgtcagcaagcaggaatgtgcattcctctggctgcatcgaagctctgctgctgggcgtgtacaacttggaaattgtcgacaaacaagggcatactaaagtcctgagcttcaccatcccatcactttctaagcctagcgtgtatcacgagccttcctctatcggatccatggccctgactgaatccgccctatcgcagcatgggctgtccaaggtggtgtactccggccctcatcctcagagagagatgctgaccgcccagaacaggttcgaggttctgacatttctactcctgtgttataatgcagctctgacctacatgccaagcgtgtcactgcagtcactgtgccaaatctgttctcgaatctgcgtgtgcgggtaccccagacagcacgtgcgtaaatacaaggggatttcttccagaatccccgtttcttctggtttcatggtccagatgctgacaggaatttactttgccttttataatggcgagtgggacctggcacaaaaagctctggacgacatcatataccgagcccagctcgaactctatccagagcctcttctggtcgccaatgccataaaggcttccctgccgcacggacctatgaaatcaaacaaagaaggtacccggtgcatccaagtggaaatcacccctacatcatccaggatctcccggaatgcagtgaccagcatgtcaattcgaggccatagatggaaaaggcatgggaacactgaacttactgggcaggaagaactcatggaaatcagcgaggttgacgagggcttttattcccgggccgctagcagcacttcacagagtggtttgagcaactcgtcacataactgctccaacaagccaagtatcggcaagaaccatagacgctccgggggaagcaagaccggaggcaaagagaaagaaactacaggggaaagctgcaaggaccattttgccaggaagcagacacagagagctcagagtgaaaacttggaattgcttagcctcaaacgactcactctgactacgtcccagtcactgcctaaacccagttcccacggacttgctaagactgccgcaacagtattcagcaagtcctttgaacaggtgtccggcgtgactgttccccacaacccctctagcgctgtcggctgcggcgccggcaccgatgcaaatcggttctcagcctgcagtctccaggaggaaaagctgatttacgtgtctgagcggacagagcttcctatgaaacaccagtccggccaacagcgcccacctagcatcagtattactctcagcaccgattag

SEQ ID NO: 224996 - DNA, 1566 bp, Artificial Sequence
  derived and/or modified sequence
atgttcaccagcgagaagggcgtggtggaggagtggctgtctgagttcaagaccctgcctgagaccagcctgcccaactatgccaccaacctgaaggacaagagcagcctggtgagcagcctgtacaaggtgatccaggagccccagagcgagctgctggagcctgtgtgccaccagctgtttgagttctaccgcagcggggaggagcagctgctgcagttcaccctgcagttcctgcctgagctgatctggtgctacctggccgtgtctgccagcagaaatgtgcacagcagcggctgcatcgaggccctgctgctgggcgtgtacaacctggagatcgtggacaagcagggccacaccaaggtgctgtccttcaccatccccagcctgagcaagcccagcgtgtaccacgagcccagcagcatcggctccatggccctgacagagagcgccctgagccagcacggcctgagcaaggtggtgtacagcggcccccacccccagcgggagatgctgacagcccagaacagatttgaggtgctgaccttcctgctgctgtgctacaatgctgccctgacctacatgcccagcgtgtccctgcagagcctgtgccagatctgcagccgcatctgtgtgtgtggctacccccggcagcacgtgaggaagtacaagggcatcagcagccgcatccctgtgagcagcggcttcatggtgcagatgctgaccggcatctactttgccttctacaacggggagtgggacctggcccagaaggccctggatgacatcatctaccgggcccagctggagctgtacccagagcccctgctggtggccaatgccatcaaggccagcctgccccacggccccatgaagagcaacaaggagggcacccgctgcatccaggtggagatcacccccaccagcagccgcatcagcagaaatgctgtgacctccatgagcatccggggccaccgctggaagagacatggcaacacagagctgaccggccaggaggagctgatggagatcagcgaggtggatgagggcttctacagcagagctgccagcagcaccagccagagcggcctgagcaacagcagccacaactgcagcaacaagcccagcatcggcaagaaccaccggcgcagcggcggcagcaagacaggaggcaaggagaaggagaccactggagagagctgcaaggaccactttgccaggaagcagacccagagggcccagagcgagaacctggagctgctgagcctgaagaggctgaccctgaccaccagccagagcctgcccaagcccagcagccacggcctggccaagacagctgccaccgtcttcagcaagagctttgagcaggtgtctggagtgacagtgccccacaaccccagcagcgctgtgggctgtggggccggcacagatgccaaccgcttcagcgcctgcagcctgcaggaggagaagctgatctacgtgtctgagaggacagagctgcccatgaagcaccagagcggccagcagaggcctccttccatcagcatcaccctgagcacagactag

SEQ ID NO: 224997 - DNA, 1566 bp, Artificial Sequence
  derived and/or modified sequence
atgttcaccagcgagaagggcgtggtggaggagtggctgagcgagttcaagacccttcccgagacatccctccccaactacgccaccaatttgaaggataagagctcactagtttcatcactgtacaaagtcatccaagaaccccagagcgaactgctggagccagtctgccatcagctgttcgagttctatcggagcggcgaagagcagctgctgcagttcacgttgcagtttctacctgagctgatctggtgctatctggccgtctcggccagcagaaacgttcacagtagtgggtgcatagaggccctcctgctgggagtctacaacctcgaaattgtcgataagcaagggcacaccaaagtcttgagcttcactatcccttccttgagcaagcccagcgtataccacgagccctcaagcatcggatcaatggcactgacagaatcagctttgagtcagcacggcctcagcaaagtcgtatattcaggcccacacccacagagagaaatgctgacagcccaaaaccgttttgaagtgctgacttttcttttattatgctataatgctgctctaacctacatgccatcggtttccctccagagcctgtgtcagatctgctcgcgcatttgcgtgtgcggttacccgagacagcatgtcagaaagtataagggtattagtagcaggatccctgtgagcagtggattcatggtacagatgcttaccggtatctactttgccttctacaacggcgagtgggacttagcccagaaagctctggacgatattatctaccgtgcacagctggaactataccctgaacccctgctggtcgccaatgcaatcaaagccagcctaccccacggacccatgaaatcgaataaggagggcacaaggtgcatccaggtagagatcaccccgacgtcttcacggatctctcgaaacgccgtgacctcgatgagtattcgcggtcacagatggaagaggcatggaaatactgaattgacaggacaggaggagttgatggaaattagtgaagtggacgaggggttctatagcagagccgcctcttcaacctcacagtctgggttgagtaattcctcgcacaattgttccaataaacctagcatcggaaaaaatcatcgacggtcgggaggttcaaaaaccgggggcaaggagaaggagaccacaggcgagtcctgtaaagaccatttcgcccgtaagcagacgcagagagcccagtcagagaatctggaacttttgtccctgaaaaggctcacgctaacaacaagccagtcattgcctaaaccttcatctcatggattagctaagacagcggccaccgtcttctcgaaatcgttcgaacaggtatctggggttaccgtaccgcacaacccctccagcgcggtggggtgcggagcaggcaccgatgctaatcgcttttctgcctgcagtctccaggaggaaaaactgatatatgtgtcagagcgaactgaactgccgatgaaacatcaatccgggcagcaacggccccctagcatatccataaccttatcaactgactag

SEQ ID NO: 224998 - DNA, 1566 bp, Artificial Sequence
  derived and/or modified sequence
atgtttaccagcgagaaaggcgtggtggaggaatggctgagcgagttcaagacgttgcccgagacttcactgcctaactacgcaactaatctcaaagataagagctcattggtttcttccttatacaaagtgatccaggaacctcagagcgaactgttggagcctgtgtgccatcagctcttcgaattctatcgctccggcgaggagcaactcctgcagttcactctgcaatttctgcccgaacttatatggtgctacctggctgtgtccgcttccagaaacgtgcacagctccggttgtatcgaagcactgcttctcggagtgtacaatctcgaaatcgtagacaaacagggccataccaaggtgctgagctttaccatcccttctctgtccaagccgtcagtgtatcacgaacctagttcaattggaagcatggcgctgacagagtccgcgctgtctcagcatggtctatcgaaggttgtgtattcaggtccacacccccaacgggaaatgctcactgcacagaatcggttcgaggtgctgacgttcctcctgctgtgttataacgctgccttgacatacatgcccagcgtttctctacaatccctttgtcagatctgcagccgcatttgtgtttgcggttatcctcgccagcatgttaggaaatataagggcatttcttcccggattcccgtctcatccggctttatggtgcagatgctgactgggatctatttcgcgttttacaacggagaatgggatctcgcacagaaggcgctcgatgatattatttaccgtgcacaactggagctctacccagagccattgctggtggccaacgctatcaaagcctccttgcctcacggacccatgaaaagcaacaaggaaggtacacgctgcatccaggttgaaattacccccaccagctctcgcataagtagaaatgccgtcacttctatgagcattcggggacaccggtggaagcgacatgggaacaccgagttgaccggccaggaggagctgatggaaattagcgaagtggacgaaggtttctattctcgggctgcgtccagtacttcccagtcaggcctgagcaatagtagtcataactgctccaataagccttcgatcggcaagaatcacaggcgctctggcggtagcaagacaggaggcaaggagaaggagaccacaggagagtcatgcaaggaccatttcgctaggaaacaaactcagagagcacagtcagagaacttagagctgttgagtctcaaacgcctgaccctgactactagccagagtttgccaaagccgtcctctcacggcctggctaaaaccgccgctactgttttctccaaaagttttgaacaggtgtctggcgtgactgttccacataacccaagcagtgcagttggctgcggcgctggaacggatgcgaaccggttcagtgcgtgctctctgcaggaggagaagctaatatacgtgtctgaacgcacagaattaccgatgaagcaccaatcgggccagcagcggccacccagcatctctatcacgctgtctacagactag

SEQ ID NO: 224999 - DNA, 1566 bp, Artificial Sequence
  derived and/or modified sequence
atgttcaccagcgagaagggcgtggtggaggagtggctgagcgagttcaagaccctgcccgagaccagcctgcccaactacgccaccaacctgaaggacaagagcagcctggtgagcagcctgtacaaggtgatccaggagccccagagcgagctgctggagcccgtgtgccaccagctgttcgagttctacagaagcggcgaggagcagctgctgcagttcaccctgcagttcctgcccgagctgatctggtgctacctggccgtgagcgccagcagaaacgtgcacagcagcggctgcatcgaggccctgctgctgggcgtgtacaacctggagatcgtggacaagcagggccacaccaaggtgctgagcttcaccatccccagcctgagcaagcccagcgtgtaccacgagcccagcagcatcggcagcatggccctgaccgagagcgccctgagccagcacggcctgagcaaggtggtgtacagcggcccccacccccagagagagatgctgaccgcccagaacagattcgaggtgctgaccttcctgctgctgtgctacaacgccgccctgacctacatgcccagcgtgagcctgcagagcctgtgccagatctgcagcagaatctgcgtgtgcggctaccccagacagcacgtgagaaagtacaagggcatcagcagcagaatccccgtgagcagcggcttcatggtgcagatgctgaccggcatctacttcgccttctacaacggcgagtgggacctggcccagaaggccctggacgacatcatctacagagcccagctggagctgtaccccgagcccctgctggtggccaacgccatcaaggccagcctgccccacggccccatgaagagcaacaaggagggcaccagatgcatccaggtggagatcacccccaccagcagcagaatcagcagaaacgccgtgaccagcatgagcatcagaggccacagatggaagagacacggcaacaccgagctgaccggccaggaggagctgatggagatcagcgaggtggacgagggcttctacagcagagccgccagcagcaccagccagagcggcctgagcaacagcagccacaactgcagcaacaagcccagcatcggcaagaaccacagaagaagcggcggcagcaagaccggcggcaaggagaaggagaccaccggcgagagctgcaaggaccacttcgccagaaagcagacccagagagcccagagcgagaacctggagctgctgagcctgaagagactgaccctgaccaccagccagagcctgcccaagcccagcagccacggcctggccaagaccgccgccaccgtgttcagcaagagcttcgagcaggtgagcggcgtgaccgtgccccacaaccccagcagcgccgtgggctgcggcgccggcaccgacgccaacagattcagcgcctgcagcctgcaggaggagaagctgatctacgtgagcgagagaaccgagctgcccatgaagcaccagagcggccagcagagaccccccagcatcagcatcaccctgagcaccgactag

SEQ ID NO: 225000 - protein, 1604 aa, Artificial Sequence
  derived and/or modified sequence
MGAKESRIGFLSYEEALRRVTDVELKRLKDAFKRTCGLSYYMGQHCFIREVLGDGVPPKVAEVIYCSFGGTSKGLHFNNLIVGLVLLTRGKDEEKAKYIFSLFSSESGNYVIREEMERMLHVVDGKVPDTLRKCFSEGEKVNYEKFRNWLFLNKDAFTFSRWLLSGGVYVTLTDDSDTPTFYQTLAGVTHLEESDIIDLEKRYWLLKAQSRTGRFDLETFGPLVSPPIRPSLSEGLFNAFDENRDNHIDFKEISCGLSACCRGPLAERQKFCFKVFDVDRDGVLSRVELRDMVVALLEVWKDNRTDDIPELHMDLSDIVEGILNAHDTTKMGHLTLEDYQIWSVKNVLANEFLNLLFQVCHIVLGLRPATPEEEGQIIRGWLERESRYGLQAGHNWFIISMQWWQQWKEYVKYDANPVVIEPSSVLNGGKYSFGTAAHPMEQVEDRIGSSLSYVNTTEEKFSDNISTASEASETAGSGFLYSATPGADVCFARQHNTSDNNNQCLLGANGNILLHLNPQKPGAIDNQPLVTQEPVKATSLTLEGGRLKRTPQLIHGRDYEMVPEPVWRALYHWYGANLALPRPVIKNSKTDIPELELFPRYLLFLRQQPATRTQQSNIWVNMGNVPSPNAPLKRVLAYTGCFSRMQTIKEIHEYLSQRLRIKEEDMRLWLYNSENYLTLLDDEDHKLEYLKIQDEQHLVIEVRNKDMSWPEEMSFIANSSKIDRHKVPTEKGATGLSNLGNTCFMNSSIQCVSNTQPLTQYFISGRHLYELNRTNPIGMKGHMAKCYGDLVQELWSGTQKNVAPLKLRWTIAKYAPRFNGFQQQDSQELLAFLLDGLHEDLNRVHEKPYVELKDSDGRPDWEVAAEAWDNHLRRNRSIVVDLFHGQLRSQVKCKTCGHISVRFDPFNFLSLPLPMDSYMHLEITVIKLDGTTPVRYGLRLNMDEKYTGLKKQLSDLCGLNSEQILLAEVHGSNIKNFPQDNQKVRLSVSGFLCAFEIPVPVSPISASSPTQTDFSSSPSTNEMFTLTTNGDLPRPIFIPNGMPNTVVPCGTEKNFTNGMVNGHMPSLPDSPFTGYIIAVHRKMMRTELYFLSSQKNRPSLFGMPLIVPCTVHTRKKDLYDAVWIQVSRLASPLPPQEASNHAQDCDDSMGYQYPFTLRVVQKDGNSCAWCPWYRFCRGCKIDCGEDRAFIGNAYIAVDWDPTALHLRYQTSQERVVDEHESVEQSRRAQAEPINLDSCLRAFTSEEELGENEMYYCSKCKTHCLATKKLDLWRLPPILIIHLKRFQFVNGRWIKSQKIVKFPRESFDPSAFLVPRDPALCQHKPLTPQGDELSEPRILAREVKKVDAQSSAGEEDVLLSKSPSSLSANIISSPKGSPSSSRKSGTSCPSSKNSSPNSSPRTLGRSKGRLRLPQIGSKNKLSSSKENLDASKENGAGQICELADALSRGHVLGGSQPELVTPQDHEVALANGFLYEHEACGNGYSNGQLGNHSEEDSTDDQREDTRIKPIYNLYAISCHSGILGGGHYVTYAKNPNCKWYCYNDSSCKELHPDEIDTDSAYILFYEQQGIDYAQFLPKTDGKKMADTSSMDEDFESDYKKYCVLQ

SEQ ID NO: 225001 - DNA, 4815 bp, Artificial Sequence
  derived and/or modified sequence
atgggcgccaaggagagcagaatcggcttcctgagctacgaggaggccctgagaagagtgaccgacgtggagctgaagagactgaaggacgccttcaagagaacctgcggcctgagctactacatgggccagcactgcttcatcagagaggtgctgggcgacggcgtgccccccaaggtggccgaggtgatctactgcagcttcggcggcaccagcaagggcctgcacttcaacaacctgatcgtgggcctggtgctgctgaccagaggcaaggacgaggagaaggccaagtacatcttcagcctgttcagcagcgagagcggcaactacgtgatcagagaggagatggagagaatgctgcacgtggtggacggcaaggtgcccgacaccctgagaaagtgcttcagcgagggcgagaaggtgaactacgagaagttcagaaactggctgttcctgaacaaggacgccttcaccttcagcagatggctgctgagcggcggcgtgtacgtgaccctgaccgacgacagcgacacccccaccttctaccagaccctggccggcgtgacccacctggaggagagcgacatcatcgacctggagaagagatactggctgctgaaggcccagagcagaaccggcagattcgacctggagaccttcggccccctggtgagcccccccatcagacccagcctgagcgagggcctgttcaacgccttcgacgagaacagagacaaccacatcgacttcaaggagatcagctgcggcctgagcgcctgctgcagaggccccctggccgagagacagaagttctgcttcaaggtgttcgacgtggacagagacggcgtgctgagcagagtggagctgagagacatggtggtggccctgctggaggtgtggaaggacaacagaaccgacgacatccccgagctgcacatggacctgagcgacatcgtggagggcatcctgaacgcccacgacaccaccaagatgggccacctgaccctggaggactaccagatctggagcgtgaagaacgtgctggccaacgagttcctgaacctgctgttccaggtgtgccacatcgtgctgggcctgagacccgccacccccgaggaggagggccagatcatcagaggctggctggagagagagagcagatacggcctgcaggccggccacaactggttcatcatcagcatgcagtggtggcagcagtggaaggagtacgtgaagtacgacgccaaccccgtggtgatcgagcccagcagcgtgctgaacggcggcaagtacagcttcggcaccgccgcccaccccatggagcaggtggaggacagaatcggcagcagcctgagctacgtgaacaccaccgaggagaagttcagcgacaacatcagcaccgccagcgaggccagcgagaccgccggcagcggcttcctgtacagcgccacccccggcgccgacgtgtgcttcgccagacagcacaacaccagcgacaacaacaaccagtgcctgctgggcgccaacggcaacatcctgctgcacctgaacccccagaagcccggcgccatcgacaaccagcccctggtgacccaggagcccgtgaaggccaccagcctgaccctggagggcggcagactgaagagaaccccccagctgatccacggcagagactacgagatggtgcccgagcccgtgtggagagccctgtaccactggtacggcgccaacctggccctgcccagacccgtgatcaagaacagcaagaccgacatccccgagctggagctgttccccagatacctgctgttcctgagacagcagcccgccaccagaacccagcagagcaacatctgggtgaacatgggcaacgtgcccagccccaacgcccccctgaagagagtgctggcctacaccggctgcttcagcagaatgcagaccatcaaggagatccacgagtacctgagccagagactgagaatcaaggaggaggacatgagactgtggctgtacaacagcgagaactacctgaccctgctggacgacgaggaccacaagctggagtacctgaagatccaggacgagcagcacctggtgatcgaggtgagaaacaaggacatgagctggcccgaggagatgagcttcatcgccaacagcagcaagatcgacagacacaaggtgcccaccgagaagggcgccaccggcctgagcaacctgggcaacacctgcttcatgaacagcagcatccagtgcgtgagcaacacccagcccctgacccagtacttcatcagcggcagacacctgtacgagctgaacagaaccaaccccatcggcatgaagggccacatggccaagtgctacggcgacctggtgcaggagctgtggagcggcacccagaagaacgtggcccccctgaagctgagatggaccatcgccaagtacgcccccagattcaacggcttccagcagcaggacagccaggagctgctggccttcctgctggacggcctgcacgaggacctgaacagagtgcacgagaagccctacgtggagctgaaggacagcgacggcagacccgactgggaggtggccgccgaggcctgggacaaccacctgagaagaaacagaagcatcgtggtggacctgttccacggccagctgagaagccaggtgaagtgcaagacctgcggccacatcagcgtgagattcgaccccttcaacttcctgagcctgcccctgcccatggacagctacatgcacctggagatcaccgtgatcaagctggacggcaccacccccgtgagatacggcctgagactgaacatggacgagaagtacaccggcctgaagaagcagctgagcgacctgtgcggcctgaacagcgagcagatcctgctggccgaggtgcacggcagcaacatcaagaacttcccccaggacaaccagaaggtgagactgagcgtgagcggcttcctgtgcgccttcgagatccccgtgcccgtgagccccatcagcgccagcagccccacccagaccgacttcagcagcagccccagcaccaacgagatgttcaccctgaccaccaacggcgacctgcccagacccatcttcatccccaacggcatgcccaacaccgtggtgccctgcggcaccgagaagaacttcaccaacggcatggtgaacggccacatgcccagcctgcccgacagccccttcaccggctacatcatcgccgtgcacagaaagatgatgagaaccgagctgtacttcctgagcagccagaagaacagacccagcctgttcggcatgcccctgatcgtgccctgcaccgtgcacaccagaaagaaggacctgtacgacgccgtgtggatccaggtgagcagactggccagccccctgcccccccaggaggccagcaaccacgcccaggactgcgacgacagcatgggctaccagtaccccttcaccctgagagtggtgcagaaggacggcaacagctgcgcctggtgcccctggtacagattctgcagaggctgcaagatcgactgcggcgaggacagagccttcatcggcaacgcctacatcgccgtggactgggaccccaccgccctgcacctgagataccagaccagccaggagagagtggtggacgagcacgagagcgtggagcagagcagaagagcccaggccgagcccatcaacctggacagctgcctgagagccttcaccagcgaggaggagctgggcgagaacgagatgtactactgcagcaagtgcaagacccactgcctggccaccaagaagctggacctgtggagactgccccccatcctgatcatccacctgaagagattccagttcgtgaacggcagatggatcaagagccagaagatcgtgaagttccccagagagagcttcgaccccagcgccttcctggtgcccagagaccccgccctgtgccagcacaagcccctgaccccccagggcgacgagctgagcgagcccagaatcctggccagagaggtgaagaaggtggacgcccagagcagcgccggcgaggaggacgtgctgctgagcaagagccccagcagcctgagcgccaacatcatcagcagccccaagggcagccccagcagcagcagaaagagcggcaccagctgccccagcagcaagaacagcagccccaacagcagccccagaaccctgggcagaagcaagggcagactgagactgccccagatcggcagcaagaacaagctgagcagcagcaaggagaacctggacgccagcaaggagaacggcgccggccagatctgcgagctggccgacgccctgagcagaggccacgtgctgggcggcagccagcccgagctggtgaccccccaggaccacgaggtggccctggccaacggcttcctgtacgagcacgaggcctgcggcaacggctacagcaacggccagctgggcaaccacagcgaggaggacagcaccgacgaccagagagaggacaccagaatcaagcccatctacaacctgtacgccatcagctgccacagcggcatcctgggcggcggccactacgtgacctacgccaagaaccccaactgcaagtggtactgctacaacgacagcagctgcaaggagctgcaccccgacgagatcgacaccgacagcgcctacatcctgttctacgagcagcagggcatcgactacgcccagttcctgcccaagaccgacggcaagaagatggccgacaccagcagcatggacgaggacttcgagagcgactacaagaagtactgcgtgctgcagtag

SEQ ID NO: 225002 - DNA, 1173 bp, Artificial Sequence
  derived and/or modified sequence
atgggcgccaaggagagcagaatcggcttcctgagctacgaggaggccctgagaagagtgaccgacgtggagctgaagagactgaaggacgccttcaagagaacctgcggcctgagctactacatgggccagcactgcttcatcagagaggtgctgggcgacggcgtgccccccaaggtggccgaggtgatctactgcagcttcggcggcaccagcaagggcctgcacttcaacaacctgatcgtgggcctggtgctgctgaccagaggcaaggacgaggagaaggccaagtacatcttcagcctgttcagcagcgagagcggcaactacgtgatcagagaggagatggagagaatgctgcacgtggtggacggcaaggtgcccgacaccctgagaaagtgcttcagcgagggcgagaaggtgaactacgagaagttcagaaactggctgttcctgaacaaggacgccttcaccttcagcagatggctgctgagcggcggcgtgtacgtgaccctgaccgacgacagcgacacccccaccttctaccagaccctggccggcgtgacccacctggaggagagcgacatcatcgacctggagaagagatactggctgctgaaggcccagagcagaaccggcagattcgacctggagaccttcggccccctggtgagcccccccatcagacccagcctgagcgagggcctgttcaacgccttcgacgagaacagagacaaccacatcgacttcaaggagatcagctgcggcctgagcgcctgctgcagaggccccctggccgagagacagaagttctgcttcaaggtgttcgacgtggacagagacggcgtgctgagcagagtggagctgagagacatggtggtggccctgctggaggtgtggaaggacaacagaaccgacgacatccccgagctgcacatggacctgagcgacatcgtggagggcatcctgaacgcccacgacaccaccaagatgggccacctgaccctggaggactaccagatctggagcgtgaagaacgtgctggccaacgagttcctgaacctgctgttccaggtgtgccacatcgtgctgggcctgagacccgccacccccgaggaggagggccagatcatcagaaccctggagaccgaccagatctacaccagaaactag

SEQ ID NO: 225003 - DNA, 4815 bp, Artificial Sequence
  derived and/or modified sequence
atgggggccaaagaatcgcggatcgggtttttatcctacgaggaggctctgcgacgggtgaccgatgtagagctgaagcgacttaaagatgcgttcaagcgaacctgtgggctgtcctactatatgggtcagcattgtttcattagagaagtcctgggagatggggtgcccccaaaggtcgccgaagtgatttattgtagctttggcggcacctcaaagggtttacactttaacaacctaatcgttggcctggttttgctcaccagaggaaaagacgaggaaaaagccaagtatatcttttccctgttctcatcagaatctgggaactacgttatccgggaggagatggagaggatgctgcatgtcgttgacggcaaggttccagatacgctacgcaagtgtttttctgagggggaaaaggtgaactacgagaaattccgaaattggttattcctcaacaaagatgctttcactttttcacgatggctactgagtggtggggtttatgtgacactcacagacgatagtgatacacccactttctaccagactctggccggcgtcacgcacctggaggagagcgacataattgatctcgagaagaggtactggttactgaaggctcagtcccgcaccgggagatttgatcttgagacgttcggaccactggtatcccctccaattaggcctagcctaagcgagggattgttcaacgcattcgatgaaaatagagacaaccatattgacttcaaggaaatctcgtgtgggctgtctgcatgctgcagaggtccgctggcggaaagacagaaattttgtttcaaggtgtttgatgttgaccgagatggggtcctgtcacgcgtggagctacgagatatggttgtagcacttctagaagtgtggaaggacaaccgcaccgacgatattccagaactgcacatggacctgtctgacatcgtcgagggtattctgaacgcacatgatacaactaagatgggtcatctgactctagaggactaccagatttggagcgtaaagaatgtgttggcaaacgagtttctcaacttgcttttccaagtttgccacatcgtgttgggtctgcgacccgcaacacctgaagaggaaggccaaatcatccgggggtggctggagcgcgaaagtcggtacggtctgcaggccggacacaactggtttatcatttcgatgcaatggtggcaacagtggaaggaatacgttaagtatgacgccaatcccgttgtaattgaacccagtagtgtgctaaacggcggaaaatacagctttggaaccgcagctcacccaatggaacaggttgaagatcgaataggctcctccctttcatacgtgaatacaactgaagaaaaattctccgataacatctctactgccagcgaggctagcgaaacagctgggtccgggtttctgtatagcgcaaccccaggcgctgacgtatgtttcgccagacagcataatacctcagataataataatcagtgcctcctcggcgccaatggtaacatactactccacctgaatccacagaaacccggagcaatcgacaaccagccgctggttactcaggaaccagtgaaagcgacttccttgactctcgaaggcggtcgccttaaaaggactcctcagcttatacatggtagggactatgaaatggtgccggaaccggtgtggagagctctttatcactggtacggcgcaaacctggccttgccaaggcccgtgataaaaaatagtaaaaccgatattcccgaactggaactcttccccaggtacctgctgtttcttagacagcagccggccaccagaacacagcagtccaacatttgggtgaacatgggtaacgtaccatctcccaacgcccctctgaaacgggttctcgcatataccggttgcttcagccggatgcagaccattaaggaaatccacgaatatctctctcaaagacttaggatcaaggaagaagatatgcggctgtggctgtataacagcgagaattacctcacacttttggacgatgaggaccacaagctggaatatctcaagatccaggacgagcagcatctggtgatcgaggtgagaaacaaggatatgtcgtggcctgaggaaatgtctttcattgccaactcttccaaaattgacaggcacaaagtccccaccgaaaagggcgctactggcctttcaaatttaggaaatacttgctttatgaacagctcaattcaatgcgtctccaacacccagcccttgacccagtactttattagcggtcgacacctgtacgaactgaatcgcacaaaccccattggcatgaagggacatatggccaaatgttatggcgaccttgtacaggaactgtggtccggtacacagaagaacgtcgcaccactgaagttaaggtggacaattgccaaatacgctccccgattcaacggatttcagcagcaagactcacaggaactgctggctttcctcctagacgggcttcatgaggatctgaatcgagttcacgagaaaccatacgtggagctcaaagactccgacggtcgacccgattgggaagtggccgcggaggcgtgggataaccacttacgcaggaatagaagtatagtggtagacctcttccacggtcagttacggtctcaagtgaagtgcaagacttgtggacatatcagtgttcgctttgatcctttcaatttcctttcactgcctctaccgatggacagttacatgcaccttgagattaccgtgatcaagttagacggcacgacgcccgtgcgttacggattacggctaaatatggacgaaaaatatactggtcttaagaagcagctatccgacctgtgcggtctgaattccgaacagatcttactggccgaagtccacgggtcaaatatcaaaaattttccccaggataatcagaaggtgcgactgtcggtgtctgggtttctgtgtgcctttgagattcctgtgcccgtgtctccaatctctgcaagcagcccaacacagacggatttcagttcctccccgtctaccaacgagatgttcacccttacaacaaacggcgatctgccgcgtccaatcttcatacccaatggtatgccaaatacagttgttccttgtgggacagaaaagaattttacaaatggtatggtcaatggtcacatgcccagcttgcctgactctccctttacaggctatataatagccgtgcataggaagatgatgaggactgagctgtattttctcagctcacagaaaaaccggccctcgctgttcgggatgcctctgattgtgccatgtactgtacacacaaggaagaaggatttgtacgatgctgtatggatccaggtctctcgcctggccagcccactcccacctcaggaagcttctaatcacgcacaagactgtgacgatagtatgggctaccagtaccccttcacgctacgtgttgtccagaaagacggaaactcctgtgcttggtgtccatggtacagattttgtcgaggctgtaagattgactgcggagaggatcgggcatttatcggcaatgcttacatcgctgtcgattgggatccaacagctctccatctgcgataccagaccagccaagaacgggtggtggacgaacacgagagcgtcgagcagagccgtagggctcaagccgagcccatcaatctggattcttgtctgagggcattcacatccgaagaggagcttggggagaacgagatgtactattgctctaagtgcaagactcattgcttggctacgaagaaactggacctctggcgcctgcctccgattctcatcatccatctgaaacgcttccagttcgtgaatggacgttggattaaaagtcagaagatcgtgaagtttccacgagaaagcttcgacccttcagcttttcttgttccgcgcgatccagccttatgccagcataagccgcttaccccccagggcgatgagctgtctgagccgaggattctggcccgcgaagtgaagaaagtggatgcgcaatcgtccgctggagaggaagatgtgttgcttagtaaatcccccagctctctgagcgctaatatcatttctagcccaaagggctctccttcctcgtctaggaaatctggtacatcatgccccagtagtaaaaacagttcccccaactcaagcccacggacgttgggacgtagcaaaggcagactgcggctcccccagattgggagtaagaacaagctttccagctcaaaggagaatttggacgccagcaaggaaaatggtgctggacagatttgtgagctggcggatgctctgagccgcggacacgtcctaggaggaagtcagccagaacttgtcaccccccaggaccacgaagtggctctggctaatggcttcttatatgagcatgaagcatgcgggaatggttatagcaatgggcagttgggtaaccactccgaagaagatagcaccgacgatcagagagaggatacccgaatcaaaccaatctacaatctatacgctatttcatgtcatagcgggattctcggcggcgggcactacgtgacatacgccaagaacccaaactgtaagtggtactgctataacgacagctcttgtaaggaactgcatccagacgagatcgacaccgactcagcctacatcctgttctatgagcagcagggcattgattatgctcagtttcttccaaaaactgacggaaagaagatggctgacactagctccatggatgaggactttgagagtgattataagaagtattgtgttctgcagtag

SEQ ID NO: 225004 - DNA, 1173 bp, Artificial Sequence
  derived and/or modified sequence
atgggcgctaaggagtctcgcattgggtttctgagctacgaggaagctctgagacgggtcaccgacgtcgaactgaaaaggttaaaggacgcattcaagcggacttgcggtctcagttactatatgggccagcattgcttcatacgagaggtgctgggcgatggcgtcccccctaaagttgcagaggttatctactgtagttttgggggcacctccaaaggcctacattttaataaccttattgtcggtctggtgctactcactaggggtaaagatgaggaaaaggccaagtacattttttcgctctttagctctgagtccgggaattacgtgatccgcgaggagatggagcgcatgctgcacgtggtggacggaaaagtgccagatacgctgaggaaatgttttagcgagggcgagaaagtcaactacgaaaagtttaggaattggcttttcctgaacaaagatgcatttacgttctctcgctggctgctgtcgggcggggtctacgtgacgctgaccgatgactcagacacacctaccttctatcagaccctcgcaggtgtgactcatttagaagagtctgatattatagacttggagaaacgctactggcttctgaaggctcagagccgcaccgggcggtttgatttagagacctttggccccttagtaagcccccctatcagaccttccctctctgagggactgttcaacgcctttgatgagaaccgggataaccatatcgactttaaggaaattagttgcggactgagtgcctgttgtagaggtccactcgcagaacggcagaaattttgcttcaaggtgttcgatgttgatcgcgacggggttctgagccgagtcgaactgcgcgacatggtggtagctctgctagaggtctggaaagataatagaacggacgacatacctgaactgcacatggatctgtcagacatcgtggaggggattctgaacgcccacgacactactaagatgggccatctcacgctagaggattatcagatctggtctgtaaaaaatgtgctagccaatgagttcctcaatcttctctttcaagtatgccatattgttcttggcctacggcccgctacccccgaagaggagggtcagatcataaggaccctcgagacagatcaaatctacacccggaactag

SEQ ID NO: 225005 - DNA, 4815 bp, Artificial Sequence
  derived and/or modified sequence
atgggcgccaaggagagccgcatcggcttcctgtcctatgaggaggccctgcggcgggtgacagatgtggagctgaagaggctgaaggatgccttcaagaggacctgtggcctgagctactacatgggccagcactgcttcatccgggaggtgctgggagatggagtgccccccaaggtggccgaggtgatctactgcagctttggaggcaccagcaagggcctgcacttcaacaacctgattgtgggcctggtgctgctgacccggggcaaggatgaggagaaggccaagtacatcttcagcctcttcagcagcgagagcggcaactacgtgatccgggaggagatggagaggatgctgcacgtggtggatggcaaggtgcctgacaccctgaggaagtgcttcagcgagggggagaaggtgaactatgagaagttcaggaactggctgttcctgaacaaggatgccttcaccttcagccgctggctgctgtctggaggagtgtatgtgaccctgacagatgacagcgacacccccaccttctaccagaccctggccggcgtgacccacctggaggagagtgacatcatcgacctggagaagcgctactggctgctgaaggcccagagcaggacaggccgctttgacctggagaccttcggccccctggtgagcccccccatccggcccagcctgtctgagggcctcttcaatgcctttgatgagaacagagacaaccacatcgacttcaaggagatcagctgtggcctgagcgcctgctgccggggccccctggccgagcggcagaagttctgcttcaaggtgtttgatgtggacagagatggagtgctgagccgggtggagctgcgggacatggtggtggccctgctggaggtgtggaaggacaacagaacagatgacatccctgagctgcacatggacctgagtgacatcgtggagggcatcctgaatgcccatgacaccaccaagatgggccacctgaccctggaggactaccagatctggagcgtgaagaatgtgctggccaatgagttcctgaacctgctcttccaggtgtgccacatcgtgctgggcctgcggcctgccaccccagaggaggagggccagatcatccggggctggctggagcgggagagccgctatggcctgcaggccggccacaactggttcatcatctccatgcagtggtggcagcagtggaaggagtatgtgaagtatgatgccaaccctgtggtgattgagcccagctctgtgctgaatggaggcaagtacagctttggaacagctgcccaccccatggagcaggtggaggacagaattggcagcagcctgtcctatgtgaacaccacagaggagaagttcagtgacaacatcagcacagccagcgaggccagcgagacagctggcagcggcttcctgtacagcgccaccccaggagcagatgtgtgctttgcccggcagcacaacaccagtgacaacaacaaccagtgcctgctgggcgccaatggaaacatcctgctgcacctgaacccccagaagccaggggccatcgacaaccagcccctggtgacccaggagcctgtgaaggccaccagcctgaccctggagggcggccgcctgaagaggaccccccagctgattcatggccgggactatgagatggtgcctgagcctgtgtggagggccctgtaccactggtacggggccaacctggccctgcccaggcctgtgatcaagaacagcaagacagacatccctgagctggagctgttcccccgctacctgctcttcctgcggcagcagcctgccaccaggacccagcagagcaacatctgggtgaacatgggaaatgtgcccagccccaatgcccccctgaagagggtgctggcctacacaggctgcttcagcaggatgcagaccatcaaggagatccacgagtacctgagccagaggctgcgcatcaaggaggaggacatgaggctgtggctgtacaacagcgagaactacctgaccctgctggatgatgaggaccacaagctggagtacctgaagatccaggatgagcagcacctggtgattgaggtgaggaacaaggacatgtcctggccagaggagatgtccttcatcgccaacagcagcaagattgacagacacaaggtgcccacagagaagggggccaccggcctgagcaacctgggcaacacctgcttcatgaacagcagcatccagtgtgtgagcaacacccagcccctgacccagtacttcatcagcggccgccacctgtatgagctgaacagaaccaaccccatcggcatgaagggccacatggccaagtgctatggagacctggtgcaggagctgtggagcggcacccagaagaatgtggcccccctgaagctgcgctggaccatcgccaagtatgccccccgcttcaacggcttccagcagcaggacagccaggagctgctggccttcctgctggatggcctgcacgaggacctgaacagagtgcatgagaagccctacgtggagctgaaggacagtgatggccgcccagactgggaggtggccgctgaggcctgggacaaccacctgcggaggaacagaagcatcgtggtggacctcttccacggccagctgcggagccaggtgaagtgcaagacctgtggccacatctctgtgcgctttgaccccttcaacttcctgagcctgcccctgcccatggacagctacatgcacctggagatcaccgtcatcaagctggatggcaccacccctgtgcgctatggcctgcggctgaacatggatgagaagtacacaggcctgaagaagcagctgagtgacctgtgtggcctgaacagcgagcagatcctgctggccgaggtgcacggcagcaacatcaagaacttcccccaggacaaccagaaggtgcggctgtctgtgtctggcttcctgtgtgcctttgagatccctgtgcctgtgagccccatcagcgccagcagccccacccagacagacttcagcagcagccccagcaccaatgagatgttcaccctgaccaccaatggagacctgccccggcccatcttcatccccaacggcatgcccaacacagtggtgccctgtggcacagagaagaacttcaccaacggcatggtgaatggccacatgcccagcctgcctgacagccccttcaccggctacatcatcgctgtgcacaggaagatgatgaggacagagctgtacttcctgagcagccagaagaaccggcccagcctgtttggcatgcccctcatcgtgccctgcaccgtgcacaccaggaagaaggacctgtatgatgctgtgtggatccaggtgtcccggctggccagccccctgcccccccaggaggccagcaaccacgcccaggactgtgatgacagcatgggctaccagtaccccttcaccctgcgggtggtgcagaaggatggcaacagctgtgcctggtgcccctggtaccgcttctgccggggctgcaagattgactgtggagaagatcgggccttcatcggaaatgcctacatcgctgtggactgggaccccacagccctgcacctgcgctaccagaccagccaggagcgggtggtggatgaacatgaatctgtggagcagagccggcgggcccaggccgagcccatcaacctggacagctgcctgcgggccttcaccagcgaggaggagctgggggagaatgagatgtactactgcagcaagtgcaagacccactgcctggccaccaagaagctggacctgtggaggctgccccccatcctgatcatccacctgaagcgcttccagtttgtgaatggccgctggatcaagagccagaagatcgtgaagttcccccgggagagctttgaccccagcgccttcctggtgccccgggaccctgccctgtgccagcacaagcccctgaccccccagggagatgagctgtctgagccccgcatcctggcccgggaggtgaagaaggtggatgcccagagcagcgctggggaggaggatgtgctgctgagcaagagccccagcagcctgagcgccaacatcatcagcagccccaagggcagccccagcagcagcaggaagagcggcaccagctgccccagcagcaagaacagcagccccaacagcagccccaggaccctgggccgcagcaagggccgcctgcggctgccccagatcggcagcaagaacaagctgagcagcagcaaagaaaacctggatgccagcaaagaaaatggagctggccagatctgtgagctggctgatgccctgagccggggccacgtgctgggcggcagccagcctgagctggtgaccccccaggaccacgaggtggccctggccaacggcttcctgtatgagcacgaggcctgtggaaatggctacagcaatggccagctgggcaaccacagcgaggaggacagcacagatgaccagcgggaggacacccgcatcaagcccatctacaacctgtatgccatcagctgccacagcggcatcctgggcggcggccactacgtgacctacgccaagaaccccaactgcaagtggtactgctacaatgacagcagctgcaaggagctgcacccagatgaaattgacacagacagcgcctacatcctcttctatgagcagcagggcattgattatgcccagttcctgcccaagacagatggcaagaagatggctgacaccagctccatggatgaagattttgaaagtgactacaagaagtactgtgtgctgcagtag

SEQ ID NO: 225006 - DNA, 1173 bp, Artificial Sequence
  derived and/or modified sequence
atgggcgccaaggagagccgcatcggcttcctgtcctatgaggaggccctgcggcgggtgacagatgtggagctgaagaggctgaaggatgccttcaagaggacctgtggcctgagctactacatgggccagcactgcttcatccgggaggtgctgggagatggagtgccccccaaggtggccgaggtgatctactgcagctttggaggcaccagcaagggcctgcacttcaacaacctgattgtgggcctggtgctgctgacccggggcaaggatgaggagaaggccaagtacatcttcagcctcttcagcagcgagagcggcaactacgtgatccgggaggagatggagaggatgctgcacgtggtggatggcaaggtgcctgacaccctgaggaagtgcttcagcgagggggagaaggtgaactatgagaagttcaggaactggctgttcctgaacaaggatgccttcaccttcagccgctggctgctgtctggaggagtgtatgtgaccctgacagatgacagcgacacccccaccttctaccagaccctggccggcgtgacccacctggaggagagtgacatcatcgacctggagaagcgctactggctgctgaaggcccagagcaggacaggccgctttgacctggagaccttcggccccctggtgagcccccccatccggcccagcctgtctgagggcctcttcaatgcctttgatgagaacagagacaaccacatcgacttcaaggagatcagctgtggcctgagcgcctgctgccggggccccctggccgagcggcagaagttctgcttcaaggtgtttgatgtggacagagatggagtgctgagccgggtggagctgcgggacatggtggtggccctgctggaggtgtggaaggacaacagaacagatgacatccctgagctgcacatggacctgagtgacatcgtggagggcatcctgaatgcccatgacaccaccaagatgggccacctgaccctggaggactaccagatctggagcgtgaagaatgtgctggccaatgagttcctgaacctgctcttccaggtgtgccacatcgtgctgggcctgcggcctgccaccccagaggaggagggccagatcatccgcaccctggagacagaccagatctacaccagaaattag

SEQ ID NO: 225007 - DNA, 4815 bp, Artificial Sequence
  derived and/or modified sequence
atgggcgccaaggagagccggatcggcttcctgagctacgaggaggcactgcgcagggtgacagatgtggaacttaagcgcctcaaggacgcattcaaacgcacatgcggcttgagctactatatgggtcagcactgcttcatccgcgaggttctgggcgacggcgtccctccgaaggtcgctgaggttatttattgcagttttggcgggacatctaaaggcctgcattttaataacctgattgttggcctcgtgctgttaaccagagggaaggacgaggagaaagccaagtacatctttagtctattcagttcagagagcggaaattacgtgattcgggaggagatggaaagaatgctgcatgtggtagacggcaaagtcccagatacacttagaaagtgttttagcgaaggagaaaaggtcaactacgagaaatttcggaactggctctttctcaacaaagacgcttttacgttctcccggtggttgctttccggcggggtctacgttaccctgacagacgattccgacacccctaccttttatcaaacgctcgcgggtgttacacatttggaggagtcagatatcattgatctggagaaaagatactggctgcttaaagcacagtcccgcacaggccggttcgatttggagactttcgggccccttgtcagccccccaatccggcccagccttagtgaaggcctcttcaacgcttttgacgagaatcgcgataaccacattgacttcaaagaaatttcgtgcgggctttcagcctgttgccgcggtccgctcgcggagagacagaaattctgcttcaaggtgtttgacgttgatagagatggggtgctgtcccgagtggagcttagagacatggttgtggctcttttggaggtttggaaagacaaccggactgacgacatccctgagctacatatggacttgagtgatatcgtcgaggggatacttaacgcacacgacactaccaagatgggccacctgaccctagaggactaccagatctggagtgttaagaatgtgctggctaacgaatttctcaaccttttgttccaagtctgtcacatagtgttaggacttcgtcccgccacccccgaggaagagggtcagatcattcgggggtggctggagcgggagtcacgatacgggttgcaggccggacacaattggttcatcattagcatgcagtggtggcagcaatggaaggaatacgtcaaatatgacgctaacccggtcgtgatagaaccctcttctgtgctgaatggagggaaatactcgtttggcaccgccgctcacccaatggagcaggtggaggatcgcatcgggtcatcactcagctatgtcaatactaccgaggagaagttctcagataatatatcaacagccagcgaggcctccgagacagcaggaagcggctttctttacagtgctactcctggagcagacgtgtgcttcgcgagacagcacaatacatcagataataataaccagtgcttactgggggccaatggtaacattctcttacatcttaacccccagaagcctggtgctatagataaccagccactcgtcactcaggagccagtgaaggcaacctcacttactctcgaggggggaagactcaagcgaactcctcagctgattcatgggcgagactacgaaatggtccctgagcctgtgtggagggctctgtaccattggtacggggctaacctagccctgcctcggcccgtgattaagaatagcaagacggacatacctgagttggaactgtttccacgctaccttttatttctgcgacagcagcccgccacccgcacacagcagtccaacatatgggtgaacatgggaaatgtaccttcgcctaatgccccacttaaacgggtgctcgcctatacaggctgctttagtagaatgcagaccattaaagagatccatgagtacctgagtcaaagactcagaattaaggaggaagatatgaggctgtggttgtataactcggagaattatctcactctgctggatgacgaggaccataagctggaatacctaaaaatccaggacgagcagcacctggtaatagaggtacggaacaaggatatgtcttggccagaagagatgtcctttatagctaactcaagtaagattgacagacataaagtgccaactgagaagggcgcaactggcctaagcaacctgggcaacacatgctttatgaattcgtccatccagtgcgtgtcaaacacccaacccctgactcagtattttatatcagggagacacctttacgagctgaatcggaccaatccgatcggtatgaagggacatatggcaaagtgttacggagatctggtgcaagagctgtggtctggcacgcaaaaaaacgtggctccccttaagctgcgatggactatagccaaatacgccccacggtttaacggctttcagcagcaggatagtcaagaactcctggccttcctcctggatggacttcatgaggatctgaacagggtgcatgagaagccgtatgtagaattaaaggattcagatggcaggcctgattgggaggtcgcagcagaggcatgggacaatcacctgcgcagaaaccgctccatcgtagtggacctcttccacggccagctgcgcagccaagtgaaatgcaagacttgcggccacatcagcgtaagattcgatcccttcaacttcttaagcctgcccctgcccatggactcatatatgcatctggagatcaccgtcattaagcttgacggcaccaccccggttcgctacggtctgcggctgaatatggacgaaaagtacacaggcctgaagaaacagctttccgacctgtgtggcctcaacagtgagcagatcttactggccgaagtccacggatcgaatataaagaattttccacaagacaaccagaaggttagactgagcgtcagcggttttctctgcgcctttgagatccctgtacctgtgagtcctatctctgcaagctctcctacacagacagatttttcctcctcgcctagcacaaacgagatgtttaccttgaccaccaacggcgatctgcctcgccccatttttataccgaacggaatgccaaatacagtggtgccttgcggcaccgagaaaaacttcaccaacggaatggtcaacgggcacatgccatctctgccggactctccgtttaccggttacataatcgctgtgcatcgcaagatgatgcgaacagaactgtactttttgtcatcacagaaaaataggcccagcctgttcgggatgcctctgattgttccatgcaccgtacacacgcgcaaaaaggacctgtatgatgcagtgtggatccaagtaagcaggctcgcatcacctctccccccgcaggaggcatctaaccatgctcaggattgtgacgattcaatggggtaccagtatccctttaccttgagggtcgtgcagaaggatggtaattcatgtgcatggtgcccctggtatcgtttctgcagaggttgcaagatcgactgtggggaggatcgggccttcatcgggaacgcatatattgctgttgactgggaccccacagcattacatctgagatatcagacttcccaagagagggtggttgatgagcacgagtcggttgagcagtctcgccgcgctcaagccgagccaatcaatttagattcttgcctgcgcgctttcacatctgaggaagagctcggcgagaatgagatgtattattgctcgaagtgtaaaacccattgcttggccaccaagaagttagacctttggagactgcctcctatactgattattcacttaaagcgcttccaatttgtgaatggcagatggattaagtcccagaagatagtaaagtttcccagggaatcctttgatccctcagcatttttagtgccccgcgatcccgctctttgtcaacataagcccctaactccacagggcgatgagttgtctgaacctcgcattttagcccgcgaggtgaaaaaggtggatgctcagtcatccgcaggagaagaggatgtgctcctgagtaagtccccttcctccttgtcagctaacatcattagctcaccaaagggatcaccttcgtcgagcaggaagagcggaacctcttgcccttcatctaagaatagctctccaaattccagccctagaacgttaggtcgatcaaagggacggctgcgcctcccacagattgggtcgaagaacaagctgtcatccagcaaagaaaatctggatgccagcaaggaaaatggcgcgggccaaatctgcgaactagccgatgccctgtccagggggcacgtccttggcggctcacagcccgaattagtgacgccgcaggaccacgaggtggccttggccaatggcttcctttatgaacacgaggcctgtgggaacgggtattcaaatggtcagttggggaaccactccgaagaagatagcaccgacgaccagcgcgaagacacaagaatcaagcctatctacaacttgtacgctatctcttgtcattccggaatcctgggcggtggtcattacgtcacatatgctaagaatcccaactgtaagtggtattgttacaacgactcatcatgcaaagagttgcatcccgacgagattgataccgactccgcttacatcctcttttacgagcagcagggaatcgactatgcccagttcctccctaaaactgatggaaagaaaatggcagatacctcttccatggacgaagatttcgagagcgattacaagaaatactgtgtcttgcagtag

SEQ ID NO: 225008 - DNA, 1173 bp, Artificial Sequence
  derived and/or modified sequence
atgggcgccaaggagagccggatcggcttcctgagctacgaggaggctttacgtcgggtgacggacgtggagctgaagcgcctcaaggacgctttcaagcgtacctgcggactctcatactacatgggacaacactgttttattcgcgaggtgctcggcgatggcgttccccccaaggttgcggaggtcatctattgcagttttggcgggaccagcaagggcctgcatttcaacaatcttatagtcggcctggtcctgctgacgcgcggaaaagacgaggaaaaagccaaatacatcttttcattattcagctctgagagtggcaattacgtgattcgggaagaaatggagcgcatgctacatgtcgtggatgggaaagtgccggatactctgcgcaaatgtttctcggagggagaaaaggtgaattacgaaaagtttcgaaattggctgtttctgaacaaagacgcttttacattctcgcggtggctcctcagcggtggtgtttacgtgacactcacagacgactctgatactcctaccttctatcagacactggctggagtaacgcacctggaagaaagcgatatcattgatctggaaaaaaggtattggttactgaaggcccagagtcgcacaggcaggtttgacctcgagactttcgggcctctcgtgtcaccacctattcgaccttcactgtctgaaggactgttcaacgcctttgatgagaaccgggataatcacatcgatttcaaggaaatctcatgcgggctgagcgcctgttgccgtggcccgcttgcagaacgccagaagttttgttttaaggtctttgatgtggatcgtgatggggtactgagcagagtggagttgagggatatggttgttgccctattagaagtctggaaggacaacaggaccgatgacattcccgaactacacatggatctttcggacatcgtggaagggatcctgaatgcgcatgacacaaccaagatgggacatttaaccctagaggactatcaaatctggtcagtaaagaatgtgctggccaatgaatttctgaatttgctgttccaggtgtgccacattgtgctgggcctgcggcctgcaacgcccgaagaggagggccagatcattaggaccctggagaccgaccagatctataccagaaattag

SEQ ID NO: 225009 - DNA, 4814 bp, Artificial Sequence
  derived and/or modified sequence
atgggagccaaggaatcgcgtattggttttctgtcttacgaagaagcattgcgcagggtcaccgatgtggagcttaaacgtctgaaagacgctttcaagagaacatgcgggctgagttattatatgggtcagcactgcttcattagggaggtgctgggggacggagtcccaccgaaggtcgctgaagtgatctactgtagtttcgggggaacaagtaaaggccttcacttcaacaacctgatcgtaggactcgtgctcttaaccagagggaaggacgaggagaaagcgaaatacatctttagcctgttttcctccgagagcggtaactacgtgatcagggaggagatggagagaatgctgcatgtcgtagacggcaaggtccctgacaccttgaggaaatgtttctcggaaggggaaaaggtaaattatgaaaagttccggaattggttgtttctgaataaggatgcctttaccttctctcgttggctcctttctgggggtgtctatgtaactctgactgacgactccgacactcccaccttttaccaaaccctggccggagtaacccatctcgaggaatcagacatcatagacctagagaagaggtactggcttctgaaggcacagagtaggaccggtcgcttcgacttagaaaccttcggcccacttgtcagtccccctatcaggccatctctctcagaggggcttttcaacgcctttgatgaaaatcgggacaaccacatcgactttaaagagatttcctgcggtctgtccgcatgttgcagaggaccactagcagaaaggcagaagttttgctttaaggtattcgacgtcgatcgtgatggagtgctgtcccgcgttgagcttagggacatggttgtggccctgcttgaagtatggaaagacaacaggacagacgacatcccagaactgcatatggatctttctgacatcgtcgagggcatcctgaatgctcatgacactacaaaaatgggccacctgaccctcgaagattaccaaatctggtccgtcaagaacgtgctcgccaatgagtttctgaatcttctcttccaagtttgccacatcgtgctgggactccgcccagcaactccagaagaggaagggcaaataattagaggctggctggagcgagagagcaggtacggccttcaagctggccacaactggttcatcatttctatgcagtggtggcagcagtggaaagaatacgtcaagtacgatgccaaccccgtggtgattgaaccttcgtccgttcttaatggtggcaaatatagtttcggaaccgcagcccatcccatggagcaggtagaagatcggattggctcctctctcagttacgtcaacacaacagaagaaaaattttctgacaacatcagcaccgcaagtgaggcatctgaaaccgccggtagcggcttcctgtatagtgctactcccggtgccgacgtgtgcttcgcccgacagcataacacttcagataacaataaccagtgccttctgggcgcaaatggcaacattttgttacacctgaacccgcagaaacccggtgctatcgacaaccagccgcttgttacccaagagccggtgaaggcaacatctctgacactggaaggaggcaggcttaaaagaaccccccagcttatacatggcagagattacgagatggtgcccgagcccgtgtggcgagcattatatcattggtacggcgctaatcttgcccttccccgacctgtcattaaaaactcaaagacagacattcctgagctggaattgttccctcgctatctgctctttctgagacagcagcctgcaacgcgaacccaacagtcaaatatctgggtgaacatggggaacgtcccctcacctaatgctccactgaaacgcgtactcgcctacactggttgctttagtcgaatgcagactatcaaagagatccacgaatacctgtcacagagattaagaatcaaagaagaagatatgaggctttggctctacaatagtgagaattatctcacactgctggacgatgaagaccacaaactggaatatctgaaaattcaggacgagcagcatctggtaatcgaggtgcgaaacaaagacatgtcctggcccgaggaaatgtccttcattgcaaatagctctaagatcgacaggcacaaggtccctacggagaagggtgcgaccgggctttctaacctgggcaacacctgttttatgaacagctctattcagtgtgtctcaaatacccagccattaacacagtatttcatctctgggcgacatctgtatgagctcaaccgcacaaatccgatagggatgaaaggtcatatggctaaatgttacggagacctcgtgcaggaactttggagtggaacgcagaagaacgtggctcccctgaagctgagatggacaattgctaagtatgctcctcgtttcaatggcttccaacagcaggatagccaggagcttctagcatttctcctcgacggcttacacgaagaccttaatagagtgcatgaaaaaccctacgttgagctcaaagattctgacgggcgacccgattgggaagttgccgcagaggcctgggataaccatctccgacgaaaccggagtattgtggtagatctgttccacggccagctgagatcacaggtgaagtgcaagacgtgcggacatatctcagttcgcttcgatcctttcaatttcttgtcactgcctttgcctatggactcttacatgcatcttgagatcaccgttatcaagcttgatggcactacaccggtaagatacggcttgcgtttaaacatggatgaaaaatataccgggctcaaaaagcagctttccgacctttgcgggctgaatagcgaacaaatcctcttggcagaggtgcatggcagtaatataaaaaatttcccccaggacaaccagaaagtcaggctgtccgtttctggctttctatgtgccttcgagatccctgtgccagtcagccctatttccgcatcatcccctactcagactgacttctcctcttcaccctccactaatgaaatgttcaccctgactaccaacggagatctgccacggccaatctttataccaaatgggatgccaaatactgtggttccttgtggcacggagaagaacttcacaaacggcatggtaaatggccatatgccttccctgccagacagcccattcaccggttatattatcgctgtccaccgcaagatgatgaggaccgagctgtattttctgtccagccagaaaaaccgaccctctttatttggaatgcccttaatcgtaccttgcacagtccacacccgcaagaaggacttgtacgatgccgtgtggatacaggtttctagacttgcctcgccactccccccacaggaagcctccaaccatgcccaggattgtgatgattcaatgggctatcagtaccctttcaccctgcgcgtcgtgcaaaaggacggtaatagttgcgcctggtgcccttggtaccggttctgcagagggtgcaaaatcgattgcggagaagatcgggcttttatcggcaacgcctatatcgctgtggattgggatccaactgcattgcatctgcgctaccagacttcccaggagcgggtagtggacgaacacgagtccgtggagcagtccaggcgggcacaagccgaaccaatcaatctcgacagctgtctaagggcctttacatcagaggaggagcttggggaaaatgagatgtactattgctcgaagtgtaagacccactgcctcgcaacaaaaaagctggacctctggcgtcttcctccgatcctgatcatacatctcaagcgcttccagtttgttaatggtagatggattaagagtcagaagattgtaaagttccccagggaaagttttgatccaagcgcttttctcgtgccacgagacccagccctttgccaacacaaaccgctcaccccccaaggcgacgagttgtccgaaccgagaatcctggccagagaggtgaagaaggtcgacgctcagagtagcgcaggcgaagaggatgttcttttgagcaagtctccctctagtttgtccgccaacatcatcagctcaccgaaaggctcccccagttcatcacgcaagtctggaacgtcttgtccatcttcaaaaaactcatccccgaacagttcccccagaaccctcgggcgttcaaaaggaaggctcaggctgccacagatcggatccaaaaacaagctcagttcctccaaagaaaatctggacgcctctaaagaaaatggcgcagggcagatttgcgagctggccgacgcgctttcacgcggtcatgtcctgggaggcagccagcctgagcttgtgaccccacaggaccacgaagtggctttagctaatggtttcctatacgagcatgaggcttgcggcaacggttattcaaacggtcagctgggtaaccattctgaggaagactcaacagacgaccagagggaggacacccggatcaagccaatatacaacctttacgcgatttcttgccacagtggtatcctgggcggtggccattacgttacctacgctaagaatccgaattgcaagtggtactgttacaacgactcaagctgtaaggaactgcatccagacgagatcgatacagactccgcttacatactgttctatgaacaacagggaatcgattatgcgcagttccttccaaagaccgacggaaagaaaatggctgacacaagctccatggacgaggattttgagtctgactataaaaaatactgcgtacttcagta

SEQ ID NO: 225010 - DNA, 1173 bp, Artificial Sequence
  derived and/or modified sequence
atgggagccaaagagagtcggatcgggttcttgtcatatgaggaagcactgcggagggtcactgatgtggaactgaagcggctaaaggatgcatttaagcgaacctgcggcctttcatactacatgggtcagcattgcttcatacgcgaagtgctaggagacggggtgccccctaaggtcgccgaggtcatttactgttctttcggaggcacgagtaagggcctccacttcaacaacctgatagtcgggctcgtgcttctgacaaggggcaaagatgaggagaaggccaaatacatctttagtttgttcagctctgaaagtggcaactacgtgatcagagaggagatggagcgtatgctgcacgtcgtggacggcaaagtaccggacacgctgcggaagtgtttcagtgagggcgagaaggtgaattacgaaaaattcagaaattggctgtttctcaataaggacgccttcaccttttcccggtggctactgagcggtggtgtgtacgtgaccctgaccgatgacagtgatacaccaacgttttatcagaccctggctggggtgacgcatctagaggagtctgatatcatcgaccttgagaagcggtactggttgctgaaggctcagtcacggactggccgattcgatcttgagaccttcggccctcttgtgtcaccaccaatcaggccaagcttaagtgaggggctgttcaatgcatttgacgaaaaccgagacaaccatatcgactttaaggaaatatcatgcggactgtcggcatgctgtcggggacccctggcagagcgccagaagttttgctttaaggtgtttgacgtggacagagatggcgtcctgagcagggttgagctgagagacatggttgtggctctgctggaggtatggaaggataaccgaacggatgatattccagaactccacatggatctgagcgatatcgtcgagggaatcctgaacgcacatgatacaaccaaaatgggccaccttacgcttgaagactaccagatttggtcagtcaagaatgtattggccaatgaattcctgaatctgctatttcaggtctgccacatcgttttgggcctgcgtcctgccacaccagaagaggaaggtcagattattaggaccttagaaactgaccaaatctacactaggaactag

SEQ ID NO: 225011 - DNA, 7026 bp, Artificial Sequence
  derived and/or modified sequence
aagagggcgtgaggagggaaggagagggaggagagagaggagagagaagggcggagtaggaggcaggggaagggggcggggcggaagagtcacgtgatccggcatggaggcggtggcggcgaccgggaggagccgccggggcagaagccgcacttgttagtgtggggggaggtgggggcgggggacgccgacaccgtcaccgtcacccagggacgccgaggagaaggcgggaggggggtgggggcgagatcaggctccgaccccccgccgaggggatgaggggagcatgggtgccaaggagtcacggatcggattcctcagctacgaggaggcgctgaggagagttacagatgtagagctaaaacgactgaaggatgctttcaagaggacctgtggactctcatattacatgggccagcactgcttcatccgggaagtgcttggggatggagtgcctccaaaggttgctgaggtgatttactgttcttttggtggaacatccaaagggctgcacttcaataatttaatagttggacttgtcctccttacaagaggcaaagatgaagagaaagcaaaatacatttttagtcttttttcaagtgaatctgggaactatgttatacgggaagaaatggaaagaatgctccacgtggtggatggtaaagtcccagatacactcaggaagtgtttctcagagggtgaaaaggtaaactatgaaaagtttagaaattggctttttctaaacaaagatgcttttactttctctcgatggcttctatctggaggtgtgtatgttaccctcactgatgatagtgatactcctactttctaccaaactctggctggagtcacacatttggaggaatcagacatcattgatcttgagaaacgctattggttattgaaggctcaatcccggactggacgatttgatttagagacatttggcccattggtttcaccacctattcgtccatctctaagtgaaggtttgtttaatgcttttgatgaaaatcgtgacaatcacatagattttaaggagatatcctgtgggttatcagcctgttgcaggggacccctggctgaaagacaaaaattttgcttcaaggtatttgatgttgaccgtgatggagttctctccagggttgaactgagagacatggtggttgcacttttagaagtctggaaggacaaccgcactgatgatattcctgaattacatatggatctctctgatattgtagaaggcatactgaatgcacatgacaccacaaagatgggtcatcttactctggaagactatcagatctggagtgtgaaaaatgttcttgccaatgagtttttgaacctccttttccaggtgtgtcacatagttctggggttaagaccagctactccggaagaagaaggacaaattattagaggatggttagaacgagagagcaggtatggtctgcaagcaggacacaactggtttatcatctccatgcagtggtggcaacagtggaaagaatatgtcaaatacgatgccaaccctgtggtaattgagccatcatctgttttgaatggaggaaaatactcatttggaactgcagcccatcctatggagcaggtcgaagatagaattggaagcagcctcagttacgtgaatactacagaagagaaattttcagacaacatttctactgcatctgaagcctcagaaactgctggcagcggctttctgtattctgccacaccaggggcagatgtttgctttgctcgacaacataacacttctgacaataacaaccagtgtttgctgggagccaatgggaatattttgttgcaccttaaccctcagaaaccaggggctattgataatcagccattagtaactcaagaaccagtaaaggctacatcattaacactagaaggaggacgattaaaacgaactccacagctgattcatggaagagactatgaaatggtcccagaacctgtgtggagagcactttatcactggtatggagcaaacctggccttacctagaccagttatcaagaacagcaagacagacatcccagagctggaattatttccccgctatcttctcttcctgagacagcagcctgccactcggacacagcagtctaacatctgggtgaatatgggaaatgtaccttctccgaatgcacctttaaagcgggtattagcctatacaggctgttttagtcgaatgcagaccatcaaggaaattcacgaatatctatctcaaaggctgcgcattaaagaggaagatatgcgcctgtggctatacaacagtgagaactaccttactcttctggatgatgaggatcataaattggaatatttgaaaatccaggatgaacaacacctggtaattgaagttcgcaacaaagatatgagttggcctgaggagatgtcttttatagcaaatagtagtaaaatagatagacacaaggttcccacagaaaagggagccacaggtctaagcaatctgggaaacacatgcttcatgaactcaagcatccagtgtgttagtaacacacagccactgacacagtattttatctcagggagacatctttatgaactcaacaggacaaatcccattggtatgaaggggcatatggctaaatgctatggtgatttagtgcaggaactttggagtggaactcagaagaatgttgccccattaaagcttcggtggaccatagcaaaatatgctcccaggtttaatgggtttcagcaacaggactcccaagaacttctggcttttctcttggatggtcttcatgaagatcttaatcgagtccatgaaaagccatatgtggaactgaaggacagtgatgggcgaccagactgggaagtagctgcagaggcctgggacaaccatctaagaagaaatagatcaattgttgtggatttgttccatgggcagctaagatctcaagtaaaatgcaagacatgtgggcatataagtgtccgatttgaccctttcaattttttgtctttgccactaccaatggacagttatatgcacttagaaataacagtgattaagttagatggtactacccctgtacggtatggactaagactgaatatggatgaaaagtacacaggtttaaaaaaacagctgagtgatctctgtggacttaattcagaacaaatccttctagcagaagtacatggttccaacataaagaactttcctcaggacaaccaaaaagtacgactctcagtgagtggatttttgtgtgcatttgaaattcctgtccctgtgtctccaatttcagcttctagtccaacacagacagatttctcctcttcgccatctacaaatgaaatgttcaccctaactaccaatggggacctaccccgaccaatattcatccccaatggaatgccaaacactgttgtgccatgtggaactgagaagaacttcacaaatggaatggttaatggtcacatgccatctcttcctgacagcccctttacaggttacatcattgcagtccaccgaaaaatgatgaggacagaactgtatttcctgtcatctcagaagaatcgccccagcctctttggaatgccattgattgttccatgtactgtgcatacccggaagaaagacctatatgatgcggtttggattcaagtatcccggttagcgagcccactcccacctcaggaagctagtaatcatgcccaggattgtgacgacagtatgggctatcaatatccattcactctacgagttgtgcagaaagatgggaactcctgtgcttggtgcccatggtatagattttgcagaggctgtaaaattgattgtggggaagacagagctttcattggaaatgcctatatcgctgtggattgggatcccacagcccttcaccttcgctatcaaacatcccaggaaagggttgtagatgagcatgagagtgtggagcagagtcggcgagcgcaagccgagcccatcaacctggacagctgtctccgtgctttcaccagtgaggaagagctaggggaaaatgagatgtactactgttccaagtgtaagacccactgcttagcaacaaagaagctggatctctggaggcttccacccatcctgattattcaccttaagcgatttcaatttgtaaatggtcggtggataaaatcacagaaaattgtcaaatttcctcgggaaagttttgatccaagtgcttttttggtaccaagagacccggctctctgccagcataaaccactcacaccccagggggatgagctctctgagcccaggattctggcaagggaggtgaagaaagtggatgcgcagagttcggctggggaagaggacgtgctcctgagcaaaagcccatcctcactcagcgctaacatcatcagcagcccgaaaggttctccttcttcatcaagaaaaagtggaaccagctgtccctccagcaaaaacagcagccctaatagcagcccacggactttggggaggagcaaagggaggctccggctgccccagattggcagcaaaaataaactgtcaagtagtaaagagaacttggatgccagcaaagaaaatggggctgggcagatatgtgagctggctgacgccttgagtcgagggcatgtgctggggggcagccaaccagagttggtcactcctcaggaccatgaggtagctttggccaatggattcctttatgagcatgaagcatgtggcaatggctacagcaatggtcagcttggaaaccacagtgaagaagacagcactgatgaccaaagagaagatactcgtattaagcctatttataatctatatgcaatttcgtgccattcaggaattctgggtgggggccattacgtcacttatgccaaaaacccaaactgcaagtggtactgttacaatgacagcagctgtaaggaacttcacccggatgaaattgacaccgactctgcctacattcttttctatgagcagcaggggatagactatgcacaatttctgccaaagactgatggcaaaaagatggcagacacaagcagtatggatgaagactttgagtctgattacaaaaagtactgtgtgttacagtaaagctaccactctggctgctagacagcttggcggtgagggagatgactccttgtagctgacatttggcaaaagcgtcactgaaaggcaagctaaatgtagttattttatcctgtggccctgaagcacaaaataaaaattctaattaaaatagttaactttaagagtagtaatcattttattttgaagtctcatacaagctctccgatagagaactttcaggcagatcccaccattagcctgtaaacaaaaggtttggcaccagccacctgggaccaaataagaattcaattgtgcttgtccagatatgaacaaatatgtagtgagtatagagtttaccataatcataacaaatattaaagatttccttggagtcagagtaaaaaacaaacaattataatgttgtctagggacgacatgatatgctacctcctttttcctgaagttttattccattatattgacaagatggagaaagcaagatcacgaaggtgtgcaaatgattcttaaggcatggacgaggatttttcaatttattttttaaactgtttccataccctttctttgtctttcttgctttttgtttttgccgttgtatttatgtttgagacacaaccagtcattggtggcaggggcatatagtggtcagtctgaaagggaggctctcttaagagctgtgtgccttccacccagagccttgtgggagacccagtagaaagaaacagcatcctgggaaatccagctaccatggccctcccagtggaggcatcttacatttaggatacttcaagtatcctcagaaatgtattctgcacccccggccccacccatgctgagggaaggggagcagttgccaatatttgcaccatcttcacatgcacctgttgcaacaagagcttctgggaaggtaagtggcattggagctagatcacgtttcacaattagtggttgttcttttctgtgtttgtcttgcactttaaaaaagagagaacacatgcaaatgaacttgcttgtgtgtatttgatggctctaagggctataaattacaaacaaaacacatcccagacattaggagttcataagtgtatttaatgaaattggtggttttaggaagtcaactttagttttgctttgtttgcatgtccactaatttttttattttgatatttgtcttttttttaaattttacagtagtcatcgaaagttatgtttctttgcttacttcatttttttctctaatcaagactggaacaaaagtataaatattatttatttcaggtagcatttttttcgtgtagttttttaatatatacttgaaggaaatgtttcaccttatttttggtctttgtttattcatttagaccctgcaagttgattctcattaattgtcagattccactaccctttcttcctcatagatagtaattaccaatgtaactaagtatttgtgttctgatatctgaggccagtaactattaatatctagttctcagagcatttggaaaggttatcttaaatggctacctaaattgaaatccttttcagaaaaaatataattgcaagtaggtaggactggcctaaattgtctaatgtaataaagtcagacaaaatgcatactttatagtttcaagattttcagtatataaaatctgtccattcccattaaaaagtggaagattttaaataatttctttacagatgttttatttaagcaggtagctcaatctactaatgttgtttgatctgtgtttgttatactggttgtaattaatttttttaattcatgaactagcagaaaatttattaaattaactattaactacattcaccttgtaaattactgtataaaacttgttgacaatgcactgactttagaaagatgttaatgtacataaatagagtgtaaataaaatagtgttgatgtaccg

SEQ ID NO: 225012 - DNA, 1843 bp, Artificial Sequence
  derived and/or modified sequence
caggctccgaccccccgccgaggggatgaggggagcatgggtgccaaggagtcacggatcggattcctcagctacgaggaggcgctgaggagagttacagatgtagagctaaaacgactgaaggatgctttcaagaggacctgtggactctcatattacatgggccagcactgcttcatccgggaagtgcttggggatggagtgcctccaaaggttgctgaggtgatttactgttcttttggtggaacatccaaagggctgcacttcaataatttaatagttggacttgtcctccttacaagaggcaaagatgaagagaaagcaaaatacatttttagtcttttttcaagtgaatctgggaactatgttatacgggaagaaatggaaagaatgctccacgtggtggatggtaaagtcccagatacactcaggaagtgtttctcagagggtgaaaaggtaaactatgaaaagtttagaaattggctttttctaaacaaagatgcttttactttctctcgatggcttctatctggaggtgtgtatgttaccctcactgatgatagtgatactcctactttctaccaaactctggctggagtcacacatttggaggaatcagacatcattgatcttgagaaacgctattggttattgaaggctcaatcccggactggacgatttgatttagagacatttggcccattggtttcaccacctattcgtccatctctaagtgaaggtttgtttaatgcttttgatgaaaatcgtgacaatcacatagattttaaggagatatcctgtgggttatcagcctgttgcaggggacccctggctgaaagacaaaaattttgcttcaaggtatttgatgttgaccgtgatggagttctctccagggttgaactgagagacatggtggttgcacttttagaagtctggaaggacaaccgcactgatgatattcctgaattacatatggatctctctgatattgtagaaggcatactgaatgcacatgacaccacaaagatgggtcatcttactctggaagactatcagatctggagtgtgaaaaatgttcttgccaatgagtttttgaacctccttttccaggtgtgtcacatagttctggggttaagaccagctactccggaagaagaaggacaaattattaggactctggaaactgaccaaatatatacaagaaattgagaagcatttattcaagaactactaatccttggtgagaacaatggaagtgtgtggtaatttaaccaggagcagctttcatttcctcccatccagcaagtctgcatgggctgtcagtctgattcatgatttgaaggagagcaggaataaatgcctgtccaaggataataaaataaatacataccatcatggtggtaaacagtgagggaaaactgacatcaccagcttggggataaaatactggttaggggaagcagcagactaacaacagaccagtcaaatttttaacagggaacaggatcaccatagtgagccttagcaagctttctcatgtccccagtgatctgtagactgcttgtacaaggctatacacaaactcaggagaaaccaaagtgggctttagcactttattcttccctagttgaaggtgaagccttgcatgtgcagaaagtaaaagccagggtaggcttgtaacctgcccaaactttaaatgcattccccaaaccatgtacagatccatcaggaaaagggtgtgaatgttactggctaaacacaaccagtaaactgctgagagcacaacctctcagcagtcattggctgaccagtaagttaggctcaccccaagaaggccaagctt

SEQ ID NO: 225013 - protein, 1382 aa, Artificial Sequence
  derived and/or modified sequence
MTRKRTYWVPNSSGGLVNRGIDIGDDMVSGLIYKTYTLQDGPWSQQERNPEAPGRAAVPPWGKYDAALRTMIPFRPKPRFPAPQPLDNAGLFSYLTVSWLTPLMIQSLRSRLDENTIPPLSVHDASDKNVQRLHRLWEEEVSRRGIEKASVLLVMLRFQRTRLIFDALLGICFCIASVLGPILIIPKILEYSEEQLGNVVHGVGLCFALFLSECVKSLSFSSSWIINQRTAIRFRAAVSSFAFEKLIQFKSVIHITSGEAISFFTGDVNYLFEGVCYGPLVLITCASLVICSISSYFIIGYTAFIAILCYLLVFPLAVFMTRMAVKAQHHTSEVSDQRIRVTSEVLTCIKLIKMYTWEKPFAKIIEDLRRKERKLLEKCGLVQSLTSITLFIIPTVATAVWVLIHTSLKLKLTASMAFSMLASLNLLRLSVFFVPIAVKGLTNSKSAVMRFKKFFLQESPVFYVQTLQDPSKALVFEEATLSWQQTCPGIVNGALELERNGHASEGMTRPRDALGPEEEGNSLGPELHKINLVVSKGMMLGVCGNTGSGKSSLLSAILEEMHLLEGSVGVQGSLAYVPQQAWIVSGNIRENILMGGAYDKARYLQVLHCCSLNRDLELLPFGDMTEIGERGLNLSGGQKQRISLARAVYSDRQIYLLDDPLSAVDAHVGKHIFEECIKKTLRGKTVVLVTHQLQYLEFCGQIILLENGKICENGTHSELMQKKGKYAQLIQKMHKEATSDMLQDTAKIAEKPKVESQALATSLEESLNGNAVPEHQLTQEEEMEEGSLSWRVYHHYIQAAGGYMVSCIIFFFVVLIVFLTIFSFWWLSYWLEQGSGTNSSRESNGTMADLGNIADNPQLSFYQLVYGLNALLLICVGVCSSGIFTKVTRKASTALHNKLFNKVFRCPMSFFDTIPIGRLLNCFAGDLEQLDQLLPIFSEQFLVLSLMVIAVLLIVSVLSPYILLMGAIIMVICFIYYMMFKKAIGVFKRLENYSRSPLFSHILNSLQGLSSIHVYGKTEDFISQFKRLTDAQNNYLLLFLSSTRWMALRLEIMTNLVTLAVALFVAFGISSTPYSFKVMAVNIVLQLASSFQATARIGLETEAQFTAVERILQYMKMCVSEAPLHMEGTSCPQGWPQHGEIIFQDYHMKYRDNTPTVLHGINLTIRGHEVVGIVGRTGSGKSSLGMALFRLVEPMAGRILIDGVDICSIGLEDLRSKLSVIPQDPVLLSGTIRFNLDPFDRHTDQQIWDALERTFLTKAISKFPKKLHTDVVENGGNFSVGERQLLCIARAVLRNSKIILIDEATASIDMETDTLIQRTIREAFQGCTVLVIAHRVTTVLNCDHILVMGNGKVVEFDRPEVLRKKPGSLFAALMATATSSLR

SEQ ID NO: 225014 - DNA, 4149 bp, Artificial Sequence
  derived and/or modified sequence
atgacacgcaagcgcacctactgggttcccaactcaagtggggggctagttaataggggcatagatatcggggatgatatggtgtcaggactcatttataagacctacaccctccaggacggaccatggtctcagcaggaacgtaatcccgaggcccccggaagggcagctgtccctccctgggggaaatacgatgctgcacttcgaacaatgatccccttccgccccaaacccaggttccctgctcctcagccactggacaacgcgggcttgttcagttatctgacagtgagctggctgaccccactgatgattcagtccctgcggagccgcctcgatgagaacactatcccccctctgtccgtgcatgatgctagcgacaaaaacgttcagcggttgcatcgattgtgggaagaagaggtcagtagacgcgggattgaaaaggcgtcggtgttactggtaatgcttagattccagcggacccgcctgatatttgatgcacttctgggcatttgtttttgtattgcctccgtgttgggccccattttgatcatcccgaaaatactcgagtattcagaagagcaactgggtaatgtggtgcacggcgtgggcctctgtttcgctctgtttctgtctgagtgcgtgaaatcgctctctttttcaagcagctggataataaaccaaaggacggcaataagatttagggcggcagtaagcagcttcgctttcgaaaagctcatccagttcaagagcgtgatacatattacatctggcgaggcaatcagcttttttactggggatgtgaattatctgttcgaaggagtctgttacggtcccttagtgcttataacttgcgcctcgctggtcatttgctccatctcgtcctacttcattataggatataccgctttcattgcaattctgtgctatctgctggtgttccctctggcggtcttcatgactagaatggccgtcaaagcccagcatcacacctctgaagtgtccgatcagcgcatccgggtgacgtcagaggtgctcacctgcatcaagcttattaagatgtacacctgggaaaagcccttcgctaaaatcatcgaggacctgagacgaaaagaacgcaagctcctcgagaagtgtggcttggtgcagtccctaacgagcattactctgtttatcatccctactgtggccacagctgtctgggtgcttattcacacgagcttgaagctcaagttgaccgccagtatggcattcagcatgctggcctccctaaacttgctccggctgagtgtgttttttgtgcccattgctgtgaagggccttaccaactccaagagcgccgtaatgcgctttaaaaaattttttcttcaagagagccccgtgttttatgtgcagacgcttcaggacccgagtaaagccctagtgttcgaggaagcaactctgtcctggcaacagacatgcccgggcattgtgaacggcgctctggagctagagagaaatgggcacgcctccgaaggaatgactagaccccgcgatgctcttggaccagaagaagagggcaatagtttaggccccgagttacacaagataaacctcgtggtgtcaaagggaatgatgctcggagtgtgcggaaataccggaagtggcaagtctagccttctgtctgctattctcgaagagatgcacttgctcgaaggctcagtgggtgtgcagggttcactggcctatgtcccacaacaagcctggatcgtgtcagggaacatcagggagaatatcctgatggggggggcctacgacaaagctcggtacctccaggtgcttcactgttgctcactcaatagagatctcgagctgctgcctttcggcgatatgacagaaataggggaacggggattgaacctctccgggggtcagaaacaacgcatttcactagcccgcgctgtatactctgataggcagatctacctgctggacgatccattgtcggcagttgacgcacacgtcggaaagcatatatttgaggagtgcattaagaaaacattgcgcggaaagacagtggtgctggtaacacatcagctacagtatctggaattctgcggccaaattatcctgctggaaaatggcaaaatttgtgagaatggcacgcactctgagctaatgcaaaaaaaagggaagtacgcacagctaattcagaagatgcataaggaggccacgagcgatatgctacaagacaccgccaaaatcgccgagaaacccaaagtcgagtcccaagccttggccaccagtctagaggaatcactcaatggcaatgccgttcctgagcaccagctgacacaagaggaggaaatggaggagggatccttgtcctggcgagtgtaccaccactatattcaagccgccgggggttatatggtgtcctgcatcatatttttttttgtggtgctgatcgtcttcctgaccattttctcattttggtggttgagctattggctggaacaaggtagtggaacaaatagcagccgagaatccaatgggacaatggctgatctcggaaacattgcggataaccctcaactgtcattttaccagctcgtctatggcctcaatgcgctgctcttgatatgtgtaggagtatgctcttccggtatatttaccaaagtgacaaggaaggccagtaccgccctgcataacaagttattcaacaaggtgttcaggtgtcccatgtcttttttcgataccatcccaattgggcgacttctgaactgctttgccggagatctcgagcagttggaccagttgttacccatttttagcgaacagttcctggtgttatctttaatggttatagctgtcctcttaatcgtttccgtgttaagcccctacatactactcatgggggcaataatcatggtgatctgcttcatctattatatgatgtttaagaaggctatcggcgtcttcaaaaggctcgagaactattctcggtcccctctgttttctcacatattaaacagtctgcagggtctctcctccatccatgtgtacggaaagactgaggacttcatctcccagttcaaaaggttgacagacgctcaaaataattacctgttgctgttcctctcttccacgaggtggatggctctgcgactggagattatgactaatcttgtaaccctcgccgtggcgctattcgtggctttcgggatttctagtactccctacagttttaaggtgatggcagtcaatattgtactgcagctggcctcaagcttccaggctaccgcccggatcgggctcgagacggaagcccaattcaccgctgtcgagagaatcttgcagtacatgaagatgtgcgtttcagaggcgcccctgcacatggagggtacatcgtgtccacagggctggccacagcacggcgagatcatcttccaggattatcacatgaagtatcgtgataatacaccaacagtgttgcatgggattaatctaaccattaggggccatgaagtggtggggatcgtcgggcggactgggagtggaaagtcctcattgggtatggcactgtttcgactggttgagccgatggctgggcgtatcctcatcgatggcgttgatatctgtagcatcggccttgaagacttgcgttcaaagctcagcgtgatcccccaggaccccgtgctcttatctggtacaatccggtttaatctggaccccttcgaccggcacacagatcagcaaatctgggacgctttggagcggaccttcctgacgaaggctatctccaagttccctaagaagctccatactgatgtggtggagaacggtggcaacttctccgtgggcgagagacagctgctgtgtattgccagggccgtgctgcgaaacagcaagatcattctgatcgacgaggccacagcaagtatcgatatggaaacagatacactgattcaaaggaccatacgggaagcgttccagggctgcaccgtgctggtcatcgcacatagggtgacaacagtcctcaattgcgatcacatcctggtaatgggaaacggaaaagtggtggagtttgaccgtcctgaagtcttgagaaagaagccaggctccctgtttgcagcgcttatggcgaccgccaccagctctctgaggtag

SEQ ID NO: 225015 - DNA, 4149 bp, Artificial Sequence
  derived and/or modified sequence
atgacacggaagcgaacctattgggtgcccaacagtagtggcgggctggtgaatcggggaatcgacatcggagacgacatggtctccggattgatctataagacatatactctgcaggatgggccgtggtctcagcaggaaaggaatcccgaagcacccggacgcgccgccgtgcctccttggggcaaatacgacgctgcactgcgcaccatgattccgttccgacccaaacctagattccccgctcctcagccactggacaacgccggactgtttagctacttaaccgtaagctggctgaccccattgatgattcagtctctccggtctcgcctggatgaaaacacaatccctcctctatccgtgcatgacgcctcagacaaaaatgtgcagcgtctgcaccggctgtgggaagaggaggtgtcccgacggggcattgagaaagcaagcgtgttattagtgatgctgaggtttcaacggactagactgatctttgatgcacttttgggcatatgcttctgcattgcgtcagtgcttggccctatcctgatcatccctaagatattggaatattccgaggaacaactaggcaacgtggtacatggagtaggtctgtgcttcgctctctttctcagcgaatgtgttaaaagcttgagcttctcttcaagctggatcattaaccagcggaccgctattagatttagagccgctgtgtcctccttcgcatttgagaagctgatccagtttaagagcgtgatccacatcacatcgggagaggctatcagcttctttaccggagacgttaactatctttttgaaggagtctgttatggcccgctcgtgctgatcacttgcgccagcttggtgatttgctccatctcaagctatttcatcattgggtacaccgcctttattgctattttgtgttatctgctagtttttcctctggctgtattcatgacgcggatggccgttaaggcccagcaccatacaagcgaagtttccgaccagcggattcgtgtcactagcgaagtgctgacttgtattaagctcattaaaatgtacacctgggagaagccgttcgctaaaattatagaagatttgaggcgaaaagagcgaaagctgcttgaaaagtgcggcctcgtgcagtccctgacaagcatcacactgttcatcatcccaacagtcgcaactgccgtgtgggtgctgatccatactagcctcaagcttaaactgaccgcttcaatggcattttctatgctggctagcctgaatctgctccgactttcagtcttctttgttcccatcgcggtgaaaggtttgaccaattcgaaatcagccgtgatgagattcaagaagttcttcctccaggagtctcctgttttttacgtgcaaacactgcaggaccccagcaaagccctggttttcgaagaagccaccctctcttggcagcagacctgcccgggtattgttaacggtgctttagagctagaacgcaacggccacgcctccgaggggatgacaagaccaagggatgccctgggccctgaagaggaagggaattcgctgggaccagagctgcataagatcaatttagttgttagtaaaggcatgatgctcggcgtgtgtgggaacacaggatctggcaagtcttccttgctcagtgcaattttggaagaaatgcatctgctggaagggtccgtgggagtccagggctcactcgcctacgtgccgcagcaagcctggatagttagcggcaacataagagagaacatcttaatgggcggcgcatatgataaagccagatacctgcaggtactccattgttgctccttgaaccgtgacctagaactcctaccctttggggacatgaccgagattggagagaggggcctgaacctctccgggggccagaagcaacgtattagtctggcgcgcgcggtgtacagcgacaggcaaatttacctgctcgacgaccccctgagcgctgtggacgctcacgtcggaaagcatattttcgaagaatgcataaaaaaaactctgaggggaaagacagtggtgcttgtaacacaccagcttcagtacctagaattttgtggccagatcattctgctggagaacggaaagatctgcgagaatggcactcacagcgagctgatgcagaagaaaggaaagtatgcccagctcatacagaaaatgcataaagaggcaacgtctgatatgctgcaggacaccgctaaaatcgctgaaaagcccaaagttgagagccaggccctcgccaccagcctcgaggaatctctgaatggcaacgcggtacctgaacaccagctaacacaggaagaggagatggaagaaggctccctgtcatggcgcgtgtaccatcattacatccaggccgctggcggctacatggtgagttgcattatcttcttctttgtggtgctcatcgtattcttgactatcttttccttctggtggctgagttattggctcgaacaggggtctggcactaatagttctcgggagtctaatggcacaatggccgacctaggaaacatagccgacaatcctcagcttagcttctatcagcttgtatacggactgaacgccttgcttctaatctgcgtgggagtttgcagcagtggcatcttcaccaaagtcacacgaaaggcttctacggccctgcataacaaattattcaataaagtattcagatgtcccatgtccttcttcgacactatcccaatcggcaggcttctcaactgtttcgctggtgatctggaacagttggaccagctgctacccatatttagcgagcagttcctcgtgctcagtctgatggtgatcgcagtgctgctcatcgtgtcagtcctaagtccatacatcttgctaatgggcgcgataatcatggtgatttgttttatatactacatgatgttcaaaaaggcgatcggcgtgttcaaacgtttggagaattacagccggtctcccttgttcagccacatcctgaatagtcttcagggcttgtcttctatacatgtgtatggtaaaaccgaggattttatctcccagttcaaacgtctgaccgatgcacaaaataactacctgctgctgtttctgagctcaacccgttggatggctctcaggctggagattatgaccaacttggtgactttggctgtggcgctttttgtggcttttggcatctcctctaccccgtacagctttaaagtcatggctgttaacattgtgttacagttggcttcctcgttccaggctaccgctagaattggccttgagaccgaggcgcagtttactgccgtcgaacgtatccttcagtatatgaagatgtgtgtttctgaagcaccgctccacatggaaggaacctcctgtccacaggggtggcctcagcacggggagattatctttcaggattaccatatgaaatatagagataatacacccactgtgctgcacgggataaacctcactattaggggacacgaagtagttggaatagtgggtaggacagggagcggaaagtcttctcttggaatggccctgtttcgtttagtggagccaatggccgggcgtatcctcattgatggtgtggatatttgcagcattgggctagaggacctgaggtccaagctgtcggtaataccacaggaccccgtgctgctgtcaggaacaatccggttcaatctcgacccatttgaccggcacacagatcagcagatctgggacgccctcgagcgaacattcttaaccaaggccatttctaagttcccgaagaagttgcacaccgacgtggtggaaaacggaggtaacttcagtgttggagagcggcaattattgtgtattgctcgtgcagtcttgcgtaattcaaagatcattctcatagacgaagccactgcttcgattgacatggagacagatacactgatccaacgcaccatccgagaagcattccaggggtgtactgtgcttgtgatagctcaccgagtgaccacggtgctcaactgcgatcatatactggtgatgggtaatggtaaagtggtggagttcgaccgccctgaggtgttacggaagaagcccgggtcgctgttcgctgccctcatggctaccgctacgtcctccttgaggtag

SEQ ID NO: 225016 - DNA, 4149 bp, Artificial Sequence
  derived and/or modified sequence
atgacgaggaaaagaacctactgggtgcccaacagcagcggcggacttgtcaatcggggcatcgacataggggatgacatggtgagcgggctgatctacaaaacatacaccttacaggacgggccctggagtcagcaggagcgcaaccccgaggcacccggacgggccgcagtccccccgtggggaaagtatgacgctgccttaaggactatgatccctttccggcccaaacctcgcttccctgctcctcagccactggataatgcgggcctcttctcttatttgacagtgtcttggttgacccccctgatgattcagagcttgaggagccgcctggacgagaatactatcccacccttatccgtccacgatgccagtgacaaaaacgttcagcggctgcaccgactttgggaggaagaggtatctcgaagaggcattgagaaagcctctgtgctactcgtgatgttgcgctttcagcggacccggctgatattcgatgcgctcctgggcatttgcttttgtattgcttctgtcttaggccccatcctgattatcccgaagatcctggagtactctgaagaacagctcggcaatgttgttcacggggttggactgtgctttgcactgttcttatcggagtgtgtcaaatctttaagcttttcttcctcttggattattaatcagcgaacagctatccgatttcgggcggccgtgtcttctttcgcgttcgagaaacttatccaattcaaatccgtgatccacatcacatccggtgaggcaatcagcttctttacaggggatgtgaattatctttttgagggtgtatgttacggccccttagtactgatcacgtgtgcctcccttgttatatgttcgatcagttcctattttattattggttatacggcctttattgcgatcctttgttatctgctggtctttcccttggccgtgttcatgacccggatggctgtcaaggcccagcatcatacctccgaggtttccgaccagaggatcagggtaacaagcgaggtgttaacatgcataaagctaatcaagatgtacacttgggagaaaccattcgcgaagataatcgaagatttgaggcggaaggaacgcaaactgttggaaaagtgcggcctggtccaatcgctgacaagcatcactctcttcatcatcccaaccgtcgcaacagccgtgtgggtgctgatccatactagtcttaagttgaaactgaccgccagcatggcctttagcatgctcgccagcctgaatttgctacggctttccgtgtttttcgtgccaatagccgtaaagggtttgacaaatagtaagtcggcagtgatgaggttcaagaagtttttcctgcaggaatccccagttttttatgtgcaaacactgcaggatccatccaaagcgcttgtgtttgaagaagcgaccctttcttggcagcagacttgccccgggattgtgaatggagccctggagctggaaaggaatgggcatgcaagtgagggcatgacgcgcccgcgagacgctcttggaccagaggaagaggggaacagccttggcccagaactccataaaattaacttggtcgtctcaaagggaatgatgttgggtgtctgcggcaacactggcagcgggaagtcatccctgctgagcgccatccttgaagagatgcacctgttggaagggagcgtgggggtccagggctctctcgcatacgtccctcagcaagcatggatcgtttcaggcaacattcgcgagaatatcctgatgggcggggcatacgataaagccagataccttcaggttctgcactgttgttcactgaatcgcgacttggaactgctgccattcggagatatgacagagatcggtgaaagagggctgaacctgtcgggtgggcagaagcagaggataagtctggccagggcggtgtacagtgatcgacagatttaccttttagacgacccgctgagtgctgtggatgcccatgtggggaaacacatttttgaggaatgcatcaaaaaaaccttacgcgggaagacagtggtccttgttacacaccaattgcagtatctggagttctgtggccagatcattctccttgagaatggaaagatctgtgaaaatggcacacatagcgagctgatgcagaaaaaaggtaaatatgcgcaactgatacagaaaatgcataaagaggccacctcagatatgctacaggacaccgccaaaatcgcggagaagcctaaggtggagagtcaggcactagctacaagtctggaagaatctctgaatggaaatgcagtaccggaacaccagctaacccaggaagaggagatggaagaaggatctctgagctggcgggtttaccaccactatatccaggccgcgggtggctatatggtgagctgtataatattttttttcgttgtgctgatagtgttcctcacaatattttcattctggtggttaagttactggctggaacaaggctccggcaccaacagcagcagggaaagcaatggaactatggccgatctcggcaacatcgccgacaacccccagttgtcgttctaccagcttgtctatgggttgaatgcgctcctcctcatttgtgtaggagtttgttcgagcggaatcttcacaaaggtaacaagaaaagcaagcacagctctccacaataaacttttcaacaaagtgttcaggtgtcccatgtctttctttgacacaattccaattggtcggctgttaaattgctttgccggcgaccttgaacagcttgaccagctgctgcctatattttcagagcagtttctcgtcctcagtcttatggtcatcgccgtgctgctgattgtttccgtcctttcaccatacattctgttgatgggggccattatcatggttatctgtttcatctattacatgatgtttaagaaggccatcggggtttttaagcggctggagaactattcccgctcgccgctattttctcatattctgaacagcctgcaaggtctttcatcgatccacgtttatgggaagacagaagatttcatctcccagttcaaaaggctgacagacgctcagaataattacctgctcttgttcctgtcaagcactcgatggatggcgttaaggctggaaattatgaccaatcttgtgactcttgccgttgctcttttcgttgctttcggcatttccagcacaccctacagctttaaggtgatggcagtgaatattgtgctccaattggcttcttccttccaggccaccgcgagaatagggctggagactgaagcccagttcaccgccgtagagagaatcctacagtacatgaagatgtgcgtcagtgaagcccctctgcacatggagggaacgagttgcccacaaggatggccccagcacggggagatcatcttccaagactatcatatgaagtatagagacaacacacccacggtgctccatgggataaacttgaccattagaggacacgaagtggtaggcatagtggggaggactggcagcggtaaatcgagtttggggatggccttgttccgactggtcgaaccaatggcgggtagaatcttaatcgatggcgtcgatatctgcagcatcggactcgaagacttgcgatctaaactctctgtaattccccaggaccctgtgttgctgtctgggactattaggtttaatcttgaccccttcgatcgacacacggaccagcaaatatgggatgcactggagcgcactttcctgaccaaggccatatcaaagtttcccaagaagctccatacggatgtggtcgaaaatgggggcaactttagcgtcggggaaaggcaactcctatgcattgctcgggcagtgttgcggaactccaaaattatcttgatagatgaagccacggctagcatcgatatggaaacagacactctgatccaaaggacaatcagagaagccttccaggggtgtaccgtgttggtgatagctcacagggtaaccaccgtgttgaattgtgaccacatcctggtgatgggcaacggcaaggtggtcgagttcgacagacctgaggtgctaaggaagaaacctggctcgctgttcgccgccctaatggctaccgccacctcgagcttgagatag

SEQ ID NO: 225017 - DNA, 4149 bp, Artificial Sequence
  derived and/or modified sequence
atgaccaggaagaggacctactgggtgcccaacagcagcggcggcctggtgaacagaggaattgatattggagatgacatggtgtctggcctcatctacaagacctacaccctgcaggacggcccctggagccagcaggagaggaaccctgaggcccctggccgggctgctgtgcccccctggggcaagtatgatgctgccctgcggaccatgatccccttccggcccaagccccgcttccctgccccccagcccctggacaatgccggcctcttctcctacctgactgtgtcctggctgacccccctgatgatccagagcctgcggagccggctggatgagaacaccatcccccccctgtctgtgcatgatgccagtgacaagaatgtgcagaggctgcaccggctgtgggaggaggaggtgtccagaagaggcatcgagaaggcctctgtgctgctggtgatgctgcgcttccagaggaccaggctcatctttgatgccctgctgggcatctgcttctgcatcgcctctgtgctgggccccatcctgatcatccccaagatcctggagtacagcgaggagcagctgggcaatgtggtgcatggagtgggcctgtgctttgccctcttcctgtctgaatgtgtgaagagcctgtccttcagcagctcctggatcatcaaccagaggacagccatccgcttccgggctgctgtgagcagctttgcctttgagaagctgatccagttcaagagcgtcatccacatcaccagcggggaggccatctccttcttcaccggagatgtgaactacctgtttgagggcgtgtgctacggccccctggtgctgatcacctgtgccagcctggtgatctgcagcatcagcagctacttcatcatcggctacacagccttcatcgccatcctgtgctacctgctggtgttccccctggccgtgttcatgaccaggatggctgtgaaggcccagcaccacaccagcgaggtgtctgaccagaggatccgggtgaccagcgaggtgctgacctgcatcaagctgatcaagatgtacacctgggagaagccctttgccaagatcatcgaggacctgcggaggaaggagaggaagctgctggagaagtgtggcctggtgcagagcctgaccagcatcaccctcttcatcatccccaccgtggccacagctgtgtgggtgctgatccacaccagcctgaagctgaagctgacagcctccatggccttctccatgctggccagcctgaacctgctgcggctgagcgtcttctttgtgcccatcgctgtgaagggcctgaccaacagcaagtctgctgtgatgaggttcaagaagttcttcctgcaggagagccctgtgttctacgtgcagaccctgcaggaccccagcaaggccctggtgtttgaggaggccaccctgtcctggcagcagacctgccccggcatcgtgaatggagccctggagctggagagaaatggccacgccagcgagggcatgacccggcccagagatgccctgggccctgaggaggagggcaacagcctgggccctgagctgcacaagatcaacctggtggtgtccaagggcatgatgctgggcgtgtgtggcaacacaggcagcggcaagagcagcctgctgagcgccatcctggaggagatgcacctgctggagggctctgtgggcgtgcagggcagcctggcctacgtgccccagcaggcctggatcgtgtctggcaacatccgggagaacatcctgatgggcggggcctatgacaaggcccgctacctgcaggtgctgcactgctgcagcctgaacagagacctggagctgctgccctttggagacatgacagaaattggagagcggggcctgaacctgagcggcggccagaagcagaggatcagcctggcccgggctgtgtacagcgaccggcagatctacctgctggatgaccccctgtctgctgtggatgcccacgtgggcaagcacatctttgaggagtgcatcaagaagaccctgcggggcaagacagtggtgctggtgacccaccagctgcagtacctggagttctgtggccagatcatcctgctggagaatggcaagatctgtgaaaatggcacccacagcgagctgatgcagaagaagggcaagtatgcccagctgatccagaagatgcacaaggaggccaccagtgacatgctgcaggacacagccaagattgctgagaagcccaaggtggagagccaggccctggccaccagcctggaggagagcctgaatggaaatgctgtgcctgagcaccagctgacccaggaggaggagatggaggagggcagcctgtcctggagggtgtaccaccactacatccaggccgccggcggctacatggtgtcctgcatcatcttcttctttgtggtgctgattgtgttcctgaccatcttctccttctggtggctgagctactggctggagcagggcagcggcaccaacagcagccgggagagcaatggcaccatggctgacctgggcaacattgctgacaacccccagctgtccttctaccagctggtgtatggcctgaatgccctgctgctgatctgtgtgggcgtgtgcagcagcggcatcttcaccaaggtgaccaggaaggccagcacagccctgcacaacaagctgttcaacaaggtgttccgctgccccatgtccttctttgacaccatccccatcggccgcctgctgaactgctttgctggggacctggagcagctggaccagctgctgcccatcttcagcgagcagttcctggtgctgagcctgatggtgattgctgtgctgctgattgtgtctgtgctgagcccctacatcctgctgatgggcgccatcatcatggtgatctgcttcatctactacatgatgttcaagaaggccatcggggtcttcaagaggctggagaactacagccgcagccccctcttcagccacatcctgaacagcctgcagggcctgagcagcatccacgtgtatggcaagacagaggacttcatcagccagttcaagaggctgacagatgcccagaacaactacctgctgctcttcctgagcagcacccgctggatggccctgcggctggagatcatgaccaacctggtgaccctggccgtggccctgtttgtggccttcggcatcagcagcaccccctacagcttcaaggtgatggctgtgaacatcgtgctgcagctggccagcagcttccaggccacagccagaattggcctggagacagaggcccagttcaccgctgtggagcgcatcctgcagtacatgaagatgtgtgtgtctgaggcccccctgcacatggagggcaccagctgcccccagggctggccccagcacggggagatcatcttccaggactaccacatgaagtacagagacaacacccccaccgtgctgcacggcatcaacctgaccatccggggccacgaggtggtgggcatcgtgggccgcactggaagtggcaagagcagcctgggcatggccctcttccggctggtggagcccatggccggccgcatcctgattgatggagtggacatctgcagcatcggcctggaggacctgcggagcaagctgagcgtcatcccccaggaccctgtgctgctgagcggcaccatccgcttcaacctggacccctttgacagacacacagaccagcagatctgggatgccctggagaggaccttcctgaccaaggccatcagcaagttccccaagaagctgcacacagatgtggtggagaatggaggcaacttctctgtgggggagcggcagctgctgtgcatcgcccgggctgtgctgaggaacagcaagatcatcctgattgatgaggccacagccagcattgacatggagacagacaccctcatccagaggaccatccgggaggccttccagggctgcaccgtgctggtgattgcccaccgggtgaccaccgtgctgaactgtgaccacatcctggtgatgggaaatggcaaggtggtggagtttgacaggcctgaggtgctgaggaagaagccaggcagcctgtttgctgccctgatggccacagccaccagcagcctgaggtag

SEQ ID NO: 225018 - DNA, 4149 bp, Artificial Sequence
  derived and/or modified sequence
atgacccggaagcggacctactgggtgcccaacagcagcggcggcttggtaaacaggggtatcgatatcggcgacgatatggtctctggccttatctacaaaacttatacccttcaggatggaccctggtcacaacaggagcgcaatccagaagctcccggcagagctgcagtgcccccctggggcaaatatgacgccgctttgcgcacgatgataccattcaggccgaagcctcggtttcctgccccacaaccattggacaatgcgggcctgttcagttatctcacagtgtcctggctcacaccgctgatgatccagtccctgcgcagccggctggacgagaataccattcctcccctctctgtgcacgatgccagcgacaaaaatgttcaaagacttcacaggctgtgggaggaggaggtgtcccgccgtggcatcgagaaagctagcgtgctactggttatgctgcgtttccagagaactaggctgatttttgacgccctgctcggcatatgtttttgtattgcctccgttctcggccctatcctgataatcccaaaaattctagaatattccgaggaacaacttggcaacgtggtgcacggtgtggggctatgttttgcactgttcctttccgagtgtgtcaaaagcctgagcttttcttcatcttggatcataaaccagcgtaccgctattagatttagagcggctgtcagtagttttgctttcgaaaaactgatacagtttaagtccgtaatccatatcacatctggagaggccatctctttcttcactggggacgtgaattacttgttcgagggcgtttgttacgggcctctggtgctcattacatgtgcgtccctggttatttgttccatctctagctactttatcatcggatacacagccttcatcgctatcctgtgctatttgttagtctttccactcgccgtgttcatgacccgaatggcagtgaaagcgcagcaccacacatctgaggtgtccgatcagagaattcgggtaactagcgaggtcctcacctgcattaagcttattaagatgtacacctgggaaaagccatttgctaaaatcattgaagacctgaggagaaaagagagaaaactgttggaaaagtgtgggctagtgcagagtctgaccagcattacactgttcataattccgacagtggccacagctgtttgggtgctcatccacactagcctcaagcttaaactgaccgcatctatggccttctccatgctggcttcacttaatcttttacggcttagcgtgttttttgtgcccatcgcagtgaagggtctcacaaattccaaaagcgccgtcatgaggttcaaaaagttttttctccaggaatctcccgtcttttatgttcagacgctgcaagacccttcgaaggcactggtgtttgaggaggcgacactgtcctggcagcagacctgtcccgggatagtgaacggcgccttggaactggagagaaatgggcatgccagtgaagggatgacaaggccgcgcgatgctttggggccggaagaggaagggaacagcctgggaccggagcttcataagatcaatttggtagtgtctaaaggcatgatgctgggagtgtgtggcaacacaggtagcggaaagagtagtctgctgtccgcaatcctggaagaaatgcatctattggagggatccgtgggggtgcagggttccctcgcatatgtgcctcagcaagcctggatcgtaagcggaaacattagagagaacattttgatgggtggtgcatacgataaagcccgctatctgcaagtcctccattgctgctccctcaacagagatttggaactcctgcctttcggcgatatgactgaaatcggcgagagagggctcaatttgtctgggggccagaagcagagaatttcattggcacgcgccgtgtactccgatcgccagatatacttactggacgatcccttgtcagccgtggacgcacacgtcgggaagcacatttttgaagaatgtattaaaaagacgctgagaggaaagactgtggtgttagttactcaccagttacagtacctggagttttgcggacagatcatcctcttggagaatgggaaaatctgtgagaatgggacacacagtgaactgatgcagaaaaagggaaagtacgctcagctgattcagaagatgcataaagaagcgaccagcgacatgctccaggataccgcgaaaattgccgaaaagcccaaagtggaatctcaggctctggctacgtctttagaagaatccttgaatgggaacgctgtgccggagcaccagctcactcaggaagaagaaatggaagagggctcactctcttggcgggtgtatcaccactatatccaggccgcaggcggatatatggtcagctgcattatctttttttttgttgtgctaatagtatttttaaccatattcagcttttggtggcttagctactggttggagcaggggagtggcacaaacagctcccgagaatccaacggcaccatggctgacctggggaacattgccgacaaccctcaactttcattctatcagctggtttacggactaaatgctctcctgctaatttgtgttggagtgtgctccagcggcatctttactaaagtgacaagaaaagcttccactgcactgcacaacaagctgttcaacaaagtcttccgatgccctatgtcgttttttgacactataccaattggacgcctgcttaattgttttgcgggagacttagagcagctagatcagttactgcctattttctccgaacagttcctggttttgagtctgatggtgatcgcagtgctgctgatcgtgtcagtcttgtcgccctacattctcctcatgggcgccatcatcatggtcatatgtttcatctactatatgatgtttaagaaggccatcggcgttttcaagcggctcgagaactactctcgatcccccctattttcacatatcctgaatagtctgcaaggcctttcaagcatccatgtgtacggtaagacggaggatttcatttctcagttcaagcgccttacagacgcgcaaaataattaccttctgcttttcctgtcctcgacacggtggatggctctgcgcctggaaattatgacaaatctggtgacactggctgtggctctttttgtggcctttggcatatcctcaactccctactctttcaaagttatggccgtgaatatcgtgctccagctagcctcaagttttcaggccactgctcgtattggtcttgagacggaagcccagtttaccgcggtagaacggattttgcagtatatgaaaatgtgcgtgtccgaggccccactccatatggagggaacctcttgtccacagggctggccccagcacggcgaaataatcttccaagactaccatatgaagtacagagataacacccctacggttctgcacgggattaacctcaccatccgaggacacgaagtcgttggtatcgtggggcgtactgggagcggtaaaagttctctggggatggccctatttcggctggtagaacccatggccggtcgcatactgatagatggcgtcgacatctgttctatcgggcttgaagacctgcggtctaagcttagcgttattcctcaagaccccgttctgttaagcggcacaattcgctttaatttggatccattcgacagacatacagatcagcagatctgggacgccctcgagcggacgtttttaaccaaggcaatcagcaaattccctaagaaactccacacggacgtggtggagaatggtggcaatttcagcgttggggaacggcagctcctgtgcatcgctcgggccgtgcttagaaacagcaaaattattttgatagatgaggcaacagcaagtattgacatggagaccgataccttgatacaaagaacaatcagagaagccttccaagggtgtaccgtcctcgtgatcgcacaccgagttaccaccgtgctgaattgtgatcatatactcgtcatgggaaatggaaaagttgttgaattcgaccgccccgaggtgctccggaagaaacccggttctctttttgccgccctaatggcaaccgcgacatccagcctgcggtag

SEQ ID NO: 225019 - DNA, 4149 bp, Artificial Sequence
  derived and/or modified sequence
atgacccggaagcggacctactgggtgcccaacagcagcggcggcctggtgaacaggggtatcgatatcggagacgatatggtctctggcctcatttataaaacatataccctgcaggacggaccgtggtctcagcaggaaaggaaccccgaagcccctggacgggccgccgtacccccctggggaaaatacgatgctgcactaaggacaatgataccctttcgaccaaaaccgcggtttcctgccccccagccactggacaatgcagggctgttcagttacttgacagtctcttggctgaccccgcttatgatccaatccttgagatcgcgactggatgaaaataccattcctcccctaagcgtacatgatgcctcagacaagaacgttcagaggctccatagactttgggaggaggaggtctcaagaagaggcatcgaaaaggccagtgttcttctggttatgctgcgattccagcgcacacgtttgatcttcgatgccctgctgggcatatgcttctgcattgctagtgtgctcgggcccatcctgattattccgaagatcctggagtacagcgaggagcaattaggaaacgtcgtgcacggcgtgggcctatgtttcgcgctgttcttgtcggagtgcgtgaaatctctgagcttcagttcaagctggataatcaatcaaagaacagcaattcgctttagggctgccgtgtcttcctttgcctttgagaagcttatccaatttaagagcgtaatacatattacgtctggagaagccatctcctttttcaccggcgacgtgaattacctcttcgagggcgtgtgttatggtcctctcgtgctgatcacttgcgcctcactggtgatatgctctatctcctcttactttatcatcggctacactgcattcatagcaatcctttgttacctacttgtctttccgctggctgtctttatgacgcgcatggccgtcaaagcgcagcatcacacatcagaagtatccgaccagaggatacgggtgacgtccgaggtgctgacttgcataaagctgatcaagatgtatacttgggagaagcctttcgccaaaattattgaggatcttagaagaaaggaacgcaaattgctggagaaatgcggccttgtccagtccttaacatcaatcaccttgttcattatcccaactgtcgctacggcagtctgggtgcttatacacacctcccttaaactcaagcttaccgccagcatggccttctccatgcttgctagtctgaacctgctgcggctctctgtgttcttcgtgcccatcgcagtcaagggcctgaccaactccaagagtgcggtaatgcgatttaagaagttttttcttcaggaatcacccgttttttatgtgcagacactgcaggatccatctaaggccctcgtttttgaagaagctacactttcttggcaacagacttgtccaggaattgtcaacggagccttggagctagagcgtaatgggcacgctagcgaaggcatgacgcgcccccgcgacgccctcggtcccgaggaggaaggaaactcactgggcccggagctgcataagatcaatcttgtggttagcaaggggatgatgctgggggtctgcggcaacactggtagcggaaagagttccctgctttcagccattctggaggagatgcatctgctagagggttccgtaggcgtgcaaggctctctggcttacgtcccccaacaggcgtggattgtgtctgggaatatccgcgagaatattttaatgggtggcgcctatgacaaagcaaggtacctgcaggtcctgcactgctgcagccttaacagagacctggaacttttgccattcggggacatgaccgagatcggagagcgcggcctcaacctctcaggaggacaaaagcaaagaatctccctggcgcgtgccgtttacagcgacaggcagatctatctcttggacgacccccttagtgccgtggatgctcatgtgggaaagcacatctttgaagaatgtatcaaaaagactctccgtggtaaaactgtggtcctagtgacccaccagttacagtatctagaattttgtgggcagatcattctcctggaaaacggcaagatatgcgagaacggaacacactcagagctgatgcagaagaagggaaaatacgcccagcttatacaaaaaatgcacaaggaggctacatcagacatgctgcaagacactgctaaaatcgcagagaaaccaaaggttgagtctcaggccctggcaacatccctggaagagtctcttaatggcaacgccgtccccgagcatcagctcactcaggaggaggagatggaggagggctctctgtcttggcgggtgtaccaccattacatacaggcagccggcggctacatggtgtcttgtatcattttcttttttgtcgttctgatcgttttcttgacaatctttagtttctggtggttgtcttactggttggaacaagggtctggcaccaacagctcacgtgagtccaatgggacaatggcggatctgggcaatattgcggacaaccctcagcttagtttttaccagttagtgtatggactgaatgctttgttgctgatctgtgttggtgtgtgcagctccggtattttcactaaagtgactcgcaaggcttcaactgcactgcataataagctgtttaataaagtgtttcggtgtccaatgtctttctttgacactattcccatcggcagacttctaaattgcttcgcaggtgacttggaacaactggatcagcttctgccaatcttcagtgaacagtttctggtgctatcactgatggtcatcgcagtgctcctgatagtgagcgtcctgtcaccatacatacttttgatgggagccattatcatggtcatttgcttcatttactatatgatgtttaagaaggccattggggtgttcaaaagactcgaaaattatagccgcagtcctctgtttagtcacatccttaattcccttcaagggctcagcagtattcacgtgtatggcaagactgaagatttcattagtcagttcaagaggctgacagatgcccaaaacaattatctgcttttgtttctgagctcaacacggtggatggcccttcgccttgaaatcatgactaatctcgtgaccctggcagtggcattgttcgtggcattcggaattagttccaccccgtatagttttaaggtgatggctgttaacatcgtgttacaactcgcctcttcctttcaggcaaccgcacggatcgggctggagacagaggctcaatttacggcagtagagagaatcctccagtatatgaaaatgtgtgtgagcgaagctcccctgcatatggaagggacgtcttgtccacaggggtggcctcagcacggcgaaatcatctttcaggattaccatatgaagtatcgcgacaacactccaactgtgcttcatggaattaatctgactattcgaggccatgaagtggtgggaatcgtggggcgaaccgggagcggtaagtccagcctaggtatggccctgttcaggctcgtagaacccatggccggccgcatcctgatagacggagtagacatatgcagcattggcctcgaagacctgcgctccaagttatctgtgatccctcaggaccccgtgctactctccggcactattaggtttaacctggatccttttgaccggcacacagaccaacaaatatgggacgcactggagcgcacctttcttacaaaggctattagcaaattcccaaaaaagctgcacaccgatgtggtggaaaacgggggtaatttttcagtcggcgagagacagctgctctgcatcgcgcgggcagtgctgaggaactctaaaatcatcctcatcgacgaggctacagcgtctattgacatggagaccgacacattgattcagcgcacgatccgcgaagcattccagggctgtaccgttttagttatagcccatcgggtcactacagtgctcaactgtgaccatatcctcgtgatgggcaatggaaaggtagttgagtttgaccgaccagaagtcctaaggaagaaaccaggctctctgtttgctgccctcatggccacggcaaccagctcactgaggtag

SEQ ID NO: 225020 - DNA, 4149 bp, Artificial Sequence
  derived and/or modified sequence
atgacccggaagcggacctactgggtgcccaacagcagcggcggcctggtgaaccggggcatagacatcggcgatgatatggtgagtggactcatttataagacatacactctgcaggacggtccctggtcccagcaagagcgtaatcccgaagcgcccgggcgtgcagccgtgccaccctggggcaaatacgacgccgccctccggacaatgattccatttcgaccaaagcctcgattccctgcgccacagccacttgataacgccggcttattctcctatctcacagtgtcatggctcacgccattgatgatccagtcgttgaggtcgcggctggacgaaaataccattccaccactctctgtccatgacgccagtgacaagaatgtgcagaggctacatagactctgggaagaggaggtatctcgacggggtatcgagaaggccagcgtcctcctagtaatgttgagatttcagcggactcggctaatttttgatgcccttctcgggatctgcttctgtatcgcatccgtactggggcctatccttattatccctaagattctggagtattccgaggagcagcttggtaacgtggttcatggtgtcggactatgcttcgctctgtttctctcagagtgcgtgaagtctctgtctttcagttcctcttggataattaatcaacgaactgccattaggtttagggctgcagtaagttcatttgccttcgagaaattaatccagttcaaaagtgttatccacattaccagtggtgaagccatatccttcttcaccggggacgttaattacctttttgagggagtgtgctacggaccattagttttgatcacatgcgcctcactcgtgatctgctccatatcaagctactttattatcggctatacagcctttatagcaatcttgtgctaccttttggtgtttccactggcagtgttcatgacacgcatggctgtgaaagcccagcaccacacctccgaagtgtccgaccagagaatccgagttacttcagaagtcttaacttgtatcaagctcattaaaatgtatacctgggaaaagcctttcgctaagattattgaggacctgaggaggaaagaaagaaagctgttggaaaaatgtgggctcgtgcagagcctgacctctataacactctttatcatccccaccgtagccaccgccgtgtgggtcctgattcacacctcattaaaacttaagcttaccgcgagcatggcgttctcaatgttggcttccttaaacctcttgagactttcagtgttcttcgtccctatcgctgtgaaagggcttaccaatagcaaaagcgccgtcatgcgattcaagaaattctttctgcaggaaagccctgttttctacgtgcaaaccctgcaagatccatcaaaggcactcgtcttcgaagaggcgaccctgagttggcagcagacgtgtcccggtattgtgaacggggccctggaactggagcggaacggtcacgccagtgagggcatgactagaccacgggacgccctgggtccagaggaagagggcaattctttgggccctgagctacacaagattaacttggtcgtgtcaaagggaatgatgctgggggtttgtggcaatactggaagcggcaagtcttccctgctctctgctatcttggaggagatgcaccttctggagggaagcgtgggcgttcagggatctctggcatacgtgccgcagcaggcttggattgtgagcggtaatatcagagagaatatattgatggggggagcctacgacaaagcccgctatctgcaggttctccattgctgctcactgaatagagacctcgagcttttaccattcggtgatatgaccgaaattggtgagagaggacttaacctcagcggcggacaaaaacagagaatctctctggcccgggccgtgtactcagacagacagatctacctgctggacgaccccttatccgctgttgacgcccatgtggggaagcacatcttcgaggagtgcatcaagaagacattacgaggaaaaactgtcgtgcttgtcacccatcagttgcagtacctggaattctgtggccagattattctcctagagaacggaaagatctgtgaaaatggtacccacagcgagctgatgcaaaagaaaggcaagtatgcccagttgattcagaagatgcataaggaggccacgagtgacatgctccaggacactgctaaaatcgctgagaaacccaaggtcgaatcgcaggctctggcaacaagcctagaagagtccttgaatggcaatgccgttcccgaacatcagctcacccaagaagaggagatggaggaaggcagcctcagctggcgtgtctaccatcactatatccaggccgccggaggttacatggtctcatgcatcatcttcttctttgtcgtgttaatagtttttttaacgatcttttcattctggtggctgagctactggctggagcaggggtcaggaacgaattctagcagagagtccaatggaactatggcagaccttggcaacattgcagataacccacaactgagcttctaccagctggtatatgggttaaacgctttgctgctgatctgtgtaggcgtttgcagctccggcatcttcaccaaagttactcgaaaagcctccaccgccctgcacaataagttgttcaacaaggtttttagatgtcctatgtcctttttcgatacgatcccaattggccgcctcctaaactgctttgctggagacctcgaacagctagatcaacttctcccaatcttcagcgagcagttccttgttttgtcgctgatggtcattgctgtccttctcatcgtgtccgttctgagcccctacatactgctgatgggggcaattattatggtcatatgctttatttactacatgatgttcaaaaaagcaattggggtgttcaagcggctggaaaattactctcgttcaccactgttcagccacatcctgaattctctgcaaggactgagctccattcatgtgtatggtaagacagaagacttcattagtcagtttaaaaggctcaccgacgcccaaaataactacctcctgctctttctgtcttccacacggtggatggcgctacgcctggagatcatgacaaaccttgtcacgctggcagtggctcttttcgtggcttttgggattagctctactccttactcttttaaggttatggccgtaaatatagtgctgcagctcgcaagctcttttcaggccacagcccgcatcgggttagagacagaggctcagttcactgctgtggaaaggatcctgcagtacatgaaaatgtgcgtcagcgaggccccactgcatatggaaggtacttcttgcccacaggggtggccccagcatggggaaatcatctttcaggactaccatatgaagtatcgcgacaatactccaaccgtgctccacggcatcaatctcaccatcagaggccacgaggtcgtggggatcgtgggcagaaccgggtccggcaaaagctctctaggcatggccctctttagactggtggagccaatggcaggacgaatcctgatcgatggggtagacatctgttcaattggattagaggaccttcggtccaaactttcagttataccccaggaccccgtactgctgtcaggtacgatccgctttaacctggatcctttcgatagacacactgatcagcagatctgggatgctttagagcgcacctttttgacaaaagcaatttcaaaattccccaagaagctacacactgatgttgtggagaacgggggaaatttctctgtgggagagagacagctcctgtgcatcgcacgagcagtactgcggaacagtaaaattattctgatagatgaggccaccgcttccatagacatggagactgataccttgatacagcggaccatccgagaagcatttcaaggttgtaccgtactggtcattgctcatcgagtcaccacagtgctgaattgcgaccacatccttgtcatgggaaacggcaaggtggtggaatttgaccgccccgaagtgctcagaaagaaacctgggtcacttttcgctgctctaatggccaccgccactagctcactcagatag

SEQ ID NO: 225021 - DNA, 4149 bp, Artificial Sequence
  derived and/or modified sequence
atgacccgcaagaggacttactgggtgcccaattcatccggcggattagtgaacagaggtatcgacatcggagatgatatggtctctgggctgatctataaaacatatactctacaggacgggccttggtcacaacaagagcgcaaccctgaggcccctggtcgagcggctgtgcctccctggggcaagtacgacgctgcactcaggaccatgatcccctttcgcccaaagcccaggttccccgcaccccaacccctcgacaacgctggactttttagctacctgactgtgtcgtggctgaccccactaatgatccagtcactgcgctcccgactggacgaaaacacaattccaccactcagtgtgcacgacgcatccgataaaaatgtgcagagattgcacagactatgggaggaggaagtctccaggcgtggcattgagaaagcgagcgtgttactggttatgcttcggtttcagcggacaagactcatcttcgacgctttgctcgggatctgtttctgcatagcaagtgtcctgggacccatattgatcattcctaaaatattggagtacagtgaagagcagctcgggaacgtcgtgcatggcgttgggttatgcttcgcactatttctcagtgagtgtgtgaaatccttgtcgttttccagttcatggattattaatcaacggaccgcaatcagattccgggctgccgtaagttcttttgccttcgagaaactcatacagtttaagagcgtcatccacattacttcaggcgaggccatttcgtttttcaccggagacgtgaattacttattcgaaggagtatgctatggacctctggtcctgatcacctgcgcctcgttggtcatttgtagtatatcctcctatttcataataggatacacagccttcattgcaattctctgttacctgttagtgtttcctctagccgttttcatgacccgtatggccgttaaggctcagcaccatactagcgaggtatcagatcagagaattagagtcacaagtgaggtgctgacctgtatcaagctgatcaaaatgtacacctgggagaagcctttcgcaaagataatagaggacctgcggcgaaaggagcgcaaactgctagagaagtgcggccttgtgcagtccttgacttctatcactctgtttattatcccaacagttgccactgccgtgtgggtgctgattcacacctcgttgaagctgaagctcactgcctccatggcgttctccatgctagcatcactgaacctgcttcgactcagcgtattttttgtgccgattgcggtgaaaggcctcaccaattctaaatccgccgttatgcgcttcaagaagttcttcctccaggagagtccagtcttttatgtgcagactcttcaagacccgagtaaggcgctcgtgtttgaggaagctactctgtcctggcagcagacatgcccaggcatcgtcaatggtgctctcgaactggaaaggaacggccacgcctcagaaggaatgactcggcctcgggacgcgctgggtcccgaagaggaagggaatagtttggggcctgagttgcacaagataaacctagtcgtgtctaaagggatgatgctgggcgtatgtggcaacaccgggagcggaaagagcagcctacttagtgcaatcctcgaggagatgcatttgctggaaggatccgtaggagtccaaggctcacttgcctatgtgccccagcaggcctggatcgtctcaggaaatattagagagaatatccttatgggaggagcttatgacaaggcacgctatctccaggtgctccactgctgttcgttaaatcgagatcttgagcttctgcctttcggggatatgacagagattggcgagaggggcctcaacctgtccggcggacagaagcagagaataagcctcgcacgtgcagtctactctgatcgtcagatctacttactggacgatccgctctccgcagtggatgcacacgtggggaaacacatttttgaggaatgcattaaaaaaactcttagaggcaagaccgttgtgctggtgacacaccagctgcagtacctcgagttttgcggccaaattatattactcgaaaatggcaagatttgtgagaacggcacacattctgaactgatgcagaagaaaggaaagtatgcccagctcatacagaaaatgcataaggaggccacgagtgacatgcttcaagataccgctaagatcgcagagaaacctaaggtcgagtcacaggctcttgctacttctctggaagagagtcttaacgggaatgctgtgcccgagcaccagttgactcaggaagaggaaatggaggaaggcagcctatcttggcgcgtgtaccaccattacatccaagccgctggcggatatatggtcagctgtattatattttttttcgtggtcctgattgtgttcctgaccattttcagtttctggtggttgagctactggctggagcaaggctccgggacaaactcttctcgagagtccaatggcacaatggccgacctggggaatatcgccgacaatcctcagctcagcttttatcaacttgtgtatgggctcaacgctctgctcttgatttgtgtgggggtgtgctcgtccggtattttcaccaaggtaacccgtaaagcttccacagccctgcacaataagctatttaataaagtgtttagatgcccgatgtcgttcttcgataccatccctatcgggagactgctgaattgttttgccggagaccttgagcaactagatcagttactgcccatcttttcggaacagttcctggtgttatcacttatggttatcgccgtccttttaattgtgtctgttctctcaccttatatcctgcttatgggagccatcatcatggttatttgcttcatttactacatgatgtttaaaaaggcaataggtgtttttaaacggttggagaactattcccgatcaccactgttttcgcacatactgaattccttacaaggactcagtagcattcatgtatatggcaaaaccgaggatttcatttcacagttcaaacgcctgacagacgctcagaacaattatctgctactcttcctatcatccacaaggtggatggctcttcgtctagagatcatgacaaacctggtgaccttggccgtagccctcttcgtggcattcggcatcagctcaacaccatactcttttaaggtcatggccgtgaacatcgtactccaactcgcatcgtcattccaggccacagctaggattggcctggaaaccgaggcccagtttacagccgtcgagaggatcctccagtatatgaagatgtgtgtcagtgaggccccactacatatggaggggacatcatgtcctcaaggatggccccagcacggtgaaatcatcttccaagattaccacatgaaatatcgggataatacccctactgtgctgcatggtattaacttaacaattcggggacacgaagttgttgggattgtggggcgtaccggtagtggtaagtccagcctgggaatggctctgttcaggctcgttgagccaatggccggacgaatcttgatcgacggcgtcgacatttgttcaataggcctggaggatcttcgctctaaactgtcagttatcccacaggatcctgttctgctgagcgggaccatacgcttcaatcttgatccttttgacagacacacagatcagcagatatgggacgcgctggagcgaacctttcttacaaaggcaatttctaagttccccaagaagttgcataccgatgtcgtggaaaacggcggaaactttagtgtcggcgagagacaattactatgcatcgctagagccgtcttgagaaactcgaagattatcttgatcgacgaggcaactgcttccattgatatggagaccgacactctgatccaacgcacaattagggaagcgtttcagggctgtaccgtgctggtgatagcccaccgtgtcacaactgtcctcaattgtgaccacatcctggtgatgggtaacggtaaggtcgtcgaattcgataggccagaggttcttcgcaagaagccaggaagcctgttcgccgctctgatggccacagccacctcctccctcagatag

SEQ ID NO: 225022 - DNA, 4149 bp, Artificial Sequence
  derived and/or modified sequence
atgaccagaaagcgcacttactgggttccaaactctagcggtggcctcgttaatagaggaatcgacattggtgatgacatggtttccgggttaatatacaaaacctatacattacaggatgggccttggagtcaacaggagagaaatcctgaagcccctgggagagcagccgttccaccatggggaaaatatgacgcagctcttcgcaccatgattccatttaggccaaagcctaggtttcctgccccacagccgctggacaatgctggcctcttttcatacctgaccgtcagctggctgactcccctcatgatccagtccctgaggtcccgcttagatgagaacacgataccacctctctcggtgcacgacgcgtctgataagaatgttcagcggctgcacagactctgggaggaagaggtctcacgccgtgggattgagaaggccagcgtgctgttagtgatgttgcggttccagcggacccgtctgatttttgacgccctgctgggtatttgcttttgcatcgcctcagtgctcggacctatcctaataatccccaaaatccttgaatattcggaagaacagctaggcaacgtagtgcacggcgtggggctatgtttcgccctctttctgtcagagtgtgtcaagagtcttagtttctcttcctcctggataataaaccagagaaccgccatacgatttagggccgctgttagctcttttgcttttgagaagctgatacaattcaagagcgttattcatatcacatcgggagaagcaatttcattcttcaccggcgacgtcaattacctgtttgaaggagtctgttacgggcctctagtgctaatcacgtgcgcaagccttgtgatctgctctattagctcctactttatcatcgggtacacagcctttattgctattttatgctacttgctcgtcttcccactggcagttttcatgactaggatggctgtgaaggctcagcatcacacttccgaggtgtctgaccagcgaatccgagttactagtgaagtgctgacatgtatcaaactgatcaagatgtacacctgggaaaagccttttgccaagataatcgaggatcttcgacggaaggagagaaaattgctggagaaatgcggcctggtacagtccctgactagcattaccctcttcatcatccctaccgttgctactgcagtttgggttctgattcacaccagcctcaagctaaagctgacggcttcaatggcatttagtatgctggcttcattaaatcttctgcgcttgtccgtcttctttgtgccgattgcagtgaaggggttgacaaatagtaagagtgccgtgatgaggttcaagaaattttttctccaggagagcccggtcttctatgttcaaaccctgcaggaccctagcaaggctctggtgtttgaggaggccacgctgagttggcaacagacctgtcctggaatcgttaacggagccctggagctcgagagaaacggccacgcctccgaagggatgacacgccctcgggatgcgctcggtccggaggaagagggaaattccctgggcccagagctacacaaaatcaacctcgtagtttctaagggcatgatgctaggcgtctgcgggaatactggatcagggaagagctcacttctgagcgcaatactcgaggaaatgcatttgttagagggttccgtcggggtgcagggttccctcgcttacgtgccacaacaggcctggattgtttctgggaatattcgcgaaaatattctgatgggcggagcttatgacaaagcacgatatctccaggtcctgcattgttgctccctgaaccgcgatcttgagttgctgccctttggtgacatgactgagatcggagaaaggggtttgaatctctccggcggacaaaagcagcgaatcagcctagccagggccgtatactcagatcgccaaatctacctcctggatgaccccctgtccgcagtagatgcccacgttggcaagcatatctttgaagaatgcattaagaagactctgcgcggtaagaccgtggttctggtgacacatcagctgcagtaccttgagttctgtggccaaatcatcctcttggaaaatggtaagatttgcgagaacggaacacattcagaactgatgcagaagaagggcaaatacgctcagttaatccagaaaatgcacaaggaggcaactagtgacatgctacaggataccgccaaaatcgcggagaagccaaaagtggagtctcaagccttggccacctctctggaagagagtttaaatgggaatgctgttcccgagcatcagctgacacaggaggaagagatggaggaaggctcgctgtcatggcgcgtgtaccatcattatattcaggccgctggaggatatatggtctcatgtattatttttttcttcgtagttctgatcgttttcctgaccattttttcattctggtggctgagctattggctcgagcagggctctggaacaaactcttccagggaatctaacggaactatggccgatctgggaaacattgctgacaatccccaacttagcttctatcagctggtttacggcctcaacgcccttctgctcatctgtgtgggagtctgtagctctggaatcttcaccaaggtaaccaggaaagcttcgaccgccctgcataataaactgtttaacaaggttttcagatgccccatgagcttctttgacaccatcccaattggccgattactgaattgctttgccggagacttggaacagctagaccaactgctaccaatttttagcgaacagtttctcgtccttagcctaatggtcatcgctgtgctgttgatcgtgtcggtgctctctccctatatactacttatgggagcgatcattatggtcatctgtttcatttactatatgatgttcaaaaaagctataggggtgtttaagcgcctggagaattacagccgctcaccccttttcagtcacattctgaatagcctgcagggactgagcagcattcacgtctacggaaaaaccgaagattttatttcccagtttaagcgtcttaccgatgcgcagaacaactatcttttactatttctcagcagcacccgctggatggcactgagattggagataatgacaaacctcgtgactcttgccgtggccctgttcgtagccttcggtatctcttctaccccttatagctttaaagtcatggcagtgaatattgttctccagcttgcatccagcttccaggcaactgcgaggatcggccttgaaacagaggcacagtttactgctgtcgaacgcatactgcaatatatgaaaatgtgcgtatccgaggcccctctacatatggaggggacatcatgccctcaagggtggccccagcacggcgagataatcttccaggactaccacatgaaataccgcgacaacacccctaccgtgctgcacggcattaatctgaccatcaggggtcacgaggtggttgggattgttggccgaacaggaagcggaaaatcaagtctaggaatggcgttgttccgcttagtcgaacctatggcgggacgaattctgatagacggcgtggacatttgttctatcgggctcgaggacctgaggtccaagctgtctgtgatcccacaagacccagtacttctttcaggcaccatccgcttcaatctcgacccatttgaccgacacactgatcagcagatttgggacgcactagagagaaccttcctgactaaggctatctctaaattccctaagaaactgcacaccgatgtcgtggagaacgggggaaacttttccgttggtgaaaggcaactgctgtgtatcgctcgagcggtactccgaaacagcaaaattattctcattgacgaagccacagccagcatcgacatggagactgacaccctgattcagaggacaatccgagaggcttttcagggatgcacagttcttgtgattgcccatcgcgtgactaccgtgctaaactgtgatcatatacttgtgatgggcaatggaaaggtggttgagtttgatcgcccagaagtcctgaggaagaaaccgggaagtctctttgctgctctgatggccaccgccacgtcctctttacgttag

SEQ ID NO: 225023 - DNA, 4149 bp, Artificial Sequence
  derived and/or modified sequence
atgacgaggaaaaggacctattgggtgcctaattcttcaggaggcctcgtgaaccgcggaatcgatattggagacgacatggtcagcggactgatctacaagacctatacactccaggacggcccttggagccagcaggagcggaacccagaagccccaggcagggctgctgtccccccttgggggaagtatgacgccgcactaagaacaatgatcccattcagacccaaaccaagattccctgccccacagcctctggataacgcaggactgttctcttatttgaccgtttcttggctaacgcccctgatgattcaaagcctgaggtccaggctggatgagaacaccatcccaccactttccgtgcacgacgctagcgataaaaatgtccaaaggttgcatagactgtgggaggaagaagtaagccggagaggtattgaaaaagctagtgtcctgctggtgatgctgaggtttcagcggactagactcatatttgacgccttgcttggtatttgcttttgtatcgccagtgtgctaggcccaatcctgatcataccaaagatccttgagtacagcgaggagcaactcggtaacgtggtgcacggagtgggcctctgtttcgctctgttcttgagcgagtgcgtgaaatcgttgagtttctcatcctcatggatcataaaccagaggaccgctatacggtttagggccgctgtgtcaagtttcgcattcgaaaagctgattcaattcaagtcagtaatacatatcacaagcggagaagctatctcttttttcacaggggatgtcaactatctttttgagggtgtatgctacggcccactggttctgataacctgcgccagcctcgtcatatgcagtatatccagctactttatcattggctatacagcgttcatagccatattatgttatctgctggtcttccctcttgcggtatttatgacgcgcatggcagtgaaggctcagcatcacaccagcgaagtgtcggatcagcgcatccgagtcacttccgaggttttgacatgcatcaagttgattaaaatgtacacctgggagaaaccgtttgcaaagattatagaggacttacggagaaaagagagaaagctcctggagaagtgcgggctcgttcagtccctcacctccatcacccttttcattattccaacagtggccacagcagtatgggtactgattcacactagccttaagctaaaactgactgcatcaatggcatttagcatgctggcctctctgaacttgctgaggctgtcggtgtttttcgtgcccattgctgttaagggcctcaccaattcaaagtctgcagttatgagattcaagaagtttttcctgcaagaaagtcccgtgttctatgtgcagacccttcaagacccgtctaaggcactcgtttttgaggaggccacattgtcctggcaacaaacgtgtccaggcatagtaaatggtgctctggaactggaaagaaatggacatgcctccgagggaatgacgcgccctagagatgccctggggcctgaggaggaagggaattccctcggcccagagctccataaaatcaacctggtagtctctaaagggatgatgttgggcgtatgcggaaacacaggctcaggcaagtccagcctcctttccgcaattctggaggaaatgcacctcctggagggaagtgtgggggtccagggcagtctcgcttatgtgccccagcaagcgtggattgtgtctggaaacatccgtgaaaacatcctaatggggggagcgtatgataaggccaggtacctgcaggtgctccactgctgttctctcaaccgagacctggagctcttgccctttggggatatgacagaaatcggtgagaggggcctgaatctgtctggagggcagaaacagaggatctccctcgcaagagcagtgtactcagacagacagatctacttactagacgacccactgtctgccgttgatgcgcatgttggaaaacatatctttgaggagtgcatcaaaaaaaccctgcgtggaaagaccgtagtcctcgtgacacaccagctgcagtatctggagttctgtggacagatcatattattggagaatggcaagatctgcgagaacggtacacatagtgagctcatgcaaaagaaaggaaaatacgctcaactgatccaaaagatgcacaaagaggctaccagcgacatgctccaggacacggcaaagatcgccgagaagcctaaagttgaatcacaagccctagcaacctctttggaggaaagtttgaacggaaacgcagttcctgaacaccagctcacccaggaggaggaaatggaggaaggctctctgtcctggagagtgtaccaccactatatccaagccgcaggtgggtacatggtatcttgtatcatcttttttttcgtcgtgctgattgtctttctgacaatcttcagcttctggtggttgtcatactggctagaacagggatctgggaccaatagttctcgcgagtccaacggaacgatggctgacctcggaaacattgcagacaatccccaactttctttttaccagttagtgtatggacttaatgctctgctgctgatctgtgtcggcgtgtgctccagcggaatttttacgaaagtgacccgcaaagcatccaccgccctccacaacaagctgttcaataaggtctttcgctgcccaatgtcttttttcgacactatccctatcggacggttgcttaactgtttcgcaggcgacttggagcagttagaccaactcctgcccatatttagtgaacaatttctggtgctgtccttaatggtgattgcagtgcttttgatcgtgtctgtcctgagcccctacatcctcctcatgggcgctataattatggtgatatgcttcatttattatatgatgtttaaaaaggcaatcggagtatttaaacgcctggagaactattctagatcaccactcttttctcacatccttaattctctccagggcctttccagcatccatgtgtatgggaagactgaggacttcatctctcagttcaagaggctgactgacgcccagaataactacctccttctttttctatcgtccactcgctggatggctctgcggctggagattatgactaacctcgtgaccttagccgtggccctattcgttgccttcggtatcagctcaactccctacagttttaaggttatggctgtcaacatagtgcttcagctcgcatccagtttccaagctacggcaagaatcggcttggagacagaggcacagtttaccgcggtagagcgcattttacagtatatgaagatgtgcgtgagcgaagcccctctacacatggagggtactagttgtcctcagggatggccacaacacggcgagatcatcttccaggattatcacatgaagtacagggataacacaccaaccgtgctgcatggcattaaccttacaattcgcggacacgaagtggtgggcatcgtgggtcggaccggctctggtaaatcttcactgggtatggctctttttaggttggtcgagcccatggccggtaggatcctgatcgatggcgtcgatatctgcagtatcgggttggaagacctgagaagcaaactctcggtgataccccaggatcctgtgttactctcggggactatcaggttcaatctggatcccttcgatagacacacagaccagcaaatctgggatgccctggaacgcactttcctcacaaaggccatttccaagttcccaaagaaactgcatactgacgtagtggaaaacggcggaaatttttctgtaggcgagcgacagttattatgcatcgctcgggcagtcctgagaaattctaaaataatcctgatcgacgaggcaaccgccagcattgacatggaaactgacacgctgattcagaggactattcgcgaggcttttcaaggctgcacggtgctggtgatagcacaccgcgtgacgactgtcttaaactgcgaccatattctcgtgatgggcaacggaaaggtggtggaatttgacagacccgaagtcctgagaaagaaacctggatcccttttcgctgccctgatggcgacagccaccagcagcttgagatag

SEQ ID NO: 225024 - DNA, 4612 bp, Artificial Sequence
  derived and/or modified sequence
gtcacctggatagcgcaaaggaaacaagagaaaggaacagagcccctcttctggcctctgggctaccatacagaaaagcagaattggcaggaactgaaaatgactaggaagaggacatactgggtgcccaactcttctggtggcctcgtgaatcgtggcatcgacataggcgatgacatggtttcaggacttatttataaaacctatactctccaagatggcccctggagtcagcaagagagaaatcctgaggctccagggagggcagctgtcccaccgtgggggaagtatgatgctgccttgagaaccatgattcccttccgtcccaagccgaggtttcctgccccccagcccctggacaatgctggcctgttctcctacctcaccgtgtcatggctcaccccgctcatgatccaaagcttacggagtcgcttagatgagaacaccatccctccactgtcagtccatgatgcctcagacaaaaatgtccaaaggcttcaccgcctttgggaagaagaagtctcaaggcgagggattgaaaaagcttcagtgcttctggtgatgctgaggttccagagaacaaggttgattttcgatgcacttctgggcatctgcttctgcattgccagtgtactcgggccaatattgattataccaaagatcctggaatattcagaagagcagttggggaatgttgtccatggagtgggactctgctttgccctttttctctccgaatgtgtgaagtctctgagtttctcctccagttggatcatcaaccaacgcacagccatcaggttccgagcagctgtttcctcctttgcctttgagaagctcatccaatttaagtctgtaatacacatcacctcaggagaggccatcagcttcttcaccggtgatgtaaactacctgtttgaaggggtgtgctatggacccctagtactgatcacctgcgcatcgctggtcatctgcagcatttcttcctacttcattattggatacactgcatttattgccatcttatgctatctcctggttttcccactggcggtattcatgacaagaatggctgtgaaggctcagcatcacacatctgaggtcagcgaccagcgcatccgtgtgaccagtgaagttctcacttgcattaagctgattaaaatgtacacatgggagaaaccatttgcaaaaatcattgaagacctaagaaggaaggaaaggaaactattggagaagtgcgggcttgtccagagcctgacaagtataaccttgttcatcatccccacagtggccacagcggtctgggttctcatccacacatccttaaagctgaaactcacagcgtcaatggccttcagcatgctggcctccttgaatctccttcggctgtcagtgttctttgtgcctattgcagtcaaaggtctcacgaattccaagtctgcagtgatgaggttcaagaagtttttcctccaggagagccctgttttctatgtccagacattacaagaccccagcaaagctctggtctttgaggaggccaccttgtcatggcaacagacctgtcccgggatcgtcaatggggcactggagctggagaggaacgggcatgcttctgaggggatgaccaggcctagagatgccctcgggccagaggaagaagggaacagcctgggcccagagttgcacaagatcaacctggtggtgtccaaggggatgatgttaggggtctgcggcaacacggggagtggtaagagcagcctgttgtcagccatcctggaggagatgcacttgctcgagggctcggtgggggtgcagggaagcctggcctatgtcccccagcaggcctggatcgtcagcgggaacatcagggagaacatcctcatgggaggcgcatatgacaaggcccgatacctccaggtgctccactgctgctccctgaatcgggacctggaacttctgccctttggagacatgacagagattggagagcggggcctcaacctctctggggggcagaaacagaggatcagcctggcccgcgccgtctattccgaccgtcagatctacctgctggacgaccccctgtctgctgtggacgcccacgtggggaagcacatttttgaggagtgcattaagaagacactcagggggaagacggtcgtcctggtgacccaccagctgcagtacttagaattttgtggccagatcattttgttggaaaatgggaaaatctgtgaaaatggaactcacagtgagttaatgcagaaaaaggggaaatatgcccaacttatccagaagatgcacaaggaagccacttcggacatgttgcaggacacagcaaagatagcagagaagccaaaggtagaaagtcaggctctggccacctccctggaagagtctctcaacggaaatgctgtgccggagcatcagctcacacaggaggaggagatggaagaaggctccttgagttggagggtctaccaccactacatccaggcagctggaggttacatggtctcttgcataattttcttcttcgtggtgctgatcgtcttcttaacgatcttcagcttctggtggctgagctactggttggagcagggctcggggaccaatagcagccgagagagcaatggaaccatggcagacctgggcaacattgcagacaatcctcaactgtccttctaccagctggtgtacgggctcaacgccctgctcctcatctgtgtgggggtctgctcctcagggattttcaccaaggtcacgaggaaggcatccacggccctgcacaacaagctcttcaacaaggttttccgctgccccatgagtttctttgacaccatcccaataggccggcttttgaactgcttcgcaggggacttggaacagctggaccagctcttgcccatcttttcagagcagttcctggtcctgtccttaatggtgatcgccgtcctgttgattgtcagtgtgctgtctccatatatcctgttaatgggagccataatcatggttatttgcttcatttattatatgatgttcaagaaggccatcggtgtgttcaagagactggagaactatagccggtctcctttattctcccacatcctcaattctctgcaaggcctgagctccatccatgtctatggaaaaactgaagacttcatcagccagtttaagaggctgactgatgcgcagaataactacctgctgttgtttctatcttccacacgatggatggcattgaggctggagatcatgaccaaccttgtgaccttggctgttgccctgttcgtggcttttggcatttcctccaccccctactcctttaaagtcatggctgtcaacatcgtgctgcagctggcgtccagcttccaggccactgcccggattggcttggagacagaggcacagttcacggctgtagagaggatactgcagtacatgaagatgtgtgtctcggaagctcctttacacatggaaggcacaagttgtccccaggggtggccacagcatggggaaatcatatttcaggattatcacatgaaatacagagacaacacacccaccgtgcttcacggcatcaacctgaccatccgcggccacgaagtggtgggcatcgtgggaaggacgggctctgggaagtcctccttgggcatggctctcttccgcctggtggagcccatggcaggccggattctcattgacggcgtggacatttgcagcatcggcctggaggacttgcggtccaagctctcagtgatccctcaagatccagtgctgctctcaggaaccatcagattcaacctagatccctttgaccgtcacactgaccagcagatctgggatgccttggagaggacattcctgaccaaggccatctcaaagttccccaaaaagctgcatacagatgtggtggaaaacggtggaaacttctctgtgggggagaggcagctgctctgcattgccagggctgtgcttcgcaactccaagatcatccttatcgatgaagccacagcctccattgacatggagacagacaccctgatccagcgcacaatccgtgaagccttccagggctgcaccgtgctcgtcattgcccaccgtgtcaccactgtgctgaactgtgaccacatcctggttatgggcaatgggaaggtggtagaatttgatcggccggaggtactgcggaagaagcctgggtcattgttcgcagccctcatggccacagccacttcttcactgagataaggagatgtggagacttcatggaggctggcagctgagctcagaggttcacacaggtgcagcttcgaggcccacagtctgcgaccttcttgtttggagatgagaacttctcctggaagcaggggtaaatgtagggggggtggggattgctggatggaaaccctggaataggctacttgatggctctcaagaccttagaaccccagaaccatctaagacatgggattcagtgatcatgtggttctccttttaacttacatgctgaataattttataataaggtaaaagcttatagttttctgatctgtgttagaagtgttgcaaatgctgtactgactttgtaaaatataaaactaaggaaaactca

SEQ ID NO: 225025 - DNA, 4862 bp, Artificial Sequence
  derived and/or modified sequence
actgggataaagcaagaagactgattttatgagcaggggtttgatacatcaaaggagattgcccaggatcaagggtgcggtgttgggggtgggttggggagggtggttagagaaggtttcactaagtgatttgggcctgaggcctgagaagatgtttaaaaagagggatcaagcacaggctaaggagaggaaagagcaggcacccaaacctctgcatggccccaatatgctccctgcagggtagtgccccctcttctggctgctcaaggcgagatctaagcttcttctaactcctgctgtcttttcatattctctgattctgggaaacgaagaattggcaggaactgaaaatgactaggaagaggacatactgggtgcccaactcttctggtggcctcgtgaatcgtggcatcgacataggcgatgacatggtttcaggacttatttataaaacctatactctccaagatggcccctggagtcagcaagagagaaatcctgaggctccagggagggcagctgtcccaccgtgggggaagtatgatgctgccttgagaaccatgattcccttccgtcccaagccgaggtttcctgccccccagcccctggacaatgctggcctgttctcctacctcaccgtgtcatggctcaccccgctcatgatccaaagcttacggagtcgcttagatgagaacaccatccctccactgtcagtccatgatgcctcagacaaaaatgtccaaaggcttcaccgcctttgggaagaagaagtctcaaggcgagggattgaaaaagcttcagtgcttctggtgatgctgaggttccagagaacaaggttgattttcgatgcacttctgggcatctgcttctgcattgccagtgtactcgggccaatattgattataccaaagatcctggaatattcagaagagcagttggggaatgttgtccatggagtgggactctgctttgccctttttctctccgaatgtgtgaagtctctgagtttctcctccagttggatcatcaaccaacgcacagccatcaggttccgagcagctgtttcctcctttgcctttgagaagctcatccaatttaagtctgtaatacacatcacctcaggagaggccatcagcttcttcaccggtgatgtaaactacctgtttgaaggggtgtgctatggacccctagtactgatcacctgcgcatcgctggtcatctgcagcatttcttcctacttcattattggatacactgcatttattgccatcttatgctatctcctggttttcccactggcggtattcatgacaagaatggctgtgaaggctcagcatcacacatctgaggtcagcgaccagcgcatccgtgtgaccagtgaagttctcacttgcattaagctgattaaaatgtacacatgggagaaaccatttgcaaaaatcattgaagacctaagaaggaaggaaaggaaactattggagaagtgcgggcttgtccagagcctgacaagtataaccttgttcatcatccccacagtggccacagcggtctgggttctcatccacacatccttaaagctgaaactcacagcgtcaatggccttcagcatgctggcctccttgaatctccttcggctgtcagtgttctttgtgcctattgcagtcaaaggtctcacgaattccaagtctgcagtgatgaggttcaagaagtttttcctccaggagagccctgttttctatgtccagacattacaagaccccagcaaagctctggtctttgaggaggccaccttgtcatggcaacagacctgtcccgggatcgtcaatggggcactggagctggagaggaacgggcatgcttctgaggggatgaccaggcctagagatgccctcgggccagaggaagaagggaacagcctgggcccagagttgcacaagatcaacctggtggtgtccaaggggatgatgttaggggtctgcggcaacacggggagtggtaagagcagcctgttgtcagccatcctggaggagatgcacttgctcgagggctcggtgggggtgcagggaagcctggcctatgtcccccagcaggcctggatcgtcagcgggaacatcagggagaacatcctcatgggaggcgcatatgacaaggcccgatacctccaggtgctccactgctgctccctgaatcgggacctggaacttctgccctttggagacatgacagagattggagagcggggcctcaacctctctggggggcagaaacagaggatcagcctggcccgcgccgtctattccgaccgtcagatctacctgctggacgaccccctgtctgctgtggacgcccacgtggggaagcacatttttgaggagtgcattaagaagacactcagggggaagacggtcgtcctggtgacccaccagctgcagtacttagaattttgtggccagatcattttgttggaaaatgggaaaatctgtgaaaatggaactcacagtgagttaatgcagaaaaaggggaaatatgcccaacttatccagaagatgcacaaggaagccacttcggacatgttgcaggacacagcaaagatagcagagaagccaaaggtagaaagtcaggctctggccacctccctggaagagtctctcaacggaaatgctgtgccggagcatcagctcacacaggaggaggagatggaagaaggctccttgagttggagggtctaccaccactacatccaggcagctggaggttacatggtctcttgcataattttcttcttcgtggtgctgatcgtcttcttaacgatcttcagcttctggtggctgagctactggttggagcagggctcggggaccaatagcagccgagagagcaatggaaccatggcagacctgggcaacattgcagacaatcctcaactgtccttctaccagctggtgtacgggctcaacgccctgctcctcatctgtgtgggggtctgctcctcagggattttcaccaaggtcacgaggaaggcatccacggccctgcacaacaagctcttcaacaaggttttccgctgccccatgagtttctttgacaccatcccaataggccggcttttgaactgcttcgcaggggacttggaacagctggaccagctcttgcccatcttttcagagcagttcctggtcctgtccttaatggtgatcgccgtcctgttgattgtcagtgtgctgtctccatatatcctgttaatgggagccataatcatggttatttgcttcatttattatatgatgttcaagaaggccatcggtgtgttcaagagactggagaactatagccggtctcctttattctcccacatcctcaattctctgcaaggcctgagctccatccatgtctatggaaaaactgaagacttcatcagccagtttaagaggctgactgatgcgcagaataactacctgctgttgtttctatcttccacacgatggatggcattgaggctggagatcatgaccaaccttgtgaccttggctgttgccctgttcgtggcttttggcatttcctccaccccctactcctttaaagtcatggctgtcaacatcgtgctgcagctggcgtccagcttccaggccactgcccggattggcttggagacagaggcacagttcacggctgtagagaggatactgcagtacatgaagatgtgtgtctcggaagctcctttacacatggaaggcacaagttgtccccaggggtggccacagcatggggaaatcatatttcaggattatcacatgaaatacagagacaacacacccaccgtgcttcacggcatcaacctgaccatccgcggccacgaagtggtgggcatcgtgggaaggacgggctctgggaagtcctccttgggcatggctctcttccgcctggtggagcccatggcaggccggattctcattgacggcgtggacatttgcagcatcggcctggaggacttgcggtccaagctctcagtgatccctcaagatccagtgctgctctcaggaaccatcagattcaacctagatccctttgaccgtcacactgaccagcagatctgggatgccttggagaggacattcctgaccaaggccatctcaaagttccccaaaaagctgcatacagatgtggtggaaaacggtggaaacttctctgtgggggagaggcagctgctctgcattgccagggctgtgcttcgcaactccaagatcatccttatcgatgaagccacagcctccattgacatggagacagacaccctgatccagcgcacaatccgtgaagccttccagggctgcaccgtgctcgtcattgcccaccgtgtcaccactgtgctgaactgtgaccacatcctggttatgggcaatgggaaggtggtagaatttgatcggccggaggtactgcggaagaagcctgggtcattgttcgcagccctcatggccacagccacttcttcactgagataaggagatgtggagacttcatggaggctggcagctgagctcagaggttcacacaggtgcagcttcgaggcccacagtctgcgaccttcttgtttggagatgagaacttctcctggaagcaggggtaaatgtagggggggtggggattgctggatggaaaccctggaataggctacttgatggctctcaagaccttagaaccccagaaccatctaagacatgggattcagtgatcatgtggttctccttttaacttacatgctgaataattttataataaggtaaaagcttatagttttctgatctgtgttagaagtgttgcaaatgctgtactgactttgtaaaatataaaactaaggaaaactc

SEQ ID NO: 225026 - DNA, 4576 bp, Artificial Sequence
  derived and/or modified sequence
gtgtatttgaataaaccaggttggcaaatcatactatagctgaaagaattggcaggaactgaaaatgactaggaagaggacatactgggtgcccaactcttctggtggcctcgtgaatcgtggcatcgacataggcgatgacatggtttcaggacttatttataaaacctatactctccaagatggcccctggagtcagcaagagagaaatcctgaggctccagggagggcagctgtcccaccgtgggggaagtatgatgctgccttgagaaccatgattcccttccgtcccaagccgaggtttcctgccccccagcccctggacaatgctggcctgttctcctacctcaccgtgtcatggctcaccccgctcatgatccaaagcttacggagtcgcttagatgagaacaccatccctccactgtcagtccatgatgcctcagacaaaaatgtccaaaggcttcaccgcctttgggaagaagaagtctcaaggcgagggattgaaaaagcttcagtgcttctggtgatgctgaggttccagagaacaaggttgattttcgatgcacttctgggcatctgcttctgcattgccagtgtactcgggccaatattgattataccaaagatcctggaatattcagaagagcagttggggaatgttgtccatggagtgggactctgctttgccctttttctctccgaatgtgtgaagtctctgagtttctcctccagttggatcatcaaccaacgcacagccatcaggttccgagcagctgtttcctcctttgcctttgagaagctcatccaatttaagtctgtaatacacatcacctcaggagaggccatcagcttcttcaccggtgatgtaaactacctgtttgaaggggtgtgctatggacccctagtactgatcacctgcgcatcgctggtcatctgcagcatttcttcctacttcattattggatacactgcatttattgccatcttatgctatctcctggttttcccactggcggtattcatgacaagaatggctgtgaaggctcagcatcacacatctgaggtcagcgaccagcgcatccgtgtgaccagtgaagttctcacttgcattaagctgattaaaatgtacacatgggagaaaccatttgcaaaaatcattgaagacctaagaaggaaggaaaggaaactattggagaagtgcgggcttgtccagagcctgacaagtataaccttgttcatcatccccacagtggccacagcggtctgggttctcatccacacatccttaaagctgaaactcacagcgtcaatggccttcagcatgctggcctccttgaatctccttcggctgtcagtgttctttgtgcctattgcagtcaaaggtctcacgaattccaagtctgcagtgatgaggttcaagaagtttttcctccaggagagccctgttttctatgtccagacattacaagaccccagcaaagctctggtctttgaggaggccaccttgtcatggcaacagacctgtcccgggatcgtcaatggggcactggagctggagaggaacgggcatgcttctgaggggatgaccaggcctagagatgccctcgggccagaggaagaagggaacagcctgggcccagagttgcacaagatcaacctggtggtgtccaaggggatgatgttaggggtctgcggcaacacggggagtggtaagagcagcctgttgtcagccatcctggaggagatgcacttgctcgagggctcggtgggggtgcagggaagcctggcctatgtcccccagcaggcctggatcgtcagcgggaacatcagggagaacatcctcatgggaggcgcatatgacaaggcccgatacctccaggtgctccactgctgctccctgaatcgggacctggaacttctgccctttggagacatgacagagattggagagcggggcctcaacctctctggggggcagaaacagaggatcagcctggcccgcgccgtctattccgaccgtcagatctacctgctggacgaccccctgtctgctgtggacgcccacgtggggaagcacatttttgaggagtgcattaagaagacactcagggggaagacggtcgtcctggtgacccaccagctgcagtacttagaattttgtggccagatcattttgttggaaaatgggaaaatctgtgaaaatggaactcacagtgagttaatgcagaaaaaggggaaatatgcccaacttatccagaagatgcacaaggaagccacttcggacatgttgcaggacacagcaaagatagcagagaagccaaaggtagaaagtcaggctctggccacctccctggaagagtctctcaacggaaatgctgtgccggagcatcagctcacacaggaggaggagatggaagaaggctccttgagttggagggtctaccaccactacatccaggcagctggaggttacatggtctcttgcataattttcttcttcgtggtgctgatcgtcttcttaacgatcttcagcttctggtggctgagctactggttggagcagggctcggggaccaatagcagccgagagagcaatggaaccatggcagacctgggcaacattgcagacaatcctcaactgtccttctaccagctggtgtacgggctcaacgccctgctcctcatctgtgtgggggtctgctcctcagggattttcaccaaggtcacgaggaaggcatccacggccctgcacaacaagctcttcaacaaggttttccgctgccccatgagtttctttgacaccatcccaataggccggcttttgaactgcttcgcaggggacttggaacagctggaccagctcttgcccatcttttcagagcagttcctggtcctgtccttaatggtgatcgccgtcctgttgattgtcagtgtgctgtctccatatatcctgttaatgggagccataatcatggttatttgcttcatttattatatgatgttcaagaaggccatcggtgtgttcaagagactggagaactatagccggtctcctttattctcccacatcctcaattctctgcaaggcctgagctccatccatgtctatggaaaaactgaagacttcatcagccagtttaagaggctgactgatgcgcagaataactacctgctgttgtttctatcttccacacgatggatggcattgaggctggagatcatgaccaaccttgtgaccttggctgttgccctgttcgtggcttttggcatttcctccaccccctactcctttaaagtcatggctgtcaacatcgtgctgcagctggcgtccagcttccaggccactgcccggattggcttggagacagaggcacagttcacggctgtagagaggatactgcagtacatgaagatgtgtgtctcggaagctcctttacacatggaaggcacaagttgtccccaggggtggccacagcatggggaaatcatatttcaggattatcacatgaaatacagagacaacacacccaccgtgcttcacggcatcaacctgaccatccgcggccacgaagtggtgggcatcgtgggaaggacgggctctgggaagtcctccttgggcatggctctcttccgcctggtggagcccatggcaggccggattctcattgacggcgtggacatttgcagcatcggcctggaggacttgcggtccaagctctcagtgatccctcaagatccagtgctgctctcaggaaccatcagattcaacctagatccctttgaccgtcacactgaccagcagatctgggatgccttggagaggacattcctgaccaaggccatctcaaagttccccaaaaagctgcatacagatgtggtggaaaacggtggaaacttctctgtgggggagaggcagctgctctgcattgccagggctgtgcttcgcaactccaagatcatccttatcgatgaagccacagcctccattgacatggagacagacaccctgatccagcgcacaatccgtgaagccttccagggctgcaccgtgctcgtcattgcccaccgtgtcaccactgtgctgaactgtgaccacatcctggttatgggcaatgggaaggtggtagaatttgatcggccggaggtactgcggaagaagcctgggtcattgttcgcagccctcatggccacagccacttcttcactgagataaggagatgtggagacttcatggaggctggcagctgagctcagaggttcacacaggtgcagcttcgaggcccacagtctgcgaccttcttgtttggagatgagaacttctcctggaagcaggggtaaatgtagggggggtggggattgctggatggaaaccctggaataggctacttgatggctctcaagaccttagaaccccagaaccatctaagacatgggattcagtgatcatgtggttctccttttaacttacatgctgaataattttataataaggtaaaagcttatagttttctgatctgtgttagaagtgttgcaaatgctgtactgactttgtaaaatataaaactaaggaaaactc

SEQ ID NO: 225027 - DNA, 4149 bp, Artificial Sequence
  derived and/or modified sequence
atgaccagaaagagaacctactgggtgcccaacagcagcggcggcctggtgaacagaggcatcgacatcggcgacgacatggtgagcggcctgatctacaagacctacaccctgcaggacggcccctggagccagcaggagagaaaccccgaggcccccggcagagccgccgtgcccccctggggcaagtacgacgccgccctgagaaccatgatccccttcagacccaagcccagattccccgccccccagcccctggacaacgccggcctgttcagctacctgaccgtgagctggctgacccccctgatgatccagagcctgagaagcagactggacgagaacaccatcccccccctgagcgtgcacgacgccagcgacaagaacgtgcagagactgcacagactgtgggaggaggaggtgagcagaagaggcatcgagaaggccagcgtgctgctggtgatgctgagattccagagaaccagactgatcttcgacgccctgctgggcatctgcttctgcatcgccagcgtgctgggccccatcctgatcatccccaagatcctggagtacagcgaggagcagctgggcaacgtggtgcacggcgtgggcctgtgcttcgccctgttcctgagcgagtgcgtgaagagcctgagcttcagcagcagctggatcatcaaccagagaaccgccatcagattcagagccgccgtgagcagcttcgccttcgagaagctgatccagttcaagagcgtgatccacatcaccagcggcgaggccatcagcttcttcaccggcgacgtgaactacctgttcgagggcgtgtgctacggccccctggtgctgatcacctgcgccagcctggtgatctgcagcatcagcagctacttcatcatcggctacaccgccttcatcgccatcctgtgctacctgctggtgttccccctggccgtgttcatgaccagaatggccgtgaaggcccagcaccacaccagcgaggtgagcgaccagagaatcagagtgaccagcgaggtgctgacctgcatcaagctgatcaagatgtacacctgggagaagcccttcgccaagatcatcgaggacctgagaagaaaggagagaaagctgctggagaagtgcggcctggtgcagagcctgaccagcatcaccctgttcatcatccccaccgtggccaccgccgtgtgggtgctgatccacaccagcctgaagctgaagctgaccgccagcatggccttcagcatgctggccagcctgaacctgctgagactgagcgtgttcttcgtgcccatcgccgtgaagggcctgaccaacagcaagagcgccgtgatgagattcaagaagttcttcctgcaggagagccccgtgttctacgtgcagaccctgcaggaccccagcaaggccctggtgttcgaggaggccaccctgagctggcagcagacctgccccggcatcgtgaacggcgccctggagctggagagaaacggccacgccagcgagggcatgaccagacccagagacgccctgggccccgaggaggagggcaacagcctgggccccgagctgcacaagatcaacctggtggtgagcaagggcatgatgctgggcgtgtgcggcaacaccggcagcggcaagagcagcctgctgagcgccatcctggaggagatgcacctgctggagggcagcgtgggcgtgcagggcagcctggcctacgtgccccagcaggcctggatcgtgagcggcaacatcagagagaacatcctgatgggcggcgcctacgacaaggccagatacctgcaggtgctgcactgctgcagcctgaacagagacctggagctgctgcccttcggcgacatgaccgagatcggcgagagaggcctgaacctgagcggcggccagaagcagagaatcagcctggccagagccgtgtacagcgacagacagatctacctgctggacgaccccctgagcgccgtggacgcccacgtgggcaagcacatcttcgaggagtgcatcaagaagaccctgagaggcaagaccgtggtgctggtgacccaccagctgcagtacctggagttctgcggccagatcatcctgctggagaacggcaagatctgcgagaacggcacccacagcgagctgatgcagaagaagggcaagtacgcccagctgatccagaagatgcacaaggaggccaccagcgacatgctgcaggacaccgccaagatcgccgagaagcccaaggtggagagccaggccctggccaccagcctggaggagagcctgaacggcaacgccgtgcccgagcaccagctgacccaggaggaggagatggaggagggcagcctgagctggagagtgtaccaccactacatccaggccgccggcggctacatggtgagctgcatcatcttcttcttcgtggtgctgatcgtgttcctgaccatcttcagcttctggtggctgagctactggctggagcagggcagcggcaccaacagcagcagagagagcaacggcaccatggccgacctgggcaacatcgccgacaacccccagctgagcttctaccagctggtgtacggcctgaacgccctgctgctgatctgcgtgggcgtgtgcagcagcggcatcttcaccaaggtgaccagaaaggccagcaccgccctgcacaacaagctgttcaacaaggtgttcagatgccccatgagcttcttcgacaccatccccatcggcagactgctgaactgcttcgccggcgacctggagcagctggaccagctgctgcccatcttcagcgagcagttcctggtgctgagcctgatggtgatcgccgtgctgctgatcgtgagcgtgctgagcccctacatcctgctgatgggcgccatcatcatggtgatctgcttcatctactacatgatgttcaagaaggccatcggcgtgttcaagagactggagaactacagcagaagccccctgttcagccacatcctgaacagcctgcagggcctgagcagcatccacgtgtacggcaagaccgaggacttcatcagccagttcaagagactgaccgacgcccagaacaactacctgctgctgttcctgagcagcaccagatggatggccctgagactggagatcatgaccaacctggtgaccctggccgtggccctgttcgtggccttcggcatcagcagcaccccctacagcttcaaggtgatggccgtgaacatcgtgctgcagctggccagcagcttccaggccaccgccagaatcggcctggagaccgaggcccagttcaccgccgtggagagaatcctgcagtacatgaagatgtgcgtgagcgaggcccccctgcacatggagggcaccagctgcccccagggctggccccagcacggcgagatcatcttccaggactaccacatgaagtacagagacaacacccccaccgtgctgcacggcatcaacctgaccatcagaggccacgaggtggtgggcatcgtgggcagaaccggcagcggcaagagcagcctgggcatggccctgttcagactggtggagcccatggccggcagaatcctgatcgacggcgtggacatctgcagcatcggcctggaggacctgagaagcaagctgagcgtgatcccccaggaccccgtgctgctgagcggcaccatcagattcaacctggaccccttcgacagacacaccgaccagcagatctgggacgccctggagagaaccttcctgaccaaggccatcagcaagttccccaagaagctgcacaccgacgtggtggagaacggcggcaacttcagcgtgggcgagagacagctgctgtgcatcgccagagccgtgctgagaaacagcaagatcatcctgatcgacgaggccaccgccagcatcgacatggagaccgacaccctgatccagagaaccatcagagaggccttccagggctgcaccgtgctggtgatcgcccacagagtgaccaccgtgctgaactgcgaccacatcctggtgatgggcaacggcaaggtggtggagttcgacagacccgaggtgctgagaaagaagcccggcagcctgttcgccgccctgatggccaccgccaccagcagcctgagatag

SEQ ID NO: 225028 - protein, 1037 aa, Artificial Sequence
  derived and/or modified sequence
MATESTPSEIIERERKKLLEILQHDPDSILDTLTSRRLISEEEYETLENVTDLLKKSRKLLILVQKKGEATCQHFLKCLFSTFPQSAAICGLRHEVLKHENTVPPQSMGASSNSEDAFSPGIKQPEAPEITVFFSEKEHLDLETSEFFRDKKTSYRETALSARKNEKEYDTPEVTLSYSVEKVGCEVPATITYIKDGQRYEELDDSLYLGKEEYLGSVDTPEDAEATVEEEVYDDPEHVGYDGEEDFENSETTEFSGEEPSYEGSETSLSLEEEQEKSIEERKKVFKDVLLCLNMDRSRKVLPDFVKQFSLDRGCKWTPESPGDLAWNFLMKVQARDVTARDSILSHKVLDEDSKEDLLAGVENLEIRDIQTINPLDVLCATMLCSDSSLQRQVMSNMYQCQFALPLLLPDAENNKSILMLGAMKDIVKKQSTQFSGGPTEDTEKFLTLMKMPVISFVRLGYCSFSKSRILNTLLSPAQLKLHKIFLHQDLPLLVLPRQISDGLVEITWCFPDSDDRKENPFFQKPVALANLRGNLESFWTQFGFLMEVSSAVFFFTDCLGEKEWDLLMFLGEAAIERCYFVLSSQARESEEAQIFQRILNLKPAQLLFWERGDAGDRRKNMEGLQAALQEVMFSSCLRCVSVEDMAALARELGIQVDEDFENTQRIQVSSGENMAGTAEGEGQQRHSQLKSSSKSQALMPIQEPGTQCELSQNLQNLYGTPVFRPVLENSWLFPTRIGGNFNHVSLKASWVMGRPFGSEQRPKWFHPLPFQNAGAQGRGKSFGIQSFHPQIFYSGERFMKFSRVARGCHSNGTFGRLPRPICQHVQACPERPQMMGTLERSRAVASKIGHSYSLDSQPARAVGKPWPQQACTRVTELTEATGKLIRTSHIGKPHPQSFQPAAATQKLRPASQQGVQMKTQGGASNPALQIGSHPMCKSSQFKSDQSNPSTVKHSQPKPFHSVPSQPKSSQTKSCQSQPSQTKPSPCKSTQPKPSQPWPPQSKPSQPRPPQPKSSSTNPSQAKAHHSKAGQKRGGKH

SEQ ID NO: 225029 - protein, 310 aa, Artificial Sequence [sequence omitted]

SEQ ID NO: 225030 - protein, 481 aa, Artificial Sequence
  derived and/or modified sequence
MATESTPSEIIERERKKLLEILQHDPDSILDTLTSRRLISEEEYETLENVTDLLKKSRKLLILVQKKGEATCQHFLKCLFSTFPQSAAICGLRHEVLKHENTVPPQSMGASSNSEDAFSPGIKQPEAPEITVFFSEKEHLDLETSEFFRDKKTSYRETALSARKNEKEYDTPEVTLSYSVEKVGCEVPATITYIKDGQRYEELDDSLYLGKEEYLGSVDTPEDAEATVEEEVYDDPEHVGYDGEEDFENSETTEFSGEEPSYEGSETSLSLEEEQEKSIEERKKVFKDVLLCLNMDRSRKVLPDFVKQFSLDRGCKWTPESPGDLAWNFLMKVQARDVTARDSILSHKVLDEDSKEDLLAGVENLEIRDIQTINPLDVLCATMLCSDSSLQRQVMSNMYQCQFALPLLLPDAENNKSILMLGAMKDIVKKQSTQFSGGPTEDTEKFLTLMKTLKTLREFKFPLEKTWLGQLKVRVSKDTVS

SEQ ID NO: 225031 - DNA, 3114 bp, Artificial Sequence
  derived and/or modified sequence
atggctacagaaagtaccccgagtgagataatagagagggaaaggaaaaagttgttagagattcttcagcacgaccccgacagcatcctggacaccctgacttccagaagactcatttctgaggaagagtatgaaacgctggaaaacgttactgatttgttgaagaaatcccgcaagctcctgatattagtacagaagaaaggggaggcgacgtgccagcactttctaaaatgtttgttttccacttttccacagagtgcagcgatttgcggcttgaggcatgaagtcctgaaacatgaaaacacagtgcctccacaatccatgggggccagctctaatagcgaggatgctttctctcctgggatcaagcagcccgaagctccagagatcacggtcttcttctcagaaaaagaacacctcgacctggagacctccgagttctttagggacaagaaaacaagttatcgagaaacagctttgagtgcgaggaagaacgaaaaggagtatgatacgcccgaagttaccctgtcttacagcgtagaaaaggtcggctgtgaagtaccagccaccattacttatatcaaggacggccagaggtacgaagagttagatgattcactttacctggggaaagaagagtacctggggagcgtggataccccagaggacgctgaggctactgtggaggaggaggtgtacgatgatccggaacacgtaggctacgatggagaggaggatttcgagaactccgaaaccaccgaatttagcggtgaagagccctcttacgaagggagcgagacaagcctaagtcttgaggaagaacaagagaaaagcattgaggagcgcaaaaaagtgtttaaagatgtcctcctgtgcctgaacatggaccggtctaggaaggtcctccccgacttcgttaagcagtttagtttggatcgtggctgcaaatggacacccgaatcccccggcgatttggcttggaacttcctaatgaaggtccaagcccgcgatgttacggcacgcgacagtattcttagccataaggtgctggatgaggactccaaagaagatctgttggcaggcgtcgagaatctcgaaattcgcgacatacagaccataaatccattggacgtcttatgtgccaccatgctatgctccgattcatccctacagcgacaggtgatgtctaacatgtatcaatgtcagttcgcattgccccttttgctgcctgacgctgaaaataataaatccatcctgatgttgggggccatgaaggacatcgtgaagaagcagagtacccagttttccgggggtccgactgaggataccgagaagtttctaacgctgatgaagatgcctgtcattagcttcgtcagacttggctactgtagttttagcaagtccagaatcctgaatactctgctgtctccagctcagcttaaattacataaaatattcctgcatcaggacctccccttgctggtgctgccgcggcaaatctccgatggactagtggagattacttggtgtttccctgactcagacgacagaaaggaaaacccatttttccagaagccggtggcactagcgaatctgcgcggtaatctggagtctttttggactcagttcggattcttgatggaggtcagttccgctgtgtttttctttactgactgtctcggggagaaggaatgggatctcctcatgtttctcggggaggccgccattgagagatgctatttcgtcctgagcagccaggctagggagagcgaggaggcgcaaatattccagcggattctgaacctcaaaccggcccagcttttgttctgggagaggggcgacgccggtgatcgccggaaaaacatggaagggctgcaagccgcacttcaggaggtgatgttctcttcttgcctcaggtgtgtgtcagtcgaagacatggcggccctggcacgcgagctgggaatacaggttgatgaggacttcgagaacacacagaggattcaggtttcctccggggagaacatggcaggcacagctgagggagaaggccagcagaggcatagtcaactgaaaagttcatccaaatctcaggcgttaatgcctatccaggagccaggcacccagtgtgaactgagtcagaatttgcagaatctgtacgggacccctgtattcagacctgttctcgaaaattcatggctctttcctaccagaattggaggtaacttcaatcatgtgtcattgaaggcatcttgggtcatgggtagaccattcggaagtgaacagagacctaaatggttccaccccctcccgttccaaaatgcgggagctcaggggaggggcaagtctttcggtatccaaagttttcacccccagatcttctacagcggcgagagatttatgaagttcagtcgcgttgcaagggggtgtcattccaacggtacgtttgggcggctgcctaggccaatctgtcagcatgttcaagcatgtcccgaaagaccccaaatgatgggcaccctggaacgcagtcgagctgtagcgtctaagatcggtcactcctactccttggactctcagcccgccagggctgtcggtaagccatggccccagcaagcgtgtacacgagtgacagaacttacagaggcaaccggaaaactcatccgaacgagccacattgggaagcctcacccccagtcttttcaaccggcagcagcgacccagaagctgcggcccgcgagccagcaaggcgtgcagatgaaaacccaaggcggggcttctaatccggctttacagataggaagtcaccccatgtgcaagtcctcacaatttaagtcagatcagtcgaaccccagcactgtgaagcactctcagcccaagcctttccattccgtaccttcccaacccaagtcctcccagacaaaaagctgtcagtcccagccctcgcagacaaaaccctcgccatgcaaaagcacccagcctaagccgagtcagccatggcctcctcagtctaagcctagccaaccaagacctccacagcccaagagctcctcgacgaaccctagccaggccaaggcccaccatagtaaggccggtcagaaacgtggcgggaaacactag

SEQ ID NO: 225032 - DNA, 933 bp, Artificial Sequence
  derived and/or modified sequence
atggctacggagtctacaccaagcgagatcatcgaaagagagaggaaaaaactgctcgaaattctccagcatgaccccgactctatcctggacacactgacctcgcggagactcatctctgaagaggagtacgaaacgctggaaaatgttactgatttactgaaaaaatccaggaaattgcttattctagtgcagaaaaagggcgaggccacttgtcagcattttctaaaatgccttttctccacctttccacagagcgctgccatctgcggattgcggcccgaagtgttgaagcatgagaataccgtgcccccccaaagcatgggggcgtcttccaattcggaagacgccttcagccccggtatcaagcagcccgaggcaccagaaattactgtcttcttctccgagaaggaacacttagacctggagaccagtgagtttttccgcgacaaaaagacctcttaccgcgagactgccctctcggcgcgtaagaatgagaaagaatatgacacaccagaggtaacattgtcttacagcgtggaaaaagtgggctgtgaagtaccagccactatcacttatattaaagatggtcagcgttacgaggagctggatgactccctgtacttgggtaaagaagagtacctggggagtgtggatacccccgaggatgccgaggctacagtcgaagaagaagtgtatgatgaccccgaacacgtcgggtacgatggcgaggaagacttcgaaaattcagagaccacggagttctctggcgaggaaccaagctatgagggttctgaaacaagcctgagtctggaggaggaacaagaaaagtctatcgaagggtggtccaggactcacggactgaagcggtcttcccacgtaggcctgcctaagtgctgggactaccgaagagaacccccctgtttagcttag

SEQ ID NO: 225033 - DNA, 1446 bp, Artificial Sequence
  derived and/or modified sequence
atggccactgagtccacaccctcagaaatcattgagcgcgaacgcaagaaactcctggagatcttacagcatgatcctgactcaatcttagacactctgacttccagaaggctcattagcgaggaagagtacgagaccttagaaaatgtgactgatctgcttaaaaaatccaggaaattgctgatcctggtgcaaaagaagggcgaggcaacatgccagcactttctgaagtgtctcttcagtacctttcctcagagcgccgctatatgtggcctgcgacatgaggtcctgaagcatgagaacactgtcccgcctcagagtatgggtgcatctagcaatagcgaggatgccttcagtcctgggataaagcaacctgaggcccctgagattacagttttcttctcagagaaggagcacctcgatctggagacaagcgaattctttcgcgacaaaaaaacctcttaccgggaaaccgctctcagcgccagaaagaatgagaaagagtacgatacaccggaggtgacgctgtcctactccgttgagaaggtaggctgcgaggtcccagcaaccatcacatatattaaagatggtcagcggtatgaagaactggatgactccctttacctggggaaagaggaatatctgggtagcgttgacactcctgaggatgccgaagccaccgtggaagaagaggtctatgatgacccagagcatgtgggctacgatggcgaagaagattttgaaaattcagaaacaaccgaattttccggagaagagcccagttacgagggttccgaaacttcactttctctcgaggaggaacaggagaaaagtatcgaggagcgtaagaaggtgttcaaagatgtactgctctgcctgaatatggaccggtccagaaaggtgctcccagactttgtcaagcagttctcgctcgaccgcggttgcaaatggactccggagtctcctggcgacctggcctggaactttctcatgaaggtgcaagccagagacgttacagctcgagactctattctttcacacaaggttctcgacgaggattctaaggaggatctgctcgctggtgtagagaaccttgaaatacgcgacatacagactataaacccattggacgtcctgtgcgccacaatgctgtgctctgatagcagcctgcagcggcaagttatgtccaatatgtaccagtgccagtttgcccttcccctgcttctccccgacgcggagaataacaagagcattctgatgctgggtgctatgaaagacatagttaagaaacaaagcacccagttctccgggggaccaacagaggatacagagaaattcctaaccctgatgaagactttaaaaaccctgagagagttcaagttccctctcgagaaaacttggctgggacaactcaaagtgcgggtctccaaggatactgtgagttag

SEQ ID NO: 225034 - DNA, 3114 bp, Artificial Sequence
  derived and/or modified sequence
atggccacagagagcacccccagcgagatcatcgagcgggagaggaagaagctgctggagatcctgcagcacgaccctgacagcatcctggacaccctgaccagccggcggctcatcagcgaggaggagtatgagaccctggagaatgtgacagacctgctgaagaagagcaggaagctgctgatcctggtgcagaagaagggggaggccacctgccagcacttcctgaagtgcctcttcagcaccttcccccagagcgctgccatctgtggcctgcggcatgaggtgctgaagcatgagaacacagtgcccccccagagcatgggcgccagcagcaacagtgaagatgccttcagccctggcatcaagcagcctgaggcccctgagatcaccgtcttcttcagcgagaaggagcacctggacctggagaccagcgagttcttccgggacaagaagaccagctaccgggagacagccctgagcgccaggaagaatgagaaggagtatgacaccccagaggtgaccctgagctacagcgtggagaaggtgggctgtgaggtgcctgccaccatcacctacatcaaggatggccagagatatgaggagctggatgacagcctgtacctgggcaaggaggagtacctgggctctgtggacaccccagaagatgctgaggccaccgtggaggaggaggtgtatgatgatcctgagcacgtgggctatgatggagaagaagattttgagaacagcgagaccacagagttcagcggggaggagcccagctatgagggcagcgagaccagcctgagcctggaggaggagcaggagaagagcattgaggagaggaagaaggtgttcaaggatgtgctgctgtgcctgaacatggacaggagcaggaaggtgctgcctgactttgtgaagcagttcagcctggaccggggctgcaagtggaccccagagagccctggggacctggcctggaacttcctgatgaaggtgcaggccagagatgtgacagcccgggacagcatcctgagccacaaggtgctggatgaggacagcaaggaggacctgctggccggcgtggagaacctggagatccgggacatccagaccatcaaccccctggatgtgctgtgtgccaccatgctgtgcagcgacagcagcctgcagaggcaggtgatgagcaacatgtaccagtgccagtttgccctgcccctgctgctgcctgatgctgagaacaacaagagcatcctgatgctgggcgccatgaaggacatcgtgaagaagcagagcacccagttcagcggcggccccacagaggacacagagaagttcctgaccctgatgaagatgcctgtgatcagctttgtgcggctgggctactgcagcttcagcaagagccgcatcctgaacaccctgctgagccctgcccagctgaagctgcacaagatcttcctgcaccaggacctgcccctgctggtgctgccccggcagatcagtgatggcctggtggagatcacctggtgcttcccagacagtgatgacagaaaagaaaaccccttcttccagaagcctgtggccctggccaacctgcggggcaacctggagagcttctggacccagtttggcttcctgatggaggtgtcctctgctgtgttcttcttcacagactgcctgggggagaaggagtgggacctgctgatgttcctgggggaggccgccatcgagcgctgctactttgtgctgagcagccaggcccgggagagcgaggaggcccagatcttccagaggatcctgaacctgaagccagcccagctgctcttctgggagagaggagatgctggggacaggaggaagaacatggagggcctgcaggccgccctgcaggaggtgatgttcagcagctgcctgcgctgtgtgtctgtggaggacatggccgccctggcccgggagctgggcatccaggtggatgaagattttgagaacacccagaggatccaggtgtcctctggagagaacatggccggcacagctgagggggagggccagcagaggcacagccagctgaagagcagcagcaagagccaggccctgatgcccatccaggagcccggcacccagtgtgagctgagccagaacctgcagaacctgtatggcacccctgtgttccggcctgtgctggagaacagctggctgttccccacccgcatcggcggcaacttcaaccacgtgtccctgaaggcctcctgggtgatgggccggccctttggaagtgagcagaggcccaagtggttccaccccctgcccttccagaatgctggggcccagggccggggcaagagctttggcatccagagcttccacccccagatcttctacagcggggagcgcttcatgaagttcagccgggtggcccggggctgccacagcaatggcaccttcggccgcctgccccggcccatctgccagcacgtgcaggcctgcccagagcggccccagatgatgggcaccctggagaggagcagagctgtggccagcaagattggccacagctacagcctggacagccagcctgcccgggctgtgggcaagccctggccccagcaggcctgcaccagggtgacagagctgacagaggccaccgggaagctgatccgcaccagccacatcggcaagccccacccccagagcttccagcctgctgctgccacccagaagctgcggcctgccagccagcagggcgtgcagatgaagacccagggcggggccagcaacccagccctgcagatcggcagccaccccatgtgcaagagcagccagttcaagagtgaccagagcaaccccagcacagtgaagcacagccagcccaagcccttccacagcgtgcccagccagcccaagagcagccagaccaagagctgccagagccagcccagccagaccaagcccagcccctgcaagagcacccagcccaagcccagccagccctggccaccccagagcaagcccagccagcccaggcctccccagcccaagagcagcagcaccaaccccagccaggccaaggcccaccacagcaaggccggccagaagaggggcggcaagcactag

SEQ ID NO: 225035 - DNA, 933 bp, Artificial Sequence
  derived and/or modified sequence
atggccacagagagcacccccagcgagatcatcgagcgggagaggaagaagctgctggagatcctgcagcacgaccctgacagcatcctggacaccctgaccagccggcggctcatcagcgaggaggagtatgagaccctggagaatgtgacagacctgctgaagaagagcaggaagctgctgatcctggtgcagaagaagggggaggccacctgccagcacttcctgaagtgcctcttcagcaccttcccccagagcgctgccatctgtggcctgcggcctgaggtgctgaagcatgagaacacagtgcccccccagagcatgggcgccagcagcaacagtgaagatgccttcagccctggcatcaagcagcctgaggcccctgagatcaccgtcttcttcagcgagaaggagcacctggacctggagaccagcgagttcttccgggacaagaagaccagctaccgggagacagccctgagcgccaggaagaatgagaaggagtatgacaccccagaggtgaccctgagctacagcgtggagaaggtgggctgtgaggtgcctgccaccatcacctacatcaaggatggccagagatatgaggagctggatgacagcctgtacctgggcaaggaggagtacctgggctctgtggacaccccagaagatgctgaggccaccgtggaggaggaggtgtatgatgatcctgagcacgtgggctatgatggagaagaagattttgagaacagcgagaccacagagttcagcggggaggagcccagctatgagggcagcgagaccagcctgagcctggaggaggagcaggagaagagcattgagggctggagcaggacccacggcctgaagaggagcagccacgtgggcctgcccaagtgctgggactacagaagagagcccccctgcctggcctag

SEQ ID NO: 225036 - DNA, 1446 bp, Artificial Sequence
  derived and/or modified sequence
atggccacagagagcacccccagcgagatcatcgagcgggagaggaagaagctgctggagatcctgcagcacgaccctgacagcatcctggacaccctgaccagccggcggctcatcagcgaggaggagtatgagaccctggagaatgtgacagacctgctgaagaagagcaggaagctgctgatcctggtgcagaagaagggggaggccacctgccagcacttcctgaagtgcctcttcagcaccttcccccagagcgctgccatctgtggcctgcggcatgaggtgctgaagcatgagaacacagtgcccccccagagcatgggcgccagcagcaacagtgaagatgccttcagccctggcatcaagcagcctgaggcccctgagatcaccgtcttcttcagcgagaaggagcacctggacctggagaccagcgagttcttccgggacaagaagaccagctaccgggagacagccctgagcgccaggaagaatgagaaggagtatgacaccccagaggtgaccctgagctacagcgtggagaaggtgggctgtgaggtgcctgccaccatcacctacatcaaggatggccagagatatgaggagctggatgacagcctgtacctgggcaaggaggagtacctgggctctgtggacaccccagaagatgctgaggccaccgtggaggaggaggtgtatgatgatcctgagcacgtgggctatgatggagaagaagattttgagaacagcgagaccacagagttcagcggggaggagcccagctatgagggcagcgagaccagcctgagcctggaggaggagcaggagaagagcattgaggagaggaagaaggtgttcaaggatgtgctgctgtgcctgaacatggacaggagcaggaaggtgctgcctgactttgtgaagcagttcagcctggaccggggctgcaagtggaccccagagagccctggggacctggcctggaacttcctgatgaaggtgcaggccagagatgtgacagcccgggacagcatcctgagccacaaggtgctggatgaggacagcaaggaggacctgctggccggcgtggagaacctggagatccgggacatccagaccatcaaccccctggatgtgctgtgtgccaccatgctgtgcagcgacagcagcctgcagaggcaggtgatgagcaacatgtaccagtgccagtttgccctgcccctgctgctgcctgatgctgagaacaacaagagcatcctgatgctgggcgccatgaaggacatcgtgaagaagcagagcacccagttcagcggcggccccacagaggacacagagaagttcctgaccctgatgaagaccctgaagaccctgcgggagttcaagttccccctggagaagacctggctgggccagctgaaggtgcgggtgtccaaggacacagtgtcctag

SEQ ID NO: 225037 - DNA, 3114 bp, Artificial Sequence
  derived and/or modified sequence
atggccaccgagagcacccccagcgagatcatcgagcgggagcggaagaagttactggagattctgcagcacgatcccgactctattctggacaccttaacatccagacgcctaattagtgaagaagaatatgagacactggagaacgtaaccgaccttttgaagaagtcgcggaaactgttgattcttgtgcagaagaaaggtgaggcgacctgccaacacttcctcaagtgcttgttcagcacattcccacagagcgccgcaatctgcggcttgaggcacgaggtcctgaagcatgagaacaccgttcccccacagagcatgggggctagctcaaactccgaggacgctttctcccccggtataaagcagcctgaagcgcctgagattactgtgttcttcagcgaaaaagagcacctggacttggagacaagtgaattctttcgtgataagaaaacctcttacagggaaactgcgctgagtgccagaaaaaatgagaaagaatacgatacccctgaagttacgctgagctattctgttgagaaggttggttgcgaagtgccagctactatcacatacatcaaagacgggcagagatacgaggagttggacgattctttgtatctcggtaaggaagagtacctcggttccgtggatacccctgaagacgccgaggcaactgtcgaggaggaggtgtatgatgatcctgagcacgtggggtatgatggcgaggaggatttcgaaaacagcgagacaacagagttttcaggtgaggagccatcttacgagggctcagaaacaagcttgtcattagaggaagaacaggaaaagagtatagaggagaggaaaaaagtcttcaaggatgtgctgttatgtctgaatatggatcggagtcgaaaagttctgccagactttgtgaagcagttctccctggaccgcgggtgtaagtggacacccgaatctccaggcgacctggcttggaactttctgatgaaagtgcaagctcgagacgtaacagcgcgagacagcatcctgagccacaaggtcttggacgaagattccaaagaagacttattagccggcgttgagaacctcgagatccgggacatccaaactatcaatcccctagacgtcttatgcgcaacaatgctgtgctcggattccagcctgcagcgccaggtgatgtcgaacatgtaccagtgtcaattcgctctccccctgttacttcccgacgcggagaataataagagtattctgatgttgggcgccatgaaggatatcgtgaaaaaacagagtacacagttttccgggggccccaccgaggacacggagaaatttcttactttgatgaaaatgcccgtgatctccttcgtgcggctgggatactgcagtttttcgaaatctaggatcctgaacacacttctttcccctgcacagctcaaactccacaagatttttctgcaccaagacctgccactgttggtcctaccccgtcagatcagcgatggcctggtggaaatcacatggtgttttcctgactctgatgatagaaaagagaatccgttcttccagaagcctgtcgcgctcgccaacttgcggggaaacctagagtccttttggactcagtttggatttctcatggaggtgagctcagctgtattcttttttactgactgcctgggagaaaaggaatgggacctgctgatgtttctcggcgaggccgcgattgaacgatgttacttcgtattatccagccaggccagggagtccgaggaagcacagatttttcagagaattctgaatctcaagcctgcccagctgctgttttgggaacgaggggacgctggcgatcgaaggaagaatatggagggacttcaagccgcccttcaggaggttatgttttctagctgtttacgctgcgtcagcgtggaagacatggctgcattggcgcgagaattggggattcaggtcgacgaagattttgagaacacacaaaggatacaagtctctagcggagaaaacatggcaggtacagccgagggtgagggccagcagaggcacagccagctgaagtcctccagtaagtcccaggccctcatgccaatccaggagcctggtacccagtgcgaattatctcagaacctgcagaatctgtatgggacccccgtgtttaggccagtcctggaaaattcttggctgttcccaacacgcatagggggcaacttcaaccatgttagcttgaaggcatcctgggtgatgggccgccccttcggctccgagcaaagacccaaatggttccacccactgccattccagaatgctggtgcccagggccgcggtaagagcttcggcattcagagctttcatccacaaatcttctattccggagagcggttcatgaagttttctcgcgttgctaggggttgccatagtaacggaacatttggccgcctgccaaggcctatctgccagcatgtgcaggcgtgtcctgaaaggcctcaaatgatgggaactctggagagatctagagccgtcgcctctaaaatcgggcactcctacagcctggatagtcagccggcccgcgccgtggggaaaccatggccacaacaagcctgcacaagagtcacagagctcaccgaggctacggggaagttaattagaacatctcacatcggtaagccacatcctcaatcatttcagccagctgcggctacacagaaactgagacccgcttctcagcagggagtgcaaatgaagacacagggtggcgcatcaaatcctgctttgcagataggcagccatccaatgtgcaagagttcccaatttaaaagcgatcagtctaaccccagcacggtgaagcatagtcagccaaagcccttccactctgtcccgagccagccaaagtcatcacagacaaaatcatgccaatcacagccctcacaaactaaaccatccccttgcaagagcacccagcccaagccgtcccagccctggccacctcagtccaagccatcccagccccgtccaccccagcccaaaagttcttccacgaatccttcccaggccaaggcccatcattccaaagccgggcaaaaacggggaggcaagcattag

SEQ ID NO: 225038 - DNA, 933 bp, Artificial Sequence
  derived and/or modified sequence
atggccaccgagagcacccccagcgagatcatcgagcgggagcggaagaagttgctagagatcctccagcatgacccagacagcatcctggatacattgacctccaggcggctaatcagcgaggaagagtatgagactttagagaacgtgactgatctactgaaaaaaagtaggaagctgctcattctcgtgcagaagaagggagaggccacatgtcagcactttctgaaatgcttattcagtacttttccacagagtgccgcaatttgtggattacgtccagaggtgctgaagcacgaaaacactgttcccccacagagcatgggggcgtcctccaattcggaggacgcattttccccgggcataaagcagcctgaagctcccgagataaccgtgtttttctctgagaaggaacaccttgacttggagacatcagagttctttagagataagaagacttcctacagggagacagctcttagcgcacggaagaacgaaaaagagtacgatacacctgaagtgaccctgtcttactccgtggaaaaagttgggtgtgaggtgccagcgactataacatacattaaggacgggcagcggtatgaagagttagatgatagtctttatctgggaaaagaagaatacctgggatcagtggatacacccgaagacgccgaagccactgtggaggaagaagtgtacgacgaccccgagcacgtaggatatgatggagaggaagatttcgaaaatagtgagaccacggagttctccggcgaggaacccagttatgagggctccgagacatcacttagcttagaagaagagcaggaaaagagcatcgaggggtggtcccgcacacacggcctgaagcgcagctcgcacgtgggtttgcctaagtgttgggactacaggagagagccgccatgcctggcatag

SEQ ID NO: 225039 - DNA, 1446 bp, Artificial Sequence
  derived and/or modified sequence
atggccaccgagagcacccccagcgagatcatcgagcgggagcggaaaaagctacttgaaatcctgcagcacgatccggattcgatactagacaccctaacctctcgacgccttatatcagaagaggaatacgagaccctcgagaacgtaaccgatctactcaaaaaatctaggaaattgttgatcctggttcagaaaaaaggagaggccacctgccagcatttcctgaaatgtttgttctcgacgttcccccagagcgcggccatttgtggtctcaggcacgaagtgctcaaacacgaaaataccgtacctccacagtcaatgggggcctcctctaactccgaggatgctttctcgcccggcataaaacagcccgaagctccggaaatcaccgtcttcttttccgagaaagaacatttagatctggaaaccagcgagttcttccgcgataaaaaaacctcatatagggaaactgccctcagcgccagaaaaaacgaaaaagagtatgatactcctgaggttaccctgtcatactcagtagagaaggtgggatgtgaagtccccgccaccattacatatattaaggacggccagcgctacgaggaactggatgatagcttgtacctcggcaaagaggagtacttgggctccgttgatacccccgaggatgccgaggcgacagtcgaggaggaggtgtacgatgacccagaacacgttggctatgacggagaggaggacttcgagaacagcgaaaccaccgaattttctggagaggagcctagttacgagggaagtgagaccagcctgagtcttgaagaggagcaggaaaaaagcatcgaggagaggaaaaaggtatttaaggacgtgctgctctgccttaacatggaccgaagcaggaaagtgctgccagatttcgtcaagcagttctccctggaccgcgggtgtaagtggactcccgagtcgcccggcgacctcgcctggaatttcctgatgaaagttcaggcacgggatgtgacagccagggattccatattatcccacaaggtactggatgaggattctaaagaggacttgctggccggggttgagaatcttgaaatacgagacattcaaactatcaaccctttagacgtgttgtgcgcaaccatgctatgctctgatagcagtctgcaacgccaggtcatgagcaacatgtatcaatgtcagttcgctctgcctctcctgctgccagatgctgagaataataaaagcattctgatgctaggcgccatgaaggacatcgtaaagaagcagtctacccagtttagtggaggacctaccgaagataccgaaaaattcctgactctgatgaagactctgaaaaccctcagggaattcaaatttcctcttgagaaaacatggctgggccagctcaaggtcagggtttctaaggataccgtgtcttag

SEQ ID NO: 225040 - DNA, 3114 bp, Artificial Sequence
  derived and/or modified sequence
atggccaccgagtctacacccagcgaaatcattgaaagagagcgcaagaaacttctcgagattctccagcacgatccggattccatcctcgacaccctgactagtagaaggctgatatcggaggaggagtatgaaacactggagaatgtaaccgatctgttaaagaagagcaggaaactgctgatattagtccagaaaaagggcgaagctacctgccagcacttcctcaaatgtctcttttctaccttcccacagagcgctgctatctgcggcctcagacatgaagtgcttaaacatgagaacaccgtgcctccacaaagtatgggagcctctagcaactcagaggatgccttttcacccggaatcaagcagccagaggccccagagataacagtctttttcagcgagaaggagcacctggaccttgagacgagtgaattcttcagggataagaaaacatcgtatcgtgagactgcgctaagcgccagaaaaaacgagaaggaatacgatactcccgaagttactttgtcgtactctgtggagaaggtcggatgtgaggtacctgccacgataacatacattaaggatggccaacgctacgaggaacttgatgattctttgtatctggggaaggaggagtaccttggatctgtcgacacccccgaagacgcagaggcaaccgtcgaggaggaggtgtatgacgatccagaacacgtggggtacgacggcgaggaggacttcgaaaattcagagacgactgagttttcaggagaggaaccgtcctacgagggcagcgaaacctccctgtcattagaggaagagcaggagaagtcgattgaggagaggaaaaaggtgtttaaggatgttttgctctgcttgaatatggatcggagccgcaaagtcctgccggatttcgttaagcagttttccctggaccgagggtgtaaatggacccctgaaagccctggggatctggcctggaacttcctcatgaaggtgcaagccagagatgtgaccgccagagatagcatccttagtcataaggttctggatgaagatagcaaggaagacttgcttgcaggagtggagaacctggagatacgggatattcagaccattaaccctttggacgtcctgtgcgcaacgatgctgtgcagtgactcgagtctccaacgtcaggtgatgtcaaacatgtaccaatgtcagttcgctttaccactccttttacccgatgcagaaaataacaagagcatcctgatgctgggagccatgaaggatatcgtgaaaaagcagtctacgcagttcagcgggggtcccaccgaggatacagagaagtttctgactttaatgaagatgcctgtgatctcgttcgtaagactggggtattgcagtttttccaagtcgcgtattctcaataccctcctgagccccgcacagctaaagctccataaaatatttctccaccaggacctccctctactggtgcttcctcgccagattagtgatgggctggtggaaattacctggtgcttccctgactcagatgataggaaagaaaatcctttctttcagaaaccggtggccctcgccaacctgagaggcaacctcgagagcttctggacccaattcggtttccttatggaagtgtcctcggccgtcttcttcttcactgactgtctgggggaaaaagaatgggacctgctgatgttcttgggggaggcagcaattgagcgctgttactttgtgctttctagccaggcacgggagtctgaagaggctcagatttttcagagaatcctgaacttgaagcccgctcagctgttgttttgggagaggggggatgcgggagatcgcagaaaaaatatggaaggccttcaggctgccctacaggaagttatgttcagcagctgccttcggtgcgtgtccgtggaggacatggccgctctggcacgagagctcggaattcaggtcgacgaggattttgagaacacccagcggatccaggtcagctccggggaaaatatggccggtactgctgaaggggagggccaacagcggcactctcagcttaagagctcttccaaatcccaggccctgatgcctattcaggagccaggaactcagtgcgagttgtctcagaacttgcagaacctatatggtacccctgtgttccgcccagtgctggagaattcttggttatttcccacccggatcgggggaaatttcaaccacgtgtcgttaaaagcttcttgggtaatgggtcgacccttcggttctgagcagcggcctaaatggttccaccctctcccattccaaaacgcaggggctcagggcagaggcaaatctttcggtattcagtcttttcatccccagatcttctactctggtgagcgttttatgaagttttctcgggttgcccgtggttgtcattccaatggcactttcggcaggctccctaggcctatatgccagcacgttcaggcatgcccagagcgtcctcagatgatggggactttggaaagaagtagagctgtagcttctaagattggccactcttactccctggattcccagccggcacgcgctgtgggaaaaccgtggccacagcaggcatgcacccgcgtgaccgaactgacagaagcaactggaaaattgatcaggacgtcgcacatcggaaaaccccatccccagtctttccagccagccgcagctacccagaaactgaggcctgcgtctcagcagggagtgcagatgaaaacacaaggcggtgcatccaatcctgctttacagataggatcacaccctatgtgcaaaagctctcagtttaaatcagatcaaagcaatcctagcactgtgaagcactctcaaccgaagccattccactccgtaccttcccagcccaaatccagccaaacgaaatcttgtcagtctcagccgtcccagaccaagccctcaccttgcaagtctacacagccgaaacccagtcagccttggcctccacagagtaaaccatctcagccccgaccccctcagccaaagtcaagttccacgaatccctctcaggctaaagctcaccactcaaaggctggacagaagagaggcggtaagcactag

SEQ ID NO: 225041 - DNA, 933 bp, Artificial Sequence
  derived and/or modified sequence
atggccaccgaatcaaccccttcggagattatagaaagagaaagaaagaaacttctggaaatcctacaacatgatccggattctatactcgacaccctgacctcgcgacggctgatttccgaagaggaatacgagaccttggagaacgtgactgacctgttgaagaagtctaggaagctgctgattctagttcagaagaagggggaagccacatgccaacattttcttaagtgtctttttagcacctttccacaatctgcagccatttgcggccttcggcctgaagtgctcaagcacgagaatacagtacctccacaaagcatgggagcaagtagcaactctgaggatgcatttagtccagggatcaagcaaccggaggcccctgagattacagtgttcttctcagagaaagaacatctggacctcgagacgagtgagttcttccgtgacaaaaaaacttcatatcgcgagacagccctgagtgctcggaaaaatgaaaaagaatacgatactccagaagtcacgctctcttactctgtggagaaggtgggatgcgaggtgcccgcaacaattacatatatcaaggacggccagcgatatgaagaattagacgactccctatacctgggtaaagaagagtatctcggctctgtagataccccagaagatgctgaagccactgtggaggaggaggtgtacgatgacccagaacatgtcggttacgatggcgaagaagacttcgaaaactcagagaccaccgagttttccggggaggagcccagctatgagggttccgaaacaagcctgagcctcgaagaggaacaggagaaatcaatagaaggttggtctcgtacccatggattgaagcggtcttcccacgtgggcctcccaaaatgctgggactatcggagagaacccccttgtctggcctag

SEQ ID NO: 225042 - DNA, 1446 bp, Artificial Sequence
  derived and/or modified sequence
atggctactgaaagcacaccttctgaaatcatcgagagagagagaaaaaaactgctagagattctccagcatgatcccgactcgatcctcgacactttaacgtccaggcgcctgatatcagaggaggagtatgaaaccctagagaatgtaaccgacctcctgaagaaaagtaggaagcttctgattctggtgcagaaaaaaggggaggccacttgtcagcatttcttgaagtgcttgttcagtacctttccacagagcgccgctatttgtggcctgcgtcacgaagtgctcaagcatgagaataccgtccctccacagagcatgggagcttccagtaactcagaagacgcattttctcccggtattaaacagcccgaggcaccagagatcacggtgttcttcagcgaaaaggagcacctggacctggaaacatcagagttttttcgcgacaaaaagacttcttatcgggagaccgccctttcagccagaaaaaatgagaaggagtacgacacgccggaggtgaccttgagttattcagtggaaaaagtaggctgtgaagttccagcaactattacgtacattaaggatggccagaggtacgaagagctggacgattcactgtatctcgggaaggaagagtacctcggctccgtggacacccctgaagatgctgaggcaacagttgaggaagaagtgtatgacgatcctgaacacgttggctatgacggcgaggaggacttcgagaactctgagacgacagaattctcaggggaggagcctagctatgaagggtccgaaacttccctgtccttggaggaagagcaggaaaaaagtattgaggaacgaaagaaggtcttcaaagatgtcctcctttgccttaatatggaccgtagccgtaaggtgctacctgatttcgtgaagcagttctctttggataggggctgcaaatggacacctgaatctcccggagacctggcttggaatttcctgatgaaagtccaggccagagatgtgacagctcgagactctattcttagtcataaagtgctggacgaggactccaaagaagatcttctggcaggtgtggaaaaccttgaaattcgcgacatccagaccattaacccgctggatgtgctgtgtgccaccatgctgtgctccgactccagtctgcagagacaggtcatgtccaacatgtatcagtgtcagttcgcgttgccactcctgctgccagacgccgagaataacaagtccatcttgatgctcggagcaatgaaggatatcgtgaaaaagcagtctacacagttttctggcggtcctaccgaggacacagaaaaattccttactctgatgaagactcttaaaactctccgcgagttcaagttccctctcgagaaaacatggcttgggcagctgaaggttagggtctccaaggacactgtcagttag

SEQ ID NO: 225043 - DNA, 424 bp, Artificial Sequence
  derived and/or modified sequence
gcagagctggcccctgactcacagcccacagagttccacctgctcacaggttggctggctcagccaaggtggtgccctgctctgagcattcaggccaagcccatcctgcaccatggccaggtacagatgctgtcgcagccagagccggagcagatattaccgccagagacaaagaagtcgcagacgaaggaggcggagctgccagacacggaggagagccatgaggtgctgccgccccaggtacagaccgcgatgtagaagacactaattgcacaaaatagcacatccaccaaactcctgcctgagaatgttaccagacttcaagatcctcttgccacatcttgaaaatgccaccatccaataaaaatcaggagcctgctaaggaacaatgccgcctgtcaataaatgttgaaaagtcatccca

SEQ ID NO: 225044 - DNA, 4221 bp, Artificial Sequence
  derived and/or modified sequence
ccacaaggaccccggatcagagagtgctccgagctgggttgccccactgtgcttgtatctgcactctccaacactaggcatcattgacatgttaaagcttagccaaatagaattgttctttgtcattctttttttaacttttacttattcattaggatgatttcataatatatttcctggtttagaggaaacaggaacaatggctaccgagagtactccctcagagatcatagaaagagaaagaaaaaagttgcttgaaatccttcaacatgatcctgattctatcttagacacgttaacttctcggaggctgatttctgaggaagagtatgagactctggagaatgttacagatctcctgaagaaaagtcggaagctgttaattttggtacagaaaaagggagaggcgacctgtcagcattttctcaagtgtttatttagtacttttccacagtcagctgccatttgcggcttaaggcatgaagttttaaaacatgagaatacagtacctcctcaatctatgggggcaagcagtaattcagaagatgctttttctcctggaataaaacagcctgaagcccctgagatcacagtgttcttcagtgagaaggaacacttggatttggaaacctctgagtttttcagggacaagaaaactagttatagggaaacagctttgtctgccaggaagaatgagaaggaatatgacacaccagaagtcacattatcatattcagttgagaaagttggatgtgaagttccagcaactattacatatataaaagatggacagagatatgaggagctagatgattctttatacttaggaaaagaggaatatctaggatctgttgacacccctgaagatgcagaagccactgtggaagaggaggtttatgatgacccagagcacgttggatatgatggtgaagaggacttcgagaattcagaaaccacagagttctctggtgaagaaccaagttatgagggatcagaaaccagcctttcattggaggaggaacaggagaaaagtatagaagaaagaaaaaaggtgtttaaagatgtcctgttatgtttgaacatggatagaagcagaaaggttctgccagattttgttaaacaattctccttagatcgaggatgtaagtggacccctgagagtccaggagacttagcctggaatttcctgatgaaagttcaagcacgagatgtgaccgctagggattcaatcctcagtcacaaggttctggatgaagatagcaaggaggatttgctggctggagtggagaatttggaaattcgagacatacaaaccattaatccccttgacgtgctttgtgccaccatgctgtgttcagatagctctttgcaacgccaagtcatgtcaaacatgtatcagtgccagtttgctcttcccctgctactgccagatgcagaaaacaacaaaagcatcttaatgctgggggccatgaaagacattgtgaagaagcagtcaacacagttttcaggggggcctacagaggatacagaaaagtttctgactctcatgaagatgcctgtcatctcttttgtgcgtctaggatactgtagcttctctaagtccagaatcctcaacacacttctcagccctgcccagttgaaattacacaaaatctttcttcatcaagatttgcctcttttggtgcttccccggcaaatctctgatggcctggttgagataacatggtgttttcctgatagcgatgatagaaaggaaaacccctttttccaaaagcctgttgctctggctaatctccgtggaaatctagaaagcttttggactcagtttggttttttgatggaagtttcttcagctgtgttttttttcactgactgtttaggtgagaaggaatgggacttgctaatgtttttaggagaggctgccattgaaagatgctactttgttctcagttcccaagccagggagagtgaagaggctcaaatttttcagaggatactgaacttgaagccagcacagctactgttttgggagaggggagatgctggggatagaaggaagaacatggagggccttcaagctgccctccaggaagtgatgttctcttcttgcctcagatgtgtgtctgtggaggatatggccgccctggccagggagctggggattcaggtagatgaagactttgaaaacactcagagaattcaagtttcctctggagaaaacatggctgggacagctgaaggtgagggtcagcaaagacacagtcagctaaaaagctcatctaaaagccaggctctaatgccaattcaagagcctgggactcaatgtgagctcagccagaatcttcagaatctctatggtaccccagtattcaggcctgttctagagaactcctggctctttccaaccagaattggaggtaactttaaccatgtttccttgaaagcctcctgggttatgggccgcccctttgggtcagagcagaggcctaagtggttccatcctttgccttttcagaatgcaggggcccagggccgaggtaaaagttttggtattcaatccttccatccccagatattttattcaggtgaaagattcatgaaattttccagagttgctcggggatgtcactcgaatggaacatttgggagactgccaagacccatttgtcagcatgtacaggcctgccctgagagaccacaaatgatgggaactcttgaaaggtctagggcagtagcctccaagataggtcactcctattccctggattcacagccagcaagagcagtagggaagccatggcctcagcaagcttgcaccagggtaacagagttaactgaagcaactggaaaactgataagaacatcccatattggaaagcctcaccctcagtcctttcaaccagcagcagccacacaaaaactaagacctgcttctcagcaaggagtccagatgaagacacaaggtggggcttcaaatccagctctccaaatagggtcccatcccatgtgcaagagctctcagttcaaatccgatcagtccaacccatccacagtcaaacactcccagcctaaacccttccattctgtgccctctcaacctaaatcctctcagacaaaatcctgtcagtcccagccctcccaaactaaaccttctccatgcaaatctactcagcctaagccaagccagccctggcctccccagtctaagccttctcagcccagaccccctcaacctaagtcatcctcaaccaatccttcacaagctaaggcacaccactcaaaagcagggcagaagaggggagggaagcattaaagagctaactccagagatctataaagcatatcctttacccaggccattcctatcatatagtaagcagaagagttgccatgaaagtaaaagactactgtcattagcatgtaaaacaaagaaagatatacatgactgaattggatatctttgtttgtttgtttgagacagagtttcactcttgttgcccaggctggagtgcaatggcacgatctcggctcaccgcaacctctgcttcctggcttaaagtgattctcctgcctcagcctctcgagtagctgggattacaggcatgcaccaccacacccagctaattttgtatttttagtagaggcagggtttctccatgttggtcaggctggtcttgaactcccgacctcaggtgatccgcccacctaggcctctcaaagtgttgggattacgtgtgtaagccacagtgcccagcccgaattggatatctttaagatatctgtaagtgttatatccctaaccaagaagaaaaatatgaaaataattaagactagaatcaagcagtagataattgaatccaatcttgggtattattagataatgtataacttgcacccagggaatgggggtctatgagacaaccccacttggagaagaatggggttagggtctctaattgcaaagtgactgtacaataggacgaaagttgcctctgtgtctgagaaagtatcttagttgttggctgctccagaggtatctttgtcaaaagcttctggttcaatatcagccactgagcagataaccctgcttatttggtgtggttaaatcaactagcttctgctaatagccccaatttgcttgaatgggaaaactctctcatttgacccttataggtagaaataatgaattaacaaccaataaaattaatcatttggcattaa

SEQ ID NO: 225045 - DNA, 1085 bp, Artificial Sequence
  derived and/or modified sequence
attctttttttaacttttacttattcattaggatgatttcataatatatttcctggtttagaggaaacaggaacaatggctaccgagagtactccctcagagatcatagaaagagaaagaaaaaagttgcttgaaatccttcaacatgatcctgattctatcttagacacgttaacttctcggaggctgatttctgaggaagagtatgagactctggagaatgttacagatctcctgaagaaaagtcggaagctgttaattttggtacagaaaaagggagaggcgacctgtcagcattttctcaagtgtttatttagtacttttccacagtcagctgccatttgcggcttaaggccagaagttttaaaacatgagaatacagtacctcctcaatctatgggggcaagcagtaattcagaagatgctttttctcctggaataaaacagcctgaagcccctgagatcacagtgttcttcagtgagaaggaacacttggatttggaaacctctgagtttttcagggacaagaaaactagttatagggaaacagctttgtctgccaggaagaatgagaaggaatatgacacaccagaagtcacattatcatattcagttgagaaagttggatgtgaagttccagcaactattacatatataaaagatggacagagatatgaggagctagatgattctttatacttaggaaaagaggaatatctaggatctgttgacacccctgaagatgcagaagccactgtggaagaggaggtttatgatgacccagagcacgttggatatgatggtgaagaggacttcgagaattcagaaaccacagagttctctggtgaagaaccaagttatgagggatcagaaaccagcctttcattggaggaggaacaggagaaaagtatagaaggctggtctcgaactcatgggcttaagcgatcctcccacgttggcctcccaaagtgctgggattacaggcgtgagccaccctgcctggcctgaaaattctgcctcaaacatctcaaacatccatttatattttgtacaagaaagtaaataaaatttttctttttaacatt

SEQ ID NO: 225046 - DNA, 1555 bp, Artificial Sequence
  derived and/or modified sequence
aggaacaatggctaccgagagtactccctcagagatcatagaaagagaaagaaaaaagttgcttgaaatccttcaacatgatcctgattctatcttagacacgttaacttctcggaggctgatttctgaggaagagtatgagactctggagaatgttacagatctcctgaagaaaagtcggaagctgttaattttggtacagaaaaagggagaggcgacctgtcagcattttctcaagtgtttatttagtacttttccacagtcagctgccatttgcggcttaaggcatgaagttttaaaacatgagaatacagtacctcctcaatctatgggggcaagcagtaattcagaagatgctttttctcctggaataaaacagcctgaagcccctgagatcacagtgttcttcagtgagaaggaacacttggatttggaaacctctgagtttttcagggacaagaaaactagttatagggaaacagctttgtctgccaggaagaatgagaaggaatatgacacaccagaagtcacattatcatattcagttgagaaagttggatgtgaagttccagcaactattacatatataaaagatggacagagatatgaggagctagatgattctttatacttaggaaaagaggaatatctaggatctgttgacacccctgaagatgcagaagccactgtggaagaggaggtttatgatgacccagagcacgttggatatgatggtgaagaggacttcgagaattcagaaaccacagagttctctggtgaagaaccaagttatgagggatcagaaaccagcctttcattggaggaggaacaggagaaaagtatagaagaaagaaaaaaggtgtttaaagatgtcctgttatgtttgaacatggatagaagcagaaaggttctgccagattttgttaaacaattctccttagatcgaggatgtaagtggacccctgagagtccaggagacttagcctggaatttcctgatgaaagttcaagcacgagatgtgaccgctagggattcaatcctcagtcacaaggttctggatgaagatagcaaggaggatttgctggctggagtggagaatttggaaattcgagacatacaaaccattaatccccttgacgtgctttgtgccaccatgctgtgttcagatagctctttgcaacgccaagtcatgtcaaacatgtatcagtgccagtttgctcttcccctgctactgccagatgcagaaaacaacaaaagcatcttaatgctgggggccatgaaagacattgtgaagaagcagtcaacacagttttcaggggggcctacagaggatacagaaaagtttctgactctcatgaagactttgaaaacactcagagaattcaagtttcctctggagaaaacatggctgggacagctgaaggtgagggtcagcaaagacacagtcagctaaaaagctcatctaaaagccaggctctaatgccaattcaagagcctgggactcaatgtgagctcagccagaatcttcagaatctctatggtaccccagtattca

SEQ ID NO: 225047 - DNA, 3114 bp, Artificial Sequence
  derived and/or modified sequence
atggccaccgagagcacccccagcgagatcatcgagagagagagaaagaagctgctggagatcctgcagcacgaccccgacagcatcctggacaccctgaccagcagaagactgatcagcgaggaggagtacgagaccctggagaacgtgaccgacctgctgaagaagagcagaaagctgctgatcctggtgcagaagaagggcgaggccacctgccagcacttcctgaagtgcctgttcagcaccttcccccagagcgccgccatctgcggcctgagacacgaggtgctgaagcacgagaacaccgtgcccccccagagcatgggcgccagcagcaacagcgaggacgccttcagccccggcatcaagcagcccgaggcccccgagatcaccgtgttcttcagcgagaaggagcacctggacctggagaccagcgagttcttcagagacaagaagaccagctacagagagaccgccctgagcgccagaaagaacgagaaggagtacgacacccccgaggtgaccctgagctacagcgtggagaaggtgggctgcgaggtgcccgccaccatcacctacatcaaggacggccagagatacgaggagctggacgacagcctgtacctgggcaaggaggagtacctgggcagcgtggacacccccgaggacgccgaggccaccgtggaggaggaggtgtacgacgaccccgagcacgtgggctacgacggcgaggaggacttcgagaacagcgagaccaccgagttcagcggcgaggagcccagctacgagggcagcgagaccagcctgagcctggaggaggagcaggagaagagcatcgaggagagaaagaaggtgttcaaggacgtgctgctgtgcctgaacatggacagaagcagaaaggtgctgcccgacttcgtgaagcagttcagcctggacagaggctgcaagtggacccccgagagccccggcgacctggcctggaacttcctgatgaaggtgcaggccagagacgtgaccgccagagacagcatcctgagccacaaggtgctggacgaggacagcaaggaggacctgctggccggcgtggagaacctggagatcagagacatccagaccatcaaccccctggacgtgctgtgcgccaccatgctgtgcagcgacagcagcctgcagagacaggtgatgagcaacatgtaccagtgccagttcgccctgcccctgctgctgcccgacgccgagaacaacaagagcatcctgatgctgggcgccatgaaggacatcgtgaagaagcagagcacccagttcagcggcggccccaccgaggacaccgagaagttcctgaccctgatgaagatgcccgtgatcagcttcgtgagactgggctactgcagcttcagcaagagcagaatcctgaacaccctgctgagccccgcccagctgaagctgcacaagatcttcctgcaccaggacctgcccctgctggtgctgcccagacagatcagcgacggcctggtggagatcacctggtgcttccccgacagcgacgacagaaaggagaaccccttcttccagaagcccgtggccctggccaacctgagaggcaacctggagagcttctggacccagttcggcttcctgatggaggtgagcagcgccgtgttcttcttcaccgactgcctgggcgagaaggagtgggacctgctgatgttcctgggcgaggccgccatcgagagatgctacttcgtgctgagcagccaggccagagagagcgaggaggcccagatcttccagagaatcctgaacctgaagcccgcccagctgctgttctgggagagaggcgacgccggcgacagaagaaagaacatggagggcctgcaggccgccctgcaggaggtgatgttcagcagctgcctgagatgcgtgagcgtggaggacatggccgccctggccagagagctgggcatccaggtggacgaggacttcgagaacacccagagaatccaggtgagcagcggcgagaacatggccggcaccgccgagggcgagggccagcagagacacagccagctgaagagcagcagcaagagccaggccctgatgcccatccaggagcccggcacccagtgcgagctgagccagaacctgcagaacctgtacggcacccccgtgttcagacccgtgctggagaacagctggctgttccccaccagaatcggcggcaacttcaaccacgtgagcctgaaggccagctgggtgatgggcagacccttcggcagcgagcagagacccaagtggttccaccccctgcccttccagaacgccggcgcccagggcagaggcaagagcttcggcatccagagcttccacccccagatcttctacagcggcgagagattcatgaagttcagcagagtggccagaggctgccacagcaacggcaccttcggcagactgcccagacccatctgccagcacgtgcaggcctgccccgagagaccccagatgatgggcaccctggagagaagcagagccgtggccagcaagatcggccacagctacagcctggacagccagcccgccagagccgtgggcaagccctggccccagcaggcctgcaccagagtgaccgagctgaccgaggccaccggcaagctgatcagaaccagccacatcggcaagccccacccccagagcttccagcccgccgccgccacccagaagctgagacccgccagccagcagggcgtgcagatgaagacccagggcggcgccagcaaccccgccctgcagatcggcagccaccccatgtgcaagagcagccagttcaagagcgaccagagcaaccccagcaccgtgaagcacagccagcccaagcccttccacagcgtgcccagccagcccaagagcagccagaccaagagctgccagagccagcccagccagaccaagcccagcccctgcaagagcacccagcccaagcccagccagccctggcccccccagagcaagcccagccagcccagacccccccagcccaagagcagcagcaccaaccccagccaggccaaggcccaccacagcaaggccggccagaagagaggcggcaagcactag

SEQ ID NO: 225048 - DNA, 933 bp, Artificial Sequence
  derived and/or modified sequence
atggccaccgagagcacccccagcgagatcatcgagagagagagaaagaagctgctggagatcctgcagcacgaccccgacagcatcctggacaccctgaccagcagaagactgatcagcgaggaggagtacgagaccctggagaacgtgaccgacctgctgaagaagagcagaaagctgctgatcctggtgcagaagaagggcgaggccacctgccagcacttcctgaagtgcctgttcagcaccttcccccagagcgccgccatctgcggcctgagacccgaggtgctgaagcacgagaacaccgtgcccccccagagcatgggcgccagcagcaacagcgaggacgccttcagccccggcatcaagcagcccgaggcccccgagatcaccgtgttcttcagcgagaaggagcacctggacctggagaccagcgagttcttcagagacaagaagaccagctacagagagaccgccctgagcgccagaaagaacgagaaggagtacgacacccccgaggtgaccctgagctacagcgtggagaaggtgggctgcgaggtgcccgccaccatcacctacatcaaggacggccagagatacgaggagctggacgacagcctgtacctgggcaaggaggagtacctgggcagcgtggacacccccgaggacgccgaggccaccgtggaggaggaggtgtacgacgaccccgagcacgtgggctacgacggcgaggaggacttcgagaacagcgagaccaccgagttcagcggcgaggagcccagctacgagggcagcgagaccagcctgagcctggaggaggagcaggagaagagcatcgagggctggagcagaacccacggcctgaagagaagcagccacgtgggcctgcccaagtgctgggactacagaagagagcccccctgcctggcctag

SEQ ID NO: 225049 - DNA, 1446 bp, Artificial Sequence
  derived and/or modified sequence
atggccaccgagagcacccccagcgagatcatcgagagagagagaaagaagctgctggagatcctgcagcacgaccccgacagcatcctggacaccctgaccagcagaagactgatcagcgaggaggagtacgagaccctggagaacgtgaccgacctgctgaagaagagcagaaagctgctgatcctggtgcagaagaagggcgaggccacctgccagcacttcctgaagtgcctgttcagcaccttcccccagagcgccgccatctgcggcctgagacacgaggtgctgaagcacgagaacaccgtgcccccccagagcatgggcgccagcagcaacagcgaggacgccttcagccccggcatcaagcagcccgaggcccccgagatcaccgtgttcttcagcgagaaggagcacctggacctggagaccagcgagttcttcagagacaagaagaccagctacagagagaccgccctgagcgccagaaagaacgagaaggagtacgacacccccgaggtgaccctgagctacagcgtggagaaggtgggctgcgaggtgcccgccaccatcacctacatcaaggacggccagagatacgaggagctggacgacagcctgtacctgggcaaggaggagtacctgggcagcgtggacacccccgaggacgccgaggccaccgtggaggaggaggtgtacgacgaccccgagcacgtgggctacgacggcgaggaggacttcgagaacagcgagaccaccgagttcagcggcgaggagcccagctacgagggcagcgagaccagcctgagcctggaggaggagcaggagaagagcatcgaggagagaaagaaggtgttcaaggacgtgctgctgtgcctgaacatggacagaagcagaaaggtgctgcccgacttcgtgaagcagttcagcctggacagaggctgcaagtggacccccgagagccccggcgacctggcctggaacttcctgatgaaggtgcaggccagagacgtgaccgccagagacagcatcctgagccacaaggtgctggacgaggacagcaaggaggacctgctggccggcgtggagaacctggagatcagagacatccagaccatcaaccccctggacgtgctgtgcgccaccatgctgtgcagcgacagcagcctgcagagacaggtgatgagcaacatgtaccagtgccagttcgccctgcccctgctgctgcccgacgccgagaacaacaagagcatcctgatgctgggcgccatgaaggacatcgtgaagaagcagagcacccagttcagcggcggccccaccgaggacaccgagaagttcctgaccctgatgaagaccctgaagaccctgagagagttcaagttccccctggagaagacctggctgggccagctgaaggtgagagtgagcaaggacaccgtgagctag

SEQ ID NO: 225050 - protein, 1336 aa, Artificial Sequence
  derived and/or modified sequence
MAGPQMGGSAEDHPPRKRHAAEKQKKKTVIYTKCFEFESATQRPIDRQRYDENEDLSDVEEIVSVRGFSLEEKLRSQLYQGDFVHAMEGKDFNYEYVQREALRVPLIFREKDGLGIKMPDPDFTVRDVKLLVGSRRLVDVMDVNTQKGTEMSMSQFVRYYETPEAQRDKLYNVISLEFSHTKLEHLVKRPTVVDLVDWVDNMWPQHLKEKQTEATNAIAEMKYPKVKKYCLMSVKGCFTDFHIDFGGTSVWYHVFRGGKIFWLIPPTLHNLALYEEWVLSGKQSDIFLGDRVERCQRIELKQGYTFFIPSGWIHAVYTPVDSLVFGGNILHSFNVPMQLRIYEIEDRTRVQPKFRYPFYYEMCWYVLERYVYCVTQRSHLTQEYQRESMLIDAPRKPSIDGFSSDSWLEMEEEACDQQPQEEEEKDEEGEGRDRAPKPPTDGSTSPTSTPSEDQEALGKKPKAPALRFLKRTLSNESEESVKSTTLAVDYPKTPTGSPATEVSAKWTHLTEFELKGLKALVEKLESLPENKKCVPEGIEDPQALLEGVKNVLKEHADDDPSLAITGVPVVTWPKKTPKNRAVGRPKGKLGPASAVKLAANRTTAGARRRRTRCRKCEACLRTECGECHFCKDMKKFGGPGRMKQSCIMRQCIAPVLPHTAVCLVCGEAGKEDTVEEEEGKFNLMLMECSICNEIIHPGCLKIKESEGVVNDELPNCWECPKCNHAGKTGKQKRGPGFKYASNLPGSLLKEQKMNRDNKEGQEPAKRRSECEEAPRRRSDEHSKKVPPDGLLRRKSDDVHLRKKRKYEKPQELSGRKRASSLQTSPGSSSHLSPRPPLGSSLSPWWRSSLTYFQQQLKPGKEDKLFRKKRRSWKNAEDRMALANKPLRRFKQEPEDELPEAPPKTRESDHSRSSSPTAGPSTEGAEGPEEKKKVKMRRKRRLPNKELSRELSKELNHEIQRTENSLANENQQPIKSEPESEGEEPKRPPGICERPHRFSKGLNGTPRELRHQLGPSLRSPPRVISRPPPSVSPPKCIQMERHVIRPPPISPPPDSLPLDDGAAHVMHREVWMAVFSYLSHQDLCVCMRVCRTWNRWCCDKRLWTRIDLNHCKSITPLMLSGIIRRQPVSLDLSWTNISKKQLSWLINRLPGLRDLVLSGCSWIAVSALCSSSCPLLRTLDVQWVEGLKDAQMRDLLSPPTDNRPGQMDNRSKLRNIVELRLAGLDITDASLRLIIRHMPLLSKLHLSYCNHVTDQSINLLTAVGTTTRDSLTEINLSDCNKVTDQCLSFFKRCGNICHIDLRYCKQVTKEGCEQFIAEMSVSVQFGQVEEKLLQKLS

SEQ ID NO: 225051 - protein, 1326 aa, Artificial Sequence
  derived and/or modified sequence
MAGPQMGGSAEDHPPRKRHAAEKQKKKTVIYTKCFEFESATQRPIDRQRYDENEDLSDVEEIVSVRGFSLEEKLRSQLYQGDFVHAMEGKDFNYEYVQREALRVPLIFREKDGLGIKMPDPDFTVRDVKLLVGSRRLVDVMDVNTQKGTEMSMSQFVRYYETPEAQRDKLYNVISLEFSHTKLEHLVKRPTVVDLVDWVDNMWPQHLKEKQTEATNAIAEMKYPKVKKYCLMSVKGCFTDFHIDFGGTSVWYHVFRGGKIFWLIPPTLHNLALYEEWVLSGKQSDIFLGDRVERCQRIELKQGYTFFIPSGWIHAVYTPVDSLVFGGNILHSFNVPMQLRIYEIEDRTRVQPKFRYPFYYEMCWYVLERYVYCVTQRSHLTQEYQRESMLIDAPRKPSIDGFSSDSWLEMEEEACDQQPQEEEEKDEEGEGRDRAPKPPTDGSTSPTSTPSEDQEALGKKPKAPALRFLKRTLSNESEESVKSTTLAVDYPKTPTGSPATEVSAKWTHLTEFELKGLKALVEKLESLPENKKCVPEGIEDPQALLEGVKNVLKEHADDDPSLAITGVPVVTWPKKTPKNRAVGRPKGKLGPASAVKLAANRTTAGARRRRTRCRKCEACLRTECGECHFCKDMKKFGGPGRMKQSCIMRQCIAPVLPHTAVCLVCGEAGKEDTVEEEEGKFNLMLMECSICNEIIHPGCLKIKESEGVVNDELPNCWECPKCNHAGKTGKQKRGPGFKYASNLPGSLLKEQKMNRDNKEGQEPAKRRSECEEAPRRRSDEHSKKVPPDGLLRRKSDDVHLRKKRKYEKPQELSGRKRASSLQTSPGSSSHLSPRPPLGSSLSPWWRSSLTYFQQQQRRSWKNAEDRMALANKPLRRFKQEPEDELPEAPPKTRESDHSRSSSPTAGPSTEGAEGPEEKKKVKMRRKRRLPNKELSRELSKELNHEIQRTENSLANENQQPIKSEPESEGEEPKRPPGICERPHRFSKGLNGTPRELRHQLGPSLRSPPRVISRPPPSVSPPKCIQMERHVIRPPPISPPPDSLPLDDGAAHVMHREVWMAVFSYLSHQDLCVCMRVCRTWNRWCCDKRLWTRIDLNHCKSITPLMLSGIIRRQPVSLDLSWTNISKKQLSWLINRLPGLRDLVLSGCSWIAVSALCSSSCPLLRTLDVQWVEGLKDAQMRDLLSPPTDNRPAPGQMDNRSKLRNIVELRLAGLDITDASLRLIIRHMPLLSKLHLSYCNHVTDQSINLLTAVGTTTRDSLTEINLSDCNKVTDQCLSFFKRCGNICHIDLRYCKQVTKEGCEQFIAEMSVSVQFGQVEEKLLQKLS

SEQ ID NO: 225052 - DNA, 4851 bp, Artificial Sequence
  derived and/or modified sequence
aaaagttaggcagtccttataggtatggaagccgagctaatttccttctgagccccccaaatgcctcctccacatggcgggtccgcaaatggggggatctgcagaggatcaccccccacgaaaaagacatgcagcagaaaagcaaaaaaagaaaacagttatatatacaaaatgctttgaatttgagtcggccacacagcgcccgattgaccgccagcgatacgacgagaacgaggacttgtcggacgtggaggagatcgtcagcgtccgcggcttcagcctggaggagaagcttcgcagccagctgtaccagggggacttcgtgcacgccatggagggcaaagatttcaactatgagtacgtacagagagaagctctcagggttcccctgatatttcgagaaaaggatggactgggaattaagatgcctgaccctgatttcacagtccgagacgtcaaactcctagtggggagccggcggcttgtggacgtgatggatgtgaacacccagaagggcacggagatgagcatgtcccagtttgtgcgttactacgagacgcccgaggcccagcgggacaagctgtacaacgtcatcagcctagagttcagccacaccaagctggagcacttggtcaagcgtccgactgtggtagacctggtggactgggtggacaacatgtggccccagcatctgaaggagaagcagacagaagccacgaacgccattgcagagatgaagtacccgaaagtgaaaaagtactgtctgatgagcgtgaaaggttgtttcaccgacttccacatcgactttggaggcacttccgtttggtaccatgttttccggggtgggaagattttttggctgattcctccaacgctgcacaatttggcgctgtacgaggagtgggtgctgtcaggcaaacagagtgacatctttctgggagaccgtgtggaacgatgccaaagaattgagctgaagcagggctacacatttttcatcccttccggttggatccatgccgtctacacccctgtagactctttggtgttcggcggaaacatcctgcacagctttaacgtgcccatgcagctgcggatctacgagatcgaggacaggacgcgggtgcagcccaaattccgttaccccttctactatgagatgtgctggtatgtcctggagagatacgtgtactgtgtgacccagcgctcccacctcactcaggaataccagagggagtcgatgcttattgatgccccgaggaagcccagcatagacggcttctcttcggattcctggctggagatggaggaggaggcctgtgatcagcagcctcaggaggaggaggagaaggacgaggagggcgagggcagggacagggcacccaaaccgcccaccgatggctccacttcacccaccagcacgccctctgaggaccaggaggccctcgggaagaagcccaaagcacctgccctgcgattcctcaaaaggactttgtctaatgagtcggaggaaagtgtgaagtccaccacattggccgtagactaccccaagacccccaccggctctcccgccacggaggtctctgccaaatggacccatctcactgagtttgaactgaagggcctgaaagctctggtggagaaactggaatccctcccggagaacaagaagtgtgtccccgagggcatcgaggacccccaggcactcctggagggtgtgaagaacgtcctgaaggagcacgcagatgatgaccctagtctggccatcactggggtccctgtggtgacttggccaaagaagactccaaagaaccgggctgtgggtcggcccaaggggaagctgggcccggcctccgcggtgaagttggccgccaaccggacaacggcaggagctcggcggcgccggacgcgatgccgcaagtgcgaggcctgcctgcggaccgagtgcggagagtgccacttctgcaaggacatgaagaagttcgggggccccgggcgcatgaagcagagctgcatcatgcggcagtgcatcgcgccagtgctgccccacaccgccgtgtgccttgtgtgtggcgaggcggggaaggaagacacggtggaagaggaggaaggcaagtttaacctcatgctcatggagtgctccatctgcaatgaaatcatccaccctggatgccttaagattaaggagtcagagggtgtggtcaacgacgagcttccaaactgctgggagtgtccgaagtgtaaccacgccggcaagaccgggaaacaaaagcgtggccctggctttaagtacgcctccaacctgcccggctccctgctcaaggagcagaagatgaaccgggacaacaaggaagggcaggaacctgccaagcggaggagtgagtgtgaggaggcgccccggcgcaggtcggatgagcactcgaagaaggtgccgccggacggccttctgcgcagaaagtctgacgacgtgcacctgaggaagaagcggaaatacgagaagccccaggagctgagtggacgcaagcgggcctcatcgcttcaaacgtcccccggttcctcctctcacctctcgccgaggccccctctaggcagcagcctcagcccctggtggagatccagtctcacttacttccagcagcagctcaaacctggcaaagaagataagcttttcaggaaaaagcggcggtcctggaagaacgccgaggaccgcatggcgctggccaacaagcccctccggcgcttcaagcaggaacccgaggacgaactgcccgaggcgccccccaagaccagggagagcgaccactcccgctccagctcccccaccgcgggacccagcaccgaaggggccgagggcccggaggagaagaagaaggtgaagatgcgccggaagcggcggcttcccaacaaggagctgagcagggagctgagcaaggagctcaaccacgagatccagaggacggagaacagcctggccaacgagaaccagcagcccatcaagtcggagcctgagagcgagggcgaggagcccaagcggcccccgggcatctgcgagcgtccccaccgcttcagcaaggggctcaacggcaccccccgggagctgcggcaccagctggggcccagcctgcgcagcccgccccgtgtcatctcccggcccccaccctccgtgtccccgcccaagtgtatccagatggagcgccatgtgatccggccaccccccatcagccccccgcctgactcgctacccctggacgatggggcagcccacgtcatgcacagggaggtgtggatggccgtcttcagctacctcagccaccaagacctgtgtgtgtgcatgcgggtctgcaggacctggaaccgctggtgctgcgataagcggttgtggacccgcattgacctgaaccactgcaagtctatcacacccctgatgctgagtggcatcatccggcgacagcccgtctccctcgacctcagctggaccaatatctccaagaagcagctgagctggctcatcaaccggctgcctgggctccgggacttggtgctgtcaggctgctcatggatcgcggtctcggccctttgcagctccagttgtccgctgctccggaccctggatgtccagtgggtggagggactaaaggatgcccagatgcgggatctcctgtccccgcccacagacaacaggccaggtcagatggacaatcggagcaagctccggaacatcgtggagctgcgcctggcaggcctggacatcacagatgcctccctgcggctcatcatccgccacatgcccctgctctccaagctccacctcagttactgtaaccacgtcaccgaccagtctatcaacctgctcactgctgttggcaccaccacccgagactccttaaccgagatcaacctgtctgactgcaataaggtcactgatcagtgcctgtccttcttcaaacgctgtggaaacatctgtcatattgacctgaggtactgcaagcaagtcaccaaggaaggctgtgagcagttcatagccgagatgtctgtgagtgtccagtttgggcaagtagaagaaaaactcctgcaaaaactgagttagtccaaggataagtatgtaaatacggggcgggctctgggaggggagagactttacaaaaatgagggcttttattttccatttggaacgtgggacaacagaccacaacgcaattccattttgcaagtctttccaagggagaagctgttcaaccacccgtttgggggatgagtgagccgacactttcctttggtctttctgaatcgtaactgcactgctttctggaccatttctaaggcggcctttacaagaagacattcctgtcggagaggagggtggacttcggagaaattctcatactgaagcatgagcttaggagtttctgttagtggtagtggtgttttggacacttcattccttgcaacaccgaggttttgggtgttgacataaagtggaccacacaccacatctgctgccgtcttgacacttttttttgtttggttggttttgttacatcttacattatgcagaactatttttgtacaaattgtttaaaagttatttatgcaaggtttgaatgcataccagtgtttttattgttttgagattgccaattttcctgatttccttaaggtaggagagaatttaacgtgtacttcatcgacacaacccatctacaaatgtgcccagatctaacaaagtaggctaagaccttccacttaaaagcatgtttaactggaagttgagagtctgctttgtacctcaagagttacatgagcatgttgtggataaatgtaaattatagtcaaagtaagatactctgccaagtt

SEQ ID NO: 225053 - DNA, 5274 bp, Artificial Sequence
  derived and/or modified sequence
gtgtgtccacatctttgagtgccgggagtttaaaagttaggcagtccttataggtatggaagccgagctaatttccttctgagccccccaaatgcctcctccacatggcgggtccgcaaatggggggatctgcagaggatcaccccccacgaaaaagacatgcagcagaaaagcaaaaaaagaaaacagttatatatacaaaatgctttgaatttgagtcggccacacagcgcccgattgaccgccagcgatacgacgagaacgaggacttgtcggacgtggaggagatcgtcagcgtccgcggcttcagcctggaggagaagcttcgcagccagctgtaccagggggacttcgtgcacgccatggagggcaaagatttcaactatgagtacgtacagagagaagctctcagggttcccctgatatttcgagaaaaggatggactgggaattaagatgcctgaccctgatttcacagtccgagacgtcaaactcctagtggggagccggcggcttgtggacgtgatggatgtgaacacccagaagggcacggagatgagcatgtcccagtttgtgcgttactacgagacgcccgaggcccagcgggacaagctgtacaacgtcatcagcctagagttcagccacaccaagctggagcacttggtcaagcgtccgactgtggtagacctggtggactgggtggacaacatgtggccccagcatctgaaggagaagcagacagaagccacgaacgccattgcagagatgaagtacccgaaagtgaaaaagtactgtctgatgagcgtgaaaggttgtttcaccgacttccacatcgactttggaggcacttccgtttggtaccatgttttccggggtgggaagattttttggctgattcctccaacgctgcacaatttggcgctgtacgaggagtgggtgctgtcaggcaaacagagtgacatctttctgggagaccgtgtggaacgatgccaaagaattgagctgaagcagggctacacatttttcatcccttccggttggatccatgccgtctacacccctgtagactctttggtgttcggcggaaacatcctgcacagctttaacgtgcccatgcagctgcggatctacgagatcgaggacaggacgcgggtgcagcccaaattccgttaccccttctactatgagatgtgctggtatgtcctggagagatacgtgtactgtgtgacccagcgctcccacctcactcaggaataccagagggagtcgatgcttattgatgccccgaggaagcccagcatagacggcttctcttcggattcctggctggagatggaggaggaggcctgtgatcagcagcctcaggaggaggaggagaaggacgaggagggcgagggcagggacagggcacccaaaccgcccaccgatggctccacttcacccaccagcacgccctctgaggaccaggaggccctcgggaagaagcccaaagcacctgccctgcgattcctcaaaaggactttgtctaatgagtcggaggaaagtgtgaagtccaccacattggccgtagactaccccaagacccccaccggctctcccgccacggaggtctctgccaaatggacccatctcactgagtttgaactgaagggcctgaaagctctggtggagaaactggaatccctcccggagaacaagaagtgtgtccccgagggcatcgaggacccccaggcactcctggagggtgtgaagaacgtcctgaaggagcacgcagatgatgaccctagtctggccatcactggggtccctgtggtgacttggccaaagaagactccaaagaaccgggctgtgggtcggcccaaggggaagctgggcccggcctccgcggtgaagttggccgccaaccggacaacggcaggagctcggcggcgccggacgcgatgccgcaagtgcgaggcctgcctgcggaccgagtgcggagagtgccacttctgcaaggacatgaagaagttcgggggccccgggcgcatgaagcagagctgcatcatgcggcagtgcatcgcgccagtgctgccccacaccgccgtgtgccttgtgtgtggcgaggcggggaaggaagacacggtggaagaggaggaaggcaagtttaacctcatgctcatggagtgctccatctgcaatgaaatcatccaccctggatgccttaagattaaggagtcagagggtgtggtcaacgacgagcttccaaactgctgggagtgtccgaagtgtaaccacgccggcaagaccgggaaacaaaagcgtggccctggctttaagtacgcctccaacctgcccggctccctgctcaaggagcagaagatgaaccgggacaacaaggaagggcaggaacctgccaagcggaggagtgagtgtgaggaggcgccccggcgcaggtcggatgagcactcgaagaaggtgccgccggacggccttctgcgcagaaagtctgacgacgtgcacctgaggaagaagcggaaatacgagaagccccaggagctgagtggacgcaagcgggcctcatcgcttcaaacgtcccccggttcctcctctcacctctcgccgaggccccctctaggcagcagcctcagcccctggtggagatccagtctcacttacttccagcagcagcagcggcggtcctggaagaacgccgaggaccgcatggcgctggccaacaagcccctccggcgcttcaagcaggaacccgaggacgaactgcccgaggcgccccccaagaccagggagagcgaccactcccgctccagctcccccaccgcgggacccagcaccgaaggggccgagggcccggaggagaagaagaaggtgaagatgcgccggaagcggcggcttcccaacaaggagctgagcagggagctgagcaaggagctcaaccacgagatccagaggacggagaacagcctggccaacgagaaccagcagcccatcaagtcggagcctgagagcgagggcgaggagcccaagcggcccccgggcatctgcgagcgtccccaccgcttcagcaaggggctcaacggcaccccccgggagctgcggcaccagctggggcccagcctgcgcagcccgccccgtgtcatctcccggcccccaccctccgtgtccccgcccaagtgtatccagatggagcgccatgtgatccggccaccccccatcagccccccgcctgactcgctacccctggacgatggggcagcccacgtcatgcacagggaggtgtggatggccgtcttcagctacctcagccaccaagacctgtgtgtgtgcatgcgggtctgcaggacctggaaccgctggtgctgcgataagcggttgtggacccgcattgacctgaaccactgcaagtctatcacacccctgatgctgagtggcatcatccggcgacagcccgtctccctcgacctcagctggaccaatatctccaagaagcagctgagctggctcatcaaccggctgcctgggctccgggacttggtgctgtcaggctgctcatggatcgcggtctcggccctttgcagctccagttgtccgctgctccggaccctggatgtccagtgggtggagggactaaaggatgcccagatgcgggatctcctgtccccgcccacagacaacaggccagcaccaggtcagatggacaatcggagcaagctccggaacatcgtggagctgcgcctggcaggcctggacatcacagatgcctccctgcggctcatcatccgccacatgcccctgctctccaagctccacctcagttactgtaaccacgtcaccgaccagtctatcaacctgctcactgctgttggcaccaccacccgagactccttaaccgagatcaacctgtctgactgcaataaggtcactgatcagtgcctgtccttcttcaaacgctgtggaaacatctgtcatattgacctgaggtactgcaagcaagtcaccaaggaaggctgtgagcagttcatagccgagatgtctgtgagtgtccagtttgggcaagtagaagaaaaactcctgcaaaaactgagttagtccaaggataagtatgtaaatacggggcgggctctgggaggggagagactttacaaaaatgagggcttttattttccatttggaacgtgggacaacagaccacaacgcaattccattttgcaagtctttccaagggagaagctgttcaaccacccgtttgggggatgagtgagccgacactttcctttggtctttctgaatcgtaactgcactgctttctggaccatttctaaggcggcctttacaagaagacattcctgtcggagaggagggtggacttcggagaaattctcatactgaagcatgagcttaggagtttctgttagtggtagtggtgttttggacacttcattccttgcaacaccgaggttttgggtgttgacataaagtggaccacacaccacatctgctgccgtcttgacacttttttttgtttggttggttttgttacatcttacattatgcagaactatttttgtacaaattgtttaaaagttatttatgcaaggtttgaatgcataccagtgtttttattgttttgagattgccaattttcctgatttccttaaggtaggagagaatttaacgtgtacttcatcgacacaacccatctacaaatgtgcccagatctaacaaagtaggctaagaccttccacttaaaagcatgtttaactggaagttgagagtctgctttgtacctcaagagttacatgagcatgttgtggataaatgtaaattatagtcaaagtaagatactctgccaagtttcctctgtagagaattcacttttctcaaattttaaaatttcgacttcagcctttgcactcaggaggttctgctccagcatgagctcttgtacttacatagatctaatttatacagtgagtcaagacgtagaataaatgctcccacatagcctttcttttgcttttgcttctctcctctgaagtgtgagttgagttctcatttaggtttgtaacatggctatttcctagttgtaaagttctgcatttataagtgccattgttgtaaggtggtgtttcctagaccttccctgatgcgattttacctttgttgaatttgtataaacaattgtacaaaaaaaaccactcttgaactttgagggtttctgttctaggagtggactagaagtttaagcccagagtcagtaaacactgttttgaagtcc

SEQ ID NO: 225054 - DNA, 4011 bp, Artificial Sequence
  derived and/or modified sequence
atggcaggcccccagatggggggaagcgctgaagatcaccctcccagaaagcgacacgctgcggaaaaacaaaagaagaaaactgttatatacacaaagtgctttgagtttgaatctgctactcagcggcctattgaccggcagcggtacgacgaaaacgaagatttgtctgacgttgaggaaatcgtgtcagtgcgaggcttttcccttgaagaaaagctgcggagccaactgtatcagggggatttcgtgcatgccatggaagggaaagatttcaattacgagtacgtacagcgtgaggctctgcgcgtgccccttatttttcgagagaaagacgggcttgggattaaaatgccggatcccgatttcaccgttcgtgacgtcaaacttctcgtgggctccagacgactggttgatgtgatggacgtcaatacgcagaagggaacagagatgagcatgtctcagttcgtacgatactacgaaactcctgaggcacagcgagacaaactgtacaatgttattagtctggagttttcccatactaaactagagcacttggtaaagaggcccacagtcgtggacctggttgattgggtggataatatgtggcctcagcatctcaaggaaaaacagacagaagctactaacgcaatagcggagatgaagtatcctaaagtgaaaaaatattgtctgatgtcagtaaagggttgctttacagatttccacattgactttggcgggacgtccgtgtggtaccatgtgttcagagggggaaagatcttctggctcatcccacccactcttcacaacctggctttgtatgaggaatgggtactgagtggcaaacagtccgatatattcttgggggacagggttgagcgctgtcagagaattgaactgaaacagggctacactttcttcatcccgtctggatggatacacgcagtctacacacccgtggactctctcgtgtttggtggaaacatcttgcattctttcaatgtcccgatgcaactgcgaatctacgaaatagaggatagaacacgcgtgcagccaaagtttaggtatcccttctactacgaaatgtgctggtacgtgctggagagatatgtgtattgcgtgacgcagagatctcacctgactcaggaataccagcgtgaatcgatgctcatcgatgccccgcgaaagccatccatcgacggtttctcctcggattcttggctcgagatggaggaggaagcctgcgaccagcagcctcaggaggaggaggagaaggatgaggaaggagagggcagagatagggcccctaagccaccaacagacggatccacgtcacccacaagcacccctagcgaggatcaggaagcgctgggtaagaagccaaaggctcccgctctcaggtttctcaaacgcaccttgtccaacgagtcagaagaatctgtgaaatccacaactctcgcagtcgattacccaaaaacacccactggcagccccgccaccgaggtatccgccaaatggacccacctcaccgagtttgaactaaaaggattgaaagcattggtcgaaaagctcgagtctttacctgaaaataaaaagtgcgtgccagaaggcatagaagacccgcaggctctccttgagggcgtcaaaaatgtgctgaaggagcatgccgacgacgatccgtcgctggccatcaccggcgttcctgttgtgacttggcccaagaagactcctaagaatagggccgtcggccggccaaaaggtaagctcgggcccgccagtgccgttaaactggccgccaacaggacgacagcaggcgcgagacggagaaggactcgatgccggaagtgtgaggcttgcctgcgcactgaatgtggggagtgtcacttctgtaaagatatgaaaaagttcggcggacctggcaggatgaagcagagttgtattatgaggcaatgtattgcaccagtgctaccacatacagcagtatgcctggtttgcggagaggccggaaaagaagatacagtcgaagaagaggagggtaagtttaaccttatgctgatggaatgttcaatttgtaatgagatcatccatcctgggtgtctgaagattaaagaatctgagggggtggtcaacgatgaacttccgaactgctgggaatgtcctaagtgtaaccacgccggtaagaccggtaaacaaaaacgagggccaggatttaagtacgcttcaaatctgccagggagtctgctcaaggagcaaaagatgaaccgggataacaaagaaggccaggaaccagcaaagcggcggtccgagtgcgaggaagcccccagacgtagatcagacgaacactcaaaaaaggttccgcctgatggattgctccgtcgcaagtccgacgatgtccatctccggaagaagagaaaatatgagaagcctcaggaactctcaggcagaaagagggcctcaagtctccaaacctccccaggatcaagcagtcatctatctcccaggccccctcttggcagttctctgtcaccgtggtggcgtagctctctgacttactttcaacagcagttgaaacccggcaaggaagacaaactgtttaggaagaaaagaaggagctggaaaaacgcagaggaccgaatggcactcgctaataagccactgaggaggttcaagcaggagcccgaggacgaactcccagaagcccctcctaaaacgcgggaaagcgaccactctaggagtagttctcccactgctggcccttctactgagggcgctgaaggcccggaagagaaaaagaaggtgaagatgcgaaggaaacgacggttgcccaacaaggagctgtctcgcgagttgtcaaaggagttgaaccacgaaatccagcgtaccgaaaactcacttgcaaatgaaaaccaacagccaatcaaatctgagcctgagtccgaaggtgaggagccgaagagacctccaggcatttgcgagcgaccacaccgttttagcaaggggctaaacggtacgcctcgcgagctgcgccatcaactgggcccttcattaaggtcaccaccacgcgtgatctcccgtccccccccctccgtttcaccacctaaatgtatccagatggaacgacacgtgatcaggccccctcccattagccccccccccgacagcctccctctggacgacggggcggcccacgtgatgcatcgcgaggtttggatggcagtgttcagttacctgtcccatcaagacctgtgcgtttgcatgcgagtgtgtaggacctggaatcggtggtgttgtgacaaacgtctgtggaccagaatcgacctgaatcactgtaaaagtattactccactcatgctgtccggcatcatcagacggcagcctgtgtcattagacctgtcttggacgaacatcagcaagaaacagctgagttggctgatcaatagactgccaggtctcagagatctggtcttgtctggctgtagttggatcgccgtcagcgcgctgtgttcttcctcatgccccctcctcagaacactcgatgtccagtgggtggaggggctgaaagacgcccagatgcgcgatctgttgagccctcccactgataataggcctggccagatggataacagatccaagctgcgtaacatcgtggagttgcgattggccgggcttgacatcactgacgcttccctgcgtctcattatacggcacatgcccctattatcgaaactgcatttaagctactgcaatcatgtgactgaccagtcaattaacctcctgacagccgtaggcacaacaacccgcgatagtctgaccgagatcaacctgagcgactgcaataaagtcacggaccagtgtctgtcgttctttaaaagatgcggcaatatttgtcacatagacctgcgatactgcaagcaggttactaaggaggggtgtgaacagttcattgcagaaatgtccgtgtcggttcaattcgggcaggtcgaagaaaaattgctgcagaagctgtcatag

SEQ ID NO: 225055 - DNA, 3981 bp, Artificial Sequence
  derived and/or modified sequence
atggcggggccacagatgggcggcagcgcggaagaccatcccccccgcaagaggcatgctgccgaaaaacaaaaaaagaaaaccgtgatttacacaaagtgctttgagttcgagtccgcaacacagaggcctatagataggcagcgatatgacgaaaacgaggatctgagcgatgtcgaggagattgtaagcgtgagagggttctcccttgaggaaaaactccggtcacagctgtatcagggggatttcgttcatgcaatggaaggaaaagattttaattatgagtacgtgcagcgtgaagccttgcgtgtccccctgattttccgtgagaaagacgggctcgggatcaaaatgccggatcccgatttcacagtgcgcgacgttaaactcctggtaggatcaaggcggcttgttgatgtcatggatgtgaatacccagaaggggaccgagatgtccatgagccaattcgtacgttactatgaaacccccgaggcccagcgagataagttgtacaatgttatctccctcgaatttagtcacactaaactcgagcatctggtgaagcgtcccacggttgtggatcttgttgattgggtggacaacatgtggccacagcacctgaaggagaagcagactgaagctaccaacgctattgcagaaatgaaatatcctaaagtgaaaaagtattgcctgatgagcgtgaagggttgtttcacagattttcacattgactttggcggcacatcagtatggtaccatgtctttagaggcggaaagatcttctggctgattcccccgacactccacaatcttgcactgtacgaggaatgggtcctttctgggaagcagtctgacatttttctgggggaccgcgtggaaaggtgtcagcgcattgaactcaagcaagggtatacattcttcattcccagcggatggatccacgccgtctatacccctgtggacagtctagttttcggtggaaacatcctccattcatttaatgttcctatgcagctccggatttatgagatcgaggatcgaacccgagttcaaccaaagttcaggtacccattttactacgagatgtgctggtacgtcttagaacgctatgtctactgcgtgactcagagaagtcacctgacccaggaataccagcgggaatcaatgctcatcgatgcacccagaaagccatccatcgatgggttctcatctgattcatggctggagatggaagaagaggcatgtgaccagcagccacaagaagaagaggagaaagacgaagagggtgagggccgcgatcgggctcccaaacctcctactgatggatccacctcccctacctcgactccatctgaggatcaagaggcccttggaaaaaaacctaaggccccagctctcagatttcttaaacggacattaagcaatgaaagcgaggaatccgtaaaaagcactacacttgccgttgattacccaaagacacctactggctcccctgctacggaggtctccgctaaatggacacacctcaccgagttcgaactgaagggcctaaaggccctggtggaaaagctagagagtttaccggagaacaagaaatgcgtgcctgagggaatcgaggatccccaggccctgctggagggtgtgaaaaatgtgttaaaagagcatgctgacgatgatccctcgctggctatcaccggcgtgcccgtggtgacgtggcccaagaagacacctaagaaccgagcggtgggtagacccaaggggaaactaggccccgctagcgccgtgaaactagcagctaataggacaacagcaggcgctagacgtcgacgcaccaggtgtcgcaagtgtgaagcgtgccttcgaactgaatgcggagagtgccacttctgtaaagacatgaagaagtttggcggccccggtagaatgaaacaatcttgcattatgcggcaatgcatcgctccagtgctgcctcacacagccgtatgcttggtttgcggcgaagccggcaaggaggataccgtggaggaggaagaggggaaattcaacctgatgcttatggagtgcagcatctgcaatgagattatccaccccgggtgcctgaagattaaggaatccgaaggcgtcgtgaacgacgaactccccaattgctgggagtgtccaaagtgtaaccacgcgggaaagacaggtaaacagaagagaggtccagggtttaaatatgcctcaaatttgccgggatccctcctcaaggagcaaaagatgaatagagacaataaagagggacaggagcccgccaaaagaaggtccgagtgcgaagaggcaccccgccgacgctcagacgagcacagcaaaaaggtgccacccgatggcctgctccgtcggaaatctgacgatgtgcacctgaggaagaagagaaaatatgaaaagccacaagaactgagcggaagaaagcgtgcttctagtcttcagaccagcccgggttccagctcgcaccttagcccccgcccgccactcgggagttctctgagcccttggtggcgatcttccctgacctatttccagcagcaacaacggcggagctggaagaacgccgaggatcgaatggccctggctaataaacccctacggagatttaaacaggagccagaggatgaactgccagaagcgccccctaagactagggagtccgatcactcccggtcatcgtccccgaccgcaggtccgtcaacagagggagcagaaggtccagaagagaaaaaaaaggtgaaaatgcggcgaaaacgccgcctacccaataaagaattaagtagagagttgtccaaggagcttaaccatgagattcagcgaacagaaaacagcttggctaatgagaatcagcagcctattaagagtgagcccgaaagcgaaggagaggagcctaaacggccgcccggaatatgcgaacgccctcacagattctctaaaggccttaacgggacacccagggagctgcggcatcagctgggtcccagcttaaggtctccccctagagtgattagtaggccccccccctctgtaagcccacctaaatgtatccagatggagcgtcacgtaatcaggcctcccccgataagtccccccccagatagtttgccccttgatgacggagctgcgcacgttatgcatcgtgaggtctggatggctgtgttttcctatctgtcgcatcaggatttatgtgtatgcatgcgggtatgtagaacctggaacaggtggtgttgtgacaaacgactctggaccagaattgaccttaaccactgtaaaagtatcactccacttatgctgagtggaataataaggaggcaacctgtgtcacttgacctgagctggactaatatatccaaaaagcaactgagctggctgatcaacagactccccggactccgagacctcgtcttaagcggttgctcttggatcgccgtgtctgccctttgttcgagcagctgtcctctgctgagaacgcttgatgtccagtgggttgagggtttgaaagatgcgcaaatgcgggatttgctcagtccaccgaccgataacaggcctgcgccaggccagatggataatcggtcgaagttgagaaacatcgttgaactaaggctcgccggcctggatattacagacgctagcttaaggctcataatacgtcacatgcctcttctgtctaaattacacttgtcctactgcaaccacgttaccgatcagagtatcaatctgctgaccgccgtgggtactaccaccagggatagtctaaccgaaatcaacctctcagattgcaacaaggtaaccgatcagtgtttgtcatttttcaagcgatgcggaaacatctgtcatatagacctgcggtactgtaaacaggtaacaaaggagggatgtgagcagttcattgccgaaatgtcggtttcagtccagtttggccaagtcgaggaaaagctgctacagaaactgagttag

SEQ ID NO: 225056 - DNA, 4011 bp, Artificial Sequence
  derived and/or modified sequence
atggccggcccccagatgggcggcagcgctgaggaccacccccccaggaagagacatgctgctgagaagcagaagaagaagacagtcatctacaccaagtgctttgaatttgaaagtgccacccagaggcccatcgaccggcagagatatgatgaaaatgaagacctgagtgatgtggaggagatcgtgtctgtgcggggcttcagcctggaggagaagctgcggagccagctgtaccagggcgactttgtgcacgccatggagggcaaggacttcaactatgaatatgtgcagcgggaggccctgcgggtgcccctcatcttccgggagaaggatggcctgggcatcaagatgccagaccctgacttcaccgtgagagatgtgaagctgctggtgggcagccggcggctggtggatgtgatggatgtgaacacccagaagggcacagagatgtccatgagccagtttgtgcgctactatgagaccccagaggcccagagggacaagctgtacaacgtcatcagcctggagttcagccacaccaagctggagcacctggtgaagaggcccaccgtggtggacctggtggactgggtggacaacatgtggccccagcacctgaaggagaagcagacagaggccaccaatgccatcgccgagatgaagtaccccaaggtgaagaagtactgcctgatgtctgtgaagggctgcttcacagacttccacatcgactttggaggcacctctgtgtggtaccacgtgttccggggcggcaagatcttctggctgatcccccccaccctgcacaacctggccctgtatgaggagtgggtgctgagcggcaagcagagcgacatcttcctgggggacagagtggagcgctgccagagaattgagctgaagcagggctacaccttcttcatccccagcggctggattcatgctgtgtacacccctgtggacagcctggtgtttggaggcaacatcctgcacagcttcaacgtgcccatgcagctgcgcatctatgaaattgaggacaggaccagggtgcagcccaagttccgctaccccttctactatgagatgtgctggtacgtgctggagcgctacgtgtactgtgtgacccagaggagccacctgacccaggagtaccagcgggagagcatgctgattgatgcccccaggaagcccagcattgatggcttcagcagtgacagctggctggagatggaggaggaggcctgtgaccagcagccccaggaggaggaggagaaggatgaggagggggagggccgggaccgggcccccaagccacccacagatggcagcaccagccccaccagcaccccatctgaggaccaggaggccctgggcaagaagcccaaggccccagccctgcgcttcctgaagaggaccctgagcaatgaaagtgaggagagcgtgaagagcaccaccctggccgtggactaccccaagacccccaccggcagccctgccacagaggtgtctgccaagtggacccacctgacagaatttgagctgaagggcctgaaggccctggtggagaagctggagagcctgcctgagaacaagaagtgtgtgcctgagggcatcgaggacccccaggccctgctggagggcgtgaagaatgtgctgaaggagcacgcagatgatgaccccagcctggccatcactggagtgcctgtggtgacctggcccaagaagacccccaagaacagagctgtgggccggcccaagggcaagctgggccctgccagcgctgtgaagctggccgccaacagaaccacagctggggccaggagaagaaggacccgctgcaggaaatgtgaggcctgcctgaggacagaatgtggggagtgccacttctgcaaggacatgaagaagtttggaggccctggccgcatgaagcagagctgcatcatgaggcagtgcatcgcccctgtgctgccccacacagctgtgtgcctggtgtgtggggaggccggcaaggaggacacagtggaggaggaggagggcaagttcaacctgatgctgatggagtgcagcatctgcaatgagatcatccaccctggctgcctgaagatcaaggagagcgagggcgtggtgaatgatgagctgcccaactgctgggagtgccccaagtgcaaccacgccggcaagacaggcaagcagaagaggggccctggcttcaagtatgccagcaacctgcccggcagcctgctgaaggagcagaagatgaacagagacaacaaggagggccaggagcccgccaagagaagaagtgaatgtgaggaggccccccggcggcggagtgatgagcacagcaagaaggtgcccccagatggcctgctgcggaggaagagtgatgatgtgcacctgaggaagaagaggaaatatgagaagccccaggagctgagcggcaggaagagggccagcagcctgcagaccagccctggcagcagcagccacctgagccccaggcctcccctgggcagcagcctgagcccctggtggaggagcagcctgacctacttccagcagcagctgaagccaggcaaggaggacaagctgttcaggaagaagagaagatcctggaagaatgctgaggacaggatggccctggccaacaagcccctgcggcgcttcaagcaggagccagaagatgagctgcctgaggccccacccaagacccgggagagtgaccacagccgcagcagcagccccacagctggccccagcacagaaggagctgagggccctgaggagaagaagaaggtgaagatgaggaggaagaggcggctgcccaacaaggagctgagccgggagctgagcaaggagctgaaccacgagatccagaggacagagaacagcctggccaatgaaaaccagcagcccatcaagtctgagcctgagagcgagggggaggagcccaagaggcctcctggcatctgtgagcggccccaccgcttcagcaagggcctgaatggcaccccccgggagctgcggcaccagctgggccccagcctgcggagcccccccagggtcatcagccggcccccaccttctgtgagcccccccaagtgcatccagatggagagacatgtgatccggcccccacccatcagccccccaccagacagcctgcccctggatgatggagctgcccacgtgatgcaccgggaggtgtggatggctgtgttctcctacctgagccaccaggacctgtgtgtgtgcatgagggtgtgcaggacctggaaccgctggtgctgtgacaagaggctgtggaccagaattgacctgaaccactgcaagagcatcacccccctgatgctgagcggcatcatccggcggcagcctgtgtccctggacctgtcctggaccaacatcagcaagaagcagctgtcctggctgatcaaccggctgcccggcctgcgggacctggtgctgagcggctgctcctggattgctgtgtctgccctgtgcagcagcagctgccccctgctgcggaccctggatgtgcagtgggtggagggcctgaaggatgcccagatgagggacctgctgagccccccaacagacaacagacctggccagatggacaacagaagcaagctgagaaatattgtggagctgcggctggccggcctggacatcacagatgccagcctgcggctcatcatccgccacatgcccctgctgagcaagctgcacctgagctactgcaaccacgtgacagaccagagcatcaacctgctgacagctgtgggcaccaccacccgggacagcctgacagagatcaacctgagtgactgcaacaaggtgacagaccagtgcctgtccttcttcaagagatgtggcaacatctgccacatcgacctgcgctactgcaagcaggtgaccaaggagggctgtgagcagttcatcgccgagatgtctgtgtctgtgcagtttggccaggtggaggagaagctgctgcagaagctgtcctag

SEQ ID NO: 225057 - DNA, 3981 bp, Artificial Sequence
  derived and/or modified sequence
atggccggcccccagatgggcggcagcgctgaggaccacccccccaggaagagacatgctgctgagaagcagaagaagaagacagtcatctacaccaagtgctttgaatttgaaagtgccacccagaggcccatcgaccggcagagatatgatgaaaatgaagacctgagtgatgtggaggagatcgtgtctgtgcggggcttcagcctggaggagaagctgcggagccagctgtaccagggcgactttgtgcacgccatggagggcaaggacttcaactatgaatatgtgcagcgggaggccctgcgggtgcccctcatcttccgggagaaggatggcctgggcatcaagatgccagaccctgacttcaccgtgagagatgtgaagctgctggtgggcagccggcggctggtggatgtgatggatgtgaacacccagaagggcacagagatgtccatgagccagtttgtgcgctactatgagaccccagaggcccagagggacaagctgtacaacgtcatcagcctggagttcagccacaccaagctggagcacctggtgaagaggcccaccgtggtggacctggtggactgggtggacaacatgtggccccagcacctgaaggagaagcagacagaggccaccaatgccatcgccgagatgaagtaccccaaggtgaagaagtactgcctgatgtctgtgaagggctgcttcacagacttccacatcgactttggaggcacctctgtgtggtaccacgtgttccggggcggcaagatcttctggctgatcccccccaccctgcacaacctggccctgtatgaggagtgggtgctgagcggcaagcagagcgacatcttcctgggggacagagtggagcgctgccagagaattgagctgaagcagggctacaccttcttcatccccagcggctggattcatgctgtgtacacccctgtggacagcctggtgtttggaggcaacatcctgcacagcttcaacgtgcccatgcagctgcgcatctatgaaattgaggacaggaccagggtgcagcccaagttccgctaccccttctactatgagatgtgctggtacgtgctggagcgctacgtgtactgtgtgacccagaggagccacctgacccaggagtaccagcgggagagcatgctgattgatgcccccaggaagcccagcattgatggcttcagcagtgacagctggctggagatggaggaggaggcctgtgaccagcagccccaggaggaggaggagaaggatgaggagggggagggccgggaccgggcccccaagccacccacagatggcagcaccagccccaccagcaccccatctgaggaccaggaggccctgggcaagaagcccaaggccccagccctgcgcttcctgaagaggaccctgagcaatgaaagtgaggagagcgtgaagagcaccaccctggccgtggactaccccaagacccccaccggcagccctgccacagaggtgtctgccaagtggacccacctgacagaatttgagctgaagggcctgaaggccctggtggagaagctggagagcctgcctgagaacaagaagtgtgtgcctgagggcatcgaggacccccaggccctgctggagggcgtgaagaatgtgctgaaggagcacgcagatgatgaccccagcctggccatcactggagtgcctgtggtgacctggcccaagaagacccccaagaacagagctgtgggccggcccaagggcaagctgggccctgccagcgctgtgaagctggccgccaacagaaccacagctggggccaggagaagaaggacccgctgcaggaaatgtgaggcctgcctgaggacagaatgtggggagtgccacttctgcaaggacatgaagaagtttggaggccctggccgcatgaagcagagctgcatcatgaggcagtgcatcgcccctgtgctgccccacacagctgtgtgcctggtgtgtggggaggccggcaaggaggacacagtggaggaggaggagggcaagttcaacctgatgctgatggagtgcagcatctgcaatgagatcatccaccctggctgcctgaagatcaaggagagcgagggcgtggtgaatgatgagctgcccaactgctgggagtgccccaagtgcaaccacgccggcaagacaggcaagcagaagaggggccctggcttcaagtatgccagcaacctgcccggcagcctgctgaaggagcagaagatgaacagagacaacaaggagggccaggagcccgccaagagaagaagtgaatgtgaggaggccccccggcggcggagtgatgagcacagcaagaaggtgcccccagatggcctgctgcggaggaagagtgatgatgtgcacctgaggaagaagaggaaatatgagaagccccaggagctgagcggcaggaagagggccagcagcctgcagaccagccctggcagcagcagccacctgagccccaggcctcccctgggcagcagcctgagcccctggtggaggagcagcctgacctacttccagcagcagcagaggaggtcctggaagaatgctgaggacaggatggccctggccaacaagcccctgcggcgcttcaagcaggagccagaagatgagctgcctgaggccccacccaagacccgggagagtgaccacagccgcagcagcagccccacagctggccccagcacagaaggagctgagggccctgaggagaagaagaaggtgaagatgaggaggaagaggcggctgcccaacaaggagctgagccgggagctgagcaaggagctgaaccacgagatccagaggacagagaacagcctggccaatgaaaaccagcagcccatcaagtctgagcctgagagcgagggggaggagcccaagaggcctcctggcatctgtgagcggccccaccgcttcagcaagggcctgaatggcaccccccgggagctgcggcaccagctgggccccagcctgcggagcccccccagggtcatcagccggcccccaccttctgtgagcccccccaagtgcatccagatggagagacatgtgatccggcccccacccatcagccccccaccagacagcctgcccctggatgatggagctgcccacgtgatgcaccgggaggtgtggatggctgtgttctcctacctgagccaccaggacctgtgtgtgtgcatgagggtgtgcaggacctggaaccgctggtgctgtgacaagaggctgtggaccagaattgacctgaaccactgcaagagcatcacccccctgatgctgagcggcatcatccggcggcagcctgtgtccctggacctgtcctggaccaacatcagcaagaagcagctgtcctggctgatcaaccggctgcccggcctgcgggacctggtgctgagcggctgctcctggattgctgtgtctgccctgtgcagcagcagctgccccctgctgcggaccctggatgtgcagtgggtggagggcctgaaggatgcccagatgagggacctgctgagccccccaacagacaacagacctgcccctggccagatggacaacagaagcaagctgagaaatattgtggagctgcggctggccggcctggacatcacagatgccagcctgcggctcatcatccgccacatgcccctgctgagcaagctgcacctgagctactgcaaccacgtgacagaccagagcatcaacctgctgacagctgtgggcaccaccacccgggacagcctgacagagatcaacctgagtgactgcaacaaggtgacagaccagtgcctgtccttcttcaagagatgtggcaacatctgccacatcgacctgcgctactgcaagcaggtgaccaaggagggctgtgagcagttcatcgccgagatgtctgtgtctgtgcagtttggccaggtggaggagaagctgctgcagaagctgtcctag

SEQ ID NO: 225058 - DNA, 4011 bp, Artificial Sequence
  derived and/or modified sequence
atggccggcccccagatgggcggcagcgccgaggaccaccccccccggaaacgacacgctgcagaaaaacaaaagaaaaagactgtgatctatacaaaatgttttgagttcgagtctgccactcaacggcctattgacaggcagagatacgacgagaacgaggacttgtccgacgttgaagaaattgtgtcagtgaggggatttagcttagaggagaaactacggagccaactctaccagggggacttcgtccatgccatggaagggaaggactttaattatgagtacgtccagagagaggccctcagggtgcctctgatcttccgtgaaaaggatggtctggggatcaagatgcccgatcctgattttacggtgcgggacgtaaagctgctcgtgggcagcagaaggctggtagacgtcatggatgtgaatacacagaaggggactgaaatgtcgatgtcccaatttgtgcgttattatgaaactcctgaagcgcagcgagataagctttacaatgtgatcagtctagagtttagtcacactaaactagagcacttggtgaaaaggcctactgtagtagatctggtcgattgggttgacaatatgtggccacagcacttgaaggaaaaacagactgaagctacaaatgccatcgctgaaatgaaatacccaaaggtgaaaaaatactgtctaatgagcgttaaagggtgcttcaccgatttccatattgacttcggggggacatcagtatggtatcatgtgtttcgcggcggcaaaatcttttggctcatccccccaacactacataacttagccctatatgaggaatgggttctgtccggtaaacagtccgatatctttttaggtgatcgggtggaacggtgtcagcgcattgagctgaaacagggttacacgttcttcatcccttccggctggatccacgcggtatatacccctgtggatagtttggtcttcggagggaatattcttcactctttcaatgttcccatgcaacttcggatttatgaaattgaggaccggacacgggtgcagcctaagtttcgctatcctttctactatgagatgtgctggtacgtgctagagaggtatgtgtattgcgtgacacagcgctcccatctgactcaagagtaccagagagagagcatgctgattgatgcacccaggaaacccagtatagatggcttctcatctgactcatggctcgagatggaagaagaggcttgtgaccaacagccgcaggaggaggaagagaaagacgaggaaggtgaaggccgggatcgagcccctaagccccccaccgacgggtccacatcacccacttcgaccccatctgaggaccaagaggcgcttggcaagaaacccaaagcgcccgctcttaggttcctaaaaaggaccctctctaacgaatctgaagaatctgtcaagagcactactctagccgtcgactatccaaagaccccgacaggtagccccgcaacagaggtctcagctaagtggacacatctcacggaatttgagctcaagggtcttaaggccctggtggagaagctagaatctttgcctgagaataagaagtgcgttcccgaggggatcgaggaccctcaggccctgctcgagggagtgaagaatgtgctgaaagagcacgcagacgacgaccctagcctggcaatcacaggcgtccccgttgtcacttggcctaagaagacacctaaaaatagggctgtgggacggccaaaagggaaacttgggccagcctccgcggttaaactggccgcaaatagaaccaccgccggagctagaagacgacgcaccagatgtcgaaaatgcgaggcctgcttgcgcaccgagtgtggggagtgccacttctgcaaggatatgaaaaaatttggcgggccagggcggatgaaacagtcctgcatcatgcggcagtgcatcgctcccgtgctgccccatactgctgtttgcctcgtgtgtggcgaggcaggaaaggaagatacagttgaggaagaggaagggaagtttaacctgatgctgatggagtgctcaatctgcaatgagatcattcaccctggttgcctgaaaatcaaagagagcgaaggggtggtgaatgacgaattgcccaactgctgggagtgcccgaaatgcaatcacgccggcaagaccggcaaacaaaagcgggggcccggatttaaatatgccagtaaccttcctgggtccctgctcaaagagcagaagatgaatcgagataacaaggaggggcaggaacctgctaagcgtcggtccgagtgcgaggaagcccctcggcgccgttctgatgagcatagcaaaaaggtaccacccgatggattgctgcggcgcaagagcgatgacgtgcacctgaggaaaaagcgcaagtatgagaagccccaggagttatcaggtagaaagagggctagttctctgcagacctctcctggatcaagctcacatttgagcccacgcccccctctgggatcttccctaagtccatggtggagatcttcactcacatacttccagcaacagctgaagcctggtaaggaagataagttatttagaaagaagaggaggagttggaaaaacgcagaggacaggatggcattagctaacaaacccctcagaagattcaagcaggagcctgaggatgagctgcccgaagccccccccaaaacaagggagagtgatcattctaggtcatcttcgccgacggctggtcctagcacggagggtgctgagggtccagaagagaagaaaaaagtgaagatgcgcaggaagcgacgactgcccaataaggagttaagccgggagcttagcaaagagctaaatcatgaaatacagaggactgaaaacagtctggctaatgagaatcagcagcctatcaagagtgaaccggagtctgaaggcgaggagcctaaacgtccgccaggaatctgcgagcgccctcaccggttttccaagggtcttaacggaacaccgcgggagctgcggcaccagctgggcccgtccctccgaagcccccctcgggttatatctcggccaccgccttccgtgtcacccccaaagtgcattcaaatggagcggcacgtgataagaccaccacccatctccccaccgcccgatagtctgcccctggacgacggagcggctcacgtcatgcacagggaagtttggatggccgtgttttcctacctatctcaccaggatctgtgcgtatgtatgagggtctgccgcacatggaatcgctggtgctgcgataagagactgtggacaagaatagatctgaaccactgcaaatctatcaccccgctgatgctcagcggcatcatcagaagacaacccgtgtccctggatttgtcctggacgaacatatctaaaaaacaactaagctggcttattaataggctccctggattgagggacttggtcctcagtggctgtagctggatagcagtgtccgcactctgcagttccagctgccctttgctgaggaccttagatgtgcagtgggtggaaggcctaaaagacgcgcagatgagggatctgctgagtccacctaccgataaccgacctggtcagatggataatcgaagtaaactccgcaacatcgtggagctccgtcttgctggattggacatcacagatgctagtttgcgattaatcattcggcatatgccattgctgtccaagctgcatctctcatactgtaaccacgttacagaccagagtatcaacctcctgactgctgtcggcacaaccacccgagacagcctcacggagatcaatctgagtgactgtaacaaagtgacggatcagtgcctctctttcttcaagcggtgtggcaacatttgtcacatcgatcttcgatactgcaagcaggtcaccaaggagggctgcgagcagttcatcgcagagatgtccgtgagcgtgcagtttggacaggttgaggaaaagttactccagaagttgagctag

SEQ ID NO: 225059 - DNA, 3981 bp, Artificial Sequence
  derived and/or modified sequence
atggccggcccccagatgggcggcagcgccgaggaccaccccccccgaaagcggcacgccgccgaaaagcaaaaaaagaagaccgtgatttacactaagtgttttgagtttgagtcggccacgcagcggcccatcgaccggcagcgctatgatgagaacgaggatctgagtgacgttgaggagattgtttccgtccgtggattctcccttgaggagaaacttaggagccagctgtatcagggggatttcgtacatgctatggaaggcaaagactttaactacgaatacgtgcagagagaagccctgagggtgccccttatatttagggaaaaggatgggctgggcattaaaatgccagatccagatttcaccgtgagagatgttaagttgctagtgggaagtaggcgactcgttgatgtgatggatgtgaacactcaaaagggcacagagatgtcgatgagtcaattcgtccgatattacgagacacccgaggcacaacgcgataaactttacaacgtgatcagcctagagttttcccacaccaagctcgaacacctggttaagcggccaaccgttgtggacttagtggactgggtcgataacatgtggcctcagcacctcaaagaaaagcagacagaggctacaaacgcgattgccgaaatgaagtatcctaaagtgaagaagtactgtctgatgtcggtgaaaggatgctttacagattttcacattgacttcggaggcactagcgtgtggtaccatgtgtttaggggagggaagatattctggttgattccgcctacattgcacaacctggcactgtacgaagaatgggtgctttctggcaaacagagtgacatcttcctgggggacagagtggagcgttgtcaacggatcgagctgaagcagggctacacctttttcatcccgagcggatggatacatgccgtatatactcctgtcgacagtctggtgtttgggggtaacatcctgcacagttttaacgtgcctatgcagctccggatatacgagatagaagatcggactcgggtgcaaccaaagttccgctatcccttctattatgaaatgtgctggtacgttcttgagagatatgtctattgtgttacacagcgctcccatctgacccaggagtatcaaagagagagcatgctgatcgatgcaccaaggaagccctccatagacggcttttccagcgacagttggctggagatggaagaagaggcctgcgaccagcaaccccaggaggaggaagagaaagatgaagagggcgaaggaagggacagagcaccaaaaccccccacagacgggtccactagccccaccagcaccccttctgaggaccaggaggcactgggtaagaagcccaaagcccctgcactgcgctttctgaaacggacactttctaatgaatctgaagagtctgttaagtccaccacactggcggtggactacccaaaaacaccaaccggcagtccagctacagaggtgtccgccaaatggacgcatttaacagagtttgagttgaagggactgaaggcactagtagaaaagttggagagtcttcccgaaaacaagaaatgcgtgccagagggcatcgaagacccacaggcattactggagggggtgaaaaacgtactcaaagagcacgcggatgatgatccatcgctcgcgatcaccggagtccctgtagtaacctggccaaagaagacacccaagaaccgagcagtgggccgacccaagggaaaattgggacccgccagcgctgtgaaactggccgccaaccgcaccacggcaggagcgagacgccgcaggacgagatgtcgaaagtgtgaagcatgcctgcgaacagaatgtggtgagtgtcacttctgtaaagacatgaagaaatttgggggcccagggcgcatgaaacaaagctgcatcatgcgccagtgcatcgctcccgtgcttccccacacggccgtttgccttgtttgcggagaggccgggaaagaggacactgtggaagaagaagagggtaaattcaatctcatgctgatggaatgctctatctgcaatgaaatcattcaccccgggtgtctcaaaattaaagagtccgaaggcgttgtgaatgatgaactacctaactgctgggagtgtcctaagtgcaatcatgcaggcaagaccggcaaacagaagagaggacccggcttcaagtatgcatccaaccttccagggagcctccttaaggagcagaagatgaacagggataacaaggagggccaggagcccgctaaaaggagatccgaatgtgaagaggccccgagacgtcgcagcgacgaacacagcaagaaggtgcctccagatggactacttagaagaaagtcggacgatgtccacctcagaaagaaacgtaagtacgagaagccccaggaattgtccggacgtaaacgtgcttcatccttacagacatcccctggctccagtagtcacctgagtccaaggccccccctcggtagtagcctttcgccatggtggcgaagtagcctaacgtattttcagcagcagcaaaggagatcatggaaaaacgccgaggatcggatggcgctcgcgaacaaacccctgaggagattcaagcaggagccggaagacgaacttcccgaggccccccctaagacaagggagtctgatcactctcgatcaagctctccaacggctggtccttccacagaaggggctgagggacctgaggagaaaaagaaggtgaagatgcgtaggaaaagacgcctgccaaacaaagagttatcacgcgaactgtctaaggagctcaaccacgagatccagcggacagagaattctttggctaatgaaaaccagcagcccattaagtccgagcccgaatctgagggggaagaacccaaacgacctcccggaatctgtgagagaccccaccggttttccaaagggctcaatggtacaccgcgtgagctgcgtcatcagctcgggccctcgctgcgttcacctcccagagtgatctcccgcccacctcccagcgtgagccccccgaagtgcatccagatggagcgccacgtcatccgcccaccaccgatatcacctccccccgattctttacctcttgacgatggagccgctcacgttatgcaccgggaggtgtggatggccgtgttcagttacctcagtcatcaggacctgtgcgtttgcatgcgcgtgtgccgcacctggaatcgctggtgctgtgacaagcgcctgtggactagaatagacttgaaccattgtaagagcattaccccactgatgttatcgggaattattagacgccagcccgtgtccctcgaccttagctggacaaatattagcaagaagcagctttcctggctaattaacaggctccctggcctgcgcgacttggttttgtctgggtgtagctggatcgccgtctctgctctctgcagttcctcttgcccactgctgagaaccttagatgtgcaatgggtggagggactgaaagatgcacagatgagagacctgctgtcaccgcccactgacaaccggccagccccgggccaaatggataacagaagcaagctcagaaatatcgtcgaattaagactggccggactggatatcacagacgccagtttgcggctgatcatcagacacatgcctctgctgtccaagcttcacctgtcatactgcaaccatgtgactgaccagagtattaatctcctgactgctgtgggtactaccaccagggattccctcacagaaatcaacttgtctgactgtaacaaagtgaccgaccaatgtctcagcttcttcaaacggtgcggtaacatctgccacatcgatctacggtactgcaaacaggtaacaaaggagggttgtgaacagttcatagcagagatgagtgtgtctgtccaatttggtcaggtcgaggaaaagctgttacaaaagctctcatag

SEQ ID NO: 225060 - DNA, 4011 bp, Artificial Sequence
  derived and/or modified sequence
atggctggacctcagatgggcggatccgctgaagaccatccgccacgcaagcggcatgccgctgaaaaacagaagaagaagacagtgatttatactaagtgttttgaattcgagtcagctactcaacggcctattgacaggcagaggtatgatgagaacgaggatttatcagatgtggaggaaattgtctctgtgagaggtttcagcctcgaggagaaactgagaagccagctgtaccaaggagacttcgtgcatgctatggaagggaaggacttcaactacgaatatgttcaaagggaagcactgcgagtgccactgattttccgcgaaaaggacggtcttggaatcaaaatgcctgatccggactttactgtcagggacgtgaagctcttggtgggctctcggaggctggtggacgtaatggatgtgaatacccagaaaggaaccgagatgtctatgtcccagttcgttagatactacgaaacccccgaggcccaaagagataagctgtataacgtgatcagccttgagttctcccacaccaagttagaacatctcgtcaagaggcccacagtagtcgacctcgtggattgggtggacaacatgtggcctcaacacctgaaagagaagcagacggaggctactaatgccatcgcagagatgaagtatccaaaggttaagaagtactgcttgatgagtgtgaaggggtgttttacagacttccatattgattttgggggtacgagtgtgtggtaccacgtcttcagagggggtaagatcttctggctgatcccgccaacccttcataacttggccctgtacgaagaatgggtactgtccgggaagcagagcgacattttcctaggagatcgcgtggagcgatgccagcgcatagagctgaaacagggatacactttcttcatcccctcaggatggatacacgctgtatacacgccagtggactctctggtgttcggcggtaatattttgcattctttcaacgtgcccatgcagctgaggatttacgaaatcgaagatcgtactagagttcagcctaagttcaggtacccattctattacgagatgtgctggtacgtgttagagcgttatgtctactgtgttacccaacgctcccacctgacacaggagtaccaacgtgagtctatgctcatcgatgccccacgcaaaccgagcatcgatggcttctcctcagatagctggcttgagatggaggaggaggcttgtgatcagcagccccaggaagaggaggaaaaagacgaagagggtgaaggcagagatagagcccctaagcctcccaccgacgggtcgacctcccccacttccactcccagcgaggatcaggaggctctcgggaagaaacctaaagctcccgctttgagattcttgaagagaacactttctaatgagtctgaagagtctgttaaatccaccactctagcagtggattatccaaagactcccacaggatcgccagccaccgaagtcagtgccaaatggactcatttaactgaattcgagttaaagggcctgaaggctctggtcgagaagctcgagtccctgccagaaaataaaaaatgcgtccccgaagggatcgaggaccctcaggcactgcttgagggagttaagaacgttcttaaagaacacgctgacgatgacccttcactggccattacaggggtccccgtggtcacttggcctaaaaagactccaaaaaatagggccgtgggtcgcccaaagggcaagttgggacccgcatccgctgtcaagctcgcagctaacaggacaacggccggagctagacggcgacgaacacgatgcaggaagtgcgaggcctgcctcaggactgaatgcggcgaatgtcatttctgtaaagacatgaaaaaatttggaggccctggacgaatgaagcagtcatgtattatgaggcagtgtattgccccagtgctcccacataccgccgtatgcctcgtctgcggagaggccggaaaagaagacacagtggaagaggaagaaggcaagttcaatctcatgctgatggagtgctcaatttgtaatgagatcatacacccaggctgcttgaagattaaagagtctgaaggagtcgtgaacgatgagctgcccaactgctgggaatgccccaaatgtaatcacgccggtaagactggaaaacagaaacggggtccgggatttaaatacgcctccaatctgccgggttcactactcaaggaacaaaagatgaatagagataacaaagaaggccaggagccagctaagagacgtagcgagtgcgaggaagcaccacgtaggcgctccgatgaacacagcaaaaaggtgcccccagacggcctgctgcgtcgaaagagcgacgatgtgcatttaaggaaaaagagaaaatatgaaaagccgcaggaactctccggacgaaagcgggcatcctctctgcagacatcccccggatctagtagtcatttaagccctaggcccccactcggaagttccctgagcccttggtggaggagttccctgacgtacttccagcagcagcttaaaccaggtaaagaggacaagctgttcaggaagaaacgtcggtcttggaaaaatgccgaggaccgaatggcacttgccaacaaaccactgcggagattcaaacaggagcctgaggatgagctgcctgaggcccctcctaagacacgggagtcagaccattcaagaagcagctcccctacagcagggccaagtactgagggtgcagaaggcccagaggagaagaaaaaggtgaaaatgaggcgaaagaggagactcccgaacaaggaactctcaagggagctttcaaaagaactcaatcacgaaattcagcggacagaaaactcgctagcaaacgagaatcaacagccgattaagagtgagcccgaatcggaaggtgaggaacctaagcggcctcccggaatctgtgagcggccacacagattctcaaagggactcaatgggacgcctagagaactgaggcaccagctggggccttccctgcgctcacctcccagagttatctctagacccccacccagcgtgtcacccccaaaatgcatccagatggaacgccatgtgatcagaccccctcctatttcaccacccccagacagcctccctctggacgatggggctgctcatgtaatgcatcgtgaagtgtggatggccgttttcagttacctgtcccaccaggacttgtgcgtgtgtatgagggtatgcaggacatggaatcgttggtgctgcgataaaagactttggacaaggatcgaccttaatcactgcaaatctatcacccccctaatgttgagcggcatcatccggaggcagccagtgtccctggacctgagctggactaacatcagcaaaaaacaactcagctggttgataaataggctgcccggtctgagagatctggtgctgagtggctgctcttggatcgccgtgagcgcgctgtgctcatcgagttgccccctccttaggaccttagatgtacagtgggttgagggtctgaaagatgcccaaatgagggatcttctgagcccccctactgacaacagaccaggccaaatggacaacaggagtaaacttcgaaatatcgtggagctccgactggccggattggatatcacagatgccagcctcagattgataattagacacatgcctttacttagcaagttgcatttgtcttactgtaaccatgtgaccgatcagagcattaacctcctcactgccgtgggaactacaactagggattcccttacggagatcaacctttccgattgtaacaaagtaacagaccaatgcttgagtttctttaagagatgcggtaatatctgccatattgatctacgctactgtaaacaagtgactaaagaaggttgcgagcaattcatagccgaaatgtcggtttcagtacagttcggtcaagtggaagagaagctgcttcagaaacttagttag

SEQ ID NO: 225061 - DNA, 3981 bp, Artificial Sequence
  derived and/or modified sequence
atggcgggacctcagatgggtggaagtgctgaagaccacccgcctaggaaacggcatgccgctgaaaagcagaagaaaaagacagtgatttacaccaagtgtttcgagttcgagagtgccacacagcggcctattgacaggcagcgttatgacgaaaatgaagatctgagcgacgtggaggaaatcgtgtccgtgaggggcttttccttagaggaaaaactccgctcccaactgtaccagggcgacttcgttcatgccatggagggaaaggactttaattatgagtatgttcagagagaggcactgcgagtgcccttgatttttcgggaaaaagacggactggggatcaaaatgcccgaccccgattttactgtacgcgatgtgaagcttctggtcggctcccgcaggctcgtggacgtgatggatgtcaatactcagaaagggacagagatgagcatgtcccagtttgtgcgctactacgagacacctgaggctcaaagagataagctatataacgtaatctccctggagttctcacacaccaaattggaacatctggtcaagcgccctaccgttgtggatctggtggactgggtggataacatgtggcctcagcacctaaaagaaaaacagaccgaagcaaccaacgcaatagccgagatgaagtatcccaaagtcaaaaaatactgcttgatgtcggtgaaaggttgctttaccgattttcatatcgatttcggcggaacttcagtgtggtaccacgtcttccgcggtggtaaaatattttggctcatcccacccacccttcacaacctggcactgtacgaggagtgggtgctgagcggcaaacagagtgacatcttcctcggggatcgggtcgaaaggtgccagagaatcgagttgaaacaggggtatactttctttataccgagcggttggatacatgcagtgtacacccctgtggacagcttggtgtttggaggaaacattctccacagctttaacgttcccatgcagttgagaatctacgaaatcgaagatcgaacacgtgtgcagcccaaatttcggtatccattttattatgaaatgtgctggtacgttttggagaggtacgtgtattgtgtgacccagcggagtcaccttacccaggaataccagcgcgagtcaatgctgatcgacgctccgaggaaaccgtctattgacggtttttcctcggatagttggttagagatggaggaagaggcttgtgatcaacagcctcaggaagaggaggagaaggatgaggagggggagggccgagatagagcgcctaaacctccaacagatggatctacatctcccacatccactccgagtgaggaccaggaggcccttgggaagaagccaaaggcgcctgcactacgcttcctaaaaaggacgctgagcaacgaatcagaagagtccgttaaatccactaccctggcagttgactatccaaagaccccaaccggcagcccggctactgaagtttctgcaaagtggacacatttaactgagtttgagcttaaaggcctaaaagcattggttgagaagctggaatccctgcccgaaaataagaaatgtgtgcctgagggcatcgaggacccacaagccctgctggagggggtgaaaaatgtactgaaggaacacgcagacgacgatccttcactggccattaccggcgtgcctgtggtgacttggcctaaaaaaacacctaaaaacagagcagtcggccgacccaagggaaaactggggccagcttcagccgtcaaactggcggcaaatcgtactaccgccggagcccgtagacggaggacccgctgccgaaaatgcgaggcatgtttaagaaccgaatgcggcgagtgccatttctgcaaagacatgaaaaaatttgggggaccaggaaggatgaagcagtcctgtatcatgagacaatgtatagctcctgttctcccccacaccgccgtgtgcttggtatgtggtgaggccggtaaagaggatactgtggaagaggaagaagggaagtttaatttaatgctgatggaatgcagcatctgcaacgaaataatacaccccggttgtcttaaaattaaagagagtgagggagtggtaaacgacgaattacccaactgctgggaatgtccgaaatgcaaccacgctggcaagacagggaagcaaaaaagaggaccaggctttaagtacgcttccaatctgcctgggagtctgttgaaagagcagaaaatgaatagggacaacaaggaaggacaggaacctgccaaacgtcggtctgaatgtgaggaagcgccaagacggaggagtgatgaacactcgaaaaaagtgcctcctgatggtttactcagaaggaagtctgacgacgttcacttgcggaagaaacgcaaatacgagaaaccacaggaactgtctgggcgaaaaagggcaagctccctccagactagtcctggcagttcaagccacctgtcccccaggcccccactggggagctcactaagcccgtggtggagatcctcactcacctactttcagcaacagcagagacgctcctggaaaaatgccgaggaccggatggcgctcgccaacaaaccactgagaaggtttaaacaggagcctgaggacgaacttcccgaggccccaccaaagacccgtgagagcgatcattcccgctcctcctcacccactgctggtccatcaacggagggcgcagaagggcctgaagagaaaaagaaagtgaagatgaggcgcaaacgtagactgcccaataaggaactgtcccgggaactatctaaggagctaaaccacgagattcaaaggaccgagaactccttggctaacgagaaccagcagccaatcaaatccgagccggaaagcgagggggaggagcccaagagaccccctggaatctgcgaaaggccacatcgcttttccaaaggactcaatggcacacccagagagcttcggcatcaactgggcccttccctaaggtcccccccacgggttatctccagaccgccacccagcgtgagtcccccaaagtgcatccaaatggaaagacacgtaattagacctcctcctatctcacctccaccagacagcctccccctggatgatggagcggctcatgtaatgcatcgagaggtgtggatggcggtgttttcttacctgagtcaccaggatctatgtgtttgcatgagggtctgtcgcacttggaacagatggtgctgcgataagcgtctatggactcgtatcgacctgaaccactgcaaatccattacccccttgatgctgtcaggcatcattcggaggcagccggtgtccttggacctcagttggactaatattagtaaaaagcaactatcatggcttataaataggctgccaggcctgcgcgatctggtccttagcggttgttcttggatcgcagtgtcagccctgtgtagctcatcgtgcccacttctcagaacactggacgtgcagtgggtcgagggcctgaaggatgcccaaatgcgcgatctactgagcccaccaaccgataaccgccctgcccctggacaaatggacaaccgcagcaagctgcggaatatagtggagctccgactggccggattagacataacagacgcctcattgcggctgataattaggcatatgcccttgctctccaaacttcacctgtcatattgtaatcatgtgactgatcagtctataaacctccttacagcagtgggcactacaacgcgcgactccctcacagagattaatctgtccgattgtaacaaggtgacagatcaatgcctgagctttttcaaacggtgcggaaatatctgtcatatcgaccttcggtactgtaaacaagtcacgaaggagggatgtgagcagtttattgccgaaatgtccgtgagtgttcagtttggacaggtcgaagaaaaactacttcaaaagctttcctag

SEQ ID NO: 225062 - DNA, 4011 bp, Artificial Sequence
  derived and/or modified sequence
atggccggcccccagatgggcggcagcgccgaggaccacccccccagaaagagacacgccgccgagaagcagaagaagaagaccgtgatctacaccaagtgcttcgagttcgagagcgccacccagagacccatcgacagacagagatacgacgagaacgaggacctgagcgacgtggaggagatcgtgagcgtgagaggcttcagcctggaggagaagctgagaagccagctgtaccagggcgacttcgtgcacgccatggagggcaaggacttcaactacgagtacgtgcagagagaggccctgagagtgcccctgatcttcagagagaaggacggcctgggcatcaagatgcccgaccccgacttcaccgtgagagacgtgaagctgctggtgggcagcagaagactggtggacgtgatggacgtgaacacccagaagggcaccgagatgagcatgagccagttcgtgagatactacgagacccccgaggcccagagagacaagctgtacaacgtgatcagcctggagttcagccacaccaagctggagcacctggtgaagagacccaccgtggtggacctggtggactgggtggacaacatgtggccccagcacctgaaggagaagcagaccgaggccaccaacgccatcgccgagatgaagtaccccaaggtgaagaagtactgcctgatgagcgtgaagggctgcttcaccgacttccacatcgacttcggcggcaccagcgtgtggtaccacgtgttcagaggcggcaagatcttctggctgatcccccccaccctgcacaacctggccctgtacgaggagtgggtgctgagcggcaagcagagcgacatcttcctgggcgacagagtggagagatgccagagaatcgagctgaagcagggctacaccttcttcatccccagcggctggatccacgccgtgtacacccccgtggacagcctggtgttcggcggcaacatcctgcacagcttcaacgtgcccatgcagctgagaatctacgagatcgaggacagaaccagagtgcagcccaagttcagataccccttctactacgagatgtgctggtacgtgctggagagatacgtgtactgcgtgacccagagaagccacctgacccaggagtaccagagagagagcatgctgatcgacgcccccagaaagcccagcatcgacggcttcagcagcgacagctggctggagatggaggaggaggcctgcgaccagcagccccaggaggaggaggagaaggacgaggagggcgagggcagagacagagcccccaagccccccaccgacggcagcaccagccccaccagcacccccagcgaggaccaggaggccctgggcaagaagcccaaggcccccgccctgagattcctgaagagaaccctgagcaacgagagcgaggagagcgtgaagagcaccaccctggccgtggactaccccaagacccccaccggcagccccgccaccgaggtgagcgccaagtggacccacctgaccgagttcgagctgaagggcctgaaggccctggtggagaagctggagagcctgcccgagaacaagaagtgcgtgcccgagggcatcgaggacccccaggccctgctggagggcgtgaagaacgtgctgaaggagcacgccgacgacgaccccagcctggccatcaccggcgtgcccgtggtgacctggcccaagaagacccccaagaacagagccgtgggcagacccaagggcaagctgggccccgccagcgccgtgaagctggccgccaacagaaccaccgccggcgccagaagaagaagaaccagatgcagaaagtgcgaggcctgcctgagaaccgagtgcggcgagtgccacttctgcaaggacatgaagaagttcggcggccccggcagaatgaagcagagctgcatcatgagacagtgcatcgcccccgtgctgccccacaccgccgtgtgcctggtgtgcggcgaggccggcaaggaggacaccgtggaggaggaggagggcaagttcaacctgatgctgatggagtgcagcatctgcaacgagatcatccaccccggctgcctgaagatcaaggagagcgagggcgtggtgaacgacgagctgcccaactgctgggagtgccccaagtgcaaccacgccggcaagaccggcaagcagaagagaggccccggcttcaagtacgccagcaacctgcccggcagcctgctgaaggagcagaagatgaacagagacaacaaggagggccaggagcccgccaagagaagaagcgagtgcgaggaggcccccagaagaagaagcgacgagcacagcaagaaggtgccccccgacggcctgctgagaagaaagagcgacgacgtgcacctgagaaagaagagaaagtacgagaagccccaggagctgagcggcagaaagagagccagcagcctgcagaccagccccggcagcagcagccacctgagccccagaccccccctgggcagcagcctgagcccctggtggagaagcagcctgacctacttccagcagcagctgaagcccggcaaggaggacaagctgttcagaaagaagagaagaagctggaagaacgccgaggacagaatggccctggccaacaagcccctgagaagattcaagcaggagcccgaggacgagctgcccgaggccccccccaagaccagagagagcgaccacagcagaagcagcagccccaccgccggccccagcaccgagggcgccgagggccccgaggagaagaagaaggtgaagatgagaagaaagagaagactgcccaacaaggagctgagcagagagctgagcaaggagctgaaccacgagatccagagaaccgagaacagcctggccaacgagaaccagcagcccatcaagagcgagcccgagagcgagggcgaggagcccaagagaccccccggcatctgcgagagaccccacagattcagcaagggcctgaacggcacccccagagagctgagacaccagctgggccccagcctgagaagcccccccagagtgatcagcagacccccccccagcgtgagcccccccaagtgcatccagatggagagacacgtgatcagacccccccccatcagccccccccccgacagcctgcccctggacgacggcgccgcccacgtgatgcacagagaggtgtggatggccgtgttcagctacctgagccaccaggacctgtgcgtgtgcatgagagtgtgcagaacctggaacagatggtgctgcgacaagagactgtggaccagaatcgacctgaaccactgcaagagcatcacccccctgatgctgagcggcatcatcagaagacagcccgtgagcctggacctgagctggaccaacatcagcaagaagcagctgagctggctgatcaacagactgcccggcctgagagacctggtgctgagcggctgcagctggatcgccgtgagcgccctgtgcagcagcagctgccccctgctgagaaccctggacgtgcagtgggtggagggcctgaaggacgcccagatgagagacctgctgagcccccccaccgacaacagacccggccagatggacaacagaagcaagctgagaaacatcgtggagctgagactggccggcctggacatcaccgacgccagcctgagactgatcatcagacacatgcccctgctgagcaagctgcacctgagctactgcaaccacgtgaccgaccagagcatcaacctgctgaccgccgtgggcaccaccaccagagacagcctgaccgagatcaacctgagcgactgcaacaaggtgaccgaccagtgcctgagcttcttcaagagatgcggcaacatctgccacatcgacctgagatactgcaagcaggtgaccaaggagggctgcgagcagttcatcgccgagatgagcgtgagcgtgcagttcggccaggtggaggagaagctgctgcagaagctgagctag

SEQ ID NO: 225063 - DNA, 3981 bp, Artificial Sequence
  derived and/or modified sequence
atggccggcccccagatgggcggcagcgccgaggaccacccccccagaaagagacacgccgccgagaagcagaagaagaagaccgtgatctacaccaagtgcttcgagttcgagagcgccacccagagacccatcgacagacagagatacgacgagaacgaggacctgagcgacgtggaggagatcgtgagcgtgagaggcttcagcctggaggagaagctgagaagccagctgtaccagggcgacttcgtgcacgccatggagggcaaggacttcaactacgagtacgtgcagagagaggccctgagagtgcccctgatcttcagagagaaggacggcctgggcatcaagatgcccgaccccgacttcaccgtgagagacgtgaagctgctggtgggcagcagaagactggtggacgtgatggacgtgaacacccagaagggcaccgagatgagcatgagccagttcgtgagatactacgagacccccgaggcccagagagacaagctgtacaacgtgatcagcctggagttcagccacaccaagctggagcacctggtgaagagacccaccgtggtggacctggtggactgggtggacaacatgtggccccagcacctgaaggagaagcagaccgaggccaccaacgccatcgccgagatgaagtaccccaaggtgaagaagtactgcctgatgagcgtgaagggctgcttcaccgacttccacatcgacttcggcggcaccagcgtgtggtaccacgtgttcagaggcggcaagatcttctggctgatcccccccaccctgcacaacctggccctgtacgaggagtgggtgctgagcggcaagcagagcgacatcttcctgggcgacagagtggagagatgccagagaatcgagctgaagcagggctacaccttcttcatccccagcggctggatccacgccgtgtacacccccgtggacagcctggtgttcggcggcaacatcctgcacagcttcaacgtgcccatgcagctgagaatctacgagatcgaggacagaaccagagtgcagcccaagttcagataccccttctactacgagatgtgctggtacgtgctggagagatacgtgtactgcgtgacccagagaagccacctgacccaggagtaccagagagagagcatgctgatcgacgcccccagaaagcccagcatcgacggcttcagcagcgacagctggctggagatggaggaggaggcctgcgaccagcagccccaggaggaggaggagaaggacgaggagggcgagggcagagacagagcccccaagccccccaccgacggcagcaccagccccaccagcacccccagcgaggaccaggaggccctgggcaagaagcccaaggcccccgccctgagattcctgaagagaaccctgagcaacgagagcgaggagagcgtgaagagcaccaccctggccgtggactaccccaagacccccaccggcagccccgccaccgaggtgagcgccaagtggacccacctgaccgagttcgagctgaagggcctgaaggccctggtggagaagctggagagcctgcccgagaacaagaagtgcgtgcccgagggcatcgaggacccccaggccctgctggagggcgtgaagaacgtgctgaaggagcacgccgacgacgaccccagcctggccatcaccggcgtgcccgtggtgacctggcccaagaagacccccaagaacagagccgtgggcagacccaagggcaagctgggccccgccagcgccgtgaagctggccgccaacagaaccaccgccggcgccagaagaagaagaaccagatgcagaaagtgcgaggcctgcctgagaaccgagtgcggcgagtgccacttctgcaaggacatgaagaagttcggcggccccggcagaatgaagcagagctgcatcatgagacagtgcatcgcccccgtgctgccccacaccgccgtgtgcctggtgtgcggcgaggccggcaaggaggacaccgtggaggaggaggagggcaagttcaacctgatgctgatggagtgcagcatctgcaacgagatcatccaccccggctgcctgaagatcaaggagagcgagggcgtggtgaacgacgagctgcccaactgctgggagtgccccaagtgcaaccacgccggcaagaccggcaagcagaagagaggccccggcttcaagtacgccagcaacctgcccggcagcctgctgaaggagcagaagatgaacagagacaacaaggagggccaggagcccgccaagagaagaagcgagtgcgaggaggcccccagaagaagaagcgacgagcacagcaagaaggtgccccccgacggcctgctgagaagaaagagcgacgacgtgcacctgagaaagaagagaaagtacgagaagccccaggagctgagcggcagaaagagagccagcagcctgcagaccagccccggcagcagcagccacctgagccccagaccccccctgggcagcagcctgagcccctggtggagaagcagcctgacctacttccagcagcagcagagaagaagctggaagaacgccgaggacagaatggccctggccaacaagcccctgagaagattcaagcaggagcccgaggacgagctgcccgaggccccccccaagaccagagagagcgaccacagcagaagcagcagccccaccgccggccccagcaccgagggcgccgagggccccgaggagaagaagaaggtgaagatgagaagaaagagaagactgcccaacaaggagctgagcagagagctgagcaaggagctgaaccacgagatccagagaaccgagaacagcctggccaacgagaaccagcagcccatcaagagcgagcccgagagcgagggcgaggagcccaagagaccccccggcatctgcgagagaccccacagattcagcaagggcctgaacggcacccccagagagctgagacaccagctgggccccagcctgagaagcccccccagagtgatcagcagacccccccccagcgtgagcccccccaagtgcatccagatggagagacacgtgatcagacccccccccatcagccccccccccgacagcctgcccctggacgacggcgccgcccacgtgatgcacagagaggtgtggatggccgtgttcagctacctgagccaccaggacctgtgcgtgtgcatgagagtgtgcagaacctggaacagatggtgctgcgacaagagactgtggaccagaatcgacctgaaccactgcaagagcatcacccccctgatgctgagcggcatcatcagaagacagcccgtgagcctggacctgagctggaccaacatcagcaagaagcagctgagctggctgatcaacagactgcccggcctgagagacctggtgctgagcggctgcagctggatcgccgtgagcgccctgtgcagcagcagctgccccctgctgagaaccctggacgtgcagtgggtggagggcctgaaggacgcccagatgagagacctgctgagcccccccaccgacaacagacccgcccccggccagatggacaacagaagcaagctgagaaacatcgtggagctgagactggccggcctggacatcaccgacgccagcctgagactgatcatcagacacatgcccctgctgagcaagctgcacctgagctactgcaaccacgtgaccgaccagagcatcaacctgctgaccgccgtgggcaccaccaccagagacagcctgaccgagatcaacctgagcgactgcaacaaggtgaccgaccagtgcctgagcttcttcaagagatgcggcaacatctgccacatcgacctgagatactgcaagcaggtgaccaaggagggctgcgagcagttcatcgccgagatgagcgtgagcgtgcagttcggccaggtggaggagaagctgctgcagaagctgagctag

SEQ ID NO: 225064 - protein, 725 aa, Artificial Sequence
  derived and/or modified sequence
MEPGDAARPGSGRATGAPPPRLLLLPLLLGWGLRVAAAASASSSGAAAEDSSAMEELATEKEAEESHRQDSVSLLTFILLLTLTILTIWLFKHRRVRFLHETGLAMIYGLIVGVILRYGTPATSGRDKSLSCTQEDRAFSTLLVNVSGKFFEYTLKGEISPGKINSVEQNDMLRKVTFDPEVFFNILLPPIIFHAGYSLKKRHFFRNLGSILAYAFLGTAVSCFIIGNLMYGVVKLMKIMGQLSDKFYYTDCLFFGAIISATDPVTVLAIFNELHADVDLYALLFGESVLNDAVAIVLSSSIVAYQPAGLNTHAFDAAAFFKSVGIFLGIFSGSFTMGAVTGVNANVTKFTKLHCFPLLETALFFLMSWSTFLLAEACGFTGVVAVLFCGITQAHYTYNNLSVESRSRTKQLFEVLHFLAENFIFSYMGLALFTFQKHVFSPIFIIGAFVAIFLGRAAHIYPLSFFLNLGRRHKIGWNFQHMMMFSGLRGAMAFALAIRDTASYARQMMFTTTLLIVFFTVWIIGGGTTPMLSWLNIRVGVEEPSEEDQNEHHWQYFRVGVDPDQDPPPNNDSFQVLQGDGPDSARGNRTKQESAWIFRLWYSFDHNYLKPILTHSGPPLTTTLPAWCGLLARCLTSPQVYDNQEPLREEDSDFILTEGDLTLTYGDSTVTANGSSSSHTASTSLEGSRRTKSSSEEVLERDLGMGDQKVSSRGTRLVFPLEDNA

SEQ ID NO: 225065 - DNA, 2178 bp, Artificial Sequence
  derived and/or modified sequence
atggagcccggcgacgccgccagacccggcagcggcagagccaccggcgcccccccccccagactgctgctgctgcccctgctgctgggctggggcctgagagtggccgccgccgccagcgccagcagcagcggcgccgccgccgaggacagcagcgccatggaggagctggccaccgagaaggaggccgaggagagccacagacaggacagcgtgagcctgctgaccttcatcctgctgctgaccctgaccatcctgaccatctggctgttcaagcacagaagagtgagattcctgcacgagaccggcctggccatgatctacggcctgatcgtgggcgtgatcctgagatacggcacccccgccaccagcggcagagacaagagcctgagctgcacccaggaggacagagccttcagcaccctgctggtgaacgtgagcggcaagttcttcgagtacaccctgaagggcgagatcagccccggcaagatcaacagcgtggagcagaacgacatgctgagaaaggtgaccttcgaccccgaggtgttcttcaacatcctgctgccccccatcatcttccacgccggctacagcctgaagaagagacacttcttcagaaacctgggcagcatcctggcctacgccttcctgggcaccgccgtgagctgcttcatcatcggcaacctgatgtacggcgtggtgaagctgatgaagatcatgggccagctgagcgacaagttctactacaccgactgcctgttcttcggcgccatcatcagcgccaccgaccccgtgaccgtgctggccatcttcaacgagctgcacgccgacgtggacctgtacgccctgctgttcggcgagagcgtgctgaacgacgccgtggccatcgtgctgagcagcagcatcgtggcctaccagcccgccggcctgaacacccacgccttcgacgccgccgccttcttcaagagcgtgggcatcttcctgggcatcttcagcggcagcttcaccatgggcgccgtgaccggcgtgaacgccaacgtgaccaagttcaccaagctgcactgcttccccctgctggagaccgccctgttcttcctgatgagctggagcaccttcctgctggccgaggcctgcggcttcaccggcgtggtggccgtgctgttctgcggcatcacccaggcccactacacctacaacaacctgagcgtggagagcagaagcagaaccaagcagctgttcgaggtgctgcacttcctggccgagaacttcatcttcagctacatgggcctggccctgttcaccttccagaagcacgtgttcagccccatcttcatcatcggcgccttcgtggccatcttcctgggcagagccgcccacatctaccccctgagcttcttcctgaacctgggcagaagacacaagatcggctggaacttccagcacatgatgatgttcagcggcctgagaggcgccatggccttcgccctggccatcagagacaccgccagctacgccagacagatgatgttcaccaccaccctgctgatcgtgttcttcaccgtgtggatcatcggcggcggcaccacccccatgctgagctggctgaacatcagagtgggcgtggaggagcccagcgaggaggaccagaacgagcaccactggcagtacttcagagtgggcgtggaccccgaccaggaccccccccccaacaacgacagcttccaggtgctgcagggcgacggccccgacagcgccagaggcaacagaaccaagcaggagagcgcctggatcttcagactgtggtacagcttcgaccacaactacctgaagcccatcctgacccacagcggcccccccctgaccaccaccctgcccgcctggtgcggcctgctggccagatgcctgaccagcccccaggtgtacgacaaccaggagcccctgagagaggaggacagcgacttcatcctgaccgagggcgacctgaccctgacctacggcgacagcaccgtgaccgccaacggcagcagcagcagccacaccgccagcaccagcctggagggcagcagaagaaccaagagcagcagcgaggaggtgctggagagagacctgggcatgggcgaccagaaggtgagcagcagaggcaccagactggtgttccccctggaggacaacgcctag

SEQ ID NO: 225066 - DNA, 2178 bp, Artificial Sequence
  derived and/or modified sequence
atggaacccggcgatgccgcaagaccaggcagcggaagagccacgggggccccacctccgagattgctcctgctgccactgcttctcgggtggggactacgggtggcggctgccgccagcgcgtcttcgagtggtgctgcggcagaggactcctccgctatggaggagctagcaacggagaaggaagccgaggagtctcacagacaggacagcgtatctctgctgacctttatcctccttcttacacttactatcctgactatctggcttttcaaacacaggagggtaagatttttgcacgaaaccggactggcaatgatatacggactcattgtgggggtgatcctgaggtacggaacgccggcgaccagcggtcgcgacaaaagtctgagttgtacccaggaggacagagcattttccactctgcttgtgaatgtgagcgggaagtttttcgagtatactttgaaaggggagatatcgcctggaaagattaattccgtggaacaaaacgacatgctgcgaaaggtgacctttgatcccgaagtgttctttaatatccttctaccaccaattattttccatgctggttattctttgaagaaacgacactttttccggaacctgggcagcatcctcgcttacgcctttctgggaactgccgtctcatgtttcatcattggcaatcttatgtatggggtggttaaactgatgaaaatcatgggccagctgagtgacaaattttactacacagactgtttgttttttggagccattatctctgctactgatccagtgacagttttagcaattttcaacgaactacatgcagatgttgacttgtacgcgttgctgtttggagaaagtgtgctcaacgacgccgttgcaattgttctgtcaagttcgattgtggcttaccagcccgctgggttgaacacacacgcttttgatgccgccgccttttttaagagtgtggggatattcctcggaatcttttctggatcgttcactatgggtgccgtcacgggcgtaaacgctaatgtaaccaagttcaccaagttacattgtttccctctgttggagacagctctattttttttgatgtcctggtccaccttcctcctcgccgaggcctgtggatttacaggggtcgttgcagtgctgttctgcggcattactcaagcacactacacttacaataacctttctgttgaatcacgaagccgcactaaacaactgttcgaagttcttcactttctcgctgagaacttcatattttcctacatgggcctcgctctgtttacctttcagaaacacgttttttctcccatcttcattatcggggctttcgtggcgatcttcttaggccgtgctgctcatatttatccactcagtttctttttgaacctgggcagacgccacaaaatcggctggaacttccagcacatgatgatgttcagcggtctccgtggagctatggccttcgcacttgccatcagggatactgcatcatacgcccggcaaatgatgttcaccaccactttgttgatagtgttttttacagtgtggatcatcggaggcggcacaacaccaatgctctcgtggctcaacattagggttggtgtcgaggaaccatcagaggaggaccagaatgagcaccattggcagtacttcagagtcggtgttgatcccgaccaggatcctccacctaacaatgactccttccaagtccttcagggcgatggcccggactccgcaagaggcaatcgaactaagcaggaatccgcctggatctttcgcctatggtactccttcgatcataattatctaaagcctatacttacccactccggccctccgttgactacgactctgcctgcctggtgtggcttactagccaggtgcttgactagtccgcaagtttatgacaaccaagaacccctccgggaggaagactctgacttcattttgaccgagggcgacctaactctgacttacggtgactcaaccgtgaccgcaaatggcagcagtagctcccacaccgccagcacttccttagaaggaagcaggcgcaccaagtcaagctccgaagaagtactggagagggacctgggcatgggcgaccagaaagtgagtagcaggggcaccaggctggtgtttccgcttgaggataacgcttag

SEQ ID NO: 225067 - DNA, 2178 bp, Artificial Sequence
  derived and/or modified sequence
atggagcctggagatgctgcccggcccggcagcggccgggccactggagcccccccaccccggctgctgctgctgcccctgctgctgggctggggcctgcgggtggccgccgccgccagcgccagcagcagcggggctgctgctgaggacagcagcgccatggaggagctggccacagagaaggaggccgaggagagccaccggcaggacagcgtgtccctgctgaccttcatcctgctgctgaccctgaccatcctgaccatctggctgttcaagcaccggcgggtgcgcttcctgcacgagaccggcctggccatgatctacggcctgattgtgggcgtcatcctgcgctatggcaccccagccaccagcggccgggacaagagcctgagctgcacccaggaggaccgggccttcagcaccctgctggtgaatgtgtctgggaagttctttgagtacaccctgaagggggagatcagccctgggaagatcaacagcgtggagcagaatgacatgctgaggaaggtgacctttgatcctgaggtgttcttcaacatcctgctgccccccatcatcttccacgccggctacagcctgaagaagaggcacttcttcaggaacctgggcagcatcctggcctatgccttcctgggcacagctgtgtcctgcttcatcatcggcaacctgatgtatggagtggtgaagctgatgaagatcatgggccagctgagtgacaagttctactacacagactgcctcttctttggagccatcatcagcgccacagatcctgtgacagtgctggccatcttcaatgagctgcacgcagatgtggacctgtatgccctgctgtttggagagagcgtgctgaatgatgctgtggccatcgtgctgagcagcagcatcgtggcctaccagcctgctggcctgaacacccacgcctttgatgctgctgccttcttcaagtctgtgggcatcttcctgggcatcttcagcggcagcttcaccatgggcgctgtgactggagtgaatgccaacgtgaccaagttcaccaagctgcactgcttccccctgctggagacagccctcttcttcctgatgtcctggagcaccttcctgctggccgaggcctgtggcttcaccggggtggtggccgtgctcttctgtggcatcacccaggcccactacacctacaacaacctgtctgtggagagccgcagcaggaccaagcagctgtttgaggtgctgcacttcctggccgagaacttcatcttctcctacatgggcctggccctcttcaccttccagaagcacgtgttcagccccatcttcatcatcggggcctttgtggccatcttcctgggccgggccgcccacatctaccccctgtccttcttcctgaacctgggcagaagacacaagattggctggaacttccagcacatgatgatgttcagcggcctgcggggggccatggcctttgccctggccatccgggacacagccagctatgcccggcagatgatgttcaccaccaccctgctgattgtgttcttcaccgtgtggatcatcggcggcggcaccacccccatgctgtcctggctgaacatccgggtgggcgtggaggagcccagcgaggaggaccagaatgagcaccactggcagtacttccgggtgggcgtggaccctgaccaggaccccccacccaacaatgacagcttccaggtgctgcagggagatggccctgacagcgcccggggcaacagaaccaagcaggagagcgcctggatcttccggctgtggtacagctttgaccacaactacctgaagcccatcctgacccacagcggcccccccctgaccaccaccctgcctgcctggtgtggcctgctggcccgctgcctgaccagcccccaggtgtatgacaaccaggagcccctgcgggaggaggacagcgacttcatcctgacagaaggagacctgaccctgacctatggagacagcacagtgacagccaacggcagcagcagcagccacacagccagcaccagcctggagggcagcaggaggaccaagagcagcagcgaggaggtgctggagcgggacctgggcatgggagaccagaaggtgagcagccggggcacccggctggtgttccccctggaggacaatgcctag

SEQ ID NO: 225068 - DNA, 2178 bp, Artificial Sequence
  derived and/or modified sequence
atggagcccggcgacgccgcccggcccggcagcggccgggccaccggcgcccccccgcctcgactgctcctgcttcccttactgctcggttgggggctgagagtcgcagcagcagcttccgcatcctcaagtggagctgctgcagaagatagtagcgccatggaggagctggcaaccgagaaggaagctgaagaatcacaccgccaggacagcgtctccctcctgacattcatccttttattaactttgacaatactgacaatttggctcttcaaacatcggcgtgtgcgatttctccacgagaccggcctagccatgatttacggcctcattgtgggggtgattttgaggtatggaacccctgctacctccgggagagacaagagccttagctgcacgcaagaggatcgcgccttctctacactgttagtgaacgtctccggtaagttctttgaatataccctcaagggagagataagtcctggcaagataaattctgtcgagcagaacgatatgctgcggaaagtgacattcgaccccgaggtgttttttaacattctgcttcctcccatcatctttcacgccggctatagccttaaaaagagacattttttccgaaacctggggagtatcctggcctacgcatttttgggcacagctgtctcctgctttattataggaaatcttatgtacggagtagtcaagctgatgaagattatggggcaactgtccgacaaattctactacacagactgtcttttttttggggctatcattagcgcgacggatccagtgaccgtgctcgccattttcaatgagctacacgctgacgtggatctgtacgccctgctgtttggagaaagcgttctaaacgatgcagtagctatagtcctctccagctctatagtggcctatcagccagccggactgaatacgcatgccttcgacgccgcggcattttttaaatctgtaggaatattcctgggaatcttcagcggaagctttacaatgggcgccgtgacaggtgtgaatgccaatgtcaccaaattcaccaagctacattgcttccctctcctggagacggcgttatttttcctgatgtcatggtccacatttttactggcggaggcctgcggattcaccggcgtggtggccgtgcttttttgtgggatcacccaggctcactacacatataataatctcagtgtggaaagtcgctcacggacaaagcagttgttcgaggtactgcatttccttgctgaaaatttcatcttttcttatatgggactggcactttttacttttcagaagcacgtttttagtcccatcttcattataggggcattcgttgccatctttctgggacgtgcggcgcatatttacccactctctttttttctgaaccttggccgtcgccataaaattggttggaacttccagcacatgatgatgttcagtggtttacgcggggcaatggcattcgccctagccattagggatacagctagctacgcaagacagatgatgttcaccaccacattgctgatagtctttttcactgtgtggatcatcggtggcggcaccaccccgatgttgtcctggttgaatattcgcgtgggagtggaggagccatctgaggaggatcagaatgaacaccactggcagtatttccgcgtgggagtcgaccctgaccaggacccgcccccgaataatgatagttttcaggtgttgcagggcgacggaccagactctgctcgcgggaacaggactaagcaggagagtgcatggatattccggctgtggtacagcttcgatcacaattatcttaaaccgatccttacacacagcggcccccctctgacaactacgcttcctgcatggtgtgggctcctcgcccgatgtctgacatcacctcaggtctacgataaccaggagcccttgagggaggaagactctgatttcatcctgactgaaggcgacctgacactcacatatggagacagcaccgtgacagcaaatgggagcagttctagccataccgcctcaaccagcctggagggttctcgccgtactaaatcctcaagtgaggaggtgctggaaagagatctaggcatgggcgaccagaaggtctcctctcgcggaacccgtctggtctttcctctggaagataacgcctag

SEQ ID NO: 225069 - DNA, 2178 bp, Artificial Sequence
  derived and/or modified sequence
atggaacccggagatgctgccagaccaggttctggcagagcaaccggcgctccaccgcctcggctgctcctcctgcccctgttgctcggctggggcctgagggttgcagcagcagcatctgcgtctagtagcggcgcagccgctgaggactcctctgccatggaggaattggctaccgaaaaagaggctgaggagtctcaccggcaggacagcgtgagtttactcacgtttatcctcctgctgaccctgacaatcctgactatctggttgtttaagcaccgcagagttaggtttctgcatgaaacagggttggcgatgatctatggcctgatcgtgggcgtcatccttcgatacggaactcccgcaacaagcgggcgagataagtccctttcttgtacccaggaggacagagcattttccaccttgctggtgaacgtgtctggcaagtttttcgagtacacgttgaagggagaaatttcacccggtaagattaacagtgttgaacaaaatgatatgcttagaaaggtcaccttcgaccccgaggtcttttttaacatcctattaccgcctatcattttccacgccggttactcactcaagaagcgacacttctttaggaatctgggatccattctggcctacgcgtttctgggtaccgcagtgtcttgttttattatcggaaacctcatgtacggagtggtgaaattgatgaagattatgggacagctttctgataaattctactacacagattgtctcttctttggggcaatcatctccgcgaccgatcctgtgaccgtgttagctatctttaatgaactccatgcagatgtggacctgtatgcccttctgtttggcgaaagcgtgctcaacgacgcagtcgcgattgtgcttagctctagtatcgtggcctaccagcctgccggactgaacactcacgcctttgacgctgcagccttctttaaatccgtgggcatatttctgggcattttctccggatcttttacaatgggcgctgtgactggcgtgaatgctaacgtgaccaagtttacaaagctccattgcttcccgctgttggagaccgccctgttctttcttatgtcatggagtactttcctcttggccgaggcttgtggattcacgggagttgtcgctgtcctgttttgtggaattacccaggctcattacacatacaataacctgtctgtggagtcccgcagtcggaccaaacagctgttcgaggtgctgcacttcctcgcagagaatttcatttttagctatatgggactggccctttttacatttcaaaagcacgtcttttccccaatcttcattattggcgcttttgtggccatatttctcggcagagctgcacacatctatccgttgagcttcttcttaaacctgggaagacgccacaagataggctggaattttcaacatatgatgatgtttagtgggcttcggggtgctatggcattcgctctcgccattcgcgatacagcctcatacgcaagacaaatgatgtttacaacaactctgctgattgtgtttttcactgtttggattatagggggagggacaactccaatgctgtcctggttgaatatacgggtcggggtagaagagccaagcgaggaggaccagaatgagcatcactggcaatattttcgcgttggcgtggaccctgaccaggacccacccccaaacaatgattcattccaggtgctccagggtgacgggcctgacagcgcccgaggcaataggaccaaacaagaaagtgcatggatttttcgcctgtggtatagcttcgaccataactatctgaagccaatcctgactcattccggaccgccactgacaactactctccctgcctggtgtggactgttagctagatgcctcacctcccctcaggtgtatgacaaccaggaacctttgcgggaagaggactcggatttcatcctgactgaaggagacttgaccctgacatacggcgacagcactgtgacagctaacgggtcaagctcctctcacactgcctccacttcactcgagggttctcgcagaaccaaaagctctagtgaagaggtgttggagcgcgacctaggaatgggcgatcagaaagtgtcttcacgcggaacacggctggtgttcccgctggaagacaatgcttag

SEQ ID NO: 225070 - DNA, 3838 bp, Artificial Sequence
  derived and/or modified sequence
gaggaggcgcggggggccccgggaccatggagcctggtgacgcggcgcgccctggctcgggtcgggctaccggggcgccgccgccgcggctgctgctgctgccgctgctgctgggttgggggctgcgagtcgcggccgcggcctcggcctcctcctctggggcggcggcggaggacagcagcgccatggaggagctcgctactgagaaggaggcggaggagagccaccggcaagacagcgtgagcctgctcaccttcatcctgctgctcacgctcaccatcctcaccatctggctcttcaagcaccgccgggtgcgctttctgcacgagaccgggctggccatgatctatgggctcatcgttggggtgatcctgaggtatggtacccctgctaccagtggccgtgacaaatcactcagctgcactcaggaagacagggccttcagtaccttattagtgaatgtcagcggaaagttcttcgaatacactctgaaaggagaaatcagtcctggcaagatcaacagcgtagagcagaatgatatgctacggaaggtaacattcgatccagaagtatttttcaacattcttctgcctccaattatttttcatgctggatacagcttaaagaagagacactttttcagaaatcttggatctatactggcctatgccttcttggggactgctgtttcatgcttcattattggaaatctcatgtatggtgtggtgaagctcatgaagattatgggacagctctcagataaattttactacacagattgtctcttttttggagcaatcatctctgccactgacccagtgactgtgctggcgatatttaatgaattgcatgcagacgtggatctttacgcacttctttttggagagagcgtcctaaatgatgctgttgccattgtactgtcctcgtctattgttgcctaccagccagcgggactgaacactcacgcctttgatgctgctgccttttttaagtcagttggcatttttctaggtatatttagtggctcttttaccatgggagctgtgactggtgttaatgccaacgtgactaagtttaccaaactgcactgcttccccctgctggagacggcgctgttcttcctcatgtcctggagcacgtttctcttggcagaagcctgcggatttacaggtgttgtagctgtccttttctgtggaatcacacaagctcattacacctacaacaatctgtcggtggaatcaagaagtcgaaccaagcagctctttgaggtgttacatttcctggcagagaacttcatcttctcctacatgggcctggcactgtttaccttccagaagcacgttttcagccccattttcatcatcggagcttttgttgccatcttcctgggcagagccgcgcacatctacccgctctccttcttcctcaacttgggcagaaggcataagattggctggaattttcaacacatgatgatgttttcaggcctcaggggagcaatggcatttgcgttggccatccgtgacacggcatcctatgctcgccagatgatgttcacgaccacccttctcattgtgttcttcactgtctggatcattggaggaggcacgacacccatgttgtcatggcttaacatcagagttggcgtcgaggagccctccgaagaggaccagaatgaacaccactggcagtacttcagagttggtgttgaccccgatcaagacccaccacccaacaacgacagctttcaagtcttacaaggggacggcccagattctgccagaggaaaccggacaaaacaggagagcgcatggatattcaggctgtggtacagctttgatcacaattacctgaagcccatcctcacacacagtggtcccccactaaccaccacgctccccgcctggtgtggcttactagctcgatgtctgaccagtccccaggtgtacgataaccaagagccactgagagaggaagactctgatttcatcctgaccgaaggcgacctgacattgacctacggggacagcacagtgactgcaaatggctcctcaagttcgcacaccgcctccacgagtctggagggcagccggagaacgaagagcagctcggaggaagtgctggagcgagacctgggaatgggagaccagaaggtttcgagccggggcacccgcctagtgtttcccctggaagataatgcttgactttccccccaagccctggcgcgatggggtaggctcccgatggggtgaggacagctgcaagccctagtgttgttggaggtggggcagtgactagattgaactaactcttctattttattggggtctgaagctattgtaacacttaaaatttaactcacaatgcagatggtgaggcaaaagtgtctctaaattcagacaaacgtagacctattcccacttttttcacatagtagtgcgctgtttcagagttaaacaaacaaaaaaaaatagcatgctttaatggtctcctaattcattcacctgcagtatctgaacaaggcgaggcaggtgctgggtggggggattcctcccatgagaggctgcatctcagtacacagcagtgcaagtcaagctgaccatagaattatcaagttaaagagaaggaaggcaattgagatcggaactccaaggattatgggaaacttggtgttaaatgggacagaaaacatgaaaaagcaatttggaggctctggcaacgaagtctgcttgactgcaacctcatatcaggattcctgactttatgctgcctgtgttttttctagactgaagatttgaaaatacatccacgaacatttcaacatggaacgaagaattatagttccttctctggctatatccataaagaagtagttatgaaatgtttaaaaccaaaggcaaatagtgttatactcttattttttgattaatctgaggaaaggaggtatttagaaactgatgatggtatcactgcaaaaagcattcaactttttttttttgttgagatggtgtttcactctgtcacccaggctggagtgcagtggcgtggtcttggctcactgcaacctctgcctcacgggttcaagtgattctcctgcctcagcctcctgattagctgggattacaggtgcccaccaccatgcccagctaattttttgtatttttggtagagatggggtttcaccatgttgcccaggctggtgtcaaactcctgacctcgtgatccacctcccttggcctcccaaagtgctgggattacaggtgtgagccactgcacctggccagcattcaacttttgagggctaccatatgagctgacagcctagggaaataatcactaggactgaagtatctactctgggtttagaaataacaccaaattttgtaggatgctattatctgggaaagggaaggcagcaagaaacctacaaggcaccaggctagaattcagagggaaagaaatctcaatgcaaaaaaattactgcaaagaaatacaagatagtagtctcaagactaggtagaattccaaactttgagccgacgaatgcatgagatttcagtggccacctgaggaatcagagggcaaacaatggaacattaagtattttcagcccactagaaagctctgtcttctataagcttaagagtccgagtgtctttacaccactgagtgccatgcagagaagggtcattttccttgtatctggggaggctgctgcaccagcttaacatgtgggtgtgatttgaaagttaggttttcagtttggattctttctggatgagctgttctgtctgcccacacctgtagtgctgaaatacagaaagacctctcgggaaaa

SEQ ID NO: 225071 - protein, 501 aa, Artificial Sequence
  derived and/or modified sequence
MFTLPQKDFRAPTTCLGPTCMQDLGSSHGEDLEGECSRKLDQKLPELRGVGDPAMISSDTSYLSSRGRMIKWFWDSAEEGYRTYHMDEYDEDKNPSGIINLGTSENKLCFDLLSWRLSQRDMQRVEPSLLQYADWRGHLFLREEVAKFLSFYCKSPVPLRPENVVVLNGGASLFSALATVLCEAGEAFLIPTPYYGAITQHVCLYGNIRLAYVYLDSEVTGLDTRPFQLTVEKLEMALREAHSEGVKVKGLILISPQNPLGDVYSPEELQEYLVFAKRHRLHVIVDEVYMLSVFEKSVGYRSVLSLERLPDPQRTHVMWATSKDFGMSGLRFGTLYTENQDVATAVASLCRYHGLSGLVQYQMAQLLRDRDWINQVYLPENHARLKAAHTYVSEELRALGIPFLSRGAGFFIWVDLRKYLPKGTFEEEMLLWRRFLDNKVLLSFGKAFECKEPGWFRFVFSDQVHRLCLGMQRVQQVLAGKSQVAEDPRPSQSQEPSDQRR

SEQ ID NO: 225072 - protein, 158 aa, Artificial Sequence
  derived and/or modified sequence
MFTLPQKDFRAPTTCLGPTCMQDLGSSHGEDLEGECSRKLDQKLPELRGVGDPAMISSDTSYLSSRGRMIKWFWDSAEEGYRTYHMDEYDEDKNPSGIINLGTSENKLCFDLLSWRPPGGSGQVPVFLLQEPSTPQTRECGCPEWWCLALLCSGHGAV

SEQ ID NO: 225073 - protein, 139 aa, Artificial Sequence
  derived and/or modified sequence
MFTLPQKDFRAPTTCLGPTCMQDLGSSHGEDLEGECSRKLDQKLPELRGVGDPAMISSDTSYLSSRGRMIKWFWDSAEEGYRTYHMDEYDEDKNPSGIINLGTSENKLCFDLLSWRLSQRDMQRVEPSLLQYADWRGHL

SEQ ID NO: 225074 - protein, 77 aa, Artificial Sequence
  derived and/or modified sequence
MFTLPQKDFRAPTTCLGPTCMQDLGSSHGEDLEGECSRKLDQKLPELRGVGDPAMISSDTSYLSSRGRMIKWFWDSA

SEQ ID NO: 225075 - DNA, 1506 bp, Artificial Sequence
  derived and/or modified sequence
atgtttactctgccgcagaaggattttcgtgcaccgaccacttgcctggggcccacctgtatgcaggacctgggttccagccacggcgaagacctcgagggtgagtgctctagaaagctggaccagaaattacctgagctgagaggggtgggtgatccagctatgatttcaagtgatacctcttatctgagctctcgcggccggatgatcaaatggttctgggattccgcagaggaaggttataggacctaccacatggacgagtacgacgaggataagaacccatctggaattataaaccttgggaccagcgagaacaagctctgttttgacctgctgagctggaggctcagccagcgggatatgcaaagagtcgaacccagcctgctgcagtacgctgactggagggggcacttgttcttgcgcgaggaagtggctaaattcctgagtttttactgtaagtctcccgtacctctacgtccagagaatgtggtggtgctgaacgggggcgcatctttattttcagccctggctaccgtgctttgtgaggccggggaagccttcctcattcccacgccgtactatggcgctatcactcaacatgtatgtttgtacgggaatatacgcctggcgtatgtgtacctcgacagcgaggtgaccggcctcgatacaagaccattccagctgacagtagagaaattagagatggcactcagggaagctcatagtgagggggtgaaggtgaaaggcctcattctgatctccccgcagaatccactgggcgatgtttactcccccgaagagctacaggagtatcttgtttttgccaagcggcataggttgcatgtgattgttgatgaggtctacatgctgtctgtcttcgaaaaaagtgttggttaccggagcgtgctcagtctggaaaggctgcctgatccccaacgaacacatgtgatgtgggcaacaagcaaggatttcggaatgtcagggcttaggtttggaactctatatacagagaaccaggatgttgctactgctgtcgcaagcttgtgtcgctaccatggcttgagcggcctggtgcagtaccagatggctcagttacttcgggatcgcgattggatcaaccaggtgtatctgcccgagaatcacgcacgacttaaggccgcgcacacctatgtctccgaagagctgcgcgccctgggtatcccttttctgagccggggagctggattctttatatgggtagacctacggaagtacctgcccaaaggtacattcgaagaggagatgcttctgtggaggcggttcctggataacaaggtgctgttgagctttggcaaagccttcgaatgcaaagagcccggttggttccgattcgtgtttagcgaccaggttcatcgcctgtgtctgggaatgcagagagtccaacaagtgttggctggtaagtcacaagtggctgaggatccacgaccttcccagtctcaggagccaagtgaccagcggaggtag

SEQ ID NO: 225076 - DNA, 477 bp, Artificial Sequence
  derived and/or modified sequence
atgtttacccttccccagaaagattttcgggcgccgaccacctgtcttggccctacctgcatgcaggatctcgggagcagtcatggagaagatttggagggagaatgtagtagaaagctggatcagaaactgcccgagcttcggggtgtgggcgaccctgcaatgatctcctctgacacttcataccttagcagcagaggacgaatgatcaagtggttctgggatagtgcggaggaagggtatcgtacatatcacatggacgaatatgacgaggacaaaaacccctctggcattatcaatctggggacctctgaaaacaaactttgttttgaccttcttagctggagaccacccggtggaagtggccaagttcctgtctttctgctgcaagaacccagcacaccgcagacaagggagtgcgggtgtcctgaatggtggtgcctggccctactctgttcagggcacggggccgtttag

SEQ ID NO: 225077 - DNA, 420 bp, Artificial Sequence
  derived and/or modified sequence
atgtttactttaccacaaaaggacttccgggcccctaccacctgcctcggccctacgtgcatgcaggatcttggtagttcgcatggagaggaccttgaaggggaatgttcccgtaagctcgatcagaagctgcctgaactgcgaggcgtcggagatcctgccatgatctcctctgatacaagttacttatcgtcacgggggaggatgatcaagtggttttgggattcagcagaggagggatacagaacataccatatggacgagtatgacgaagataagaacccgagcggcattattaacctgggcacatccgaaaataaactctgttttgacctcttatcctggcggctcagccaaagggatatgcagagggttgaaccctctctgctgcagtatgcagattggcgcgggcatctgtag

SEQ ID NO: 225078 - DNA, 234 bp, Artificial Sequence
  derived and/or modified sequence
atgttcacactgccccaaaaagattttcgagcccctactacatgtctaggaccaacttgcatgcaagacttggggagttctcatggcgaagacctagagggcgaatgctctcgcaagctcgaccagaaactgccagagcttagaggcgtgggggatcctgcgatgatttcgtccgacacatcttatctgtcatctagaggccgaatgatcaaatggttttgggatagcgcctag

SEQ ID NO: 225079 - DNA, 1506 bp, Artificial Sequence
  derived and/or modified sequence
atgttcaccctgccccagaaggacttccgggcccccaccacctgcctgggccccacctgcatgcaggacctgggcagcagccacggggaggacctggagggagaatgttccaggaagctggaccagaagctgcctgagctgcggggcgtgggggaccctgccatgatcagcagtgacaccagctacctgagcagccggggccgcatgatcaagtggttctgggacagcgctgaggagggctaccgcacctaccacatggatgaatatgatgaggacaagaaccccagcggcatcatcaacctgggcaccagcgagaacaagctgtgctttgacctgctgtcctggaggctgagccagagggacatgcagagggtggagcccagcctgctgcagtatgctgactggaggggccacctgttcctgcgggaggaggtggccaagttcctgtccttctactgcaagagccctgtgcccctgcggccagaaaatgtggtggtgctgaatggaggagccagcctcttcagcgccctggccaccgtgctgtgtgaggccggggaggccttcctgatccccaccccctactatggagccatcacccagcacgtgtgcctgtatggcaacatccggctggcctacgtgtacctggacagcgaggtgacaggcctggacacccggcccttccagctgactgtggagaagctggagatggccctgcgggaggcccacagcgagggcgtgaaggtgaagggcctcatcctgatcagcccccagaaccccctgggagatgtgtacagccctgaggagctgcaggagtacctggtgtttgccaagaggcaccggctgcacgtgattgtggatgaggtgtacatgctgtctgtgtttgagaagtctgtgggctacagatctgtgctgagcctggagcggctgcctgacccccagaggacccacgtgatgtgggccaccagcaaggactttggcatgagcggcctgcgcttcggcaccctgtacacagagaaccaggatgtggccacagctgtggccagcctgtgccgctaccacggcctgagcggcctggtgcagtaccagatggcccagctgctgcgggaccgggactggatcaaccaggtgtacctgcctgagaaccacgcccggctgaaggccgcccacacctacgtgtctgaggagctgcgggccctgggcatccccttcctgagcagaggagctggcttcttcatctgggtggacctgaggaagtacctgcccaagggcacctttgaggaggagatgctgctgtggaggcgcttcctggacaacaaggtgctgctgagctttgggaaggcctttgagtgcaaggagcccggctggttccgctttgtgttcagtgaccaggtgcaccggctgtgcctgggcatgcagagggtgcagcaggtgctggccggcaagagccaggtggccgaggacccccggcccagccagagccaggagcccagcgaccagaggaggtag

SEQ ID NO: 225080 - DNA, 477 bp, Artificial Sequence
  derived and/or modified sequence
atgttcaccctgccccagaaggacttccgggcccccaccacctgcctgggccccacctgcatgcaggacctgggcagcagccacggggaggacctggagggagaatgttccaggaagctggaccagaagctgcctgagctgcggggcgtgggggaccctgccatgatcagcagtgacaccagctacctgagcagccggggccgcatgatcaagtggttctgggacagcgctgaggagggctaccgcacctaccacatggatgaatatgatgaggacaagaaccccagcggcatcatcaacctgggcaccagcgagaacaagctgtgctttgacctgctgtcctggaggcctcctgggggcagcggccaggtgcctgtgttcctgctgcaggagcccagcaccccccagaccagagaatgtggctgcccagagtggtggtgcctggccctgctgtgcagcggccatggagctgtgtag

SEQ ID NO: 225081 - DNA, 420 bp, Artificial Sequence
  derived and/or modified sequence
atgttcaccctgccccagaaggacttccgggcccccaccacctgcctgggccccacctgcatgcaggacctgggcagcagccacggggaggacctggagggagaatgttccaggaagctggaccagaagctgcctgagctgcggggcgtgggggaccctgccatgatcagcagtgacaccagctacctgagcagccggggccgcatgatcaagtggttctgggacagcgctgaggagggctaccgcacctaccacatggatgaatatgatgaggacaagaaccccagcggcatcatcaacctgggcaccagcgagaacaagctgtgctttgacctgctgtcctggaggctgagccagagggacatgcagagggtggagcccagcctgctgcagtatgctgactggaggggccacctgtag

SEQ ID NO: 225082 - DNA, 234 bp, Artificial Sequence
  derived and/or modified sequence
atgttcaccctgccccagaaggacttccgggcccccaccacctgcctgggccccacctgcatgcaggacctgggcagcagccacggggaggacctggagggagaatgttccaggaagctggaccagaagctgcctgagctgcggggcgtgggggaccctgccatgatcagcagtgacaccagctacctgagcagccggggccgcatgatcaagtggttctgggacagcgcctag

SEQ ID NO: 225083 - DNA, 1506 bp, Artificial Sequence
  derived and/or modified sequence
atgttcaccctgccccagaaggacttccgggcccccaccacctgccttggaccaacctgtatgcaagacttagggtcctctcacggggaggatttggagggagagtgttcgcggaagctggatcaaaagttgcccgagttgaggggggtgggagaccctgcaatgatatcgtccgacactagctacttatcatcaaggggaagaatgatcaagtggttttgggattcagccgaggagggctatagaacataccacatggatgagtacgatgaggataagaacccatctgggattatcaatcttggtacaagtgaaaacaaactgtgctttgacttactgtcttggcggctgtcccagagggacatgcagcgagtggaacctagcctgcttcagtacgcagattggagggggcatctgttcctgagggaggaagttgcgaagttcctttcattctattgcaaaagccccgtacccctacgacccgagaacgtggtggtcctaaatggcggggcgtcactgttctctgccctggcgacagtgctgtgtgaggccggcgaagcatttctgatcccgaccccctactacggagctataacccagcatgtgtgtctctacggcaatataagactggcatatgtgtatctcgacagcgaggtgacagggcttgatacaaggccatttcagcttacagttgagaagctagagatggcgcttcgcgaggctcacagtgagggcgtgaaggttaagggcttaatattaattagcccccagaaccccttgggggacgtgtactctcctgaggagcttcaggagtatttagtgttcgcgaagaggcaccgtctacacgtgatcgttgacgaggtttatatgcttagtgtgtttgaaaaatcagttgggtataggtccgtgctcagcttggagcgcctcccagacccccaacgaacacatgtgatgtgggccaccagcaaagatttcgggatgagcggtttacggtttgggaccctctacacagagaatcaggacgttgccactgcggtcgccagcttatgcagataccacggtctgagcgggctggtgcagtatcagatggcacagctgcttcgggacagggactggattaatcaggtatatctacctgaaaatcacgcccgcttgaaagctgcccacacgtacgtgtctgaggagctgcgagcgcttggcattcctttcctcagccgaggcgccggattttttatatgggtagacctgcgcaagtacctgcctaagggcacctttgaagaggagatgttgctgtggagaagatttctggataataaagtattactgtcctttggcaaggcattcgagtgtaaagagcctggatggttcaggttcgttttttctgatcaggtgcaccgactatgtctcggaatgcagcgcgtccaacaggtcctggccggcaaaagccaggtggcagaggaccctcggccctctcagagccaggagcctagcgatcagaggcgttag

SEQ ID NO: 225084 - DNA, 477 bp, Artificial Sequence
  derived and/or modified sequence
atgttcaccctgccccagaaggacttccgggcccccaccacctgcctcggacccacatgcatgcaagacctggggtcatcacacggcgaggacctcgaaggtgagtgctctcgcaagctggatcagaaattgcctgagctgaggggcgtgggagatcctgccatgatatcctcggatacatcgtatctctcctctcggggtcggatgatcaaatggttctgggactccgccgaagaaggctatcggacttatcatatggacgagtacgatgaagataagaaccccagcggaatcataaacctagggacttctgagaacaagctgtgtttcgatctgctgtcttggcgccccccgggcggaagcggccaggtgcccgttttcctgttacaagagccttccaccccccagactagagagtgcggatgccccgagtggtggtgtctagcactgttgtgttccggacatggcgccgtgtag

SEQ ID NO: 225085 - DNA, 420 bp, Artificial Sequence
  derived and/or modified sequence
atgttcaccctgccccagaaggacttccgggcccccaccacctgcttggggcccacttgcatgcaggacttagggtcttcccatggtgaagatttggaaggggagtgctcacgtaaactggatcagaaactgcccgaactgcgaggggtgggagatcccgccatgatttcatccgacacatcctacctgagttctcgcggtagaatgattaagtggttctgggattctgcggaggagggctaccgcacatatcacatggacgaatacgatgaggacaaaaacccttcaggaattataaatttggggacatccgaaaacaagctctgcttcgatctgctttcctggcggttaagccagagagatatgcagcgcgtggagccctctttactccagtacgccgactggcggggacacctgtag

SEQ ID NO: 225086 - DNA, 234 bp, Artificial Sequence
  derived and/or modified sequence
atgttcaccctgccccagaaggacttccgggcccccaccacctgcctgggaccaacctgtatgcaagatctcggcagcagccacggggaggatctcgaaggtgaatgcagtaggaaactggaccagaaactgcccgagctcagaggggtgggtgaccccgcaatgatcagttcagacacctcatacctgagttcccggggacgcatgatcaaatggttctgggactcggcatag

SEQ ID NO: 225087 - DNA, 1506 bp, Artificial Sequence
  derived and/or modified sequence
atgttcacactcccacagaaagattttcgggctcccactacttgcctggggcctacctgtatgcaggacttgggaagttcacatggcgaggacctcgagggcgaatgtagtagaaagctagaccagaaactgcccgagctccggggtgtcggtgaccccgcaatgatcagctcagacacgagttatttgtcctctagagggagaatgattaaatggttctgggactctgcggaggagggttaccggacttaccacatggatgagtacgacgaagacaaaaatccgtcaggcatcattaaccttggcacatcagaaaataagctatgcttcgacttattgtcttggcgcctctcccagagagatatgcaacgcgtggaacccagcctcctgcagtatgcagattggagggggcatctgttccttcgggaggaagtggcgaagtttctgtcattctactgcaagtcgccagtccccttacggcctgaaaacgtggtggttctgaatggcggagcctcgctgttcagtgcactggccacagtgctgtgtgaagcaggagaggcattcctgataccgactccctattacggcgctattacacagcatgtatgtttgtacggaaacattagattggcgtatgtctacctggatagcgaagtaacaggtctggatacacgccctttccagctgactgtcgagaagctggagatggcactgcgcgaggcacatagtgaaggcgttaaggtgaagggccttatcctgatttcgccccaaaacccactcggtgacgtgtacagtccagaagagctgcaggaatacttggtgttcgccaagcggcacagattgcacgtgattgtcgacgaggtgtacatgctgagcgtgttcgagaagagcgtggggtatagaagtgtgctctcgttggaaaggttgccagacccccagaggacccacgtcatgtgggcaacctccaaggattttggtatgtctggtctgaggtttggaacactttacactgagaatcaggatgtggccaccgccgtagcctctctgtgccgctatcacggactgagcgggctggtccagtaccagatggctcagctgctgcgggaccgggactggattaatcaggtatatcttcctgagaatcacgccagattaaaagcagcccacacctatgtttccgaggaactccgcgcattaggtattccatttctgtctcgcggagctggcttcttcatctgggtagacctgcgaaaatacctccctaaaggtacgttcgaagaagaaatgctgctgtggagaagatttctcgacaacaaggtactgctgtccttcggcaaagctttcgagtgtaaagagccagggtggttccgcttcgtgttcagcgaccaagtccaccggctgtgcctcggaatgcaacgcgtccagcaggtgcttgctggtaaatctcaggtggccgaggatccccgtcccagtcaaagtcaggagccctctgaccagcgcagatag

SEQ ID NO: 225088 - DNA, 477 bp, Artificial Sequence
  derived and/or modified sequence
atgttcacactccctcagaaggattttcgcgcaccgaccacctgtctgggccctacatgtatgcaggatcttggctcaagccacggcgaggatctggagggcgagtgcagcagaaaactggaccagaagctcccagagctcagaggggtcggcgaccccgcaatgatcagttcagatacctcatacctcagcagcaggggacgaatgatcaaatggttctgggactcagcggaagaaggttaccgcacctatcacatggacgaatacgatgaggacaaaaatcccagtgggataatcaaccttggcacttccgaaaataagctgtgctttgacctgttgtcctggaggcctcccggagggtcaggccaagtgcccgtcttcctccttcaggagccctctacaccgcagacacgcgaatgcgggtgtccagagtggtggtgtctggcacttctgtgctctggacacggtgccgtctag

SEQ ID NO: 225089 - DNA, 420 bp, Artificial Sequence
  derived and/or modified sequence
atgtttacactccctcagaaagattttcgggctccgactacatgtctcggtcctacgtgcatgcaagatttggggtcaagtcacggcgaggaccttgaaggggagtgcagcaggaaactcgatcaaaaactgcctgagttgaggggtgtgggcgaccctgcaatgatctcatcagatacaagttatctgtcaagccggggtaggatgatcaagtggttttgggactctgctgaggagggctataggacctaccacatggacgaatatgatgaggacaagaatccaagcgggatcatcaacctcgggaccagcgaaaacaaactgtgttttgacctcctctcctggcgcctgtcacaaagggatatgcagcgggttgaaccctctctactgcaatatgccgattggagaggacacttgtag

SEQ ID NO: 225090 - DNA, 234 bp, Artificial Sequence
  derived and/or modified sequence
atgtttacgctaccccagaaagatttcagagcccctaccacgtgtctcggtcccacatgtatgcaagacttgggctctagccacggtgaggatctggagggggagtgcagcagaaagctggatcagaaactgccggagctaaggggggttggcgatccagcgatgatctcatccgatacttcctacctgtcttccagaggaaggatgattaagtggttctgggactccgcatag

SEQ ID NO: 225091 - DNA, 563 bp, Artificial Sequence
  derived and/or modified sequence
agtctcctagtccgggcgcgctgagcgcaggggggcgctgtcctcacccacgcgtaagtcgccgcagggcgtttccgggcggagaaaacctacacgtgatgggcgcccaccgagtgccagcaccgcctcctccagctccgccaaatgttcacccttcctcaaaaggacttcagggctcccaccacctgtctgggccccacctgcatgcaggacctgggcagtagccatggggaagatctggaaggagaatgctccagaaaactggaccagaagctgccagagctccgtggagtgggtgatcctgccatgatctcctctgatacctcctacctgtcctctagaggaagaatgattaaatggttctgggattcagctgaggagggctacaggacctaccacatggatgagtatgatgaggacaagaaccccagtggcatcattaacttgggcaccagtgagaacaaactctgctttgacctgctgtcctggcggctgagtcagcgcgacatgcagagggtggagccatccctgctgcagtatgctgactggaggggacatctgtt

SEQ ID NO: 225092 - DNA, 1506 bp, Artificial Sequence
  derived and/or modified sequence
atgttcaccctgccccagaaggacttcagagcccccaccacctgcctgggccccacctgcatgcaggacctgggcagcagccacggcgaggacctggagggcgagtgcagcagaaagctggaccagaagctgcccgagctgagaggcgtgggcgaccccgccatgatcagcagcgacaccagctacctgagcagcagaggcagaatgatcaagtggttctgggacagcgccgaggagggctacagaacctaccacatggacgagtacgacgaggacaagaaccccagcggcatcatcaacctgggcaccagcgagaacaagctgtgcttcgacctgctgagctggagactgagccagagagacatgcagagagtggagcccagcctgctgcagtacgccgactggagaggccacctgttcctgagagaggaggtggccaagttcctgagcttctactgcaagagccccgtgcccctgagacccgagaacgtggtggtgctgaacggcggcgccagcctgttcagcgccctggccaccgtgctgtgcgaggccggcgaggccttcctgatccccaccccctactacggcgccatcacccagcacgtgtgcctgtacggcaacatcagactggcctacgtgtacctggacagcgaggtgaccggcctggacaccagacccttccagctgaccgtggagaagctggagatggccctgagagaggcccacagcgagggcgtgaaggtgaagggcctgatcctgatcagcccccagaaccccctgggcgacgtgtacagccccgaggagctgcaggagtacctggtgttcgccaagagacacagactgcacgtgatcgtggacgaggtgtacatgctgagcgtgttcgagaagagcgtgggctacagaagcgtgctgagcctggagagactgcccgacccccagagaacccacgtgatgtgggccaccagcaaggacttcggcatgagcggcctgagattcggcaccctgtacaccgagaaccaggacgtggccaccgccgtggccagcctgtgcagataccacggcctgagcggcctggtgcagtaccagatggcccagctgctgagagacagagactggatcaaccaggtgtacctgcccgagaaccacgccagactgaaggccgcccacacctacgtgagcgaggagctgagagccctgggcatccccttcctgagcagaggcgccggcttcttcatctgggtggacctgagaaagtacctgcccaagggcaccttcgaggaggagatgctgctgtggagaagattcctggacaacaaggtgctgctgagcttcggcaaggccttcgagtgcaaggagcccggctggttcagattcgtgttcagcgaccaggtgcacagactgtgcctgggcatgcagagagtgcagcaggtgctggccggcaagagccaggtggccgaggaccccagacccagccagagccaggagcccagcgaccagagaagatag

SEQ ID NO: 225093 - DNA, 477 bp, Artificial Sequence
  derived and/or modified sequence
atgttcaccctgccccagaaggacttcagagcccccaccacctgcctgggccccacctgcatgcaggacctgggcagcagccacggcgaggacctggagggcgagtgcagcagaaagctggaccagaagctgcccgagctgagaggcgtgggcgaccccgccatgatcagcagcgacaccagctacctgagcagcagaggcagaatgatcaagtggttctgggacagcgccgaggagggctacagaacctaccacatggacgagtacgacgaggacaagaaccccagcggcatcatcaacctgggcaccagcgagaacaagctgtgcttcgacctgctgagctggagaccccccggcggcagcggccaggtgcccgtgttcctgctgcaggagcccagcaccccccagaccagagagtgcggctgccccgagtggtggtgcctggccctgctgtgcagcggccacggcgccgtgtag

SEQ ID NO: 225094 - DNA, 420 bp, Artificial Sequence
  derived and/or modified sequence
atgttcaccctgccccagaaggacttcagagcccccaccacctgcctgggccccacctgcatgcaggacctgggcagcagccacggcgaggacctggagggcgagtgcagcagaaagctggaccagaagctgcccgagctgagaggcgtgggcgaccccgccatgatcagcagcgacaccagctacctgagcagcagaggcagaatgatcaagtggttctgggacagcgccgaggagggctacagaacctaccacatggacgagtacgacgaggacaagaaccccagcggcatcatcaacctgggcaccagcgagaacaagctgtgcttcgacctgctgagctggagactgagccagagagacatgcagagagtggagcccagcctgctgcagtacgccgactggagaggccacctgtag

SEQ ID NO: 225095 - DNA, 234 bp, Artificial Sequence
  derived and/or modified sequence
atgttcaccctgccccagaaggacttcagagcccccaccacctgcctgggccccacctgcatgcaggacctgggcagcagccacggcgaggacctggagggcgagtgcagcagaaagctggaccagaagctgcccgagctgagaggcgtgggcgaccccgccatgatcagcagcgacaccagctacctgagcagcagaggcagaatgatcaagtggttctgggacagcgcctag

SEQ ID NO: 225096 - protein, 163 aa, Artificial Sequence
  derived and/or modified sequence
MAAAVVLAAGLRAARRAVAATGVRGGQVRGAAGVTDGNEVAKAQQATPGGAAPTIFSRILDKSLPADILYEDQQCLVFRDVAPQAPVHFLVIPKKPIPRISQAEEEDQQLLGHLLLVAKQTAKAEGLGDGYRLVINDGKLGAQSVYHLHIHVLGGRQLQWPPG

SEQ ID NO: 225097 - DNA, 492 bp, Artificial Sequence
  derived and/or modified sequence
atggcggctgcggttgtgctggctgccggactccgggctgctcggcgagccgtggccgcgaccggggttagaggcggacaagtccggggggccgcgggagtgacagacgggaacgaagtggctaaggctcagcaggccactcccggtggggccgcccctacaatcttctcccggatcctggataaatccctccctgccgatatcctctacgaggaccagcaatgtctggtctttcgtgatgtcgcgccccaggccccagtgcacttcctggtgataccgaaaaagcctattcctagaatttcgcaggccgaagaggaggaccagcagctgctgggccatttgctactggttgctaaacagacagctaaagcagaaggcctgggagatggctaccgcctagtgattaacgacggaaagcttggggcccaaagtgtgtatcatttacacatccacgtgctcggaggtagacagttgcagtggcccccgggctag

SEQ ID NO: 225098 - DNA, 628 bp, Artificial Sequence
  derived and/or modified sequence
cgagtgctgacccgggtgagaggttcccgcggctcagggaagatggcggcagccgtggtgctggctgctgggttgcgcgcggcgcgcagagccgtggcggccacgggggtgcgcggggggcaggtccgaggagctgcaggtgtgactgatgggaatgaagtggccaaggcccagcaggcaactcctgggggagcagccccaaccatcttctcccggatcctggacaagagcctcccagctgacattctctatgaggaccagcagtgtcttgtgttccgtgatgtggcccctcaggctcctgtgcacttcctggtcattcctaagaagcccattcctcggattagccaggctgaagaagaagaccagcagcttctaggacacctactccttgtggccaagcagacagcaaaggctgagggcctgggagatggataccgacttgtgatcaacgatgggaagctgggtgcacaatctgtgtatcatctgcacattcatgtacttgggggccggcagctccagtggcctccaggttgaacctgccaactgattaaaggacaccagactctggatgcttggatggaaagggaaaaatggaccctgtgatgctaataaaactgttctcccttaa

SEQ ID NO: 225099 - DNA, 492 bp, Artificial Sequence
  derived and/or modified sequence
atggctgctgctgtggtgctggccgccggcctgcgggccgccaggagagctgtggccgccactggagtgcggggcggccaggtgagaggagctgctggggtgacagatggaaatgaggtggccaaggcccagcaggccacccctgggggcgccgcccccaccatcttcagccgcatcctggacaagagcctgcctgctgacatcctgtatgaggaccagcagtgcctggtgttcagagatgtggccccccaggcccctgtgcacttcctggtgatccccaagaagcccatcccccgcatcagccaggccgaggaggaggaccagcagctgctgggccacctgctgctggtggccaagcagacagccaaggccgagggcctgggagatggctaccgcctggtgatcaatgatggcaagctgggcgcccagagcgtgtaccacctgcacatccacgtgctgggcggccggcagctgcagtggcccccaggatag

SEQ ID NO: 225100 - DNA, 492 bp, Artificial Sequence
  derived and/or modified sequence
atggccgccgccgtggtgctggccgccggcctgcgggccgcccggagggccgtggccgcaaccggtgttcggggaggtcaggtgaggggcgccgcaggagtcacagatggcaacgaagtagcaaaggcccaacaggccactcctggaggagctgcacctactattttcagtcgcatactggataagtcacttcctgccgatatcctctatgaagatcaacaatgtctggttttccgggacgtggctcctcaggctcccgtccactttttagtcatccccaaaaagcccatcccacgtatttcccaagcagaggaggaggatcagcagctcctcggccacctgttacttgtggccaagcaaacggccaaggccgaaggtctgggggacggataccgcctggtaatcaacgacgggaagctgggggcccaatctgtataccacctgcatatacatgtattaggcggcagacagctgcagtggccccccggttag

SEQ ID NO: 225101 - DNA, 492 bp, Artificial Sequence
  derived and/or modified sequence
atggccgctgctgtagtgctcgccgctgggttgagggccgctcggagagccgtcgcagccactggggtgcggggtgggcaagtccgcggtgcagctggcgtgaccgatgggaacgaggttgctaaggcacagcaggctacacctggtggcgctgcaccaacaatcttctcaagaatattggacaaaagcttaccagccgacatactgtatgaagaccagcagtgcctggtcttcagggatgtggcaccacaagccccagttcattttcttgtgatacccaagaagcctatcccacggatctcccaagcggaggaagaagaccagcagttgcttggccacctccttcttgtggctaaacagactgcaaaagccgagggtctgggcgacggatacaggttagtgataaacgacggcaaactcggcgctcagtcagtttaccatttgcacatacacgtgctcggtggaaggcagctgcaatggccacccggttag

SEQ ID NO: 225102 - DNA, 492 bp, Artificial Sequence
  derived and/or modified sequence
atggccgccgccgtggtgctggccgccggcctgagagccgccagaagagccgtggccgccaccggcgtgagaggcggccaggtgagaggcgccgccggcgtgaccgacggcaacgaggtggccaaggcccagcaggccacccccggcggcgccgcccccaccatcttcagcagaatcctggacaagagcctgcccgccgacatcctgtacgaggaccagcagtgcctggtgttcagagacgtggccccccaggcccccgtgcacttcctggtgatccccaagaagcccatccccagaatcagccaggccgaggaggaggaccagcagctgctgggccacctgctgctggtggccaagcagaccgccaaggccgagggcctgggcgacggctacagactggtgatcaacgacggcaagctgggcgcccagagcgtgtaccacctgcacatccacgtgctgggcggcagacagctgcagtggccccccggctag

SEQ ID NO: 225103 - protein, 566 aa, Artificial Sequence
  derived and/or modified sequence
MPRGFLVKRTKRTGGLYRVRLAERVFPLLGPQGAPPFLEEAPSASLPGAERATPPTREEPGKGLTAEAAREQSGSPCRAAGVSPGTGGREGAEWRAGGREGPGPSPSPSPSPAKPAGAELRRAFLERCLSSPVSAESFPGGAAAVAAFSCSVAPAAAPTPGEQFLLPLRAPFPEPALQPDPAPLSAALQSLKRAAGGERRGKAPTDCASGPAAAGIKKPKAMRKLSFADEVTTSPVLGLKIKEEEPGAPSRGLGGSRTPLGEFICQLCKEQYADPFALAQHRCSRIVRVEYRCPECDKVFSCPANLASHRRWHKPRPAAANAATVSSADGKPPSSSSSSSRDSGAIASFLAEGKENSRIERTADQHPQARDSSGADQHPDSAPRQGLQVLTHPEPPLPQGPYTEGVLGRRVPVPGSTSGGRGSEIFVCPYCHKKFRRQAYLRKHLSTHEAGSARALAPGFGSERGAPLAFACPLCGAHFPTADIREKHRLWHAVREELLLPALAGAPPETSGPSGPSDGSAQQIFSCKHCPSTFFSSPGLTRHINKCHPSESRQVLLLQMPLRPGC

SEQ ID NO: 225104 - DNA, 3024 bp, Artificial Sequence
  derived and/or modified sequence
cgggagaaagccccgcccccggcgcccgctcccactcctgattggccgggccagcccggggaggcccggcgggaccccggcccgcgtctcagctataaagatagccccggcatgacagccgcggcgaagctcttctagttcatctgctggccggctctcagtccccgtggcgccccctttcctcttgtcccagagcgctctcgactccaccatgccaaggggattcctggtgaagcgaactaaacggacaggcggcttgtaccgagttcgccttgcggagcgtgtcttccctctgctggggccccagggggcgccgcccttcttggaggaggctcccagcgcctccttgcccggcgcggagcgggcgacaccccccacccgagaggaaccaggaaaggggttgacggcggaggcggcccgggaacagtcggggtcgccatgtcgggcggctggggtgagcccggggacgggcgggcgggaaggcgcggagtggcgggcgggtggcagggaaggtcccgggcccagccccagccccagccccagtccagcgaagccggcaggcgcagagctgcgtcgggcgttcctggagcgctgcctcagctcgcccgtctccgccgagtctttccccgggggcgccgccgccgtggccgctttctcctgctccgtggcgccagcagccgcaccgaccccgggggagcagtttctgctgccgcttcgggcgccgttcccagagcccgcgcttcagccggaccctgcgcccctctcggccgcccttcagagtctgaagcgggcggccggcggcgagcgccgcggcaaggcacccacggactgcgcgtctggacccgcggccgcgggaatcaagaagccaaaggccatgaggaagttgagctttgccgatgaggtgaccacatcccctgtcctgggcctgaagatcaaggaggaggagcccggagcgccgtcccggggcttggggggcagccgcacgccactgggggagttcatctgccagctgtgcaaggagcagtacgcagaccccttcgcgctggcccagcaccgctgctcccgcatcgtgcgcgtagagtaccgctgccctgagtgcgacaaggtgttcagctgtcctgcgaacctggcctcccatcgccgctggcataagccgcgtcctgcggctgcaaacgccgccacagtctcctccgccgacgggaagccgccttcttcgtcgtcttcgtcctcccgggactccggggccattgcatcttttctggcggagggaaaggagaacagccgaatagagcggactgcggatcagcacccgcaggccagggacagctccggggcggatcagcacccggacagcgccccgaggcagggcctccaggtgctgacgcatccagagccaccgctgcctcagggcccctacacggagggggtgttggggcgccgggtacctgtgccgggcagtaccagtggtggcaggggatccgagattttcgtgtgcccatattgccacaaaaagtttcgtcgccaagcctatctgcgcaagcacctgagcactcacgaggcgggctcggcccgtgcgctagcgccgggctttggctccgaacgcggtgccccacttgccttcgcttgcccattgtgcggagcgcacttccctacagcagatatcagggagaagcaccggctgtggcatgctgtccgcgaggagctgctcctgcccgctctggcgggggctcctcccgaaacgtcgggccctagcgggccatctgacgggagtgcccagcaaattttctcgtgcaagcactgcccgtccactttttttagctctccagggctgacccggcacatcaataagtgccacccctcagaaagccggcaagtgctgctgctgcagatgccactgcggcctggctgctgagggacgagagaccaggatgatttcgaggttggccttagaggaaacagatcatgggaatttctgtggggctttcttcaacttgcaagtttactttcattccttcctatgttttaatcccctaaaattctccctgtagtcaatgttccaccagaggagcggacagtgaaatgtaatatccctctctagagcaggtatgtatatggtataaaccttgagatcaaagactgtcagctttaaatccttctcactttccccactaaaataggatttttccccttaaaactctggagaccctaacgaatcctatatgatttgtaattcctatggaaagtcgcggtgaatgcgtgcatgtctcaatgtccacaaaggattctggctaccctttggtagccaatgttttttttgtcttgtcatcacaggcgcctatacagcttctgtctcaatagggtcagatattttgcactgtatattctgtgaattaaaagttatgtgattggtgtcaaacttaaggagattcaagacctggcagaaaatgtaagaggatttttgctgcttttggggtgcatggggatctcccctgtaaactttcctttgcccaattatatgtacatgtccattcttaagttggtgtttggaggtggggaggatgctactttactggagttgagacaccccctaaaattctcaccctcagctattttgtgggcagtattcaggaagagctacttcaaacctttctttaaatggctttttggaaatacagaagtcgtttcctcaagtttgactgttttaatggggtttcacccaaattgtttaatgcttctgctgtaaatgtcatactgtgtattcattatgaaaatatgtacagcttaaggaagatgttaacacctgtaatccactaaggaactgaatggcaatttgctcaatattcagtattttcttttcagcggcaacttgtttttgatttttttaaaaaaccatttcagtgtacattgtgtactaattccctactagccagtttgggacattggctgagcactgcctgacagaaagcccgtatttgtaagatgcttaccaccaaataaatgtacatagactgtgaaaaaaaaaaa

SEQ ID NO: 225105 - DNA, 366 bp, Artificial Sequence
  derived and/or modified sequence
atgattgacagccctagaaaggagggggcactgtccccaccactcggcggttggcgcttgggcgatcggagatgtgcaggaggcaagcggaccgaacgaaggactcccgaaaagttgtggggcattagaggggagaaggagggtgtaaagcgtgagggacgccttagccggggtggcggtgctggggctggggcaggtgcgggtggcgtgaccgcccctcgacccccactccctgctctccatagcgccgctccagggctgcccccaccaccaccaccacctcctcctcctcctccgcttcccccaccgcctggcgtggcgggttgtggccagaacagaagccccaatagagccgcaggagaatag

SEQ ID NO: 225106 - DNA, 1701 bp, Artificial Sequence
  derived and/or modified sequence
atgcctcgtggctttttagttaagagaaccaagcgtaccggggggctatatagagtccgattggctgaacgagtgttcccacttcttggcccccagggagccccacccttcctagaggaagcaccctctgcttcacttcctggagctgaaagagctacccccccaaccagggaggagccagggaaaggtcttacagcagaggccgcacgggagcaatccggttctccctgtagagcagctggggtgagtccaggcacgggtgggcgggaaggtgcagagtggagagccggcggaagggaaggaccagggccatctcctagcccttcccctagcccggcgaaacctgcaggcgcggaactgcgaagggcattcctcgaaaggtgcctgtcaagtccggtgtctgcggagtcattccctgggggggcggcggctgtggctgccttcagctgcagtgttgctcccgcagctgccccaacaccaggcgagcagtttctactcccgctcagagccccatttcctgagcctgctcttcagcccgatccagcccctctgagtgccgcgctccagtcactgaagcgtgccgctggtggggagcggagaggaaaagcccccacagactgcgcttcagggccggccgcggcggggatcaaaaagcctaaagccatgcgaaagctgagctttgcagacgaagtgactaccagtcccgtgctaggtcttaaaatcaaggaagaagagccaggcgccccttctagagggctgggaggctccagaacacctttgggggaattcatctgtcagctgtgcaaggagcagtacgcagacccctttgcgctcgcccagcaccgctgctccaggatcgtgagggtggagtacagatgtcccgagtgtgataaggttttcagctgtccagccaacctagccagtcaccgcaggtggcataagccaaggccagctgccgccaatgcagcaacagtgagctctgcagacggaaaaccaccatcttcctccagcagctcctcccgcgactccggcgccatcgcgtcatttttggcagagggcaaggaaaatagcagaatcgaacggacagcggaccaacatccccaggcccgcgattcgtccggcgccgaccagcatccggatagcgctcccagacagggcctgcaggtactgacccacccagaacctcctttgcctcaggggccgtacacagagggggtgcttggcaggcgggtgcctgtgccgggcagcacaagcggaggaagaggttcggagatctttgtttgcccatactgccacaagaaattcaggcgacaggcttacctcagaaagcatctgagtacccatgaggcgggatcagcccgggccctggctccaggctttggatcagaaagaggagcccccctcgcctttgcttgtcccctttgcggcgcacactttcccactgctgatatccgagaaaaacaccgtctttggcatgccgtgcgggaagaattgttgctgccagccttggctggcgcccctcctgagacttcagggccgtcgggcccgtccgatggcagtgcacagcagattttttcttgtaagcattgtccctctacattttttagcagtcccggccttacgcggcatatcaataagtgtcatcccagcgaatccaggcaagtgctgctgctgcaaatgcctctaagacccggttgctag

SEQ ID NO: 225107 - DNA, 3013 bp, Artificial Sequence
  derived and/or modified sequence
cgggagaaagccccgcccccggcgcccgctcccactcctgattggccgggccagcccggggaggcccggcgggaccccggcccgcgtctcagctataaagatagccccggcatgacagccgcggcgaagctcttctagttcatctgctggccggctctcagtccccgtggcgccccctttcctcttgtcccagagcgctctcgactccaccatgccaaggggattcctggtgaagcgaactaaacggacaggcggcttgtaccgagttcgccttgcggagcgtgtcttccctctgctggggccccagggggcgccgcccttcttggaggaggctcccagcgcctccttgcccggcgcggagcgggcgacaccccccacccgagaggaaccaggaaaggggttgacggcggaggcggcccgggaacagtcggggtcgccatgtcgggcggctggggtgagcccggggacgggcgggcgggaaggcgcggagtggcgggcgggtggcagggaaggtcccgggcccagccccagccccagccccagtccagcgaagccggcaggcgcagagctgcgtcgggcgttcctggagcgctgcctcagctcgcccgtctccgccgagtctttccccgggggcgccgccgccgtggccgctttctcctgctccgtggcgccagcagccgcaccgaccccgggggagcagtttctgctgccgcttcgggcgccgttcccagagcccgcgcttcagccggaccctgcgcccctctcggccgcccttcagagtctgaagcgggcggccggcggcgagcgccgcggcaaggcacccacggactgcgcgtctggacccgcggccgcgggaatcaagaagccaaaggccatgaggaagttgagctttgccgatgaggtgaccacatcccctgtcctgggcctgaagatcaaggaggaggagcccggagcgccgtcccggggcttggggggcagccgcacgccactgggggagttcatctgccagctgtgcaaggagcagtacgcagaccccttcgcgctggcccagcaccgctgctcccgcatcgtgcgcgtagagtaccgctgccctgagtgcgacaaggtgttcagctgtcctgcgaacctggcctcccatcgccgctggcataagccgcgtcctgcggctgcaaacgccgccacagtctcctccgccgacgggaagccgccttcttcgtcgtcttcgtcctcccgggactccggggccattgcatcttttctggcggagggaaaggagaacagccgaatagagcggactgcggatcagcacccgcaggccagggacagctccggggcggatcagcacccggacagcgccccgaggcagggcctccaggtgctgacgcatccagagccaccgctgcctcagggcccctacacggagggggtgttggggcgccgggtacctgtgccgggcagtaccagtggtggcaggggatccgagattttcgtgtgcccatattgccacaaaaagtttcgtcgccaagcctatctgcgcaagcacctgagcactcacgaggcgggctcggcccgtgcgctagcgccgggctttggctccgaacgcggtgccccacttgccttcgcttgcccattgtgcggagcgcacttccctacagcagatatcagggagaagcaccggctgtggcatgctgtccgcgaggagctgctcctgcccgctctggcgggggctcctcccgaaacgtcgggccctagcgggccatctgacgggagtgcccagcaaattttctcgtgcaagcactgcccgtccactttttttagctctccagggctgacccggcacatcaataagtgccacccctcagaaagccggcaagtgctgctgctgcagatgccactgcggcctggctgctgagggacgagagaccaggatgatttcgaggttggccttagaggaaacagatcatgggaatttctgtggggctttcttcaacttgcaagtttactttcattccttcctatgttttaatcccctaaaattctccctgtagtcaatgttccaccagaggagcggacagtgaaatgtaatatccctctctagagcaggtatgtatatggtataaaccttgagatcaaagactgtcagctttaaatccttctcactttccccactaaaataggatttttccccttaaaactctggagaccctaacgaatcctatatgatttgtaattcctatggaaagtcgcggtgaatgcgtgcatgtctcaatgtccacaaaggattctggctaccctttggtagccaatgttttttttgtcttgtcatcacaggcgcctatacagcttctgtctcaatagggtcagatattttgcactgtatattctgtgaattaaaagttatgtgattggtgtcaaacttaaggagattcaagacctggcagaaaatgtaagaggatttttgctgcttttggggtgcatggggatctcccctgtaaactttcctttgcccaattatatgtacatgtccattcttaagttggtgtttggaggtggggaggatgctactttactggagttgagacaccccctaaaattctcaccctcagctattttgtgggcagtattcaggaagagctacttcaaacctttctttaaatggctttttggaaatacagaagtcgtttcctcaagtttgactgttttaatggggtttcacccaaattgtttaatgcttctgctgtaaatgtcatactgtgtattcattatgaaaatatgtacagcttaaggaagatgttaacacctgtaatccactaaggaactgaatggcaatttgctcaatattcagtattttcttttcagcggcaacttgtttttgatttttttaaaaaaccatttcagtgtacattgtgtactaattccctactagccagtttgggacattggctgagcactgcctgacagaaagcccgtatttgtaagatgcttaccaccaaataaatgtacatagactgtg

SEQ ID NO: 225108 - DNA, 1701 bp, Artificial Sequence
  derived and/or modified sequence
atgccccggggcttcctggtgaagaggaccaagaggactggaggcctgtacagagtgcggctggccgagagggtcttccccctgctgggcccccagggcgccccacccttcctggaggaggcccccagcgccagcctgcctggagctgagcgggccaccccacccacccgggaggagcccgggaagggcctgacagctgaggccgcccgggagcagagcggcagcccctgcagagctgctggggtgtccccaggcaccggcggccgggagggcgctgagtggagggctgggggccgggagggccctggccccagccccagccccagccccagccctgccaagccagctggagctgagctgcggcgggccttcctggagcgctgcctgagcagccctgtgtctgctgagagcttccctggaggagctgctgctgtggccgccttcagctgcagcgtggccccagctgctgcccccaccccaggagagcagttcctgctgcccctgcgggcccccttccctgagcccgccctgcagcctgaccctgcccccctgtctgctgccctgcagagcctgaagagagctgctggaggagagcggcggggcaaggcccccacagactgtgccagcggccctgctgctgctggcatcaagaagcccaaggccatgaggaagctgagctttgctgatgaggtgaccaccagccctgtgctgggcctgaagatcaaggaggaggagcccggggcccccagccggggcctgggcggcagcaggacccccctgggggagttcatctgccagctgtgcaaggagcagtatgctgacccctttgccctggcccagcaccgctgcagccgcatcgtgcgggtggagtaccgctgcccagaatgtgacaaggtgttcagctgcccagccaacctggccagccaccggcgctggcacaagcccaggcctgctgctgccaatgctgccaccgtgtcctctgcagatggcaagccacccagcagcagcagcagcagcagccgggacagcggggccatcgccagcttcctggccgagggcaaggagaacagcagaattgaaagaacagctgaccagcacccccaggcccgggacagcagtggagctgaccagcacccagattctgccccccggcagggcctgcaggtgctgacccaccctgagccccccctgccccagggcccctacacagaaggagtgctgggcagaagagtgcctgtgcccggcagcaccagcggcggccggggcagcgagatctttgtgtgcccctactgccacaagaagttccggcggcaggcctacctgaggaagcacctgagcacccatgaggccggcagcgcccgggccctggcccctggcttcggcagcgagcggggggcccccctggcctttgcctgccccctgtgtggggcccacttccccacagctgacatccgggagaagcaccggctgtggcatgctgtgcgggaggagctgctgctgcctgccctggccggggcccctcctgagaccagcggccccagcggccccagtgatggcagcgcccagcagatcttcagctgcaagcactgccccagcaccttcttcagcagccctggcctgaccaggcacatcaacaagtgccaccccagcgagagccggcaggtgctgctgctgcagatgcccctgcggcccggctgctag

SEQ ID NO: 225109 - DNA, 1701 bp, Artificial Sequence
  derived and/or modified sequence
atgccccggggcttcctggtgaagcggaccaagcggaccggcggcctgtaccgcgtccggctggcagagcgagtattcccccttttaggcccccagggcgcacctccctttctggaggaagctccatctgcaagcctcccaggggctgagcgggccaccccccccacaagagaggaaccaggtaaaggactcactgcagaggctgctagggaacaaagtggaagcccctgcagagccgcaggcgtgtcacccggcactgggggtagagagggcgcggaatggcgtgccggaggccgggaaggtcccggcccctcaccatccccaagcccttcgcccgcaaagcctgccggtgccgaactgcggcgcgcatttcttgagaggtgcctgtcaagcccagtgtccgcagagagttttcctggcggtgccgcagctgtggcagcgttcagctgtagcgtggccccggccgcggcacctacgccaggggaacaatttctgttgcccctgcgagcgccatttcccgaaccagcacttcaaccagatccagcacctcttagtgccgctctgcagtctcttaagagagccgccggcggcgagaggcgtggaaaggcccccaccgattgcgcctctgggcctgcagcagcaggtatcaagaaaccaaaggctatgcgtaagctttcttttgcggacgaagtaactactagcccagtgcttggtctaaaaataaaagaggaagaaccaggagctccttcacgaggcctggggggctctcgcactcccctgggcgagttcatttgccagctgtgtaaggagcagtatgctgatccattcgcactggctcagcacaggtgtagtagaatcgtacgcgttgagtacaggtgccctgagtgtgataaagtgtttagctgtccagccaatctcgccagccatagaagatggcacaaacctcgcccagctgcagccaacgcagccacagtgagctccgccgacgggaagccccccagttctagcagttcatcctctcgggattctggagctattgcatccttccttgcggagggtaaagagaattctcgaattgaaagaaccgcagatcagcatccacaagccagggactcttctggcgcagatcagcaccctgacagcgccccgcggcagggcttgcaggtattgactcacccagagcctccactcccccaaggcccgtatactgagggcgtgctgggcaggagagtgcctgttcctgggagtactagcggcggacgggggtcggaaattttcgtttgcccctattgccacaaaaagtttcggcggcaggcctacctgcggaaacacctgtccactcatgaggccgggtctgcccgtgccttggcacctggcttcggctctgaacgaggagcacctctggcctttgcatgcccactgtgtggggcacattttccaacagcggatatccgggaaaaacacagactgtggcacgctgtcagagaggagttgctgctgcccgctctggctggagctccgcccgagaccagcggcccaagcgggccaagtgacggatccgctcaacagatattctcttgtaaacattgtccatccacattcttttcctctcccggactgacccgccatataaacaaatgccacccgagtgagagtagacaagtacttttgctgcaaatgcctttacggcccggctgctag

SEQ ID NO: 225110 - DNA, 1701 bp, Artificial Sequence
  derived and/or modified sequence
atgccacgagggtttttggttaaacgtacaaaaaggacaggtggtctgtatagggtgaggcttgccgaaagggttttccccctcctcgggccacagggagctcccccattccttgaggaagccccaagtgcctctctgccaggcgcagaacgggcaacgccgccaactcgtgaggaacctggcaaaggactcactgccgaagcagcccgagaacagagtggctctccctgcagggctgctggtgtgagtccaggaactggcggaagggagggtgccgagtggcgcgctggcggtcgagaaggacccggtccatctccatccccgagcccctcgccagccaagccagctggggcagaactgcgccgtgcctttctcgaaagatgtctgtcaagccccgtgtccgccgagtcgttcccaggtggcgctgctgccgtggctgctttctcctgctctgtggcccctgccgctgcacccacccctggggaacagtttcttctgcctttgcgggctccattccccgaacctgccctgcagcccgaccccgcacctctgagcgcggcactgcaaagccttaagcgagcagccggaggcgagcgcagaggcaaagcacctacagattgcgcctcaggacccgcagctgcaggtattaagaagccgaaggcaatgcgcaagctctcctttgccgacgaagtcaccacatccccagtgctcggactcaagatcaaagaggaagaaccaggtgccccatctcgtgggttaggaggcagtcgaacacccctgggcgagttcatctgccaactgtgcaaagaacagtacgctgacccctttgctctagcccagcaccgatgtagcaggatcgttagggtcgagtacaggtgcccagagtgcgacaaagtcttttcatgcccggctaacttagcctctcaccgtcgatggcacaaaccaaggcccgcagctgccaatgccgctaccgtgtcgagcgcagacggtaagccaccctcttccagctcctcttcctccagagactcgggagccatcgcctccttcttggcagaggggaaagagaattcccgcattgaaagaacggcagaccaacatccacaggctcgcgacagctctggggctgaccaacatcctgatagcgcaccccgacagggactccaggtccttactcatccggaacccccactcccacagggaccatacacggaaggtgttctcggcaggcgagttccagtcccgggatctaccagtgggggtcgcggatcagagatctttgtctgcccttactgccataaaaagttcaggcgacaggcttacctgaggaagcatcttagcactcacgaagccggatcagcaagggccttagcccctgggtttggctccgaacgcggagcacccctggccttcgcctgtcctctctgcggagcccattttccaacagctgatattcgggagaaacacagactgtggcacgctgtgagagaggaactgctccttccggctttagctggcgctccacctgagaccagcggacctagtgggccaagtgatggaagtgctcaacagattttttcctgcaagcattgcccttccacttttttcagctctccgggtctaactcgccacataaacaaatgtcatccctccgagtccagacaggtcttgctgcttcagatgcccctgcgccctggatgttag

SEQ ID NO: 225111 - DNA, 1701 bp, Artificial Sequence
  derived and/or modified sequence
atgcccagaggcttcctggtgaagagaaccaagagaaccggcggcctgtacagagtgagactggccgagagagtgttccccctgctgggcccccagggcgccccccccttcctggaggaggcccccagcgccagcctgcccggcgccgagagagccaccccccccaccagagaggagcccggcaagggcctgaccgccgaggccgccagagagcagagcggcagcccctgcagagccgccggcgtgagccccggcaccggcggcagagagggcgccgagtggagagccggcggcagagagggccccggccccagccccagccccagccccagccccgccaagcccgccggcgccgagctgagaagagccttcctggagagatgcctgagcagccccgtgagcgccgagagcttccccggcggcgccgccgccgtggccgccttcagctgcagcgtggcccccgccgccgcccccacccccggcgagcagttcctgctgcccctgagagcccccttccccgagcccgccctgcagcccgaccccgcccccctgagcgccgccctgcagagcctgaagagagccgccggcggcgagagaagaggcaaggcccccaccgactgcgccagcggccccgccgccgccggcatcaagaagcccaaggccatgagaaagctgagcttcgccgacgaggtgaccaccagccccgtgctgggcctgaagatcaaggaggaggagcccggcgcccccagcagaggcctgggcggcagcagaacccccctgggcgagttcatctgccagctgtgcaaggagcagtacgccgaccccttcgccctggcccagcacagatgcagcagaatcgtgagagtggagtacagatgccccgagtgcgacaaggtgttcagctgccccgccaacctggccagccacagaagatggcacaagcccagacccgccgccgccaacgccgccaccgtgagcagcgccgacggcaagccccccagcagcagcagcagcagcagcagagacagcggcgccatcgccagcttcctggccgagggcaaggagaacagcagaatcgagagaaccgccgaccagcacccccaggccagagacagcagcggcgccgaccagcaccccgacagcgcccccagacagggcctgcaggtgctgacccaccccgagccccccctgccccagggcccctacaccgagggcgtgctgggcagaagagtgcccgtgcccggcagcaccagcggcggcagaggcagcgagatcttcgtgtgcccctactgccacaagaagttcagaagacaggcctacctgagaaagcacctgagcacccacgaggccggcagcgccagagccctggcccccggcttcggcagcgagagaggcgcccccctggccttcgcctgccccctgtgcggcgcccacttccccaccgccgacatcagagagaagcacagactgtggcacgccgtgagagaggagctgctgctgcccgccctggccggcgccccccccgagaccagcggccccagcggccccagcgacggcagcgcccagcagatcttcagctgcaagcactgccccagcaccttcttcagcagccccggcctgaccagacacatcaacaagtgccaccccagcgagagcagacaggtgctgctgctgcagatgcccctgagacccggctgctag

SEQ ID NO: 225112 - protein, 344 aa, Artificial Sequence
  derived and/or modified sequence
MLSSFPHRKTWRKSKKTVKVTRSYPTFPSLNAWEEFRGLLPVDGEPNPGAGLGVEEGLLCRVVHSPEFNLFLDSVVFESNFIQVKRGRNWRDVYKASNTMALGVTSSVPCLPLPNILLMASVKWHQGQNQTWNRPSIAPNIFLKRILPLRFVELQVCDHYQRILQLRTVTEKIYYLKLHPDHPETVFHFWIRLVQILQKGLSITTKDPRILVTHCLVPKNCSSPSGDSKLVQKKLQASQPSESLIQLMTKGESEALSQIFADLHQQNQLSFRSSRKVETNKNSSGKDSSREDSIPCTCDLRWRASFTYGEWERENPSGLQPLSLLSTLAASTGPQLAPPIGNSI

SEQ ID NO: 225113 - DNA, 1035 bp, Artificial Sequence
  derived and/or modified sequence
atgctgagcagcttcccccacagaaagacctggagaaagagcaagaagaccgtgaaggtgaccagaagctaccccaccttccccagcctgaacgcctgggaggagttcagaggcctgctgcccgtggacggcgagcccaaccccggcgccggcctgggcgtggaggagggcctgctgtgcagagtggtgcacagccccgagttcaacctgttcctggacagcgtggtgttcgagagcaacttcatccaggtgaagagaggcagaaactggagagacgtgtacaaggccagcaacaccatggccctgggcgtgaccagcagcgtgccctgcctgcccctgcccaacatcctgctgatggccagcgtgaagtggcaccagggccagaaccagacctggaacagacccagcatcgcccccaacatcttcctgaagagaatcctgcccctgagattcgtggagctgcaggtgtgcgaccactaccagagaatcctgcagctgagaaccgtgaccgagaagatctactacctgaagctgcaccccgaccaccccgagaccgtgttccacttctggatcagactggtgcagatcctgcagaagggcctgagcatcaccaccaaggaccccagaatcctggtgacccactgcctggtgcccaagaactgcagcagccccagcggcgacagcaagctggtgcagaagaagctgcaggccagccagcccagcgagagcctgatccagctgatgaccaagggcgagagcgaggccctgagccagatcttcgccgacctgcaccagcagaaccagctgagcttcagaagcagcagaaaggtggagaccaacaagaacagcagcggcaaggacagcagcagagaggacagcatcccctgcacctgcgacctgagatggagagccagcttcacctacggcgagtgggagagagagaaccccagcggcctgcagcccctgagcctgctgagcaccctggccgccagcaccggcccccagctggccccccccatcggcaacagcatctag

SEQ ID NO: 225114 - DNA, 1035 bp, Artificial Sequence
  derived and/or modified sequence
atgttgagtagcttcccccatcgtaaaacttggcggaagagcaaaaagacagttaaagtcacccgcagttaccccacgtttccatcgttgaacgcatgggaggagtttcgggggctcttacctgtggacggcgagcctaaccccggggccggcctgggcgtcgaagagggcctcctgtgccgcgtcgttcacagcccggagtttaatttgtttctggactccgtcgtttttgaaagtaacttcattcaggtgaagcgcgggcgaaactggcgtgatgtgtataaggcgagtaatacaatggctcttggcgtcacatcttctgttccttgcttgcctcttcccaacattttactgatggcgtctgtgaagtggcatcagggacagaatcagacttggaataggcccagtatagctccaaacatcttcctcaaacgcatcttaccacttcggttcgtggaactccaggtgtgcgaccactatcagagaatactgcaattgagaacagtaaccgagaagatctattatctgaagttgcaccctgaccaccctgagaccgtcttccatttctggatcaggttggtccaaatcctgcagaaggggctgtccataaccaccaaagaccccaggatactcgtgacgcactgtctggttccaaagaactgttcttcaccgtccggggatagtaaactagttcagaagaaactccaggcctcccagcctagcgaatccctgatccaactcatgaccaagggggagtccgaagctctcagtcagatcttcgcagatctacatcaacagaatcagctgtcattcaggtcttctcgcaaggtggaaacgaataaaaacagtagtggaaaagacagctcccgcgaggactcaatcccttgcacatgcgacctacgttggagagccagttttacctatggcgaatgggagagggagaatccttcaggcttgcagcccttatcactactaagcaccttagcagctagcacgggtccacagctcgcccccccaattggcaactctatctag

SEQ ID NO: 225115 - DNA, 1598 bp, Artificial Sequence
  derived and/or modified sequence
ggagacagagatcccaggacaaatgtgcagcaggcccctgagcatgtgtagaaatgttgtcatcatttccacatagaaagacttggaggaaatcaaagaagacagtaaaagtcacaagatcctatccaaccttcccttccctgaatgcctgggaagaattcaggggcctcttgcctgtggatggagagccgaaccctggagcgggcctaggtgtggaggagggactgctctgccgggtggttcattctccagaattcaacctgtttcttgactccgtggtgtttgaaagcaacttcatccaggtcaaaaggggcaggaattggagagacgtctacaaagcttccaacaccatggccctgggggtgacctcctcggtaccctgcctgcccctccccaacatcctactcatggccagtgtcaaatggcaccaggggcagaaccagacatggaacagaccatccatagcccccaacatcttcctgaagaggattctcccattgaggtttgtggagctccaggtatgtgaccactatcaacgcatcctgcagttgaggacagtcactgagaagatttattacctaaagctccatcctgaccatcctgagactgtcttccacttctggatccgactggttcaaattctgcaaaaggggctgtccatcaccaccaaagaccctaggattcttgtcacgcactgcctggtacccaagaactgcagcagcccctcaggagattcgaagttagtacagaagaaactccaagcctcccagcccagcgagagtctcattcagctaatgaccaagggggagagtgaagccctgtctcagatttttgccgacttacaccagcagaaccagttgagtttcaggagcagcagaaaggtggagaccaacaagaacagctcagggaaagattcttcccgtgaagacagcatcccttgcacctgtgacctacgttggagggcttcattcacgtacggagagtgggaaagagagaacccctccggcctgcagcccctctcactactcagcactctggcagcctccaccgggccacagctggccccacccataggaaattctatttgagccacccttccgcactggggagaatctatgcaagcctcgtcaacaccactttgcagcattcagctgctgagggattatcgggatggagagtaggagaaaactgcaaccaaggaagaatagagtcatctcacggtgacagcagagcctttccagctgtacataaccacgtcctcgccactgcacctcggcatatgccacctccatgccactgccagagctggcctagcaagatgtgctctcagaatggccgggcccaagagatgaaggaaaggagtgaaagggaagtaggaccagagaagtggaaggaagcaaaatggaggtgatgagaaaggtggtgggagaaagtcagcagatgagagacacaaagagaagtggtaataggaaacggaagagacttggtagacgagataaggaggacaagagaagggacacacccctgagagatgctcaccaagcttctatttatctaatttaaaacttgaaagtaaagccataaacaaaaaaaagaaa

SEQ ID NO: 225116 - DNA, 1035 bp, Artificial Sequence
  derived and/or modified sequence
atgctgagcagcttcccccacaggaagacctggaggaagagcaagaagacagtgaaggtgaccaggagctaccccaccttccccagcctgaatgcctgggaggagttccggggcctgctgcctgtggatggagagcccaaccctggggccggcctgggcgtggaggagggcctgctgtgccgggtggtgcacagccctgagttcaacctcttcctggacagcgtggtgtttgagagcaacttcatccaggtgaagaggggcaggaactggagagatgtgtacaaggccagcaacaccatggccctgggcgtgaccagctctgtgccctgcctgcccctgcccaacatcctgctgatggcctctgtgaagtggcaccagggccagaaccagacctggaaccggcccagcatcgcccccaacatcttcctgaagaggatcctgcccctgcgctttgtggagctgcaggtgtgtgaccactaccagaggatcctgcagctgaggacagtgacagagaagatctactacctgaagctgcacccagaccaccctgagaccgtcttccacttctggatccggctggtgcagatcctgcagaagggcctgagcatcaccaccaaggacccccgcatcctggtgacccactgcctggtgcccaagaactgcagcagccccagcggggacagcaagctggtgcagaagaagctgcaggccagccagcccagcgagagcctcatccagctgatgaccaagggggagagcgaggccctgagccagatctttgctgacctgcaccagcagaaccagctgtccttccgcagcagcaggaaggtggagaccaacaagaacagcagcggcaaggacagcagcagagaagattccatcccctgcacctgtgacctgcgctggagggccagcttcacctacggggagtgggagcgggagaaccccagcggcctgcagcccctgagcctgctgagcaccctggccgccagcacaggcccccagctggccccacccatcggcaacagcatctag

SEQ ID NO: 225117 - DNA, 1035 bp, Artificial Sequence
  derived and/or modified sequence
atgctgagcagcttcccccaccggaagacctggcggaagagcaagaaaaccgttaaggtaacacggtcctaccccacctttccctctcttaatgcttgggaagaatttcgtgggttgctccctgtcgatggcgagccgaacccaggcgcggggctgggtgtcgaagaagggttgctgtgcagagtcgtgcattcccccgagtttaatctgtttcttgattcagtggtgttcgagagcaactttatccaagtgaagcggggacgaaattggcgggatgtgtacaaagctagcaacacgatggccttgggtgtgaccagtagcgttccttgtttgccgctgccaaatattttgttaatggcctcagtgaagtggcaccagggacaaaatcaaacatggaacagaccatccatcgcccccaacatctttctgaagaggatcctaccactgaggtttgttgagcttcaggtttgtgaccactatcaacgtatcctacaactaaggacagtcacagagaaaatttactacctgaaattgcacccggatcaccctgaaaccgtgtttcacttctggattcgactggtgcagatcttgcagaagggcctctccattaccaccaaagatccacggatcttggtcactcattgtctcgtcccgaaaaactgcagcagtccttctggcgactccaagcttgtgcagaaaaagctgcaagcatctcagcctagcgaaagccttattcaactcatgaccaagggtgaatcggaagccctatcgcaaatatttgcagatctgcatcagcagaaccagctgtcttttagatcctcccgcaaggttgaaacaaataagaacagttccggcaaagactcttctagagaggactccattccatgcacatgtgacctcagatggagagcctccttcacgtatggggaatgggagcgcgaaaatccctctggtctccaacctctttccctgctgtcaactttggctgcatccaccggaccccaattggccccaccaatcggaaatagcatttag

SEQ ID NO: 225118 - DNA, 1035 bp, Artificial Sequence
  derived and/or modified sequence
atgctgagtagttttccacatcgaaagacatggaggaaatccaagaagaccgtgaaagtgacaaggagctatccaacctttcctagcctgaacgcttgggaggagttccgcggtctgcttcccgtagatggtgaacctaaccccggtgctggcctgggagtcgaggagggactgttgtgtcgtgtcgtgcacagtcccgaattcaatctgtttcttgactcggtggtgttcgagtcaaacttcattcaggtgaagcgcggtaggaactggagagatgtctacaaggcttcaaatactatggcgctaggtgtgacttccagtgtgccttgcctccctcttcctaatattctgctaatggcatctgtcaagtggcaccagggacagaaccagacttggaacagacccagcatagcacccaacatcttcttgaaacggattctccccctccgctttgtcgagcttcaagtctgtgaccactatcaacgcatcctgcagctccggacagtgactgaaaagatttactaccttaagctgcaccctgatcatcctgagactgtgttccatttttggattcgacttgttcagatcctgcaaaaagggctgagcatcactacaaaggatcctcggattttggtgacacactgcttagtgcccaagaattgctcaagcccttcgggggactctaaactggttcagaaaaagttgcaggcatcccagccaagtgagtccctcatccagctgatgactaagggggagagcgaagctttgagtcaaattttcgcagacctgcaccagcagaaccaacttagtttcaggtcctcaagaaaggttgagactaacaagaattcttcaggaaaggacagctctagagaggattctatcccttgtacatgtgatctgaggtggagggccagctttacctatggagagtgggaacgggaaaacccttcaggtttgcagccactcagcctcctgagcactctggctgctagcacaggaccccagttagctccccctattggcaatagcatttag

SEQ ID NO: 225119 - protein, 328 aa, Artificial Sequence
  derived and/or modified sequence
MYTLHTKRVKAAARQMWTSNLSKVRQSLKNVYHKCKIRHQDSTGYPTVTSDDCNQDDDSYDGKMNLPVVLQDVKTAQVELFSQMTDIVHMIPKVQEKTDLYQKQMEVLETRMNVNEDKQCTTTKDILSMKEDIKALKKKVTELEIQNSCSTIHCLEILEGERGKEITELLYKLIQPATLKNTLASTDMEISSAEPEKVPSYPKSTDHLEKKTISPQMKTLKKRNHQNASRSFEKAKPNIYIYPDFSTWIKLTFVHGGKWTFFLSATKLEEFIQWLLSRPTILPEEPQVITQRYCPFTGPILSLTTICLSIFNNIYGFICSLKEEVTRL

SEQ ID NO: 225120 - DNA, 987 bp, Artificial Sequence
  derived and/or modified sequence
atgtacaccctgcacaccaagagagtgaaggccgccgccagacagatgtggaccagcaacctgagcaaggtgagacagagcctgaagaacgtgtaccacaagtgcaagatcagacaccaggacagcaccggctaccccaccgtgaccagcgacgactgcaaccaggacgacgacagctacgacggcaagatgaacctgcccgtggtgctgcaggacgtgaagaccgcccaggtggagctgttcagccagatgaccgacatcgtgcacatgatccccaaggtgcaggagaagaccgacctgtaccagaagcagatggaggtgctggagaccagaatgaacgtgaacgaggacaagcagtgcaccaccaccaaggacatcctgagcatgaaggaggacatcaaggccctgaagaagaaggtgaccgagctggagatccagaacagctgcagcaccatccactgcctggagatcctggagggcgagagaggcaaggagatcaccgagctgctgtacaagctgatccagcccgccaccctgaagaacaccctggccagcaccgacatggagatcagcagcgccgagcccgagaaggtgcccagctaccccaagagcaccgaccacctggagaagaagaccatcagcccccagatgaagaccctgaagaagagaaaccaccagaacgccagcagaagcttcgagaaggccaagcccaacatctacatctaccccgacttcagcacctggatcaagctgaccttcgtgcacggcggcaagtggaccttcttcctgagcgccaccaagctggaggagttcatccagtggctgctgagcagacccaccatcctgcccgaggagccccaggtgatcacccagagatactgccccttcaccggccccatcctgagcctgaccaccatctgcctgagcatcttcaacaacatctacggcttcatctgcagcctgaaggaggaggtgaccagactgtag

SEQ ID NO: 225121 - DNA, 1294 bp, Artificial Sequence
  derived and/or modified sequence
aatgattaccatatgaaagattccatgcagttgactattatttcacagagctctctggttgggctgctctataagaagctaatcacctaacagtgtctattgctgtggctgatgatttccagagtgttctaagatgttatcaggaaaggcatccaacaaatagtaagagaaggaccatttcatttgtacattatttcttcctgtgattctgttttccaacaccttgcctcttgtttcaccatgaaagatgtacacacttcacaccaaaagggtaaaagctgctgctaggcagatgtggacttcaaatctctccaaggtcagacagtctcttaaaaatgtttaccacaaatgtaagattcggcaccaagattcaactggatatcccactgtgacatctgatgattgtaatcaagatgatgatagttatgacggaaaaatgaatcttccagtagtgctccaagatgttaaaactgctcaagttgaacttttcagccaaatgactgacattgtccatatgataccaaaagtccaggaaaagactgacttgtatcaaaaacagatggaggtcctggaaaccagaatgaatgttaatgaagacaaacaatgcacaacgactaaagatatcctctctatgaaagaagacatcaaggcattaaagaagaaggtgacagaactggaaattcagaattcctgctccacgatacattgtctagagattctggagggagaaaggggtaaagaaatcacagaactgctttacaaactcatacaaccagcaactctgaagaacactttggcctctacagacatggaaatctcttcagcagaaccagagaaagtgcccagttatccaaagtccactgaccatcttgagaaaaaaacaatttctccccaaatgaaaactctgaagaaacgtaaccatcaaaatgcatcaaggagctttgaaaaagcaaagccaaatatttacatttacccagacttcagtacatggatcaagctaacttttgttcatggaggaaaatggacatttttcctcagtgctaccaagttagaagaattcatccagtggcttctttctaggccaaccattcttcctgaggaaccccaggtcataacccagagatactgtccattcactgggcccattttgagcttgaccacaatctgtctctccatcttcaacaatatttacggctttatttgttccttaaaagaagaagtaactcgactatagagttatgttctgctttgcttggcacaaaataaatgtaacctggaggctccaagtattcac

SEQ ID NO: 225122 - DNA, 987 bp, Artificial Sequence
  derived and/or modified sequence
atgtatacactccacacaaaacgagtgaaggccgcggctcggcagatgtggacgtcaaatctctccaaggtgcgccaatcactgaaaaacgtctaccacaaatgcaagattcgccaccaggattccactggctaccctacagtgacaagcgatgattgtaaccaggacgacgattcctatgacggtaagatgaacctgccggtcgtgctgcaggacgtgaagactgctcaggttgagctattctctcagatgaccgatattgtccacatgatccctaaggtgcaggagaaaactgatttgtatcagaaacaaatggaagtcctcgaaactaggatgaatgttaacgaggataaacagtgcactacaaccaaagacattctgagtatgaaagaagatattaaagccttaaaaaagaaggtgaccgagcttgaaattcagaacagctgctcaacgatccactgcctggaaatcttagagggagaacgcgggaaggaaattacggagctgctctacaagcttatacagcccgccactctgaaaaatacactggcgagtacagacatggaaatatcctctgccgaacctgagaaggtgccatcctatcctaagtccaccgatcaccttgagaagaaaacaatttcccctcagatgaaaactctgaaaaagagaaaccaccagaacgccagccgaagctttgagaaagccaagcccaatatatacatctatcccgatttctcaacttggatcaagttaaccttcgtacatggcggcaagtggaccttctttctcagcgcaactaagcttgaggaattcatccagtggctgctatcccggcccaccatcttgcccgaggaacctcaggttattacacagaggtattgtccttttacaggcccaattctcagcctaacgaccatctgcctctcgatcttcaataatatctacggttttatatgcagcttgaaagaggaagtcacaaggctctag

SEQ ID NO: 225123 - DNA, 987 bp, Artificial Sequence
  derived and/or modified sequence
atgtacaccctgcacaccaagagggtgaaggccgccgcccggcagatgtggaccagcaacctgagcaaggtgcggcagagcctgaagaatgtgtaccacaagtgcaagatccgccaccaggacagcacaggctaccccaccgtgaccagtgatgactgcaaccaggatgatgacagctatgatggcaagatgaacctgcctgtggtgctgcaggatgtgaagacagcccaggtggagctgttcagccagatgacagacatcgtgcacatgatccccaaggtgcaggagaagacagacctgtaccagaagcagatggaggtgctggagaccaggatgaatgtgaatgaagacaagcagtgcaccaccaccaaggacatcctgtccatgaaggaggacatcaaggccctgaagaagaaggtgacagagctggagatccagaacagctgcagcaccatccactgcctggagatcctggagggggagcggggcaaggagatcacagagctgctgtacaagctgatccagcctgccaccctgaagaacaccctggccagcacagacatggagatcagcagcgctgagcctgagaaggtgcccagctaccccaagagcacagaccacctggagaagaagaccatcagcccccagatgaagaccctgaagaagaggaaccaccagaatgccagccgcagctttgagaaggccaagcccaacatctacatctacccagacttcagcacctggatcaagctgacctttgtgcatggaggcaagtggaccttcttcctgagcgccaccaagctggaggagttcatccagtggctgctgagccggcccaccatcctgcctgaggagccccaggtgatcacccagcgctactgccccttcaccggccccatcctgagcctgaccaccatctgcctgagcatcttcaacaacatctacggcttcatctgcagcctgaaggaggaggtgacccggctgtag

SEQ ID NO: 225124 - DNA, 987 bp, Artificial Sequence
  derived and/or modified sequence
atgtacaccctgcacaccaagcgggtgaaggccgccgcccggcagatgtggacatcaaatctgtcgaaggtccgccagtcgttgaaaaacgtctaccacaagtgtaaaatccgccatcaagactcaaccggctatcctacagtcaccagcgatgattgtaaccaggacgacgattcctatgatggtaaaatgaatcttcctgtggtgttacaggacgtgaagacggcccaggttgagctgttctctcagatgacggatatcgtacacatgattcccaaagtccaagaaaagaccgacctctatcagaagcagatggaggtgttggaaacacggatgaacgttaacgaagataaacagtgtacgactaccaaagacattttgtcaatgaaagaggacatcaaggcgctgaaaaagaaagtgacagaacttgagatccagaactcctgcagcacaatccactgcttagaaatcctggaaggggagcgtgggaaggagataaccgaacttctatacaaactcatacaaccagccactctgaagaacacgctggcttcaaccgatatggagatcagcagcgcagagccagagaaagtcccttcttatccgaagtcgacggatcatttggaaaaaaagacaatttccccgcagatgaagacactaaagaagaggaaccaccagaatgcctctagatcctttgaaaaggcaaagcctaacatctacatttaccctgacttctcgacttggatcaaactgaccttcgtccacggtggcaaatggacttttttcctgtctgcaacaaagctcgaggagttcatccagtggctcctgtcacgtccgaccattctgcccgaagagccacaagtcatcacccagcggtactgtccctttactggtcccattttaagcctcaccacaatttgcctcagtattttcaataacatctacggtttcatatgctcattaaaagaagaggtgaccagactctag

SEQ ID NO: 225125 - DNA, 987 bp, Artificial Sequence
  derived and/or modified sequence
atgtacacactgcacacgaagcgcgtgaaggccgcagcccgacagatgtggacgtccaacttaagtaaggtgcggcagagcttgaaaaacgtttatcacaaatgtaagatccgccaccaagattccacaggctaccccactgtgacctccgacgactgcaaccaagatgatgactcatatgacggtaagatgaatttgcccgtcgtccttcaagatgtgaaaaccgctcaggttgaattgtttagccagatgaccgatatcgtgcacatgattccaaaagtccaagaaaaaaccgatttgtaccaaaagcaaatggaggtgctggagacccgcatgaacgtgaatgaagacaagcagtgtaccactactaaggacatcctgtctatgaaagaggacattaaggctttaaagaaaaaggtgaccgagctcgagattcagaatagctgttcaaccattcattgccttgagatcctcgagggcgagcgagggaaagagataacagagttgctctacaagctaatacaacccgctactctgaagaacaccctcgcaagtaccgatatggaaatctcaagcgccgagcccgaaaaagtgccaagttatccaaaatccacagaccacctggaaaagaagactattagcccccagatgaaaacgttgaaaaagaggaaccaccagaatgcctcaaggtcatttgagaaagccaagcccaatatctacatctaccctgatttcagtacttggatcaaactgactttcgtgcacggcggaaaatggacattttttctttccgccactaagcttgaagaatttatccagtggttattgtcaaggccgaccatcctgccggaggagccccaggtgattacccagaggtactgccccttcacgggacccattctcagccttaccacaatttgtctgtcaatattcaataatatctacgggttcatttgcagtctcaaagaagaagtgactagactttag

SEQ ID NO: 225126 - protein, 176 aa, Artificial Sequence
  derived and/or modified sequence
MARVLKAAAANAVGLFSRLQAPIPTVRASSTSQPLDQVTGSVWNLGRLNHVAIAVPDLEKAAAFYKNILGAQVSEAVPLPEHGVSVVFVNLGNTKMELLHPLGRDSPIAGFLQKNKAGGMHHICIEVDNINAAVMDLKKKKIRSLSEEVKIGAHGKPVIFLHPKDCGGVLVELEQA

SEQ ID NO: 225127 - DNA, 531 bp, Artificial Sequence
  derived and/or modified sequence
atggctcgagttctgaaggcagcggcagccaacgccgtgggactgtttagtaggctgcaggcccctatccccaccgtgcgcgccagttcaacgtcccaaccattagatcaagtcaccggatctgtgtggaacctgggccggctgaatcacgttgctatcgccgtgccggatctggaaaaagccgctgcgttttacaaaaacatactgggagctcaagtaagcgaggctgtccctctccctgagcacggagtcagcgttgtgtttgtgaatctgggtaataccaagatggagcttctgcaccccttaggccgtgacagccccatcgccggcttcctgcagaagaacaaggctggtggcatgcaccatatttgcatagaagtagataacatcaacgccgccgtcatggacctcaaaaagaagaaaatcagatctcttagcgaggaagtcaagataggcgcccacggcaagcccgtgatctttctgcaccccaaagactgcggaggggtgctcgttgaactggaacaggcatag

SEQ ID NO: 225128 - DNA, 531 bp, Artificial Sequence
  derived and/or modified sequence
atggcccgggtgctgaaggctgctgctgccaatgctgtgggcctcttcagccggctgcaggcccccatccccaccgtgcgggccagcagcaccagccagcccctggaccaggtgactggatctgtgtggaacctgggccgcctgaaccacgtggccatcgctgtgcctgacctggagaaggccgccgccttctacaagaacatcctgggcgcccaggtgtctgaggccgtgcccctgcctgagcacggcgtgtctgtggtgtttgtgaacctgggcaacaccaagatggagctgctgcaccccctgggccgggacagccccatcgccggcttcctgcagaagaacaaggccggcggcatgcaccacatctgcatcgaggtggacaacatcaatgctgctgtgatggacctgaagaagaagaagatccgcagcctgtctgaggaggtgaagattggagcccacggcaagcctgtgatcttcctgcaccccaaggactgtggcggcgtgctggtggagctggagcaggcctag

SEQ ID NO: 225129 - DNA, 835 bp, Artificial Sequence
  derived and/or modified sequence
ggcgggttgctttccaaaatggcgcgggtgctgaaggctgcagccgcgaatgccgtagggcttttttccagacttcaagctcccattccaacagtaagagcttcttccacatcacagcccttggatcaagtgacaggttctgtgtggaacctgggtcgactcaaccatgtagccatagcagtgccagatttggaaaaggctgcagcattttataagaatattctgggggcccaggtaagtgaagcggtccctcttcctgaacatggagtatctgttgtttttgtcaacctgggaaataccaagatggaactgcttcatccattgggacgtgacagtccaattgcaggttttctgcagaaaaacaaggctggaggaatgcatcacatctgcatcgaggtggataatattaatgcagctgtgatggatttgaaaaaaaagaagatccgcagtctaagtgaagaggtcaaaataggagcacatggaaaaccagtgatttttctccatcctaaagactgtggtggagtccttgtggaactggagcaagcttgatttatatttgcaagcaactaaattaattgacctgaaaaagcctatcaaatactatcaaaatgtactatgacattgagtccttcactgcttccatcatgtaaaagttcacagttaaagactgaattacagaaagattaaaatatatacatatataaatacataaatatgtatattatttagattaacaaacatatttgttaatttgaatttgaagaaaatcttgattactaattacttagggaacattattaaaatcatatagaaataaattattcctcttctacaa

SEQ ID NO: 225130 - DNA, 531 bp, Artificial Sequence
  derived and/or modified sequence
atggcccgggtgctgaaggccgccgccgccaacgccgtgggcctgttctcaagattacaggcgccaatccctactgtgcgagcatcatctacctcccagcctctggaccaggtgactggctccgtttggaatctaggtcggctgaatcatgtcgcaatagctgttcccgatttagaaaaggccgccgcattttataaaaatatcctcggagcccaggttagcgaggccgtgcccctgcccgaacatggagtgtcagtagtgtttgttaacctggggaacaccaaaatggagttgctgcacccattaggccgcgactcccctattgccggtttcctccagaaaaataaagcgggtggcatgcatcacatctgcatcgaagtggacaacataaatgcagctgtgatggacttaaaaaagaaaaagattcgtagcctatcagaagaggttaaaataggagctcatggtaagcctgttattttcctgcatcctaaagactgtggaggagttttggtcgagctggagcaggcatag

SEQ ID NO: 225131 - DNA, 531 bp, Artificial Sequence
  derived and/or modified sequence
atggcacgggtcttgaaagccgcagccgcaaatgcagtcggcctttttagtaggctacaagcacctattcctactgtacgcgcttcgtcaacatcacagccactggatcaggttacgggaagcgtgtggaatttgggtcgtttgaaccacgtggcaatcgctgttccagatctggaaaaggctgcagctttctacaagaacatactgggggcacaggtctccgaggcagtgccgttgccagagcatggagtgagtgttgtgtttgttaacctcggcaacacgaagatggagcttctgcaccctttaggtcgggattcacctatcgccggattcctgcagaagaacaaagccggaggcatgcatcatatctgcatcgaggtggacaacatcaacgccgcagtgatggaccttaagaaaaagaagatccgctctctgtctgaggaagtcaagattggagctcacggcaaacccgttatattcctgcacccaaaagactgcgggggagtgcttgtagagctagagcaggcctag

SEQ ID NO: 225132 - DNA, 531 bp, Artificial Sequence
  derived and/or modified sequence
atggccagagtgctgaaggccgccgccgccaacgccgtgggcctgttcagcagactgcaggcccccatccccaccgtgagagccagcagcaccagccagcccctggaccaggtgaccggcagcgtgtggaacctgggcagactgaaccacgtggccatcgccgtgcccgacctggagaaggccgccgccttctacaagaacatcctgggcgcccaggtgagcgaggccgtgcccctgcccgagcacggcgtgagcgtggtgttcgtgaacctgggcaacaccaagatggagctgctgcaccccctgggcagagacagccccatcgccggcttcctgcagaagaacaaggccggcggcatgcaccacatctgcatcgaggtggacaacatcaacgccgccgtgatggacctgaagaagaagaagatcagaagcctgagcgaggaggtgaagatcggcgcccacggcaagcccgtgatcttcctgcaccccaaggactgcggcggcgtgctggtggagctggagcaggcctag

SEQ ID NO: 225133 - protein, 753 aa, Artificial Sequence
  derived and/or modified sequence
MRPVSVWQWSPWGLLLCLLCSSCLGSPSPSTGPEKKAGSQGLRFRLAGFPRKPYEGRVEIQRAGEWGTICDDDFTLQAAHILCRELGFTEATGWTHSAKYGPGTGRIWLDNLSCSGTEQSVTECASRGWGNSDCTHDEDAGVICKDQRLPGFSDSNVIEVEHHLQVEEVRIRPAVGWGRRPLPVTEGLVEVRLPDGWSQVCDKGWSAHNSHVVCGMLGFPSEKRVNAAFYRLLAQRQQHSFGLHGVACVGTEAHLSLCSLEFYRANDTARCPGGGPAVVSCVPGPVYAASSGQKKQQQSKPQGEARVRLKGGAHPGEGRVEVLKASTWGTVCDRKWDLHAASVVCRELGFGSAREALSGARMGQGMGAIHLSEVRCSGQELSLWKCPHKNITAEDCSHSQDAGVRCNLPYTGAETRIRLSGGRSQHEGRVEVQIGGPGPLRWGLICGDDWGTLEAMVACRQLGLGYANHGLQETWYWDSGNITEVVMSGVRCTGTELSLDQCAHHGTHITCKRTGTRFTAGVICSETASDLLLHSALVQETAYIEDRPLHMLYCAAEENCLASSARSANWPYGHRRLLRFSSQIHNLGRADFRPKAGRHSWVWHECHGHYHSMDIFTHYDILTPNGTKVAEGHKASFCLEDTECQEDVSKRYECANFGEQGITVGCWDLYRHDIDCQWIDITDVKPGNYILQVVINPNFEVAESDFTNNAMKCNCKYDGHRIWVHNCHIGDAFSEEANRRFERYPGQTSNQII

SEQ ID NO: 225134 - protein, 697 aa, Artificial Sequence
  derived and/or modified sequence
MRPVSVWQWSPWGLLLCLLCSSCLGSPSPSTGPEKKAGSQGLRFRLAGFPRKPYEGRVEIQRAGEWGTICDDDFTLQAAHILCRELGFTEATGWTHSAKYGPGTGRIWLDNLSCSGTEQSVTECASRGWGNSDCTHDEDAGVICKDQRLPGFSDSNVIEVEHHLQVEEVRIRPAVGWGRRPLPVTEGLVEVRLPDGWSQVCDKGWSAHNSHVVCGMLGFPSEKRVNAAFYRLLAQRQQHSFGLHGVACVGTEAHLSLCSLEFYRANDTARCPGGGPAVVSCVPGPVYAASSGQKKQQQSKPQGEARVRLKGGAHPGEGRVEVLKASTWGTVCDRKWDLHAASVVCRELGFGSAREALSGARMGQGMGAIHLSEVRCSGQELSLWKCPHKNITAEDCSHSQDAGVRCNLPYTGAETRETWYWDSGNITEVVMSGVRCTGTELSLDQCAHHGTHITCKRTGTRFTAGVICSETASDLLLHSALVQETAYIEDRPLHMLYCAAEENCLASSARSANWPYGHRRLLRFSSQIHNLGRADFRPKAGRHSWVWHECHGHYHSMDIFTHYDILTPNGTKVAEGHKASFCLEDTECQEDVSKRYECANFGEQGITVGCWDLYRHDIDCQWIDITDVKPGNYILQVVINPNFEVAESDFTNNAMKCNCKYDGHRIWVHNCHIGDAFSEEANRRFERYPGQTSNQII

SEQ ID NO: 225135 - protein, 303 aa, Artificial Sequence
  derived and/or modified sequence
MRPVSVWQWSPWGLLLCLLCSSCLGSPSPSTGPEKKAGSQGLRFRLAGFPRKPYEGRVEIQRAGEWGTICDDDFTLQAAHILCRELGFTEATGWTHSAKYGPGTGRIWLDNLSCSGTEQSVTECASRGWGNSDCTHDEDAGVICKDQRLPGFSDSNVIEVEHHLQVEEVRIRPAVGWGRRPLPVTEGLVEVRLPDGWSQVCDKGWSAHNSHVVCGMLGFPSEKRVNAAFYRLLAQRQQHSFGLHGVACVGTEAHLSLCSLEFYRANDTARCPGGGPAVVSCVPGPVYAASSGQKKQQQSKPQG

SEQ ID NO: 225136 - DNA, 2262 bp, Artificial Sequence
  derived and/or modified sequence
atgaggccagtgtcagtgtggcaatggagcccctggggcctgctgttatgcctgttgtgttcctcgtgcctgggctctccaagcccaagcaccgggccagaaaagaaagcgggctcccaagggctgcgcttcaggctggcgggctttccaagaaagccttacgagggaagggtggaaatccagcgggcaggggaatggggcacaatctgcgacgatgactttaccctgcaggcagctcatatcctttgcagggagctcggcttcaccgaggccacagggtggactcacagcgcgaagtacggccccgggaccggaagaatctggttggataatctctcttgctcgggcaccgagcagtcagtgacagagtgcgccagtagagggtggggcaattccgattgtacacacgacgaagacgctggggtaatctgcaaggaccaacgactccctggattcagcgatagcaacgtgatcgaggtggagcatcaccttcaggtggaggaagtgcgcatccgtccagccgtgggctggggaagacgcccattgcccgtcacagaagggttagtagaagtgaggttacctgacggatggtctcaggtgtgcgacaaagggtggtccgcacataactcccacgtagtatgtggcatgctcggctttcctagcgagaagagagtaaatgctgcattttatcgcctgctggcccagcgccaacagcactccttcgggctgcatggagttgcatgcgtgggtactgaggcccatctctccctgtgctccctggaattttacagggccaacgataccgcaagatgcccgggcggggggcctgccgttgtcagctgtgttccgggccctgtgtacgccgcctctagtgggcagaaaaaacaacaacagagcaaaccgcaaggggaggctcgagtgcggctgaaagggggtgcccatcctggggaggggcgagtggaggtgctgaaggccagtacctgggggacagtgtgcgacaggaagtgggatttgcatgccgcctccgtcgtttgtcgagaactgggctttggatcagctcgggaggccctgagcggcgcacgcatgggacaaggtatgggggccatccacttaagtgaagtgcgctgttccgggcaggaactgtccctgtggaagtgccctcataaaaatattaccgctgaagattgttcacacagccaggacgcaggggtgcgctgtaatctaccttacacaggcgcagaaaccagaattaggctcagcgggggacgcagtcagcacgagggaagagttgaggtccagataggaggacctggtcctctgcgctggggattaatttgcggtgacgactggggcactctggaggccatggtcgcttgccgtcagctgggtttggggtatgccaaccacgggctgcaggaaacgtggtactgggattctggcaacatcaccgaggtggtgatgagtggggtcagatgtactggaacagagctgtcactggaccagtgtgctcaccacgggacacatataacttgcaagagaacaggaacacgcttcaccgctggagtcatttgttccgaaacagcatctgacctgctgctccacagcgcacttgtacaggaaactgcctacattgaagataggccactgcatatgttgtactgcgccgctgaagagaactgcctcgcttccagcgccagaagcgcaaattggccctacgggcaccggcgacttctcagattctcctctcagatccataacctcgggcgtgctgatttcagacctaaagccggccgccacagttgggtgtggcacgagtgccatggacactatcactctatggatatcttcacccactacgatatcttaacgcctaatgggactaaggtggcagaaggacataaagctagcttttgcctcgaagatactgaatgccaggaagatgtgtccaagcgttacgagtgcgctaattttggtgaacaagggatcacagtagggtgctgggatctgtatcgccacgacattgactgtcagtggattgatattacagatgtaaagcccggtaactacatactccaggtcgtgataaatcccaacttcgaggtggccgagagcgactttactaacaacgcgatgaagtgtaactgtaaatacgatggtcatcgcatttgggtccacaactgccatattggcgatgctttttcagaagaggccaatcgccgattcgagaggtacccaggtcagacttcaaatcagatcatttag

SEQ ID NO: 225137 - DNA, 2094 bp, Artificial Sequence
  derived and/or modified sequence
atgcgcccggtgagcgtatggcaatggtccccgtgggggttactcctttgtttgctgtgttccagttgtttaggatcccctagccctagcactggccccgagaaaaaggccgggtctcagggtcttagatttagactggccggtttcccccgtaaaccatacgaaggccgtgtggagattcagagagcaggtgaatggggaactatttgtgacgacgactttacattacaggcagcacatattctatgcagagaacttggattcacagaagctacgggctggacacactctgcaaaatatggtcccggcacaggaagaatttggcttgacaatctgtcctgtagtgggaccgaacagtccgtcaccgaatgtgcatcaagaggatggggaaactctgactgtactcatgatgaggatgctggggtaatctgtaaagaccagagactgccgggctttagcgattctaacgtcatcgaagttgaacatcacctgcaggttgaagaagtcagaatccgccccgccgttggctggggccgccgaccattaccagtcactgagggtctggtggaagttcggctccccgacggttggtctcaggtgtgtgacaagggatggtctgctcacaattcccacgtggtttgtggtatgctcggctttcctagcgaaaagagggttaacgccgcattctatcgtctgctagcccagaggcagcaacactcctttggattgcacggagtggcgtgcgttgggacagaagcccacttaagcctctgctctcttgagttctacagagctaatgataccgctaggtgtcccgggggcgggccagccgtcgtatcttgtgtgcctggacccgtttatgcggccagctctggccagaaaaagcaacaacaaagcaagccccaaggcgaggcgcgagtccggcttaagggaggcgcccaccccggcgagggacgggttgaagtgctaaaggcatctacttggggaaccgtctgtgacaggaaatgggatcttcacgcagctagcgttgtttgccgggagctcgggtttgggtcagcccgagaggcactctcgggggctaggatggggcagggtatgggggcaatccacttaagtgaggtgcgctgtagcgggcaggagctttccttgtggaagtgcccccataagaacattaccgcggaagactgttcccattctcaggacgcaggcgtccggtgcaatctgccctataccggcgctgaaactcgtgaaacttggtactgggactccggaaacatcacagaggtggtgatgagcggtgtgcggtgtactgggactgaactgtctttagatcaatgtgctcaccacggaacgcacatcacgtgcaagcgcaccggaaccagattcaccgccggagttatttgttccgaaaccgcatccgacttactgctgcacagtgctctagtccaggagaccgcgtatattgaagacaggcctcttcatatgctgtactgcgctgctgaagaaaactgcctggcaagctctgcgcgctctgccaactggccatacggtcacagaaggctcctgaggtttagttcacagatccacaatctcggccgggccgatttcaggccaaaggccggacggcacagctgggtttggcatgagtgccatggacactatcattctatggacatttttacccattacgacatcctgacacctaatggcaccaaagtcgcggagggacacaaggcatcattctgcctcgaggatacggaatgccaagaagacgtgtctaagagatatgagtgtgcaaatttcggggagcagggcattacagtgggttgctgggacctgtatcgccacgacattgattgtcaatggatcgacatcaccgatgtgaagccgggaaactatatcttgcaggttgtgatcaaccctaatttcgaggtagcggagagtgatttcacgaacaatgccatgaagtgcaactgtaagtatgacgggcaccggatatgggtacacaattgtcatatcggcgatgcatttagcgaggaagccaaccgtcggttcgaaaggtatccagggcagacctcaaaccagattatttag

SEQ ID NO: 225138 - DNA, 912 bp, Artificial Sequence
  derived and/or modified sequence
atgcgacccgtctctgtgtggcagtggagtccatggggcctcctcttatgtctactgtgctcgtcgtgcctcggatcccctagcccctctaccggacctgaaaaaaaagctggaagccaggggctgcggtttaggctcgcagggtttccgcgcaaaccctacgaggggagagttgagattcagcgggctggcgaatggggcaccatttgtgacgatgactttaccctgcaggctgcccatatactgtgtcgggagttaggatttactgaggctacgggatggacccattctgcaaaatacgggcccggcaccggccgaatctggctggataatctgtcctgtagcggaacagagcagtcagtgaccgaatgtgccagccgcggctggggaaattccgactgtactcatgatgaagacgctggtgtgatctgtaaagatcagcgcctgcccggcttttctgattccaatgttattgaggtggagcaccatctgcaggtggaagaggtgaggatcagacctgccgtaggctgggggagaaggcccctgccggttactgaggggctcgtcgaagtgcggctgcccgatggttggtcccaggtgtgtgataaggggtggagtgcccataactctcatgtcgtgtgcggcatgctaggctttccaagcgagaaaagagtcaacgccgctttttatcggctgctcgctcagcggcagcagcattcttttgggctgcatggagttgcttgtgtgggaacagaagcccatcttagcctgtgcagtctggagttttaccgggccaatgacacagcccgctgtccagggggaggcccagctgtggtctcctgcgtgcctggccctgtctacgctgctagctcaggacagaaaaagcagcagcagtcaaaaccccagggctag

SEQ ID NO: 225139 - DNA, 2262 bp, Artificial Sequence
  derived and/or modified sequence
atgaggcctgtgtctgtgtggcagtggagcccctggggcctgctgctgtgcctgctgtgcagcagctgcctgggcagccccagccccagcactggacctgagaagaaggccggcagccagggcctgcgcttccggctggccggcttccccaggaagccctatgagggccgggtggagatccagagagctggggagtggggcaccatctgtgatgatgacttcaccctgcaggccgcccacatcctgtgccgggagctgggcttcacagaggccaccggctggacccacagcgccaagtatggccctggcaccggccgcatctggctggacaacctgagctgcagcggcacagagcagagcgtgacagaatgtgccagccggggctggggcaacagcgactgcacccatgatgaagatgctggggtcatctgcaaggaccagaggctgcccggcttcagtgacagcaatgtcatcgaggtggagcaccacctgcaggtggaggaggtgcgcatccggcctgctgtgggctggggcagaagacccctgcctgtgacagagggcctggtggaggtgcggctgcctgatggctggagccaggtgtgtgacaagggctggagcgcccacaacagccacgtggtgtgtggcatgctgggcttccccagcgagaagagggtgaatgctgccttctaccgcctgctggcccagaggcagcagcacagctttggcctgcacggcgtggcctgtgtgggcacagaggcccacctgagcctgtgcagcctggagttctaccgggccaatgacacagcccgctgccctgggggcggccctgctgtggtgtcctgtgtgcccggccctgtgtatgctgccagcagcggccagaagaagcagcagcagagcaagccccagggcgaggcccgggtgcggctgaagggcggggcccaccctggagagggccgggtggaggtgctgaaggccagcacctggggcaccgtgtgtgacaggaagtgggacctgcacgccgcctctgtggtgtgccgggagctgggcttcggcagcgcccgggaggccctgagcggggccaggatgggccagggcatgggcgccatccacctgtctgaggtgcgctgcagcggccaggagctgagcctgtggaagtgcccccacaagaacatcacagctgaggactgcagccacagccaggatgctggggtgcgctgcaacctgccctacacaggagctgagacccgcatccggctgagcggcggccgcagccagcacgagggccgggtggaggtgcagatcggcggccctggccccctgcgctggggcctcatctgtggagatgactggggcaccctggaggccatggtggcctgccggcagctgggcctgggctacgccaaccacggcctgcaggagacctggtactgggacagcggcaacatcacagaggtggtgatgtctggagtgcgctgcacaggaacagagctgagcctggaccagtgtgcccaccacggcacccacatcacctgcaagaggacaggcacccgcttcaccgctggggtcatctgcagcgagacagccagtgacctgctgctgcacagcgccctggtgcaggagacagcctacattgaagatcggcccctgcacatgctgtactgtgccgctgaggagaactgcctggccagcagcgcccggagcgccaactggccctacggccaccggcggctgctgcgcttcagcagccagatccacaacctgggccgggctgacttccggcccaaggccggccgccacagctgggtgtggcatgaatgtcatggccactaccacagcatggacatcttcacccactatgacatcctgaccccaaatggcaccaaggtggccgagggccacaaggccagcttctgcctggaggacacagagtgccaggaggatgtgtccaagagatatgaatgtgccaactttggagagcagggcatcaccgtgggctgctgggacctgtacagacatgacatcgactgccagtggattgacatcacagatgtgaagccaggcaactacatcctgcaggtggtgatcaaccccaactttgaggtggccgagagtgacttcaccaacaatgccatgaagtgcaactgcaagtatgatggccaccgcatctgggtgcacaactgccacatcggagatgccttcagcgaggaggccaacagaagatttgagcgctacccaggccagaccagcaaccagatcatctag

SEQ ID NO: 225140 - DNA, 2094 bp, Artificial Sequence
  derived and/or modified sequence
atgaggcctgtgtctgtgtggcagtggagcccctggggcctgctgctgtgcctgctgtgcagcagctgcctgggcagccccagccccagcactggacctgagaagaaggccggcagccagggcctgcgcttccggctggccggcttccccaggaagccctatgagggccgggtggagatccagagagctggggagtggggcaccatctgtgatgatgacttcaccctgcaggccgcccacatcctgtgccgggagctgggcttcacagaggccaccggctggacccacagcgccaagtatggccctggcaccggccgcatctggctggacaacctgagctgcagcggcacagagcagagcgtgacagaatgtgccagccggggctggggcaacagcgactgcacccatgatgaagatgctggggtcatctgcaaggaccagaggctgcccggcttcagtgacagcaatgtcatcgaggtggagcaccacctgcaggtggaggaggtgcgcatccggcctgctgtgggctggggcagaagacccctgcctgtgacagagggcctggtggaggtgcggctgcctgatggctggagccaggtgtgtgacaagggctggagcgcccacaacagccacgtggtgtgtggcatgctgggcttccccagcgagaagagggtgaatgctgccttctaccgcctgctggcccagaggcagcagcacagctttggcctgcacggcgtggcctgtgtgggcacagaggcccacctgagcctgtgcagcctggagttctaccgggccaatgacacagcccgctgccctgggggcggccctgctgtggtgtcctgtgtgcccggccctgtgtatgctgccagcagcggccagaagaagcagcagcagagcaagccccagggcgaggcccgggtgcggctgaagggcggggcccaccctggagagggccgggtggaggtgctgaaggccagcacctggggcaccgtgtgtgacaggaagtgggacctgcacgccgcctctgtggtgtgccgggagctgggcttcggcagcgcccgggaggccctgagcggggccaggatgggccagggcatgggcgccatccacctgtctgaggtgcgctgcagcggccaggagctgagcctgtggaagtgcccccacaagaacatcacagctgaggactgcagccacagccaggatgctggggtgcgctgcaacctgccctacacaggagctgagacccgggagacctggtactgggacagcggcaacatcacagaggtggtgatgtctggagtgcgctgcacaggaacagagctgagcctggaccagtgtgcccaccacggcacccacatcacctgcaagaggacaggcacccgcttcaccgctggggtcatctgcagcgagacagccagtgacctgctgctgcacagcgccctggtgcaggagacagcctacattgaagatcggcccctgcacatgctgtactgtgccgctgaggagaactgcctggccagcagcgcccggagcgccaactggccctacggccaccggcggctgctgcgcttcagcagccagatccacaacctgggccgggctgacttccggcccaaggccggccgccacagctgggtgtggcatgaatgtcatggccactaccacagcatggacatcttcacccactatgacatcctgaccccaaatggcaccaaggtggccgagggccacaaggccagcttctgcctggaggacacagagtgccaggaggatgtgtccaagagatatgaatgtgccaactttggagagcagggcatcaccgtgggctgctgggacctgtacagacatgacatcgactgccagtggattgacatcacagatgtgaagccaggcaactacatcctgcaggtggtgatcaaccccaactttgaggtggccgagagtgacttcaccaacaatgccatgaagtgcaactgcaagtatgatggccaccgcatctgggtgcacaactgccacatcggagatgccttcagcgaggaggccaacagaagatttgagcgctacccaggccagaccagcaaccagatcatctag

SEQ ID NO: 225141 - DNA, 912 bp, Artificial Sequence
  derived and/or modified sequence
atgaggcctgtgtctgtgtggcagtggagcccctggggcctgctgctgtgcctgctgtgcagcagctgcctgggcagccccagccccagcactggacctgagaagaaggccggcagccagggcctgcgcttccggctggccggcttccccaggaagccctatgagggccgggtggagatccagagagctggggagtggggcaccatctgtgatgatgacttcaccctgcaggccgcccacatcctgtgccgggagctgggcttcacagaggccaccggctggacccacagcgccaagtatggccctggcaccggccgcatctggctggacaacctgagctgcagcggcacagagcagagcgtgacagaatgtgccagccggggctggggcaacagcgactgcacccatgatgaagatgctggggtcatctgcaaggaccagaggctgcccggcttcagtgacagcaatgtcatcgaggtggagcaccacctgcaggtggaggaggtgcgcatccggcctgctgtgggctggggcagaagacccctgcctgtgacagagggcctggtggaggtgcggctgcctgatggctggagccaggtgtgtgacaagggctggagcgcccacaacagccacgtggtgtgtggcatgctgggcttccccagcgagaagagggtgaatgctgccttctaccgcctgctggcccagaggcagcagcacagctttggcctgcacggcgtggcctgtgtgggcacagaggcccacctgagcctgtgcagcctggagttctaccgggccaatgacacagcccgctgccctgggggcggccctgctgtggtgtcctgtgtgcccggccctgtgtatgctgccagcagcggccagaagaagcagcagcagagcaagccccagggctag

SEQ ID NO: 225142 - DNA, 3502 bp, Artificial Sequence
  derived and/or modified sequence
taggactgatctccaggaccagcactcttctcccagcccttagggtcctgctcggccaaggccttccctgccatgcgacctgtcagtgtctggcagtggagcccctgggggctgctgctgtgcctgctgtgcagttcgtgcttggggtctccgtccccttccacgggccctgagaagaaggccgggagccaggggcttcggttccggctggctggcttccccaggaagccctacgagggccgcgtggagatacagcgagctggtgaatggggcaccatctgcgatgatgacttcacgctgcaggctgcccacatcctctgccgggagctgggcttcacagaggccacaggctggacccacagtgccaaatatggccctggaacaggccgcatctggctggacaacttgagctgcagtgggaccgagcagagtgtgactgaatgtgcctcccggggctgggggaacagtgactgtacgcacgatgaggatgctggggtcatctgcaaagaccagcgcctccctggcttctcggactccaatgtcattgaggtagagcatcacctgcaagtggaggaggtgcgaattcgacccgccgttgggtggggcagacgacccctgcccgtgacggaggggctggtggaagtcaggcttcctgacggctggtcgcaagtgtgcgacaaaggctggagcgcccacaacagccacgtggtctgcgggatgctgggcttccccagcgaaaagagggtcaacgcggccttctacaggctgctagcccaacggcagcaacactcctttggtctgcatggggtggcgtgcgtgggcacggaggcccacctctccctctgttccctggagttctatcgtgccaatgacaccgccaggtgccctggggggggccctgcagtggtgagctgtgtgccaggccctgtctacgcggcatccagtggccagaagaagcaacaacagtcgaagcctcagggggaggcccgtgtccgtctaaagggcggcgcccaccctggagagggccgggtagaagtcctgaaggccagcacatggggcacagtctgtgaccgcaagtgggacctgcatgcagccagcgtggtgtgtcgggagctgggcttcgggagtgctcgagaagctctgagtggcgctcgcatggggcagggcatgggtgctatccacctgagtgaagttcgctgctctggacaggagctctccctctggaagtgcccccacaagaacatcacagctgaggattgttcacatagccaggatgccggggtccggtgcaacctaccttacactggggcagagaccaggatccgactcagtgggggccgcagccaacatgaggggcgagtcgaggtgcaaatagggggacctgggccccttcgctggggcctcatctgtggggatgactgggggaccctggaggccatggtggcctgtaggcaactgggtctgggctacgccaaccacggcctgcaggagacctggtactgggactctgggaatataacagaggtggtgatgagtggagtgcgctgcacagggactgagctgtccctggatcagtgtgcccatcatggcacccacatcacctgcaagaggacagggacccgcttcactgctggagtcatctgttctgagactgcatcagatctgttgctgcactcagcactggtgcaggagaccgcctacatcgaagaccggcccctgcatatgttgtactgtgctgcggaagagaactgcctggccagctcagcccgctcagccaactggccctatggtcaccggcgtctgctccgattctcctcccagatccacaacctgggacgagctgacttcaggcccaaggctgggcgccactcctgggtgtggcacgagtgccatgggcattaccacagcatggacatcttcactcactatgatatcctcaccccaaatggcaccaaggtggctgagggccacaaagctagtttctgtctcgaagacactgagtgtcaggaggatgtctccaagcggtatgagtgtgccaactttggagagcaaggcatcactgtgggttgctgggatctctaccggcatgacattgactgtcagtggattgacatcacggatgtgaagccaggaaactacattctccaggttgtcatcaacccaaactttgaagtagcagagagtgactttaccaacaatgcaatgaaatgtaactgcaaatatgatggacatagaatctgggtgcacaactgccacattggtgatgccttcagtgaagaggccaacaggaggtttgaacgctaccctggccagaccagcaaccagattatctaagtgccactgccctctgcaaaccaccactggcccctaatggcaggggtctgaggctgccattacctcaggagcttaccaagaaacccatgtcagcaaccgcactcatcagaccatgcactatggatgtggaactgtcaagcagaagttttcaccctccttcagaggccagctgtcagtatctgtagccaagcatgggaatctttgctcccaggcccagcaccgagcagaacagaccagagcccaccacaccacaaagagcagcacctgactaactgcccacaaaagatggcagcagctcattttctttaataggaggtcaggatggtcagctccagtatctcccctaagtttagggggatacagctttacctctagccttttggtgggggaaaagatccagccctcccacctcattttttactataatatgttgctaggtataattttattttatataaaaagtgtttctgtgattcttcagagcccaggagtcagtgctggtggttggagggacctgcccccactggttcatttaaccctctgtctcggtgccctcagaacctcagccagaaaggcaaggaggaaatcagagcaggagcctcatactcttggtgatctattcattctgtgacctcaggggtcacatataaggtcagtgtttctcgtccccgccggatctgcactgccaactgggattgggttcgaacagcttcataaacatcttcagcattttgtaccatctgctccccaatggccaaaatcacatcaccaggccgcagaccagccctatagagaaaaatggacagagagaaaggaaggagtacaaagcctagttcaaggacacatgcacaccttgcccatccccatatcacactgcagcctctccctcaccggtgtgcaggggagcccaggatgactttatggatgagtacaccatgctgaacatcgggaaagcttggttctcgaagctgtagttcagcaaggatgctgaaagtacacagatcaccctattagccaaacccaggcattctccccatcctgagttccacctcaagtctctcatcaacacattgataaatatatggacaggacatgggctaggtactacaaaatacaatggcaactcactttctgtcttctagcaataaagtgcaacatgtacataaaa

SEQ ID NO: 225143 - DNA, 2897 bp, Artificial Sequence
  derived and/or modified sequence
atactgagtgcttagttctttgcctatcactttctatccgttgtctctctcctctgtgtctttctggttttctctctctcattcccacagtctcccttcctctcacatcctgtctgtctgggtcttcctctctctctacgtgtctcttgctcagtctctatctctttttattgacccttctctgactctcgatctctcatagttgtctcttatctctgggtctctcaggctgtgcctctatgacctgtgcctcagcccttatttaatgtgtttctctccctgtctcttggtccctggggctctttctctcctgttgtctctcgctgtctctgtcttactcagtgtctgtttttctttcgtgacttctccctctctttctgactctgggccccactcaatctgtttctctcacgcacactttgtctctggggcacccaggccttccctgccatgcgacctgtcagtgtctggcagtggagcccctgggggctgctgctgtgcctgctgtgcagttcgtgcttggggtctccgtccccttccacgggccctgagaagaaggccgggagccaggggcttcggttccggctggctggcttccccaggaagccctacgagggccgcgtggagatacagcgagctggtgaatggggcaccatctgcgatgatgacttcacgctgcaggctgcccacatcctctgccgggagctgggcttcacagaggccacaggctggacccacagtgccaaatatggccctggaacaggccgcatctggctggacaacttgagctgcagtgggaccgagcagagtgtgactgaatgtgcctcccggggctgggggaacagtgactgtacgcacgatgaggatgctggggtcatctgcaaagaccagcgcctccctggcttctcggactccaatgtcattgaggtagagcatcacctgcaagtggaggaggtgcgaattcgacccgccgttgggtggggcagacgacccctgcccgtgacggaggggctggtggaagtcaggcttcctgacggctggtcgcaagtgtgcgacaaaggctggagcgcccacaacagccacgtggtctgcgggatgctgggcttccccagcgaaaagagggtcaacgcggccttctacaggctgctagcccaacggcagcaacactcctttggtctgcatggggtggcgtgcgtgggcacggaggcccacctctccctctgttccctggagttctatcgtgccaatgacaccgccaggtgccctggggggggccctgcagtggtgagctgtgtgccaggccctgtctacgcggcatccagtggccagaagaagcaacaacagtcgaagcctcagggggaggcccgtgtccgtctaaagggcggcgcccaccctggagagggccgggtagaagtcctgaaggccagcacatggggcacagtctgtgaccgcaagtgggacctgcatgcagccagcgtggtgtgtcgggagctgggcttcgggagtgctcgagaagctctgagtggcgctcgcatggggcagggcatgggtgctatccacctgagtgaagttcgctgctctggacaggagctctccctctggaagtgcccccacaagaacatcacagctgaggattgttcacatagccaggatgccggggtccggtgcaacctaccttacactggggcagagaccagggagacctggtactgggactctgggaatataacagaggtggtgatgagtggagtgcgctgcacagggactgagctgtccctggatcagtgtgcccatcatggcacccacatcacctgcaagaggacagggacccgcttcactgctggagtcatctgttctgagactgcatcagatctgttgctgcactcagcactggtgcaggagaccgcctacatcgaagaccggcccctgcatatgttgtactgtgctgcggaagagaactgcctggccagctcagcccgctcagccaactggccctatggtcaccggcgtctgctccgattctcctcccagatccacaacctgggacgagctgacttcaggcccaaggctgggcgccactcctgggtgtggcacgagtgccatgggcattaccacagcatggacatcttcactcactatgatatcctcaccccaaatggcaccaaggtggctgagggccacaaagctagtttctgtctcgaagacactgagtgtcaggaggatgtctccaagcggtatgagtgtgccaactttggagagcaaggcatcactgtgggttgctgggatctctaccggcatgacattgactgtcagtggattgacatcacggatgtgaagccaggaaactacattctccaggttgtcatcaacccaaactttgaagtagcagagagtgactttaccaacaatgcaatgaaatgtaactgcaaatatgatggacatagaatctgggtgcacaactgccacattggtgatgccttcagtgaagaggccaacaggaggtttgaacgctaccctggccagaccagcaaccagattatctaagtgccactgccctctgcaaaccaccactggcccctaatggcaggggtctgaggctgccattacctcaggagcttaccaagaaacccatgtcagcaaccgcactcatcagaccatgcactatggatgtggaactgtcaagcagaagttttcaccctccttcagaggccagctgtcagtatctgtagccaagcatgggaatctttgctcccaggcccagcaccgagcagaacagaccagagcccaccacaccacaaagagcagcacctgactaactgcccacaaaagatggcagcagctcattttctttaataggaggtcaggatggtcagctccagtatctcccctaagtttag

SEQ ID NO: 225144 - DNA, 1001 bp, Artificial Sequence
  derived and/or modified sequence
cccgggcttctgaggcgtctaccttcccaggtagggctgtacaaggagttctccagcatctccagggcagaaagcttaggccttccctgccatgcgacctgtcagtgtctggcagtggagcccctgggggctgctgctgtgcctgctgtgcagttcgtgcttggggtctccgtccccttccacgggccctgagaagaaggccgggagccaggggcttcggttccggctggctggcttccccaggaagccctacgagggccgcgtggagatacagcgagctggtgaatggggcaccatctgcgatgatgacttcacgctgcaggctgcccacatcctctgccgggagctgggcttcacagaggccacaggctggacccacagtgccaaatatggccctggaacaggccgcatctggctggacaacttgagctgcagtgggaccgagcagagtgtgactgaatgtgcctcccggggctgggggaacagtgactgtacgcacgatgaggatgctggggtcatctgcaaagaccagcgcctccctggcttctcggactccaatgtcattgaggtagagcatcacctgcaagtggaggaggtgcgaattcgacccgccgttgggtggggcagacgacccctgcccgtgacggaggggctggtggaagtcaggcttcctgacggctggtcgcaagtgtgcgacaaaggctggagcgcccacaacagccacgtggtctgcgggatgctgggcttccccagcgaaaagagggtcaacgcggccttctacaggctgctagcccaacggcagcaacactcctttggtctgcatggggtggcgtgcgtgggcacggaggcccacctctccctctgttccctggagttctatcgtgccaatgacaccgccaggtgccctggggggggccctgcagtggtgagctgtgtgccaggccctgtctacgcggcatccagtggccagaagaagcaacaacagtcgaagcctcaggggg

SEQ ID NO: 225145 - DNA, 2262 bp, Artificial Sequence
  derived and/or modified sequence
atgcggcccgtgagcgtgtggcagtggagcccctggggcctgctgctgtgtttgctttgttcttcctgcctcggttcaccatcacccagcacaggccccgagaaaaaagcaggttcccagggccttcggtttaggctcgctggcttcccaaggaagccctacgaggggcgcgtggaaatccaaagggctggcgagtgggggaccatttgcgatgacgattttacccttcaggctgcacacatactttgccgagaactcgggttcactgaggcaaccggctggacccactcggcaaagtatggacccggaaccggcagaatctggctggataatctaagttgctccggaacagaacagagcgttactgagtgtgcaagtagggggtggggcaatagcgattgtactcatgacgaggacgccggggttatttgcaaagaccagagattgcctggatttagtgactctaacgtcatcgaggttgagcatcatttacaagtggaagaggtcaggattagaccagccgtgggctggggtcgacgacctctgccagtgactgaagggttagtggaggtgagactgccagatggatggtctcaggtttgtgacaaaggatggtctgctcataattcccacgtggtctgcggcatgctgggctttccatccgagaaacgggtaaacgcggcattctacaggcttctggcccagcggcaacagcatagctttggactccatggagttgcatgtgtgggtactgaagcacacctcagcctctgctctttagaattctaccgcgcgaatgacacagcccgctgcccagggggaggaccggcagtggtctcatgcgtgcctggacccgtgtatgctgctagctccggccaaaagaaacagcaacagtcaaagccccaaggggaagctcgagtccgcttgaaggggggggcacacccgggtgagggtagagttgaggtgctgaaggcctctacgtggggcaccgtatgcgatcgtaaatgggatctgcacgctgcatcagtcgtgtgtcgcgaactcgggttcggctctgccagggaggcactgtcaggcgcccgaatggggcaggggatgggagctatccacctttcagaggtgcgctgttctgggcaagagctttctctttggaagtgtccacacaaaaacatcacagcagaagactgtagccactcccaggatgcaggtgttaggtgtaatctgccctacacaggagccgagactcgaatcagactctctgggggaaggagtcagcacgaaggccgggtggaagtccaaattgggggtcccggtcctttaaggtggggcttaatttgtggcgacgattggggcaccttagaggccatggtggcctgtagacagctgggccttgggtacgccaaccatgggcttcaggaaacttggtactgggacagcggaaatataacagaggtggtcatgtctggcgtccgatgcactggaaccgagctttctctggatcagtgcgcgcatcacggcacgcatattacatgtaagagaacagggacccggttcacagccggagtcatatgttccgaaactgcatcagatttacttctgcactccgctctagtgcaggagacggcttatattgaggatagaccactgcacatgctttactgcgccgccgaggaaaactgcctggcctccagtgcccgcagcgccaactggccctacgggcataggcgccttctgcgctttagttcacagatccacaacctaggccgcgccgacttcaggccaaaagctggaagacattcctgggtttggcatgagtgtcatgggcactatcattcaatggacatctttacacactacgacattctgacacctaacggcacaaaagtggcagagggccacaaggcctctttctgcctcgaggacaccgaatgccaagaggacgtgtcgaaacgttacgagtgcgctaatttcggcgaacaggggatcaccgtaggatgttgggacttgtatcggcacgatatcgactgtcagtggattgacattactgatgtgaaaccaggaaattatatcttgcaagtcgtcatcaatcctaactttgaggttgccgagtccgatttcactaataatgccatgaagtgcaactgcaaatacgatggacatcgcatatgggtgcacaactgtcacattggagacgctttttccgaagaagccaacagacgttttgaacgttaccccggtcaaacgagcaaccaaatcatctag

SEQ ID NO: 225146 - DNA, 2094 bp, Artificial Sequence
  derived and/or modified sequence
atgcggcccgtgagcgtgtggcagtggagcccctggggcctgctgctgtgtcttttgtgttcgtcttgcttggggtcaccgtcgccttccactggaccggagaaaaaggcaggaagccagggactgcggttccgtctcgccgggtttcctcggaagccctacgagggacgcgtcgaaattcaaagggcaggggagtggggcaccatatgcgatgacgactttaccctacaggcagcgcacattctctgtagagagttaggctttactgaggccaccggctggacccatagcgcaaaatatggccccggcacgggccggatttggcttgataacctcagctgtagcggcacagagcagagcgtgacagaatgcgcaagccgcgggtggggcaattcggattgtacacacgacgaagatgccggggtgatctgtaaggaccagagattgccaggcttttctgactccaatgtgattgaagtcgagcatcatctgcaggttgaggaggtgcggatccgtccagccgtgggatgggggcgacgacctctcccagtgacagagggacttgtggaggtgcggctccctgatggttggtcccaggtctgcgacaaaggctggagcgcccacaacagccacgttgtgtgtggcatgctggggttcccaagtgagaagagggtcaacgctgctttttataggctgcttgcacagagacagcagcattcttttggactccacggggtggcctgcgtagggacggaagcacacctcagcctttgctcacttgagttctatagggctaacgataccgctagatgtccgggcggggggcctgccgtcgttagctgcgtgccgggacctgtgtatgccgcaagcagcggccaaaaaaaacagcaacagtccaaaccccagggggaggccagagtgagactaaaagggggggctcaccctggcgaaggccgtgtggaggtgctgaaagcttctacatgggggacggtgtgcgatcgcaagtgggatctccacgcagctagcgttgtgtgtagggaattgggctttggaagcgctagagaggctctgtcaggagccaggatgggccagggcatgggagctatacacctgagtgaggtgcgttgtagtggccaagagcttagcctgtggaaatgtcctcacaagaatattacggcagaggactgttcacatagtcaggatgctggagtaagatgcaacctgccatatactggagctgagacccgggaaacatggtattgggacagcgggaacattaccgaagttgtgatgtctggggtgagatgtaccggtaccgagctgtctctcgaccagtgcgcacaccacgggactcacattacctgcaaacggacaggcacgcgatttactgccggtgtgatctgcagcgagacggcctcagacctgctgctgcactccgcactggtccaagaaacagcttatattgaggacagacccctccatatgctgtattgtgccgccgaagagaattgtctggcctcctccgccagaagcgcgaattggccatacggacaccggaggctcctgaggtttagcagccaaatccacaacctgggtcgagcggatttccgcccgaaggcgggacggcacagctgggtgtggcatgaatgccacggccattaccattccatggatatctttactcattatgacatcttgacccctaacggaactaaagtggcagagggccacaaagccagcttttgtctagaggacactgagtgccaagaggacgtcagtaagcgatatgaatgtgctaactttggcgaacagggaataacggtcggatgctgggatctgtacaggcacgacatcgattgccagtggatagacattactgatgttaagcctggtaactacatcctgcaagtcgtcattaaccccaacttcgaagtggccgaatccgatttcaccaacaatgctatgaaatgcaactgtaaatatgatgggcatcgcatctgggtccacaattgccacatcggagatgccttcagcgaagaagctaataggcggttcgagcggtaccctggacaaaccagtaaccagattatctag

SEQ ID NO: 225147 - DNA, 912 bp, Artificial Sequence
  derived and/or modified sequence
atgcggcccgtgagcgtgtggcagtggagcccctggggcctgctgttgtgtctcctgtgctccagctgtctggggtccccgagtccctctacaggtccggagaagaaggctggttctcagggtctcagattcagactcgcagggtttccaaggaaaccctatgaagggcgcgttgagatccagagagccggcgagtggggcactatctgcgacgacgatttcaccttgcaagccgctcatatcctgtgccgggagttgggattcacggaagctactgggtggactcattcagccaaatatggaccgggaactggtaggatttggcttgacaatctctcttgctccggaacggagcagtccgtcaccgaatgcgctagccgaggatgggggaactcagattgcacccatgacgaagatgcaggcgtcatctgtaaggatcaaaggcttccaggatttagcgattcaaacgtcattgaggtggagcatcatttgcaggtcgaagaggtgagaatccgccctgcggtggggtggggcaggcgcccactaccagtaacggagggcctagtcgaagtgcggctgcccgacgggtggagccaggtttgtgataaaggatggagtgcccacaatagccacgtggtgtgtggaatgctgggtttcccctccgaaaagagggttaacgccgcattctataggctgctcgcccaacggcagcagcatagtttcggccttcatggggtggcctgcgtggggacagaagcgcacttgagtctgtgctccctcgaattttatcgagcgaacgacacggcgcgatgtccgggcggaggcccagcagtggtctcctgcgtaccaggaccagtctacgctgcctcttccgggcagaagaagcagcagcaaagtaagccacaaggatag

SEQ ID NO: 225148 - DNA, 2262 bp, Artificial Sequence
  derived and/or modified sequence
atgcgacctgtatctgtatggcagtggtccccgtggggccttctgttgtgcctgctttgcagtagttgcctgggaagtccgtccccctctactggcccagaaaaaaaggcgggatcacagggcctgaggttcaggcttgcaggtttcccgaggaagccctatgagggccgagtggagattcagcgagctggcgagtgggggactatctgtgacgacgacttcactctgcaggccgctcacatcttgtgccgcgagctgggatttaccgaggccacagggtggacacattcagcgaaatatgggccaggcactggaagaatctggcttgacaacctgtcatgtagcggcactgaacagtccgttaccgaatgtgccagtcggggatggggaaacagcgactgcacacacgatgaggacgccggagtcatctgcaaggaccagcgcctccccggtttcagcgattctaatgtcattgaggtcgagcatcacctgcaggtggaagaggtccggataaggccagccgtcggatggggacgccgaccactacccgttaccgaggggctcgtcgaggtcagactacctgacggttggagccaggtctgcgataaggggtggtctgcccacaatagccatgtcgtctgcggaatgctgggttttcctagcgagaagagagtcaacgcggctttctaccgccttctagcacagcgacaacagcactcatttggacttcacggtgtggcctgcgtcgggactgaggcccatctctccctgtgcagtttagagttctatcgtgcaaacgacacagcaaggtgccctggcggtggaccagcagttgtgagctgcgtgcccggacctgtctacgcagcctcgtctggccagaagaagcagcagcagtcaaagccacaaggcgaagccagggtgcgtttgaagggaggggcacaccctggcgaaggtagggtcgaggtgttgaaagcgtcaacttggggtactgtatgcgaccgcaagtgggacctccacgccgctagcgtggtatgccgggaactgggatttggatcagctagagaagcgctgagcggtgcgagaatggggcaaggcatgggggctattcacctgtccgaggtgcggtgctccggccaggaactttctctgtggaaatgtcctcacaagaacataactgctgaggattgctcccatagccaagatgccggtgtcagatgtaatcttccgtacacgggcgctgaaacacgcattcggctgtctggagggagatcacagcacgagggcagggtcgaggtgcaaatcggcggacccggacctttgcgctggggtctcatctgcggtgatgactggggaactctggaggctatggtggcctgtagacagctggggctgggatacgctaaccacggactccaggaaacttggtactgggattcagggaacataactgaggttgttatgtctggggtgcgctgtaccggaaccgagctttccctggatcagtgtgcacaccacggcacacatataacatgcaaacgcaccggcaccagatttactgctggagtgatttgctcagagacagcatcagacctgctcctgcactctgcccttgtgcaggaaactgcttacattgaggatcgacccctccacatgctgtattgcgccgcagaggaaaattgcctggcgtcgagcgctaggagtgccaactggccttatggacataggcgccttctgcggttctcaagtcaaatccataacctgggcagggccgattttcggccaaaggcagggagacatagctgggtgtggcatgagtgtcacggacactaccattcgatggatattttcactcactatgatatcttaacacctaacggtaccaaagtggccgaaggccacaaggctagcttctgtctagaagacacagagtgccaggaagacgtgtctaaacgctatgagtgcgccaacttcggggagcaaggcattaccgtgggctgctgggacctgtatcggcacgatatcgattgtcagtggatcgatataacagatgtgaagcctggtaactatatcctgcaggtggtcatcaatcctaacttcgaagtggccgaaagtgacttcaccaacaacgcaatgaagtgtaactgtaaatatgacggtcaccggatatgggtgcataattgtcatattggcgacgcctttagtgaggaggctaatagaaggtttgaaagataccctggccagacctccaatcagataatctag

SEQ ID NO: 225149 - DNA, 2094 bp, Artificial Sequence
  derived and/or modified sequence
atgcggcctgtctccgtttggcaatggagcccctgggggctgctgttgtgtctcctgtgttcatcatgcctgggcagcccttccccaagcaccggacctgagaagaaggcaggttcccaaggattgcgttttcggctggccggttttccccgaaagccatatgaggggagagtggagattcagagagctggagaatggggaaccatctgtgatgacgacttcacattgcaagccgctcacatcctttgccgagagctggggtttactgaagccaccggctggactcatagcgcgaaatatggtcctgggactggtcgcatctggcttgacaacctttcatgttcaggaacagagcaaagtgtgaccgagtgcgcatcgagagggtggggcaactcagattgcacacacgatgaggacgctggggtgatctgcaaggaccagcgtctcccaggctttagcgactctaatgtaatcgaggttgagcaccacctgcaggtggaggaagtgcggatacggcctgcagtcgggtggggcagacgaccattgcccgtcacagagggactggtcgaagtccgactgcccgatggttggtcgcaggtgtgtgataaaggatggtcggcccataattcccatgtagtgtgtggaatgttggggttcccttccgagaaaagagttaacgcagctttctaccggctcttagcgcagaggcaacaacactcatttggattacatggcgtcgcatgtgttggaactgaggcccacttgtccctctgttcactcgaattttaccgcgctaatgataccgctagatgtcctgggggtggtccagctgtagtgagctgcgtgcccggaccagtctacgcagcttcttcaggtcagaagaaacaacaacagtctaagccacagggagaggctcgggtgagactgaaggggggtgcccatccaggcgaaggccgagtcgaggtgttgaaagcctcaacttggggcactgtatgcgatcggaagtgggatctgcacgcggctagcgtggtttgtcgagagctggggttcggcagcgccagggaggcgctctccggggcaaggatgggccagggcatgggggcaattcacctctctgaggtccggtgttcgggacaagaactgtctctttggaagtgtcctcataaaaatatcacggctgaggattgcagccactctcaagatgcgggtgtgcgctgcaacctgccttataccggcgctgagactagagagacctggtactgggacagcggaaatataacggaggtggtgatgtctggcgtcagatgtaccggcaccgagctgagcctggaccagtgtgcgcatcacggcacgcatatcacatgcaagcgcactgggaccaggtttaccgctggcgtgatctgcagcgaaacggcctctgacttgctgcttcattcagccctagtgcaggagaccgcatatatagaagaccgcccactccatatgctgtactgtgccgctgaagaaaactgccttgctagctccgcacggagcgcaaactggccctacgggcacaggagacttttgcgcttcagttctcagatacataatctcgggagagcggattttagacccaaagcaggacggcattcttgggtttggcatgaatgtcacggccactaccactccatggacatctttacccattacgacatcctcacacctaacggcactaaagttgctgagggtcataaagctagcttctgccttgaggataccgaatgtcaggaagacgtctctaaacgttacgagtgtgctaactttggcgagcagggcattacagtaggctgttgggatttatataggcacgacatcgactgccagtggatcgacattaccgacgtaaaacctggaaactacatactacaagtcgtgatcaaccccaactttgaagtggctgagtcagattttacaaataatgctatgaaatgcaactgtaagtacgatggacaccgaatttgggtgcacaactgccatataggggacgctttttcggaagaagccaacagaaggttcgagagatacccaggtcagacaagtaaccagataatatag

SEQ ID NO: 225150 - DNA, 912 bp, Artificial Sequence
  derived and/or modified sequence
atgcggccagtgtcggtgtggcagtggtctccctggggcctactcctttgtttgctgtgctctagctgcttagggtcgccctcaccctcaacggggccagagaaaaaggccggatcacagggtctgcgctttagattagccggttttccacggaagccctatgagggacgcgtggaaattcaacgcgctggcgaatggggcactatctgcgatgacgacttcacgctccaggctgctcatatcctttgcagagaactggggttcaccgaagctaccggatggacccatagcgctaaatacggtcctggaacaggcaggatctggctggacaacctttcctgcagcggcacagagcagagcgttacagagtgcgcttccaggggttggggcaattctgactgtactcatgacgaagacgcaggcgttatctgtaaagatcaaagattgccgggtttctcagactcaaacgtgatcgaggtagaacatcatctgcaggttgaggaagtacgcatcaggcctgccgtcggctggggaagacgtcccctccccgtcactgagggccttgtcgaggttcgcctacccgacggttggtctcaggtgtgtgacaagggctggtcagcgcacaacagccacgtcgtctgcgggatgctcgggttcccatccgagaagagagtgaatgcggctttctatcgcctgttggcccagaggcaacagcatagttttggcctgcacggagtggcatgtgtgggcactgaagcgcatctcagtctttgttccctggaattctaccgcgcaaatgacaccgctagatgtccagggggaggccctgcagtggtttcctgcgtgcccggtcctgtctatgctgcctctagtggccagaagaagcagcagcagtccaaacctcagggctag

SEQ ID NO: 225151 - DNA, 2262 bp, Artificial Sequence
  derived and/or modified sequence
atgagacccgtgagcgtgtggcagtggagcccctggggcctgctgctgtgcctgctgtgcagcagctgcctgggcagccccagccccagcaccggccccgagaagaaggccggcagccagggcctgagattcagactggccggcttccccagaaagccctacgagggcagagtggagatccagagagccggcgagtggggcaccatctgcgacgacgacttcaccctgcaggccgcccacatcctgtgcagagagctgggcttcaccgaggccaccggctggacccacagcgccaagtacggccccggcaccggcagaatctggctggacaacctgagctgcagcggcaccgagcagagcgtgaccgagtgcgccagcagaggctggggcaacagcgactgcacccacgacgaggacgccggcgtgatctgcaaggaccagagactgcccggcttcagcgacagcaacgtgatcgaggtggagcaccacctgcaggtggaggaggtgagaatcagacccgccgtgggctggggcagaagacccctgcccgtgaccgagggcctggtggaggtgagactgcccgacggctggagccaggtgtgcgacaagggctggagcgcccacaacagccacgtggtgtgcggcatgctgggcttccccagcgagaagagagtgaacgccgccttctacagactgctggcccagagacagcagcacagcttcggcctgcacggcgtggcctgcgtgggcaccgaggcccacctgagcctgtgcagcctggagttctacagagccaacgacaccgccagatgccccggcggcggccccgccgtggtgagctgcgtgcccggccccgtgtacgccgccagcagcggccagaagaagcagcagcagagcaagccccagggcgaggccagagtgagactgaagggcggcgcccaccccggcgagggcagagtggaggtgctgaaggccagcacctggggcaccgtgtgcgacagaaagtgggacctgcacgccgccagcgtggtgtgcagagagctgggcttcggcagcgccagagaggccctgagcggcgccagaatgggccagggcatgggcgccatccacctgagcgaggtgagatgcagcggccaggagctgagcctgtggaagtgcccccacaagaacatcaccgccgaggactgcagccacagccaggacgccggcgtgagatgcaacctgccctacaccggcgccgagaccagaatcagactgagcggcggcagaagccagcacgagggcagagtggaggtgcagatcggcggccccggccccctgagatggggcctgatctgcggcgacgactggggcaccctggaggccatggtggcctgcagacagctgggcctgggctacgccaaccacggcctgcaggagacctggtactgggacagcggcaacatcaccgaggtggtgatgagcggcgtgagatgcaccggcaccgagctgagcctggaccagtgcgcccaccacggcacccacatcacctgcaagagaaccggcaccagattcaccgccggcgtgatctgcagcgagaccgccagcgacctgctgctgcacagcgccctggtgcaggagaccgcctacatcgaggacagacccctgcacatgctgtactgcgccgccgaggagaactgcctggccagcagcgccagaagcgccaactggccctacggccacagaagactgctgagattcagcagccagatccacaacctgggcagagccgacttcagacccaaggccggcagacacagctgggtgtggcacgagtgccacggccactaccacagcatggacatcttcacccactacgacatcctgacccccaacggcaccaaggtggccgagggccacaaggccagcttctgcctggaggacaccgagtgccaggaggacgtgagcaagagatacgagtgcgccaacttcggcgagcagggcatcaccgtgggctgctgggacctgtacagacacgacatcgactgccagtggatcgacatcaccgacgtgaagcccggcaactacatcctgcaggtggtgatcaaccccaacttcgaggtggccgagagcgacttcaccaacaacgccatgaagtgcaactgcaagtacgacggccacagaatctgggtgcacaactgccacatcggcgacgccttcagcgaggaggccaacagaagattcgagagataccccggccagaccagcaaccagatcatctag

SEQ ID NO: 225152 - DNA, 2094 bp, Artificial Sequence
  derived and/or modified sequence
atgagacccgtgagcgtgtggcagtggagcccctggggcctgctgctgtgcctgctgtgcagcagctgcctgggcagccccagccccagcaccggccccgagaagaaggccggcagccagggcctgagattcagactggccggcttccccagaaagccctacgagggcagagtggagatccagagagccggcgagtggggcaccatctgcgacgacgacttcaccctgcaggccgcccacatcctgtgcagagagctgggcttcaccgaggccaccggctggacccacagcgccaagtacggccccggcaccggcagaatctggctggacaacctgagctgcagcggcaccgagcagagcgtgaccgagtgcgccagcagaggctggggcaacagcgactgcacccacgacgaggacgccggcgtgatctgcaaggaccagagactgcccggcttcagcgacagcaacgtgatcgaggtggagcaccacctgcaggtggaggaggtgagaatcagacccgccgtgggctggggcagaagacccctgcccgtgaccgagggcctggtggaggtgagactgcccgacggctggagccaggtgtgcgacaagggctggagcgcccacaacagccacgtggtgtgcggcatgctgggcttccccagcgagaagagagtgaacgccgccttctacagactgctggcccagagacagcagcacagcttcggcctgcacggcgtggcctgcgtgggcaccgaggcccacctgagcctgtgcagcctggagttctacagagccaacgacaccgccagatgccccggcggcggccccgccgtggtgagctgcgtgcccggccccgtgtacgccgccagcagcggccagaagaagcagcagcagagcaagccccagggcgaggccagagtgagactgaagggcggcgcccaccccggcgagggcagagtggaggtgctgaaggccagcacctggggcaccgtgtgcgacagaaagtgggacctgcacgccgccagcgtggtgtgcagagagctgggcttcggcagcgccagagaggccctgagcggcgccagaatgggccagggcatgggcgccatccacctgagcgaggtgagatgcagcggccaggagctgagcctgtggaagtgcccccacaagaacatcaccgccgaggactgcagccacagccaggacgccggcgtgagatgcaacctgccctacaccggcgccgagaccagagagacctggtactgggacagcggcaacatcaccgaggtggtgatgagcggcgtgagatgcaccggcaccgagctgagcctggaccagtgcgcccaccacggcacccacatcacctgcaagagaaccggcaccagattcaccgccggcgtgatctgcagcgagaccgccagcgacctgctgctgcacagcgccctggtgcaggagaccgcctacatcgaggacagacccctgcacatgctgtactgcgccgccgaggagaactgcctggccagcagcgccagaagcgccaactggccctacggccacagaagactgctgagattcagcagccagatccacaacctgggcagagccgacttcagacccaaggccggcagacacagctgggtgtggcacgagtgccacggccactaccacagcatggacatcttcacccactacgacatcctgacccccaacggcaccaaggtggccgagggccacaaggccagcttctgcctggaggacaccgagtgccaggaggacgtgagcaagagatacgagtgcgccaacttcggcgagcagggcatcaccgtgggctgctgggacctgtacagacacgacatcgactgccagtggatcgacatcaccgacgtgaagcccggcaactacatcctgcaggtggtgatcaaccccaacttcgaggtggccgagagcgacttcaccaacaacgccatgaagtgcaactgcaagtacgacggccacagaatctgggtgcacaactgccacatcggcgacgccttcagcgaggaggccaacagaagattcgagagataccccggccagaccagcaaccagatcatctag

SEQ ID NO: 225153 - DNA, 912 bp, Artificial Sequence
  derived and/or modified sequence
atgagacccgtgagcgtgtggcagtggagcccctggggcctgctgctgtgcctgctgtgcagcagctgcctgggcagccccagccccagcaccggccccgagaagaaggccggcagccagggcctgagattcagactggccggcttccccagaaagccctacgagggcagagtggagatccagagagccggcgagtggggcaccatctgcgacgacgacttcaccctgcaggccgcccacatcctgtgcagagagctgggcttcaccgaggccaccggctggacccacagcgccaagtacggccccggcaccggcagaatctggctggacaacctgagctgcagcggcaccgagcagagcgtgaccgagtgcgccagcagaggctggggcaacagcgactgcacccacgacgaggacgccggcgtgatctgcaaggaccagagactgcccggcttcagcgacagcaacgtgatcgaggtggagcaccacctgcaggtggaggaggtgagaatcagacccgccgtgggctggggcagaagacccctgcccgtgaccgagggcctggtggaggtgagactgcccgacggctggagccaggtgtgcgacaagggctggagcgcccacaacagccacgtggtgtgcggcatgctgggcttccccagcgagaagagagtgaacgccgccttctacagactgctggcccagagacagcagcacagcttcggcctgcacggcgtggcctgcgtgggcaccgaggcccacctgagcctgtgcagcctggagttctacagagccaacgacaccgccagatgccccggcggcggccccgccgtggtgagctgcgtgcccggccccgtgtacgccgccagcagcggccagaagaagcagcagcagagcaagccccagggctag

SEQ ID NO: 225154 - protein, 557 aa, Artificial Sequence
  derived and/or modified sequence
MGNSFCYTAVYCMINTGTQMDLEVKGVAATSRSQIQPFFGRKKPLQQRWTSESWTNQNSCPPVVPRLDLGSLVDSDDEDNFSYIPLSTANLPNSSSTLGWVTPCQTPYTQYHLNKLDQNIIPENLPAPTDKCKLKYQQCKTEIKEGYKQYSQRNAENTKSNVTHKQSPRNKIDEKCVQDEEANTDDLTTLDRKAILQQGYADNSCDKQQRARKLDAEIVAAEKKKQIVAEQVMIDHLSRAVISDPEQNLAIEQKESDHILPDSKMTPLRFRKRTLHETKIRTHSTLTENVLSHKLQFDGRIVSRNGRDACRELIGFFFTHDQSLTIYEYRQFGKNRTNVLPFIQKSIYSHQCGRRKGKQYRLGDFYVGATLTFLSSDHLSLPESIKENTLLKLRITNIDQIALDSLKTASMEQEDDIIIQETNDRLVFKAIQDVLKEKLHKRGVRILTGLGKYFQQLDKEGNGLLDKADFKQALKVFHLEVSEKDFESAWLILNDNGNGKVDYGEFKRGIIGEMNEYRKSYVRKAFMKLDFNKSGSVPIINIRKCYCAKKHSQVISG

SEQ ID NO: 225155 - protein, 461 aa, Artificial Sequence
  derived and/or modified sequence
MNTDLAAGKMASAACSMDPIDSFELLDLLFDRQDGILRHVELGEGWGHVKDQQVLPNPDSDDFLSSILGSGDSLPSSPLWSPEGSDSGISEDLPSDPQDTPPRSGPATSPAGCHPAQPGKGPCLSYHPGNSCSTTTPGPVIQVPEASVTIDLEMWSPGGRICAEKPADPVDLSPRCNLTVKDLLLSGSSGDLQQHHLGASYLLRPGAGHCQELVLTEDEKKLLAKEGITLPTQLPLTKYEERVLKKIRRKIRNKQSAQESRKKKKEYIDGLETRMSACTAQNQELQRKVLHLEKQNLSLLEQLKKLQAIVVQSTSKSAQTGTCVAVLLLSFALIILPSISPFGPNKTESPGDFAPVRVFSRTLHNDAASRVAADAVPGSEAPGPRPEADTTREESPGSPGADWGFQDTANLTNSTEELDNATLVLRNATEGLGQVALLDWVAPGPSTGSGRAGLEAAGDEL

SEQ ID NO: 225156 - protein, 419 aa, Artificial Sequence
  derived and/or modified sequence
MNTDLAAGKMASAACSMDPIDSFELLDLLFDRQDGILRHVELGEGWGHVKDQQVLPNPDSDDFLSSILGSGDSLPSSPLWSPEGSDSGISEDLPSDPQDTPPRSGPATSPAGCHPAQPGKGPCLSYHPGNSCSTTTPGPVIQVPEASVTIDLEMWSPGGRICAEKPADPVDLSPRCNLTVKDLLLSGSSGDLQQHHLGASYLLRPGAGHCQELVLTEDEKKLLAKEGITLPTQLPLTKYEERVLKKIRRKIRNKQSAQESRKKKKAIVVQSTSKSAQTGTCVAVLLLSFALIILPSISPFGPNKTESPGDFAPVRVFSRTLHNDAASRVAADAVPGSEAPGPRPEADTTREESPGSPGADWGFQDTANLTNSTEELDNATLVLRNATEGLGQVALLDWVAPGPSTGSGRAGLEAAGDEL

SEQ ID NO: 225157 - DNA, 2586 bp, Artificial Sequence
  derived and/or modified sequence
acagagccacagagggctgtgagcttgcccagccccaggtaacgctggcggtgggtgggcctccagcttggagcagagaccccccgaggcatctgcagacagaactggatggacccatgaatacggatttagctgctggaaagatggcttctgctgcctgctccatggaccccatcgacagctttgagctcctggatctcctgtttgaccggcaggacggcatcctgagacacgtggagctgggcgagggctggggtcacgtcaaggaccagcaggtcctgccaaaccccgactctgacgacttcctcagctccatcctgggctctggagactcactgcccagctccccactctggtcccccgaaggcagtgatagtggcatctccgaagacctcccctccgacccccaggacacccctccacgcagcggaccagccacctcccccgccggctgccatcctgcccagcctggcaaggggccctgcctctcctatcatcctggcaactcttgctccaccacaaccccagggccagtgatccaagtacctgaagcctctgtgaccatagacctggaaatgtggagcccaggaggaaggatctgtgctgagaagccggctgatccggtggacctgtccccacgatgcaatctcaccgtgaaagacctcctcctttcgggcagcagtggggacctgcaacagcatcacctgggggcctcctacctcctgcgacctggggctgggcactgtcaggagctggtgctcaccgaggatgagaagaagctgctggctaaagaaggcatcaccctgcccactcagctgcccctcactaagtacgaggagcgagtgctgaaaaaaatccgccggaaaatccggaacaagcagtcggcgcaagaaagcaggaagaagaagaaggaatatatcgatggcctggagactcggatgtcagcttgcactgctcagaatcaggagttacagaggaaagtcttgcatctcgagaagcaaaacctgtccctcttggagcaactgaagaaactccaggccattgtggtgcagtccaccagcaagtcagcccagacaggcacctgtgtcgcagtcctgttgctgtcctttgccctcatcatcctcccctccatcagcccttttggccccaacaaaaccgagagccctggggactttgcgcctgtacgagtgttctccagaactttgcacaacgatgctgcctcccgcgtggctgctgatgctgtgccaggctccgaggccccaggaccccgacccgaggctgacacaacccgagaagagtctccaggaagccccggggcagactggggcttccaggacaccgcgaacctgaccaattcgacggaggagctggacaacgccaccctggtcctgaggaatgcaacagaggggctgggccaggtcgccctgctggactgggtggcgcctgggccgagcactggctcaggacgtgcagggctggaggcggcgggagacgagctgtgagccccgccaggactatgctcccaggcccctctgcccaggggtgccttggggatgctgcactgggcagctacccacctggggatgggacgtgaggccaagaccccagcagagatgccagaatgggggaggcacagctcatagccacacacccagggcctgactgaggcccacgcaggaaccgacactcagacacaaggcaaagagggccacaggacccgggaaatacacacagagccaggagcagaagcaaagagcagacacacatacagcctgaaacagacctggacagacagacacagcctgaaacagacccggacagacagacacagcctgaaacagacccagacaaacagacagacagacacagcctgaaacagacccagacagacagacagacagcctgaaacagacccagacacagcctgaaacagatccggacagacagacagaaacagcctgaaacagacccagacagacagacagacacagcctgaaacagacccggacagacagacagacacagcctgaaacagacccggacagacagacagacacagcctgaaacagacccggacagacagacagacacagcctgaaacagacctagacagacagacacagattgaaacagacccagacaaacagacagacacagcctgaaacagacccagacacagcctgaaacagacccggacagacagacagacacagcctgaaacagacccagacagacagacagacacagcctgaaacagacccagacagacagaccgacgcagcctgaaagagacccagacagagagacaggcagacacagcctaaaacagacctggacagacaggcagacgtagtctgaaacagacctgaacagacagacagacgcacacacacaacagatgcgcagcaactccccgcccagggacccctcccggcctccctcgcacactgggaggaggaagccgccgagactgcagggagcctggccccggagccccgggtgcgccctggtctttggagcagccacggcccacaatcaccccccttttctaagactgcctgatccgaaataaagtattttgacaaa

SEQ ID NO: 225158 - DNA, 1386 bp, Artificial Sequence
  derived and/or modified sequence
atgaacacagatctggccgccggaaagatggcatctgcggcctgtagcatggatcctatagacagctttgagctcctagacctgctgttcgatcgccaggacggcatcctgcgccatgtggagttgggcgaagggtgggggcacgtaaaggatcagcaggtgctgccgaatccagattctgacgatttcctctccagtatcctgggttccggcgactcactaccttcgtcccccctttggtcccccgaaggaagcgactctggtataagtgaggatctgccttccgatccacaggatacacctccacgaagcggaccagcgacatctccagccggttgccaccctgcacaaccagggaaggggccctgcttgagttatcatccagggaattcttgtagcaccaccacaccaggcccagtgatccaggtgcctgaggccagtgttacaatcgacctggagatgtggtcccccggggggcgcatatgtgctgagaaacccgcggatcctgttgacctcagtccgcgctgtaatcttacggttaaggatctgctgctctctggttcatcaggggacttgcaacagcatcacctgggggccagctatctgctacgccccggagccggtcattgtcaggaactagtcctaaccgaagacgagaaaaagttgttggcaaaagagggaattactctaccaactcagctacccttgacaaagtacgaggagcgcgtacttaaaaagattcggaggaaaatccgtaataagcaatccgcccaagaatctcggaaaaagaagaaggagtatatcgatgggctggagacacgaatgagcgcctgcactgcacaaaaccaggagctgcagagaaaggtccttcaccttgaaaaacaaaacctgtcgctgctggagcaactgaagaagctgcaggcaattgttgttcagagtacgtccaaatcagcccagactgggacttgcgtcgcagtgctcctcctttctttcgctctgattatcctgccgagcatttctccctttggccctaataagaccgaatcccccggtgattttgctcccgtgcgggtgttcagccggaccctccacaacgatgcggcgagtcgcgtcgctgctgacgctgtccctggctcagaggcccccgggccccgtccggaggccgacaccactagagaggaatctccagggtcaccgggagccgattggggttttcaggacacggctaatctcaccaacagtaccgaggagctggacaatgccactctagtactgcgaaatgctacagagggcctgggacaggttgccctcctcgattgggtcgcaccggggccatcgactggctctggccgggccggcctagaagcggccggcgacgaattgtag

SEQ ID NO: 225159 - DNA, 1260 bp, Artificial Sequence
  derived and/or modified sequence
atgaacactgacttagcggctggtaaaatggcgtcggctgcctgctccatggaccccatcgactcctttgaactcctggacctcctgtttgaccggcaggatgggatcctgagacatgtcgagctgggtgagggctggggacacgttaaagaccagcaggtgctccccaaccctgatagtgatgattttttaagctctattctgggttccggagatagcttacccagttcacccttgtggagccccgaaggcagtgattccggaatttcagaagatctccctagtgacccccaagatacccctccaaggtccggccccgctaccagcccagccggctgccatcccgcccagcccggcaaggggccttgtttatcttatcatccaggcaattcttgcagcacaaccaccccaggccctgtgatccaggtgcccgaagcaagcgttactattgacctggagatgtggtcccccggaggaaggatttgtgctgagaagccagctgatcctgttgatctgtccccgcggtgcaacctgaccgtgaaggaccttctgctgagcgggtcgagcggcgacctgcagcagcaccacctgggcgccagctatctgcttaggccgggcgcaggtcattgtcaggagttggtgctcacagaagacgaaaagaagttactggctaaggagggtatcaccctgcctacgcagctgcctctcacaaaatacgaggagcgggtgctcaagaaaatccgccgcaagataaggaacaagcagagtgcccaagagtcccggaaaaagaaaaaagcaattgtggtgcaaagcacgtctaaatccgcacagaccggcacgtgcgttgcagtactgctgctttcttttgccttaatcatcctgccttctatctcccccttcggacctaataagacggaatccccaggggattttgcacccgttagggtatttagtcgcacactgcacaatgacgccgcctcccgcgtcgcagcagatgctgttcctggaagtgaagcccccggtcctcgtcctgaagcagacacgacaagagaagaaagccccggctcaccaggagctgattggggctttcaggataccgcaaacctgactaactcgactgaagagctggacaacgcaacacttgtgctcagaaacgcaactgagggcctcgggcaggtggcactcttggactgggtcgcgcccggaccaagtacagggagtggtcgggctggcttagaagccgcgggagacgagctctag

SEQ ID NO: 225160 - DNA, 1386 bp, Artificial Sequence
  derived and/or modified sequence
atgaacacagacctggccgccggcaagatggccagcgctgcctgcagcatggaccccatcgacagctttgagctgctggacctgctgtttgaccggcaggacggcatcctgcggcacgtggagctgggggagggctggggccacgtgaaggaccagcaggtgctgcccaacccagacagtgatgacttcctgagcagcatcctgggcagcggggacagcctgcccagcagccccctgtggagccctgagggcagtgacagcggcatcagcgaggacctgcccagcgacccccaggacaccccacccaggagcggccctgccaccagccctgctggctgccacccagcccagcccgggaagggcccctgcctgagctaccaccctggcaacagctgcagcaccaccaccccaggccctgtgatccaggtgcctgaggcctctgtgaccatcgacctggagatgtggagccctgggggccgcatctgtgccgagaagccagctgaccctgtggacctgagcccccgctgcaacctgactgtgaaggacctgctgctgagcggcagcagcggggacctgcagcagcaccacctgggcgccagctacctgctgcggcctggagctggccactgccaggagctggtgctgacagaagatgagaagaagctgctggccaaggagggcatcaccctgcccacccagctgcccctgaccaagtatgaggagcgggtgctgaagaagatccggaggaagatccggaacaagcagagcgcccaggagagcaggaagaagaagaaggagtacattgatggcctggagaccaggatgtctgcctgcacagcccagaaccaggagctgcagaggaaggtgctgcacctggagaagcagaacctgagcctgctggagcagctgaagaagctgcaggccatcgtggtgcagagcaccagcaagagcgcccagacaggcacctgtgtggccgtgctgctgctgagctttgccctgatcatcctgcccagcatcagccccttcggccccaacaagacagagagccctggggactttgcccctgtgcgggtcttcagcaggaccctgcacaatgatgctgccagccgggtggccgcagatgctgtgcccggcagcgaggcccctggccccaggcctgaggccgacaccacccgggaggagagccctggcagccctggagctgactggggcttccaggacacagccaacctgaccaacagcacagaggagctggacaatgccaccctggtgctgagaaatgccacagagggcctgggccaggtggccctgctggactgggtggcccctggccccagcactggaagtggccgggccggcctggaggccgctggagatgagctgtag

SEQ ID NO: 225161 - DNA, 1260 bp, Artificial Sequence
  derived and/or modified sequence
atgaacacagacctggccgccggcaagatggccagcgctgcctgcagcatggaccccatcgacagctttgagctgctggacctgctgtttgaccggcaggacggcatcctgcggcacgtggagctgggggagggctggggccacgtgaaggaccagcaggtgctgcccaacccagacagtgatgacttcctgagcagcatcctgggcagcggggacagcctgcccagcagccccctgtggagccctgagggcagtgacagcggcatcagcgaggacctgcccagcgacccccaggacaccccacccaggagcggccctgccaccagccctgctggctgccacccagcccagcccgggaagggcccctgcctgagctaccaccctggcaacagctgcagcaccaccaccccaggccctgtgatccaggtgcctgaggcctctgtgaccatcgacctggagatgtggagccctgggggccgcatctgtgccgagaagccagctgaccctgtggacctgagcccccgctgcaacctgactgtgaaggacctgctgctgagcggcagcagcggggacctgcagcagcaccacctgggcgccagctacctgctgcggcctggagctggccactgccaggagctggtgctgacagaagatgagaagaagctgctggccaaggagggcatcaccctgcccacccagctgcccctgaccaagtatgaggagcgggtgctgaagaagatccggaggaagatccggaacaagcagagcgcccaggagagcaggaagaagaagaaggccatcgtggtgcagagcaccagcaagagcgcccagacaggcacctgtgtggccgtgctgctgctgagctttgccctgatcatcctgcccagcatcagccccttcggccccaacaagacagagagccctggggactttgcccctgtgcgggtcttcagcaggaccctgcacaatgatgctgccagccgggtggccgcagatgctgtgcccggcagcgaggcccctggccccaggcctgaggccgacaccacccgggaggagagccctggcagccctggagctgactggggcttccaggacacagccaacctgaccaacagcacagaggagctggacaatgccaccctggtgctgagaaatgccacagagggcctgggccaggtggccctgctggactgggtggcccctggccccagcactggaagtggccgggccggcctggaggccgctggagatgagctgtag

SEQ ID NO: 225162 - DNA, 1386 bp, Artificial Sequence
  derived and/or modified sequence
atgaacaccgacctggccgccggcaagatggccagcgccgcctgctctatggaccccatcgactcattcgagctcctggacctgcttttcgaccggcaagacgggattctgaggcatgtcgagctgggcgaaggctggggccatgttaaggatcagcaggtcctgcctaaccctgacagtgatgacttcctttcatcaattctagggagcggcgattccctcccttcatcaccgttgtggagccccgagggatcggacagtggtatcagtgaagacctgccttctgacccgcaggataccccacctcgcagtggccctgcaacgagccccgctggatgccaccccgcgcagccaggaaaaggcccctgcctgagctaccatcctgggaatagttgctccaccaccactcccgggcccgtgatccaggtccccgaagcttcagtgaccattgatctggaaatgtggtcacccggaggtcgcatttgcgcagaaaagccggcagatccggtggatctttccccgaggtgcaacctcacggtgaaggatttgcttttgagtggatcctcaggggatctgcaacagcaccacttgggggccagctacctactgcggccgggagcagggcactgccaagaacttgtgttaaccgaggatgagaaaaaactgcttgccaaggaaggtattaccctgcctactcagcttcctctaacaaagtatgaggaacgcgtgctcaaaaagatcagaagaaaaatcaggaacaaacagtccgcgcaagagtcaaggaagaagaaaaaagaatacattgacggcctcgagaccaggatgagcgcttgtacggcccagaaccaggagcttcagaggaaggttctgcacctcgaaaagcagaatctgagtctcctggagcagctgaaaaagttgcaggccatagtcgttcaatcaaccagcaagagtgcccaaaccggcacatgtgtggctgtgctcctcctatcattcgccctgatcatcctgccaagtatttctccttttgggcccaataagaccgaaagccctggcgattttgcaccagtgagggtcttttcgcggacacttcacaatgacgcagctagtagggttgccgccgatgcagtccctggcagcgaagcccccggtcccagacctgaagcggataccacccgtgaagagtctcctggctcaccaggcgccgattggggtttccaggacacagctaacctgaccaactccacagaggaacttgataacgccacgttggttttaagaaatgcgaccgaaggactgggccaagtagccttgttggattgggtagctcctggccccagtacaggctccgggagggcgggtctcgaagccgcaggtgatgagctctag

SEQ ID NO: 225163 - DNA, 1260 bp, Artificial Sequence
  derived and/or modified sequence
atgaacaccgacctggccgccggcaagatggccagcgccgcctgcagtatggacccaatagactcttttgagctgcttgatctcctgttcgataggcaggatggaattctaagacacgtggaattgggcgaggggtggggtcatgtcaaggatcagcaggttttgcccaaccctgatagtgacgacttcttgagttccattttagggagcggagacagtctgccatcgagccccctgtggagtcccgagggatccgacagtggtatctcagaagatctgccgagtgacccgcaagacactcctccacgcagtggaccagcgacatcacccgctggttgccatccagcgcaaccaggcaaaggcccttgcctgtcataccaccccgggaacagttgcagtacaacgacacccggccccgtgattcaggtgccagaggcatcagtcacaatcgatctggaaatgtggtcaccaggtggccgtatatgcgccgaaaagccagctgacccagtggacttgagcccgcggtgtaacctcacggttaaagacttattgctgagcggctctagtggggacctgcaacagcatcacctgggggcaagttacctgcttcggcccggagcaggacattgccaagagcttgtgctcacggaggacgagaagaagctgctcgctaaggagggaattacactgcccacacagctgccattgacaaagtatgaagagagagtcttaaagaagatcaggaggaaaattcgaaacaaacagtctgcgcaggagagcaggaagaagaagaaagctatcgtggtgcaaagcacatcaaagagcgctcaaaccgggacgtgcgtagctgtgcttctgctttcttttgccctgatcattcttccgagtattagtccttttgggcctaacaaaaccgaatcccctggggattttgctccagtgcgggttttcagccggacgctgcataatgacgcagctagccgtgtcgccgccgacgcggtgcctggctctgaggctcctggcccacgtccagaagcggataccacgcgtgaagaatcccctggctctcccggagccgactggggcttccaagatacagcaaaccttacaaactcgaccgaagagctggataacgcgactctggtcctgagaaacgccaccgaggggctgggccaggtcgccctcttggactgggtggcgcctggacccagcaccgggtctggcagagccggcctggaggccgccggggacgaattatag

SEQ ID NO: 225164 - DNA, 1386 bp, Artificial Sequence
  derived and/or modified sequence
atgaacacggatcttgcagccggaaagatggcgtcagctgcgtgctcaatggaccctatcgattctttcgagttgctggacctcctctttgatagacaggatggcattctgcggcatgtggaactgggggaaggttgggggcacgtgaaggatcagcaggtgcttccaaatccagacagtgatgacttcttgtcatccatcttggggtcgggggatagcctgccctcttcccccctgtggtctcccgaaggatctgactccggcatctctgaagatctgccctctgaccctcaggacacacctcccagatctggccctgccacttcacccgcagggtgccacccggcacagcccggaaaaggcccttgtttaagttatcacccgggtaactcttgcagcacaaccactcccggaccagtcatccaagtacctgaggcatcagtcactatagatctggagatgtggtctcctggcggacgcatttgtgcggagaaaccagccgacccggtcgatttgtcaccccgatgtaatctgacagttaaggatcttttgctgagcggctctagcggcgacttgcaacaacaccatctaggggcatcctatctgctgaggccaggggcaggacattgccaggaactggtgctgacagaagacgagaagaaactgctggcaaaggaaggcattacattgccaacccagctgcccctgaccaaatacgaagaacgggtccttaagaagatcaggaggaagatcaggaacaagcagagcgctcaggagtcccgcaagaaaaagaaggaatacatcgacgggctggaaacccgaatgtctgcttgtaccgcgcagaaccaggaattgcaacgcaaagtcctgcacttagaaaaacagaatttgtcactgttagagcaactgaagaaattgcaggctatcgtcgttcagagcacctccaagagtgctcaaaccggtacgtgtgtagccgtgctgctgttgtctttcgccctcattattttgccatctattagcccctttggaccgaataagactgagagcccaggcgattttgcccctgtgcgcgtgtttagcaggactctgcacaacgacgccgcttcccgagtggccgctgacgcagttcccggatcagaggcccctggtcccaggcccgaagcagataccacacgagaggagtccccaggcagcccaggcgcagactgggggttccaagatacagccaatttaaccaatagcacagaagaacttgataacgctactctcgtcctgaggaatgcaaccgagggtctcgggcaggtcgcacttctggactgggtggctccaggcccaagcaccggcagcggtagggcaggattggaggcggcaggtgacgaattgtag

SEQ ID NO: 225165 - DNA, 1260 bp, Artificial Sequence
  derived and/or modified sequence
atgaataccgacctggctgctggcaaaatggctagcgccgcatgctcgatggacccgatcgactctttcgaactgctcgacctgctgttcgatcgccaggacgggattttgcgccacgttgaactgggagagggctgggggcacgttaaggaccagcaggtcctccccaacccagactccgatgattttctgagctcaatcctgggatcaggggattctctgccttcatcccctctgtggtctcccgagggctcagattcaggaatctcagaggatctgccaagcgatcctcaggatacacccccacggtccgggccagccacctcacctgccggttgccatccggctcaacccggtaagggtccatgtctctcatatcacccaggtaatagttgctccaccactacgcctggccctgtgatccaggtgcccgaggcatccgtgaccatagacctggagatgtggtctcccggaggcaggatatgtgccgagaagccagcagacccggtggacctgagcccaagatgtaatcttacagtgaaggatttgctcctgagcgggtcctcaggcgacctgcagcagcatcatctcggcgcaagctatctgttaagaccaggcgcaggccattgccaagagctggtgttaacagaagatgaaaagaagctgttggctaaggagggcattacccttcccactcaactccctctgaccaagtacgaggaacgtgtgctgaaaaaaattcggcgtaagattaggaataagcaatccgcccaagaaagccgtaagaagaaaaaggcgatcgtggttcaaagcaccagcaagtccgcccaaactgggacgtgcgtggcggttcttttactttcctttgccctcattatccttccttctatcagcccattcggaccgaacaagacagagagtcctggagactttgcaccggtacgcgtgttcagtagaacacttcacaacgacgccgcttcccgggtggctgccgatgccgtgccaggctccgaggccccaggtccccgaccagaggcagataccactagagaagaatcacccggaagtccaggagcagattggggcttccaggacacagctaacctgactaattctaccgaagagttggacaacgccacactggtcttgaggaatgccacggaggggcttgggcaggtggccctgttggactgggttgctcccggtcctagtaccggctccggccgtgctggcctggaggccgcaggtgacgagctgtag

SEQ ID NO: 225166 - DNA, 1386 bp, Artificial Sequence
  derived and/or modified sequence
atgaacacggatctcgccgccggaaagatggcttcagcagcatgctcaatggaccctatcgatagcttcgagcttctggacctgttatttgataggcaggatgggatactcagacacgtggaattgggagagggatggggccacgttaaagaccagcaggttctgcctaacccagatagtgatgattttctgtcttctatcttaggtagtggagattccctcccgtccagccccctgtggtcccccgaggggtctgactcaggtattagcgaggatcttccatcagaccctcaagataccccaccacggtcaggacctgccacttcacctgccggttgccaccccgcccaacccgggaagggtccctgtctatcttatcacccgggcaactcatgctccacaacaactcccggccctgtcatacaggtgcctgaggcatctgttacaatcgacctagagatgtggagccccggagggcggatctgcgccgaaaagcctgccgaccccgtagatctatcacctcgttgcaatctcacggtgaaagatctgctgctgtccggctcatcaggcgacctgcagcagcaccacctcggggcctcctatttactgcggcctggtgctggccattgtcaggagttagtactgaccgaggacgaaaaaaagctcttagccaaggaggggatcactctgccaacccagttaccactcacaaagtacgaggagcgggttcttaagaaaataagacgaaaaattcggaacaaacagtcagcccaggaaagcagaaaaaagaagaaggaatatattgatggtctcgaaacacgcatgtcggcttgtacagcccaaaatcaggaactgcaacggaaggtgctccatctcgaaaagcaaaacctgagcctcctggaacaattgaaaaaattacaagctatagtggttcaatcaaccagcaagtccgcccaaactggaacctgcgtcgccgtactgcttctgagcttcgccctcatcatcctgccatccattagtccatttggacctaacaagacagaatccccaggtgatttcgctcctgttagagtgttttctaggacgttacataatgatgccgcgtctagagtcgccgccgacgcggtccccggttccgaggccccgggacctagaccagaagccgataccacacgcgaggagtctcctgggtcaccaggtgctgattggggctttcaggatactgcaaaccttaccaatagtacagaggaacttgataatgcaactctcgttttgaggaatgccaccgagggacttggtcaagtggccctgctcgactgggttgctcccggtccgagcacaggaagtgggagagccgggctggaggcggccggcgacgaattgtag

SEQ ID NO: 225167 - DNA, 1386 bp, Artificial Sequence
  derived and/or modified sequence
atgaacacagacttggctgctggaaagatggctagtgcggcctgtagtatggaccctatcgactcgttcgaactcctagacctgctcttcgaccgacaggatggcattctgcgacatgtcgaacttggtgagggttggggccacgtaaaagatcaacaggtcttgccaaacccagacagcgatgacttcctgtccagcattcttggatctggagattcattgccttcgtccccactgtggagtccagaaggatccgattccggtattagcgaggatcttccatcagaccctcaggatacccctcctagatctggcccggcgacttctccagctggatgtcaccccgctcaacctgggaagggaccatgtttgtcctatcaccctggtaacagttgcagcaccacaacccctggcccggtgatccaagtgcccgaagcatctgtcacaattgatttggaaatgtggagccctgggggcagaatttgcgccgaaaagcctgccgaccccgtcgacctttcacctcgctgtaacctgaccgtaaaagatttgctcctgtcgggctcctctggagatctgcaacagcaccacctcggagccagctatctccttcggccaggagccggtcactgccaagagctggtacttaccgaggatgagaaaaaacttctcgctaaggaaggaattactttgccaacccagttgcccctcaccaaatatgaagaacgcgtgttgaaaaagatcaggagaaagatacgcaacaaacagtccgcccaggaatctcggaagaaaaagaaagaatacatcgacgggcttgagacccgaatgtccgcctgtaccgcccagaatcaggagcttcagcgaaaagtcctccatttagaaaaacagaacctgtctctcttagagcaacttaaaaaactgcaggcgatagtcgtccagtctacctcgaaatcagcacagacagggacttgtgtagccgttctgctcctatcctttgccctcataattcttccatcaatttcaccatttggtcccaataaaaccgagagcccaggggattttgctcccgtcagagtgttctcaaggaccctgcataacgatgccgcatctagagtggccgcagacgccgtgcccggtagtgaagcacctggcccacgaccagaggccgacactactagggaagagtcgccaggcagcccaggcgctgattgggggttccaggatactgccaacctcaccaattccacagaagaattagataacgccacgttggtgcttagaaacgcaactgaaggactgggccaagtcgctttactggattgggtcgccccaggtccatctaccggtagtgggagggccggactggaagctgcaggagatgaattgtag

SEQ ID NO: 225168 - DNA, 2586 bp, Artificial Sequence
  derived and/or modified sequence
acagagccacagagggctgtgagcttgcccggccccaggtaacgctggcggtgggtgggcctccagcttggagcagagaccccccgaggcatctgcagacagaactggatggacccatgaatacggatttagctgctggaaagatggcttctgctgcctgctccatggaccccatcgacagctttgagctcctggatctcctgtttgaccggcaggacggcatcctgagacacgtggagctgggcgagggctggggtcacgtcaaggaccagcaggtcctgccaaaccccgactctgacgacttcctcagctccatcctgggctctggagactcactgcccagctccccactctggtcccccgaaggcagtgatagtggcatctccgaagacctcccctccgacccccaggacacccctccacgcagcggaccagccacctcccccgccggctgccatcctgcccagcctggcaaggggccctgcctctcctatcatcctggcaactcttgctccaccacaaccccagggccagtgatccaagtacctgaagcctctgtgaccatagacctggaaatgtggagcccaggaggaaggatctgtgctgagaagccggctgatccggtggacctgtccccacgatgcaatctcaccgtgaaagacctcctcctttcgggcagcagtggggacctgcaacagcatcacctgggggcctcctacctcctgcgacctggggctgggcactgtcaggagctggtgctcaccgaggatgagaagaagctgctggctaaagaaggcatcaccctgcccactcagctgcccctcactaagtacgaggagcgagtgctgaaaaaaatccgccggaaaatccggaacaagcagtcggcgcaagaaagcaggaagaagaagaaggaatatatcgatggcctggagactcggatgtcagcttgcactgctcagaatcaggagttacagaggaaagtcttgcatctcgagaagcaaaacctgtccctcttggagcaactgaagaaactccaggccattgtggtgcagtccaccagcaagtcagcccagacaggcacctgtgtcgcagtcctgttgctgtcctttgccctcatcatcctcccctccatcagcccttttggccccaacaaaaccgagagccctggggactttgcgcctgtacgagtgttctccagaactttgcacaacgatgctgcctcccgcgtggctgctgatgctgtgccaggctccgaggccccaggaccccgacccgaggctgacacaacccgagaagagtctccaggaagccccggggcagactggggcttccaggacaccgcgaacctgaccaattcgacggaggagctggacaacgccaccctggtcctgaggaatgcaacagaggggctgggccaggtcgccctgctggactgggtggcgcctgggccgagcactggctcaggacgtgcagggctggaggcggcgggagacgagctgtgagccccgccaggactatgctcccaggcccctctgcccaggggtgccttggggatgctgcactgggcagctacccacctggggatgggacgtgaggccaagaccccagcagagatgccagaatgggggaggcacagctcatagccacacacccagggcctgactgaggcccacgcaggaaccgacactcagacacaaggcaaagagggccacaggacccgggaaatacacacagagccaggagcagaagcaaagagcagacacacatacagcctgaaacagacctggacagacagacacagcctgaaacagacccggacagacagacacagcctgaaacagacccagacaaacagacagacagacacagcctgaaacagacccagacagacagacagacagcctgaaacagacccagacacagcctgaaacagatccggacagacagacagaaacagcctgaaacagacccagacagacagacagacacagcctgaaacagacccggacagacagacagacacagcctgaaacagacccggacagacagacagacacagcctgaaacagacccggacagacagacagacacagcctgaaacagacctagacagacagacacagattgaaacagacccagacaaacagacagacacagcctgaaacagacccagacacagcctgaaacagacccggacagacagacagacacagcctgaaacagacccagacagacagacagacacagcctgaaacagacccagacagacagaccgacgcagcctgaaagagacccagacagagagacaggcagacacagcctaaaacagacctggacagacaggcagacgtagtctgaaacagacctgaacagacagacagacgcacacacacaacagatgcgcagcaactccccgcccagggacccctcccggcctccctcgcacactgggaggaggaagccgccgagactgcagggagcctggccccggagccccgggtgcgccctggtctttggagcagccacggcccacaatcaccccccttttctaagactgcctgatccgaaataaagtattttgacaga

SEQ ID NO: 225169 - DNA, 2460 bp, Artificial Sequence
  derived and/or modified sequence
acagagccacagagggctgtgagcttgcccggccccaggtaacgctggcggtgggtgggcctccagcttggagcagagaccccccgaggcatctgcagacagaactggatggacccatgaatacggatttagctgctggaaagatggcttctgctgcctgctccatggaccccatcgacagctttgagctcctggatctcctgtttgaccggcaggacggcatcctgagacacgtggagctgggcgagggctggggtcacgtcaaggaccagcaggtcctgccaaaccccgactctgacgacttcctcagctccatcctgggctctggagactcactgcccagctccccactctggtcccccgaaggcagtgatagtggcatctccgaagacctcccctccgacccccaggacacccctccacgcagcggaccagccacctcccccgccggctgccatcctgcccagcctggcaaggggccctgcctctcctatcatcctggcaactcttgctccaccacaaccccagggccagtgatccaagtacctgaagcctctgtgaccatagacctggaaatgtggagcccaggaggaaggatctgtgctgagaagccggctgatccggtggacctgtccccacgatgcaatctcaccgtgaaagacctcctcctttcgggcagcagtggggacctgcaacagcatcacctgggggcctcctacctcctgcgacctggggctgggcactgtcaggagctggtgctcaccgaggatgagaagaagctgctggctaaagaaggcatcaccctgcccactcagctgcccctcactaagtacgaggagcgagtgctgaaaaaaatccgccggaaaatccggaacaagcagtcggcgcaagaaagcaggaagaagaagaaggccattgtggtgcagtccaccagcaagtcagcccagacaggcacctgtgtcgcagtcctgttgctgtcctttgccctcatcatcctcccctccatcagcccttttggccccaacaaaaccgagagccctggggactttgcgcctgtacgagtgttctccagaactttgcacaacgatgctgcctcccgcgtggctgctgatgctgtgccaggctccgaggccccaggaccccgacccgaggctgacacaacccgagaagagtctccaggaagccccggggcagactggggcttccaggacaccgcgaacctgaccaattcgacggaggagctggacaacgccaccctggtcctgaggaatgcaacagaggggctgggccaggtcgccctgctggactgggtggcgcctgggccgagcactggctcaggacgtgcagggctggaggcggcgggagacgagctgtgagccccgccaggactatgctcccaggcccctctgcccaggggtgccttggggatgctgcactgggcagctacccacctggggatgggacgtgaggccaagaccccagcagagatgccagaatgggggaggcacagctcatagccacacacccagggcctgactgaggcccacgcaggaaccgacactcagacacaaggcaaagagggccacaggacccgggaaatacacacagagccaggagcagaagcaaagagcagacacacatacagcctgaaacagacctggacagacagacacagcctgaaacagacccggacagacagacacagcctgaaacagacccagacaaacagacagacagacacagcctgaaacagacccagacagacagacagacagcctgaaacagacccagacacagcctgaaacagatccggacagacagacagaaacagcctgaaacagacccagacagacagacagacacagcctgaaacagacccggacagacagacagacacagcctgaaacagacccggacagacagacagacacagcctgaaacagacccggacagacagacagacacagcctgaaacagacctagacagacagacacagattgaaacagacccagacaaacagacagacacagcctgaaacagacccagacacagcctgaaacagacccggacagacagacagacacagcctgaaacagacccagacagacagacagacacagcctgaaacagacccagacagacagaccgacgcagcctgaaagagacccagacagagagacaggcagacacagcctaaaacagacctggacagacaggcagacgtagtctgaaacagacctgaacagacagacagacgcacacacacaacagatgcgcagcaactccccgcccagggacccctcccggcctccctcgcacactgggaggaggaagccgccgagactgcagggagcctggccccggagccccgggtgcgccctggtctttggagcagccacggcccacaatcaccccccttttctaagactgcctgatccgaaataaagtattttgacaga

SEQ ID NO: 225170 - DNA, 1386 bp, Artificial Sequence
  derived and/or modified sequence
atgaacaccgacctggccgccggcaagatggccagcgccgcctgcagcatggaccccatcgacagcttcgagctgctggacctgctgttcgacagacaggacggcatcctgagacacgtggagctgggcgagggctggggccacgtgaaggaccagcaggtgctgcccaaccccgacagcgacgacttcctgagcagcatcctgggcagcggcgacagcctgcccagcagccccctgtggagccccgagggcagcgacagcggcatcagcgaggacctgcccagcgacccccaggacaccccccccagaagcggccccgccaccagccccgccggctgccaccccgcccagcccggcaagggcccctgcctgagctaccaccccggcaacagctgcagcaccaccacccccggccccgtgatccaggtgcccgaggccagcgtgaccatcgacctggagatgtggagccccggcggcagaatctgcgccgagaagcccgccgaccccgtggacctgagccccagatgcaacctgaccgtgaaggacctgctgctgagcggcagcagcggcgacctgcagcagcaccacctgggcgccagctacctgctgagacccggcgccggccactgccaggagctggtgctgaccgaggacgagaagaagctgctggccaaggagggcatcaccctgcccacccagctgcccctgaccaagtacgaggagagagtgctgaagaagatcagaagaaagatcagaaacaagcagagcgcccaggagagcagaaagaagaagaaggagtacatcgacggcctggagaccagaatgagcgcctgcaccgcccagaaccaggagctgcagagaaaggtgctgcacctggagaagcagaacctgagcctgctggagcagctgaagaagctgcaggccatcgtggtgcagagcaccagcaagagcgcccagaccggcacctgcgtggccgtgctgctgctgagcttcgccctgatcatcctgcccagcatcagccccttcggccccaacaagaccgagagccccggcgacttcgcccccgtgagagtgttcagcagaaccctgcacaacgacgccgccagcagagtggccgccgacgccgtgcccggcagcgaggcccccggccccagacccgaggccgacaccaccagagaggagagccccggcagccccggcgccgactggggcttccaggacaccgccaacctgaccaacagcaccgaggagctggacaacgccaccctggtgctgagaaacgccaccgagggcctgggccaggtggccctgctggactgggtggcccccggccccagcaccggcagcggcagagccggcctggaggccgccggcgacgagctgtag

SEQ ID NO: 225171 - DNA, 1260 bp, Artificial Sequence
  derived and/or modified sequence
atgaacaccgacctggccgccggcaagatggccagcgccgcctgcagcatggaccccatcgacagcttcgagctgctggacctgctgttcgacagacaggacggcatcctgagacacgtggagctgggcgagggctggggccacgtgaaggaccagcaggtgctgcccaaccccgacagcgacgacttcctgagcagcatcctgggcagcggcgacagcctgcccagcagccccctgtggagccccgagggcagcgacagcggcatcagcgaggacctgcccagcgacccccaggacaccccccccagaagcggccccgccaccagccccgccggctgccaccccgcccagcccggcaagggcccctgcctgagctaccaccccggcaacagctgcagcaccaccacccccggccccgtgatccaggtgcccgaggccagcgtgaccatcgacctggagatgtggagccccggcggcagaatctgcgccgagaagcccgccgaccccgtggacctgagccccagatgcaacctgaccgtgaaggacctgctgctgagcggcagcagcggcgacctgcagcagcaccacctgggcgccagctacctgctgagacccggcgccggccactgccaggagctggtgctgaccgaggacgagaagaagctgctggccaaggagggcatcaccctgcccacccagctgcccctgaccaagtacgaggagagagtgctgaagaagatcagaagaaagatcagaaacaagcagagcgcccaggagagcagaaagaagaagaaggccatcgtggtgcagagcaccagcaagagcgcccagaccggcacctgcgtggccgtgctgctgctgagcttcgccctgatcatcctgcccagcatcagccccttcggccccaacaagaccgagagccccggcgacttcgcccccgtgagagtgttcagcagaaccctgcacaacgacgccgccagcagagtggccgccgacgccgtgcccggcagcgaggcccccggccccagacccgaggccgacaccaccagagaggagagccccggcagccccggcgccgactggggcttccaggacaccgccaacctgaccaacagcaccgaggagctggacaacgccaccctggtgctgagaaacgccaccgagggcctgggccaggtggccctgctggactgggtggcccccggccccagcaccggcagcggcagagccggcctggaggccgccggcgacgagctgtag

SEQ ID NO: 225172 - protein, 2567 aa, Artificial Sequence
  derived and/or modified sequence
MAISSRLALWEQKIREEDKSPPPSSPPPLFSVIPGGFIKQLVRGTEKEAKEARQRKQLAVASPEREIPEISISQPNSKSSSGTRSGSQQISQDDQSSSPGSSDILGKESEGSRSPDPEQMTSINGEKAQELGSSATPTKKTVPFKRGVRRGDVLLMVAKLDPDSAKPEKTHPHDAPPCKTSPPATDTGKEKKGETSRTPCGSQASTEILAPKAEKTRTGGLGDPGQGTVALKKGEEGQSIVGKGLGTPKTTELKEAEPQGKDRQGTRPQAQGPGEGVRPGKAEKEGAEPTNTVEKGNVSKDVGSEGKHVRPQIPGRKWGGFLGRRSKWDGPQNKKDKEGVLLSKAEKTGEPQTQMEKTSQVQGELGDDLRMGEKAGELRSTTGKAGESWDKKEKMGQPQGKSGNAGEARSQTEKGCEAPKEVSTMVESPAAPGKGGWPGSRGQEAEEPCSRAGDGAGALETELEGPSQPALEKDAERPRIRKENQDGPAPQEEGKGGQSRDSDQAPEDRWYEAEKVWLAQKDGFTLATVLKPDEGTADLPAGRVRLWIDADKTITEVDEEHVHRANPPELDQVEDLASLISVNESSVLNTLLQRYKAQLLHTCTGPDLIVLQPRGPSVPSAGKVPKGRRDGLPAHIGSMAQRAYWALLNQRRDQSIVALGWSGAGKTTCCEQVLEHLVGMAGSVDGRVSVEKIRATFTVLRAFGSVSMAHSRSATRFSMVMSLDFNATGRITAAQLQTMLLEKSRVARQPEGESNFLVFSQMLAGLDLDLRTELNLHQMADSSSFGMGVWSKPEDKQKAAAAFAQLQGAMEMLGISESEQRAVWRVLAAIYHLGAAGACKVGRKQFMRFEWANYAAEALGCEYEELNTATFKHHLRQIIQQMTFGPSRWGLEDEETSSGLKMTGVDCVEGMASGLYQELFAAVVSLINRSFSSHHLSMASIMVVDSPGFQNPRHQGKDRAATFEELCHNYAHERLQLLFYQRTFVSTLQRYQEEGVPVQFDLPDPSPGTTVAVVDQNPSQVRLPAGGGAQDARGLFWVLDEEVHVEGSSDSVVLERLCAAFEKKGAGTEGSSALRTCEQPLQCEIFHQLGWDPVRYDLTGWLHRAKPNLSALDAPQVLHQSKREELRSLFQARAKLPPVCRAVAGLEGTSQQALQRSRMVRRTFASSLAAVRRKAPCSQIKLQMDALTSMIKRSRLHFIHCLVPNPVVESRSGQESPPPPQPGRDKPGAGGPLALDIPALRVQLAGFHILEALRLHRTGYADHMGLTRFRRQFQVLDAPLLKKLMSTSEGIDERKAVEELLETLDLEKKAVAVGHSQVFLKAGVISRLEKQREKLVSQSIVLFQAACKGFLSRQEFKKLKIRRLAAQCIQKNVAVFLAVKDWPWWQLLGSLQPLLSATIGTEQLRAKEEELTTLRRKLEKSEKLRNELRQNTDLLESKIADLTSDLADERFKGDVACQVLESERAERLQAFREVQELKSKHEQVQKKLGDVNKQLEEAQQKIQLNDLERNPTGGADEWQMRFDCAQMENEFLRKRLQQCEERLDSELTARKELEQKLGELQSAYDGAKKMAHQLKRKCHHLTCDLEDTCVLLENQQSRNHELEKKQKKFDLQLAQALGESVFEKGLREKVTQENTSVRWELGQLQQQLKQKEQEASQLKQQVEMLQDHKRELLGSPSLGENCVAGLKERLWKLESSALEQQKIQSQQENTIKQLEQLRQRFELEIERMKQMHQKDREDQEEELEDVRQSCQKRLHQLEMQLEQEYEEKQMVLHEKQDLEGLIGTLCDQIGHRDFDVEKRLRRDLRRTHALLSDVQLLLGTMEDGKTSVSKEELEKVHSQLEQSEAKCEEALKTQKVLTADLESMHSELENMTRNKSLVDEQLYRLQFEKADLLKRIDEDQDDLNELMQKHKDLIAQSAADIGQIQELQLQLEEAKKEKHKLQEQLQVAQMRIEYLEQSTVDRAIVSRQEAVICDLENKTEFQKVQIKRFEVLVIRLRDSLIKMGEELSQAATSESQQRESSQYYQRRLEELKADMEELVQREAEASRRCMELEKYVEELAAVRQTLQTDLETSIRRIADLQAALEEVASSDSDTESVQTAVDCGSSGRKEMDNVSILSSQPEGSLQSWLSCTLSLATDTMRTPSRQSATSSRILSPRINEEAGDTERTQSALALSRARSTNVHSKTSGDKPVSPHFVRRQKYCHFGDGEVLAVQRKSTERLEPASSPLASRSTNTSPLSREKLPSPSAALSEFVEGLRRKRAQRGQGSTLGLEDWPTLPIYQTTGASTLRRGRAGSDEGNLSLRVGAKSPLEIEGAAGGLLRSTSLKCISSDGVGGTTLLPEKSKTQFSSCESLLESRPSMGRKLSSPTTPRDMLLSPTLRPRRRCLESSVDDAGCPDLGKEPLVFQNRQFAHLMEEPLGSDPFSWKLPSLDYERKTKVDFDDFLPAIRKPQTPTSLAGSAKGGQDGSQRSSIHFETEEANRSFLSGIKTILKKSPEPKEDPAHLSDSSSSSGSIVSFKSADSIKSRPGIPRLAGDGGERTSPERREPGTGRKDDDVASIMKKYLQK

SEQ ID NO: 225173 - DNA, 7704 bp, Artificial Sequence
  derived and/or modified sequence
atggccataagcagccggctagccctctgggagcagaagatcagggaggaggacaagtctccacccccttctagccccccacctctgttttctgttatccccgggggtttcatcaagcagcttgtgcgcggaaccgagaaggaagctaaggaagcccgacaacgcaagcagctcgctgtggccagccctgagagggagatcccagaaatctctatctctcagcccaactccaagtcttcttccggcacacgctccggcagccaacagatttctcaggacgatcagtcgtccagccccggtagcagcgatatactcggaaaagaatccgaagggtctcgctcccccgacccagaacagatgacatctatcaacggagagaaggcccaggaactcggctcttccgcaaccccaaccaagaagacagtgcctttcaagaggggggtgcgccgcggtgacgtgctcctaatggtggccaaactagatcctgattcggctaagcccgagaagacccacccacatgatgcaccaccatgcaaaacatccccacctgccaccgatactgggaaggagaagaaaggcgagacctccagaacaccttgcggaagtcaagcctccaccgaaatcctagctccgaaggccgagaaaacgcggacaggaggcctcggtgatcccgggcaagggaccgtggcgctaaaaaaaggagaggaggggcagagtatcgtggggaaagggctaggtactcccaagactacagagctcaaggaggccgagcctcagggcaaagatcggcaaggaacgagaccacaggcccaggggccaggggagggggtgcggcccggcaaagccgaaaaggagggggcagaacctaccaatactgtggaaaaagggaatgtgtctaaagacgtgggcagtgagggaaagcacgttcggccccagatacccggtaggaagtggggtggatttctgggccggcggtccaaatgggatggcccccagaacaagaaggataaagagggagtgctcctgtcaaaagctgagaaaacaggcgaaccccagacacaaatggagaagactagtcaagtgcagggcgaactgggggatgacctacgtatgggcgagaaggccggcgagctcaggtccactactggaaaggctggtgaatcttgggacaaaaaggaaaagatggggcagccacagggcaaatccgggaacgcgggggaggctcgttctcagaccgagaaaggatgtgaggccccaaaagaggttagtacaatggtggagtctcctgctgcacctgggaaagggggctggcccggtagtcgcggacaagaggctgaggagccatgcagccgagcaggcgatggcgcaggggctctagaaactgaactggagggcccctcacagccagccttagagaaggatgctgagagaccgcggatccgtaaggagaatcaagatggacccgccccgcaggaagaaggtaagggcggccagtctcgagatagcgaccaggctcccgaggatcgttggtacgaagctgaaaaagtctggcttgcccagaaagacgggttcacccttgcaacggtgcttaaaccagacgaaggcaccgccgatctcccagcaggtcgagtccggctctggattgacgccgataaaaccataaccgaggtggatgaggagcacgtgcacagagctaacccaccagaactggatcaggttgaagacttagcttcccttatttcagtgaatgagtcctcggttctgaatacgctgctccagcgctataaagcccagttgctgcacacctgcaccggccccgacttaattgtgcttcagccccggggaccttcggtcccaagcgctggtaaagtccctaaggggcgccgggacggcctgccagctcacataggctctatggcacagcgggcgtactgggcactgctgaaccagcggcgcgaccagtccatcgtcgccctcgggtggtcaggtgcaggaaagacaacttgttgcgaacaagtgctcgaacacctcgtggggatggctggctcggtggacggccgagtttcggtcgaaaagatacgagcaaccttcaccgtcctgcgcgctttcggcagcgtgagcatggcccatagccgcagtgcaacgagattttctatggttatgtcactggactttaatgccactggacgaataactgccgctcagctacagacaatgctgctcgagaagtcccgtgtcgctagacagccggagggagaatcaaactttcttgtattttctcagatgctggctggactggatctcgatctgagaacagagttaaaccttcatcagatggcggattcctccagctttggaatgggtgtgtggtccaaacctgaagacaaacagaaggcagccgccgccttcgcgcagctgcagggggccatggagatgctcggtatctccgagtccgaacagcgagccgtttggcgtgtccttgccgccatttaccatctaggcgcagctggtgcctgcaaggttggcagaaagcagttcatgcgatttgaatgggcaaattacgcggctgaggcccttggatgcgaatacgaggaactcaatacagcaactttcaaacaccatcttaggcaaataatccagcagatgaccttcggcccttcccgttggggactcgaagacgaagagacaagttccgggctcaagatgactggtgtggactgtgtagagggcatggcaagcggcctctaccaggaactgttcgcagctgtggtgagcctgatcaaccgcagcttctcttctcatcatctgagcatggccagcattatggtagttgactccccaggctttcagaatccccgccatcagggaaaggatcgggcggctacctttgaggaactatgccacaattacgctcatgagcggctccagctcttgttttatcaaagaacctttgtttccactctccagaggtaccaggaagagggagtgcctgtccaatttgacctccccgatccttcacccggtaccaccgtggccgtcgtggaccagaacccatcccaggtgcgacttcctgccggcgggggagcccaggacgccagaggcctattctgggtcctcgatgaagaggtgcatgtggaagggtcgtcagattctgtagtactcgagcgactgtgtgccgcttttgagaagaagggcgccggaacagaaggaagttcagctcttcgcacttgtgaacagccactccagtgtgagatcttccaccagcttggatgggaccctgtgagatacgatctcaccggttggcttcatcgggccaaacccaatctcagcgccctggatgctccgcaagtcctccaccaatctaagcgtgaggagctccgttcactcttccaagctcgtgcaaagctgccccctgtgtgtcgtgccgtcgccggtctggagggaactagccagcaggcccttcaaagatcgagaatggttcggcgtaccttcgcaagtagtctggctgccgtcaggagaaaggcaccctgcagccaaattaagctgcagatggatgcactgacatcaatgataaagcggtccagactgcacttcattcactgtctggtcccaaatcccgtggttgagtccagaagtggacaagagagtccgcctccccctcagccgggtcgggataaacccggagccggcggtcccctggcactcgacatccccgccttaagagtgcagctggcaggcttccatatcctagaagcgctgagacttcatcgaacaggttacgctgatcacatgggacttacacgattccgtcgacagtttcaagtgctcgacgccccactgctcaaaaaactgatgtccaccagcgagggtattgacgagcgcaaagcagtagaggagctgctcgaaacccttgacttagagaagaaggccgttgcggtcggccacagccaggtgttcctgaaggctggagtcatcagccgcctggaaaaacagagggaaaaattagtgagtcagtcgatagtcctgtttcaagcagcttgcaagggcttcctttcaaggcaggagttcaagaaactgaaaatcagacgcctagccgctcagtgtattcagaagaatgtggctgtctttcttgcggtcaaagattggccttggtggcagctcttggggtcccttcaacctctcctgtcagcaaccatcggcacggagcagctgagagctaaagaagaggaactcacgactctgagacgcaagctggaaaagagtgagaagcttaggaatgagctgagacaaaatactgaccttctcgagagtaagatagccgacctgacctctgatctggcagacgaacgttttaagggcgacgtagcctgccaggtactggaaagcgagcgggccgagcgcctgcaggcattccgcgaagtgcaggaactaaaatccaagcacgaacaggtgcagaagaaattgggtgatgtcaataaacagcttgaggaggctcagcaaaaaattcagctgaatgatctagagcggaatcctacagggggagccgatgaatggcagatgcggttcgactgcgcccagatggaaaatgagtttcttagaaaaaggctgcaacaatgtgaggagagattggatagcgaactcacagctagaaaagagctggagcaaaagctgggggaactgcaaagtgcctatgatggagccaagaaaatggctcaccaactaaaacgtaagtgtcaccatctgacttgcgatctggaagacacgtgcgtgctgctggagaaccagcagagtcgcaaccacgaactggaaaaaaagcagaagaaatttgatctccagctagctcaagccctgggggaatctgtctttgaaaagggtctgcgggagaaagtgacccaggaaaacacatccgtaaggtgggaacttggccagttacagcagcagcttaagcagaaggaacaggaggccagccagctgaagcaacaggtggagatgttgcaggatcataagagggaactgttgggctcacctagtcttggcgagaattgtgtagctggcctaaaagaaaggctgtggaagctcgaatccagcgcccttgagcagcaaaagatccaaagccaacaggagaacaccattaaacagctggaacagttgcgccaacggttcgagcttgagattgagaggatgaaacagatgcatcaaaaagatcgggaagatcaggaggaggagctagaggacgtgcggcagagctgtcagaaaagattgcatcagttggagatgcagctggaacaagagtacgaagaaaagcagatggttctgcatgagaagcaggacttagagggattaattggcaccctgtgcgaccagatcgggcatcgagacttcgacgtcgagaaaagattaagaagggacttacgaagaacacacgccctgcttagcgatgtgcagctcctgctgggtaccatggaggatggtaaaactagcgtctcaaaggaggaactggaaaaggttcacagccagctggagcaatctgaagccaaatgcgaagaagcgcttaagacccagaaggtcctgacagcagatctggaaagcatgcattctgaacttgaaaacatgactagaaataaatcattggtggatgaacagctgtacaggctgcaattcgagaaggcagacctcttgaagcggatagatgaagatcaggatgaccttaatgaacttatgcagaagcacaaagatctcatcgcgcagtctgctgctgatatcggacagatacaagagctccaacttcagctagaagaagccaagaaggagaagcataagctccaggaacagctgcaggtggctcagatgcgcatcgagtaccttgagcagtctacagtggatcgtgcaattgtgagtcgacaggaagcggtgatttgcgacctcgagaacaagacagagtttcagaaggtgcagatcaagaggttcgaggtgctcgtaattcggctgagagattccctgatcaagatgggtgaagagctctcccaggctgcaacttctgagtctcaacagagggagagctcgcagtactaccaacggcggctcgaggagctcaaagcggacatggaagagctggtccagcgcgaagcagaggcctctagaaggtgcatggagcttgaaaagtacgttgaggagttagccgcagttaggcaaacccttcagactgatcttgaaacgagtatacgtaggatcgccgacctacaggcggccctggaagaagttgcatcttccgattctgataccgagagcgtgcagaccgccgtcgattgtggctcgtccggccgaaaggagatggataatgtatctattttgtcttcacaaccggaaggctcactccaatcttggctgtcatgcaccctgagtctcgctaccgacacaatgcgaactccaagccgccagtccgccacaagctctcgcattctgtcacccaggattaatgaagaggcaggagatacagagcggacgcagagcgccttggctctgagccgagcacgttccaccaacgtgcatagtaagacctctggggataagccagtgagccctcatttcgtgcgacgccaaaaatactgtcacttcggcgacggggaggtgctggccgtgcagcgcaagtcaactgagcgccttgaaccagcaagctcacctttggcttcacggtccaccaacactagccccctgtctcgggagaagctgcccagcccatcagccgcgctgtccgagttcgtggaaggactccgccgcaaaagagcacagcgcgggcagggctcaactttaggtcttgaggactggccgaccctgcctatttatcagactacgggtgctagcaccctgcgccgcggccgcgcaggatcagatgaaggtaatctctctctgcgagtaggcgctaagtctccactggagatcgagggggctgccggcggcctgctgcgatccacctcccttaagtgcatcagttctgatggggtgggcgggactactctactacctgagaagtctaaaacacagttttcatcctgtgaatccctcctggagtcccggcctagtatgggacgcaaattgtcgtcaccaacaactccccgcgacatgcttctgtccccaaccctgaggccaaggcgaaggtgcctggaatctagcgtggatgatgcaggttgccctgatttgggaaaggagcctttggtgtttcagaacagacagttcgctcacctaatggaagagcccctgggatccgaccctttcagttggaaactaccttctctcgattacgaacgcaaaaccaaggtggactttgacgacttcctgcccgccatccgcaagccccaaacacctacatctctggcggggagcgctaagggcggacaggatgggtctcaaagaagctcaattcattttgagactgaggaggccaacagatcttttttatctggaatcaagactattcttaaaaagtccccagagcctaaagaggacccggcccacctaagcgattcttcttcttccagtggatccatcgttagctttaagtctgccgattccatcaaatccaggccaggcattcctcgtctagccggggatgggggggaaaggacctctccagaacgtagggagcccggtactggcagaaaggatgatgatgtggcatcaattatgaaaaaatatttgcaaaagtag

SEQ ID NO: 225174 - DNA, 7704 bp, Artificial Sequence
  derived and/or modified sequence
atggcgatctcatctaggctggccctgtgggaacagaagattcgtgaggaggataagagtcccccgccatccagcccaccgcctctattctcggtaattccaggcgggttcatcaaacagttggttagaggtacagaaaaagaagcaaaagaggcaaggcagaggaagcagctcgcagtagcgagcccagaacgcgagattccagaaattagcatttcccagccaaactcaaaaagctcttccggcacacggagcggctcccagcaaattagccaagacgaccagagctcttcacctggctcatccgacattctagggaaggagtccgagggctctcgcagcccagacccggagcagatgacaagcatcaatggcgaaaaggctcaggagctgggaagcagcgccacacccaccaaaaagacagtgccatttaagagaggagtcaggcgtggagatgtgttgctcatggtcgctaaattggatccagatagcgctaaacccgagaaaacccatccacatgatgctccaccatgtaaaactagtcctccagccaccgataccggtaaggagaagaaaggagaaacgagccggaccccctgtggctcacaggcctcaacagagattctagcccccaaggctgagaaaacacgcactggaggtctgggcgacccaggccaaggaacagttgctttgaaaaagggggaggagggccagagtattgttgggaaaggccttgggacacccaagaccaccgagttaaaggaggctgagccccagggcaaggaccggcaggggacacgccctcaggctcaggggcctggagaaggtgttaggcctggaaaggcggaaaaggagggcgccgaaccaacaaacaccgttgagaaagggaatgtgtcgaaagatgtgggaagcgagggcaaacacgtccgaccacagatacctgggaggaaatggggaggattcctgggccgaaggtcaaagtgggacggtccacaaaataagaaagataaggagggcgtacttctcagcaaagccgagaaaacgggcgaaccgcagacacagatggaaaaaacctcccaggtgcagggggagctcggcgacgaccttagaatgggtgaaaaggctggagagctgcggagtaccactgggaaagcaggcgaaagctgggataagaaagagaagatgggccagccccaggggaaatcggggaatgccggagaggcccggagtcagactgagaaaggctgtgaggcgccgaaagaggtaagtactatggtagagtcccctgccgcccctggcaaaggtggatggcccgggtctagggggcaggaggctgaagaaccatgtagtagagcaggcgacggtgccggcgcgctggagacggaacttgagggccctagtcagccagccttggaaaaggacgcagaaagaccccgcatccggaaggagaatcaggacggacctgcaccccaggaagagggcaagggtgggcagtctagagactccgatcaagccccggaggaccgctggtacgaggcagagaaggtttggcttgcccagaaagatggatttacattggccacagtcctcaaacccgatgaagggaccgccgacctgccagccggtagagtgagactgtggatcgatgcagacaagacaatcacggaggtcgatgaggaacacgtgcacagagcaaaccctccagaactcgatcaggtcgaggacctggctagccttatctctgtgaatgaaagcagcgtcctcaacaccctcctgcaacgctataaggcccagctcttgcatacctgtactggacccgacttgattgtcctccagccccgcggaccctcagtgcctagtgccggcaaggtacccaagggcaggagagatggcttgccggcccacattgggagcatggcccagcgtgcttattgggccctgcttaatcagaggagagaccaatccatagtcgctctcggatggtccggagctggaaaaaccacctgctgcgaacaggtgttggaacacctggtcgggatggccggcagcgtagacggcagagtctcagttgagaaaataagagcaacgtttaccgtcctgcgagcgtttggcagcgtcagcatggcccactcccgttccgcgacgaggttctccatggtgatgagtctagactttaatgccacggggaggatcacagccgcacagctgcaaaccatgcttctggagaaaagtagggtggctagacaaccagagggcgagtctaactttctggtttttagccaaatgctggcaggactcgacttagaccttcggaccgaactgaacctacaccaaatggccgatagcagcagcttcggaatgggtgtttggtccaagcccgaagataaacaaaaagccgccgctgcgttcgctcagctccagggggccatggaaatgcttggtatttcggagtctgagcagagagccgtctggagggtcctggccgcaatctatcatctgggggccgccggcgcatgcaaggtcgggcggaaacaattcatgagatttgagtgggctaattacgctgcagaggcgctgggttgcgaatatgaagagctgaataccgccaccttcaagcatcacttacgccagataattcagcagatgacattcggcccttcacgctggggactggaagatgaggaaactagctcgggccttaagatgaccggggtcgactgtgttgaaggcatggcctcaggtctctatcaggaactctttgccgccgttgtatcattgatcaaccgatctttctcttcgcatcatctttccatggcttctatcatggtcgtggacagtcccggttttcaaaaccctcgtcaccaggggaaagaccgggctgccacttttgaagagctctgtcataactatgcccacgaacgattgcagctgctgttttaccagcgaacctttgtcagcacccttcaaagatatcaagaagagggtgtgccagtgcagttcgacctccctgacccaagccctgggacaaccgtggccgtggttgatcaaaatccttcgcaggttcgcttgccagctggaggtggggctcaagacgcacgcggccttttctgggtgctggacgaggaagtgcatgtggagggcagtagcgactcagtcgtgctggagaggctctgtgctgcatttgagaagaaaggcgccggaactgagggaagcagcgctctgcgcacatgtgagcagcctttgcagtgcgaaatcttccatcaattggggtgggaccccgtccgatatgacctaaccgggtggctgcacagggcaaagcccaatctttctgcactggatgcaccacaggtgttgcatcagagtaaacgggaggagttgaggtccctattccaggcccgagccaagttaccaccagtttgcagggcagtggctgggctcgagggcacatcccagcaggcgcttcagagaagtagaatggtgagacgtactttcgccagctcgctcgccgcagtgcgtcgaaaggctccttgctcccagattaagttacaaatggacgcacttacgtctatgataaaaagatcaaggcttcacttcattcactgcctggtgcctaatcccgtggtcgaaagcaggtccgggcaggagtccccacccccccctcagccaggtagagacaagcccggagccgggggtccactcgcactcgatattccagctttgcgtgtccagctggccgggtttcatattctggaggcactgaggttacaccggactggttacgcggatcacatggggctgacccgctttcgccgccagttccaggtacttgatgcccccctgctcaaaaaacttatgagtacatcagagggcattgacgaacgcaaggcagttgaagagctgcttgagaccctggatctagagaaaaaggccgtagcggtggggcactcgcaggtttttcttaaagctggcgtaatctcgcgcctagagaagcagcgggagaagttagtgtcccagtcgattgtactattccaagcagcctgtaagggattcttatcacgccaagaattcaagaagctcaagattcggaggctagcggcccaatgcattcagaagaatgtggctgtgtttcttgccgttaaggactggccttggtggcaactcctcggtagcctacaacccctgttaagcgccaccattgggactgagcagctgagggctaaagaggaggagcttacgaccttgcgcaggaagctggagaaaagcgagaagctgcggaatgagctgcgtcagaataccgatctgctcgagagcaaaattgctgatctgacgagcgatttagctgacgaaagatttaagggagacgttgcgtgccaggtgctggagagtgagagggcagaaaggctgcaggccttccgtgaagtccaagagctcaagagcaagcacgaacaagtgcaaaaaaagttgggagatgtgaataagcaactggaagaagcgcaacaaaagattcaactcaatgaccttgagcgaaacccaactggaggggcagatgagtggcagatgaggttcgattgtgcccagatggagaatgagttcctccgaaagagactacagcagtgtgaggaaaggcttgatagtgagctgaccgccagaaaggagcttgagcaaaagctgggtgaactgcagtccgcttacgacggggcaaaaaagatggcccaccaactgaagagaaaatgccaccacttgacttgcgaccttgaggacacatgtgtcttgctggaaaatcagcagtcgaggaaccatgaacttgagaagaaacagaagaaatttgatctgcagctggcgcaggcgctgggagaaagtgtgttcgaaaaaggcctgcgcgaaaaagttacccaggagaatacatccgtacgttgggagctgggccagctgcagcagcagttgaaacagaaggagcaggaagccagccagctcaaacagcaggtggaaatgctgcaagatcacaaacgcgagctcctgggttcaccttcactgggggaaaactgcgtcgcaggactgaaagagcggctgtggaagctcgagtcaagtgccctggaacagcaaaagattcagtcccagcaagaaaacaccataaagcagctcgagcaactgaggcagcgcttcgagctggaaattgaacgaatgaaacagatgcaccaaaaagatagggaggaccaagaagaggagctggaagatgtcagacagtcttgccaaaagcgcctgcatcagttggaaatgcagctcgaacaggagtacgaagagaagcagatggtcctgcatgagaagcaggaccttgaggggttgatcggaacactgtgtgaccagattggccacagagatttcgatgtggagaagaggctgcggcgagacctgcgccggacacacgcccttcttagcgatgtgcagctgcttctcgggacgatggaggatggtaaaacgagtgtgagcaaggaggaactggagaaggtccacagccagctagagcagtcagaagcgaaatgcgaagaggctctgaaaacccagaaagtccttacagctgatctcgagtctatgcacagcgagttggaaaatatgacgcgcaacaaaagcctggttgacgagcagctctaccgccttcaattcgaaaaggctgacctcctaaagcggattgatgaggatcaagacgatctgaatgaactgatgcaaaagcacaaggacctgattgctcaaagtgccgccgatattgggcagatacaggagcttcagttgcaacttgaggaggcaaaaaaggaaaaacataaattacaggagcagctgcaggtggcccagatgaggattgagtatctcgaacagtctacggtggatcgtgcaatcgtgagcaggcaagaggccgtgatttgcgacttggaaaacaaaaccgaattccagaaggtgcagatcaaacgttttgaagtactggtgattaggctgcgcgattccctgattaaaatgggcgaagagctcagccaagctgcgacctctgaatctcagcagagagaatcctctcagtactatcagagaagactagaagaactgaaggccgacatggaagagctcgtgcaaagggaggccgaagctagcaggcggtgtatggagctggaaaagtatgtggaagagcttgccgcggtacgacagaccctgcagacagaccttgaaacatctattcgccgtattgcggacctgcaagccgctctggaggaagtcgccagctccgatagtgacacagagtcagtgcaaaccgctgtggactgcggtagtagtggccgcaaggagatggacaatgtgtccattctaagttcccagcccgaggggtctctgcagtcatggctcagttgcacactgtcccttgcaacagacaccatgcgcactccttcaagacagagtgccacgtcctctcggatactttcgccaagaatcaacgaggaagcgggagacactgaacggacacagtctgcactggcactgagtcgcgcccgcagcaccaatgtgcatagtaagacctctggagacaagccagtctccccccattttgtccgcagacagaaatactgtcacttcggagacggggaagtgctggctgtccagaggaagagcacagaaaggctggaacctgcctccagtccgctggccagccgtagtaccaatacaagtcctctttcccgggaaaaacttccatctccttccgcggcgctgagtgaattcgtggagggcctgaggcggaaacgcgcacaacgcggccagggctctactctcgggttggaagactggcctacactccccatctaccaaaccaccggagcctccacattgcgcagaggtcgcgctggttccgatgaggggaacttgtccctgcgggtaggagcgaagtctccactcgagatcgaaggagcggcgggcggactactgcgtagtacaagcctgaagtgcattagctctgatggcgtaggtggaacgacactgctccctgagaaaagtaaaacgcagttttcctcctgcgaatcattgctggaatcccgccctagtatggggagaaaattaagctcacctacaaccccacgtgacatgctcttaagcccaactctgaggcctcgtagacgctgtctggaatcctctgtggatgacgcgggatgccccgacctcgggaaagaacccctggttttccagaatcgccagttcgctcatctgatggaagaaccgcttggttcagacccgttctcctggaagctcccctcactcgattatgagcgcaagaccaaagtcgactttgacgacttcctgccggctatccgcaagccacaaaccccgaccagcctcgcgggctctgcaaaggggggccaagacggctcgcagcggtcaagtatacattttgagacagaagaagccaacaggagtttcctctcaggtatcaagaccattcttaaaaagtccccagagcctaaagaggacccggctcacctcagcgatagttcgtcatctagcggttctattgtaagctttaagtctgccgattcaatcaagagtaggcctggaatcccgaggttagcaggtgacggcggagagcgaacttcacctgagaggagagagccgggaactggtcgtaaggatgatgacgttgcgagtatcatgaagaagtatctgcagaagtag

SEQ ID NO: 225175 - DNA, 7704 bp, Artificial Sequence
  derived and/or modified sequence
atggccatcagcagccggctggccctgtgggagcagaagatccgggaggaggacaagagccccccacccagcagccccccacccctcttcagcgtcatccctgggggcttcatcaagcagctggtgcggggcacagagaaggaggccaaggaggcccggcagaggaagcagctggccgtggccagccctgagcgggagatccctgagatcagcatcagccagcccaacagcaagagcagcagcggcaccaggagcggcagccagcagatcagccaggatgaccagagcagcagccctggcagcagtgacatcctgggcaaggagagcgagggcagccgcagcccagaccctgagcagatgaccagcatcaacggggagaaggcccaggagctgggcagcagcgccacccccaccaagaagacagtgcccttcaagaggggcgtgagaagaggagatgtgctgctgatggtggccaagctggaccctgacagcgccaagccagagaagacccacccccatgatgccccaccctgcaagaccagccccccagccacagacaccgggaaggagaagaagggggagaccagcaggaccccctgtggcagccaggccagcacagagatcctggcccccaaggccgagaagaccaggactggaggcctgggggaccccggccagggcaccgtggccctgaagaagggggaggagggccagagcatcgtgggcaagggcctgggcacccccaagaccacagagctgaaggaggccgagccccagggcaaggaccggcagggcacccggccccaggcccagggccctggagagggcgtgcggcctgggaaggccgagaaggagggcgctgagcccaccaacacagtggagaagggaaatgtgtccaaggatgtgggcagcgagggcaagcacgtgcggccccagatccctggcaggaagtggggcggcttcctgggccgccgcagcaagtgggatggcccccagaacaagaaggacaaggagggcgtgctgctgagcaaggccgagaagacaggagagccccagacccagatggagaagaccagccaggtgcagggcgagctgggagatgacctgaggatgggagagaaggccggggagctgcggagcaccaccgggaaggccggggagagctgggacaagaaggagaagatgggccagccccagggcaagtctggaaatgctggggaggcccggagccagacagagaagggctgtgaggcccccaaggaggtgtccaccatggtggagagccctgctgcccctgggaagggcggctggccaggcagccggggccaggaggccgaggagccctgcagcagagctggagatggagctggggccctggagacagagctggagggccccagccagcctgccctggagaaggatgctgagcggccccgcatcagaaaagaaaaccaggacggccctgccccccaggaggagggcaaaggaggccagagccgggacagcgaccaggccccagaagatcgctggtatgaagctgagaaggtgtggctggcccagaaggatggcttcaccctggccaccgtgctgaagccagatgagggcacagctgacctgcctgctggccgggtgcggctgtggattgatgctgacaagaccatcacagaggtggatgaggagcacgtgcaccgggccaaccccccagagctggaccaggtggaggacctggccagcctcatctctgtgaatgaatcttctgtgctgaacaccctgctgcagcgctacaaggcccagctgctgcacacctgcaccggccctgacctgattgtgctgcagccccggggccccagcgtgcccagcgctgggaaggtgcccaagggcagaagagatggcctgcctgcccacatcggctccatggcccagagggcctactgggccctgctgaaccagaggcgggaccagagcatcgtggccctgggctggagcggggccggcaagaccacctgctgtgagcaggtgctggagcacctggtgggcatggccggctctgtggatggccgggtgtctgtggagaagatccgggccaccttcaccgtgctgcgggcctttggatctgtgtccatggcccacagccgcagcgccacccgcttctccatggtgatgagcctggacttcaatgccaccggccgcatcacagctgcccagctgcagaccatgctgctggagaagagccgggtggcccggcagcctgagggggagagcaacttcctggtgttcagccagatgctggccggcctggacctggacctgaggacagagctgaacctgcaccagatggctgacagcagcagctttggcatgggcgtgtggagcaagccagaggacaagcagaaggctgctgctgcctttgcccagctgcagggcgccatggagatgctgggcatcagcgagagcgagcagagagctgtgtggagggtgctggccgccatctaccacctgggcgccgccggggcctgcaaggtgggcaggaagcagttcatgagatttgagtgggccaactatgctgctgaggccctgggctgtgaatatgaggagctgaacacagccaccttcaagcaccacctgcggcagatcatccagcagatgaccttcggccccagccgctggggcctggaggatgaggagaccagcagcggcctgaagatgactggagtggactgtgtggagggcatggccagcggcctgtaccaggagctgtttgctgctgtggtgtccctcatcaacagaagcttcagcagccaccacctgtccatggccagcatcatggtggtggacagccctggcttccagaaccccaggcaccagggcaaggaccgggccgccacctttgaggagctgtgccacaactatgcccacgagcggctgcagctgctcttctaccagaggacctttgtgtccaccctgcagcgctaccaggaggagggcgtgcctgtgcagtttgacctgcctgaccccagccctggcaccaccgtggccgtggtggaccagaaccccagccaggtgcggctgcctgctgggggcggggcccaggatgcccggggcctcttctgggtgctggatgaggaggtgcacgtggagggcagcagtgacagcgtggtgctggagcggctgtgtgccgcctttgagaagaagggggccggcacagagggcagcagcgccctgcggacctgtgagcagcccctgcagtgtgagatcttccaccagctgggctgggaccctgtgcgctatgacctgaccggctggctgcaccgggccaagcccaacctgagcgccctggatgccccccaggtgctgcaccagagcaagcgggaggagctgcggagcctcttccaggcccgggccaagctgccccctgtgtgcagagctgtggccggcctggagggcaccagccagcaggccctgcagaggagcaggatggtgcggaggacctttgccagcagcctggccgctgtgcggaggaaggccccctgcagccagatcaagctgcagatggatgccctgacctccatgatcaagaggagccggctgcacttcatccactgcctggtgcccaaccctgtggtggagagccgcagcggccaggagagccccccaccaccccagcccggccgggacaagccaggagctgggggccccctggccctggacatcccagccctgcgggtgcagctggccggcttccacatcctggaggccctgcggctgcacaggacaggctatgctgaccacatgggcctgacccgcttccggcggcagttccaggtgctggatgcccccctgctgaagaagctgatgagcaccagcgagggcattgatgagaggaaggctgtggaggagctgctggagaccctggacctggagaagaaggctgtggccgtgggccacagccaggtgttcctgaaggccggggtcatcagccggctggagaagcagcgggagaagctggtgtcccagagcatcgtgctcttccaggccgcctgcaagggcttcctgagccggcaggagttcaagaagctgaagatccggcggctggccgcccagtgcatccagaagaatgtggccgtgttcctggccgtgaaggactggccctggtggcagctgctgggcagcctgcagcccctgctgagcgccaccatcggcacagagcagctgcgggccaaggaggaggagctgaccaccctgcggaggaagctggagaagtctgagaagctgagaaatgagctgcggcagaacacagacctgctggagagcaagattgctgacctgaccagtgacctggctgatgagcgcttcaagggagatgtggcctgccaggtgctggagagcgagagagctgagcggctgcaggccttccgggaggtgcaggagctgaagagcaagcatgagcaggtgcagaagaagctgggagatgtgaacaagcagctggaggaggcccagcagaagatccagctgaatgacctggagaggaaccccaccggcggcgcagatgagtggcagatgagatttgactgtgcccagatggagaatgagttcctgaggaagaggctgcagcagtgtgaggagcggctggacagcgagctgacagccaggaaggagctggagcagaagctgggggagctgcagagcgcctatgatggagccaagaagatggcccaccagctgaagaggaagtgccaccacctgacctgtgacctggaggacacctgtgtgctgctggagaaccagcagagcaggaaccacgagctggagaagaagcagaagaagtttgacctgcagctggcccaggccctgggggagagcgtgtttgagaagggcctgcgggagaaggtgacccaggagaacacctctgtgcgctgggagctgggccagctgcagcagcagctgaagcagaaggagcaggaggccagccagctgaagcagcaggtggagatgctgcaggaccacaagcgggagctgctgggcagccccagcctgggggagaactgtgtggccggcctgaaggagcggctgtggaagctggagagcagcgccctggagcagcagaagatccagagccagcaggagaacaccatcaagcagctggagcagctgcggcagagatttgagctggagattgaaagaatgaagcagatgcaccagaaggaccgggaggaccaggaggaggagctggaggatgtgcggcagagctgccagaagaggctgcaccagctggagatgcagctggagcaggagtatgaggagaagcagatggtgctgcacgagaagcaggacctggagggcctcatcggcaccctgtgtgaccagatcggccaccgggactttgatgtggagaagaggctgcggcgggacctgcggaggacccacgccctgctgagtgatgtgcagctgctgctgggcaccatggaggatggcaagacctctgtgtccaaggaggagctggagaaggtgcacagccagctggagcagagcgaggccaagtgtgaggaggccctgaagacccagaaggtgctgacagctgacctggagagcatgcacagcgagctggagaacatgaccaggaacaagagcctggtggatgagcagctgtaccgcctgcagtttgagaaggctgacctgctgaagagaattgatgaggaccaggatgacctgaatgagctgatgcagaagcacaaggacctgattgcccagagcgctgctgacatcggccagatccaggagctgcagctgcagctggaggaggccaagaaggagaagcacaagctgcaggagcagctgcaggtggcccagatgagaattgagtacctggagcagagcacagtggaccgggccatcgtgtcccggcaggaggccgtcatctgtgacctggagaacaagacagagttccagaaggtgcagatcaagagatttgaggtgctggtgatccggctgcgggacagcctcatcaagatgggagaggagctgagccaggccgccaccagcgagagccagcagcgggagagcagccagtactaccagaggcggctggaggagctgaaggctgacatggaggagctggtgcagcgggaggccgaggccagccgccgctgcatggagctggagaagtatgtggaggagctggccgctgtgcggcagaccctgcagacagacctggagaccagcatcagaagaattgctgacctgcaggccgccctggaggaggtggccagcagtgacagcgacacagagagcgtgcagacagctgtggactgtggcagcagcggcaggaaggagatggacaacgtgtccatcctgagcagccagcctgagggcagcctgcagagctggctgagctgcaccctgagcctggccacagacaccatgaggacccccagccggcagagcgccaccagcagccgcatcctgagcccccgcatcaatgaggaggccggggacacagagaggacccagagcgccctggccctgagccgggcccggagcaccaacgtgcacagcaagaccagcggggacaagcctgtgagcccccactttgtgcggcggcagaagtactgccactttggagatggagaggtgctggccgtgcagaggaagagcacagagcggctggagcccgccagcagccccctggccagccgcagcaccaacaccagccccctgagccgggagaagctgcccagccccagcgctgccctgtctgaatttgtggagggcctgcggaggaagagggcccagaggggccagggcagcaccctgggcctggaggactggcccaccctgcccatctaccagaccaccggggccagcaccctgcggcggggccgggccggcagtgatgagggcaacctgagcctgcgggtgggcgccaagagccccctggagattgaaggagctgctgggggcctgctgcggagcaccagcctgaagtgcatcagcagtgatggagtgggcggcaccaccctgctgcctgagaagagcaagacccagttcagcagctgtgagagcctgctggagagccggcccagcatgggcaggaagctgagcagccccaccaccccccgggacatgctgctgagccccaccctgcggccccggcggcgctgcctggagagctctgtggatgatgctggctgcccagacctgggcaaggagcccctggtgttccagaaccggcagtttgcccacctgatggaggagcccctgggcagtgaccccttctcctggaagctgcccagcctggactatgaaaggaagaccaaggtggactttgatgacttcctgcctgccatcaggaagccccagacccccaccagcctggccggcagcgccaagggcggccaggacggcagccagaggagcagcatccactttgaaacagaggaggccaacagaagcttcctgagcggcatcaagaccatcctgaagaagagccctgagcccaaggaggaccctgcccacctgagtgacagcagcagcagcagcggcagcatcgtgtccttcaagtctgctgacagcatcaagagccggcccggcatcccccggctggccggagatggaggagagaggaccagccctgagcggcgggagcccggcaccggcaggaaggatgatgatgtggccagcatcatgaagaagtacctgcagaagtag

SEQ ID NO: 225176 - DNA, 8565 bp, Artificial Sequence
  derived and/or modified sequence
gggaagggatgtgtgtcggtgtgtgtggagagggtgctccttcgctcctgctttcccggctcggtggggtcccttcgcggccacccggggagacgtcttagacagtcgtggttcctgtgatctgtgtcctctttgcagaagttctgtgtccatctcatgtgctgcgtgtgtctgtaaagcctcattccgtgctgtctggcaggaagctccatctcatctcatcatctcacggccctggcactgcctcagcatggccatctcatcacgcctcgccctgtgggagcagaagattcgggaagaggacaagagccctccaccatcctcgccccctcctcttttctctgtcatcccagggggcttcattaagcaactggtccgggggactgaaaaagaggccaaggaagcgagacagaggaagcagttagctgtcgcctctccagaacgagagatcccagaaatttccatcagccaacccaacagcaagtccagcagtggcaccagatctggaagccagcagatctctcaggacgaccagtcaagctctcctgggagctcagacattctgggcaaggagagcgaggggtcccgcagccccgaccctgagcagatgacaagcatcaatggtgagaaggcccaggagctgggctccagtgcgacaccaaccaaaaagactgtccccttcaagaggggcgtgaggaggggtgatgtgttgttgatggtggccaagctggacccggactcagccaagccagagaagactcatccccatgacgcccccccttgcaagacctctccccccgccacagatactggaaaggaaaagaaaggggagacctctaggactccttgtggctcccaggccagcaccgagatcttggccccgaaagctgagaagacccggactgggggtcttggggacccaggccaaggaactgtggcactgaaaaaaggcgaggagggtcaaagcatagtggggaaggggcttgggacccccaagaccacagagctgaaagaggctgagccccagggcaaagacaggcaggggaccaggccccaagcccaagggcccggcgagggggtgcgaccagggaaagcagagaaggagggagcagagcccacaaacacggtggaaaaggggaatgtctctaaggacgtagggagtgaagggaagcacgtaaggccccaaatccctgggagaaagtggggaggtttcctgggaagaaggagtaagtgggacggtccccagaataagaaggacaaagaaggggtgctcttaagtaaggcagagaagacaggtgagcctcagacccagatggagaagacaagccaagtgcagggcgagttgggggacgatctgagaatgggggagaaagcaggtgagcttcggagcacgactgggaaggcaggtgagtcctgggataagaaggaaaagatggggcaaccccagggtaagtccgggaacgcaggtgaagctcggagtcagacagagaagggctgtgaagccccaaaggaggtgagcacaatggtggagtcgccagcagctcctgggaagggaggctggccaggaagccgtgggcaggaagcagaggagccctgctcaagagcaggtgatggggctggtgccctggagacagagctggaaggacccagccagcctgctctggagaaggatgcagaaaggcctcggatacggaaggagaaccaagacgggccagccccgcaggaggagggcaaaggaggccagagcagagactcagaccaggctcctgaggacagatggtatgaggcagagaaagtctggctggctcagaaggatggatttactcttgctacggtgctaaagccagatgagggaacagcagacctgccagcaggaagggtgagactttggattgatgctgacaaaaccatcactgaggtggatgaggagcatgtccatcgggccaaccctcctgagctggaccaggtcgaggacctggcctctctcatcagtgtcaacgaatccagtgtcctgaacacgcttctgcagcgctacaaagctcagctgctgcacacctgcacagggcctgatctgattgtcctccagccccgggggccctcggtgccttctgcagggaaggtgcccaagggccgccgggatggcctgcctgcccacattggctccatggcacagcgggcatactgggcgctgctgaaccagcggagagaccagagcattgtggccctgggctggagtggcgctgggaagaccacctgctgtgagcaggtcctggaacacctggtggggatggcaggcagtgtggatggcagggtctcagtggagaagatccgagccaccttcactgtcctccgggccttcggctctgtgtccatggcccacagccgcagtgccacccggttctccatggtgatgtcgctggacttcaacgctacaggccgcatcacagctgctcagctccagacaatgcttttggagaagagccgcgtggcacggcagccggaaggggaaagtaacttcctggttttctcccagatgctggctggattggacttggatctcaggacggagctgaacctgcaccagatggcagatagcagctcctttggcatgggcgtgtggtccaagcctgaagataaacagaaggcggcagctgcctttgcccagctccagggtgccatggagatgctcggcatctcagagagcgagcagcgggctgtttggcgggtcctggcagccatctaccacctgggtgcggcgggggcctgcaaagtgggtcggaagcagttcatgaggtttgagtgggcaaactacgcagctgaggccctgggctgcgagtatgaggagctgaacacggccaccttcaagcaccaccttcgacagatcatccagcaaatgacgtttgggccaagccgatggggcctcgaggatgaggaaaccagctcagggctcaagatgacaggagtggactgtgtggaggggatggcctcgggcctgtaccaggaactctttgcggctgtggtctcactcatcaacagatccttttcctcccaccatctctccatggcctccatcatggtggtggactctccaggcttccagaacccccggcaccagggcaaggaccgggcggccacctttgaggagctgtgccacaactacgcccatgagcgcctgcagctgctgttctaccagcggacctttgtctccacgctacagcgatatcaagaggaaggtgttcctgtgcagtttgacctcccggacccctccccagggaccaccgtggctgttgtggatcaaaatccctctcaggtccgcttaccagctggaggaggtgcccaggatgccagaggccttttctgggtcttagatgaggaagtccatgtagagggctccagtgacagtgtggtgctcgagcgtctgtgtgctgctttcgagaagaaaggagctgggactgaagggtcctctgccctgcggacctgtgagcagcccctccagtgtgagattttccaccagttgggatgggaccctgtgcggtacgacctcacgggctggctccacagagccaagcccaacctctcggccctggatgcaccccaggtcctgcaccagtcaaaaagagaggagctgcggagtctattccaggcccgggccaagctgcctcctgtgtgccgggctgtggcaggcctggagggcacctcccagcaggccctgcagaggagccgcatggtgaggaggacctttgccagcagccttgccgcggtgaggaggaaagccccgtgctcccagatcaagctgcagatggatgcgctgaccagcatgatcaaaaggtcccggctgcactttatccactgcctggtaccaaaccctgtggtggaaagcaggagtgggcaggaatctccaccaccaccgcagcctggtagagacaagcctggggcaggtggacctctggccctggatatcccagcactgagggtccagcttgctgggttccacatcctggaggctctgcgtctgcataggacaggctatgctgaccacatggggctcactcgcttccgccggcaattccaggtgctggacgctccactcctgaagaagctcatgtcgacctccgagggaatagatgaaaggaaggccgtggaggagctcctggagaccctggatctggaaaagaaggcggtggctgtggggcacagccaagtttttctcaaggcaggtgtgatctccaggcttgagaagcagcgagagaagctggtatctcagagcatcgttctcttccaggcggcttgcaagggctttctgtctcgccaggaattcaagaagctgaagattcgccgactggctgcacagtgcatccagaagaatgtggctgtgttcctcgcagtcaaggactggccatggtggcagctgcttggttccctccagcctctacttagtgccaccattggaactgagcagctccgagccaaggaggaggagcttacaacgctaagacggaagctagaaaaatcagagaagttgcggaatgaactccggcagaacacagatctgctagaaagcaagattgctgacttgacctctgaccttgccgatgagcgcttcaaaggtgatgtggcctgccaggtgctggagagtgagcgggcagagcggctacaggccttccgggaggtccaggagctcaagagcaagcatgaacaagtccagaaaaaactgggagatgtgaataaacagttggaagaagcccagcagaaaattcagttgaatgacttggaaaggaatcccactggaggagcagacgagtggcagatgcgcttcgactgtgctcagatggagaacgagttcctcagaaagcgtctgcagcaatgcgaggagaggctggactcggagctgacagccaggaaagagctggagcaaaagcttggggagttgcaaagtgcttatgacggggccaagaagatggctcaccaactgaagaggaagtgccaccatcttacctgtgaccttgaggatacctgcgtcctgctagagaaccaacaaagtcgaaaccatgagctggagaagaagcagaagaagtttgacctgcagctggcccaggccctaggtgagtcagtgtttgagaagggtctccgtgagaaagtgacccaggagaacaccagtgtccggtgggagctaggccagcttcagcagcagctgaagcaaaaggagcaggaagcctcacagctgaagcagcaggtggagatgctacaggaccataaacgggagctgctggggtcaccctctctgggggaaaattgcgttgctggcttgaaggagaggctctggaagttggaatccagcgcccttgagcaacagaaaatccagagccagcaggaaaacaccatcaagcagctggagcagctccgccagcggtttgagctggagatcgagcggatgaagcagatgcaccagaaggaccgtgaggaccaggaggaggaactggaggatgtccgtcagtcctgccagaagcggcttcatcagctggaaatgcagctggagcaagagtatgaagagaagcagatggtcctccatgagaagcaagatttggaaggcttgatcggaaccctctgtgaccagattggccatcgggactttgatgtggagaagcgacttcggagagacctcaggaggacacatgcactgttgtcagacgtgcagctccttctgggcaccatggaggatggcaagacatcagtcagcaaggaggagctggagaaagtgcacagccagctggagcagagtgaagccaagtgtgaggaggccttgaagacgcagaaggtgctcacagcggacctggagagcatgcacagcgagctggagaacatgacgcggaacaagagcctggtggatgagcagctgtacaggctgcagtttgagaaggcggacctcctgaagcgcatcgatgaggaccaggatgacctgaatgagctgatgcagaagcacaaggacctcattgctcagtctgctgctgacattgggcagatccaagaactgcagctgcagctggaggaagccaagaaggagaagcacaagctacaagaacaactgcaggtggctcagatgcgcatcgagtacctggaacagtccaccgtggatcgagccatcgtcagcaggcaggaggcggtcatctgtgacctagagaacaagacagagttccagaaggtgcagattaagagatttgaggtcctggtgatccggcttcgggacagcctgatcaagatgggggaggagctttcacaggcggccacctccgagtcccagcagcgggagagcagccagtactaccagcggcgcctggaagagctgaaggccgacatggaagagctggtgcagcgggaggcagaggccagccggcggtgcatggagctggagaagtacgtggaggaacttgcagcagtgaggcaaaccctccagacagacctggagacatccattcggcggattgccgacctgcaggctgccttggaagaagtggcatccagtgacagtgatactgagagtgtccagacggcagtggattgtggcagcagcggccgaaaagagatggataacgtctccatcctcagctcccagccagagggcagcctgcagtcctggttgagctgtactctgtccctggccacagatactatgaggactccttctcgacagtcagccaccagcagccgcatcctcagccccaggataaacgaagaggctggggacactgagaggacccagtcggcattggcactgagcagagcccggtccaccaatgtccacagcaagacctcaggagacaagcctgtttctccccactttgtccgccggcaaaagtactgtcattttggggacggcgaagtgcttgccgtccagagaaagtccacagagagattagaacctgcttcctctcccctggcttctcggagtacaaatacatccccgctgtcgagggaaaagctgcccagtccttcagcggccctctcggagttcgtggaagggctccggaggaagagagcccagagaggccaggggtccacgctgggcctagaggactggcccactctccccatttaccagacgactggggcctccacactaaggaggggcagggctggcagtgacgagggaaacctctcgctgagggttggggcaaagtcacccctggaaatcgaaggggccgctggtggtctcttgaggtccaccagcctcaaatgcatctcttcagacggtgttgggggcacaaccctactccccgaaaagtcgaaaacccaattcagttcctgcgagtccctcttagaatccagaccgagcatggggagaaaactgagctctccgaccacacccagggacatgctgttgtcgcccacactgcgtcctcggaggcggtgtctggagtcctctgtggacgatgcgggctgtccagaccttggaaaggagccgcttgttttccagaaccgccagtttgcccacctgatggaggaacctctaggcagtgacccattcagctggaaactcccaagcctcgactacgaacgcaagaccaaagtggacttcgatgacttcctcccagctatccggaagccccagacacctacctccttggctggatcagccaaaggtgggcaagacggttcacagcgttcaagcatccactttgaaacggaagaggctaaccgttcctttctctcggggatcaagaccattttgaagaagagcccggagcccaaggaggatcccgctcacctgtctgactcgtcctcatcctccggctccatcgtgtccttcaaaagtgctgacagcatcaaaagtcgaccaggaatcccacgacttgcgggtgacggtggcgagcgaacgtcccccgagcggagagagccagggacggggaggaaagacgacgatgttgcgagcataatgaagaaatacctccagaagtaggaaccagttcagcctccttgaagctgcccttgaagacttcccgactctacaataacttggagacagagagactggccaggcctccccggtggccagagccagccagcatggccaccctcaagaggcgagatgagcccacagaggcatatcctgcggggatgctgggctcccagtgtggttggcctgaacaaaataaagtgttgactcctgggcatctgtgccttctctatggccttgctacctgggattccagagagttgatggggtgcagataggggtaggactgttagaatagaaccaacccaaactgtgtgtagtttggggtgtatacttctatttctcttcctacatgtctacatgccatgaccttcctcctcctcttcacttggccagtttcagctcacttcctccaggaagtctttcctgatatatcaaactgaaacaaatgctcctcctccatgctcccttaatccccatgcttgtcgattatattcctttgccaattcatttctctatcctgtgtatgtataagtgtgtacaagcattcaagaaactgatgaatgatgaatgaatgaatgagccaaagaacaaataaatgagcccacacaccc

SEQ ID NO: 225177 - DNA, 8051 bp, Artificial Sequence
  derived and/or modified sequence
ggcagtaaggggaagggatgtgtgtcggtgtgtgtggagagggtgctccttcgctcctgctttcccggctcggtggggtcccttcgcggccacccggggagacgtcttagacagtcgtggttcctgtgatctgtgtcctctttgcagaagttctgtgtccatctcatgtgctgcgtgtgtctgtaaagcctcattccgtgctgtctggcaggaagctccatctcatctcatcatctcacggccctggcactgcctcagcatggccatctcatcacgcctcgccctgtgggagcagaagattcgggaagaggacaagagccctccaccatcctcgccccctcctcttttctctgtcatcccagggggcttcattaagcaactggtccgggggactgaaaaagaggccaaggaagcgagacagaggaagcagttagctgtcgcctctccagaacgagagatcccagaaatttccatcagccaacccaacagcaagtccagcagtggcaccagatctggaagccagcagatctctcaggacgaccagtcaagctctcctgggagctcagacattctgggcaaggagagcgaggggtcccgcagccccgaccctgagcagatgacaagcatcaatggtgagaaggcccaggagctgggctccagtgcgacaccaaccaaaaagactgtccccttcaagaggggcgtgaggaggggtgatgtgttgttgatggtggccaagctggacccggactcagccaagccagagaagactcatccccatgacgcccccccttgcaagacctctccccccgccacagatactggaaaggaaaagaaaggggagacctctaggactccttgtggctcccaggccagcaccgagatcttggccccgaaagctgagaagacccggactgggggtcttggggacccaggccaaggaactgtggcactgaaaaaaggcgaggagggtcaaagcatagtggggaaggggcttgggacccccaagaccacagagctgaaagaggctgagccccagggcaaagacaggcaggggaccaggccccaagcccaagggcccggcgagggggtgcgaccagggaaagcagagaaggagggagcagagcccacaaacacggtggaaaaggggaatgtctctaaggacgtagggagtgaagggaagcacgtaaggccccaaatccctgggagaaagtggggaggtttcctgggaagaaggagtaagtgggacggtccccagaataagaaggacaaagaaggggtgctcttaagtaaggcagagaagacaggtgagcctcagacccagatggagaagacaagccaagtgcagggcgagttgggggacgatctgagaatgggggagaaagcaggtgagcttcggagcacgactgggaaggcaggtgagtcctgggataagaaggaaaagatggggcaaccccagggtaagtccgggaacgcaggtgaagctcggagtcagacagagaagggctgtgaagccccaaaggaggtgagcacaatggtggagtcgccagcagctcctgggaagggaggctggccaggaagccgtgggcaggaagcagaggagccctgctcaagagcaggtgatggggctggtgccctggagacagagctggaaggacccagccagcctgctctggagaaggatgcagaaaggcctcggatacggaaggagaaccaagacgggccagccccgcaggaggagggcaaaggaggccagagcagagactcagaccaggctcctgaggacagatggtatgaggcagagaaagtctggctggctcagaaggatggatttactcttgctacggtgctaaagccagatgagggaacagcagacctgccagcaggaagggtgagactttggattgatgctgacaaaaccatcactgaggtggatgaggagcatgtccatcgggccaaccctcctgagctggaccaggtcgaggacctggcctctctcatcagtgtcaacgaatccagtgtcctgaacacgcttctgcagcgctacaaagctcagctgctgcacacctgcacagggcctgatctgattgtcctccagccccgggggccctcggtgccttctgcagggaaggtgcccaagggccgccgggatggcctgcctgcccacattggctccatggcacagcgggcatactgggcgctgctgaaccagcggagagaccagagcattgtggccctgggctggagtggcgctgggaagaccacctgctgtgagcaggtcctggaacacctggtggggatggcaggcagtgtggatggcagggtctcagtggagaagatccgagccaccttcactgtcctccgggccttcggctctgtgtccatggcccacagccgcagtgccacccggttctccatggtgatgtcgctggacttcaacgctacaggccgcatcacagctgctcagctccagacaatgcttttggagaagagccgcgtggcacggcagccggaaggggaaagtaacttcctggttttctcccagatgctggctggattggacttggatctcaggacggagctgaacctgcaccagatggcagatagcagctcctttggcatgggcgtgtggtccaagcctgaagataaacagaaggcggcagctgcctttgcccagctccagggtgccatggagatgctcggcatctcagagagcgagcagcgggctgtttggcgggtcctggcagccatctaccacctgggtgcggcgggggcctgcaaagtgggtcggaagcagttcatgaggtttgagtgggcaaactacgcagctgaggccctgggctgcgagtatgaggagctgaacacggccaccttcaagcaccaccttcgacagatcatccagcaaatgacgtttgggccaagccgatggggcctcgaggatgaggaaaccagctcagggctcaagatgacaggagtggactgtgtggaggggatggcctcgggcctgtaccaggaactctttgcggctgtggtctcactcatcaacagatccttttcctcccaccatctctccatggcctccatcatggtggtggactctccaggcttccagaacccccggcaccagggcaaggaccgggcggccacctttgaggagctgtgccacaactacgcccatgagcgcctgcagctgctgttctaccagcggacctttgtctccacgctacagcgatatcaagaggaaggtgttcctgtgcagtttgacctcccggacccctccccagggaccaccgtggctgttgtggatcaaaatccctctcaggtccgcttaccagctggaggaggtgcccaggatgccagaggccttttctgggtcttagatgaggaagtccatgtagagggctccagtgacagtgtggtgctcgagcgtctgtgtgctgctttcgagaagaaaggagctgggactgaagggtcctctgccctgcggacctgtgagcagcccctccagtgtgagattttccaccagttgggatgggaccctgtgcggtacgacctcacgggctggctccacagagccaagcccaacctctcggccctggatgcaccccaggtcctgcaccagtcaaaaagagaggagctgcggagtctattccaggcccgggccaagctgcctcctgtgtgccgggctgtggcaggcctggagggcacctcccagcaggccctgcagaggagccgcatggtgaggaggacctttgccagcagccttgccgcggtgaggaggaaagccccgtgctcccagatcaagctgcagatggatgcgctgaccagcatgatcaaaaggtcccggctgcactttatccactgcctggtaccaaaccctgtggtggaaagcaggagtgggcaggaatctccaccaccaccgcagcctggtagagacaagcctggggcaggtggacctctggccctggatatcccagcactgagggtccagcttgctgggttccacatcctggaggctctgcgtctgcataggacaggctatgctgaccacatggggctcactcgcttccgccggcaattccaggtgctggacgctccactcctgaagaagctcatgtcgacctccgagggaatagatgaaaggaaggccgtggaggagctcctggagaccctggatctggaaaagaaggcggtggctgtggggcacagccaagtttttctcaaggcaggtgtgatctccaggcttgagaagcagcgagagaagctggtatctcagagcatcgttctcttccaggcggcttgcaagggctttctgtctcgccaggaattcaagaagctgaagattcgccgactggctgcacagtgcatccagaagaatgtggctgtgttcctcgcagtcaaggactggccatggtggcagctgcttggttccctccagcctctacttagtgccaccattggaactgagcagctccgagccaaggaggaggagcttacaacgctaagacggaagctagaaaaatcagagaagttgcggaatgaactccggcagaacacagatctgctagaaagcaagattgctgacttgacctctgaccttgccgatgagcgcttcaaaggtgatgtggcctgccaggtgctggagagtgagcgggcagagcggctacaggccttccgggaggtccaggagctcaagagcaagcatgaacaagtccagaaaaaactgggagatgtgaataaacagttggaagaagcccagcagaaaattcagttgaatgacttggaaaggaatcccactggaggagcagacgagtggcagatgcgcttcgactgtgctcagatggagaacgagttcctcagaaagcgtctgcagcaatgcgaggagaggctggactcggagctgacagccaggaaagagctggagcaaaagcttggggagttgcaaagtgcttatgacggggccaagaagatggctcaccaactgaagaggaagtgccaccatcttacctgtgaccttgaggatacctgcgtcctgctagagaaccaacaaagtcgaaaccatgagctggagaagaagcagaagaagtttgacctgcagctggcccaggccctaggtgagtcagtgtttgagaagggtctccgtgagaaagtgacccaggagaacaccagtgtccggtgggagctaggccagcttcagcagcagctgaagcaaaaggagcaggaagcctcacagctgaagcagcaggtggagatgctacaggaccataaacgggagctgctggggtcaccctctctgggggaaaattgcgttgctggcttgaaggagaggctctggaagttggaatccagcgcccttgagcaacagaaaatccagagccagcaggaaaacaccatcaagcagctggagcagctccgccagcggtttgagctggagatcgagcggatgaagcagatgcaccagaaggaccgtgaggaccaggaggaggaactggaggatgtccgtcagtcctgccagaagcggcttcatcagctggaaatgcagctggagcaagagtatgaagagaagcagatggtcctccatgagaagcaagatttggaaggcttgatcggaaccctctgtgaccagattggccatcgggactttgatgtggagaagcgacttcggagagacctcaggaggacacatgcactgttgtcagacgtgcagctccttctgggcaccatggaggatggcaagacatcagtcagcaaggaggagctggagaaagtgcacagccagctggagcagagtgaagccaagtgtgaggaggccttgaagacgcagaaggtgctcacagcggacctggagagcatgcacagcgagctggagaacatgacgcggaacaagagcctggtggatgagcagctgtacaggctgcagtttgagaaggcggacctcctgaagcgcatcgatgaggaccaggatgacctgaatgagctgatgcagaagcacaaggacctcattgctcagtctgctgctgacattgggcagatccaagaactgcagctgcagctggaggaagccaagaaggagaagcacaagctacaagaacaactgcaggtggctcagatgcgcatcgagtacctggaacagtccaccgtggatcgagccatcgtcagcaggcaggaggcggtcatctgtgacctagagaacaagacagagttccagaaggtgcagattaagagatttgaggtcctggtgatccggcttcgggacagcctgatcaagatgggggaggagctttcacaggcggccacctccgagtcccagcagcgggagagcagccagtactaccagcggcgcctggaagagctgaaggccgacatggaagagctggtgcagcgggaggcagaggccagccggcggtgcatggagctggagaagtacgtggaggaacttgcagcagtgaggcaaaccctccagacagacctggagacatccattcggcggattgccgacctgcaggctgccttggaagaagtggcatccagtgacagtgatactgagagtgtccagacggcagtggattgtggcagcagcggccgaaaagagatggataacgtctccatcctcagctcccagccagagggcagcctgcagtcctggttgagctgtactctgtccctggccacagatactatgaggactccttctcgacagtcagccaccagcagccgcatcctcagccccaggataaacgaagaggctggggacactgagaggacccagtcggcattggcactgagcagagcccggtccaccaatgtccacagcaagacctcaggagacaagcctgtttctccccactttgtccgccggcaaaagtactgtcattttggggacggcgaagtgcttgccgtccagagaaagtccacagagagattagaacctgcttcctctcccctggcttctcggagtacaaatacatccccgctgtcgagggaaaagctgcccagtccttcagcggccctctcggagttcgtggaagggctccggaggaagagagcccagagaggccaggggtccacgctgggcctagaggactggcccactctccccatttaccagacgactggggcctccacactaaggaggggcagggctggcagtgacgagggaaacctctcgctgagggttggggcaaagtcacccctggaaatcgaaggggccgctggtggtctcttgaggtccaccagcctcaaatgcatctcttcagacggtgttgggggcacaaccctactccccgaaaagtcgaaaacccaattcagttcctgcgagtccctcttagaatccagaccgagcatggggagaaaactgagctctccgaccacacccagggacatgctgttgtcgcccacactgcgtcctcggaggcggtgtctggagtcctctgtggacgatgcgggctgtccagaccttggaaaggagccgcttgttttccagaaccgccagtttgcccacctgatggaggaacctctaggcagtgacccattcagctggaaactcccaagcctcgactacgaacgcaagaccaaagtggacttcgatgacttcctcccagctatccggaagccccagacacctacctccttggctggatcagccaaaggtgggcaagacggttcacagcgttcaagcatccactttgaaacggaagaggctaaccgttcctttctctcggggatcaagaccattttgaagaagagcccggagcccaaggaggatcccgctcacctgtctgactcgtcctcatcctccggctccatcgtgtccttcaaaagtgctgacagcatcaaaagtcgaccaggaatcccacgacttgcgggtgacggtggcgagcgaacgtcccccgagcggagagagccagggacggggaggaaagacgacgatgttgcgagcataatgaagaaatacctccagaagtaggaaccagttcaggtaaaagcaacaggctggggctattcttgggggaatgagagttcaccttgcagccttggggagagcaggtgccact

SEQ ID NO: 225178 - DNA, 7704 bp, Artificial Sequence
  derived and/or modified sequence
atggccatcagcagccggctggccctgtgggagcagaagatccgggaggaggataaatcccctcctccctcttcaccgccccctctctttagcgtgattcccggggggttcataaagcagctggtgcgtggcactgaaaaggaagccaaggaggcacggcagaggaagcagttggccgtcgccagcccagaaagagaaatccctgaaatatctatctcccagcctaactctaagtcatcgtcagggacaaggtcagggtcccaacagatatcccaggatgaccagagctccagtcctggctcatcggacatcttagggaaggaatctgaaggcagtcggagtcccgatccagaacagatgacttctatcaatggcgaaaaagcacaggagctcgggtcgagtgctacacccacaaaaaagacagttcctttcaaaaggggcgttcgcagaggggatgttctgctcatggtggccaagctggatcccgacagcgcaaaacctgaaaaaacccaccctcacgatgcccctccctgcaagacatctccccccgctactgacaccggaaaagaaaagaaaggagaaacctctcggacgccctgcggttcccaggcaagtaccgagatcctggctcccaaggctgagaaaacccgcactggaggactgggtgatcctggccagggtacagtggctttaaagaaaggcgaggagggccaatccatcgtgggcaaggggcttggcacccctaagaccaccgaactgaaggaggcggagcctcagggcaaggaccggcagggcacccgccctcaggcccagggccctggagaaggtgtacgccccggcaaggccgagaaggagggcgccgaacccactaatacagtcgaaaagggaaatgtttccaaggacgtgggcagcgagggcaaacatgtgaggcctcagattcctgggagaaaatgggggggctttctagggagacgttccaagtgggacggaccccaaaataaaaaggacaaggagggggttttgctgtccaaggccgagaagaccggagaaccacagacgcaaatggaaaaaacaagtcaagtgcagggggaactgggggatgatttgagaatgggggaaaaggcgggcgaactcaggtctaccaccggtaaggctggagaatcctgggataagaaggagaaaatggggcagccccagggaaagtccggcaatgctggcgaagctcgaagccaaaccgagaaagggtgcgaggcacccaaagaggtctcgacaatggttgagagccctgccgcaccaggaaaaggtggttggccgggaagtagaggccaagaagctgaagagccctgctcacgcgctggggacggcgctggcgctctggagactgagctggagggcccatcccagcctgcgttagagaaggatgccgagagaccacggatccggaaggagaatcaggacggccccgctccccaggaggagggcaagggcggccagtcgcgagactcagatcaggcacctgaggacagatggtatgaggctgaaaaggtgtggctcgctcagaaggacggttttactctggcaacggtgctcaagccggacgaggggacagcagatctccctgcagggcgagtgcgactgtggattgatgccgataaaactataacggaggttgatgaggagcacgtgcaccgagctaacccccctgagctggaccaggtggaggatcttgccagcttgatctcagtgaacgagtcaagcgtcctgaatacgcttctgcagcgctataaagcccagttgctccatacctgcaccgggccagacttgattgtcctgcagccgcggggcccgtcagtcccctccgcagggaaggtgccgaaaggaagacgggatggcctcccggctcacattggaagcatggcccagcgggcttactgggctctccttaaccagagaagggatcaatccatcgttgccctggggtggagtggagcgggcaaaactacgtgttgtgaacaagtgctggaacacctggtaggaatggctggatccgtcgatggcagggtgtctgtcgaaaaaatccgggccacctttacagtgctcagagcctttgggagcgttagcatggcccattcgaggtccgctacaagattctcgatggtaatgtcccttgatttcaatgcaacgggtagaatcactgccgcccagcttcagaccatgctgctggaaaagtctcgtgtagcgcgccaacccgagggggagtccaactttctggtattttctcaaatgctggctgggctggatttggatttgcgaacggagctcaatttgcaccagatggcagactccagctctttcggcatgggcgtttggtctaaaccagaggacaagcagaaagccgccgccgctttcgcccagctgcagggggctatggaaatgttgggaatatctgagtccgagcaaagggccgtgtggcgcgtactggccgccatctaccacctgggtgctgccggagcctgtaaagtgggccggaagcagttcatgcgttttgagtgggctaactacgccgcggaagcgctggggtgcgagtacgaggagctgaatacagccaccttcaagcaccacctccgacaaattatccagcagatgactttcgggcccagccgttggggcctcgaagatgaggaaacctcttccgggctgaagatgaccggggttgattgtgttgagggaatggccagcggactctaccaggagttgtttgcagccgttgtgtccctaattaataggagtttttcttctcatcatcttagtatggccagcatcatggttgtggactctcctggctttcagaatccccggcaccagggcaaagacagggccgcaacctttgaagagttatgccacaattacgctcacgaacggcttcagttactcttctaccagcgcacatttgtgagcacgttgcagcgttatcaggaggaaggagtgcctgtgcagttcgaccttccagatccctcccctgggaccaccgtagccgtcgtggaccaaaacccgtcacaggtgagattaccagccggcggcggtgcacaggatgccaggggactattttgggtccttgacgaagaagtgcatgttgaaggcagtagtgactcagtggttttggaacggctatgcgctgcatttgaaaaaaagggggccggaacagagggatcttccgcgctgcgcacatgtgagcagcccctgcagtgcgaaatctttcatcagttaggctgggatcctgtgcgttacgatttaaccgggtggctgcaccgggccaagccaaatctttcagcattagacgcgcctcaggtgctgcaccaatccaagcgggaagagttacggtctctcttccaggcacgtgcaaagctgcctccggtatgcagagctgtagcaggcctggagggcacttctcagcaggccctgcagagaagcaggatggtgaggcgaacctttgcatctagcctggccgcagtgcgcagaaaagccccttgttcccagatcaagctccagatggacgctttgacaagcatgataaagaggtcacggttgcactttatccactgtctggtcccaaatcccgtggtggagtcccgttctggccaggagtcacccccccccccgcagcccgggagggataagccaggtgctgggggccctctggcactggatatccccgccctcagggttcagctcgctggttttcatattttggaggccctacggctgcaccgcacaggttacgccgatcacatgggcttgacccggtttaggcggcagtttcaagtgttagatgcccccttgctgaagaagctaatgtccacatccgaaggcattgatgaaaggaaagcagtagaggagttattagagaccctggacttggagaagaaggctgtggccgttggtcattcccaggtttttttgaaggccggggtgatctctcgactcgaaaaacaacgggaaaagctcgttagtcagagtattgtgctcttccaggctgcatgcaagggctttctgtcacgccaggaatttaagaaactgaaaatcaggcggttggccgcacaatgtatacagaaaaacgtcgcggtcttcctcgcggtgaaagactggccctggtggcaactgctgggttctttgcaacctcttctctccgccacgataggtaccgagcagttgcgagctaaagaagaggaactcactacacttcgccgcaagctagaaaaatcagaaaaactgcgtaacgagcttagacagaataccgacttattggaatccaaaattgccgatctgacgtctgacctggccgacgagagattcaagggcgatgtagcatgccaggtgctcgagagcgagcgcgcggaacgcctgcaggcattccgtgaagttcaggagctgaagagcaaacacgagcaagtgcagaagaaactgggcgacgtgaataagcagcttgaagaagctcaacaaaaaatccagctgaacgatctggaaaggaatcccacgggcggagccgacgaatggcagatgaggttcgactgtgctcagatggagaatgagtttctgcgcaaaagactgcagcagtgtgaggaaagattagattccgagctcacggcccggaaagagctcgagcagaaactgggtgaactacagagcgcgtatgatggtgctaaaaaaatggcgcaccaattaaaacgcaagtgccatcacttaacctgcgatttagaagacacctgcgttttgctggaaaaccaacaatccagaaaccatgagctggagaagaaacaaaaaaagtttgatttacaactcgcccaggctctgggggaatctgtgtttgagaagggtctgagagaaaaggttacccaggagaataccagcgtcaggtgggaactgggccagctccaacaacagctgaaacaaaaagagcaggaagcctctcaattgaagcaacaagtcgaaatgctgcaggatcacaagagggagctgctggggtcaccgagcttgggcgaaaattgcgttgccgggctgaaagaaaggctgtggaaactggaaagctccgccttggagcagcaaaagatacagagccagcaggaaaataccatcaaacagctggagcaactcaggcagaggttcgaactggagatcgagcgaatgaagcagatgcaccaaaaagatcgtgaggaccaagaggaggagctcgaggacgtgcggcagtcttgccaaaagagactgcatcaactcgagatgcagctagagcaggagtacgaagagaaacagatggtgctgcacgagaagcaggatctcgagggcctgatcggcactctgtgtgaccaaattggccacagggatttcgacgtagaaaagaggctgcggcgtgatttgcgccgaacacacgccctgctgtccgacgttcagctgctcctgggaaccatggaggatggcaagacatctgtcagcaaagaggaactggagaaagtccactcccagctggaacagagtgaggccaaatgcgaggaagcactgaagacccagaaagtgctaaccgctgacttggaaagcatgcattcagaattagaaaacatgactcgtaacaaaagcctggtggatgagcagttgtacagactccagtttgagaaggccgatcttctcaagagaattgatgaagaccaagatgacctgaatgagttgatgcagaaacataaagacctgatcgcccagtccgccgccgacatcgggcagattcaggaactccaactgcaactggaagaggcaaagaaggagaagcacaagctccaagagcagctgcaggttgcccagatgcgtatagagtacctggagcaatccacggtagatcgcgccattgtctccaggcaagaagcagttatttgcgacctcgagaacaaaacagagtttcaaaaggtccaaattaagcggttcgaggtccttgtgatccggcttcgagactcccttattaagatgggggaggagctgtcacaggcagctacctcagaatcccagcagagggagtcctctcagtattaccagaggagacttgaggaactgaaagctgacatggaggagctggtccagagagaggccgaagcttcccgccggtgtatggagcttgagaaatacgtagaggagttggccgccgtcagacagacgctgcagactgacctggaaacctcaattaggcggatcgccgatctgcaggctgctctcgaggaggtagctagcagcgactccgataccgagtcagttcaaacagctgtggactgcgggagcagcggacggaaagagatggacaatgtgagcattctcagcagccaacccgagggctccctccagtcttggttgtcgtgtactttaagtctggccactgacaccatgcgtacacccagtcggcagagcgcgacctcgagccggattctatccccccggatcaatgaggaagcgggtgacaccgaacgaactcaaagtgccctggccctgtcacgcgcccggtccactaacgtgcacagtaaaacgtcaggcgataagccggtgtctccccacttcgttaggcggcaaaagtactgtcacttcggcgacggggaagtcctcgcagtgcagcggaaatccactgagaggctcgaaccagccagctcccctctggcctctaggtccaccaatacatcacctttgtccagagagaaactgccctcaccgtcagccgccctgtctgaattcgtagaaggcctcaggagaaagagagcccagagaggccagggttccaccctgggtcttgaggattggcctacactgcccatctaccaaaccacaggggctagcaccctcagaaggggtcgcgccggatcagatgagggcaatttgtcactcagggtgggtgcgaaaagtccactggagattgaaggcgccgcgggcggcctcctgcgctcaacatccttaaagtgcatctccagtgacggagtgggcggcacaacgctgctgcctgaaaaaagcaagacccaattttctagctgtgaaagtctcctcgagtcaaggcccagtatggggaggaaacttagtagccctaccactccacgggatatgttgctctctccaactttaaggccacgcaggcgctgtctcgagagcagcgtagacgacgcaggatgtccagatctgggaaaagagcctctggtctttcagaatagacagttcgcccacttgatggaggagcccctgggttctgacccctttagctggaagttaccgtcattagattacgagcgcaagaccaaggtggatttcgatgactttctcccggccattcggaagccccaaactccaacctcactggctggatcagccaaaggtggacaggacggcagccaacggagcagtatccatttcgaaaccgaggaagctaacaggtcctttctgagtggtatcaaaacaattttgaaaaagtcacctgagcccaaagaagatccggcgcacctgagcgactcttctagctcctcaggttccatcgtgtcatttaagtcggccgacagtataaaatctcggcccgggatcccacgactagctggggacgggggcgagagaacgtccccagagcggagggagcctggcacaggtcggaaagacgatgatgttgcttccattatgaagaaatatcttcagaaatag

SEQ ID NO: 225179 - DNA, 7704 bp, Artificial Sequence
  derived and/or modified sequence
atggccatcagcagccggctggccctgtgggagcagaagatccgggaagaggataagtctccccctccttcaagtccacctccactgttcagtgttattccagggggatttatcaagcagctggtccgtggcacagaaaaagaggcaaaggaagctcggcagaggaagcagctcgcagtggcaagccctgagagggaaataccggagataagtataagccaaccaaatagcaaatcctcctcgggcacacgcagcgggtcccagcaaatttctcaggatgaccaaagctcgtctcctggaagttcagacatacttgggaaagagtccgaaggcagccgaagccccgaccccgaacagatgacctcgatcaacggcgaaaaggcccaggaactcggttcctctgccaccccaacgaagaaaacagtcccctttaagcgaggcgtgagacgcggtgacgtgttactcatggttgcaaagctcgacccggacagcgctaagccggagaaaacacatcctcatgacgcaccgccctgtaagacatctcctcccgccacagatactgggaaggaaaagaagggcgaaacctccaggactccctgtgggtcccaggccagcactgaaatcctagccccgaaggccgagaagacccgcaccggaggactgggagaccccgggcaagggactgtggccctcaaaaagggagaggaaggacaaagtattgtaggtaaagggctgggaactcccaaaaccaccgaattaaaagaggctgaacctcagggtaaagacaggcagggtactaggccacaagcgcaggggccgggggagggggtgcgacctggaaaagccgagaaagagggcgcagaacctacaaacactgtggaaaaaggtaacgtgtctaaggatgtcggcagcgagggaaaacacgtgaggcctcagattcccggcaggaagtggggcggtttcttgggacggaggagcaagtgggacggaccacaaaacaagaaagataaagagggtgtccttttgtcaaaggctgagaaaaccggggagccacagacgcagatggagaagacctcgcaggtacaaggagagctgggcgacgacctcaggatgggagagaaggctggcgagcttcggtcaactaccggcaaggccggtgaatcttgggataaaaaagagaagatgggacagccacaaggcaaatccggaaatgccggagaggctagaagccagaccgagaaaggctgcgaggccccaaaggaagtgagcaccatggtcgagagcccagccgcacccggaaagggcggctggccgggatctcgggggcaggaagcagaggaaccgtgttccagagctggcgacggggcaggagcacttgaaacagaattggagggacctagccagcccgcactcgaaaaggacgccgaacgcccacgaatacggaaagaaaatcaggatgggcccgctccacaggaagagggtaagggaggtcagtccagggattcagatcaggcacctgaggacagatggtacgaagccgagaaggtctggctcgcacagaaagacggcttcactttggcgacagtcctcaaacctgatgagggcaccgcagatctgcctgccgggcgtgtcagattgtggatcgacgcggacaagacgatcaccgaagtggacgaggagcatgtgcacagagccaatccacccgagctggatcaggttgaggacctggcgtctctgatctccgtgaacgagtcgagcgtactcaacaccctcctgcagaggtataaagcacagttactgcacacttgcaccggacctgacttgatcgttttacagccccgaggtcctagtgtcccgtctgctggaaaggtccccaagggtcgaagggatggcctcccggcccacataggaagtatggcccaaagagcttactgggctctgcttaatcagcgtcgtgatcagtccattgtagccctggggtggtcaggcgccggcaaaacaacatgctgcgagcaggtattggagcacctggtagggatggcgggatctgtggacggtcgcgtgtccgttgagaagatacgggcaacttttactgttctgcgggctttcgggagcgtctccatggcccattctagatctgcaaccaggttttctatggtgatgtccctggattttaacgccactggtaggatcactgctgcccaattgcagacaatgctactcgaaaagagcagagtcgctcggcagcccgagggcgaaagtaactttctggtatttagtcagatgctagccggcctggatctagacttgcggacggaactcaaccttcatcagatggctgactcctcctcgtttggaatgggcgtgtggtctaaacctgaagataagcaaaaagcagccgctgcctttgcgcaacttcagggcgctatggagatgttaggaatatccgagtccgaacaacgtgctgtgtggcgggtcctggcggcaatctatcacctcggtgctgcgggggcgtgtaaagttggtcggaagcagttcatgaggtttgaatgggctaattacgctgccgaagccctgggctgtgagtatgaagagctaaacaccgctacatttaagcatcatctgcgacaaataattcagcagatgacttttggtccaagtaggtggggacttgaggacgaggagacctctagcggcctgaagatgactggggtggactgcgtagagggaatggcctctggtctgtaccaggaactcttcgccgctgttgtctccctgattaaccgcagcttctcgagtcaccatctgtccatggcatccattatggtagttgactcgcctgggttccagaatcctagacaccaggggaaagacagagccgcaacatttgaagaattgtgtcacaactacgcccatgagcggctccagctgttattttatcaaagaacattcgtgagtactttgcagcgctaccaggaggagggtgtgcctgtgcagttcgacttgcctgatccaagccccggcaccactgtggcggttgtggaccaaaatccgtcacaggttagactgcccgctggcgggggtgcacaggacgcccgagggctgttctgggtgcttgacgaagaggttcacgtggagggctcatctgactctgttgtccttgaaaggttgtgtgcggcgtttgagaagaagggggcgggcacagaaggcagctccgcgctgcgtacctgtgaacagccgctgcaatgcgaaatcttccatcagctggggtgggacccggtgaggtacgatttaacgggctggctgcacagagcaaagccaaacctcagcgcactggacgcacctcaggtcctccatcagtctaagcgcgaggagcttagatctctgttccaggcaagagccaaactcccccctgtctgccgggcggtggctgggcttgaggggaccagtcagcaggccctccagaggagtagaatggtaagaagaactttcgcctcatccctggccgctgttcggaggaaagccccctgttcccagatcaaactgcagatggatgccttaacatccatgatcaaacggtcaagactccacttcatacattgcctagtgccgaatcccgtggttgaaagccgaagcggccaagagagcccaccaccgccccagcctggacgcgataaacctggagccggcggccctctggcccttgatattccagcccttcgcgtgcaactcgctggctttcacatactggaggctttacggctgcacagaactggctacgccgaccatatggggctcacccgtttcagacggcagttccaagtgttggatgcaccattgcttaagaagttaatgtcaaccagcgaggggatcgacgagcgtaaagcagtcgaagaactgctggagacccttgatctcgaaaaaaaagccgtggccgtaggacacagccaagtgtttctgaaggccggagtgatatccagactagagaagcagcgcgagaaactcgtaagtcaatctatcgttctcttccaggcagcctgcaagggattcctcagtcgtcaggagtttaagaaactgaagattaggagactggccgctcaatgcatacagaaaaatgtcgccgtatttctggctgtgaaggactggccttggtggcagcttctgggctctctccagcctctgctgtcagcaactatcggaactgagcaactccgcgccaaagaggaagagcttactaccttgagacgaaaactggagaagtctgagaagctgaggaacgagctgaggcagaacactgatctgttggagagcaaaatagccgacctgacatctgacttggcggacgagcggtttaagggggacgtggcttgccaggtcttggagtcggaaagagcagagcgcctccaggcattccgagaggtacaggagctgaaatccaagcacgagcaagttcagaagaaacttggcgatgtgaataaacagctggaggaagcccaacagaaaatccaactgaacgatctggagagaaaccccacaggcggcgcagatgaatggcagatgcgttttgactgtgcccaaatggaaaacgaatttctgcgcaaacgtctccagcagtgcgaggagcgcctggactctgaactgactgcgcgtaaggagctggagcaaaagctgggggaactacagtccgcctacgatggagcaaagaaaatggctcatcagctcaagagaaagtgccaccacctgacctgtgacctggaagacacttgtgtgttgctcgagaaccagcagagccgcaaccacgagctggagaaaaagcagaaaaaatttgaccttcaactggcacaggcacttggagaaagcgtgttcgagaaaggccttagagaaaaagtgacgcaggaaaacacttccgtacgatgggaactgggacagcttcaacagcagctgaagcagaaggagcaagaagcatcccagctgaagcaacaggtcgagatgctacaagatcataagcgggaactcctggggtccccatctctgggggaaaattgcgtggccggtctgaaagaacgactctggaagctggaaagttctgcattagagcagcaaaagattcagagccagcaggagaacacaattaaacagcttgagcaattgagacaacgcttcgagcttgagattgaacgaatgaagcagatgcaccagaaagacagggaggatcaagaagaagaactggaggacgttagacagagctgtcagaaacggctgcaccagctggagatgcagttagagcaagaatatgaggaaaaacagatggtgcttcacgaaaagcaagacctggaggggctgatcggtacactctgcgaccagatagggcaccgggattttgacgtggaaaagcggctcaggcgggatctgcggcggacacatgctcttctctctgatgtgcaacttctgttgggaacaatggaggacggtaagacctctgtaagcaaagaggagctcgaaaaagtgcatagccagctggagcagtctgaggctaaatgcgaggaggcgcttaaaacacagaaggtattgacagccgatctggagtcgatgcattcagagctcgagaatatgacacgcaacaagtccttggtggatgagcagctgtatcgccttcaattcgaaaaggctgatctgttgaaacggattgacgaggatcaagacgatctcaacgaactgatgcaaaagcataaggatcttatcgctcagagcgccgcagacatcggccagatacaagagctgcaactccagttggaggaggcgaaaaaagaaaagcacaagctacaagagcaacttcaggtagcacagatgaggattgagtatttggaacagtcaacagtggatagagccattgtctctcggcaggaggcagtgatctgcgacctcgagaacaagacggaatttcagaaagtgcaaatcaagcggtttgaggtgcttgtgatccggctccgcgactccctcattaagatgggcgaggaattgagccaggcagccacatcagaatcccaacagcgtgagagcagccagtactaccagcgtagactcgaagagttgaaggcagacatggaggaattggtacaacgcgaagccgaagctagcaggcgatgcatggagctcgagaagtatgtggaagaactcgccgccgtacgccaaaccctgcagactgacctggagactagcatccgccgtattgctgacctacaggccgctctggaggaagtggcatccagtgacagcgacactgaaagcgtgcagacagcagtggattgcggttccagcggcagaaaagagatggataatgtgagtatcctatcttctcagcccgaggggtctctgcagtcctggctcagctgcaccctgagtttagccacagacacaatgaggaccccctcccggcagtctgccacctccagcagaatcttgagtccccgtattaatgaggaagcgggagacaccgagcggactcaaagcgccttggccctgagtagagctcgctctaccaacgtgcacagcaagaccagcggtgacaagccagtttctccccattttgtgcggcgtcagaagtattgtcatttcggggatggcgaagtgctagccgtgcagagaaagtctactgagcgactggagccagccagcagtcctttagctagtaggtccacaaacactagccctctctctcgcgaaaaacttccatccccttccgcggcgttgagcgaatttgtcgagggcttaaggaggaaacgagcacagaggggacagggatctacactcggattagaagactggccaactctcccaatttaccagaccacaggtgcctcaaccctgcgacggggaagagctgggagcgacgagggcaacctgtctctgcgagtgggagcaaagtcacccttagaaattgaaggagctgctggaggactgcttcgtagcacatctctaaaatgtatatctagtgacggggtgggcgggacgaccctgctaccagagaagagcaagacacagttttctagctgtgaaagtctgcttgaatcccgcccaagcatgggtagaaagctatcatctcctaccacacccagggacatgctattgtctcccactttgcgaccccgcagacgctgcctcgagtcaagcgtcgatgatgccggctgtcccgatcttgggaaagagccgctggtgtttcaaaatagacagttcgcccacctcatggaggaacccctcggctccgacccgttctcctggaagctgccttcacttgattacgagcggaaaacaaaggtagactttgacgactttctcccagcaataagaaaacctcagaccccgacaagtttggccggatcagcgaagggcggccaagatggctcccagagatcctccattcatttcgaaacagaggaggcgaaccgaagctttttatctgggatcaaaacaatcctgaaaaaaagcccagaacccaaagaggatccggctcacttgtccgactcatcgtcttcttctggttctattgttagtttcaaatccgcggattcaattaagagccgccccgggatccccagattggcaggcgatggcggcgagcgtacatcacctgaacgcagggaacctgggaccggacgtaaggatgatgatgtcgctagcatcatgaagaagtatttacagaagtag

SEQ ID NO: 225180 - DNA, 7703 bp, Artificial Sequence
  derived and/or modified sequence
atggccatctcatcaaggctggccttatgggagcagaagattagagaagaggacaaaagtccgcctccctcatctccaccgcctcttttttcagtgataccagggggtttcatcaaacaactcgtacggggaaccgaaaaggaagccaaggaagccaggcagcgaaagcagcttgcagtggcatcaccagagcgcgagatccccgaaatcagcatctcccaacctaactctaaatctagctcgggaaccagatccggatcgcagcagatctcacaggatgatcagtcaagctcaccagggtccagtgacatcctgggaaaggagagcgagggctctagatcccccgatccagagcagatgacttccattaatggcgagaaagcacaagaattgggctctagcgctactccaacaaaaaagacagtccctttcaagagaggcgtgcgacgcggagacgtcttgctcatggtggcaaaactggaccccgacagcgcaaagcccgaaaaaacccacccacacgacgcgccaccatgtaagacttcacctccggctacggataccggtaaggagaagaagggcgaaaccagccgcaccccatgcgggagccaagcaagcaccgagatcctggccccaaaggccgagaaaaccagaaccggaggactcggagatccaggtcaaggtacagtggctctcaagaagggggaagagggccagagcatcgtaggcaagggtcttggtacaccaaagaccaccgaattgaaagaggccgaaccccagggcaaagaccggcagggaacccgaccccaggcccagggacccggagagggcgttagacctggtaaagcagaaaaagaaggcgctgagccaactaataccgtggaaaaggggaatgtgagcaaggatgtgggttcagagggtaaacacgtgcgcccacagattccagggcgaaaatggggaggttttttgggccgtcggagtaaatgggatggcccacagaataagaaagataaggaaggcgttctcctcagcaaggccgaaaagactggagaaccccagacgcagatggaaaagacatctcaagtgcagggcgagttaggtgatgatctgcggatgggcgagaaagccggagaactcagatctactacaggcaaggctggcgagtcatgggataaaaaagaaaaaatgggacaacctcagggcaagagcgggaatgcaggcgaagctaggtcacaaaccgaaaagggttgtgaagctcccaaggaagtgtctacaatggtggagagccctgctgcacccggaaaaggcggatggccaggatctcgaggacaggaggccgaagaaccttgtagcagagcaggcgacggggcaggtgccctggagaccgagttggaaggaccttcccagcctgcactggaaaaagatgctgaaaggccaagaatcagaaaggaaaatcaggacggacctgcccctcaggaggagggaaaaggaggtcagagcagagattcagatcaggccccagaggatcggtggtacgaggccgagaaggtgtggttggcacagaaagacggttttactttggcaacagtgttaaagccagacgaagggacagccgacctccctgccggtagggtccggctgtggatagacgctgacaagacaattacagaagtcgacgaagagcatgtacatcgcgcaaacccccctgaattagaccaggtggaagacctggcctctctcatatcagtgaacgaatcttctgtgctgaataccctcctacaacggtacaaagcacagctactgcatacctgtaccgggcctgacctgatcgtgctacagccacgtgggcctagtgtgccctcggctgggaaagtgcctaagggccgaagggacggacttcctgcccacatagggtccatggcccagcgcgcatattgggccctgttgaaccagagaagagatcagtcgattgtggccctggggtggagcggggctggtaagaccacttgctgtgagcaggttcttgagcacctggtgggcatggctggctctgtggatggtcgggtgtcggtggagaagatcagggcaacattcaccgtcctccgggcatttgggagcgtcagcatggctcactccagatccgccaccagattcagcatggtgatgtctctggactttaatgctacaggacgcattacagctgcccagctgcaaacaatgctgttggaaaagagccgggtagcgagacagccggagggcgagtccaactttcttgtgttctctcagatgttggccggtctggaccttgacttgcgtactgagttgaacctccatcagatggcagactcgtcctcgttcgggatgggagtttggtcaaaaccagaggataagcaaaaggctgctgcagcattcgcacagctgcagggtgctatggagatgctgggcattagtgagtccgagcagcgcgctgtctggcgcgtcctggccgctatctaccatttaggagcagccggtgcctgcaaggtaggtaggaaacagtttatgagatttgagtgggccaactacgctgccgaggcactgggatgtgaatatgaagagttgaatacggcgaccttcaagcatcatctgcggcagattatacagcagatgacattcggaccatcccgatggggcctggaggatgaggaaacttcctcgggacttaaaatgacgggagtggactgcgttgagggtatggcgagtggcctgtatcaagaactgttcgccgctgtggttagcttaatcaacaggtccttcagctcccaccacctgagtatggcatccattatggttgtggatagccccggattccagaatccaagacaccagggaaaggaccgggctgcaactttcgaggagctctgccacaactacgcacacgaacgcttacagcttcttttctatcagagaactttcgtctctactctgcaacggtaccaggaagagggggtacctgtgcagttcgacctgcccgacccctccccaggcacaacagttgccgtggttgaccagaatccctcccaagttcgcctccctgctggcggaggtgcacaggacgcaaggggcttgttttgggtacttgatgaagaagtccacgtggagggatcatcagacagtgtggtcttagagcgtctgtgtgccgctttcgagaagaaaggtgcaggtactgagggtagctcggccctgcggacttgcgaacagcctttacagtgcgaaatttttcatcagctcggatgggaccctgttcgatatgacttgaccggctggttgcatagagctaaaccaaatctgtccgccctcgacgcccctcaggtcctccaccagtccaaacgcgaggaactgcgttcactgtttcaggccagggccaagcttcccccagtgtgccgtgccgtagctggcctcgaggggacatcccaacaagccctccagagatctcgcatggtgcggaggacttttgctagctctctagccgcagttcgacggaaagcgccttgttctcagatcaaactacagatggatgccctaacaagcatgatcaagaggtcacgcctgcattttatacactgccttgtccctaaccccgttgtggagtcccgaagtggccaggaatccccccctccaccacagccaggcagggataaacccggagcgggaggccctctggcccttgatatccctgcactgcgcgtacagctcgctggctttcacatccttgaggcccttagattgcaccggacaggttacgccgatcacatgggattgacgcggtttaggcgccagtttcaggtgctggatgccccactgctgaagaagctaatgtccacatctgagggaattgacgagcgaaaggctgtggaagaacttttggagactctggacctcgagaaaaaagcagtggcggtgggtcattctcaggtttttttgaaggccggagtgatatcacgactggaaaagcagcgggagaagcttgtgagccaatcaatcgtcttatttcaggctgcatgtaagggtttcctgagtagacaggagttcaagaagctcaaaatccgccgattggccgctcaatgtatccaaaaaaatgtagccgtatttcttgccgttaaggattggccctggtggcaattactaggaagcctacagcccctgctgtccgccacgattgggactgaacaacttagagcaaaggaggaggagcttacgacgttaaggaggaagctggaaaaatctgagaagctgagaaatgaactccgacagaacaccgatctcctggagagcaaaatagcggacctgacttctgacctggcagatgaaagatttaaaggcgatgtggcatgccaggtccttgagtccgagcgcgctgaacgattacaggcatttcgggaagtgcaggagcttaagtcgaaacacgagcaagtccagaagaagttgggcgacgtgaacaagcagctggaagaggctcagcagaagatccagctgaatgacctggaaaggaatcccactggtggagccgacgaatggcagatgcggttcgactgcgcgcagatggaaaatgaatttctgaggaaaaggctccagcaatgcgaggaacgcttggattccgaattgacggcacgaaaggagctagagcaaaagttgggtgagctgcagtcagcctacgacggagcaaaaaagatggcccaccagctgaaaagaaagtgccaccacctcacatgcgatctcgaagatacctgcgttctgttagagaaccagcaaagcaggaatcacgaattggagaaaaagcagaagaagtttgacttacagctggcccaggcccttggcgaaagtgtcttcgaaaaaggactcagagagaaggtaacccaggagaatacctctgtccgctgggagcttggccagctgcagcagcagttgaagcagaaggaacaggaggcttcccaactgaaacaacaggtggaaatgcttcaggatcataagagagaactgctgggcagcccatctctgggcgagaattgtgtcgccggacttaaggaaaggttgtggaagctggaatcaagcgccctcgaacagcagaagattcagtcccaacaggagaacacaatcaagcagctggagcaactccgtcagagattcgaactggaaattgagaggatgaaacagatgcatcagaaagaccgggaagatcaggaggaagaattggaagatgtccgccagagttgtcaaaaacgcctgcaccagctggaaatgcagctggagcaggagtacgaagaaaagcagatggtgctgcacgaaaagcaggacttggaggggctcatagggactttgtgtgaccagattggacatagggactttgatgtggaaaagcggctgcgaagggacctccgcagaactcacgctttgcttagcgacgttcagctcctcttaggcacaatggaggacgggaagactagtgtcagtaaagaggaattggagaaagttcattcccagttggaacagtctgaagcaaaatgtgaggaggcgctcaaaacacagaaggtgttgactgccgaccttgaaagtatgcattcagagctggaaaatatgactcgtaacaagtccttggtagatgaacaactttacaggctgcagttcgaaaaagctgacctactgaagcggattgatgaagatcaagatgatctgaatgaactgatgcaaaaacacaaagatcttatcgctcagagtgccgctgacatcggacagatacaggaactccagttacagctggaggaggccaagaaagaaaagcataaattacaggaacagctccaggttgcacagatgcggattgagtacttggaacaaagcacggtcgaccgggctattgtgagccgacaggaagcagtcatttgcgacctggagaacaagactgagtttcagaaagtgcaaatcaaacgcttcgaggtgttggttatacgcctgagagactctctgatcaagatgggcgaagaactgtcacaggctgccacttctgaatcccagcagagagagagttctcagtactaccagagaaggttggaggagctgaaggccgatatggaggaactggtacagagggaggccgaagcctctagacggtgcatggagttggaaaagtacgtcgaagaactggcagccgtgagacagacactgcagacggatctggaaacttctattagaagaattgccgatctacaggccgcactggaagaggtggctagctctgactcagacaccgagtcggtccagaccgcggtggactgcggtagttccggcaggaaagagatggacaacgtgtcaatcctgtcttcacagcctgaaggcagtctgcagtcttggctttcttgtaccctgtctctggccacggacacaatgagaacaccatcccggcagagcgcaaccagttcccgaatcctctctcctaggattaacgaggaagcgggagatacagaaagaacccagagcgctttagcgctgtccagggcaagatcaaccaatgttcatagcaagacctccggagataagccagtctctcctcacttcgtccgcagacagaagtactgtcattttggagatggagaggtgcttgctgttcagcgaaagtcaactgaacgtctcgaaccggcaagctctcctctggctagtaggtccactaataccagtcccttatctcgggagaagctgcccagtcctagcgcagccctgtccgaattcgttgaaggcttacgccgtaagcgcgctcagcggggacaaggatcaacactgggcctggaagactggccaacgctgcctatctaccagacaaccggggcatccacccttcgaagaggaagggcgggttctgacgagggtaacctttctcttagagtgggcgcaaagtctcctcttgagattgaaggggctgctggagggttattgcggagcactagtttgaagtgtatttcctctgatggcgtggggggtactacattactccctgaaaagtcaaagacacagttcagttcatgcgaatccttgctagagagcaggccctcgatgggacggaaactgagcagtcctactacccctagggatatgttgttgagtcctacactgagaccccgtcgtaggtgtctggagagcagcgtggacgacgccggatgccctgacctaggcaaggaacctctggtgttccagaatcggcagttcgcacatttgatggaggagccattgggctccgaccccttttcgtggaagctgccaagtcttgactacgagcggaaaaccaaagtcgacttcgacgactttctaccagcaattcgtaaacctcagactcctacctccttggccggatcggccaagggaggtcaggacggatcccagagatctagcatccactttgagaccgaggaggccaaccgatctttcctgagtggaatcaaaacaatcctgaaaaagagtcccgagcccaaagaggatcctgctcacctgtccgacagctcttcatcctcagggagtatcgtctcctttaaaagcgccgattctattaaatcccgcccaggaatacccagattggctggagatggaggggagcgcaccagtcctgaacgccgtgagcccggaacgggtcgaaaggacgatgatgtggccagtattatgaaaaaatacttgcaaaaata

SEQ ID NO: 225181 - DNA, 7703 bp, Artificial Sequence
  derived and/or modified sequence
atggccatatcttcccgcctggccctgtgggaacagaaaattcgcgaggaagataaatcaccacctcccagctcccctccgccactgttttccgtcataccgggtgggttcattaaacagctcgttcgcggaacagaaaaggaagctaaggaggcaagacagagaaaacaactggccgtggcctcacccgaacgcgagattcctgagatcagtatatctcagcccaacagcaaaagctctagtggcacaaggtccggatctcaacagatctcccaggatgaccaaagctcgtcaccaggtagctccgatatcctcggaaaggaatccgaagggtctcgctcacccgatcctgaacagatgacctcaataaacggcgagaaggcacaggaactgggatctagcgccacccctactaagaagactgttccatttaagagaggcgttagacgcggagatgtattactcatggtcgctaagctggatcctgactctgccaagcccgaaaaaactcaccctcatgatgctcctccgtgcaaaacctctccacccgcaacagacacaggtaaagagaagaaaggcgaaacctcacggactccatgcggttctcaggccagtacagagattctcgcccctaaagccgagaagacccggaccggcggtctgggtgaccccggacaggggaccgttgccctaaaaaagggtgaagagggacaaagcatagtgggtaaaggacttggaaccccaaaaaccacggaattaaaggaggccgaaccacagggaaaagacagacagggaacaaggccccaggcccagggccctggcgagggggttcgaccaggaaaagcagagaaggagggggctgagcctactaatacagtagagaagggaaacgtaagcaaggatgtgggctcagaaggtaaacacgtgcggcctcaaatcccaggacgtaaatgggggggatttttggggaggaggtcaaaatgggatggaccacaaaacaagaaagataaggaaggagtgttacttagtaaagctgagaagaccggagaaccgcagacacagatggagaagacttcacaggtccagggagagttaggcgatgatctgcggatgggagaaaaagccggtgagcttcgctccacaaccgggaaagccggtgaatcatgggacaagaaggagaagatggggcaacctcagggaaagagcgggaatgccggagaggcaaggtctcaaaccgaaaagggctgcgaggcgcctaaggaggtatccaccatggtggagtcccccgcagcacccggaaaaggcggatggccagggtcccgcggtcaggaggccgaggaaccttgttctagggctggagatggggcaggggcactcgagaccgagttagagggaccgagccagcctgccctggagaaggatgctgagagacctcggattaggaaggaaaaccaggacggtcctgcacctcaggaggagggtaaggggggacagtccagggacagcgaccaggccccagaggataggtggtatgaagcggagaaggtctggttagcccagaaggatgggtttaccttagcaactgtcctgaagccagacgaggggaccgccgacttgccagctgggagggtacgtctatggatcgacgccgataagacaataacggaagtagatgaggagcatgtgcaccgcgcaaatccccctgaactggaccaagtggaggacctggcatccttgatctccgtgaacgaaagctctgtgcttaatactctcctgcagcgctataaggcccaactgttacacacatgcaccggcccagacctgattgttctgcaacctagaggcccaagcgtgccatctgccggaaaagtccccaagggtcgcagagatgggttgcccgctcatatagggtccatggcacaacgagcgtactgggcactgttaaatcagcggagggatcagagtatcgttgcgctgggctggtcaggcgcaggcaagactacttgttgtgaacaggttttggaacatctcgtgggtatggctgggtccgtcgacggcagggtctctgtagagaagattcgggcaacctttaccgttctgcgggcttttggctccgtctcaatggctcacagtcggagtgccactcgtttttccatggtcatgtcactggatttcaacgccactggaaggattacagcagctcagttgcagactatgctactagagaaatcaagggtggccagacagcccgaaggtgaaagcaatttcttagttttttctcaaatgctcgccggactggacctagatcttaggacagagctgaatttgcaccaaatggcagacagtagctccttcggaatgggagtgtggtccaaacctgaggataaacagaaggctgcagctgccttcgcccaactgcagggtgccatggagatgctgggaatcagtgaaagcgaacagagagccgtgtggcgagtcctggccgcaatatatcatctgggagccgctggtgcttgcaaggtcgggaggaaacagtttatgcgttttgagtgggctaattatgcggctgaggccctggggtgcgagtatgaagaattgaatacggcaacgttcaagcatcacctgcgccaaatcatccagcagatgacatttgggcctagcagatgggggctggaggacgaagagacttcatctggcctgaagatgacaggtgtagactgtgtggagggcatggcctcaggcctctaccaggagctgtttgccgcagtcgttagcctgatcaatcgatccttcagctcccatcacttgagcatggcgagcattatggtggtcgactcacccggttttcagaaccccaggcatcaaggcaaggacagagccgctactttcgaagagttatgtcacaactacgctcacgaacggctccagcttctgttctatcagagaacatttgtgtccacccttcagaggtaccaggaagagggcgtaccagtgcagttcgacctgccagacccttcccccggtactaccgtggccgttgtggaccagaacccgtcccaggtgaggctgccagccggaggtggagctcaggatgccagaggcctattttgggttctggacgaggaggtgcacgtcgaaggctcctccgactccgtggtgctggagcgtctgtgtgctgcatttgagaagaaaggagctggtaccgaaggctcaagcgcattgcgtacgtgcgagcaacccttgcaatgcgagatcttccatcagctgggatgggatccggttaggtatgatctgaccggatggctgcaccgcgcaaaacctaacctgtcagcccttgatgccccacaggtgttacatcaatccaaacgagaggagctgagatctctgttccaagcacgcgctaagctgccgcctgtttgccgagccgtcgccggtctggagggcaccagccagcaagctttgcaaagaagtaggatggtgcggcgaacctttgcatccagcctggctgctgtccgtcgaaaagccccttgcagccagattaagctgcagatggacgcgctgacaagcatgataaagcggtcccggcttcacttcatccattgcctggttccaaatcctgttgtcgaatcaagaagcggacaagagagtccgccacctcctcaaccaggccgtgacaaaccaggggctggaggtccgcttgctcttgatatcccggcacttagagtacagcttgctggcttccacatcctcgaggccctgcgacttcatcgcaccggttacgccgatcacatggggctgaccaggttccggaggcagtttcaagtcctggacgcgcctttgttaaagaaactgatgtccacgtctgaaggaatcgatgaacggaaagcagtagaggagctcctggagaccttggatctggagaaaaaggcggtggccgtgggtcatagtcaggtctttttgaaagccggagtaatctctagactggagaagcagcgtgagaaattagtgagtcagagcattgtgctgtttcaggctgcctgtaaagggttcctgagccgtcaagaatttaagaaactaaagattcggcgactggccgctcagtgcatacagaagaacgttgccgtcttcttggccgtcaaggattggccttggtggcagctgttggggtccttacagccgctgctgtcagcgaccatcggaaccgagcagctcagagcgaaggaggaggagttgacaactctgagacgaaagctcgagaagtcagagaaactaaggaatgagttgagacaaaatacggacctcctcgagtcaaaaattgctgatctgacctcagatctagctgacgagagattcaaaggagacgtggcgtgtcaggtcctagaaagcgagagggcggagcggcttcaggcttttcgggaggttcaggagctgaaaagtaagcacgagcaagttcaaaagaagctcggcgacgtcaacaagcagctagaagaggcccagcagaagatccaactgaatgatctcgaacgcaatcctactgggggagcagacgagtggcaaatgcgcttcgactgcgctcaaatggagaacgagtttcttcgaaagagactgcaacaatgcgaggagcgactggattccgagctgaccgctcggaaggagctcgagcaaaaattgggggagctgcagagtgcttatgatggcgcaaaaaagatggcccaccagcttaagcgcaaatgtcatcacctgacttgtgacctggaggacacctgcgttctcctcgagaatcagcagtcaaggaaccacgaactggaaaagaagcagaaaaaatttgatctgcagctcgcacaggcgcttggagagtccgtcttcgaaaagggtctcagagaaaaggtgacacaggagaataccagcgttagatgggaactcggccagctgcagcaacagcttaaacagaaagaacaggaagcttcccagctgaagcagcaggtggagatgctgcaggaccacaaacgcgagctcctgggcagccctagcctgggcgagaactgtgtagccggtttgaaggagagactctggaaactggagtccagcgccttggaacagcaaaagatccagagtcagcaggaaaataccatcaaacagcttgagcagctaagacagagattcgagctcgagattgaacggatgaaacaaatgcatcagaaggatcgcgaggatcaggaggaggaacttgaggatgtgaggcagtcgtgtcaaaagcgcctgcaccaactggaaatgcaactcgagcaagagtacgaggaaaagcaaatggtgctgcatgagaagcaagacctggaagggttaatcggaaccctatgtgaccagatcgggcacagggactttgatgtggaaaagcgccttcggagggacctgcgaagaacgcacgctctccttagtgacgtgcaattattattaggaaccatggaagatggcaagacctcagtcagtaaagaggaactagaaaaggtacacagccaattggaacaaagtgaagcaaagtgtgaagaagccttaaaaacccagaaggtcttaaccgcagacctggaatctatgcatagtgaactggagaacatgactaggaataagagcctggtagacgagcagctgtaccggttacagttcgagaaggccgatttactcaagcgtattgatgaggatcaggatgatctcaatgagcttatgcagaagcataaagacctaatagcccaatcagccgcagacatcggccagatccaggagctacagctgcagttggaagaagcaaaaaaagaaaaacacaaattgcaagagcagttacaggtggcgcagatgcgcatcgagtacctggagcagagtaccgtggatagggctattgtttcaaggcaagaagcggtgatctgtgatctggagaataagacagaatttcagaaagtccaaattaaaagatttgaagttctcgtgatacggctacgagactccctgatcaagatgggggaggagctctcacaggctgcgaccagtgagtctcagcagcgcgaaagcagtcagtattaccaaagacggctggaagagcttaaggctgacatggaagagctagtgcagagggaggccgaggcatccaggcgctgtatggaactggaaaaatatgtggaagaattggccgcagtcagacagactctgcagactgacttggagaccagcattcggagaatcgcagatctgcaggctgcattagaggaggttgcctctagcgatagtgacacagagtccgtccagactgctgtggattgtgggtcaagcggaaggaaagagatggataacgtgtctatcctgagtagtcagccagaggggtccctccagtcgtggttgtcatgtacactttccctggcgactgacacaatgagaactccgagtagacagtccgcgactagttcccggatcctctcgccgaggataaacgaagaggcaggcgataccgaacggactcagtcggccctggccctctcacgcgcacgctcaacaaacgtgcactctaagaccagcggggataagcccgtgagtccacattttgtgcgacgacagaagtattgtcactttggagacggcgaggtactggctgtgcagcgaaaatctacagagcgcctggagcctgccagctcacccttagcctcaaggtccactaacacttcccccctgtctcgcgaaaaacttccaagcccttcagcagccctgagtgaatttgttgaaggtttgaggcgcaaacgggcacagagggggcagggatcaaccctgggcttggaggattggcctaccctccccatatatcagacaacaggggcaagcacgctgcggagggggagggccggaagcgacgagggcaatctctcattgagggtaggcgctaagtctcccctggagattgaaggggcagcaggtggtctcctgcggagtacttcactaaagtgtatctcttccgatggagtgggcggaaccactctgttaccagagaaaagcaaaactcagttctcgtcttgcgaatctctcctggaatctaggccctctatgggccgaaaactgagctctcctacaactcctagggatatgttgctttcccctacactgcggcctcgccgacgctgtctggaatcaagcgtagatgacgcaggctgccctgatcttggaaaggagcctctggttttccagaacagacagtttgctcacctaatggaggaacctcttgggtcagaccccttctcctggaagctccccagtctggattatgaacgcaaaacaaaggttgatttcgacgactttctgcccgcaattaggaaaccccagacaccgacctctctggccggatcagccaagggagggcaagatggatctcagaggtctagtattcattttgagaccgaagaagccaataggtcctttttgtccgggatcaaaacgatcctgaaaaaaagccccgagcctaaagaagatcctgctcatctcagtgacagttccagctctagcggctccatcgtcagctttaagtctgccgactctattaagagcaggccagggatcccccgactggccggagacggtggggagagaacttcccccgagagaagagagccagggactggccgaaaagacgatgatgtggccagtatcatgaagaaatatttgcagaaata

SEQ ID NO: 225182 - DNA, 7704 bp, Artificial Sequence
  derived and/or modified sequence
atggccatcagcagcagactggccctgtgggagcagaagatcagagaggaggacaagagccccccccccagcagccccccccccctgttcagcgtgatccccggcggcttcatcaagcagctggtgagaggcaccgagaaggaggccaaggaggccagacagagaaagcagctggccgtggccagccccgagagagagatccccgagatcagcatcagccagcccaacagcaagagcagcagcggcaccagaagcggcagccagcagatcagccaggacgaccagagcagcagccccggcagcagcgacatcctgggcaaggagagcgagggcagcagaagccccgaccccgagcagatgaccagcatcaacggcgagaaggcccaggagctgggcagcagcgccacccccaccaagaagaccgtgcccttcaagagaggcgtgagaagaggcgacgtgctgctgatggtggccaagctggaccccgacagcgccaagcccgagaagacccacccccacgacgcccccccctgcaagaccagcccccccgccaccgacaccggcaaggagaagaagggcgagaccagcagaaccccctgcggcagccaggccagcaccgagatcctggcccccaaggccgagaagaccagaaccggcggcctgggcgaccccggccagggcaccgtggccctgaagaagggcgaggagggccagagcatcgtgggcaagggcctgggcacccccaagaccaccgagctgaaggaggccgagccccagggcaaggacagacagggcaccagaccccaggcccagggccccggcgagggcgtgagacccggcaaggccgagaaggagggcgccgagcccaccaacaccgtggagaagggcaacgtgagcaaggacgtgggcagcgagggcaagcacgtgagaccccagatccccggcagaaagtggggcggcttcctgggcagaagaagcaagtgggacggcccccagaacaagaaggacaaggagggcgtgctgctgagcaaggccgagaagaccggcgagccccagacccagatggagaagaccagccaggtgcagggcgagctgggcgacgacctgagaatgggcgagaaggccggcgagctgagaagcaccaccggcaaggccggcgagagctgggacaagaaggagaagatgggccagccccagggcaagagcggcaacgccggcgaggccagaagccagaccgagaagggctgcgaggcccccaaggaggtgagcaccatggtggagagccccgccgcccccggcaagggcggctggcccggcagcagaggccaggaggccgaggagccctgcagcagagccggcgacggcgccggcgccctggagaccgagctggagggccccagccagcccgccctggagaaggacgccgagagacccagaatcagaaaggagaaccaggacggccccgccccccaggaggagggcaagggcggccagagcagagacagcgaccaggcccccgaggacagatggtacgaggccgagaaggtgtggctggcccagaaggacggcttcaccctggccaccgtgctgaagcccgacgagggcaccgccgacctgcccgccggcagagtgagactgtggatcgacgccgacaagaccatcaccgaggtggacgaggagcacgtgcacagagccaacccccccgagctggaccaggtggaggacctggccagcctgatcagcgtgaacgagagcagcgtgctgaacaccctgctgcagagatacaaggcccagctgctgcacacctgcaccggccccgacctgatcgtgctgcagcccagaggccccagcgtgcccagcgccggcaaggtgcccaagggcagaagagacggcctgcccgcccacatcggcagcatggcccagagagcctactgggccctgctgaaccagagaagagaccagagcatcgtggccctgggctggagcggcgccggcaagaccacctgctgcgagcaggtgctggagcacctggtgggcatggccggcagcgtggacggcagagtgagcgtggagaagatcagagccaccttcaccgtgctgagagccttcggcagcgtgagcatggcccacagcagaagcgccaccagattcagcatggtgatgagcctggacttcaacgccaccggcagaatcaccgccgcccagctgcagaccatgctgctggagaagagcagagtggccagacagcccgagggcgagagcaacttcctggtgttcagccagatgctggccggcctggacctggacctgagaaccgagctgaacctgcaccagatggccgacagcagcagcttcggcatgggcgtgtggagcaagcccgaggacaagcagaaggccgccgccgccttcgcccagctgcagggcgccatggagatgctgggcatcagcgagagcgagcagagagccgtgtggagagtgctggccgccatctaccacctgggcgccgccggcgcctgcaaggtgggcagaaagcagttcatgagattcgagtgggccaactacgccgccgaggccctgggctgcgagtacgaggagctgaacaccgccaccttcaagcaccacctgagacagatcatccagcagatgaccttcggccccagcagatggggcctggaggacgaggagaccagcagcggcctgaagatgaccggcgtggactgcgtggagggcatggccagcggcctgtaccaggagctgttcgccgccgtggtgagcctgatcaacagaagcttcagcagccaccacctgagcatggccagcatcatggtggtggacagccccggcttccagaaccccagacaccagggcaaggacagagccgccaccttcgaggagctgtgccacaactacgcccacgagagactgcagctgctgttctaccagagaaccttcgtgagcaccctgcagagataccaggaggagggcgtgcccgtgcagttcgacctgcccgaccccagccccggcaccaccgtggccgtggtggaccagaaccccagccaggtgagactgcccgccggcggcggcgcccaggacgccagaggcctgttctgggtgctggacgaggaggtgcacgtggagggcagcagcgacagcgtggtgctggagagactgtgcgccgccttcgagaagaagggcgccggcaccgagggcagcagcgccctgagaacctgcgagcagcccctgcagtgcgagatcttccaccagctgggctgggaccccgtgagatacgacctgaccggctggctgcacagagccaagcccaacctgagcgccctggacgccccccaggtgctgcaccagagcaagagagaggagctgagaagcctgttccaggccagagccaagctgccccccgtgtgcagagccgtggccggcctggagggcaccagccagcaggccctgcagagaagcagaatggtgagaagaaccttcgccagcagcctggccgccgtgagaagaaaggccccctgcagccagatcaagctgcagatggacgccctgaccagcatgatcaagagaagcagactgcacttcatccactgcctggtgcccaaccccgtggtggagagcagaagcggccaggagagccccccccccccccagcccggcagagacaagcccggcgccggcggccccctggccctggacatccccgccctgagagtgcagctggccggcttccacatcctggaggccctgagactgcacagaaccggctacgccgaccacatgggcctgaccagattcagaagacagttccaggtgctggacgcccccctgctgaagaagctgatgagcaccagcgagggcatcgacgagagaaaggccgtggaggagctgctggagaccctggacctggagaagaaggccgtggccgtgggccacagccaggtgttcctgaaggccggcgtgatcagcagactggagaagcagagagagaagctggtgagccagagcatcgtgctgttccaggccgcctgcaagggcttcctgagcagacaggagttcaagaagctgaagatcagaagactggccgcccagtgcatccagaagaacgtggccgtgttcctggccgtgaaggactggccctggtggcagctgctgggcagcctgcagcccctgctgagcgccaccatcggcaccgagcagctgagagccaaggaggaggagctgaccaccctgagaagaaagctggagaagagcgagaagctgagaaacgagctgagacagaacaccgacctgctggagagcaagatcgccgacctgaccagcgacctggccgacgagagattcaagggcgacgtggcctgccaggtgctggagagcgagagagccgagagactgcaggccttcagagaggtgcaggagctgaagagcaagcacgagcaggtgcagaagaagctgggcgacgtgaacaagcagctggaggaggcccagcagaagatccagctgaacgacctggagagaaaccccaccggcggcgccgacgagtggcagatgagattcgactgcgcccagatggagaacgagttcctgagaaagagactgcagcagtgcgaggagagactggacagcgagctgaccgccagaaaggagctggagcagaagctgggcgagctgcagagcgcctacgacggcgccaagaagatggcccaccagctgaagagaaagtgccaccacctgacctgcgacctggaggacacctgcgtgctgctggagaaccagcagagcagaaaccacgagctggagaagaagcagaagaagttcgacctgcagctggcccaggccctgggcgagagcgtgttcgagaagggcctgagagagaaggtgacccaggagaacaccagcgtgagatgggagctgggccagctgcagcagcagctgaagcagaaggagcaggaggccagccagctgaagcagcaggtggagatgctgcaggaccacaagagagagctgctgggcagccccagcctgggcgagaactgcgtggccggcctgaaggagagactgtggaagctggagagcagcgccctggagcagcagaagatccagagccagcaggagaacaccatcaagcagctggagcagctgagacagagattcgagctggagatcgagagaatgaagcagatgcaccagaaggacagagaggaccaggaggaggagctggaggacgtgagacagagctgccagaagagactgcaccagctggagatgcagctggagcaggagtacgaggagaagcagatggtgctgcacgagaagcaggacctggagggcctgatcggcaccctgtgcgaccagatcggccacagagacttcgacgtggagaagagactgagaagagacctgagaagaacccacgccctgctgagcgacgtgcagctgctgctgggcaccatggaggacggcaagaccagcgtgagcaaggaggagctggagaaggtgcacagccagctggagcagagcgaggccaagtgcgaggaggccctgaagacccagaaggtgctgaccgccgacctggagagcatgcacagcgagctggagaacatgaccagaaacaagagcctggtggacgagcagctgtacagactgcagttcgagaaggccgacctgctgaagagaatcgacgaggaccaggacgacctgaacgagctgatgcagaagcacaaggacctgatcgcccagagcgccgccgacatcggccagatccaggagctgcagctgcagctggaggaggccaagaaggagaagcacaagctgcaggagcagctgcaggtggcccagatgagaatcgagtacctggagcagagcaccgtggacagagccatcgtgagcagacaggaggccgtgatctgcgacctggagaacaagaccgagttccagaaggtgcagatcaagagattcgaggtgctggtgatcagactgagagacagcctgatcaagatgggcgaggagctgagccaggccgccaccagcgagagccagcagagagagagcagccagtactaccagagaagactggaggagctgaaggccgacatggaggagctggtgcagagagaggccgaggccagcagaagatgcatggagctggagaagtacgtggaggagctggccgccgtgagacagaccctgcagaccgacctggagaccagcatcagaagaatcgccgacctgcaggccgccctggaggaggtggccagcagcgacagcgacaccgagagcgtgcagaccgccgtggactgcggcagcagcggcagaaaggagatggacaacgtgagcatcctgagcagccagcccgagggcagcctgcagagctggctgagctgcaccctgagcctggccaccgacaccatgagaacccccagcagacagagcgccaccagcagcagaatcctgagccccagaatcaacgaggaggccggcgacaccgagagaacccagagcgccctggccctgagcagagccagaagcaccaacgtgcacagcaagaccagcggcgacaagcccgtgagcccccacttcgtgagaagacagaagtactgccacttcggcgacggcgaggtgctggccgtgcagagaaagagcaccgagagactggagcccgccagcagccccctggccagcagaagcaccaacaccagccccctgagcagagagaagctgcccagccccagcgccgccctgagcgagttcgtggagggcctgagaagaaagagagcccagagaggccagggcagcaccctgggcctggaggactggcccaccctgcccatctaccagaccaccggcgccagcaccctgagaagaggcagagccggcagcgacgagggcaacctgagcctgagagtgggcgccaagagccccctggagatcgagggcgccgccggcggcctgctgagaagcaccagcctgaagtgcatcagcagcgacggcgtgggcggcaccaccctgctgcccgagaagagcaagacccagttcagcagctgcgagagcctgctggagagcagacccagcatgggcagaaagctgagcagccccaccacccccagagacatgctgctgagccccaccctgagacccagaagaagatgcctggagagcagcgtggacgacgccggctgccccgacctgggcaaggagcccctggtgttccagaacagacagttcgcccacctgatggaggagcccctgggcagcgaccccttcagctggaagctgcccagcctggactacgagagaaagaccaaggtggacttcgacgacttcctgcccgccatcagaaagccccagacccccaccagcctggccggcagcgccaagggcggccaggacggcagccagagaagcagcatccacttcgagaccgaggaggccaacagaagcttcctgagcggcatcaagaccatcctgaagaagagccccgagcccaaggaggaccccgcccacctgagcgacagcagcagcagcagcggcagcatcgtgagcttcaagagcgccgacagcatcaagagcagacccggcatccccagactggccggcgacggcggcgagagaaccagccccgagagaagagagcccggcaccggcagaaaggacgacgacgtggccagcatcatgaagaagtacctgcagaagtag

SEQ ID NO: 225183 - protein, 171 aa, Artificial Sequence
  derived and/or modified sequence
MLPRAAWSLVLRKGGGGRRGMHSSEGTTRGGGKMSPYTNCYAQRYYPMPEEPFCTELNAEEQALKEKEKGSWTQLTHAEKVALYRLQFNETFAEMNRRSNEWKTVMGCVFFFIGFAALVIWWQRVYVFPPKPITLTDERKAQQLQRMLDMKVNPVQGLASRWDYEKKQWKK

SEQ ID NO: 225184 - DNA, 516 bp, Artificial Sequence
  derived and/or modified sequence
atgctgccaagagctgcttggagtctggtgttgaggaaaggcgggggagggagaagaggaatgcattcatctgaaggtaccacacggggggggggtaaaatgtccccatacaccaattgttatgcgcaaagatattatcccatgcctgaggaacccttctgtacagagttaaatgccgaggaacaggcgctaaaggagaaagaaaaaggcagctggactcagctcactcatgccgaaaaggtggccctctaccggctgcagttcaacgaaaccttcgcagaaatgaatagaagatccaatgagtggaaaacagtaatgggatgcgtctttttttttatcggtttcgccgccctggtgatctggtggcaaagagtgtacgtgtttccgcctaagcctattacacttaccgatgaaagaaaagcacaacaactacagagaatgctcgatatgaaagtaaatcccgtccagggtctcgcctcacgctgggactatgagaagaaacagtggaaaaagtag

SEQ ID NO: 225185 - DNA, 516 bp, Artificial Sequence
  derived and/or modified sequence
atgctgcccagggctgcctggagcctggtgctgaggaaaggaggcggcggccggcggggcatgcacagcagcgagggcaccacccggggcggcggcaagatgagcccctacaccaactgctacgcccagcgctactaccccatgcctgaggagcccttctgcacagagctgaatgctgaggagcaggccctgaaggagaaggagaagggctcctggacccagctgacccacgccgagaaggtggccctgtaccgcctgcagttcaatgagacctttgctgagatgaacagaagaagcaatgagtggaagacagtgatgggctgtgtgttcttcttcatcggctttgctgccctggtgatctggtggcagagggtgtatgtgtttcctcccaagcccatcaccctgacagatgagaggaaggcccagcagctgcagaggatgctggacatgaaggtgaaccctgtgcagggcctggccagccgctgggactatgagaagaagcagtggaagaagtag

SEQ ID NO: 225186 - DNA, 516 bp, Artificial Sequence
  derived and/or modified sequence
atgctgccccgggccgcctggagcctggtgctgcggaagggcggcgggggacgtaggggtatgcactctagcgaggggacaacccgcggcggtggtaagatgagcccttatactaactgttacgcccaaagatattacccaatgcccgaggaaccgttctgcactgaactgaacgcagaagagcaggcgctgaaagagaaagagaagggcagctggacgcagttgacccacgccgagaaggtagccctctatcgcttgcaattcaacgagacattcgcggagatgaatcgacggagcaacgaatggaaaaccgtgatgggctgcgtgttcttttttattggatttgcagcccttgtcatctggtggcagcgcgtgtatgtgttcccccccaaaccaattacgctgaccgatgagaggaaggcacagcagcttcagagaatgctggatatgaaggtcaacccagtccagggcctggcctctcgctgggactacgagaagaaacagtggaagaagtag

SEQ ID NO: 225187 - DNA, 516 bp, Artificial Sequence
  derived and/or modified sequence
atgctacccagagcggcttggtcccttgtgctgcgcaagggaggagggggtaggcggggaatgcactcatccgagggaacaacacgaggcggaggaaagatgtccccctacactaattgttatgcccagaggtattatcccatgcctgaggagcccttttgcacagaactgaatgctgaggaacaggccctaaaggagaaggagaagggcagctggacccagctaacccatgccgaaaaggttgccctgtaccgcttacagtttaacgagacgtttgccgaaatgaaccgccgatccaacgaatggaagaccgttatgggttgcgtgtttttctttatcggctttgcggcactcgtgatctggtggcaacgagtctacgtgtttccaccgaagccaattacccttaccgacgaaagaaaagcccagcaattgcagaggatgctggacatgaaggttaaccccgtccaagggctcgcctcccgctgggattatgaaaaaaagcagtggaaaaagtag

SEQ ID NO: 225188 - DNA, 693 bp, Artificial Sequence
  derived and/or modified sequence
caggtccctccgcagcgggttctcagttgctcgctgggcagacccaggtcgcgctcccactgccgagcccgcgagatgctccccagagctgcctggagcttggtgctgaggaaaggtggaggtggaagacgagggatgcacagctcagaaggcaccacccgtggtggggggaagatgtccccctacaccaactgctatgcccagcgctactaccccatgccagaagagcccttctgcacagaactcaacgctgaggagcaggccctgaaggagaaggagaagggaagctggacccagctgacccacgccgaaaaggtggccttgtaccggctccagttcaatgagacctttgcggagatgaaccgtcgctccaatgagtggaagacagtgatgggttgtgtcttcttcttcattggattcgcagctctggtgatttggtggcagcgggtctacgtatttcctccaaagccgatcaccttgacggacgagcggaaagcccagcagctgcagcgcatgctggacatgaaggtgaatcctgtgcagggcctggcctcccgctgggactatgagaagaagcagtggaagaagtgacttgcatccccagctgtctccctgaggctccgccctggctgggagcctctggcggcccctcccctcccctgcccttaaccccagtaaagctccaaaaaaaaa

SEQ ID NO: 225189 - DNA, 516 bp, Artificial Sequence
  derived and/or modified sequence
atgctgcccagagccgcctggagcctggtgctgagaaagggcggcggcggcagaagaggcatgcacagcagcgagggcaccaccagaggcggcggcaagatgagcccctacaccaactgctacgcccagagatactaccccatgcccgaggagcccttctgcaccgagctgaacgccgaggagcaggccctgaaggagaaggagaagggcagctggacccagctgacccacgccgagaaggtggccctgtacagactgcagttcaacgagaccttcgccgagatgaacagaagaagcaacgagtggaagaccgtgatgggctgcgtgttcttcttcatcggcttcgccgccctggtgatctggtggcagagagtgtacgtgttcccccccaagcccatcaccctgaccgacgagagaaaggcccagcagctgcagagaatgctggacatgaaggtgaaccccgtgcagggcctggccagcagatgggactacgagaagaagcagtggaagaagtag

SEQ ID NO: 225190 - protein, 492 aa, Artificial Sequence
  derived and/or modified sequence
MWRGLWTLAAQAARGPRRLCTRRSSGAPAPGSGATIFALSSGQGRCGIAVIRTSGPASGHALRILTAPRDLPLARHASLRLLSDPRSGEPLDRALVLWFPGPQSFTGEDCVEFHVHGGPAVVSGVLQALGSVPGLRPAEAGEFTRRAFANGKLNLTEVEGLADLIHAETEAQRRQALRQLDGELGHLCRGWAETLTKALAHVEAYIDFGEDDNLEEGVLEQADIEVRALQVALGAHLRDARRGQRLRSGVHVVVTGPPNAGKSSLVNLLSRKPVSIVSPEPGTTRDVLETPVDLAGFPVLLSDTAGLREGVGPVEQEGVRRARERLEQADLILAMLDASDLASPSSCNFLATVVASVGAQSPSDSSQRLLLVLNKSDLLSPEGPGPGPDLPPHLLLSCLTGEGLDGLLEALRKELAAVCGDPSTDPPLLTRARHQHHLQGCLDALGHYKQSKDLALAAEALRVARGHLTRLTGGGGTEEILDIIFQDFCVGK

SEQ ID NO: 225191 - protein, 151 aa, Artificial Sequence [sequence omitted]

SEQ ID NO: 225192 - DNA, 1479 bp, Artificial Sequence
  derived and/or modified sequence
atgtggagaggcctgtggaccctggccgcccaggccgccagaggccccagaagactgtgcaccagaagaagcagcggcgcccccgcccccggcagcggcgccaccatcttcgccctgagcagcggccagggcagatgcggcatcgccgtgatcagaaccagcggccccgccagcggccacgccctgagaatcctgaccgcccccagagacctgcccctggccagacacgccagcctgagactgctgagcgaccccagaagcggcgagcccctggacagagccctggtgctgtggttccccggcccccagagcttcaccggcgaggactgcgtggagttccacgtgcacggcggccccgccgtggtgagcggcgtgctgcaggccctgggcagcgtgcccggcctgagacccgccgaggccggcgagttcaccagaagagccttcgccaacggcaagctgaacctgaccgaggtggagggcctggccgacctgatccacgccgagaccgaggcccagagaagacaggccctgagacagctggacggcgagctgggccacctgtgcagaggctgggccgagaccctgaccaaggccctggcccacgtggaggcctacatcgacttcggcgaggacgacaacctggaggagggcgtgctggagcaggccgacatcgaggtgagagccctgcaggtggccctgggcgcccacctgagagacgccagaagaggccagagactgagaagcggcgtgcacgtggtggtgaccggcccccccaacgccggcaagagcagcctggtgaacctgctgagcagaaagcccgtgagcatcgtgagccccgagcccggcaccaccagagacgtgctggagacccccgtggacctggccggcttccccgtgctgctgagcgacaccgccggcctgagagagggcgtgggccccgtggagcaggagggcgtgagaagagccagagagagactggagcaggccgacctgatcctggccatgctggacgccagcgacctggccagccccagcagctgcaacttcctggccaccgtggtggccagcgtgggcgcccagagccccagcgacagcagccagagactgctgctggtgctgaacaagagcgacctgctgagccccgagggccccggccccggccccgacctgcccccccacctgctgctgagctgcctgaccggcgagggcctggacggcctgctggaggccctgagaaaggagctggccgccgtgtgcggcgaccccagcaccgacccccccctgctgaccagagccagacaccagcaccacctgcagggctgcctggacgccctgggccactacaagcagagcaaggacctggccctggccgccgaggccctgagagtggccagaggccacctgaccagactgaccggcggcggcggcaccgaggagatcctggacatcatcttccaggacttctgcgtgggcaagtag

SEQ ID NO: 225193 - DNA, 1479 bp, Artificial Sequence
  derived and/or modified sequence
atgtggcgcggtctctggaccctcgccgcccaggcagccagaggcccccgcaggctgtgcacccgaagatcatctggggctcctgcccctgggtctggagccaccatttttgccttgtcttctggccaaggacggtgtggcatagccgtaatccgtacttcaggacctgcctccggtcacgcactgcgtattctgacagctcccagggatctccccttggcccgtcatgcatctcttcgactcttaagtgatccacgcagcggtgaacccttggacagagcgctggtactctggttccctggcccacagagcttcaccggagaagattgcgtcgaattccacgttcacgggggaccagccgtggtgtccggcgttctgcaagcgcttggcagtgtgcccggcctgaggcccgcagaagcaggcgagttcacccggagagccttcgctaatggcaaactgaaccttacagaagtggaaggtcttgcagacctgatccacgcagagacagaagcgcagcgacgccaggctctgagacagctggatggcgagctggggcacctctgccgggggtgggctgagacactgacaaaggcgctggcccatgtggaggcctacattgacttcggagaggatgacaacctggaagagggggtgctggaacaggcagatatcgaagtgagagccctgcaggtcgccctgggcgctcatctgcgcgacgcccgaagaggccaacggctgagaagtggcgttcatgtagtcgtcacgggcccccctaacgcgggtaagagtagtctggtgaacctgctctcccggaaacccgtgtcgattgtgagcccagaacccggaacaacacgagatgtactcgagacaccagtcgacctggctggattccctgtgttgctgtccgatacagccgggttacgagagggcgtaggccccgtcgagcaagaaggggttagacgggcacgagagcgcctggagcaggccgacttgatcctggcgatgctggatgcttcggacctggctagcccatcaagctgcaattttctagccactgttgtggcttctgtaggcgcacaatcaccatcggattctagtcagcgcctgctgctggtacttaacaagagtgacctcctgtccccggagggtcctggtcctggccctgacctgccccctcatttactgcttagctgcctgaccggcgagggtctagacggactgctcgaagctctcagaaaggagctggcagctgtctgtggagacccttcaacagatccccctctacttactcgagccagacatcagcaccatctccagggatgcctcgatgccctgggacactataagcagagcaaggatctggctctagcggcagaggcgctgagagtcgcgcggggccatctgacgcgcctgacgggtggtggcgggactgaggaaatcctggatattatcttccaggacttctgcgttgggaagtag

SEQ ID NO: 225194 - DNA, 2571 bp, Artificial Sequence
  derived and/or modified sequence
ggccccctgcccagacttgaagccacacaggcaggtcgggcaggcgggtcgcaggttgtaaatccatgtggcgggggctttggaccctggcggcccaagcggcacgtgggcctcgcagattgtgcacgcgccggagcagcggcgcaccagcccccggctccggcgccaccatcttcgcgctaagctctggccaaggccgctgcggcatcgcagtgatccggaccagcggccccgccagcggccacgccctccgaattctcacagcaccccgagacctgccccttgctcgccacgccagcctgcgcctgctcagcgatccccgctccggggagcctctggaccgcgcactggtgctctggttcccaggtccccagagtttcaccggtgaggactgcgtggagttccacgtgcatggaggcccggcagtggtgagcggcgtcctgcaggccttgggcagcgtgccagggcttcgaccggcggaggcaggcgagttcaccagacgggcgttcgccaatgggaagctgaacctgaccgaagtggaggggctggcggaccttatccacgcggaaacagaggcgcagcggcggcaggccctcaggcagctggacggagagctgggccacctctgccgtggctgggccgagaccctcaccaaagctctggcccacgtggaggcctatatcgatttcggcgaggatgacaacctggaggagggggtcctggagcaagccgacatcgaagtacgggcactgcaggtggccctgggtgcacatctacgagatgccaggcgcgggcagaggctccgctcaggggtgcacgtagtggtcactggaccccccaatgcgggcaagagcagcctagtgaacctgctcagtcggaagcctgtgtccatcgtgtccccggagccagggaccacccgtgacgtgctggagaccccagtcgacctggccggatttcctgtgctgctgagcgacacggctgggttgcgggagggcgtggggcccgtggagcaggagggcgtgcggcgcgcccgggagaggctagagcaggctgacctcattctggccatgctggatgcttctgacctggcctctccctccagttgcaacttcctggccaccgtcgtagcctctgtgggagcccagagccccagtgacagcagccagcgcctcctcctggtgctgaacaagtcggacctgctgtccccggagggcccaggtcccggtcctgacctgcccccgcacctgctgctgtcctgtctgacgggagaggggctggacggcctcctggaggcgctgaggaaggagctagctgcagtgtgtggggacccgtccacagatcccccgctgctgacccgagcaaggcaccagcaccacctccagggttgcctggatgccctcggccactacaagcagtcaaaagacctggccctggcggcagaggcgctgcgggtggcccggggtcacctgacccggctcacaggtggagggggtaccgaggagatcctggacatcatcttccaggacttctgtgtgggcaagtgacgggatccagggaagtcgcacccaagctgcgtggagacccaggagcctcgggggatctggaaacagtttaggccaattgggattctcattcgcctgggaaagaacttgattctcaaatagtgaagcaacacagctgagaggtagtgagatccctgcagggactccctggagattcaggccctggaatggggctgaatggaggtcccgttcgacccttgatgctggggcatccgggttgggatggagataggaggatctcagtatatttgtttcgtagttttttatttattttgcaaataccaaaggaatgtaaaaaaaactcaggtgatctagaagtgtttattttcttcccttcccttcccttccctttccttttccctttccctttccccttccccttccccttccccttcccctacccttccctcctctgtctattgcccaggctggagtgcagtggtgcgaccttggctcactgcaacctccatctccggggctcaagcgcttctcctgcctcagcctcctgagtagctgggattacaggcatgtgccagcatgcccggctaatttttttctttttttgagacagagtctcgctctgtcacccaggctggagttcagtggtgcgacctcggcttactgcaacctccacctcccgggttcaagtgattctcctgcctcagcctcttgagtagctgggactacaggcgcacaccaccacgccaggctaatttttgtatttttagtagagacaaggtttcaccatgttgaccaggctggtcttgaactccttgacctcaggtaatctgcctaccttggcctcccaaagtgctgggatcacaggcgtgagctatcacacctggccccagaagtgtttcaacatggaaattttccttagcccttctgtggttgtcatggcttaatgtgtgtctttccagaactttgaatgtttgcatacttgtggatgtacctttcaaatatgtttgtcttgtgtatcatatataaatggtattgtgttcattgctct

SEQ ID NO: 225195 - DNA, 1479 bp, Artificial Sequence
  derived and/or modified sequence
atgtggaggggcctgtggaccctggccgcccaggccgcccggggcccccggcggctgtgcacccggcgcagcagcggggccccagcccctggcagcggggccaccatctttgccctgagcagcggccagggccgctgtggcattgctgtgatccgcaccagcggccctgccagcggccacgccctgcgcatcctgacagccccccgggacctgcccctggcccggcatgccagcctgcggctgctgagtgaccccaggtctggagagcccctggaccgggccctggtgctgtggttccctggcccccagagcttcaccggggaggactgtgtggagttccacgtgcacggcggccctgctgtggtgtctggagtgctgcaggccctgggctctgtgcccggcctgcggcctgctgaggccggggagttcacccggcgggcctttgccaacgggaagctgaacctgacagaggtggagggcctggccgacctgattcatgctgagacagaggcccagaggcggcaggccctgcggcagctggatggagagctgggccacctgtgccggggctgggccgagaccctgaccaaggccctggcccacgtggaggcctacatcgactttggagaagatgacaacctggaggagggcgtgctggagcaggccgacatcgaggtgcgggccctgcaggtggccctgggcgcccacctgagagatgcccggcggggccagaggctgcggtctggagtgcacgtggtggtgactggacctccaaatgctgggaagagcagcctggtgaacctgctgagcaggaagcctgtgtccatcgtgtccccagagcccggcaccaccagagatgtgctggagacccctgtggacctggccggcttccctgtgctgctgagtgacacagctggcctgcgggagggcgtgggccctgtggagcaggagggcgtgcggcgggcccgggagcggctggagcaggccgacctgatcctggccatgctggatgccagtgacctggccagccccagcagctgcaacttcctggccaccgtggtggcctctgtgggcgcccagagccccagcgacagcagccagaggctgctgctggtgctgaacaagagtgacctgctgagccctgagggccctggccctggccctgacctgcccccccacctgctgctgagctgcctgaccggggagggcctggatggcctgctggaggccctgaggaaggagctggccgctgtgtgtggggaccccagcacagacccccccctgctgacccgggcccggcaccagcaccacctgcagggctgcctggatgccctgggccactacaagcagagcaaggacctggccctggccgctgaggccctgcgggtggcccggggccacctgacccggctgaccggcggcggcggcacagaggagatcctggacatcatcttccaggacttctgtgtgggcaagtag

SEQ ID NO: 225196 - DNA, 1479 bp, Artificial Sequence
  derived and/or modified sequence
atgtggcggggcctgtggaccctggccgcccaggccgcccggggccctcggaggctctgcactagacgcagtagtggtgcacctgccccaggtagtggagctacaatcttcgccctgagcagcgggcaaggtcggtgtggaatcgccgtgatacggacatccggccccgcgagtggccatgcactgagaatcctaaccgctccccgtgatcttcctctggcccggcacgcttctctccggttgctgagcgatccacgtagtggcgagccattagaccgcgctctggtgctttggtttccgggtccacagtcattcacgggagaagactgcgtagaatttcacgtccatggcggtcccgcagtggtgagcggagtgctgcaggccttaggaagtgtacccggactgcgccccgccgaggcaggcgagttcacgagacgtgctttcgccaacggtaagttgaatttaactgaagtcgagggtctggctgacctaattcacgctgaaacagaagcccagcgacgacaggccctcaggcagttggacggcgagctggggcatttgtgtcgtgggtgggctgaaactcttactaaagcactcgctcacgtggaggcctatatcgacttcggtgaagatgataatcttgaggaaggcgttctggagcaagcagacatcgaagttagggcactccaggtagccctcggggcccatctgcgcgatgcccggcgtgggcagagactgcgtagcggtgtgcacgtggtggtgaccggccccccaaacgccgggaagtctagtctggtgaacttgctctcccgtaaaccagttagcatagtgagccccgaacccggcacaacacgagatgtgctggagacacccgtagacctggcaggttttcccgtcctgctcagcgatacagcaggactgagggaaggcgtgggcccggtggagcaggagggcgtgcgtagggccagggagcgcctggagcaggccgatctcattctggccatgctggacgcgtctgacttggcttctccctctagctgtaacttcttggccacagtggtggcctcagttggcgcacagtccccttctgattcctctcagaggttactgctcgtcctgaataagtcggaccttctgagtcccgagggacccggtcccggccctgatctccctccccacttgttactgtcgtgtctaaccggtgagggccttgatgggcttctggaagctctgagaaaagaacttgccgcggtatgcggggaccccagcaccgatccaccacttctgacaagggcccgccaccagcaccacctgcaggggtgccttgatgccctcggccattacaaacagtctaaggatctggccctggccgccgaggcgctgcgagtggcaagggggcatttgacccgcttaaccggcggcggcggtacagaagaaatactggacatcatatttcaggacttctgtgtgggcaaatag

SEQ ID NO: 225197 - DNA, 1479 bp, Artificial Sequence
  derived and/or modified sequence
atgtggcggggattatggactttggccgcacaagccgctcgcggtcccagacgactctgcaccagacgaagctccggcgctcctgcaccaggctcgggtgctactatatttgctctgtcttccggacagggtcgttgcgggatcgctgtgatccggacctccggacctgcaagcggacacgcgctgcggatcttgacagctccacgggacctgccactcgccaggcacgcctccctgcggctcctgagtgatcctaggtccggcgaacccctcgaccgcgcactggtactctggtttcccggaccccaatcgttcaccggggaggattgtgtcgagttccatgttcatgggggtccagccgtagtttcaggcgtgctgcaggctctggggtccgtaccaggcctccggcctgccgaggccggagaattcacccggagagccttcgccaatggcaaactcaacctgacagaagtggaaggcttggctgacttgatccacgcggagacggaggcccaacggaggcaggccctgcgccagttagatggtgagctgggccatctttgtagaggatgggctgaaacactgactaaggccctcgcccatgtggaggcttacattgattttggggaggatgacaatctggaagaaggggtactcgaacaggctgatatcgaagtcagggccctgcaggtggccctcggcgctcacctcagggacgctaggcggggtcaacggctgcgttctggggtccacgtcgtggtcacgggacctcccaatgctgggaaatcttcattagtcaaccttctgtcccgcaaacccgtaagcatcgtttcgccagaaccaggtacgacacgcgacgtactggagacccccgtggatttagccggattccctgtactcctgtccgataccgctggcctgcgggaaggggtcggccctgtagagcaagaaggcgtgcggagggcacgggagcggttagagcaggcggatctcatcctggctatgcttgatgcttcagacttggcctctccatctagctgtaatttccttgccaccgtagttgccagcgttggggcacaaagtccatctgattcctctcaacgcctgctcctggtccttaataagagcgatctactgtcccctgaaggcccaggcccaggccctgatttgcccccacacctgttgctatcttgcctgactggcgaaggattagacgggttgcttgaggcgctgaggaaggagctggccgctgtttgcggggacccctctaccgacccacccctgctaactcgggcacgacaccagcatcaccttcaaggttgtctggacgcgctgggacactacaagcagagcaaagatttagcactggccgcagaggcactgagggtggctagagggcaccttacacgtcttacaggcggtggcggaacagaagagattttagatatcatattccaggacttctgcgtcgggaaatag

SEQ ID NO: 225198 - protein, 632 aa, Artificial Sequence
  derived and/or modified sequence
MKALLLLVLPWLSPANYIDNVGNLHFLYSELCKGASHYGLTKDRKRRSQDGCPDGCASLTATAPSPEVSAAATISLMTDEPGLDNPAYVSSAEDGQPAISPVDSGRSNRTRARPFERSTIRSRSFKKINRALSVLRRTKSGSAVANHADQGRENSENTTAPEVFPRLYHLIPDGEITSIKINRVDPSESLSIRLVGGSETPLVHIIIQHIYRDGVIARDGRLLPGDIILKVNGMDISNVPHNYAVRLLRQPCQVLWLTVMREQKFRSRNNGQAPDAYRPRDDSFHVILNKSSPEEQLGIKLVRKVDEPGVFIFNVLDGGVAYRHGQLEENDRVLAINGHDLRYGSPESAAHLIQASERRVHLVVSRQVRQRSPDIFQEAGWNSNGSWSPGPGERSNTPKPLHPTITCHEKVVNIQKDPGESLGMTVAGGASHREWDLPIYVISVEPGGVISRDGRIKTGDILLNVDGVELTEVSRSEAVALLKRTSSSIVLKALEVKEYEPQEDCSSPAALDSNHNMAPPSDWSPSWVMWLELPRCLYNCKDIVLRRNTAGSLGFCIVGGYEEYNGNKPFFIKSIVEGTPAYNDGRIRCGDILLAVNGRSTSGMIHACLARLLKELKGRITLTIVSWPGTFL

SEQ ID NO: 225199 - DNA, 1899 bp, Artificial Sequence
  derived and/or modified sequence
atgaaagctttgctgctgctcgtgctcccttggctctcacctgctaattacattgataatgtagggaatcttcattttctctactctgagttgtgtaaaggagcctcacattatgggcttaccaaagacaggaaacggcggtcgcaggacggttgccctgatggctgcgcctccctaaccgctacagcccctagtcccgaggttagtgcagctgctaccatatctctgatgactgacgaaccggggctggacaatccggcttacgtctcatcggccgaagacggacagccggccatttcccctgtggattccggtagatccaaccggacgcgcgcacggccgtttgagcgcagcactataaggagcagatcttttaagaagataaaccgcgctttatcggtcctgcgtaggacaaagagtggaagcgccgtagccaaccacgccgaccaggggagagaaaattccgagaataccacagctcccgaagtatttcctcgcttgtatcatctcattcccgacggtgaaattacttccatcaagattaatagggtcgacccctcagaatcattaagcatccgcttggttggcggcagcgaaactccacttgttcacattattatacaacatatctatagggatggagtcatcgctagggatggcagactgctgcctggcgacatcattttaaaggttaatggaatggacatatctaacgtgccccataattacgccgtgagactgctgcggcagccatgccaggtgctgtggttaaccgtcatgcgagagcagaaattccgatctcggaataacggccaggccccagatgcctaccgcccgcgcgatgattccttccatgtcatcctcaataaatccagtccagaagaacagttgggtattaagctggtccgcaaagttgacgaacccggagtcttcatcttcaacgtcctggatggcggggtagcctacagacacggtcagcttgaggagaacgaccgtgtgctggctatcaatggacacgatctgcgatatggttctcccgagagtgccgcacacctcatacaggcctcagaacgcagggttcatttagtggtgtctaggcaggtgagacagcgcagccccgatattttccaagaggccgggtggaattcaaacggctcctggagcccaggcccaggcgagagatctaacaccccaaagcctctgcatcccacaatcacatgtcacgaaaaagttgttaacattcaaaaggacccaggggagagtctgggaatgaccgttgccgggggggcatcacatagagagtgggacctccccatttatgtgattagcgtcgagcctggaggcgtaatcagccgtgatggaaggatcaaaacaggggatatcctactgaacgtagacggggtcgagctcaccgaagtaagtcggtctgaggccgtggcacttctgaagaggacctccagctcaatcgtgctgaaggcgttggaggtgaaagagtacgaaccccaagaggactgttcctctcctgccgctctggactcaaatcacaacatggccccaccctcagattggtccccatcttgggtgatgtggcttgagctccctcgctgtctgtataattgtaaagacattgtgctgagacgtaacactgcagggagcctggggttctgtatagtaggtggatatgaggagtacaacggcaacaagcccttcttcatcaaatctatcgtcgagggaacacccgcctataatgatggccgcattcgctgtggggatattttactcgctgttaacggacgctcgacttctggtatgattcacgcatgtttagcccggctgctgaaggagctcaagggcagaataactctcacaatcgtaagttggcctggaacctttctctag

SEQ ID NO: 225200 - DNA, 1899 bp, Artificial Sequence
  derived and/or modified sequence
atgaaggccctgctgctgctggtgctgccctggctgagccctgccaactacatcgacaacgtgggcaacctgcacttcctgtacagcgagctgtgcaagggggccagccactacggcctgaccaaggacaggaagaggaggagccaggacggctgcccagatggctgtgccagcctgacagccacagcccccagccctgaggtgtctgctgctgccaccatcagcctgatgacagatgagcccggcctggacaacccagcctacgtgtcctctgcagaagatggccagcctgccatcagccctgtggacagcggccgcagcaacagaacccgggcccggccctttgagaggagcaccatccgcagccgctccttcaagaagatcaacagagccctgtctgtgctgcggaggaccaagagcggcagcgctgtggccaaccacgccgaccagggcagagaaaattctgagaacaccacagcccctgaggtgttcccccggctgtaccacctgatcccagatggagagatcaccagcatcaagatcaacagagtggaccccagcgagagcctgagcatccggctggtgggcggcagcgagacccccctggtgcacatcatcatccagcacatctacagagatggagtcatcgccagagatggccgcctgctgcccggggacatcatcctgaaggtgaatggcatggacatcagcaatgtgccccacaactatgctgtgcggctgctgcggcagccctgccaggtgctgtggctgactgtgatgagggagcagaagttccgcagcaggaacaacggccaggccccagatgcctaccggcccagagatgacagcttccacgtgatcctgaacaagagcagccctgaggagcagctgggcatcaagctggtgaggaaggtggatgagcccggggtcttcatcttcaacgtgctggatggaggagtggcctaccgccacggccagctggaggagaatgacagagtgctggccatcaatggacatgacctgcgctatggcagccctgagagcgctgcccacctgatccaggccagcgagcggcgggtgcacctggtggtgtcccggcaggtgcggcagaggagcccagacatcttccaggaggccggctggaacagcaatggctcctggagccctggccctggagagaggagcaacacccccaagcccctgcaccccaccatcacctgccacgagaaggtggtgaacatccagaaggaccccggggagagcctgggcatgacagtggccggcggggccagccaccgggagtgggacctgcccatctacgtgatctctgtggagcccggcggcgtcatcagcagagatggccgcatcaagacaggagacatcctgctgaatgtggatggagtggagctgacagaggtgagccgctctgaggccgtggccctgctgaagaggaccagcagcagcatcgtgctgaaggccctggaggtgaaggagtatgagccccaggaggactgcagcagccctgctgccctggacagcaaccacaacatggcccccccaagtgactggagccccagctgggtgatgtggctggagctgccccgctgcctgtacaactgcaaggacatcgtgctgcggaggaacacagctggcagcctgggcttctgcatcgtgggcggctatgaggagtacaatggaaacaagcccttcttcatcaagagcatcgtggagggcaccccagcctacaatgatggccgcatccgctgtggggacatcctgctggccgtgaatggccgcagcaccagcggcatgatccacgcctgcctggcccggctgctgaaggagctgaagggccgcatcaccctgaccatcgtgtcctggccaggcaccttcctgtag

SEQ ID NO: 225201 - DNA, 3757 bp, Artificial Sequence
  derived and/or modified sequence
cagcctaagctctctcgccaaccgtggtggctccttgcgttcctacatcctctcatctgagaatcagagagcataatcttcttacgggcccgtgatttattaacgtggcttaatctgaaggttctcagtcaaattctttgtgatctactgattgtgggggcatggcaaggtttgcttaaaggagcttggctggtttgggcccttgtagctgacagaaggtggccagggagaaggcagcacactgctcggagaatgaaggcgcttctgttgctggtcttgccttggctcagtcctgctaactacattgacaatgtgggcaacctgcacttcctgtattcagaactctgtaaaggtgcctcccactacggcctgaccaaagataggaagaggcgctcacaagatggctgtccagacggctgtgcgagcctcacagccacggctccctccccagaggtttctgcagctgccaccatctccttaatgacagacgagcctggcctagacaaccctgcctacgtgtcctcggcagaggacgggcagccagcaatcagcccagtggactctggccggagcaaccgaactagggcacggccctttgagagatccactattagaagcagatcatttaaaaaaataaatcgagctttgagtgttcttcgaaggacaaagagcgggagtgcagttgccaaccatgccgaccagggcagggaaaattctgaaaacaccactgcccctgaagtctttccaaggttgtaccacctgattccagatggtgaaattaccagcatcaagatcaatcgagtagatcccagtgaaagcctctctattaggctggtgggaggtagcgaaaccccactggtccatatcattatccaacacatttatcgtgatggggtgatcgccagagacggccggctactgccaggagacatcattctaaaggtcaacgggatggacatcagcaatgtccctcacaactacgctgtgcgtctcctgcggcagccctgccaggtgctgtggctgactgtgatgcgtgaacagaagttccgcagcaggaacaatggacaggccccggatgcctacagaccccgagatgacagctttcatgtgattctcaacaaaagtagccccgaggagcagcttggaataaaactggtgcgcaaggtggatgagcctggggttttcatcttcaatgtgctggatggcggtgtggcatatcgacatggtcagcttgaggagaatgaccgtgtgttagccatcaatggacatgatcttcgatatggcagcccagaaagtgcggctcatctgattcaggccagtgaaagacgtgttcacctcgtcgtgtcccgccaggttcggcagcggagccctgacatctttcaggaagccggctggaacagcaatggcagctggtccccagggccaggggagaggagcaacactcccaagcccctccatcctacaattacttgtcatgagaaggtggtaaatatccaaaaagaccccggtgaatctctcggcatgaccgtcgcagggggagcatcacatagagaatgggatttgcctatctatgtcatcagtgttgagcccggaggagtcataagcagagatggaagaataaaaacaggtgacattttgttgaatgtggatggggtcgaactgacagaggtcagccggagtgaggcagtggcattattgaaaagaacatcatcctcgatagtactcaaagctttggaagtcaaagagtatgagccccaggaagactgcagcagcccagcagccctggactccaaccacaacatggccccacccagtgactggtccccatcctgggtcatgtggctggaattaccacggtgcttgtataactgtaaagatattgtattacgaagaaacacagctggaagtctgggcttctgcattgtaggaggttatgaagaatacaatggaaacaaaccttttttcatcaaatccattgttgaaggaacaccagcatacaatgatggaagaattagatgtggtgatattcttcttgctgtcaatggtagaagtacatcaggaatgatacatgcttgcttggcaagactgctgaaagaacttaaaggaagaattactctaactattgtttcttggcctggcacttttttatagaatcaatgatgggtcagaggaaaacagaaaaatcacaaataggctaagaagttgaaacactatatttatcttgtcagtttttatatttaaagaaagaatacattgtaaaaatgtcaggaaaagtatgatcatctaatgaaagccagttacacctcagaaaatatgattccaaaaaaattaaaactactagttttttttcagtgtggaggatttctcattactctacaacattgtttatattttttctattcaataaaaagccctaaaacaactaaaatgatttgtataccccactgaattcaagctgatttaaatttaaaatttggtatatgctgaagtctgccaagggtacattatggccatttttaatttacagctaaaatattttttaaaatgcattgctgagaaacgttgctttcatcaaacaagaataaatatttttcagaagttatagttgtcttttagtatgtgatactaattaagattacttttgtattatcactatttaaaagatcctagtaatttattctttcaaataccatgttatttgttaccatcaccgatgaatacctcctaggcttatccctaaaaatgctcgctcagagaattaattataaacttgttttgtttttagtaagaaatggctaaagctctttttttccacaatcgttagtaactgtataaaaactcatgctgctccaccagtgggccttggaaaatgcatcaagaaggccaaaccagcttgaccctggctcacagacatggtcatgaggcgatttaaatttgtgccacaatgaagagtgtgtgtacacatgcctcctagaaactacactatgggtaattaattaatttatttcatagaggccacccagatgccttataggttttattaatttggatatgaaagtgtaccccatttggtttcaccaggaacccaaatttagaatattgaaaagccatcaaaaagttgtgatatcaaaaatgtatgagtctcttaatatactaagcaagagtgtcacagcagtaatgataaagactagttttaatctcaagccttagaggggccctttgttgccttttgtgatgcagcctcttaagagagtggtgtttgattaacaaaaaaactgtggcccaagtggaacccttgaccttttctcagataatctgtgtatgtacacagctaacacagctctttagattccctgttaagtgactcattcacattcctttcttggatataaagtcattgctgtctttttatttttgaaatagtacaagacaaagatttttaacttaacatgaaaaattcactcttttattttggaaaaaaagttaacttttcatactaacaaacagaacaagatttaaggtaaatttcttaaacattatccagaaaaataacaagatttatagtatctacttctggtactaatatacacaaaaggccaaaaccatgcctattctgcaggtgtagcttcggtgctctcctgttcaggggcaggctcactgcccgcttcttttccttctttgcttcttttagattttttgtgtttgtgtctcctgtgactatctccttcttcactttcatggcgacgtctactattac

SEQ ID NO: 225202 - DNA, 1899 bp, Artificial Sequence
  derived and/or modified sequence
atgaaggccctgctgctgctggtgctgccctggctgagccccgccaactacattgacaatgttgggaatcttcacttcctctattccgagctctgcaaaggtgctagccattatggattaaccaaagatcggaagcggagatcccaggacgggtgccccgatggatgtgcctccctcactgcgactgccccaagtcctgaggtttcagccgccgctacaataagtctcatgaccgatgagccagggctggataaccctgcctacgtgtcatcagcagaggacggccagccggcaatctctccggtggattctggtcggtctaaccgaactcgggcgcgtccatttgagaggtccaccatacgctcacgctcattcaagaagataaaccgagcactcagtgtacttagacgcactaaatctggctccgctgtggcgaaccacgccgatcagggccgtgaaaactccgagaatactactgcacctgaggtgtttcctcggctttatcatttaatccccgatggcgaaatcacctcaataaagattaaccgtgtagatccatccgagagtctcagcatccggctggtgggcggttctgagactccattagtgcacatcattattcagcacatttatcgggatggtgtgatcgcccgcgacgggcggctgcttcccggggatatcatactgaaagtaaacggcatggatatctccaacgttccccacaattatgccgtaagactgttgcgccagccctgccaagtgctttggttaacggtaatgcgggaacaaaagttcagatccaggaataacgggcaggccccagacgcctaccggccgagagatgacagctttcacgtcattctgaacaaatctagtcctgaagagcagttgggaataaagctggtgaggaaggtagacgaaccgggtgtgttcatatttaacgtccttgacggtggcgtcgcgtatcgccacgggcaactggaagagaatgatcgcgtactcgccatcaacgggcacgaccttcgatacgggtcccctgagagcgccgcccacctaatccaagctagcgagaggcgggtccatctggtcgtgagccggcaggttcgccagaggtcacctgatatttttcaggaggcaggctggaacagcaacggctcttggtcccccggcccgggcgagcgaagcaatacaccgaaaccactccaccccaccattacttgtcacgaaaaggtggtgaacatccagaaggatccaggcgagtccctgggaatgactgttgctggcggagcaagccatcgagaatgggacctgcctatatatgtaatctcagtcgagcccggcggggtaatctctcgcgatggacgtattaagaccggggatatcctgctgaacgtcgacggagtggagttaacggaggtgagtcgatccgaagctgtggcactgctcaagagaacatcgtctagtatcgtgctgaaggcgcttgaggtgaaggaatacgaaccccaggaggactgcagcagcccggcagccctggattccaaccacaacatggctcctccgtccgactggtctccatcctgggttatgtggctcgaactccctcgctgtttatacaactgtaaagatatagtgctgcgccgcaacacagcagggtcactgggcttttgcattgtgggaggttacgaagagtataatggaaacaaacctttttttatcaagtctatcgtcgagggcacaccagcatacaatgacggccgtatccgatgtggagacattctcctggccgtcaatggacgcagtacatctggaatgattcacgcctgcctggcccggctgcttaaagagctgaagggccgcatcacgcttacaatagtttcttggcctgggacattcctgtag

SEQ ID NO: 225203 - DNA, 1899 bp, Artificial Sequence
  derived and/or modified sequence
atgaaagccctcctgttacttgtcttaccttggcttagcccagcaaattatattgacaacgtggggaatctgcattttctttacagtgagctatgcaagggggcaagccactatggactaacaaaagacaggaaaagacgcagtcaagatggttgcccagacggttgtgccagcctgaccgcgactgctccttcgcccgaagtgagtgcagcagccacaatctctctcatgaccgacgagccaggcctggataatccggcttacgttagtagtgcagaggatggccagccagctatttctcccgttgattccggacggagcaaccggacacgggctagaccctttgaaaggtcgactatcagaagcaggtcatttaagaagatcaatagagccctgagtgtactcagaagaacaaaatccggctccgccgtggcaaaccacgctgaccagggacgggaaaacagtgagaacaccacagctccagaagtattcccccgactgtaccacctgatcccggacggggaaattacttcaatcaagatcaaccgcgttgacccttccgagtctctgtccattcgcttagtgggcggatccgaaacacctctggtccacatcatcatccagcatatctaccgcgacggagtcatagccagggacggccgacttctgcctggagatattattctaaaggtcaatggaatggacatctctaacgtgcctcacaactacgcagttagactgctgcggcagccatgccaagtgctttggcttacagttatgagagagcagaaattccggtccaggaataatggccaagccccagatgcctatagacctcgggacgacagcttccacgtgatcctcaacaagtcgagccccgaagagcagctgggaatcaagctcgtccgaaaggtcgacgagcctggcgttttcatatttaatgttctcgacgggggagtcgcatacaggcatggccaattggaggagaacgaccgggtgttggccatcaatggccacgatcttagatacggctcaccagagagtgccgcacatttgattcaagcttccgaacggcgtgttcacctggtggtctccagacaagtgagacagcgatcacccgacatctttcaagaggccggatggaacagtaatggcagctggtctcccggtcctggtgagcggtcaaataccccaaagcctctgcaccccaccattacctgccacgaaaaggttgtgaacatccagaaagatcccggagagtcccttggcatgactgtcgccggtggcgcttcacatcgcgaatgggacctgcccatctacgtcatttccgtcgaaccgggaggtgtaatctctagagacgggcgaattaaaactggcgacatcttgcttaacgttgacggcgtggagttaacagaagtgagtaggtccgaggcggttgccttgcttaaacggactagttcatccatcgtgctaaaggctctggaggtcaaggagtatgaaccacaggaggattgttccagtccggcagcccttgactccaaccacaatatggcccctccaagcgattggtcccctagctgggtaatgtggctcgaacttcccaggtgcctgtataactgtaaagacattgtgctaagaaggaacactgcgggtagcctcggattctgtattgtggggggatacgaggagtataacggcaacaaaccctttttcattaagtctattgtcgaaggcacccccgcatacaatgatgggagaatacggtgtggagatattctgctcgcagtgaacggccgaagcacatccggtatgatccacgcctgtctggcaagactgctaaaagagctgaagggacgaataaccctgaccatagtctcatggccagggacattcctgtag

SEQ ID NO: 225204 - DNA, 1899 bp, Artificial Sequence
  derived and/or modified sequence
atgaaggccctgctgctgctggtgctgccctggctgagccccgccaactacatcgacaacgtgggcaacctgcacttcctgtacagcgagctgtgcaagggcgccagccactacggcctgaccaaggacagaaagagaagaagccaggacggctgccccgacggctgcgccagcctgaccgccaccgcccccagccccgaggtgagcgccgccgccaccatcagcctgatgaccgacgagcccggcctggacaaccccgcctacgtgagcagcgccgaggacggccagcccgccatcagccccgtggacagcggcagaagcaacagaaccagagccagacccttcgagagaagcaccatcagaagcagaagcttcaagaagatcaacagagccctgagcgtgctgagaagaaccaagagcggcagcgccgtggccaaccacgccgaccagggcagagagaacagcgagaacaccaccgcccccgaggtgttccccagactgtaccacctgatccccgacggcgagatcaccagcatcaagatcaacagagtggaccccagcgagagcctgagcatcagactggtgggcggcagcgagacccccctggtgcacatcatcatccagcacatctacagagacggcgtgatcgccagagacggcagactgctgcccggcgacatcatcctgaaggtgaacggcatggacatcagcaacgtgccccacaactacgccgtgagactgctgagacagccctgccaggtgctgtggctgaccgtgatgagagagcagaagttcagaagcagaaacaacggccaggcccccgacgcctacagacccagagacgacagcttccacgtgatcctgaacaagagcagccccgaggagcagctgggcatcaagctggtgagaaaggtggacgagcccggcgtgttcatcttcaacgtgctggacggcggcgtggcctacagacacggccagctggaggagaacgacagagtgctggccatcaacggccacgacctgagatacggcagccccgagagcgccgcccacctgatccaggccagcgagagaagagtgcacctggtggtgagcagacaggtgagacagagaagccccgacatcttccaggaggccggctggaacagcaacggcagctggagccccggccccggcgagagaagcaacacccccaagcccctgcaccccaccatcacctgccacgagaaggtggtgaacatccagaaggaccccggcgagagcctgggcatgaccgtggccggcggcgccagccacagagagtgggacctgcccatctacgtgatcagcgtggagcccggcggcgtgatcagcagagacggcagaatcaagaccggcgacatcctgctgaacgtggacggcgtggagctgaccgaggtgagcagaagcgaggccgtggccctgctgaagagaaccagcagcagcatcgtgctgaaggccctggaggtgaaggagtacgagccccaggaggactgcagcagccccgccgccctggacagcaaccacaacatggccccccccagcgactggagccccagctgggtgatgtggctggagctgcccagatgcctgtacaactgcaaggacatcgtgctgagaagaaacaccgccggcagcctgggcttctgcatcgtgggcggctacgaggagtacaacggcaacaagcccttcttcatcaagagcatcgtggagggcacccccgcctacaacgacggcagaatcagatgcggcgacatcctgctggccgtgaacggcagaagcaccagcggcatgatccacgcctgcctggccagactgctgaaggagctgaagggcagaatcaccctgaccatcgtgagctggcccggcaccttcctgtag

SEQ ID NO: 225205 - protein, 240 aa, Artificial Sequence
  derived and/or modified sequence
MYLRRAVSKTLALPLRAPPNPAPLGKDASLRRMSSNRFPGSSGSNMIYYLVVGVTVSAGGYYAYKTVTSDQAKHTEHKTNLKEKTKAEIHPFQGEKENVAETEKASSEAPEELIVEAEVVDAEESPSATVVVIKEASACPGHVEAAPETTAVSAETGPEVTDAAARETTEVNPETTPEVTNAALDEAVTIDNDKDTTKNETSDEYAELEEENSPAESESSAGDDLQEEASVGSEAASAQG

SEQ ID NO: 225206 - DNA, 1339 bp, Artificial Sequence
  derived and/or modified sequence
gttaggggaggatggtgaggactacaaaggtctccccacctcccgggggccgcggaggcggggctggatgaaggtcgacgtgcctcctccgggcggggcgctgccaggctctcagcctctctgtggaagggcagcctgcgcctgggtaccgaggctgctgcgcggcggacagcgggcgcgatgtatctccgcagggcggtctccaagactctggcgctgccgctgagggcgccccccaaccccgcgccgctcggaaaggacgcatctctgcgccggatgtcatctaacagattccctggatcatctggatcaaatatgatttattatctggttgtaggcgtcacagtcagtgctggtggatattatgcttacaagacagtcacatcagaccaagccaaacacacagaacataaaacaaatttgaaagaaaaaacaaaagcagagatacatccatttcaaggtgaaaaggagaatgttgcggaaactgagaaagcaagttcagaagccccagaagaacttatagtggaagctgaggtggtagatgctgaagaaagtcccagtgctacagttgtggtcataaaagaggcatctgcctgtccaggtcacgtggaggctgctccggagaccacagcagtcagtgctgaaaccgggccagaggtcacagatgcagcggcgagggaaaccacggaagtaaaccctgaaacaaccccagaggttacaaatgctgccctggatgaagctgtcaccatcgataatgataaagatacaacaaagaacgaaacctctgatgaatatgctgaactagaagaagaaaattctccagctgagtcagagtcctctgctggagatgatttacaggaggaagccagtgttggctctgaggctgcttcggctcaaggctaatctccagccggtagacatttcagcaacaaatgccatagggtgtctgataagtgcttttgtgtttttagtacacttagtttaaaaaaaaaaagacttattttctagaaaacgttaatgggtcttgaagatttttggcatccactgatagattttaggactgagagacttgagattgtacatttcttactactcttctactgtctgagatcagaatatgacattgcagtaaagagcttaaatagtttcatctttggtttttttttctagacacttttcttttatcccagtcatctctgaatttacattttatattaaagaaattgagctatccatacaacctgtatttactttaatttcactatgctttcagcttactttattgtatgatatgtaggtctaaaatatagtttgagtcaaataaaattagaaaagcttt

SEQ ID NO: 225207 - DNA, 723 bp, Artificial Sequence
  derived and/or modified sequence
atgtacctgagaagagccgtgagcaagaccctggccctgcccctgagagccccccccaaccccgcccccctgggcaaggacgccagcctgagaagaatgagcagcaacagattccccggcagcagcggcagcaacatgatctactacctggtggtgggcgtgaccgtgagcgccggcggctactacgcctacaagaccgtgaccagcgaccaggccaagcacaccgagcacaagaccaacctgaaggagaagaccaaggccgagatccaccccttccagggcgagaaggagaacgtggccgagaccgagaaggccagcagcgaggcccccgaggagctgatcgtggaggccgaggtggtggacgccgaggagagccccagcgccaccgtggtggtgatcaaggaggccagcgcctgccccggccacgtggaggccgcccccgagaccaccgccgtgagcgccgagaccggccccgaggtgaccgacgccgccgccagagagaccaccgaggtgaaccccgagaccacccccgaggtgaccaacgccgccctggacgaggccgtgaccatcgacaacgacaaggacaccaccaagaacgagaccagcgacgagtacgccgagctggaggaggagaacagccccgccgagagcgagagcagcgccggcgacgacctgcaggaggaggccagcgtgggcagcgaggccgccagcgcccagggctag

SEQ ID NO: 225208 - DNA, 723 bp, Artificial Sequence
  derived and/or modified sequence
atgtaccttaggcgcgccgtaagtaaaactttagcactgccacttcgagccccccctaacccagccccgctcggcaaggatgcgagcctaaggagaatgagttccaataggtttcccggatcctcaggaagtaacatgatctactacttggtcgttggcgttaccgtcagtgctggcggatattacgcttataagactgtgacatcagatcaggccaaacacaccgagcacaagaccaatctgaaggagaaaacaaaggcagaaatccatccctttcagggagagaaggaaaacgtcgccgagacggaaaaggcttcgagcgaggccccagaggagttgatagtagaggctgaagtggtcgatgcagaggagtccccatcagctacagtggttgttattaaggaagctagtgcttgccctggacacgtggaggcagccccagagacaaccgccgtgtcagccgaaacaggcccggaggtgacagacgccgccgcccgggagactaccgaagtcaacccagagacaactcctgaagtgaccaacgccgcactggatgaggcagtgacgatcgataacgacaaagacaccaccaaaaatgagaccagtgatgagtacgccgaattggaggaagagaattcaccagctgagagcgagtcaagcgctggcgacgacctccaggaagaggctagcgtggggagtgaggccgcctccgctcagggctag

SEQ ID NO: 225209 - DNA, 723 bp, Artificial Sequence
  derived and/or modified sequence
atgtacctgcggcgggctgtgtccaagaccctggccctgcccctgcgggccccacccaacccagcccccctgggcaaggatgccagcctgcggaggatgagcagcaaccgcttccctggcagcagcggcagcaacatgatctactacctggtggtgggcgtgacagtgtctgctgggggctactatgcctacaagacagtgaccagtgaccaggccaagcacacagagcacaagaccaacctgaaggagaagaccaaggccgagatccaccccttccagggcgagaaggaaaatgtggccgagacagagaaggccagcagcgaggcccctgaggagctgattgtggaggccgaggtggtggatgctgaggagagccccagcgccaccgtggtggtgatcaaggaggccagcgcctgccccggccacgtggaggccgcccctgagaccacagctgtgtctgctgagaccggccctgaggtgacagatgctgctgcccgggagaccacagaggtgaaccctgagaccaccccagaggtgaccaatgctgccctggatgaagctgtgaccatcgacaatgacaaggacaccaccaagaatgagaccagtgatgaatatgcagagctggaggaggagaacagccctgctgagagcgagagcagcgctggagatgacctgcaggaggaggcctctgtgggcagcgaggccgccagcgcccagggctag

SEQ ID NO: 225210 - DNA, 723 bp, Artificial Sequence
  derived and/or modified sequence
atgtacctgcggcgggccgtgagcaagaccctggccctgcccctgcgggccccgccaaaccctgcaccccttgggaaggacgcctctctcagaagaatgagtagcaaccgctttcccgggagtagtggttccaatatgatatactatttggtagtgggtgtcaccgtctctgccgggggatactatgcctataaaactgtgacatcagaccaggccaagcacacagagcacaagactaacctgaaggagaagacgaaagccgagattcacccttttcagggagagaaggaaaatgtcgctgaaacagaaaaggctagctccgaggcccccgaggagctcattgtcgaggcagaggtggtcgacgcggaagagtctccctccgccactgtggttgtgatcaaggaggccagtgcatgccccggtcacgtagaggccgcccctgaaacaaccgcggtctccgctgagaccgggcccgaggttaccgatgccgctgcaagggagacgacagaggtcaacccggagaccactcccgaagttaccaacgcggcccttgacgaagccgttacaattgacaatgataaggacaccacaaagaatgagacatcggatgaatatgccgaactggaggaggagaatagtcccgcagagtctgagtccagcgccggagatgatctccaggaggaggcttccgtaggctcagaagcagcctcggcccaggggtag

SEQ ID NO: 225211 - DNA, 723 bp, Artificial Sequence
  derived and/or modified sequence
atgtacttacgcagggccgtgtcaaaaacactggctctgccattgagagctccacccaacccagccccacttggaaaggatgcctctctgcgacggatgtcttcaaacaggtttcccggttcctcgggctccaatatgatttattatctggtcgtgggcgtcacggtttccgccggaggatattatgcttacaagacagttacttctgatcaggcaaagcacaccgagcacaaaacaaatcttaaagagaaaacaaaagccgagatccacccttttcagggagagaaagaaaacgtggcagagaccgagaaggccagctcggaagccccagaggagcttatcgtggaagcagaggtggtggacgctgaggaatcccccagcgcaaccgttgtcgtcatcaaggaagcatcagcgtgccctggccacgtcgaagccgcaccggagaccactgccgtgtccgcggagactggcccagaggtgacagacgcagcagcacgcgagaccacagaggttaatcctgaaacaacccccgaagtgaccaacgccgctctggacgaggctgtgaccattgataacgataaagataccactaaaaatgaaacctccgatgagtatgcggagctggaagaggaaaattcacccgcagaaagcgaatccagtgccggagatgatctgcaggaggaagcctccgtaggctccgaggccgctagtgcgcaggggtag

SEQ ID NO: 225212 - DNA, 628 bp, Artificial Sequence
  derived and/or modified sequence
gagctgggccacgcaagatggcgccgtccgccttgctgcgtcccctttcccggctgctggcccccgccaggctcccgagcggcccttcagtgcgatcaaagttctacgtgcgagagccgccgaatgccaaacctgactggctgaaagttgggttcaccttgggcaccactgtcttcttgtggatctatctcatcaaacaacacaatgaagatattttagagtacaaaagaagaaatgggctggaataaacttttgaaacactaatgtacatctctgcgccggatgtcatctaacagattccctggatcatctggatcaaatatgatttattatctggttgtaggcgtcacagtcagtgctggtggatattatgcttacaagacagtcacatcagaccaagccaaacacacagaacataaaacaaatttgaaagaaaaaacaaaagcagagatacatccatttcaaggtgaaaaggagaatgttgcggaaactgagaaagcaagttcagaagccccagaagaacttatagtggaagctgaggtggtagatgctgaagaaagtcccagtgctacagttgtggtcataaaagaggcatctgcctgtccaggtcacgtggaggctgctccgg

SEQ ID NO: 225213 - protein, 118 aa, Artificial Sequence
  derived and/or modified sequence
MSCVHYKFSSKLNYDTVTFDGLHISLCDLKKQIMGREKLKAADCDLQITNAQTKEEYTDDNALIPKNSSVIVRRIPIGGVKSTSKTYVISRTEPAMATTKAVCKNTISHFFYTLLLPL

SEQ ID NO: 225214 - DNA, 357 bp, Artificial Sequence
  derived and/or modified sequence
atgtcatgcgttcattataagttcagtagtaaactgaactacgatactgtaactttcgacggacttcacatctcattatgtgatcttaaaaagcaaatcatggggcgggaaaagctgaaagcggcggactgtgatttacaaatcaccaacgcccaaaccaaggaagaatatacggatgacaatgctctgatcccaaagaacagtagcgtgattgtgcgtagaatccccattggcggcgtgaagtctaccagcaaaacttatgttatcagtcggacagagccagcaatggcaactaccaaagctgtgtgcaagaatacaatctcacacttcttttatactctcctcctgcccctctag

SEQ ID NO: 225215 - DNA, 357 bp, Artificial Sequence
  derived and/or modified sequence
atgagctgtgtgcactacaagttcagcagcaagctgaactatgacacagtgacctttgatggcctgcacatcagcctgtgtgacctgaagaagcagatcatgggccgggagaagctgaaggctgctgactgtgacctgcagatcaccaatgcccagaccaaggaggagtacacagatgacaatgccctgatccccaagaacagctctgtgattgtgcggcgcatccccatcggcggcgtgaagagcaccagcaagacctacgtgatcagcaggacagagcccgccatggccaccaccaaggctgtgtgcaagaacaccatcagccacttcttctacaccctgctgctgcccctgtag

SEQ ID NO: 225216 - DNA, 357 bp, Artificial Sequence
  derived and/or modified sequence
atgagctgcgtgcactacaagttcagcagcaagctgaactacgacacggtcacattcgatgggctccacattagcttatgtgacttgaaaaagcaaatcatgggccgggaaaaattaaaggccgccgattgcgacctccaaatcactaatgcccagaccaaggaggagtacacagacgataatgcgctgatcccaaagaattcctccgtgattgtgagacgaatcccaattggcggtgtgaaatccacctccaaaacctacgtcatttcaaggaccgagcctgcgatggccaccaccaaggctgtgtgtaaaaacaccatcagtcacttcttctatacactcttgctcccgctgtag

SEQ ID NO: 225217 - DNA, 357 bp, Artificial Sequence
  derived and/or modified sequence
atgagttgtgtccactacaaattttcttccaaactgaattacgatacagtgacgttcgacggtctccatatttctctgtgtgatctaaagaaacagattatgggtagagaaaaactaaaagctgctgactgtgatctccagattacgaacgcacagacgaaagaagagtatactgacgataatgcactaatcccaaagaactcatcagtgatcgtcagaaggatccccatcggtggggtgaagagtacctcaaagacatatgtgatatctaggactgagccagccatggcgacgacaaaagcggtgtgcaagaatacaatcagccattttttttacacactccttcttccgctgtag

SEQ ID NO: 225218 - DNA, 1762 bp, Artificial Sequence
  derived and/or modified sequence
gccaggccgcgtccgccatagtacctggcttggaggtgtcgccgccgctcggtgagagcccccgagcggcagggggccaacacaaaaagggagccggagaagccctagccgctgcccagcagcttgcgggcgtgttctcgcggttccgggcctcaaggcgacggaaacgaaaggcgagcgaagcgcggaggatccggcgagaagaagcgtcagggagcctcggcggtgtccccggggtccgccgaagccacccggccgccggctggggcccggggtggtgaggaagtgctccgaggcctcgccgaggcctagcgccggctttgtgtccgaggcggcggcggcggcggggggaggcggagccgggggcggcctgcgggaaggcctctcctccgccgaccgcgcgttttcggcctaggccgtggggccgctcgtggcctccggggagcaggcgccaggggtttgtgtgcggtgggggcctgggcctgggcctggggaagctgacgccggtcgtccggaagccaggaggaggcgtgaggccgctcgtggactccgggcctaggccctctcccctcaaccttctcccggggcctgggtcaccccaatccacggagagagagacccgccgggaggtgcggccgcgctatggacccctgaccccgtggggtcgctcggactcttaacgtgtggactgaccgctactgactgcaccgccaatccccccgtctctgccggccccttagcatgagcgagggggacccagccgggtgacattgtgcccgttggcggattctcgatttcccctcttccccgtcctcgtcctcctcctcccccatgaagtgattctgagtatcggggggtctctggattattgttctgacgaacccctgcttgtggttggggggtatttaatctgaggccttagggtccttcggtgtctttgagtgttttgtgtgtacatattttgctcttaaagtttataaatatacgtatattgagagtgtccacgtctcctcgctgaaccttaggaatcccttggcaccatgtcctgtgtgcattataaattttcctctaaactcaactatgataccgtcacctttgatgggctccacatctccctctgcgacttaaagaagcagattatggggagagagaagctgaaagctgccgactgcgacctgcagatcaccaatgcgcagacgaaagaagaatatactgatgataatgctctgattcctaagaattcttctgtaattgttagaagaattcctattggaggtgttaaatctacaagcaagacatatgttataagtcgaactgaaccagcgatggcaactacaaaagcagtatgtaaaaacacaatctcacactttttctacacattgcttttacctttataatgtagcagtgaagtaaatcattttagaacttaatatccaactgatcatagtacatattgtaaataaaatgtattttgatgacagctcagttgaatatggataatatgtggcatcacttgcacacttattttgtagaaatgggtaatttgtgcccgtaacactgtttcatattaaatatgatagcattatccctgtatgacactgtgttgtacagttaatgtatgatcctttttagatcgtttaggttttacactaaggaacatgatgacatgttctacatttgtctgtctatagttagtattttgtatgtatgtacaggctgttgtgtgctttttgtttcttgcaataaaaaatgtttggagtgt

SEQ ID NO: 225219 - DNA, 357 bp, Artificial Sequence
  derived and/or modified sequence
atgagctgcgtgcactacaagttcagcagcaagctgaactacgacaccgtgaccttcgacggcctgcacatcagcctgtgcgacctgaagaagcagatcatgggcagagagaagctgaaggccgccgactgcgacctgcagatcaccaacgcccagaccaaggaggagtacaccgacgacaacgccctgatccccaagaacagcagcgtgatcgtgagaagaatccccatcggcggcgtgaagagcaccagcaagacctacgtgatcagcagaaccgagcccgccatggccaccaccaaggccgtgtgcaagaacaccatcagccacttcttctacaccctgctgctgcccctgtag

SEQ ID NO: 225220 - protein, 212 aa, Artificial Sequence
  derived and/or modified sequence
MEAKTLGTVTPRKPVLSVSARKIKDNAADWHNLILKWETLNDAGFTTANNIANLKISLLNKDKIELDSSSPASKENEEKVCLEYNEELEKLCEELQATLDGLTKIQVKMEKLSSTTKGICELENYHYGEESKRPPLFHTWPTTHFYEVSHKLLEMYRKELLLKRTVAKELAHTGDPDLTLSYLSMWLHQPYVESDSRLHLESMLLETGHRAL

SEQ ID NO: 225221 - DNA, 639 bp, Artificial Sequence
  derived and/or modified sequence
atggaggccaagacattggggacagtcactcccagaaagcccgtgcttagtgtgagcgcacggaagataaaagacaatgccgccgactggcacaatctgattttaaaatgggagacgctgaacgatgccggcttcactactgcgaacaatattgcgaatcttaaaatctcattgctgaataaagacaaaatagagctggacagctctagtcccgccagtaaagagaatgaagaaaaggtgtgtctggagtataatgaggagctcgagaagctttgcgaagaactgcaagctaccttagatggcctgaccaaaatccaagtgaagatggaaaagctttcaagtacaactaaggggatctgtgagctcgaaaactatcactatggcgaggagagtaaacggccaccacttttccatacatggcccaccacacatttctatgaagtcagccacaaactgctggaaatgtacagaaaagaactcctgcttaaacgtaccgtagccaaagaactagcacacaccggtgatcccgacctgacactgtcctatctctcaatgtggcttcaccagccctacgtggagtccgactcccggctgcacctggagagcatgctcttggaaaccgggcacagagccctgtag

SEQ ID NO: 225222 - DNA, 639 bp, Artificial Sequence
  derived and/or modified sequence
atggaagcaaagaccctggggacagtgacgccaagaaagccggtcctcagtgtcagcgcccgaaagattaaggataatgccgccgactggcataatctgatactcaaatgggagaccttaaacgacgctgggttcaccaccgccaacaatatcgccaacttgaaaatttcattactcaacaaagataaaatcgaactcgactcctcatcacctgcgtccaaggagaacgaagaaaaggtttgcctcgagtataatgaagaactggaaaagctgtgtgaggaactccaggctacactggacggtctcaccaaaatccaggtgaaaatggagaaactgagctccactaccaaaggtatttgtgaactcgaaaattaccattacggcgaggagagcaagcggcctcctcttttccacacatggccaacaacgcacttttacgaggtttctcacaagctgctcgagatgtatcgcaaggaactattgttgaaacgcactgtcgcaaaagaactggcacatacgggtgatcccgatctgactctgtcgtaccttagcatgtggctccatcaaccctatgttgagtcagattctcgattacacttggaatccatgcttttggagaccgggcacagggcgctgtag

SEQ ID NO: 225223 - DNA, 639 bp, Artificial Sequence
  derived and/or modified sequence
atggaggccaagaccctgggcaccgtgacccccaggaagcctgtgctgtctgtgtctgccaggaagatcaaggacaatgctgctgactggcacaacctgatcctgaagtgggagaccctgaatgatgctggcttcaccacagccaacaacatcgccaacctgaagatcagcctgctgaacaaggacaagattgagctggacagcagcagccctgccagcaaagaaaatgaggagaaggtgtgcctggagtacaatgaggagctggagaagctgtgtgaggagctgcaggccaccctggatggcctgaccaagatccaggtgaagatggagaagctgagcagcaccaccaagggcatctgtgagctggagaactaccactatggagaggagagcaagaggcctcctctcttccacacctggcccaccacccacttctatgaggtgagccacaagctgctggagatgtacaggaaggagctgctgctgaagaggacagtggccaaggagctggcccacactggagaccctgacctgaccctgagctacctgtccatgtggctgcaccagccctacgtggagagtgacagccggctgcacctggagagcatgctgctggagaccggccaccgggccctgtag

SEQ ID NO: 225224 - DNA, 639 bp, Artificial Sequence
  derived and/or modified sequence
atggaggccaagaccctgggcaccgtgaccccccggaagcccgtgctctcagtaagcgccagaaagatcaaggacaacgctgctgattggcacaacctgattttaaaatgggagacgctgaacgatgctggcttcaccacagctaacaatatcgcaaatttgaaaatctctctactgaataaggataagatagaattagacagctcctcgccggccagcaaggagaacgaagagaaggtgtgcctggagtataatgaagagttggagaagctttgtgaagagttgcaagccaccctggacggtctcacgaagatccaggttaaaatggaaaaactgtcctccacgaccaagggaatatgcgaattggagaattatcactatggggaggagtcgaagcgccctccgctgttccacacatggcccacaacacatttctacgaagtgagtcacaagctgctggagatgtacaggaaggaacttctactgaagcgcacggtggccaaggagttggcccacacaggggacccagacctaaccctttcttatctgagtatgtggctccatcaaccatacgtggagagtgattcccgcctgcatctggagtctatgctcctggagacaggacacagggcgctctag

SEQ ID NO: 225225 - DNA, 639 bp, Artificial Sequence
  derived and/or modified sequence
atggaggccaagaccctgggcaccgtgaccccccggaagcccgtgctgagcgtaagcgcacgaaaaatcaaggacaacgccgctgactggcacaatctgatcctgaaatgggagaccctcaatgacgcaggatttacgacagctaataatatcgcaaacctgaaaattagccttcttaacaaggacaaaattgagctggattcctcatccccagcaagtaaggagaacgaagagaaggtctgcctggagtacaacgaggaactcgagaagttgtgtgaggaattacaggccaccttggatggactgactaaaatccaggtgaaaatggaaaagctctcatccacgaccaaaggaatatgtgagctcgagaactatcactacggagaggagagtaagagacctccactatttcacacatggcctacgacccacttctacgaggtttctcataagttgttagaaatgtaccgcaaggagttgctgttgaaaagaacggtggccaaggaactcgcccacactggcgacccagatttgacccttagctacctgtctatgtggcttcaccaaccgtatgtcgagtcagatagcaggctgcacttggagagtatgctgctcgaaacaggtcacagggccctgtag

SEQ ID NO: 225226 - DNA, 639 bp, Artificial Sequence
  derived and/or modified sequence
atggaggcgaagacactgggcactgtgacccccagaaaacctgttctgtctgtgtctgctcgcaaaatcaaagacaacgctgctgattggcacaacttaatcttgaaatgggagacactcaacgatgctggttttacaactgccaataacatagccaatctcaaaattagcctgcttaacaaagacaagatcgagttagattccagttccccagcctccaaagagaatgaggagaaggtttgcttggagtacaatgaagaactcgaaaagctgtgtgaggagttacaggccacactggacgggttaaccaaaatccaggttaagatggagaaactgagttcaacaacaaaaggaatttgcgagctggaaaactatcattacggagaggagtccaaacgaccgccactctttcatacctggccaaccacccatttttacgaggtttcacacaaactgctcgagatgtacaggaaagagctcctgctcaagcgtacagtggcaaaggagctcgcccacacaggcgatcccgatctcaccttaagttatcttagtatgtggctgcatcagccatacgtggagtctgactcaaggttgcaccttgagagcatgctgctagaaacagggcacagggctttgtag

SEQ ID NO: 225227 - DNA, 639 bp, Artificial Sequence
  derived and/or modified sequence
atggaggctaagacactcggcactgtaacccccaggaaacccgtgctgtcagtttccgccagaaagattaaagataacgccgcagactggcacaatctgatcctaaagtgggagaccctgaatgacgccggttttacgaccgctaataatatcgccaacctgaagatctccttattgaacaaagacaagatagagttggacagtagcagccctgcttcaaaggagaatgaagagaaggtgtgcctggaatacaacgaagaacttgagaagttatgtgaagaactgcaagccacgcttgacgggctgacaaaaattcaggtcaagatggagaagctgtccagcaccacaaaaggcatctgcgagctggagaactaccactatggggaagagtccaaacgacctcccctctttcacacgtggccaacaacacatttttatgaagttagccataagctgcttgagatgtacagaaaggaactgctcttaaagcggactgttgccaaggagttggcccatacaggcgacccagacttgactctctcctacctgagtatgtggcttcaccaaccctacgtggaaagcgacagtagacttcacctggagagcatgcttctcgagacaggacacagagccctctag

SEQ ID NO: 225228 - DNA, 955 bp, Artificial Sequence
  derived and/or modified sequence
gcggggcttcgcgtctccttctacggatatctgtggaccttatggaagcaaagactcttggaactgtaacgcccagaaaacctgtcttatctgtcagtgcaagaaaaattaaggacaatgcggctgattggcacaatttaatcctgaagtgggaaaccctcaatgatgcaggttttaccactgcaaataatattgccaacttgaaaatcagtttattgaataaagacaagatagaactagacagcagcagcccagcctcgaaggaaaatgaagaaaaggtgtgtctggaatataacgaggaactggagaagctgtgtgaggaactgcaggccaccttggatgggttgaccaaaatacaggtgaaaatggaaaagctgtcttcaactaccaagggaatttgtgaactagaaaactaccattatggggaggagagtaaacgaccccctctgttccacacgtggcctacaacccatttctatgaggtttcgcataagctcttggagatgtacaggaaggagctgctcctgaagcgcacggtggccaaggagcttgcccacaccggggatcccgacctcaccctgagctacctgtccatgtggctgcaccagccctatgtggagagcgacagcaggctgcatctggagagcatgctgctggagacaggccaccgagctctctgacgtcctgagacggctgcggacactggctccttccacgtctcaccaggcagacagtctgcctaggacccagtgccgcaggcctggatcagaccccaggatcagaccttggggtcttctggccagagcttgtcaccagccccatggcctctccaggcgtgctcatgcccacaacccgcggccagccccacgtggtgctgctcagccttctctgcccctcctgggaatctgtcattcgtgggtgcttcagagtaaaatcaatgagtttctgagcagaa

SEQ ID NO: 225229 - DNA, 572 bp, Artificial Sequence
  derived and/or modified sequence
ggatatctgtggaccttatggaagcaaagactcttggaactgtaacgcccagaaaacctgtcttatctgtcagtgcaagaaaaattaaggacaatgcggctgattggcacaatttaatcctgaagtgggaaaccctcaatgatgcaggttttaccactgcaaataatattgccaacttgaaaatcagtttattgaataaagacaagatagaactagacagcagcagcccagcctcgaaggaaaatgaagaaaaggtgtgtctggaatataacgaggaactggagaagctgtgtgaggaactgcaggccaccttggatgggttgatgaggtttcgcataagctcttggagatgtacaggaaggagctgctcctgaagcgcacggtggccaaggagcttgcccacaccggggatcccgacctcaccctgagctacctgtccatgtggctgcaccagccctatgtggagagcgacagcaggctgcatctggagagcatgctgctggagacaggccaccgagctctctgacgtcctgagacggctgcggacactggctccttccacgtctcaccag

SEQ ID NO: 225230 - DNA, 2346 bp, Artificial Sequence
  derived and/or modified sequence
gcaaatgcgtttccggtggggtgggcggggcttcgcgtctccttctacggatatctgtggaccttatggaagcaaagactcttggaactgtaacgcccagaaaacctgtcttatctgtcagtgcaagaaaaattaaggacaatgcggctgattggcacaatttaatcctgaagtgggaaaccctcaatgatgcaggttttaccactgcaaataatattgccaacttgaaaatcagtttattgaataaagacaagatagaactagacagcagcagcccagcctcgaaggaaaatgaagaaaaggtgtgtctggaatataacgaggaactggagaagctgtgtgaggaactgcaggccaccttggatgggttgaccaaaatacaggtgaaaatggaaaagctgtcttcaactaccaagggaatttgtgaactagaaaactaccattatggggaggagagtaaacgaccccctctgttccacacgtggcctacaacccatttctatgaggtttcgcataagctcttggagatgtacaggaaggagctgctcctgaagcgcacggtggccaaggagcttgcccacaccggggatcccgacctcaccctgagctacctgtccatgtggctgcaccagccctatgtggagagcgacagcaggctgcatctggagagcatgctgctggagacaggccaccgagctctctgacgtcctgagacggctgcggacactggctccttccacgtctcaccaggcagacagtctgcctaggacccagtgccgcaggcctggatcagaccccaggatcagaccttggggtcttctggccagagcttgtcaccagccccatggcctctccaggcgtgctcatgcccacaacccgcggccagccccacgtggtgctgctcagccttctctgcccctcctgggaatctgtcattcgtgggtgcttcagagtaaaatcaatgagtttctgagcagaatgagatcccaggagggcactcatggtggtttatgggactctggactcctgagaagcggccttgagtctacaggatacatctacagcctgacctgaccacccaacactcccaggcagccgcggcttgctcccctgctggccatttccagcctgctagaaaacccacctttttgttcctaccgaccgtggctttgagatcaagtgagggtaggaaatgcccctggtcactaaaagggctgtaggaaaggctggctctctgagaatacagctgccctccagggcaggacctggaaggagcacagcgccagggcgacacatggtcacaagcccagctctgtccctgagcagcgtgctctctgcttggggtctctcctgaccgtctctgcaaggcgtggggagagacctgctgctccctttgaatgctttcttccacatgtggacaaatggcccttcccttccttccccgtaacacagcccacggaaatattgaagacatgccactaagtgactttccaagtgggacatcaaagaactgggcttctaccctgagcagcatcttgctgtggacctcaagtaagtcaccccatcatttatgcctcaccttcctcatctgtaaaatgtgaggagagccaggcaccgtggcgcacgcctgtagtcccagctactcaggaggccgaggcaggaggatcgcttaagcctgggagttaaaggctgcaatgagctatgattgcaccactgcactccagcctgggcaacagagtgaaaactcatctctaaaaaaaaaaatcaggccggggccgggcacagtggctcacgcctgtaatcccagcactttgggaggccgaggcaggcagatcacgaggtcaagagatcgagaccatcctggccaacatggtgaaacctcatctctactaaaaatacaaaaattagccgggtgtggtggcggacacctgtagtcccagctactcggcaggctgaggcaggagaatcacttgaacccaggaagcggagggtgcagtgagccgagattgcaccattgcacttcagcctggcgacagcaagactccatctcaaaaaaaaacaatcaggcccagtgcagtggctcacacctataatcccagcactttgggatgctgaggcgcgtagatcacctgaggtcaggagttcaagatcagcctgaccaccatggagataccccgtctctactaaaaatacaaaatgatccaggtgtgatggcacatgcctgtaatcccagctacttgggaggctgaggcaggagaattgcttgaaccctgtggtggaggttgcggtgagccaagatcgagccattgcactccagcttgggcaacaagaccaaaactccatctc

SEQ ID NO: 225231 - DNA, 639 bp, Artificial Sequence
  derived and/or modified sequence
atggaggccaagaccctgggcaccgtgacccccagaaagcccgtgctgagcgtgagcgccagaaagatcaaggacaacgccgccgactggcacaacctgatcctgaagtgggagaccctgaacgacgccggcttcaccaccgccaacaacatcgccaacctgaagatcagcctgctgaacaaggacaagatcgagctggacagcagcagccccgccagcaaggagaacgaggagaaggtgtgcctggagtacaacgaggagctggagaagctgtgcgaggagctgcaggccaccctggacggcctgaccaagatccaggtgaagatggagaagctgagcagcaccaccaagggcatctgcgagctggagaactaccactacggcgaggagagcaagagaccccccctgttccacacctggcccaccacccacttctacgaggtgagccacaagctgctggagatgtacagaaaggagctgctgctgaagagaaccgtggccaaggagctggcccacaccggcgaccccgacctgaccctgagctacctgagcatgtggctgcaccagccctacgtggagagcgacagcagactgcacctggagagcatgctgctggagaccggccacagagccctgtag

SEQ ID NO: 225232 - protein, 745 aa, Artificial Sequence
  derived and/or modified sequence
MPFPVTTQGSQQTQPPQKHYGITSPISLAAPKETDCVLTQKLIETLKPFGVFEEEEELQRRILILGKLNNLVKEWIREISESKNLPQSVIENVGGKIFTFGSYRLGVHTKGADIDALCVAPRHVDRSDFFTSFYDKLKLQEEVKDLRAVEEAFVPVIKLCFDGIEIDILFARLALQTIPEDLDLRDDSLLKNLDIRCIRSLNGCRVTDEILHLVPNIDNFRLTLRAIKLWAKRHNIYSNILGFLGGVSWAMLVARTCQLYPNAIASTLVHKFFLVFSKWEWPNPVLLKQPEECNLNLPVWDPRVNPSDRYHLMPIITPAYPQQNSTYNVSVSTRMVMVEEFKQGLAITDEILLSKAEWSKLFEAPNFFQKYKHYIVLLASAPTEKQRLEWVGLVESKIRILVGSLEKNEFITLAHVNPQSFPAPKENPDKEEFRTMWVIGLVFKKTENSENLSVDLTYDIQSFTDTVYRQAINSKMFEVDMKIAAMHVKRKQLHQLLPNHVLQKKKKHSTEGVKLTALNDSSLDLSMDSDNSMSVPSPTSATKTSPLNSSGSSQGRNSPAPAVTAASVTNIQATEVSVPQVNSSESSGGTSSESIPQTATQPAISPPPKPTVSRVVSSTRLVNPPPRSSGNAATSGNAATKIPTPIVGVKRTSSPHKEESPKKTKTEEDETSEDANCLALSGHDKTEAKEQLDTETSTTQSETIQTAASLLASQKTSSTDLSDIPALPANPIPVIKNSIKLRLNR

SEQ ID NO: 225233 - DNA, 2238 bp, Artificial Sequence
  derived and/or modified sequence
atgcccttccccgtaacgacccaaggctctcagcagactcagccacctcagaaacactatggcatcacctctcctatttctctggcagcacccaaggagactgactgcgtcctaacacaaaagctcattgagaccttgaaaccatttggtgtgttcgaggaggaggaagaacttcagcgacgaattctaattctgggtaaactcaacaatttagtgaaggaatggattcgggaaatctccgagtctaagaatctcccccagagtgtcatcgaaaatgtcggaggcaagatttttacttttgggtcctaccggctcggcgtccatactaaaggcgccgatattgacgctttgtgcgtggctccccgccacgttgaccggagtgacttcttcacttccttctatgacaagttgaagctacaggaggaagtgaaggatctgagagccgtcgaagaggccttcgtgccggtcatcaagttgtgcttcgacgggatcgaaatcgatattctgttcgctcgcctggcgctccaaacaattcctgaagatttggacctccgggatgacagtttactgaaaaacctcgacattagatgcatcaggtccctcaacgggtgtcgtgtaactgatgagatccttcatctggtgcctaacatcgacaatttcagattgactcttagagctatcaaactctgggctaaaaggcataacatttacagtaacatactgggatttctcggcggagtttcttgggctatgttagtcgctcggacctgccagctgtatccaaatgctattgcatccacccttgtccacaaattttttttggtctttagcaagtgggagtggcccaaccccgtgctcttaaagcagccggaagaatgcaatctgaatctccctgtgtgggatcccagagtaaacccaagtgaccgctaccatttgatgcctatcatcacgccagcatatccccaacaaaattctacatacaacgtgagcgtgagtacccggatggttatggtggaggagtttaagcaagggctggccatcaccgatgagattctcctgtcgaaagctgagtggagcaaactgtttgaagcacccaatttttttcagaagtacaaacactacatcgtgctcctggcatccgccccgactgagaaacaacgcctcgagtgggtgggcctggtggagtcaaagattcgcatcttggtgggttcgctcgagaagaacgagttcattaccctcgcgcacgtgaacccccagtcattcccagcacccaaagaaaatcccgacaaggaagaattccgaaccatgtgggttataggcctcgtgtttaagaagaccgagaatagcgagaatctctcggtcgatctgacatatgacatccagtccttcaccgacacagtctatcgccaggcgattaactcaaaaatgttcgaagtggatatgaagatagcagcaatgcacgtgaagagaaaacagctgcatcagctgctgccgaatcacgtgcttcaaaagaagaaaaagcattctaccgagggagttaaattaaccgcgcttaacgacagttcactcgacttgtctatggacagcgacaattctatgtccgtgccgtcacctacaagtgcgaccaaaacatctcctttgaacagctctgggtcgtctcagggaaggaactcccccgcccctgccgtcaccgctgcatctgtcacaaatatacaagcaaccgaggtcagcgtaccgcaagtcaactcctctgaatcttccgggggcacatccagcgaaagcatcccgcaaacagctacacaaccagccatcagccctcctccgaagcccaccgtgtcaagagtggtcagttcgacaagattagtcaacccacctcccaggagttctggaaacgcggcaacatccggcaacgctgccaccaaaatcccaactcctattgttggcgtgaagcgaacttcttccccccataaggaggagagtccaaagaaaacaaaaacagaggaagacgagaccagcgaagacgccaactgccttgccctgtccggacacgataagaccgaagcgaaagagcagttagatacagagacatccacaacccaatccgagactattcagaccgctgcctccctcctggcctctcaaaagacgagttcaaccgacctatccgacattcccgcccttcctgctaaccccataccagtgatcaagaactctatcaaacttcggctgaaccgctag

SEQ ID NO: 225234 - DNA, 2238 bp, Artificial Sequence
  derived and/or modified sequence
atgcccttccctgtgaccacccagggcagccagcagacccagcccccccagaagcactacggcatcaccagccccatcagcctggccgcccccaaggagacagactgtgtgctgacccagaagctgattgagaccctgaagccctttggagtgtttgaggaggaggaggagctgcagaggcgcatcctgatcctgggcaagctgaacaacctggtgaaggagtggatccgggagatcagcgagagcaagaacctgccccagagcgtgattgaaaatgtgggcggcaagatcttcaccttcggcagctaccgcctgggcgtgcacaccaagggagctgacattgatgccctgtgtgtggcccccaggcatgtggacagaagtgacttcttcaccagcttctatgacaagctgaagctgcaggaggaggtgaaggacctgcgggctgtggaggaggcctttgtgcctgtgatcaagctgtgctttgatggcatcgagattgacatcctgtttgcccggctggccctgcagaccatccctgaggacctggacctgagagatgacagcctgctgaagaacctggacatccgctgcatccgcagcctgaatggctgccgggtgacagatgagatcctgcacctggtgcccaacatcgacaacttccggctgaccctgcgggccatcaagctgtgggccaagaggcacaacatctacagcaacatcctgggcttcctgggcggcgtgtcctgggccatgctggtggcccggacctgccagctgtacccaaatgccatcgccagcaccctggtgcacaagttcttcctggtgttcagcaagtgggagtggcccaaccctgtgctgctgaagcagcctgaggagtgcaacctgaacctgcctgtgtgggacccccgggtgaaccccagcgaccgctaccacctgatgcccatcatcaccccagcctacccccagcagaacagcacctacaacgtgtctgtgtccaccaggatggtgatggtggaggagttcaagcagggcctggccatcacagatgagatcctgctgagcaaggccgagtggagcaagctgtttgaggcccccaacttcttccagaagtacaagcactacatcgtgctgctggccagcgcccccacagagaagcagaggctggagtgggtgggcctggtggagagcaagatccgcatcctggtgggcagcctggagaagaatgagttcatcaccctggcccacgtgaacccccagagcttccctgcccccaaggagaacccagacaaggaggagttccgcaccatgtgggtgattggcctggtgttcaagaagacagaaaattctgagaacctgtctgtggacctgacctatgacatccagagcttcacagacacagtgtaccggcaggccatcaacagcaagatgtttgaggtggacatgaagattgctgccatgcacgtgaagaggaagcagctgcaccagctgctgcccaaccacgtgctgcagaagaagaagaagcacagcacagagggcgtgaagctgacagccctgaatgacagcagcctggacctgtccatggacagcgacaacagcatgtctgtgcccagccccaccagcgccaccaagaccagccccctgaacagcagcggcagcagccagggcaggaacagccctgccccagctgtgacagctgcctctgtgaccaacatccaggccacagaggtgtctgtgccccaggtgaacagcagcgagagcagcggcggcaccagcagcgagagcatcccccagacagccacccagcctgccatcagccccccacccaagcccaccgtgtcccgggtggtgagcagcacccggctggtgaaccccccacccaggagcagtggaaatgctgccaccagcggaaatgctgccaccaagatccccacccccatcgtgggcgtgaagaggaccagcagcccccacaaggaggagagccccaagaagaccaagacagaggaggatgagaccagtgaagatgccaactgcctggccctgagcggccatgacaagacagaggccaaggagcagctggacacagagaccagcaccacccagagcgagaccatccagacagctgccagcctgctggccagccagaagaccagcagcacagacctgagtgacatcccagccctgcctgccaaccccatccctgtgatcaagaacagcatcaagctgcggctgaacagatag

SEQ ID NO: 225235 - DNA, 2238 bp, Artificial Sequence
  derived and/or modified sequence
atgcccttccccgtgaccacccagggcagccagcagacccagcccccacagaaacactatggaatcactagcccgattagcctcgcggcccctaaggaaaccgactgcgtgttgacacaaaaactcattgaaaccctcaagccatttggtgtgtttgaggaggaggaggaattacaacggcgcatattaattctgggcaaactgaacaacttggtgaaagaatggatccgggagattagcgagtccaaaaatctgccccagtcagttatagagaacgtgggcggcaaaatcttcacattcggaagttaccgcctgggagtgcacacgaaaggagctgatatcgacgcactgtgcgtggcccctcgacacgttgaccgatccgacttctttacatctttttatgataaacttaagcttcaggaggaggtgaaagacctgcgagcagtggaggaggcatttgtaccagtgatcaagttgtgctttgacggtattgagatcgacattcttttcgcgagactagcgctgcagaccatacctgaggacttggatctgagggacgactcacttctgaaaaacctcgacattcgatgtatccgatccctaaatggctgtcgtgttactgatgaaatattacatctggtgcccaatatagacaactttcggctgactctgcgcgcgattaagctgtgggccaaaaggcacaacatctatagcaacatactggggtttttaggtggcgttagttgggccatgctggtggccagaacatgtcaactctaccccaacgcaatcgccagtacgctagtacacaagttttttctggtattcagcaagtgggagtggcctaatcccgtgttgctcaagcagccagaggagtgtaacttgaatctgcccgtgtgggatcccagggtgaacccctccgatcgctaccatctgatgccaattattactccagcttacccccaacagaatagcacctacaacgtatccgtctcaacacgaatggtcatggtagaggagttcaagcaggggctggcaattactgacgagatcctgctgagcaaggcagagtggagtaaattgtttgaggccccaaactttttccaaaagtataagcactatatcgtccttctagcttctgcacctactgagaagcagcggctggaatgggtggggctagtcgaatccaagatcaggatactggtgggttctctcgaaaaaaatgaattcattaccctcgcccacgtgaatccacagtcctttccagctcccaaggaaaacccagataaagaggagttcaggaccatgtgggtgattggtctcgtgtttaagaaaactgagaactccgagaatctctccgtagacttaacttacgacattcaatcatttaccgacaccgtgtaccgccaagcgatcaatagtaaaatgttcgaggtggacatgaaaattgctgcaatgcatgtcaagaggaagcagcttcatcaactcctcccaaatcatgttctgcagaagaagaagaagcactctacagaaggagtcaaactgactgcactcaatgactcttctcttgatttatctatggatagcgacaactccatgagtgtgccaagtccgacatccgccacaaaaacctctcccctgaattcgagcggctcttcccagggtaggaattctcccgcccccgcagtaacagccgcctccgtgaccaatattcaagccaccgaagtgtcagtaccccaggtgaattcgtcggaaagctccgggggcacatcatcagagtctataccccaaacagcaactcagcccgccatctccccaccaccaaaacccacagtgtcacgagtggtgtcttccacgagactggtcaatccacctcccaggtcaagcggtaatgcagccacatcggggaacgccgccactaagattcctacgcccattgtgggggtcaagagaacttcatccccccataaagaagagtcccccaagaaaaccaaaaccgaagaagatgagactagcgaggatgcaaattgccttgcgctgagcgggcatgataagacagaggccaaagaacaattggatacagagacatcaactactcagtctgaaacgatacagaccgctgctagccttctggcctcacaaaaaacctccagtacagatctctcagatattccagctctgccagcgaatcctataccagtgataaaaaatagcattaaacttaggttaaaccgctag

SEQ ID NO: 225236 - DNA, 2238 bp, Artificial Sequence
  derived and/or modified sequence
atgcccttcccggtgactacccaaggttctcagcagacccagccaccccagaaacattacggcatcactagtccaatatccctcgctgccccaaaagagacggactgtgtcctcacacagaagctcattgaaacccttaaacctttcggagtctttgaggaggaagaggagctgcagagacgcatcctcattctgggtaaactgaataatctggtgaaagagtggattcgggaaatctctgagtcaaaaaacctgccacagtcagtcatcgaaaatgtcggtggtaaaattttcacctttggttcttacaggctcggagtgcatacgaagggtgcggatattgacgcgctgtgcgtggcacctagacatgtggatcgcagtgacttctttacctctttctatgacaaacttaagctgcaggaagaggttaaggacctgagggcggtggaagaggcctttgtccccgtcattaagctctgcttcgacggtattgagattgatatattgttcgcaagattggccctgcagacgatacccgaggacctggatctgcgcgatgatagcttgctcaaaaaccttgatataaggtgcatcaggtcactgaatggctgccgggtgacagatgaaatactccacttggttcccaacatcgataactttcgtctgacactgcgggctattaaattatgggcaaagcgccacaatatttatagtaacattcttggattcctgggaggtgtgagctgggccatgctggtcgccagaacctgccagttgtaccccaatgcaatcgcgtccactctcgtccacaagttctttctcgtatttagtaagtgggagtggcctaatccagtactgctgaaacagcctgaggaatgcaacctgaatctcccggtctgggatcccagggtcaatcccagcgaccggtaccatctgatgccaattattacacctgcctaccctcagcagaattccacttacaacgtgtctgtctccactaggatggtgatggtggaagagtttaaacagggtttagccatcacagatgaaatactcttaagcaaagcggagtggtccaaactcttcgaagctcctaactttttccagaagtacaaacactacatcgtgttgctcgccagcgcgccaaccgagaagcagaggcttgagtgggtgggcctcgtagagtccaagatccgtatcctggtcggaagcctggaaaagaacgagttcatcacactagcccatgttaaccctcagtccttccccgctcccaaggaaaaccccgacaaggaggagtttaggaccatgtgggttatcggtttggtttttaaaaaaaccgaaaactcagagaacttgtctgtcgatctgacctatgatattcagagctttaccgacactgtgtaccgccaggccatcaactcaaagatgttcgaagtggacatgaaaattgccgcaatgcacgtcaagcgaaaacagctccatcaactgctgcctaatcatgtgctccaaaagaaaaagaagcattccactgaaggagtgaaattaacggctctgaatgattcttcattggacttgtccatggatagtgataatagcatgtctgtgccttcgcctacatccgccacaaagactagccctttgaatagctctgggtcaagccaggggagaaactcacctgcccctgcggttactgccgcaagcgtcaccaatatccaggccactgaagtctcagtgcctcaggtcaatagctccgaatcctctggaggcactagtagtgagagtatacctcaaacagctacgcagcctgctatttctcctccgcctaagcctactgtttcgcgagtcgtgtctagtacgaggctcgtgaatcccccaccccgttcctctggaaatgccgctaccagtggcaacgctgcgaccaagatcccaactcctatcgtgggagtcaaacggacaagtagtccgcataaggaggagagtcccaagaaaacaaagaccgaggaggatgagaccagcgaggacgccaactgtcttgctttaagcggtcatgacaaaactgaagcaaaggaacagctggacaccgagacatccacgacccagagcgagaccattcagacagctgcgtcactcctcgcctcccagaagacatcaagcaccgatcttagcgatattccggcactgcccgcaaatcctatccccgtcattaagaactcaattaagctccgcctcaacaggtag

SEQ ID NO: 225237 - DNA, 4519 bp, Artificial Sequence
  derived and/or modified sequence
agcagttctagaacgttgctgtggtagcgctcgggcgccatgttaggacgaaggggaaggaggagaagcgcttaaagcggcgggagcggtgcgggagaggggttggacccagggctgaggcaggcccccccctccctcccgcctcagtggatcatgcccagggcggcagcggcggcggttgcgggggggaagtgactgggcggtgccggcgccggagacgatgccgtttccagttacaacacagggatcacaacaaacacaaccgccacagaagcactatggcattacttctcctatcagcttagcagcccccaaggagactgactgcgtacttacacagaaactaattgagacattgaaaccctttggggtttttgaagaggaagaggaactgcagcgcaggattttaattttgggaaaactaaataacctggtaaaagagtggatacgagaaatcagtgaaagcaagaatcttccacaatctgtaattgaaaatgttggaggaaaaatttttacatttggatcttacagattaggagtgcatacaaaaggtgctgatattgatgcgttgtgtgttgcaccaagacatgttgatcgaagtgactttttcacctcattctatgataagttgaaattacaggaagaagtaaaagatttaagagctgttgaagaggcattcgtaccagttattaaactctgttttgatgggatagagattgatattttgtttgcaagattagcactgcagacaattcctgaagatttggatctacgagatgacagtctgctaaaaaatttagatataagatgtataagaagtcttaacggttgcagggtaaccgatgaaattttacatctagtaccaaacattgacaacttcaggttaactctgagagctatcaaactatgggccaaacgccacaacatctattccaatatattaggtttcctcggtggtgtttcctgggctatgctagtagcaagaacttgccagctttatccaaatgcaatagcatcaactcttgtacataaatttttcttggtattttctaaatgggaatggccaaatccagtgctattgaaacagcctgaagaatgcaatcttaatttgcctgtatgggacccaagggtaaaccccagtgataggtaccatcttatgcctataattacaccagcatacccacaacagaactccacgtacaatgtgtccgtttcaacacggatggtcatggttgaggagtttaaacaaggtcttgctatcacagatgaaattttgctgagtaaggcagagtggtccaaactttttgaagctccaaacttctttcaaaagtacaagcattatattgtacttctagcaagtgcaccaacagaaaaacaacgcctggaatgggtgggcttggtggaatcaaaaatccgaatcctggttggaagcttggagaagaatgaatttattacactggctcatgtgaatccccagtcatttccagcacccaaagaaaatcccgacaaggaagaatttcgcacgatgtgggtgattgggttagtgtttaaaaaaacagaaaactctgaaaacctcagtgttgatctcacctatgatattcagtctttcacagatacagtttataggcaagcaataaacagcaagatgtttgaggtggatatgaaaattgctgcaatgcatgtaaaaagaaagcaactccatcaactactacctaatcatgtgcttcagaaaaagaaaaagcattcaacagaaggtgtcaaattgacagctctcaatgacagcagcctcgacttgtctatggacagtgataacagcatgtctgtgccttcacctactagtgctacgaagaccagtccattgaacagttctggcagctctcagggcagaaacagtcctgctccagctgtaacagcagcatctgtgaccaacatacaggctactgaagtttctgtgccacaagtaaattccagtgaaagctcagggggtacatcgagtgaaagcattcctcaaactgccacacaaccagccatttctccaccaccaaagcctacggtctccagagttgtttcttcaacacgtctggtaaacccaccacctagatcttcaggaaatgcagcaacttcaggaaatgcagcaacaaaaatacctactcctatagtaggagtcaagaggacatcctcacctcataaagaagagagtcccaagaaaaccaaaacagaagaggatgaaacaagtgaagatgctaactgtcttgctttgagtggacatgataaaacagaagcaaaggaacaacttgatacagagacaagtacaactcaatcagaaactattcagacagcggcttctctgttggcctctcagaaaacatccagtacagacctttctgatatccctgctctccctgcaaatcctattcctgttatcaagaattcaataaaactgagattgaatcggtaaaaacaacctcaggggtccataaacaatatctgccaactcaacctgttgtcttcaaatgctaaaaaaggagaatggagggtacaagactagacatgactgaaatggatttgggttttttggtgacctcccttactgggctaatcagcacttgatcggaagtccaggttagtatgtgaagccaggagtactattattattgtgttagcaacagttgcattaactatttcaaaaattactgcctttaaaaaaaacaacctcaagctatatttgtattcataattgacatctggattgggtttatgtttgatgcattgtttggaaaatttgcaatacaaactggcataagaattacttattctgatgatgcacttttatgtatttttcattagaaagtagaactaattttagattttcagcttgatggattttcagtttttcctgaagaattttctttaccattagtcttcaaattggatactgttgtgcagtggtgtactgttatacttcagagaaagggtaagagtacatctagttcagttcctatgaggtagctgtaacccttaaaaatgaaacgtcaactctagggtacatttgacattgaaagaatagttaggaaataacttggttttgatagggtcatgattaagaaatgatatattggttttatttatggaattgttttatagtgcatacaaatcagcgatcagccagcaaatatttttctttgagcttgtgaaagctctgtgttcttttgccttcaatctgttgtcttcaaaacaaacaaacaaaaaaagcttcttgcgcctttccctcccctgttttcttcctttttctttttgcttgtatgcacaaggtaggacttacttcgtaagaaacaaaatgccagtattttcttaagccatgatgtgaaaccaatgaccctgtgaccacatggcacagaacactaaattttggtcccatggctgaaacttgagggtgactaaaagtaatgcctgtgaaacatgatatctatctgggatggccatttgatctctaaaaggaattttgtacactccacagaactcctatctatagtaaaattgattttcagttttaaatgtgggcaaaaaggcattttctccaagattttaaaactaattcttatttttaaatggtttaccaaaatttgtcagtacattttacgtgtagaagcattttaaaaatcatttctagcaagcacttgacatctagtcagctctctactcctttattttgttttatcaaaagattaagagctcctttctttgaataaaataatttctcataattaagcagtagaagatctatcttcacaaagtatgagggatgccagatgttgataaacttactctttctgaatctggacaaagtcgacttaacagatttttctgatgagcatgttttatgaatcctccattgtgctccattctatcacatgtgcatttttcatgttaaactgcaattacttaatctcttcccctatccttctaaattaattttctgaagttggagtgtagtcttttcccccttaggctatgcattaatcgaagctttcttttcaccatgactttataatgtctagtaaacaatatttctacttcccacatctttgctttacacagtcaccttgcccttccttccaccaccgaagaaaaaagatggtcatactaacaggtgaaatgtacaaggtgtctgtgtgttttgtgtagcttcagagttagattgaaattaccaggcacagatttagtcttgtcattttgtttacacattggggaaaacaattcagtttattaaacgtttcatgtaactgcacccaagttttgccaagctggaaacttggaccttttctgtgtagtgactttttaattatagttttcataacctggagatcagactgttgctttcgcatgatgtatgtagtgtctcatgactggagtttgctttgttttatagtatctgtactccttgtatttttcaagagctattttgtaaacagatgatgtatttctccattgaaaacacaataaaaaaaaaacagcacaa

SEQ ID NO: 225238 - DNA, 2238 bp, Artificial Sequence
  derived and/or modified sequence
atgcccttccccgtgaccacccagggcagccagcagacccagcccccccagaagcactacggcatcaccagccccatcagcctggccgcccccaaggagaccgactgcgtgctgacccagaagctgatcgagaccctgaagcccttcggcgtgttcgaggaggaggaggagctgcagagaagaatcctgatcctgggcaagctgaacaacctggtgaaggagtggatcagagagatcagcgagagcaagaacctgccccagagcgtgatcgagaacgtgggcggcaagatcttcaccttcggcagctacagactgggcgtgcacaccaagggcgccgacatcgacgccctgtgcgtggcccccagacacgtggacagaagcgacttcttcaccagcttctacgacaagctgaagctgcaggaggaggtgaaggacctgagagccgtggaggaggccttcgtgcccgtgatcaagctgtgcttcgacggcatcgagatcgacatcctgttcgccagactggccctgcagaccatccccgaggacctggacctgagagacgacagcctgctgaagaacctggacatcagatgcatcagaagcctgaacggctgcagagtgaccgacgagatcctgcacctggtgcccaacatcgacaacttcagactgaccctgagagccatcaagctgtgggccaagagacacaacatctacagcaacatcctgggcttcctgggcggcgtgagctgggccatgctggtggccagaacctgccagctgtaccccaacgccatcgccagcaccctggtgcacaagttcttcctggtgttcagcaagtgggagtggcccaaccccgtgctgctgaagcagcccgaggagtgcaacctgaacctgcccgtgtgggaccccagagtgaaccccagcgacagataccacctgatgcccatcatcacccccgcctacccccagcagaacagcacctacaacgtgagcgtgagcaccagaatggtgatggtggaggagttcaagcagggcctggccatcaccgacgagatcctgctgagcaaggccgagtggagcaagctgttcgaggcccccaacttcttccagaagtacaagcactacatcgtgctgctggccagcgcccccaccgagaagcagagactggagtgggtgggcctggtggagagcaagatcagaatcctggtgggcagcctggagaagaacgagttcatcaccctggcccacgtgaacccccagagcttccccgcccccaaggagaaccccgacaaggaggagttcagaaccatgtgggtgatcggcctggtgttcaagaagaccgagaacagcgagaacctgagcgtggacctgacctacgacatccagagcttcaccgacaccgtgtacagacaggccatcaacagcaagatgttcgaggtggacatgaagatcgccgccatgcacgtgaagagaaagcagctgcaccagctgctgcccaaccacgtgctgcagaagaagaagaagcacagcaccgagggcgtgaagctgaccgccctgaacgacagcagcctggacctgagcatggacagcgacaacagcatgagcgtgcccagccccaccagcgccaccaagaccagccccctgaacagcagcggcagcagccagggcagaaacagccccgcccccgccgtgaccgccgccagcgtgaccaacatccaggccaccgaggtgagcgtgccccaggtgaacagcagcgagagcagcggcggcaccagcagcgagagcatcccccagaccgccacccagcccgccatcagccccccccccaagcccaccgtgagcagagtggtgagcagcaccagactggtgaaccccccccccagaagcagcggcaacgccgccaccagcggcaacgccgccaccaagatccccacccccatcgtgggcgtgaagagaaccagcagcccccacaaggaggagagccccaagaagaccaagaccgaggaggacgagaccagcgaggacgccaactgcctggccctgagcggccacgacaagaccgaggccaaggagcagctggacaccgagaccagcaccacccagagcgagaccatccagaccgccgccagcctgctggccagccagaagaccagcagcaccgacctgagcgacatccccgccctgcccgccaaccccatccccgtgatcaagaacagcatcaagctgagactgaacagatag

SEQ ID NO: 225239 - protein, 1089 aa, Artificial Sequence
  derived and/or modified sequence
MQKASVLLFLAWVCFLFYAGIALFTSGFLLTRLELTNHSSCQEPPGPGSLPWGSQGKPGACWMASRFSRVVLVLIDALRFDFAQPQHSHVPREPPVSLPFLGKLSSLQRILEIQPHHARLYRSQVDPPTTTMQRLKALTTGSLPTFIDAGSNFASHAIVEDNLIKQLTSAGRRVVFMGDDTWKDLFPGAFSKAFFFPSFNVRDLDTVDNGILEHLYPTMDSGEWDVLIAHFLGVDHCGHKHGPHHPEMAKKLSQMDQVIQGLVERLENDTLLVVAGDHGMTTNGDHGGDSELEVSAALFLYSPTAVFPSTPPEEPEVIPQVSLVPTLALLLGLPIPFGNIGEVMAELFSGGEDSQPHSSALAQASALHLNAQQVSRFLHTYSAATQDLQAKELHQLQNLFSKASADYQWLLQSPKGAEATLPTVIAELQQFLRGARAMCIESWARFSLVRMAGGTALLAASCFICLLASQWAISPGFPFCPLLLTPVAWGLVGAIAYAGLLGTIELKLDLVLLGAVAAVSSFLPFLWKAWAGWGSKRPLATLFPIPGPVLLLLLFRLAVFFSDSFVVAEARATPFLLGSFILLLVVQLHWEGQLLPPKLLTMPRLGTSATTNPPRHNGAYALRLGIGLLLCTRLAGLFHRCPEETPVCHSSPWLSPLASMVGGRAKNLWYGACVAALVALLAAVRLWLRRYGNLKSPEPPMLFVRWGLPLMALGTAAYWALASGADEAPPRLRVLVSGASMVLPRAVAGLAASGLALLLWKPVTVLVKAGAGAPRTRTVLTPFSGPPTSQADLDYVVPQIYRHMQEEFRGRLERTKSQGPLTVAAYQLGSVYSAAMVTALTLLAFPLLLLHAERISLVFLLLFLQSFLLLHLLAAGIPVTTPGPFTVPWQAVSAWALMATQTFYSTGHQPVFPAIHWHAAFVGFPEGHGSCTWLPALLVGANTFASHLLFAVGCPLLLLWPFLCESQGLRKRQQPPGNEADARVRPEEEEEPLMEMRLRDAPQHFYAALLQLGLKYLFILGIQILACALAASILRRHLMVWKVFAPKFIFEAVGFIVSSVGLLLGIALVMRVDGAVSSWFRQLFLAQQR

SEQ ID NO: 225240 - DNA, 3270 bp, Artificial Sequence
  derived and/or modified sequence
atgcagaaggccagcgtgctgctgttcctggcctgggtgtgcttcctgttctacgccggcatcgccctgttcaccagcggcttcctgctgaccagactggagctgaccaaccacagcagctgccaggagccccccggccccggcagcctgccctggggcagccagggcaagcccggcgcctgctggatggccagcagattcagcagagtggtgctggtgctgatcgacgccctgagattcgacttcgcccagccccagcacagccacgtgcccagagagccccccgtgagcctgcccttcctgggcaagctgagcagcctgcagagaatcctggagatccagccccaccacgccagactgtacagaagccaggtggacccccccaccaccaccatgcagagactgaaggccctgaccaccggcagcctgcccaccttcatcgacgccggcagcaacttcgccagccacgccatcgtggaggacaacctgatcaagcagctgaccagcgccggcagaagagtggtgttcatgggcgacgacacctggaaggacctgttccccggcgccttcagcaaggccttcttcttccccagcttcaacgtgagagacctggacaccgtggacaacggcatcctggagcacctgtaccccaccatggacagcggcgagtgggacgtgctgatcgcccacttcctgggcgtggaccactgcggccacaagcacggcccccaccaccccgagatggccaagaagctgagccagatggaccaggtgatccagggcctggtggagagactggagaacgacaccctgctggtggtggccggcgaccacggcatgaccaccaacggcgaccacggcggcgacagcgagctggaggtgagcgccgccctgttcctgtacagccccaccgccgtgttccccagcaccccccccgaggagcccgaggtgatcccccaggtgagcctggtgcccaccctggccctgctgctgggcctgcccatccccttcggcaacatcggcgaggtgatggccgagctgttcagcggcggcgaggacagccagccccacagcagcgccctggcccaggccagcgccctgcacctgaacgcccagcaggtgagcagattcctgcacacctacagcgccgccacccaggacctgcaggccaaggagctgcaccagctgcagaacctgttcagcaaggccagcgccgactaccagtggctgctgcagagccccaagggcgccgaggccaccctgcccaccgtgatcgccgagctgcagcagttcctgagaggcgccagagccatgtgcatcgagagctgggccagattcagcctggtgagaatggccggcggcaccgccctgctggccgccagctgcttcatctgcctgctggccagccagtgggccatcagccccggcttccccttctgccccctgctgctgacccccgtggcctggggcctggtgggcgccatcgcctacgccggcctgctgggcaccatcgagctgaagctggacctggtgctgctgggcgccgtggccgccgtgagcagcttcctgcccttcctgtggaaggcctgggccggctggggcagcaagagacccctggccaccctgttccccatccccggccccgtgctgctgctgctgctgttcagactggccgtgttcttcagcgacagcttcgtggtggccgaggccagagccacccccttcctgctgggcagcttcatcctgctgctggtggtgcagctgcactgggagggccagctgctgccccccaagctgctgaccatgcccagactgggcaccagcgccaccaccaacccccccagacacaacggcgcctacgccctgagactgggcatcggcctgctgctgtgcaccagactggccggcctgttccacagatgccccgaggagacccccgtgtgccacagcagcccctggctgagccccctggccagcatggtgggcggcagagccaagaacctgtggtacggcgcctgcgtggccgccctggtggccctgctggccgccgtgagactgtggctgagaagatacggcaacctgaagagccccgagccccccatgctgttcgtgagatggggcctgcccctgatggccctgggcaccgccgcctactgggccctggccagcggcgccgacgaggccccccccagactgagagtgctggtgagcggcgccagcatggtgctgcccagagccgtggccggcctggccgccagcggcctggccctgctgctgtggaagcccgtgaccgtgctggtgaaggccggcgccggcgcccccagaaccagaaccgtgctgacccccttcagcggcccccccaccagccaggccgacctggactacgtggtgccccagatctacagacacatgcaggaggagttcagaggcagactggagagaaccaagagccagggccccctgaccgtggccgcctaccagctgggcagcgtgtacagcgccgccatggtgaccgccctgaccctgctggccttccccctgctgctgctgcacgccgagagaatcagcctggtgttcctgctgctgttcctgcagagcttcctgctgctgcacctgctggccgccggcatccccgtgaccacccccggccccttcaccgtgccctggcaggccgtgagcgcctgggccctgatggccacccagaccttctacagcaccggccaccagcccgtgttccccgccatccactggcacgccgccttcgtgggcttccccgagggccacggcagctgcacctggctgcccgccctgctggtgggcgccaacaccttcgccagccacctgctgttcgccgtgggctgccccctgctgctgctgtggcccttcctgtgcgagagccagggcctgagaaagagacagcagccccccggcaacgaggccgacgccagagtgagacccgaggaggaggaggagcccctgatggagatgagactgagagacgccccccagcacttctacgccgccctgctgcagctgggcctgaagtacctgttcatcctgggcatccagatcctggcctgcgccctggccgccagcatcctgagaagacacctgatggtgtggaaggtgttcgcccccaagttcatcttcgaggccgtgggcttcatcgtgagcagcgtgggcctgctgctgggcatcgccctggtgatgagagtggacggcgccgtgagcagctggttcagacagctgttcctggcccagcagagatag

SEQ ID NO: 225241 - DNA, 3270 bp, Artificial Sequence
  derived and/or modified sequence
atgcagaaagcatccgtcctgcttttcctcgcctgggtgtgcttcctgttttacgccgggatcgctttattcacttccgggtttctcctgactagacttgaactgactaaccattcatcttgccaggagcccccaggacctgggtcactgccctggggcagccagggaaaaccaggggcttgctggatggcttcacgcttttctcgggtggtgctggtgctaatcgatgcactgagattcgattttgcccagccccagcacagtcacgtgccccgggagccacctgttagccttcctttcctaggtaagctctcaagcctccagcggattctggagatccagccacaccatgccagattgtatcgcagtcaggttgatccccccacgaccaccatgcaaaggctcaaagccttaaccaccggttccttgcccacatttatcgacgctgggagcaattttgcatcccacgccattgttgaagataatctcattaaacaactgacgtccgcaggccgcagagtggtttttatgggagacgacacgtggaaggatcttttcccgggggccttcagcaaagcattctttttcccaagcttcaatgtgcgggacctggacactgtggataacgggattctcgaacacttgtacccgacaatggactcaggcgagtgggatgttctcatcgcccatttcttaggggttgaccattgtgggcacaagcatggccctcaccatccggagatggcaaaaaaactgagccaaatggaccaggtcatccagggactggtggagagattggagaatgacaccttgctggtggtcgctggggatcacggaatgacaaccaacggggatcatggcggtgatagcgaacttgaggtctcagctgctctgtttctgtacagccctacagcggtgttcccttccacgcctcccgaggagcctgaagtgatacctcaggtgtctctggttccgaccctggccctcctgttaggcttgccgataccttttggtaacattggagaggtaatggcagagttattttccgggggggaagactctcagccacacagttccgcgcttgcgcaagcctctgcgctgcacttgaacgcccagcaggtgagcaggtttctccacacatactcagccgcgacccaggatctacaggcaaaagaactccatcagctgcagaatttgtttagcaaggctagcgccgattaccagtggctgctccagagtcccaaaggggcggaggccacacttcccaccgtgatcgccgaactgcaacagtttttgcgcggggcaagagcaatgtgtatcgagagctgggctcgtttctccctggtgcggatggccggtgggactgctctactagccgcttcttgctttatctgcctcctagcctctcagtgggccatatcccccggttttcctttctgtcccctgttactaacgcctgtcgcatggggcctggtaggagccattgcgtatgctgggcttctcggcactatcgagctcaaattggacctggtactgctcggcgctgtggctgcagtcagctccttcttgccattcctgtggaaggcatgggcggggtggggttccaagaggcctttagccaccttgttcccaatcccgggccccgtcctgctcctcctactgttccgtctggcagtatttttctctgacagttttgtggtggctgaggccagagctaccccttttctgttggggtcattcatcctgctgcttgtagttcagctgcattgggagggccagctgctccctcccaagctcctgaccatgcctcgcctaggtacgtccgccacgacaaaccctccaaggcataacggtgcctatgcactacggctgggcattgggcttttgctctgtacccgtttggccggcttgtttcatagatgccccgaggagacgcctgtctgtcattcgagcccttggctatcccccctggcttctatggtcgggggcagagcgaaaaatctgtggtacggcgcctgtgtggccgccttggtggcactactggccgccgtgcgactatggttacgcagatacggcaacctcaagtcccccgaaccaccgatgctatttgtacgatggggactaccccttatggccctcggcacggctgcctactgggctctggcttccggggcggatgaggctcctccccgcttgagggtgctggttagtggggcctcaatggtactgccacgagctgtggcagggcttgctgcatcggggctggcgctcctcttatggaagcccgtgaccgtcttggtcaaggccggggcaggggcaccccggacacgaaccgttttgactccgttttccggtccccccacttctcaggctgacttggactacgtcgtcccacaaatttaccgtcacatgcaggaggagtttcggggcagactggagcgcacgaagtcccagggccccctcacagtggcagcataccagctgggctcggtgtattccgccgcgatggttaccgcattgacacttcttgcttttccactcctcttgctgcacgccgagcgcatctcactcgtgtttcttttactcttccttcaatcatttctgttgctgcaccttcttgccgctggaatccccgtgaccacacccggcccgttcaccgtgccatggcaggcagtgtctgcttgggctttaatggcaacacagaccttctacagcacaggtcatcaacccgtgtttcccgccattcattggcacgccgccttcgtcggattccctgaaggccacggctcttgcacctggctcccagcccttctagtgggtgccaatacctttgcaagtcatttgttgtttgcggtgggttgccctctgctgctgctgtggccgtttctctgcgagagccagggacttcggaagcggcagcagccccctgggaacgaggccgacgctcgggtgcgtcctgaggaggaagaggagcccttgatggaaatgagattgagagacgccccacagcatttttacgcagccctgcttcagctgggcctgaaatatctgttcatcttggggatccaaatcctggcatgcgcattagctgccagcatcctcagacggcacctcatggtgtggaaagtgtttgccccaaagttcatctttgaggccgtgggctttattgtatccagcgttgggctcttgctgggtattgctctcgtgatgagagtggatggggctgttagttcctggtttcggcagctctttctagcccagcagcgatag

SEQ ID NO: 225242 - DNA, 3270 bp, Artificial Sequence
  derived and/or modified sequence
atgcagaaggcatccgttcttctattcctcgcatgggtttgtttcctattttatgcgggcattgccctgttcactagtggatttcttctgacgcgcttagagctgacgaatcactcttcttgccaggagccgcccggtccaggcagcctgccttggggatctcagggcaaaccaggcgcgtgttggatggcttccagatttagccgtgtggttctcgtcctcattgatgcactcagattcgactttgcccagccccagcattctcacgttccgcgtgagccacccgtgtccctgcctttcttgggtaaactgagttctctccagcgcatacttgaaatacagccccaccacgcaagactctacagaagtcaggtggatccgcccaccacaaccatgcagagactgaaggcactcacaaccgggtcgttacccaccttcattgacgcaggatccaactttgcaagccatgcaatcgtcgaggacaacctaataaagcagttgacttcagctggcagacgggtggtgttcatgggcgacgatacgtggaaggacctgtttcccggtgcattcagcaaggctttcttcttccccagcttcaatgtccgcgacttagacacggtagataatggtatcttggagcacttataccctactatggattctggcgagtgggatgttctgattgcacatttccttggggtcgaccattgcggacacaaacacgggccacaccatcccgaaatggccaaaaaacttagtcagatggaccaagtgatccagggcctggtggagcgactggagaatgacacactgctggtggtagccggggatcacggaatgaccactaatggagaccatgggggtgacagtgaacttgaggttagcgccgccttgttcctatactctcccacagccgtgttcccttcgactcctcctgaagaacctgaggtcatccctcaggtcagcctggtgcctacattggccctgcttcttggcctgccaatcccattcggaaacattggggaagtgatggctgaattgttctctggcggggaagattcacaaccacactcttctgctctcgcccaggcatcggcgctgcatcttaatgcccagcaggtcagccggttcctgcacacctattctgcagctacacaggatctgcaggctaaggagcttcaccagcttcagaacctgttcagcaaggcttccgcggattaccagtggttgctccagagccccaaaggggccgaggctaccctgccaactgtgatagcggagcttcagcagtttctgcggggcgcgcgggccatgtgtatcgaaagctgggcacgctttagcctggtcagaatggccggtggcacagccctccttgccgctagctgctttatctgtcttctcgcttcgcagtgggcaataagtcctggttttcccttttgccctttgctgctgacaccagtggcatgggggttggttggagcaattgcttatgccggtctgctcggaacaattgagctgaagctggacctggtgctactcggggcagtcgcggctgtgtcaagtttcctgccattcctttggaaagcatgggcgggctggggctccaagcgtcctcttgccacactgttcccgattccgggacctgtcctgctgctactcctgtttcggctcgccgtgttctttagtgactccttcgttgtggcggaggcccgcgcgactccttttctgctggggtcatttatcctgcttcttgtggttcagctgcactgggaaggccagctgctgccccctaagctactcaccatgccaagattgggaacctctgcgactaccaacccccccaggcacaacggcgcttatgctctgagactcggaattggattgttactttgcacccggctggccggactctttcatcggtgcccagaagaaactcctgtgtgtcatagcagcccctggctgtctcctctggcctccatggtcggcgggagagcaaaaaatctttggtacggcgcgtgcgtcgctgctttagtggctctgctcgccgccgtgcgtttgtggctccggcgatacggaaatctgaagagccccgaaccacctatgcttttcgtgcgttggggattaccattgatggccctgggtaccgctgcgtattgggcccttgctagtggcgccgacgaagccccgccacgattgagagtacttgtcagcggcgcctcaatggtactgccccgggccgtcgctggacttgccgcgtccggattggcactgttgctctggaaaccagtaacagtattggttaaggccggcgcaggagccccgagaactaggacagttcttactcccttctctgggccacccaccagccaagctgacctggattatgtagtgccacaaatataccgtcacatgcaagaagagttccggggtcgtctggagaggacaaagagtcagggacctctcacagttgccgcttatcaactgggctcggtatatagcgccgccatggtcactgctctcacactgctcgccttcccactgctgttgctgcatgcagaaagaattagtcttgtctttctgctccttttccttcaaagctttcttttacttcacctgctggccgctgggattcccgtcacaactccgggcccgtttaccgtcccgtggcaggctgtctcagcctgggcgctcatggccacacaaaccttttactcaaccggacatcagcctgtattcccggcaatccactggcacgccgccttcgtggggtttcctgagggtcacggcagctgtacctggctgcctgccctccttgtgggggccaataccttcgcaagtcatctgctctttgccgtcggctgccctcttctcttgttatggccattcctgtgcgagagccagggactgcgaaagcgtcagcaacctcccggaaacgaggctgacgcacgggtacggccagaggaggaagaggaacctcttatggaaatgcggcttagagacgcccctcagcatttttatgcagcacttctgcaactgggtctaaagtacctgtttatcctcgggatccaaattcttgcctgcgcccttgctgccagcatactgcggcgacaccttatggtgtggaaagtgtttgcacccaagttcatctttgaagccgtagggtttatcgttagtagtgtcggactgctgctcggcattgcattagtcatgagagttgatggcgccgtatcaagctggttcagacagctgttcctggcccagcagcggtag

SEQ ID NO: 225243 - DNA, 3270 bp, Artificial Sequence
  derived and/or modified sequence
atgcagaaggcctctgtgctgctcttcctggcctgggtgtgcttcctgttctacgccggcatcgccctcttcaccagcggcttcctgctgacccggctggagctgaccaaccacagcagctgccaggagcccccaggccctggcagcctgccctggggcagccagggcaagccaggggcctgctggatggccagccgcttcagccgggtggtgctggtgctgattgatgccctgcgctttgattttgcccagccccagcacagccacgtgccccgggagccccctgtgtccctgcccttcctgggcaagctgagcagcctgcagaggatcctggagatccagccccaccacgcccggctgtaccgcagccaggtggacccccccaccaccaccatgcagaggctgaaggccctgaccaccggcagcctgcccaccttcattgatgctggcagcaactttgccagccacgccatcgtggaggacaacctgatcaagcagctgaccagcgctggccggcgggtggtgttcatgggagatgacacctggaaggacctcttccctggggccttcagcaaggccttcttcttccccagcttcaacgtgcgggacctggacacagtggacaatggcatcctggagcacctgtaccccaccatggattctggagagtgggatgtgctgattgcccacttcctgggcgtggaccactgcggccacaagcacggcccccaccaccctgagatggccaagaagctgagccagatggaccaggtgatccagggcctggtggagcggctggagaatgacaccctgctggtggtggccggggaccacggcatgaccaccaatggagaccacggcggggacagcgagctggaggtgtctgctgccctcttcctgtacagccccacagctgtgttccccagcaccccacctgaggagcctgaggtgatcccccaggtgtccctggtgcccaccctggccctgctgctgggcctgcccatcccctttggaaacatcggggaggtgatggccgagctgttctctggaggagaggacagccagccccacagcagcgccctggcccaggccagcgccctgcacctgaatgcccagcaggtgagccgcttcctgcacacctacagcgctgccacccaggacctgcaggccaaggagctgcaccagctgcagaacctcttcagcaaggccagcgctgactaccagtggctgctgcagagccccaagggagctgaggccaccctgcccaccgtgattgctgagctgcagcagttcctgcggggggcccgggccatgtgcatcgagagctgggcccgcttcagcctggtgaggatggccggcggcacagccctgctggccgccagctgcttcatctgcctgctggccagccagtgggccatcagccctggcttccccttctgccccctgctgctgacccctgtggcctggggcctggtgggcgccatcgcctatgccggcctgctgggcaccatcgagctgaagctggacctggtgctgctgggcgctgtggccgctgtgtcctccttcctgcccttcctgtggaaggcctgggccggctggggcagcaagaggcccctggccaccctcttccccatccctggccctgtgctgctgctgctgctcttccggctggccgtgttcttcagtgacagctttgtggtggccgaggcccgggccacccccttcctgctgggcagcttcatcctgctgctggtggtgcagctgcactgggagggccagctgctgccccccaagctgctgaccatgccccggctgggcaccagcgccaccaccaaccccccaagacacaatggagcctatgccctgcggctgggcatcggcctgctgctgtgcacccggctggccggcctcttccaccgctgcccagaggagacccctgtgtgccacagcagcccctggctgagccccctggcctccatggtgggcggccgggccaagaacctgtggtacggggcctgtgtggccgccctggtggccctgctggccgctgtgcggctgtggctgcggcgctatggcaacctgaagagccctgagccccccatgctgtttgtgcgctggggcctgcccctgatggccctgggcacagctgcctactgggccctggccagcggggctgatgaggccccaccccggctgcgggtgctggtgtctggggcctccatggtgctgcccagggctgtggccggcctggccgccagcggcctggccctgctgctgtggaagcctgtgacagtgctggtgaaggccggggccggggcccccaggaccaggacagtgctgacccccttcagcggcccccccaccagccaggccgacctggactatgtggtgccccagatctaccgccacatgcaggaggagttccggggccgcctggagaggaccaagagccagggccccctgactgtggccgcctaccagctgggctctgtgtacagcgctgccatggtgacagccctgaccctgctggccttccccctgctgctgctgcacgccgagcgcatcagcctggtgttcctgctgctcttcctgcagagcttcctgctgctgcacctgctggccgccggcatccctgtgaccaccccaggccccttcaccgtgccctggcaggccgtgtctgcctgggccctgatggccacccagaccttctacagcacaggccaccagcccgtcttccctgccatccactggcatgctgcctttgtgggcttccctgagggccacggcagctgcacctggctgcctgccctgctggtgggcgccaacacctttgccagccacctgctgtttgctgtgggctgccccctgctgctgctgtggcccttcctgtgtgagagccagggcctgaggaagaggcagcagcccccaggaaatgaagcagatgcccgggtgcggcctgaggaggaggaggagcccctgatggagatgaggctgagagatgccccccagcacttctatgctgccctgctgcagctgggcctgaagtacctgttcatcctgggcatccagatcctggcctgtgccctggccgccagcatcctgcggcggcacctgatggtgtggaaggtgtttgcccccaagttcatctttgaggccgtgggcttcatcgtgtcctctgtgggcctgctgctgggcatcgccctggtgatgagggtggatggagctgtgtcctcctggttccggcagctgttcctggcccagcagaggtag

SEQ ID NO: 225244 - DNA, 3270 bp, Artificial Sequence
  derived and/or modified sequence
atgcagaaggccagcgtgctgctgttcctggcctgggtgtgcttcttgttctatgctggaattgccctgttcacgagtggctttctcctcacgcgacttgagctgaccaatcactcctcctgccaggagccccctggtccaggatcgcttccctggggctctcaggggaagcccggcgcgtgttggatggcgtcccgattcagcagagtggtccttgttctcatcgatgcccttaggttcgattttgctcagccccagcatagccacgtacctagggaacctcctgtgagcctcccatttcttggaaagctgtcttcactgcagaggatactggaaattcaaccccaccacgctaggttgtaccggagtcaggtggaccccccaactaccacaatgcagcgccttaaagctctgactaccggcagtttacccacctttatagacgctggaagtaacttcgcttcacatgccatcgtcgaagataaccttatcaaacagctaaccagtgctggtcgaagagtggttttcatgggagatgacacttggaaagacctgttcccaggggcctttagcaaagcttttttctttccaagcttcaacgtgcgtgatctggatacagtcgataatggaatcctggaacatctgtaccctacaatggattcaggggagtgggatgtgttgatagcccatttcctcggggtggatcactgcggccacaagcacgggccacatcaccccgagatggccaagaaactgtcccaaatggatcaggtaattcagggattggtggagcgcctcgagaatgataccctactggtggtggccggggatcatggtatgaccacgaacggagatcatggcggcgatagtgaactggaggtcagcgcagccctctttctttattccccaaccgccgttttcccatctacaccgcctgaggagccggaagttatccctcaggtctccctcgtgcccactctagccttattgctagggctgcccattcctttcggcaatattggtgaggtgatggctgagctattctcgggaggcgaggactcacagcctcattcttcggccttggcacaggctagtgccctgcaccttaatgcgcagcaggtgtcaagattcttgcacacctacagcgcggctacccaggatctgcaggctaaggaactccaccagctccaaaatctgttctcaaaagcctctgccgattaccaatggctccttcagagccccaaaggggcggaggcaaccctccctaccgtcatagctgagcttcaacagttcttgagaggagcaagggccatgtgcattgaatcttgggctagattctcccttgtacgaatggccggcgggactgcactactggccgctagctgtttcatttgcctgctggcctcacagtgggccattagccctggattcccattttgtcccctgctgctgactccagtggcctgggggctagtcggtgcaattgcctacgccggtctcttaggcaccattgaactgaagctggatctggtcctgttgggcgctgtggctgccgtaagcagcttccttcctttcctgtggaaggcttgggctggatggggttccaagcgtcctctggccacactgttccccattccaggccctgtacttttgctgctgctgttcaggctcgcagtgtttttcagcgattctttcgtagtggccgaagcccgcgccacgccgttccttctaggcagcttcatccttttgctggttgtgcaactgcactgggaggggcaactgctgccccccaaactgctgacgatgccaaggttgggcacctccgctactacaaatcctcctcggcacaatggcgcgtacgcactcagacttggtattggccttctgctgtgcactaggctcgcgggactgttccatagatgtccagaagaaacacctgtttgccactcaagtccttggctctcccctctggcatcaatggtgggagggagagccaaaaatctttggtatggggcttgcgtcgcagcgctggtggccctcctcgcagccgtacgactgtggttgaggcgctacggcaacctcaaaagccccgagccccctatgctttttgtcaggtggggtctgcctttaatggccctcggaactgccgcttactgggcgttggcatccggggcagacgaagccccccccaggctgagagtgctcgtgtcaggagctagtatggtcctgccccgggccgttgccggcttggccgcctcaggcttggctttactgttatggaagcctgtgacagtgctcgtgaaggcgggcgctggcgctccaagaaccagaacagttctgacaccattttctgggcctcccacctcccaagctgacctagattacgtggtccctcagatttacaggcacatgcaagaggagtttaggggccgtctggagcgtaccaaatctcaagggcctttgaccgttgcagcttaccaacttgggagtgtatattccgcagccatggtgaccgccctaacattgctggcttttcctctcctcttgctccacgcagagcggatctccctggtgtttctgctcctgttcctgcaaagctttttactcctccacttgctggccgctggcatccctgtgaccacccctggcccgttcaccgtgccttggcaggccgtgtctgcttgggccctgatggctacccagactttctattcaacaggccaccaaccagtgttccccgcaatccactggcacgccgccttcgttggattccccgagggccacggcagctgtacatggcttcctgctttattagtcggcgcaaataccttcgctagccaccttcttttcgcagtgggctgccctctcctactgctgtggcctttcctttgcgaaagtcagggcctaagaaagcgacagcagcctcccggtaatgaagcggacgcacgggtgaggccggaagaggaggaggaacctttgatggaaatgagactacgggatgccccacaacacttctatgcggcgctgctacagctgggcctgaagtatctgtttatcctgggcatccagatcctagcatgtgcacttgctgcctccatacttaggcgccatttgatggtgtggaaagtcttcgcccccaaatttatttttgaagcggtaggtttcatagtgagcagcgtagggttgctgctgggaatcgccctggtgatgagggtggatggagccgtatcatcttggtttaggcagctgttcctggctcagcaacgatag

SEQ ID NO: 225245 - DNA, 3270 bp, Artificial Sequence
  derived and/or modified sequence
atgcagaaggccagcgtgctgctgttcctggcctgggtgtgcttcttattctacgccggcattgctctgtttacctccgggttcttgctgacgcggttggaactgaccaatcatagctcatgtcaggaacctcccgggccaggcagtttgccctggggcagccagggtaaacctggagcctgttggatggcatcaaggtttagtagagtggttctggtactgatcgacgcattacggttcgattttgctcagcctcagcacagccacgtgcctcgcgaaccgccagtgtctctgccttttctgggtaaattgagttctctccagcgcatcctggaaatacaaccacatcacgctaggttgtaccggagtcaagtggacccccccaccactaccatgcagcgcctgaaggctctcacaactggctccctgcctacctttattgacgccgggagtaactttgcttctcatgcaatcgtggaagataatctgattaagcagctcacatcagctggaaggcgggtggtcttcatgggggatgatacttggaaagacctatttccaggcgcattcagcaaagcctttttttttcccagttttaatgtgagagatctcgacaccgtggacaatgggatcttggagcatctttaccccaccatggacagcggtgagtgggacgttcttatcgctcacttcttgggagtggaccactgtggacacaaacacggaccccatcacccggagatggctaaaaaactgagccagatggatcaggtcatccaggggcttgtcgaacggctggagaatgatacactgttggttgtggccggcgaccacggcatgaccactaacggtgatcacgggggggacagtgagctcgaggtgtctgccgcactcttcctgtactctcctacagccgtctttccctcaacaccaccagaggaaccagaggtgatcccccaagtgagtcttgtaccaacacttgccttactgcttggactaccaatcccattcgggaatataggcgaagtgatggctgagctgttttccggcggcgaggactctcagcctcacagttccgccttggctcaggcaagtgcactgcacctcaatgcacaacaagtaagtaggttcctccatacttatagcgccgctacacaggacctccaggcgaaagagttacaccagctgcagaatctctttagcaaggcctccgccgattatcaatggctgttacagtcccctaaaggggccgaggccactctgccgactgtgatcgccgaacttcagcagtttctgagaggtgccagagccatgtgtattgagtcctgggcccgatttagtctagtccggatggccggtggaacagctctgctggccgccagttgcttcatctgcttgctggcctcccagtgggcaattagccccggtttccccttttgcccgctgctgctcacccctgtggcgtggggcctcgtgggtgctattgcgtatgctggtctcttagggacaattgagttgaagctggacctggtgttgctcggagcagttgccgcagttagttcgttcttgcccttcctatggaaggcttgggccggctgggggtcaaagaggcctctggccactctcttcccaatcccaggacctgtgctgctgttgctgctcttccgactggctgttttcttctctgattccttcgtcgtcgctgaggcacgagccacaccttttctcttgggaagcttcatcttgctgctagtggtgcagctccattgggaaggacagctcctgcctcccaaactgctgacaatgccgaggttaggtactagtgccaccacaaaccctcctagacataatggagcctatgccctgcggctgggcatcgggctcctgctctgcacgcggttagctggcctcttccacagatgtcccgaagagactccagtgtgtcactctagtccttggctctccccccttgccagcatggttgggggccgggccaagaatttgtggtatggtgcctgcgtggctgccctggtggcactgctggcagccgtccggctttggttgcgtagatacggaaatctgaaaagcccagagcctcctatgttgttcgtgcgatggggactgcccctaatggccctggggaccgcagcatattgggcgttagccagcggtgctgacgaggctcctccgcgcttgcgggtgcttgtgtcaggagcaagcatggtgctcccaagagccgtagctggactggccgcctctggattggccctgctgctatggaaaccagttacggtactggtcaaagccggggctggtgccccacgcaccaggacagtgctgactccctttagcggaccccccacctcccaggccgacctggattacgtggtacctcagatctataggcacatgcaagaggaatttcgggggcgactggagaggacaaaatcacagggccccctgaccgtggcagcctaccagcttggttccgtttatagtgctgcgatggtaacggcgctgacactccttgcattcccccttctattgttgcatgctgagcggatatcattggtcttcttgctgctctttttgcagtcttttctgttgcttcacctgctcgcggcggggattccagtcaccacacccggcccttttacggtaccatggcaggcagtgtccgcctgggcgctgatggctactcaaacattctactctacaggacaccagcccgtcttccctgccatacactggcacgcggctttcgtgggattcccagaaggccacggatcctgcacctggctcccggctctcctggttggcgctaacacattcgcatcccacctactcttcgctgtcggctgccctttgctgctgctctggccttttctctgcgaatcccagggactgcgcaaaagacagcagcccccaggaaatgaggctgacgcaagggttaggcccgaggaggaagaggagcctttaatggagatgcggctgcgggacgcaccccaacacttttacgctgcactccttcaactcgggctgaagtatttattcatcttgggcatccagattttggcctgcgccctcgctgcttctattcttagaagacatctgatggtgtggaaggtgtttgcaccaaagttcatatttgaagcagtaggctttattgtgagctccgtaggtctcctgctcggcatcgcacttgtcatgcgtgtggacggcgctgttagctcatggttcaggcagctcttccttgcgcagcagaggtag

SEQ ID NO: 225246 - DNA, 3690 bp, Artificial Sequence
  derived and/or modified sequence
gcacttccgggtgccattgcaggatgcagaaagcctcagtgttgctcttcctggcctgggtctgcttcctcttctacgctggcattgccctcttcaccagtggcttcctgctcacccgtttggagctcaccaaccatagcagctgccaagagcccccaggccctgggtccctgccatgggggagccaagggaaacctggggcctgctggatggcttcccgattttcgcgggttgtgttggtgctgatagatgctctgcgatttgacttcgcccagccccagcattcacacgtgcctagagagcctcctgtctccctacccttcctgggcaaactaagctccttgcagaggatcctggagattcagccccaccatgcccggctctaccgatctcaggttgaccctcctaccaccaccatgcagcgcctcaaggccctcaccactggctcactgcctacctttattgatgctggtagtaacttcgccagccacgccatagtggaagacaatctcattaagcagctcaccagtgcaggaaggcgtgtagtcttcatgggagatgatacctggaaagaccttttccctggtgctttctccaaagctttcttcttcccatccttcaatgtcagagacctagacacagtggacaatggcatcctggaacacctctaccccaccatggacagtggtgaatgggacgtgctgattgctcacttcctgggtgtggaccactgtggccacaagcatggccctcaccaccctgaaatggccaagaaacttagccagatggaccaggtgatccagggacttgtggagcgtctggagaatgacacactgctggtagtggctggggaccatgggatgaccacaaatggagaccatggaggggacagtgagctggaggtctcagctgctctctttctgtatagccccacagcagtcttccccagcaccccaccagaggagccagaggtgattcctcaagttagccttgtgcccacgctggccctgctgctgggcctgcccatcccatttgggaatatcggggaagtgatggctgagctattctcagggggtgaggactcccagccccactcctctgctttagcccaagcctcagctctccatctcaatgctcagcaggtgtcccgatttcttcatacctactcagctgctactcaggaccttcaagctaaggagcttcatcagctgcagaacctcttctccaaggcctctgctgactaccagtggcttctccagagccccaagggggctgaggcgacactgccgactgtgattgctgagctgcagcagttcctgcggggagctcgggccatgtgcatcgagtcttgggctcgtttctctctggtccgcatggcggggggtactgctctcttggctgcttcctgctttatctgcctgctggcatctcagtgggcaatatccccaggctttccattctgccctctactcctgacacctgtggcctggggcctggttggggccatagcgtatgctggactcctgggaactattgagctgaagctagatctagtgcttctaggggctgtggctgcagtgagctcattcctcccttttctgtggaaagcctgggctggctgggggtccaagaggcccctggcaaccctgtttcccatccctgggcccgtcctgttactcctgctgtttcgcttggctgtgttcttctctgatagttttgttgtagctgaggccagggccacccccttccttttgggctcattcatcctgctcctggttgtccagcttcactgggagggccagctgcttccacctaagctactcacaatgccccgccttggcacttcagccacaacaaaccccccacggcacaatggtgcatatgccctgaggcttggaattgggttgcttttatgtacaaggctagctgggctttttcatcgttgccctgaagagacacctgtttgccactcctctccctggctgagtcctctggcatccatggtgggtggtcgagccaagaatttgtggtatggagcttgtgtggcggcgctggtggccctgttagctgccgtgcgcttgtggcttcgccgctatggtaatctcaagagccccgagccacccatgctctttgtgcgctggggactgcccctaatggcattgggtactgctgcctactgggcattggcgtcgggggcagatgaggctcccccccgtctccgggtcctggtctctggggcatccatggtgctgcctcgggctgtagcagggctggctgcttcagggctcgcgctgctgctctggaagcctgtgacagtgctggtgaaggctggggcaggcgctccaaggaccaggactgtcctcactcccttctcaggcccccccacttctcaagctgacttggattatgtggtccctcaaatctaccgacacatgcaggaggagttccggggccggttagagaggaccaaatctcagggtcccctgactgtggctgcttatcagttggggagtgtctactcagctgctatggtcacagccctcaccctgttggccttcccacttctgctgttgcatgcggagcgcatcagccttgtgttcctgcttctgtttctgcagagcttccttctcctacatctgcttgctgctgggatacccgtcaccacccctggtccttttactgtgccatggcaggcagtctcggcttgggccctcatggccacacagaccttctactccacaggccaccagcctgtctttccagccatccattggcatgcagccttcgtgggattcccagagggtcatggctcctgtacttggctgcctgctttgctagtgggagccaacacctttgcctcccacctcctctttgcagtaggttgcccactgctcctgctctggcctttcctgtgtgagagtcaagggctgcggaagagacagcagcccccagggaatgaagctgatgccagagtcagacccgaggaggaagaggagccactgatggagatgcggctccgggatgcgcctcagcacttctatgcagcactgctgcagctgggcctcaagtacctctttatccttggtattcagattctggcctgtgccttggcagcctccatccttcgcaggcatctcatggtctggaaagtgtttgcccctaagttcatatttgaggctgtgggcttcattgtgagcagcgtgggacttctcctgggcatagctttggtgatgagagtggatggtgctgtgagctcctggttcaggcagctatttctggcccagcagaggtagcctagtctgtgattactggcacttggctacagagagtgcttgagaacagtgtagcctggcctgtacaggtactggatgatctgcaagacaggctcagccatactcttactatcatgcagccaggggccgctgacatctaggacttcattattctataattcaggaccacagtggagtatgatccctaactcctgatttggatgcatctgagggacaaggggggcggtctccgaagtggaataaaataggccgggcgtggtgacttgcacctataatcccagcactttgggaggcagaggtgggaggattgcttggtcccaggagttcaagaccagcctgtggaacataacaagaccccgtctctactatttaaaaaaaagtgtaataaaatgataat

SEQ ID NO: 225247 - DNA, 4066 bp, Artificial Sequence
  derived and/or modified sequence
ctcccgagaacctcaccccccggtattcccctcaccctgaagtaagggagtctccctcttcccctcagctcctaaccaaggtgctcagtaccgcggctagggtgcccagcgggaggctgggtagttaccggaggaggcagagccggtcgcacgcctgggtcccagcggaggcccagtcgactctcgacccgggccccagcctccttgcgtggcgaaggtcgtgcctcaggtctcctggcgaacctggccgcccggaagcggagagtgactcctccccttcgtcccctcggtgcccgccaggcggcgccgtcggctgggcccggattcccctgcggcttcgatccctttccactgggtattgagattggcgaggggagaggcgcagaaacggcgtgatgcagaaagcctcagtgttgctcttcctggcctgggtctgcttcctcttctacgctggcattgccctcttcaccagtggcttcctgctcacccgtttggagctcaccaaccatagcagctgccaagagcccccaggccctgggtccctgccatgggggagccaagggaaacctggggcctgctggatggcttcccgattttcgcgggttgtgttggtgctgatagatgctctgcgatttgacttcgcccagccccagcattcacacgtgcctagagagcctcctgtctccctacccttcctgggcaaactaagctccttgcagaggatcctggagattcagccccaccatgcccggctctaccgatctcaggttgaccctcctaccaccaccatgcagcgcctcaaggccctcaccactggctcactgcctacctttattgatgctggtagtaacttcgccagccacgccatagtggaagacaatctcattaagcagctcaccagtgcaggaaggcgtgtagtcttcatgggagatgatacctggaaagaccttttccctggtgctttctccaaagctttcttcttcccatccttcaatgtcagagacctagacacagtggacaatggcatcctggaacacctctaccccaccatggacagtggtgaatgggacgtgctgattgctcacttcctgggtgtggaccactgtggccacaagcatggccctcaccaccctgaaatggccaagaaacttagccagatggaccaggtgatccagggacttgtggagcgtctggagaatgacacactgctggtagtggctggggaccatgggatgaccacaaatggagaccatggaggggacagtgagctggaggtctcagctgctctctttctgtatagccccacagcagtcttccccagcaccccaccagaggagccagaggtgattcctcaagttagccttgtgcccacgctggccctgctgctgggcctgcccatcccatttgggaatatcggggaagtgatggctgagctattctcagggggtgaggactcccagccccactcctctgctttagcccaagcctcagctctccatctcaatgctcagcaggtgtcccgatttcttcatacctactcagctgctactcaggaccttcaagctaaggagcttcatcagctgcagaacctcttctccaaggcctctgctgactaccagtggcttctccagagccccaagggggctgaggcgacactgccgactgtgattgctgagctgcagcagttcctgcggggagctcgggccatgtgcatcgagtcttgggctcgtttctctctggtccgcatggcggggggtactgctctcttggctgcttcctgctttatctgcctgctggcatctcagtgggcaatatccccaggctttccattctgccctctactcctgacacctgtggcctggggcctggttggggccatagcgtatgctggactcctgggaactattgagctgaagctagatctagtgcttctaggggctgtggctgcagtgagctcattcctcccttttctgtggaaagcctgggctggctgggggtccaagaggcccctggcaaccctgtttcccatccctgggcccgtcctgttactcctgctgtttcgcttggctgtgttcttctctgatagttttgttgtagctgaggccagggccacccccttccttttgggctcattcatcctgctcctggttgtccagcttcactgggagggccagctgcttccacctaagctactcacaatgccccgccttggcacttcagccacaacaaaccccccacggcacaatggtgcatatgccctgaggcttggaattgggttgcttttatgtacaaggctagctgggctttttcatcgttgccctgaagagacacctgtttgccactcctctccctggctgagtcctctggcatccatggtgggtggtcgagccaagaatttgtggtatggagcttgtgtggcggcgctggtggccctgttagctgccgtgcgcttgtggcttcgccgctatggtaatctcaagagccccgagccacccatgctctttgtgcgctggggactgcccctaatggcattgggtactgctgcctactgggcattggcgtcgggggcagatgaggctcccccccgtctccgggtcctggtctctggggcatccatggtgctgcctcgggctgtagcagggctggctgcttcagggctcgcgctgctgctctggaagcctgtgacagtgctggtgaaggctggggcaggcgctccaaggaccaggactgtcctcactcccttctcaggcccccccacttctcaagctgacttggattatgtggtccctcaaatctaccgacacatgcaggaggagttccggggccggttagagaggaccaaatctcagggtcccctgactgtggctgcttatcagttggggagtgtctactcagctgctatggtcacagccctcaccctgttggccttcccacttctgctgttgcatgcggagcgcatcagccttgtgttcctgcttctgtttctgcagagcttccttctcctacatctgcttgctgctgggatacccgtcaccacccctggtccttttactgtgccatggcaggcagtctcggcttgggccctcatggccacacagaccttctactccacaggccaccagcctgtctttccagccatccattggcatgcagccttcgtgggattcccagagggtcatggctcctgtacttggctgcctgctttgctagtgggagccaacacctttgcctcccacctcctctttgcagtaggttgcccactgctcctgctctggcctttcctgtgtgagagtcaagggctgcggaagagacagcagcccccagggaatgaagctgatgccagagtcagacccgaggaggaagaggagccactgatggagatgcggctccgggatgcgcctcagcacttctatgcagcactgctgcagctgggcctcaagtacctctttatccttggtattcagattctggcctgtgccttggcagcctccatccttcgcaggcatctcatggtctggaaagtgtttgcccctaagttcatatttgaggctgtgggcttcattgtgagcagcgtgggacttctcctgggcatagctttggtgatgagagtggatggtgctgtgagctcctggttcaggcagctatttctggcccagcagaggtagcctagtctgtgattactggcacttggctacagagagtgcttgagaacagtgtagcctggcctgtacaggtactggatgatctgcaagacaggctcagccatactcttactatcatgcagccaggggccgctgacatctaggacttcattattctataattcaggaccacagtggagtatgatccctaactcctgatttggatgcatctgagggacaaggggggcggtctccgaagtggaataaaataggccgggcgtggtgacttgcacctataatcccagcactttgggaggcagaggtgggaggattgcttggtcccaggagttcaagaccagcctgtggaacataacaagaccccgtctctactatttaaaaaaaagtgtaataaaatgataatataa

SEQ ID NO: 225248 - DNA, 3270 bp, Artificial Sequence
  derived and/or modified sequence
atgcaaaaagcgtctgttcttctgttcctggcgtgggtgtgctttctgttttacgcagggatcgccctgtttacctccgggttcctgctgacaagactggagctcaccaaccactcgtcatgccaggagccaccagggccaggatccttgccctggggaagtcaaggaaagcctggagcatgttggatggcctcccgttttagtcgtgtcgtcttggtattaatagacgccctccggttcgacttcgcgcagccccagcatagccacgtgcccagagagccaccagtgagcctgcctttccttggtaaacttagctccctgcaacgaattttggagatacaacctcaccacgctaggctgtatcgtagccaagttgatccgcctacaacgacaatgcaacggcttaaagccctaacgactggatctcttccaacatttattgatgctggctccaacttcgcctcccatgccatcgtggaggacaacttgattaaacagctgactagtgctggcaggcgtgtggtattcatgggcgatgatacttggaaagacctgttccctggggcattcagcaaggcgttcttctttccatccttcaatgtgagagacttggacaccgtagataacggaatactcgagcatctgtaccctactatggacagtggggagtgggacgtcctgatcgcgcatttcctgggtgtggatcactgcggacataaacatggtcctcaccatcctgaaatggccaagaaactcagtcaaatggaccaagttatacagggacttgtcgagaggctcgagaacgacacactgcttgtggttgcaggtgatcacgggatgactactaatggagatcacgggggtgacagcgagcttgaagtgtctgcggctctgtttttgtatagtcccaccgctgtgtttccatctactccacccgaggaacccgaggttatcccccaagtatcattagtaccgaccttggcgctcctacttggacttcctattcccttcggaaacatcggggaggtcatggccgaacttttttccggaggggaggactcacaacctcattcctctgcattggcacaagcctctgccctgcatctgaatgctcagcaggtcagtcgatttttgcatacctacagcgccgctacacaggacctgcaagcaaaagaactgcaccagctgcaaaacctgtttagcaaagccagcgccgattatcagtggttgctgcagtcccccaagggcgctgaagcgaccttgcctactgtcatcgccgagctgcaacagttccttcggggagcacgggctatgtgcatcgaaagctgggctaggtttagcttagtgagaatggctggcggtacagcccttttggccgctagctgcttcatctgtctactggccagtcagtgggcaatctcacccggttttccgttttgtcctcttctattaacccccgtggcctgggggttggtgggcgctatagcttatgccggtttgttgggtacaatagaactgaaattggatctggtcttgttgggcgctgtcgctgccgtttcatcattcctccctttcttgtggaaggcctgggccggatggggcagcaaacgtcctttggctactctgttccctattccaggtccagtgctgttactccttctgtttcgactggctgttttctttagtgactcctttgttgtcgctgaggccagagccaccccattcctgctggggtcgtttatcctgcttttggtggtccaactgcactgggagggccaattacttcctccaaagctcctgacaatgcccaggctgggcacctccgccacaaccaatcctcccagacacaacggagcctacgccctccgccttggcatcgggctcctcctttgcacacgcctggctgggttgtttcatcgctgcccagaagagactccagtgtgccacagctccccttggctctccccactggcatcaatggtcggaggtcgagccaagaacttatggtacggggcttgtgtcgcagctctggtcgctctgctcgctgctgtgcgcctttggttgcgccgatacggtaatctcaaaagtcccgaacctcccatgctgtttgtgcgatggggtttaccgctgatggcactgggcaccgccgcttactgggcactggcatcaggtgccgatgaagcacctccacgcctgagagtgctagtgtcaggggctagtatggtcctgccccgagctgttgcgggattagctgcctccgggctcgccttactcctgtggaaacccgtcaccgtgctagtgaaagcaggggctggcgctcccaggacacgaacagttctaacacccttctcaggccctcccacctctcaagccgatctggattacgtggttccgcagatctacagacatatgcaagaggaatttagaggcaggctcgagcgaacaaagagtcaggggccactcactgtcgcagcttatcaactgggtagcgtgtacagtgccgcaatggtcaccgctctcaccttacttgcgtttcccttgttgttactgcacgccgagagaataagtctggtctttctccttcttttcctccagagcttcctgttgctgcacctcctggcggctggcatccctgtcaccacacccggaccttttactgtgccatggcaggcggtctctgcatgggctctcatggccacccagacgttttacagcacaggccatcaaccggtgtttccggctatccattggcacgccgcatttgtgggctttcccgagggacatggatcgtgtacctggctgccagcgctgctggtgggcgctaacacttttgcctcacatctgctctttgctgttgggtgtccactgctgctcctgtggcctttcctttgcgagtctcaaggcctccgtaagcgccaacagcccccagggaacgaggccgatgctcgcgtccgccctgaagaggaagaggaaccattgatggaaatgcgactccgtgatgccccacaacacttttacgctgcattgctgcaactaggcctgaaatacctgtttatcctcgggatacagatcctcgcctgcgccctagctgcttctattctaagacggcacctcatggtgtggaaggttttcgcacccaagttcattttcgaagctgtgggattcatcgtctcttctgtggggctactattaggtatcgcactcgtcatgagggtagatggtgccgtatcatcctggttccgtcagctgtttttggcccagcaacggtag

SEQ ID NO: 225249 - DNA, 3270 bp, Artificial Sequence
  derived and/or modified sequence
atgcagaaggcctctgtgctgctcttcctcgcttgggtgtgtttcttgttctacgcaggaattgcgctgttcacttccggattcctactgactaggttagagctgactaatcattccagctgtcaagagccacctggtccagggagtttgccgtgggggagtcagggaaagccaggagcctgctggatggctagtcgctttagcagggtagttctggtgcttatcgatgccctaaggttcgacttcgcccagcctcaacactcacacgttcctcgggaacctcctgtctctctgccctttctgggaaaactgagttccctgcagagaatccttgagattcagccccaccacgcccgtttgtaccgttcccaagtcgatccccctactacaaccatgcagcgtctgaaggcacttactactgggagcctgccaacatttatcgacgccggatcaaatttcgcgagtcacgctattgttgaggataatctcatcaagcagctaacctctgccggacgccgagtggtctttatgggtgacgacacatggaaggatctctttcctggcgcattttcaaaggctttcttctttccctccttcaacgtacgcgacctggatactgtggataatgggattctggaacatctgtatcccactatggactccggcgaatgggacgtgctcatagcccacttcctaggcgtggatcactgcgggcataagcacggaccacatcatcccgagatggctaagaagcttagccagatggatcaggtgatacaggggctcgtagaaagattagaaaatgacactctcctggtggtggctggcgaccacggtatgactaccaacggagaccacggtggcgattcagaactggaggtctccgctgcacttttcctctattcgccgaccgctgtcttccccagcactcctccagaggagcccgaagtcatcccccaggtcagcctcgttcccacccttgctctcctgctcggactcccaatcccgttcgggaatattggcgaagtgatggctgagctgttttccggcggagaggattcacaaccacactcctcagctttggctcaagcctctgccctgcaccttaacgcacagcaggtctccagattcctgcacacctattctgctgcaacccaggacctgcaggccaaggaacttcatcagttgcagaatctgttctcaaaggcctccgcggattaccaatggctactccagagcccaaaaggagcagaggcaactctacctacggtgatcgccgagctgcagcagttccttcggggagcgcgagcaatgtgcatcgaaagctgggccagattcagcctggtcagaatggccggaggcacagctcttctggccgcttcatgcttcatttgtctgttggcttctcagtgggctattagccctgggtttcctttctgcccgctccttctcacaccagtcgcttgggggttggtgggtgcgattgcttacgcagggttgctcggcactatcgaactaaagctggacctagtccttctgggagccgtcgcagctgtttccagtttcctgccattcttatggaaagcctgggcaggctggggaagcaagcgccctctcgctacgctttttccgataccaggcccagtgttgctcctgctgctgtttaggctggcagtgttcttcagcgactctttcgtggtcgctgaggctagggcaaccccatttctgctgggaagttttatccttctgctggtcgttcagctgcactgggaaggccagctgttgccacccaagttactgactatgccgcgactcggcacctctgccactactaatcctccacgccataacggggcttacgctctgcggctcgggatcgggctcttgctgtgcaccagactggcaggactgttccacaggtgtcccgaggagacccccgtctgccactcaagcccctggttgtccccattagccagcatggtcggcggtcgagccaaaaacctgtggtatggcgcttgtgtcgccgcattggttgcactactggcggcagtcagactgtggctgcggagatacggcaatctgaagtcccccgagccaccgatgctctttgtgagatgggggctgcctctcatggcccttgggacggcggcatactgggccctggcttcaggtgctgacgaggctccccctaggctgcgtgtattagtatccggcgcaagcatggtacttccgagggctgtggccggtctggccgcatccggcctcgcccttttgctgtggaagcccgtgacagttctcgtgaaggctggcgctggggctccgcgaactcgcaccgtcctgaccccattttctggtccccctactagccaagcggatctggactatgtggtgccccaaatttaccgacatatgcaggaggaattccgcggacgtttagagagaaccaaatcacaaggaccactgaccgttgccgcttaccaactgggtagcgtgtatagtgccgctatggtcaccgctttaacccttcttgccttcccactgttgctgctgcatgccgagaggatttcactcgtgttcctattgctgtttctccagtcctttcttttgctccacctcctcgcagccggaataccagttactactcccggtccatttactgtaccatggcaggctgtgtctgcctgggccctgatggccacacagactttttattccactggacaccagccagtgttcccagcgattcattggcacgcagcattcgttggatttccggagggacatggctcttgtacttggttgcctgcactactcgtgggcgctaacaccttcgcctcacatctcctctttgccgtgggatgcccactactgctcttatggccctttctgtgcgaaagccaaggcctccgaaagcggcagcagccgcctggaaatgaagctgatgccagagtcagacctgaagaggaggaggaacctctcatggagatgaggcttagggacgccccacagcatttctatgccgcactcttgcagttgggcctcaagtacctgttcatactcggtattcaaatcttggcctgcgccctggctgcctcaatactgaggaggcatcttatggtatggaaggtgtttgcgcctaagttcatttttgaggcggttggcttcatcgtctcaagcgtgggactgttactgggcatcgccctcgtgatgagggtggatggggcagtgtcctcatggttccggcagttattcctggctcagcagcggtag

SEQ ID NO: 225250 - DNA, 150 bp, Artificial Sequence
  derived and/or modified sequence
gtaggccctacaggcccagaaggccctcgaggcaatatcggcccactggggcctactgggctgcccggacctatggggcctattgggaagcctggccctaaaggagaagctggtcctaccggacctcaggtgttccccttctgcatctag

SEQ ID NO: 225251 - protein, 410 aa, Artificial Sequence
  derived and/or modified sequence
MHRKHLQEIPDLSSNVATSFTWGWDSSKTSELLSGMGVSALEKEEPDSENIPQELLSNLGHPESPPRKRLKSKGSDKDFVIVRRPKLNRENFPGVSWDSLPDELLLGIFSCLCLPELLKVSGVCKRWYRLASDESLWQTLDLTGKNLHPDVTGRLLSQGVIAFRCPRSFMDQPLAEHFSPFRVQHMDLSNSVIEVSTLHGILSQCSKLQNLSLEGLRLSDPIVNTLAKNSNLVRLNLSGCSGFSEFALQTLLSSCSRLDELNLSWCFDFTEKHVQVAVAHVSETITQLNLSGYRKNLQKSDLSTLVRRCPNLVHLDLSDSVMLKNDCFQEFFQLNYLQHLSLSRCYDIIPETLLLVTRAGVRIRLDSDIGCPQTYRTSKLKSSHKLFCQHVRVICIFVCDFYFYRLVLKQ

SEQ ID NO: 225252 - DNA, 1462 bp, Artificial Sequence
  derived and/or modified sequence
cgggctgtagagccttgcgcgcgcagtggggatggaacgttgctaggcttagcgggtctggctgctgggggcccgagcagcacgctcggagccgccgcgcgccaaagcgggaatctgggaggcgagcagctctgcagttaatgcacgtattttaaactcccgggcctgcggacgctatgcacaggaagcacctccaggagattccagacctgagtagcaacgttgccaccagcttcacgtggggatgggattccagcaagacttctgaactgctgtcaggcatgggggtctccgccctggagaaagaggagcccgacagtgagaacatcccccaggaactgctctcaaacctgggccacccggagagccccccacggaaacggctgaagagcaaagggagtgacaaagactttgtgattgtccgcaggcctaagctaaatcgagagaactttccaggtgtttcatgggactcccttccggatgagctgctcttgggaatcttttcctgtctgtgcctccctgagctgctaaaggtctctggtgtttgtaagaggtggtatcgcctagcgtctgatgagtctctatggcagaccttagacctcacaggtaaaaatctgcacccggatgtgactggtcggttgctgtctcaaggggtgattgccttccgctgcccacgatcatttatggaccaaccattggctgaacatttcagcccttttcgtgtacagcacatggacctatcgaactcagttatagaagtgtccaccctccacggcatactgtctcagtgttccaagttgcagaatctaagcctggaaggcctgcggctttcggatcccattgtcaatactctcgcaaaaaactcaaatttagtgcgacttaacctttctgggtgttctggattctctgaatttgccctgcagactttgctaagcagctgttccagactggatgagctgaacctctcctggtgttttgatttcactgaaaagcatgtacaggtggctgttgcgcatgtgtcagagaccatcacccagctgaatcttagcggctacagaaagaatctccagaaatcagatctctctactttagttagaagatgccccaatcttgtccatctagacttaagtgatagtgtcatgctaaagaatgactgctttcaggaatttttccagctcaactacctccaacacctatcactcagtcggtgctatgatataatacctgaaactttactattagtgacaagagctggggttaggatccggttggactctgacatcggatgccctcaaacatacagaacttccaaactcaagtccagccataagctattttgccaacatgtcagagtaatctgtatttttgtatgtgatttctacttttatagacttgttttaaaacaataaaacacatttttataaaaatgagtgcttaaactaaaaaaaaaaaaaaaaaaaaa

SEQ ID NO: 225253 - DNA, 1233 bp, Artificial Sequence
  derived and/or modified sequence
atgcacagaaagcacctgcaggagatccccgacctgagcagcaacgtggccaccagcttcacctggggctgggacagcagcaagaccagcgagctgctgagcggcatgggcgtgagcgccctggagaaggaggagcccgacagcgagaacatcccccaggagctgctgagcaacctgggccaccccgagagcccccccagaaagagactgaagagcaagggcagcgacaaggacttcgtgatcgtgagaagacccaagctgaacagagagaacttccccggcgtgagctgggacagcctgcccgacgagctgctgctgggcatcttcagctgcctgtgcctgcccgagctgctgaaggtgagcggcgtgtgcaagagatggtacagactggccagcgacgagagcctgtggcagaccctggacctgaccggcaagaacctgcaccccgacgtgaccggcagactgctgagccagggcgtgatcgccttcagatgccccagaagcttcatggaccagcccctggccgagcacttcagccccttcagagtgcagcacatggacctgagcaacagcgtgatcgaggtgagcaccctgcacggcatcctgagccagtgcagcaagctgcagaacctgagcctggagggcctgagactgagcgaccccatcgtgaacaccctggccaagaacagcaacctggtgagactgaacctgagcggctgcagcggcttcagcgagttcgccctgcagaccctgctgagcagctgcagcagactggacgagctgaacctgagctggtgcttcgacttcaccgagaagcacgtgcaggtggccgtggcccacgtgagcgagaccatcacccagctgaacctgagcggctacagaaagaacctgcagaagagcgacctgagcaccctggtgagaagatgccccaacctggtgcacctggacctgagcgacagcgtgatgctgaagaacgactgcttccaggagttcttccagctgaactacctgcagcacctgagcctgagcagatgctacgacatcatccccgagaccctgctgctggtgaccagagccggcgtgagaatcagactggacagcgacatcggctgcccccagacctacagaaccagcaagctgaagagcagccacaagctgttctgccagcacgtgagagtgatctgcatcttcgtgtgcgacttctacttctacagactggtgctgaagcagtag

SEQ ID NO: 225254 - DNA, 1233 bp, Artificial Sequence
  derived and/or modified sequence
atgcatagaaagcacctccaggagattccagatctgtcctcgaacgttgccacgtcatttacttggggttgggactcgtcaaaaacttccgagctcctgagcggaatgggcgtgtctgcactggaaaaggaggaacccgacagcgaaaacattccccaggagctgctgagcaacctgggacatcccgaatccccaccaagaaaacgcctcaagagcaaaggctcagacaaggatttcgtgattgtccggcggcctaagctgaaccgggaaaactttcccggtgtttcgtgggattcactgcctgacgagttactgcttggcatattttcctgtttatgcctccctgagctgttgaaggtaagtggagtgtgcaaacgctggtatcggctggcatctgacgaatcactctggcagaccctcgacctgacaggcaaaaaccttcatcctgatgtgactggtcggctcctatctcagggggtgatcgcattccggtgcccacgtagttttatggaccagcccctggcggagcacttctcgccattcagggtacagcatatggatctctcaaactctgtgattgaggtttccactctccacggtatcttatcccagtgttcaaagctgcagaatctctctctggaagggttgcgtctgagcgaccccatcgtgaacaccctggcgaagaattcaaatctggtccgcctgaacctcagtgggtgttccgggtttagcgagtttgccctccagactctcctgtccagctgttccagactcgatgagctgaatctgagctggtgcttcgacttcaccgagaagcatgtgcaggtagccgtggctcacgtcagcgaaaccataacccagctgaatctcagtggctatcgcaagaatctgcaaaaatccgatctctccacactagtgagacgctgtcccaaccttgtacacctggatctgagtgacagcgtgatgttgaagaacgattgtttccaggaatttttccaactgaattatctgcagcatctgtctctttcgcgctgctacgatattatacctgagactctgctgctagtaactcgggcgggagtacgcatccgccttgactctgatatcgggtgtccacagacatatagaacttctaaactcaaatcaagtcataagttattttgccaacatgttcgggttatttgcatttttgtatgcgacttttacttctaccggttggtgttaaagcagtag

SEQ ID NO: 225255 - DNA, 1233 bp, Artificial Sequence
  derived and/or modified sequence
atgcacaggaagcacctgcaggagatcccagacctgagcagcaatgtggccaccagcttcacctggggctgggacagcagcaagaccagcgagctgctgagcggcatgggcgtgtctgccctggagaaggaggagccagacagcgagaacatcccccaggagctgctgagcaacctgggccaccctgagagcccccccaggaagaggctgaagagcaaaggaagtgacaaggactttgtgattgtgagaagacccaagctgaaccgggagaacttccctggggtgtcctgggacagcctgcctgatgagctgctgctgggcatcttcagctgcctgtgcctgcctgagctgctgaaggtgtctggagtgtgcaagcgctggtaccgcctggccagtgatgagagcctgtggcagaccctggacctgaccgggaagaacctgcacccagatgtgacaggccgcctgctgagccagggcgtgattgccttccgctgccccaggagcttcatggaccagcccctggccgagcacttcagccccttccgggtgcagcacatggacctgagcaacagcgtgattgaggtgtccaccctgcacggcatcctgagccagtgcagcaagctgcagaacctgagcctggagggcctgcggctgagtgaccccatcgtgaacaccctggccaagaacagcaacctggtgcggctgaacctgagcggctgcagcggcttcagcgagtttgccctgcagaccctgctgagcagctgcagccggctggatgagctgaacctgtcctggtgctttgacttcacagagaagcacgtgcaggtggccgtggcccacgtgtctgagaccatcacccagctgaacctgagcggctacaggaagaacctgcagaagagtgacctgagcaccctggtgcggcgctgccccaacctggtgcacctggacctgagtgacagcgtgatgctgaagaatgactgcttccaggagttcttccagctgaactacctgcagcacctgagcctgagccgctgctatgacatcatccctgagaccctgctgctggtgaccagggctggggtgcgcatccggctggacagcgacatcggctgcccccagacctaccgcaccagcaagctgaagagcagccacaagctgttctgccagcacgtgcgggtcatctgcatctttgtgtgtgacttctacttctaccgcctggtgctgaagcagtag

SEQ ID NO: 225256 - DNA, 1233 bp, Artificial Sequence
  derived and/or modified sequence
atgcaccggaagcacctgcaggagatccccgacctgagcagcaacgtcgctacctcgttcacatgggggtgggattccagtaagaccagcgagcttctttctggtatgggggtctcagccttagagaaagaggaacctgactcagagaatataccacaggaactgctgtccaacctcggccacccagaatccccccccaggaaaaggctgaagtccaagggatcagataaggacttcgttattgtcaggcgtcccaagctgaatcgcgagaatttcccaggcgtcagctgggactcactccctgatgagttgctgctggggattttctcttgtttgtgcctccccgagttgttaaaagtcagtggagtgtgcaagcgctggtatcggctcgcctctgatgaaagcctgtggcagactctggacctgaccgggaaaaatctccatccagacgtgacgggcaggcttcttagtcagggggtgattgccttcaggtgcccgcgcagtttcatggatcaaccactggcagagcacttttcgcctttccgcgtgcagcatatggatctgtcaaattctgttattgaggtgtcaactctgcatggcatattaagccaatgttcaaagctgcagaacctgtcattggagggcctccgcctctccgatccgatcgtgaatacattggctaagaatagcaacctggtgcgcctcaatctgtcagggtgttctggatttagcgagttcgcgttgcaaacactcttgtcatcctgttcccgcctggatgagctgaacttgtcttggtgttttgacttcacagagaaacacgttcaggtggccgtcgcccacgtaagcgagacgatcacccagctgaacctgagtggctataggaaaaatttgcaaaagtccgacttgtccactttggttcgcaggtgtccgaatctcgtgcaccttgacctctctgacagtgtcatgctgaagaatgattgtttccaggagttctttcagttgaattacctacagcacctgtctctgtcccgctgttatgacatcatcccagaaaccctactgctggtgacccgggccggcgtgaggatacgcctggattcagacatcggttgtcctcagacctatagaacaagcaagctaaaaagcagccataaactgttctgtcagcacgttcgggtgatctgcatattcgtgtgtgatttctacttctacagactggtgttgaaacaatag

SEQ ID NO: 225257 - DNA, 1233 bp, Artificial Sequence
  derived and/or modified sequence
atgcaccgaaaacatctgcaggaaattcctgacctgagctccaatgtcgctacctcatttacttgggggtgggactccagcaagacttctgagctcctgtccggcatgggcgtttctgctctcgaaaaggaggagcccgattctgaaaatattcctcaagagctcctgagcaacctcggacatcccgaatcccctcctagaaagcggttgaagtccaagggcagcgataaagattttgtgatcgtacgtcggcctaaactcaacagggagaatttccccggagtgtcttgggactctctccctgacgaattgctgctgggtatctttagctgtctctgtcttcctgagctgctcaaagtgagcggagtgtgtaaacggtggtatagattggccagcgacgaatctctctggcaaacattagacctcaccggaaaaaatctccatccagacgtgacaggccgattgctttctcagggggttatcgccttccggtgtccgagaagtttcatggaccagccgctcgccgaacactttagcccatttagggtgcagcatatggacctcagtaactcagttatcgaggtgagtacgctgcacggaattctctcccagtgctccaaactgcagaatctcagcctggaaggactgagactttcagatcctatcgtcaacaccctggcgaaaaatagtaatctggttcgattgaacctgtccggctgtagcggcttcagcgaatttgccctgcagactctattgagctcctgtagccggctggatgagctcaatctatcgtggtgtttcgatttcaccgaaaaacacgtgcaggtagcggtggcccacgttagcgagactattacccaactgaacctatccgggtaccgtaaaaacttgcagaaatcagatctttccaccctggtgcgacgctgccctaacctggtgcacctggatttatccgatagtgtgatgctcaaaaacgattgtttccaggaattttttcaactcaactacttacaacatttgtctctttcccgctgctacgatattatccctgagacactactgctcgtaacgcgcgctggagtgcgtatcagattagactcggatatcgggtgcccacagacctataggacctccaagctcaaatcttcccacaagttgttctgtcagcatgtgcgggttatttgcatatttgtttgtgatttctatttctaccgtcttgtgcttaaacaatag

SEQ ID NO: 225258 - DNA, 1537 bp, Artificial Sequence
  derived and/or modified sequence
aagggaaggaagtaagggcgagcccgtcggactacgaagcgggacggaaactacaattcccagcaggccttgggcctcagtgcggccgcgaagcagagcgggctgtagagccttgcgcgcgcagtggggatggaacgttgctaggcttagcgggtctggctgctgggggcccgagcagcacgctcggagccgccgcgcgccaaagcgggaatctgggaggcgagcagctctgcagttaatgcacgtattttaaactcccgggcctgcggacgctatgcacaggaagcacctccaggagattccagacctgagtagcaacgttgccaccagcttcacgtggggatgggattccagcaagacttctgaactgctgtcaggcatgggggtctccgccctggagaaagaggagcccgacagtgagaacatcccccaggaactgctctcaaacctgggccacccggagagccccccacggaaacggctgaagagcaaagggagtgacaaagactttgtgattgtccgcaggcctaagctaaatcgagagaactttccaggtgtttcatgggactcccttccggatgagctgctcttgggaatcttttcctgtctgtgcctccctgagctgctaaaggtctctggtgtttgtaagaggtggtatcgcctagcgtctgatgagtctctatggcagaccttagacctcacaggtaaaaatctgcacccggatgtgactggtcggttgctgtctcaaggggtgattgccttccgctgcccacgatcatttatggaccaaccattggctgaacatttcagcccttttcgtgtacagcacatggacctatcgaactcagttatagaagtgtccaccctccacggcatactgtctcagtgttccaagttgcagaatctaagcctggaaggcctgcggctttcggatcccattgtcaatactctcgcaaaaaactcaaatttagtgcgacttaacctttctgggtgttctggattctctgaatttgccctgcagactttgctaagcagctgttccagactggatgagctgaacctctcctggtgttttgatttcactgaaaagcatgtacaggtggctgttgcgcatgtgtcagagaccatcacccagctgaatcttagcggctacagaaagaatctccagaaatcagatctctctactttagttagaagatgccccaatcttgtccatctagacttaagtgatagtgtcatgctaaagaatgactgctttcaggaatttttccagctcaactacctccaacacctatcactcagtcggtgctatgatataatacctgaaactttactattagtgacaagagctggggttaggatccggttggactctgacatcggatgccctcaaacatacagaacttccaaactcaagtccagccataagctattttgccaacatgtcagagtaatctgtatttttgtatgtgatttctacttttatagacttgttttaaaacaataaaacacatttttataaaaatgagtgcttaaa

SEQ ID NO: 225259 - protein, 353 aa, Artificial Sequence
  derived and/or modified sequence
MGQDQTKQQIEKGLQLYQSNQTEKALQVWTKVLEKSSDLMGRFRVLGCLVTAHSEMGRYKEMLKFAVVQIDTARELEDADFLLESYLNLARSNEKLCEFHKTISYCKTCLGLPGTRAGAQLGGQVSLSMGNAFLGLSVFQKALESFEKALRYAHNNDDAMLECRVCCSLGSFYAQVKDYEKALFFPCKAAELVNNYGKGWSLKYRAMSQYHMAVAYRLLGRLGSAMECCEESMKIALQHGDRPLQALCLLCFADIHRSRGDLELSQLKLHCLSESIYRSKGLQRELRAHVVRFHECVEETELYCGLCGESIGEKNSRLQALPCSHIFHLRCLQNNGTRSCPNCRRSSMKPGFV

SEQ ID NO: 225260 - DNA, 1062 bp, Artificial Sequence
  derived and/or modified sequence
atgggtcaggaccagacaaagcaacaaatcgagaaaggcctacaactatatcagtctaatcagactgagaaggccctgcaggtctggacaaaggttctggagaagtcatcagacttaatgggaagatttcgagtcctgggatgtctcgttaccgcccactctgaaatggggcgctacaaagagatgctcaaattcgccgtggtccagatcgacaccgcccgggagctggaagatgccgactttttactcgaaagctacctaaatctggctcgttcaaacgagaaattgtgcgagttccacaaaactatcagctactgcaagacctgcctgggacttccaggaactagggcaggtgctcagctcggtgggcaggtgtcgctgtctatggggaacgcttttctcggcctgtctgtcttccagaaagcgttggaatcttttgagaaagccctccgttacgcacacaataacgacgacgccatgctggagtgccgggtctgttgttcattgggcagtttctatgcacaggtgaaggactacgagaaagcccttttctttccttgtaaggcagctgagctggtcaataactatgggaagggttggtctctgaagtaccgggccatgtctcagtaccacatggcggttgcctaccgccttttgggccgcctgggtagcgccatggaatgttgtgaagagtccatgaagatcgccctacagcatggggaccgtcctctgcaggctctgtgtcttctctgtttcgcagatatccaccggagcaggggcgatctggaactgtctcagctaaagctgcactgcctctcagagtcaatctaccgctccaaaggattgcagcgcgaattgcgggcccatgtggtgagattccatgaatgtgtggaggagaccgagctgtactgtggcctgtgcggggaaagcatcggcgagaagaactcacgactccaggcgctaccctgcagccacatctttcatctccgctgtctgcagaacaacggaaccaggagctgccccaactgccgccgctcgtctatgaagcctggctttgtgtag

SEQ ID NO: 225261 - DNA, 1062 bp, Artificial Sequence
  derived and/or modified sequence
atgggccaggaccagaccaagcagcagatcgagaagggcctgcagctgtaccagagcaaccagacagagaaggccctgcaggtgtggaccaaggtgctggagaagagcagtgacctgatgggccgcttccgggtgctgggctgcctggtgacagcccacagcgagatgggccgctacaaggagatgctgaagtttgctgtggtgcagattgacacagcccgggagctggaggatgctgacttcctgctggagagctacctgaacctggcccggagcaatgagaagctgtgtgagttccacaagaccatctcctactgcaagacctgcctgggcctgcccggcaccagggctggggcccagctgggcggccaggtgtccctgtccatgggaaatgccttcctgggcctgtctgtgttccagaaggccctggagagctttgagaaggccctgcgctatgcccacaacaatgatgatgccatgctggagtgccgggtgtgctgcagcctgggcagcttctacgcccaggtgaaggactatgagaaggccctcttcttcccctgcaaggctgctgagctggtgaacaactacggcaagggctggagcctgaagtaccgggccatgagccagtaccacatggctgtggcctaccgcctgctgggccgcctgggcagcgccatggagtgctgtgaggagagcatgaagatcgccctgcagcacggggaccggcccctgcaggccctgtgcctgctgtgctttgctgacatccacaggagcagaggagacctggagctgagccagctgaagctgcactgcctgtctgagagcatctaccgcagcaagggcctgcagcgggagctgcgggcccacgtggtgcgcttccatgaatgtgtggaggagacagagctgtactgcggcctgtgtggggagagcattggagagaagaacagccggctgcaggccctgccctgcagccacatcttccacctgcgctgcctgcagaacaacggcaccaggagctgccccaactgccgccgcagctccatgaagccaggctttgtgtag

SEQ ID NO: 225262 - DNA, 1062 bp, Artificial Sequence
  derived and/or modified sequence
atgggccaggaccagaccaagcagcagatcgagaagggcctgcagttgtatcagagcaatcagaccgagaaggccctccaggtttggacgaaagtgctcgagaagtcttcggatttgatgggcaggtttagggtcctgggatgtctggtaactgcccactcagagatggggcgatacaaggagatgctcaagtttgccgtggtgcaaatcgacacagctcgtgaactggaggatgcagatttcctcctagagagctatctgaacctggccaggagcaacgaaaaactttgtgagttccacaaaaccatctcgtattgcaagacatgcctaggactgccaggaacccgggcgggcgcccagctggggggccaggtgagcctctcaatggggaatgcatttctcgggctttccgtgttccaaaaagctttggaatccttcgagaaggccctgaggtacgcacacaataacgacgatgccatgctggagtgcagagtgtgttgcagcttaggaagtttttatgctcaagttaaagactacgagaaggccttattctttccgtgcaaggcggccgagttggtcaacaattacggtaaaggctggagcctgaaatatcgcgcaatgtcccaataccacatggccgtagcgtataggctattgggtcgccttgggtctgctatggagtgctgtgaggaatccatgaagattgctttacagcacggagacaggccgctgcaggccctttgccttctgtgtttcgcagatatacaccggtctagaggcgatctcgagttgtcccagcttaaacttcactgtctttcagagagtatttaccggagtaagggactccagcgcgaactgcgtgcacatgttgtcagatttcacgaatgcgtggaggaaaccgaactctactgtgggctgtgcggagagtccattggcgagaagaatagccgcttgcaggcgcttccctgtagccacatctttcacctccgctgtctccagaataacggaacgaggtcttgcccaaattgcagacgatctagtatgaagccgggatttgtgtag

SEQ ID NO: 225263 - DNA, 1062 bp, Artificial Sequence
  derived and/or modified sequence
atgggccaagaccaaaccaagcagcagatcgagaaggggttgcaattgtaccagtcgaatcagactgaaaaggctctccaggtctggaccaaggtgcttgaaaaatcctctgacctgatggggaggttccgagtgctagggtgtttggtcacagctcatagtgaaatggggcgttataaagagatgctgaagttcgccgtggttcaaattgataccgcccgagagttagaagacgcagattttcttcttgaatcttatctcaatcttgctagatccaacgaaaaactatgcgaatttcataagaccatatcttattgcaagacttgcttgggcttacccggtacgcgggcaggcgcacagctcggtggacaggtgtccttgagtatggggaacgcgtttctgggactatcagtgttccagaaggcgctcgagtccttcgagaaagcgctgagatatgcgcacaataatgatgatgcaatgcttgagtgccgcgtttgctgcagccttggcagtttttatgcacaggtaaaagactatgagaaggcactgttctttccttgcaaggccgctgaactcgtcaacaactatggcaagggttggagcctcaaataccgggcaatgtctcagtaccatatggcagtggcatataggctcctcggaaggctgggcagtgccatggaatgctgcgaggaaagcatgaaaatagccttgcaacatggtgaccgccctttgcaagccctttgcctgctgtgctttgccgacatccaccgctccaggggggacctggagctgtcacaattaaaactacactgtctctccgagtccatatatagatcaaaggggctgcaacgagagttgcgtgcccatgtggtgaggttccacgagtgtgtcgaagagacagaactgtattgcgggctctgcggggagagtatcggcgagaaaaactccaggctgcaggccctgccttgcagccacatatttcacctgcggtgtctgcagaataatggaacgcgttcgtgccccaactgccgccgatctagtatgaagcctggatttgtgtag

SEQ ID NO: 225264 - DNA, 1452 bp, Artificial Sequence
  derived and/or modified sequence
cagctttgttcccagggtggcgcctgctctccatccaggccccattccggctcccacccgacgctgcttttgttcccacgtttcggggggcagctggcactgtgattcctgccccatgagtgcctagaggcacggagccaccagggatcaccccacgtgggacacagggcttggggaggatggggcaggaccagaccaagcagcagatcgagaaggggctccagctgtaccagtccaaccagacagagaaggcattgcaggtgtggacaaaggtgctggagaagagctcggacctcatggggcgcttccgcgtgctgggctgcctggtcacagcccactcggagatgggccgctacaaggagatgctgaagttcgctgtggtccagatcgacacggcccgggagctggaggatgccgacttcctcctggagagctacctgaacctggcacgcagcaacgagaagctgtgcgagtttcacaagaccatctcctactgcaagacctgccttgggctgcctggtaccagggcaggtgcccagctcggaggccaggtcagcctgagcatgggcaatgccttcctgggcctcagcgtcttccagaaggccctggagagcttcgagaaggccctgcgctatgcccacaacaatgatgacgccatgctcgagtgccgcgtgtgctgcagcctgggcagcttctatgcccaggtcaaggactacgagaaagccctgttcttcccctgcaaggcggcagagcttgtcaacaactatggcaaaggctggagcctgaagtaccgggccatgagccagtaccacatggccgtggcctatcgcctgctgggccgcctgggcagtgccatggagtgttgtgaggagtctatgaagatcgcgctgcagcacggggaccggccactgcaggcgctctgcctgctctgcttcgctgacatccaccggagccgtggggacctggagctgagccagctcaagctgcactgtctgagcgagagcatttaccgcagcaaagggctgcagcgggaactgcgggcgcacgttgtgaggttccacgagtgcgtggaggagacggagctctactgcggcctgtgcggcgagtccataggcgagaagaacagccggctgcaggccctaccttgctcccacatcttccacctcaggtgcctgcagaacaacgggacccggagctgtcccaactgccgccgctcatccatgaagcctggctttgtatgactcctggcagcaggcgtgggcttcctcctcgccactcctgctctttctccactgcacgccagaggcccatttactcctggggcagctgccaggtcgtcctcaccatagccaaggccttggggcctgcccagggctgctcccctgggcccagctcccctccctgcctctttgtactttgctctttatagaaaaataaactgtttgtacctgg

SEQ ID NO: 225265 - DNA, 1062 bp, Artificial Sequence
  derived and/or modified sequence
atgggccaggaccagaccaagcagcagatcgagaagggcctgcagctgtaccagagcaaccagaccgagaaggccctgcaggtgtggaccaaggtgctggagaagagcagcgacctgatgggcagattcagagtgctgggctgcctggtgaccgcccacagcgagatgggcagatacaaggagatgctgaagttcgccgtggtgcagatcgacaccgccagagagctggaggacgccgacttcctgctggagagctacctgaacctggccagaagcaacgagaagctgtgcgagttccacaagaccatcagctactgcaagacctgcctgggcctgcccggcaccagagccggcgcccagctgggcggccaggtgagcctgagcatgggcaacgccttcctgggcctgagcgtgttccagaaggccctggagagcttcgagaaggccctgagatacgcccacaacaacgacgacgccatgctggagtgcagagtgtgctgcagcctgggcagcttctacgcccaggtgaaggactacgagaaggccctgttcttcccctgcaaggccgccgagctggtgaacaactacggcaagggctggagcctgaagtacagagccatgagccagtaccacatggccgtggcctacagactgctgggcagactgggcagcgccatggagtgctgcgaggagagcatgaagatcgccctgcagcacggcgacagacccctgcaggccctgtgcctgctgtgcttcgccgacatccacagaagcagaggcgacctggagctgagccagctgaagctgcactgcctgagcgagagcatctacagaagcaagggcctgcagagagagctgagagcccacgtggtgagattccacgagtgcgtggaggagaccgagctgtactgcggcctgtgcggcgagagcatcggcgagaagaacagcagactgcaggccctgccctgcagccacatcttccacctgagatgcctgcagaacaacggcaccagaagctgccccaactgcagaagaagcagcatgaagcccggcttcgtgtag

SEQ ID NO: 225266 - protein, 534 aa, Artificial Sequence
  derived and/or modified sequence
MQAARVDYIAPWWVVWLHSVPHVGLRLQPVNSTFSPGDESYQESLLFLGLVAAVCLGLNLIFLVAYLVCACHCRRDDAVQTKQHHSCCITWTAVVAGLICCAAVGVGFYGNSETNDGAYQLMYSLDDANHTFSGIDALVSGTTQKMKVDLEQHLARLSEIFAARGDYLQTLKFIQQMAGSVVVQLSGLPVWREVTMELTKLSDQTGYVEYYRWLSYLLLFILDLVICLIACLGLAKRSKCLLASMLCCGALSLLLSWASLAADGSAAVATSDFCVAPDTFILNVTEGQISTEVTRYYLYCSQSGSSPFQQTLTTFQRALTTMQIQVAGLLQFAVPLFSTAEEDLLAIQLLLNSSESSLHQLTAMVDCRGLHKDYLDALAGICYDGLQGLLYLGLFSFLAALAFSTMICAGPRAWKHFTTRNRDYDDIDDDDPFNPQAWRMAAHSPPRGQLHSFCSYSSGLGSQTSLQPPAQTISNAPVSEYMNQAMLFGRNPRYENVPLIGRASPPPTYSPSMRATYLSVADEHLRHYGNQFPA

SEQ ID NO: 225267 - DNA, 1605 bp, Artificial Sequence
  derived and/or modified sequence
atgcaggccgccagagtggactacatcgccccctggtgggtggtgtggctgcacagcgtgccccacgtgggcctgagactgcagcccgtgaacagcaccttcagccccggcgacgagagctaccaggagagcctgctgttcctgggcctggtggccgccgtgtgcctgggcctgaacctgatcttcctggtggcctacctggtgtgcgcctgccactgcagaagagacgacgccgtgcagaccaagcagcaccacagctgctgcatcacctggaccgccgtggtggccggcctgatctgctgcgccgccgtgggcgtgggcttctacggcaacagcgagaccaacgacggcgcctaccagctgatgtacagcctggacgacgccaaccacaccttcagcggcatcgacgccctggtgagcggcaccacccagaagatgaaggtggacctggagcagcacctggccagactgagcgagatcttcgccgccagaggcgactacctgcagaccctgaagttcatccagcagatggccggcagcgtggtggtgcagctgagcggcctgcccgtgtggagagaggtgaccatggagctgaccaagctgagcgaccagaccggctacgtggagtactacagatggctgagctacctgctgctgttcatcctggacctggtgatctgcctgatcgcctgcctgggcctggccaagagaagcaagtgcctgctggccagcatgctgtgctgcggcgccctgagcctgctgctgagctgggccagcctggccgccgacggcagcgccgccgtggccaccagcgacttctgcgtggcccccgacaccttcatcctgaacgtgaccgagggccagatcagcaccgaggtgaccagatactacctgtactgcagccagagcggcagcagccccttccagcagaccctgaccaccttccagagagccctgaccaccatgcagatccaggtggccggcctgctgcagttcgccgtgcccctgttcagcaccgccgaggaggacctgctggccatccagctgctgctgaacagcagcgagagcagcctgcaccagctgaccgccatggtggactgcagaggcctgcacaaggactacctggacgccctggccggcatctgctacgacggcctgcagggcctgctgtacctgggcctgttcagcttcctggccgccctggccttcagcaccatgatctgcgccggccccagagcctggaagcacttcaccaccagaaacagagactacgacgacatcgacgacgacgaccccttcaacccccaggcctggagaatggccgcccacagcccccccagaggccagctgcacagcttctgcagctacagcagcggcctgggcagccagaccagcctgcagccccccgcccagaccatcagcaacgcccccgtgagcgagtacatgaaccaggccatgctgttcggcagaaaccccagatacgagaacgtgcccctgatcggcagagccagccccccccccacctacagccccagcatgagagccacctacctgagcgtggccgacgagcacctgagacactacggcaaccagttccccgcctag

SEQ ID NO: 225268 - DNA, 1605 bp, Artificial Sequence
  derived and/or modified sequence
atgcaggcggcgagggtggactatattgccccgtggtgggtggtttggttgcacagtgtccctcacgtcggtctgaggctgcagcccgtcaattctactttttcccctggcgacgagtcttaccaagaatctctgctgtttttggggctggttgccgctgtctgcctgggtctcaatctcatatttttggtggcataccttgtctgtgcatgccactgcaggcgggacgatgctgtgcaaaccaagcagcatcacagttgctgcatcacatggacagccgtagtggccggactcatctgctgcgctgccgtcggggtgggattctatggtaacagtgagaccaacgatggagcatatcagctgatgtactcccttgatgatgcaaaccacactttttccggaatcgacgcgttggtaagtggcacaactcagaagatgaaagtagacctggaacaacacctagcgaggctgagcgaaatcttcgcggctaggggtgattacttacagaccctgaagttcatacagcagatggccggatccgttgtcgtgcagctcagtggcttgcccgtgtggagggaggttacgatggagttgacgaagttgtccgaccagactggttacgttgaatactataggtggctgtcttacctgctgttgttcatccttgacttggtgatctgcctgattgcttgtttaggcttggccaagagaagcaagtgtctcctggcctcgatgctgtgttgcggagctctgagcctcttgcttagttgggcaagcctggccgccgatggctcagccgccgtcgccacctccgatttttgcgtggcccccgatacgtttattctaaatgtgacagagggccaaatcagcacagaggttaccagatattacttatattgttctcaatccgggtcctccccattccagcagactcttactacattccagcgggcgcttactactatgcagatccaggtggccggcctactgcagtttgccgtccctcttttcagcaccgcagaggaggatctcctggctatccaactgctgctgaattcaagtgagtctagtctgcaccagctgacagccatggttgactgccgcggcctgcacaaagattacttagatgccctggccgggatttgttacgatggcttacaaggcctgctctaccttgggctcttctcctttttagctgcccttgctttcagcaccatgatctgcgcagggccgagagcgtggaagcactttacgacccggaatcgcgattacgatgacatcgatgacgatgatccctttaatcctcaggcctggcgcatggctgcccactcacctccacgtggacagctgcactccttctgctcatattcatcaggcctaggcagccagaccagcctgcaaccgccagcccaaactatctctaacgcacctgtgtccgaatacatgaaccaggcgatgttgtttgggcggaacccaaggtacgaaaatgtgcccctgatcggtcgggcgagtccacctcctacctactccccgtccatgcgcgctacatatctgtctgtggccgacgagcatctccggcattatggcaaccagttccctgcttag

SEQ ID NO: 225269 - DNA, 1605 bp, Artificial Sequence
  derived and/or modified sequence
atgcaggccgcccgggtggactacatcgccccctggtgggtggtgtggctgcacagcgtgccccacgtgggcctgcggctgcagcctgtgaacagcaccttcagccctggagatgagagctaccaggagagcctgctcttcctgggcctggtggccgctgtgtgcctgggcctgaacctgatcttcctggtggcctacctggtgtgtgcctgccactgcagaagagatgatgctgtgcagaccaagcagcaccacagctgctgcatcacctggacagctgtggtggccggcctcatctgctgtgccgctgtgggcgtgggcttctacggcaacagcgagaccaatgatggagcctaccagctgatgtacagcctggatgatgccaaccacaccttctctggaattgatgccctggtgtctggcaccacccagaagatgaaggtggacctggagcagcacctggcccggctgtctgagatctttgctgcccggggggactacctgcagaccctgaagttcatccagcagatggccggctctgtggtggtgcagctgagcggcctgcctgtgtggagggaggtgaccatggagctgaccaagctgagtgaccagacaggctacgtggagtactaccgctggctgagctacctgctgctcttcatcctggacctggtgatctgcctgattgcctgcctgggcctggccaagaggagcaagtgcctgctggcctccatgctgtgctgcggggccctgagcctgctgctgtcctgggccagcctggccgcagatggcagcgctgctgtggccaccagtgacttctgtgtggccccagacaccttcatcctgaatgtgacagagggccagatcagcacagaggtgacccgctactacctgtactgcagccagagcggcagcagccccttccagcagaccctgaccaccttccagagggccctgaccaccatgcagatccaggtggccggcctgctgcagtttgctgtgcccctcttcagcacagctgaggaggacctgctggccatccagctgctgctgaacagcagcgagagcagcctgcaccagctgacagccatggtggactgccggggcctgcacaaggactacctggatgccctggccggcatctgctatgatggcctgcagggcctgctgtacctgggcctcttctccttcctggccgccctggccttcagcaccatgatctgtgccggcccccgggcctggaagcacttcaccaccaggaacagagattatgatgacattgatgatgatgaccccttcaacccccaggcctggaggatggccgcccacagccccccccggggccagctgcacagcttctgcagctacagcagcggcctgggcagccagaccagcctgcagcccccagcccagaccatcagcaatgcccctgtgtctgagtacatgaaccaggccatgctgtttggaagaaaccccaggtatgaaaatgtgcccctcatcggccgggccagccccccacccacctacagccccagcatgagggccacctacctgtctgtggctgatgagcacctgcggcactacggcaaccagtttcctgcctag

SEQ ID NO: 225270 - DNA, 1605 bp, Artificial Sequence
  derived and/or modified sequence
atgcaggccgcccgggtggactacatcgccccctggtgggtggtgtggttgcatagtgtgccccacgtgggcctccgcctacaacccgtcaattcaacgttcagtcctggggatgagagctaccaagagtcactgctgttcctcggactggtcgccgcagtctgcctgggactgaacctgatattcctggtggcatatctggtgtgcgcttgccactgtcgccgcgatgacgcggtgcaaacaaagcaacaccattcgtgctgcataacgtggaccgcagtggttgctgggttgatctgctgcgctgccgtcggtgtgggtttctacggcaattctgaaactaacgatggcgcataccagctgatgtactcacttgacgacgccaaccataccttcagtggaattgacgcgctggtcagtggaactacccagaagatgaaagtagacttggaacaacacctggcaagactgagtgagatctttgccgcgaggggtgactaccttcagaccctgaagttcattcagcagatggctggatcagtcgtagttcagctctccgggcttcctgtctggcgtgaagtcacgatggaacttacgaagctgagcgaccagaccggctacgttgaatactatagatggcttagttacttgctgctattcattctagacttggtgatctgcctaatagcctgcctggggcttgcaaaacggagtaaatgtctactagcaagcatgctctgctgcggcgctttgtccctcctgttgtcttgggcgtcactcgctgctgacgggagtgcggcagtggcaacatctgatttttgcgtcgcgccggatacattcatactgaacgtgactgagggacaaatcagtactgaggtgacgcgctactatttgtactgctctcaatcaggctcttctcctttccagcagacactcacaacattccagcgggccctcaccaccatgcagatccaggtggccggcctacttcaatttgccgtacctttgttttcaactgccgaggaggatctcctggccatccagctgctgctaaatagcagcgagagttccctacaccagctgactgccatggttgattgtcgcgggctccacaaggactatctggatgctctcgctggtatctgctacgacggattacagggtctcctgtatctgggcttattcagttttttggcggcccttgcgttttcaacaatgatttgcgcaggacctagagcatggaaacactttacaaccagaaatcgcgattacgacgacattgatgacgacgatccattcaatcctcaggcgtggcgcatggccgcgcacagtccacccagaggtcagctacatagcttctgctcttactcatccgggcttggatcccaaacttccctgcagccaccagcccagacaatttccaatgcccccgtgtcagagtacatgaaccaggcaatgctgttcggtcgcaacccacggtatgagaatgttccactgattggccgggcctcccctccccctacatattctcctagcatgcgggctacttacctgtccgtagccgacgaacacctccgccactatggcaaccagttccctgcctag

SEQ ID NO: 225271 - DNA, 1605 bp, Artificial Sequence
  derived and/or modified sequence
atgcaagccgctagggtcgactatattgccccttggtgggtggtgtggttacactccgtccctcatgtcggactacgacttcagcccgtcaactccactttctctccaggagacgaatcttaccaagaatctctccttttcctgggcctggtggcagccgtctgtctggggctgaacctgattttcctcgtggcctatttagtctgtgcttgtcactgtcgcagggacgacgccgtacaaacaaagcagcatcatagctgctgtatcacttggacagcagtggtagctggcctgatttgttgtgctgcagttggagtagggttctacgggaactcagaaacaaacgatggagcatatcaattgatgtactccttggatgatgccaaccacacgtttagcgggatagacgctcttgtgtctggtaccacccagaaaatgaaagtggatctcgagcagcacctggccagactgtccgagatatttgccgcacgtggcgattacctgcagactctgaaatttatccagcagatggctggaagcgtcgtggtgcaactgtccgggctccctgtctggagggaagtgactatggagctgactaagctgtcagaccagactggatatgttgaatattaccggtggctgtcctatcttctgctgttcatcctggacttagtaatctgccttatcgcctgcctggggctggccaaaagatcgaaatgtctgcttgcaagtatgctgtgttgcggggctttgtcgctgttattaagctgggcctctctcgccgcagacggttcagctgctgtagctaccagtgacttctgcgttgccccagatacctttatacttaatgtcactgaggggcagatctcaacagaggtgactaggtattatctgtactgcagccaaagcggaagttctccctttcaacaaactttgactactttccagcgcgcactgacaacaatgcagattcaggtggccggactgctgcaattcgcagtgcctctgttctccacggctgaagaagatctgcttgcaatccagctcttgcttaattccagtgagagcagcctgcaccagctcaccgcaatggtcgattgtagaggtctgcacaaggactatctggatgcattggcgggtatatgttatgacggtttacaagggctgctgtacctgggactgtttagtttcctggccgctctcgcattctctacaatgatctgtgctggaccacgggcttggaagcatttcaccacccggaatagagattacgatgacatagacgacgatgatccatttaacccacaagcttggcgtatggccgctcattctcctccgaggggtcaactgcattccttctgttcatattcctcgggcctagggtcacagacctcgctgcagcctcccgctcagacaatttctaatgccccagtcagtgaatacatgaatcaagccatgctttttgggagaaacccaaggtatgaaaacgttcctctaattggccgtgccagtccacctccgacctattctccaagtatgcgggcaacctacctgagcgttgccgatgagcacctgcgccactacgggaaccaattcccggcatag

SEQ ID NO: 225272 - DNA, 3486 bp, Artificial Sequence
  derived and/or modified sequence
gggcgggcacggggccccggccgggaggtgagcgcagctgtcgttcagcttgtgggtagcactcgggccgagccatgcaggcggcgcgcgtggactacatcgctccctggtgggtcgtgtggctgcacagcgtcccgcacgtcggcctgcgcctgcagcccgtgaacagcaccttcagccccggcgacgagagttaccaggagtcgctgctgttcctggggctggtggccgccgtctgcctgggcctgaacctcatcttccttgtggcttacctggtctgtgcatgccactgccggcgggacgatgcggtgcagaccaagcagcaccactcctgctgcatcacctggacggccgtggtggccgggctcatctgctgtgctgcggtgggcgttggtttctatggaaacagcgagaccaacgatggggcgtaccagctgatgtactccttggacgatgccaaccacaccttctctgggatcgatgctctggtttccggaactacccagaagatgaaggtggacctagagcagcacctggcccggctcagtgagatctttgctgcccggggcgattacctgcagaccctgaagttcatacagcagatggcgggcagcgttgttgttcagctctcaggactgcccgtgtggagggaggtcaccatggagctgaccaagctatccgaccagactggctacgtggagtactacaggtggctctcctacctcctgctctttatcctggacctggtcatctgcctcattgcctgcctgggactggccaagcgctccaagtgtctcctggcctcgatgctgtgctgtggggcactgagcctgctcctcagttgggcatccctggccgctgatggctctgcggcagtggccaccagtgacttctgtgtggctcctgacaccttcatcctgaacgtcacggagggccagatcagcacagaggtgactcgctactacctgtattgcagccagagtggaagcagccccttccagcagaccctgaccaccttccagcgcgcacttaccaccatgcagatccaggtcgcggggctgctgcagtttgccgtgcccctcttctccactgcagaggaagacctgcttgcaatccagctcctgctgaactcctcagagtccagccttcaccagctgaccgccatggtggactgccgagggctgcacaaggattatctggacgctcttgctggcatctgctacgacggcctccagggcttgctgtaccttggcctcttctccttcctggccgccctcgccttctccaccatgatctgtgcagggccaagggcctggaagcacttcaccaccagaaacagagactacgatgacattgatgatgatgacccctttaacccccaagcctggcgcatggcggctcacagtcccccgaggggacagcttcacagcttctgcagctacagcagtggcctgggaagtcagaccagcctgcagcccccggcccagaccatctccaacgcccctgtctccgagtacatgaaccaagccatgctctttggtaggaacccacgctacgagaacgtgccactaatcgggagagcctcccctccgcctacgtactctcccagcatgagagccacctacctgtctgtggcggatgagcacctgaggcactacgggaatcagtttccagcctaacagactttcgggggttcctgcctcctttttccgttctggtttttaattagtgcaaatacaagctgcgtttctttaatagaaaccaaaggcatctggagcccgagaggcctcctgctgtggcagaggagcagctgggattcccgaccaaagccccagggggtgcagaagactcaccacgcgggccagcctctctcttttgccctgctctccacaccagaaatgcccccaggtgcttggctgcctcagaggtaccatccctgagctggctgcctggccctgctcacccctacgcctcgcccttgccaggaggggagtggcagtgaggagggggccaggtcaggcaccaccatcaagagagctgtgtgttctctctggtcccacaacgatgactctgcctcttgtcagcccagccaagagcccagacgacccctctgtcctcgttccctgtcctcgttccctgcaggtaacatgagaagggctgatcaggagatgctctttaagaagttcgcacccctgctgacaccagaacagcccaaatcagagttcccagggccagacaggctcttcctgggccacagaggggaggcatcaggaaagctctgcagtggggggctggtggctccggggctgggggatcacaggctggtgaaccccggtgggaacagaggtgaaagcctgccacattccgcctgtctccctaaccctccattgcctcgcctctattccagaatcaatgctgcagaatgtgttagctgcagataggcatggtctcaggtatgaacagacactttgaaacgactttaggtctttcttttctccagtgttttaaacatgttgattatccaaagaattgaaactcctagcacatccagtttttacaacagatttgcagctcattccttaccctggttaggtcactacttttgcagattttgctggcactgatctggagatctgcagatctggaggagacgggaaggagtcgattcttaaataaggatcagtgaggcatcctgtcccaagctactgtttggtggggatctgggttcatctcacccacagagggaggatctttaagaggagaaaaaagccaagagggaaagccagagttccctgttctaggggactagccaaatgcctacatcagctgtcccctccctgttgtctccaagtaagtttgccagaaaaggttttagcaaagtgctacaactgtgtctttataggaggataggcctctgccctgccccacccccaccacctgtccccacccagtgtcccaggccacaggagcttattggccaggagggaataatgtcccccaatactgcctgttgagggaccagagttggggtctttggtgcttccaacctcctgccaacctggagttcacaacaccagagccccacggcctcgcacactgaagcaggggcgtgcggtgactcggtgcttctgttttggaagaaccacctgtcatcaaaacatggacagcagggtgttctcagctcccagcgaagcctccacaacagaatggggccacagggcagccgggactccctgtctcacctacattaacccatgcatactgtatgccataaactcactttggtatatccgcgtcacatgcagagaggaactctgcgacgtcaaagtgttgcttcttaaagtttcattattggcaactagagggttgtttttaatgcatggaaactaaacagattcctcggggagttcctgaaggaaccaggtgggcaaacctttgcttatatacatgcggcctcacctggaagagaaataaaccacttgtact

SEQ ID NO: 225273 - protein, 211 aa, Artificial Sequence
  derived and/or modified sequence
MEELSSVGEQVFAAECILSKRLRKGKLEYLVKWRGWSSKHNSWEPEENILDPRLLLAFQKKEHEKEVQNRKRGKRPRGRPRKLTAMSSCSRRSKLKVGGCAGYADPTSQHPLGVGGRQREGLGPSGRGWHFCQQSVPLLGKQEPPFFLSLSFCCQGPQPAESSSPPLPGASCFSLSCTPLCWVAGSNCCRQALFPPRGSLGDGKEQEACVQ

SEQ ID NO: 225274 - DNA, 636 bp, Artificial Sequence
  derived and/or modified sequence
atggaagagctcagcagcgtgggcgaacaggttttcgctgccgaatgtattttgagcaagaggctgagaaaggggaaattggagtatctggtcaagtggagggggtggtctagtaagcacaatagttgggaaccagaggagaatatcctggatccacgcctgcttctggctttccagaagaaggagcatgagaaagaggtgcaaaaccgcaaacgcggtaagcgccctcgcggacgccccagaaagttaactgccatgtcttcttgttcccggcggtctaagctaaaggtaggaggttgtgctggctacgcggatcccacatcccagcaccctttgggagtcggcggcagacagagggagggacttggcccctccggacgcggatggcacttctgccagcagagtgtcccgctgctgggcaaacaagaacccccattttttctttcactctctttctgttgccagggtccccaaccggccgaaagttcctcaccccccttaccaggcgcaagctgcttctctttgagctgtactcctctgtgctgggtggccggctcaaactgttgtcgtcaggctcttttccctcctagaggcagcttgggtgacgggaaggagcaagaagcctgcgtgcaatag

SEQ ID NO: 225275 - DNA, 636 bp, Artificial Sequence
  derived and/or modified sequence
atggaggagctgagctctgtgggggagcaggtgtttgctgctgagtgcatcctgagcaagaggctgaggaagggcaagctggagtacctggtgaagtggaggggctggagcagcaagcacaacagctgggagcctgaggagaacatcctggacccccggctgctgctggccttccagaagaaggagcacgagaaggaggtgcagaacaggaagaggggcaagaggccccggggccggcccaggaagctgacagccatgagcagctgcagcagaagaagcaagctgaaggtgggcggctgtgccggctacgccgaccccaccagccagcaccccctgggcgtgggcggccggcagcgggagggcctgggccccagcggccggggctggcacttctgccagcagagcgtgcccctgctgggcaagcaggagccccccttcttcctgagcctgtccttctgctgccagggcccccagcctgctgagagcagcagcccccccctgcccggggccagctgcttcagcctgagctgcacccccctgtgctgggtggccggcagcaactgctgccggcaggccctcttccccccccggggcagcctgggagatggcaaggagcaggaggcctgtgtgcagtag

SEQ ID NO: 225276 - DNA, 636 bp, Artificial Sequence
  derived and/or modified sequence
atggaggagctgagcagcgtgggcgagcaggtgttcgccgccgagtgtattttatcaaagcgcctacgcaaaggaaaactggagtatttagtgaagtggcggggctggtccagtaaacataattcatgggaaccagaagagaatatcctcgatccccggctgctgttggcttttcagaaaaaggagcatgagaaggaagtgcagaacaggaaacggggtaagcgaccaagaggccgacccagaaagctgactgccatgtcgagctgtagccgccggtcaaagctcaaagtcggcgggtgcgccgggtacgccgatcccacctcccagcatcccttgggcgtggggggccgtcagcgcgaggggctcgggccctcaggccgcggatggcatttctgtcagcaaagcgttccacttctgggaaagcaagagccgcctttctttttgagcctgtcattttgctgccaaggtccccagcccgccgagagctcctctcctcccctacccggagcgtcttgtttcagcttaagctgtaccccgctgtgttgggttgcaggctccaattgttgccgacaggccctgtttcctccccgcgggtccctgggtgacggtaaggaacaggaagcgtgtgtacagtag

SEQ ID NO: 225277 - DNA, 636 bp, Artificial Sequence
  derived and/or modified sequence
atggaggagctgtcttcggtaggggagcaagttttcgctgccgagtgtattctgagtaaacgcctccgcaaaggcaagctggaatatctggtaaagtggaggggttggtcaagcaagcataattcctgggagcctgaggaaaacatcctggaccccaggttgctactcgccttccagaaaaaggagcacgagaaggaggtgcagaacaggaagaggggaaaaaggccaagagggagacccagaaagttgaccgcaatgtcatcctgctcccggaggtccaagctcaaagtgggtgggtgcgctggatatgcggatcccacaagccagcaccccttgggcgtgggcggtcggcagcgggagggcctgggaccttccgggagaggttggcatttttgccagcagagcgttcccctgcttggaaagcaagagccaccgttttttctaagtctttcgttctgttgccaagggcctcagcctgctgaaagctcttcaccccctctaccaggcgcaagctgcttctcactatcatgcacacccctatgttgggttgcgggatctaattgctgcaggcaggcgctcttcccaccgaggggcagtttgggtgacggaaaggaacaggaagcatgtgtgcaatag

SEQ ID NO: 225278 - DNA, 1077 bp, Artificial Sequence
  derived and/or modified sequence
ggcggtccgggcgggtgactggcggcgggcgccgcggtcgggctggctgccgggcagcatggaggagctgagcagcgtgggcgagcaggtcttcgccgccgagtgcatcctgagcaagcggctccgcaagggcaagctggagtacctggtcaagtggcgcggctggtcctccaaacataacagctgggagccggaggagaacatcctggacccgaggctgctcctggccttccagaagaaggaacatgagaaggaggtgcagaaccggaagagaggcaagaggccgagaggccggccaaggaagctcactgccatgtcctcctgcagccggcgctccaagctcaaggtgggtggctgcgctgggtatgctgaccccacctcccagcacccccttggcgtagggggcaggcagagggagggtttggggccctcaggaagggggtggcacttctgccaacagtctgtccctctactcggaaaacaggagccccctttcttcctgtctctcagcttctgctgccaggggccccagccggctgagagttcctccccgcccctcccaggggcttcctgcttcagcctgtcctgcacgcctctctgctgggtggcagggtcaaactgctgcagacaagcactcttccctcccagggggtccttgggggacggaaaggaacaggaagcatgcgtacagtaggtgctcataggattgccggctggatgtgactcaaaagcctaagatttgggggctactccgggcccacctgcgggtgcaccttaaatcgaggtggccacgaaaggcagggctgactgaatagccagggggtgccaggaggggccttggaggagggcagaggcagtgtgggctgatgatgtgctttggccttctcgggactgtcctgtcacccctcctcgctacagtgatgggctcaccccgccacaggtatgcatgcgcccctggggtccgtggtagggcccctccctcccctgaggacaggtgaggcaggacaggatgggggaggagggcctggcctcagtcccgggtgtggctttgattccctcctccgggcactgtccctg

SEQ ID NO: 225279 - DNA, 636 bp, Artificial Sequence
  derived and/or modified sequence
atggaggagctgagcagcgtgggcgagcaggtgttcgccgccgagtgcatcctgagcaagagactgagaaagggcaagctggagtacctggtgaagtggagaggctggagcagcaagcacaacagctgggagcccgaggagaacatcctggaccccagactgctgctggccttccagaagaaggagcacgagaaggaggtgcagaacagaaagagaggcaagagacccagaggcagacccagaaagctgaccgccatgagcagctgcagcagaagaagcaagctgaaggtgggcggctgcgccggctacgccgaccccaccagccagcaccccctgggcgtgggcggcagacagagagagggcctgggccccagcggcagaggctggcacttctgccagcagagcgtgcccctgctgggcaagcaggagccccccttcttcctgagcctgagcttctgctgccagggcccccagcccgccgagagcagcagcccccccctgcccggcgccagctgcttcagcctgagctgcacccccctgtgctgggtggccggcagcaactgctgcagacaggccctgttcccccccagaggcagcctgggcgacggcaaggagcaggaggcctgcgtgcagtag

SEQ ID NO: 225280 - protein, 507 aa, Artificial Sequence
  derived and/or modified sequence
MDPKLGRMAASLLAVLLLLLERGMFSSPSPPPALLEKVFQYIDLHQDEFVQTLKEWVAIESDSVQPVPRFRQELFRMMAVAADTLQRLGARVASVDMGPQQLPDGQSLPIPPIILAELGSDPTKGTVCFYGHLDVQPADRGDGWLTDPYVLTEVDGKLYGRGATDNKGPVLAWINAVSAFRALEQDLPVNIKFIIEGMEEAGSVALEELVEKEKDRFFSGVDYIVISDNLWISQRKPAITYGTRGNSYFMVEVKCRDQDFHSGTFGGILHEPMADLVALLGSLVDSSGHILVPGIYDEVVPLTEEEINTYKAIHLDLEEYRNSSRVEKFLFDTKEEILMHLWRYPSLSIHGIEGAFDEPGTKTVIPGRVIGKFSIRLVPHMNVSAVEKQVTRHLEDVFSKRNSSNKMVVSMTLGLHPWIANIDDTQYLAAKRAIRTVFGTEPDMIRDGSTIPIAKMFQEIVHKSVVLIPLGAVDDGEHSQNEKINRWNYIEGTKLFAAFFLEMAQLH

SEQ ID NO: 225281 - DNA, 1524 bp, Artificial Sequence
  derived and/or modified sequence
atggaccccaaactggggcgcatggcggcgtccctcctggcagtgctgttattattgctagagcgtggcatgttctcatctccatcacctccacctgcactgttagagaaagtattccagtatatagatctccatcaggatgagtttgtccagactttaaaggaatgggtagccatagagagcgattcagtgcagcctgttccccgatttcgccaagagctgtttcggatgatggcggtcgcagccgacacactacagcggctcggcgctagagtagcatccgtcgatatgggtcctcagcaactgcccgatggtcagtcactgcccattccacccataattctggccgaactggggtccgacccaactaaggggaccgtctgcttttacggccacctggatgtgcagcccgccgatagaggtgacggatggctgaccgacccttatgtgctgacagaagtggacggcaagctgtacggcaggggtgctacagacaacaaggggccagtgctcgcctggatcaacgcggtgtctgcctttcgggccctggagcaggacctgccagtgaatattaagttcattatcgaggggatggaggaggcagggagcgtggccctggaagagctcgtggaaaaggagaaggaccggtttttctctggcgtcgattacattgtgatctctgataatttatggataagtcaaaggaagcctgctataacctacggaacacggggtaattcatatttcatggtggaagtcaaatgccgagatcaggattttcattcaggaacgttcggcggtatcctgcacgaacccatggccgatttggtggctctgctcggtagcctcgtcgactcatcaggacatattttagttcccggaatttatgacgaagtggtccctttgaccgaagaggagatcaacacttataaagcaatccatctcgatctcgaggaatacaggaattcttcccgcgttgagaagttcttatttgacactaaagaagaaattcttatgcatttgtggagatacccttcactcagtatccacgggatagaaggcgccttcgacgagcctggaacgaagacagttattcctgggagagttatcgggaaattctccatccgcctggtgccgcacatgaacgtgtcagctgttgagaaacaggtcacccggcacctggaagatgttttctccaagcgaaactcctccaataaaatggtcgtgtcaatgaccttggggttacacccgtggatcgccaatattgacgacacccagtaccttgcggcaaagagagccattcgcacagtcttcggcactgagccggatatgattagggatggttcaactattcccatcgccaagatgtttcaggagatcgtgcataaatctgtggttctgattcctctgggcgcggtggatgacggagaacatagccagaacgagaaaatcaatcggtggaattacatcgaggggacaaaactgttcgctgcattcttcctggagatggcccagctccactag

SEQ ID NO: 225282 - DNA, 1524 bp, Artificial Sequence
  derived and/or modified sequence
atggaccccaagctgggccgcatggccgccagcctgctggccgtgctgctgctgctgctggagcggggcatgttcagcagccccagccccccaccagccctgctggagaaggtgttccagtacatcgacctgcaccaggatgaatttgtgcagaccctgaaggagtgggtggccattgaaagtgacagcgtgcagcctgtgccccgcttccggcaggagctgttcaggatgatggctgtggccgctgacaccctgcagaggctgggcgcccgggtggcctctgtggacatgggcccccagcagctgcctgatggccagagcctgcccatcccccccatcatcctggccgagctgggcagtgaccccaccaagggcaccgtgtgcttctacggccacctggatgtgcagcctgctgacagaggagatggctggctgacagacccctacgtgctgacagaggtggatggcaagctgtatggccgcggggccacagacaacaagggccctgtgctggcctggatcaatgctgtgtctgccttccgggccctggagcaggacctgcctgtgaacatcaagttcatcatcgagggcatggaggaggccggctctgtggccctggaggagctggtggagaaggagaaggaccgcttcttctctggagtggactacatcgtcatcagtgacaacctgtggatcagccagaggaagccagccatcacctacggcacccggggcaacagctacttcatggtggaggtgaagtgccgggaccaggacttccacagcggcacctttggaggcatcctgcacgagcccatggctgacctggtggccctgctgggcagcctggtggacagcagcggccacatcctggtgcccggcatctatgatgaggtggtgcccctgacagaggaggagatcaacacctacaaggccatccacctggacctggaggagtacagaaacagcagccgggtggagaagttcctgtttgacaccaaggaggagatcctgatgcacctgtggagataccccagcctgagcatccacggcatcgagggcgcctttgatgagcccggcaccaagacagtcatccctggccgggtcatcggcaagttcagcatccggctggtgccccacatgaatgtgtctgctgtggagaagcaggtgaccaggcacctggaggatgtgttcagcaagaggaacagcagcaacaagatggtggtgtccatgaccctgggcctgcacccctggatcgccaacattgatgacacccagtacctggccgccaagagggccatcagaacagtgtttggaacagagccagacatgatcagagatggcagcaccatccccatcgccaagatgttccaggagatcgtgcacaagtctgtggtgctgatccccctgggcgctgtggatgatggagagcacagccagaatgagaagatcaaccgctggaactacatcgagggcaccaagctgtttgctgccttcttcctggagatggcccagctgcactag

SEQ ID NO: 225283 - DNA, 1524 bp, Artificial Sequence
  derived and/or modified sequence
atggaccccaagctgggccggatggccgccagcctgctggccgtgctgctccttctattggagagagggatgttctcttctccttcaccccctccagcgctcctcgagaaggtgttccaatacatcgatctccatcaagacgagtttgtacaaacgctgaaagagtgggtggccatcgaatctgactctgtccagccggttccgaggttccggcaggagctgttccggatgatggccgtcgccgcggataccctgcagaggctcggagcccgagttgccagtgtggacatgggccctcagcagctgcccgatggccaaagtctgcctatccctcccataattttggctgagctgggtagtgaccctaccaaaggaaccgtgtgcttttacgggcatttagacgttcagcctgccgatcggggtgacggatggctcaccgacccctatgtgctgaccgaagtagatggcaaactctatgggcggggtgccactgacaacaagggcccagtgctggcatggattaatgctgtaagcgccttccgagctcttgagcaagaccttcctgttaatatcaagttcatcatcgaggggatggaggaagccggttccgtggccttggaagaactggttgagaaggaaaaagaccgcttctttagtggcgtggattacatcgtcatttccgacaatctttggattagccagcgaaagccagcgatcacctatgggacaaggggaaatagctacttcatggtcgaggtgaaatgcagggatcaagactttcatagtggcacctttggaggtatactgcacgaaccaatggccgaccttgtggcactcttggggtcactggttgactcttccgggcacatcttggtgccagggatttacgacgaggtcgttcccctgaccgaggaggaaattaatacgtataaggcaatccacctggacctggaggagtataggaatagctcccgtgtggagaagttcttgttcgataccaaggaggaaatcttaatgcacctgtggcgatacccctcccttagtatccatggcatagagggggccttcgacgaacctggaacaaagactgtcattcctggacgcgtgatcggaaagtttagcataagactggtgccgcacatgaacgttagtgcagtggagaaacaggtgactaggcacctagaagatgtgttctcaaagcgcaattcaagcaacaagatggttgtgagtatgaccctaggcttgcacccatggatcgctaacattgacgatacccaatacctcgccgccaaacgtgcgattagaactgtgttcggtacagaaccagatatgatacgcgatggttcaacaatacccatcgccaaaatgttccaagagatcgtacataagtccgtcgtcctgatacctctaggcgctgttgatgatggcgaacacagtcagaatgaaaagattaataggtggaactatatagaaggaactaaactgttcgcagctttctttctggagatggcacagctgcactag

SEQ ID NO: 225284 - DNA, 1524 bp, Artificial Sequence
  derived and/or modified sequence
atggaccccaagctcggtcggatggctgcatcattattagccgtcttgttgctactgcttgagagaggaatgtttagctccccgagtccaccacctgctctgctggagaaggttttccagtacatcgatctccaccaggatgaattcgttcaaactctgaaggagtgggtggcgatcgagtccgattctgtccaacccgtgcctcgcttccgtcaagaactgttcaggatgatggctgtagctgcagatacattgcagcggctgggcgctagagtggccagcgtagacatgggcccacagcagctgccagacggccagtcgcttcctattccacccattatcctggcagagttaggctcagatcctacaaagggtaccgtttgcttttacgggcacctcgatgtccagcccgcagatcgtggcgatgggtggctcacagacccatatgtactcactgaggtcgacggtaagctgtacggcagaggggcaaccgataacaaggggcctgtgctcgcatggatcaacgctgtgtctgccttccgcgctcttgagcaggacctcccagtgaacataaagttcataatcgagggcatggaggaggcagggtctgtagctctcgaagagttggtggaaaaagagaaggacaggttttttagcggcgttgactacatagtgattagcgataacttgtggatcagtcagcgcaaacctgctataacctacggcacacggggaaatagctattttatggtcgaagtgaaatgccgggaccaggatttccacagcggaacctttggcggtatcctgcacgagcctatggccgatctggtggctctgctcggctcactggtggactcctccggtcatatacttgttcccggaatttacgatgaggtagtgcctcttactgaagaagaaattaacacatacaaagcaattcatttggatctcgaagagtatagaaactcctcccgagtggagaaattcctgtttgataccaaggaggagattcttatgcatctgtggcgttatcccagcctgtccatccacggaattgagggggctttcgacgaacctggcactaagacggtaattcctggcagggtcatcggtaagtttagcatcaggctggtgccacatatgaacgtcagtgccgtcgaaaagcaggttacccgccacttggaggatgtgttttctaaaaggaactcatccaacaaaatggtcgtttcgatgaccctgggtttgcatccctggatagctaacatagatgatacccaatatctagcagccaagagggccatccgcactgtattcggcacagagcccgacatgattagagacggaagtaccatcccaattgcaaaaatgttccaggagatcgtccacaagtcggtggtactgatacccctaggtgccgtcgacgatggagagcatagtcagaatgaaaagatcaaccggtggaattatatagaaggcaccaagctcttcgccgcttttttcctggaaatggcccagttgcactag

SEQ ID NO: 225285 - DNA, 2215 bp, Artificial Sequence
  derived and/or modified sequence
gcattgtctcttcctctgcagttgagctgaatgaatacctccgaagccgctttgttctccagatgtgaatagctccactataccagcctcgtcttccttccgggggacaacgtgggtcagggcacagagagatatttaatgtcaccctcttggggctttcatgggactccctctgccacattttttggaggttgggaaagttgctagaggcttcagaactccagcctaatggatcccaaactcgggagaatggctgcgtccctgctggctgtgctgctgctgctgctggagcgcggcatgttctcctcaccctccccgcccccggcgctgttagagaaagtcttccagtacattgacctccatcaggatgaatttgtgcagacgctgaaggagtgggtggccatcgagagcgactctgtccagcctgtgcctcgcttcagacaagagctcttcagaatgatggccgtggctgcggacacgctgcagcgcctgggggcccgtgtggcctcggtggacatgggtcctcagcagctgcccgatggtcagagtcttccaatacctcccatcatcctggccgaactggggagcgatcccacgaaaggcaccgtgtgcttctacggccacttggacgtgcagcctgctgaccggggcgatgggtggctcacggacccctatgtgctgacggaggtagacgggaaactttatggacgaggagcgaccgacaacaaaggccctgtcttggcttggatcaatgctgtgagcgccttcagagccctggagcaagatcttcctgtgaatatcaaattcatcattgaggggatggaagaggctggctctgttgccctggaggaacttgtggaaaaagaaaaggaccgattcttctctggtgtggactacattgtaatttcagataacctgtggatcagccaaaggaagccagcaatcacttacggaacccgggggaacagctacttcatggtggaggtgaaatgcagagaccaggattttcactcaggaacctttggtggcatccttcatgaaccaatggctgatctggttgctcttctcggtagcctggtagactcgtctggtcatatcctggtccctggaatctatgatgaagtggttcctcttacagaagaggaaataaatacatacaaagccatccatctagacctagaagaataccggaatagcagccgggttgagaaatttctgttcgatactaaggaggagattctaatgcacctctggaggtacccatctctttctattcatgggatcgagggcgcgtttgatgagcctggaactaaaacagtcatacctggccgagttataggaaaattttcaatccgtctagtccctcacatgaatgtgtctgcggtggaaaaacaggtgacacgacatcttgaagatgtgttctccaaaagaaatagttccaacaagatggttgtttccatgactctaggactacacccgtggattgcaaatattgatgacacccagtatctcgcagcaaaaagagcgatcagaacagtgtttggaacagaaccagatatgatccgggatggatccaccattccaattgccaaaatgttccaggagatcgtccacaagagcgtggtgctaattccgctgggagctgttgatgatggagaacattcgcagaatgagaaaatcaacaggtggaactacatagagggaaccaaattatttgctgcctttttcttagagatggcccagctccattaatcacaagaaccttctagtctgatctgatccactgacagattcacctcccccacatccctagacagggatggaatgtaaatatccagagaatttgggtctagtatagtacattttcccttccatttaaaatgtcttgggatatctggatcagtaataaaatatttcaaaggcacagatgttggaaatggtttaaggtcccccactgcacaccttcctcaagtcatagctgcttgcagcaacttgatttccccaagtcctgtgcaatagccccaggattggattccttcaaaccttttagcatatctccaaccttgcaatttgattggcataatcactccagtttgctttctaggtcctcaagtgctcgtgacacataatcattccatccaatgatcgcctttgctttaccactctttccttttatcttattaataaaaatgttggtctccaccactgactacaa

SEQ ID NO: 225286 - DNA, 1524 bp, Artificial Sequence
  derived and/or modified sequence
atggaccccaagctgggcagaatggccgccagcctgctggccgtgctgctgctgctgctggagagaggcatgttcagcagccccagccccccccccgccctgctggagaaggtgttccagtacatcgacctgcaccaggacgagttcgtgcagaccctgaaggagtgggtggccatcgagagcgacagcgtgcagcccgtgcccagattcagacaggagctgttcagaatgatggccgtggccgccgacaccctgcagagactgggcgccagagtggccagcgtggacatgggcccccagcagctgcccgacggccagagcctgcccatcccccccatcatcctggccgagctgggcagcgaccccaccaagggcaccgtgtgcttctacggccacctggacgtgcagcccgccgacagaggcgacggctggctgaccgacccctacgtgctgaccgaggtggacggcaagctgtacggcagaggcgccaccgacaacaagggccccgtgctggcctggatcaacgccgtgagcgccttcagagccctggagcaggacctgcccgtgaacatcaagttcatcatcgagggcatggaggaggccggcagcgtggccctggaggagctggtggagaaggagaaggacagattcttcagcggcgtggactacatcgtgatcagcgacaacctgtggatcagccagagaaagcccgccatcacctacggcaccagaggcaacagctacttcatggtggaggtgaagtgcagagaccaggacttccacagcggcaccttcggcggcatcctgcacgagcccatggccgacctggtggccctgctgggcagcctggtggacagcagcggccacatcctggtgcccggcatctacgacgaggtggtgcccctgaccgaggaggagatcaacacctacaaggccatccacctggacctggaggagtacagaaacagcagcagagtggagaagttcctgttcgacaccaaggaggagatcctgatgcacctgtggagataccccagcctgagcatccacggcatcgagggcgccttcgacgagcccggcaccaagaccgtgatccccggcagagtgatcggcaagttcagcatcagactggtgccccacatgaacgtgagcgccgtggagaagcaggtgaccagacacctggaggacgtgttcagcaagagaaacagcagcaacaagatggtggtgagcatgaccctgggcctgcacccctggatcgccaacatcgacgacacccagtacctggccgccaagagagccatcagaaccgtgttcggcaccgagcccgacatgatcagagacggcagcaccatccccatcgccaagatgttccaggagatcgtgcacaagagcgtggtgctgatccccctgggcgccgtggacgacggcgagcacagccagaacgagaagatcaacagatggaactacatcgagggcaccaagctgttcgccgccttcttcctggagatggcccagctgcactag

SEQ ID NO: 225287 - protein, 479 aa, Artificial Sequence
  derived and/or modified sequence
MVRIQRRKLLASCLCVTATVFLLVTLQVMVELGKFERKEFKSSSLQDGHTKMEEAPTHLNSFLKKEGLTFNRKRKWELDSYPIMLWWSPLTGETGRLGQCGADACFFTINRTYLHHHMTKAFLFYGTDFNIDSLPLPRKAHHDWAVFHEESPKNNYKLFHKPVITLFNYTATFSRHSHLPLTTQYLESIEVLKSLRYLVPLQSKNKLRKRLAPLVYVQSDCDPPSDRDSYVRELMTYIEVDSYGECLRNKDLPQQLKNPASMDADGFYRIIAQYKFILAFENAVCDDYITEKFWRPLKLGVVPVYYGSPSITDWLPSNKSAILVSEFSHPRELASYIRRLDSDDRLYEAYVEWKLKGEISNQRLLTALRERKWGVQDVNQDNYIDAFECMVCTKVWANIRLQEKGLPPKRWEAEDTHLSCPEPTVFAFSPLRTPPLSSLREMWISSFEQSKKEAQALRWLVDRNQNFSSQEFWGLVFKD

SEQ ID NO: 225288 - DNA, 1440 bp, Artificial Sequence
  derived and/or modified sequence
atggtgagaatccagagaagaaagctgctggccagctgcctgtgcgtgaccgccaccgtgttcctgctggtgaccctgcaggtgatggtggagctgggcaagttcgagagaaaggagttcaagagcagcagcctgcaggacggccacaccaagatggaggaggcccccacccacctgaacagcttcctgaagaaggagggcctgaccttcaacagaaagagaaagtgggagctggacagctaccccatcatgctgtggtggagccccctgaccggcgagaccggcagactgggccagtgcggcgccgacgcctgcttcttcaccatcaacagaacctacctgcaccaccacatgaccaaggccttcctgttctacggcaccgacttcaacatcgacagcctgcccctgcccagaaaggcccaccacgactgggccgtgttccacgaggagagccccaagaacaactacaagctgttccacaagcccgtgatcaccctgttcaactacaccgccaccttcagcagacacagccacctgcccctgaccacccagtacctggagagcatcgaggtgctgaagagcctgagatacctggtgcccctgcagagcaagaacaagctgagaaagagactggcccccctggtgtacgtgcagagcgactgcgacccccccagcgacagagacagctacgtgagagagctgatgacctacatcgaggtggacagctacggcgagtgcctgagaaacaaggacctgccccagcagctgaagaaccccgccagcatggacgccgacggcttctacagaatcatcgcccagtacaagttcatcctggccttcgagaacgccgtgtgcgacgactacatcaccgagaagttctggagacccctgaagctgggcgtggtgcccgtgtactacggcagccccagcatcaccgactggctgcccagcaacaagagcgccatcctggtgagcgagttcagccaccccagagagctggccagctacatcagaagactggacagcgacgacagactgtacgaggcctacgtggagtggaagctgaagggcgagatcagcaaccagagactgctgaccgccctgagagagagaaagtggggcgtgcaggacgtgaaccaggacaactacatcgacgccttcgagtgcatggtgtgcaccaaggtgtgggccaacatcagactgcaggagaagggcctgccccccaagagatgggaggccgaggacacccacctgagctgccccgagcccaccgtgttcgccttcagccccctgagaaccccccccctgagcagcctgagagagatgtggatcagcagcttcgagcagagcaagaaggaggcccaggccctgagatggctggtggacagaaaccagaacttcagcagccaggagttctggggcctggtgttcaaggactag

SEQ ID NO: 225289 - DNA, 1074 bp, Artificial Sequence
  derived and/or modified sequence
atgggcatcggccagctgccccactacgccctggtggtgcccgccgacggcggcgactgggaggtgagacccatgtggagcagatgcctgttcctgcaccaccagcccgacctgccccccagcagccacgaccagagcatccccctgctgtggagccaggaggagagcccccccctggccgagaacgacggcaccgacttcaacatcgacagcctgcccctgcccagaaaggcccaccacgactgggccgtgttccacgaggagagccccaagaacaactacaagctgttccacaagcccgtgatcaccctgttcaactacaccgccaccttcagcagacacagccacctgcccctgaccacccagtacctggagagcatcgaggtgctgaagagcctgagatacctggtgcccctgcagagcaagaacaagctgagaaagagactggcccccctggtgtacgtgcagagcgactgcgacccccccagcgacagagacagctacgtgagagagctgatgacctacatcgaggtggacagctacggcgagtgcctgagaaacaaggacctgccccagcagctgaagaaccccgccagcatggacgccgacggcttctacagaatcatcgcccagtacaagttcatcctggccttcgagaacgccgtgtgcgacgactacatcaccgagaagttctggagacccctgaagctgggcgtggtgcccgtgtactacggcagccccagcatcaccgactggctgcccagcaacaagagcgccatcctggtgagcgagttcagccaccccagagagctggccagctacatcagaagactggacagcgacgacagactgtacgaggcctacgtggagtggaagctgaagggcgagatcagcaaccagagactgctgaccgccctgagagagagaaagtggggcgtgcaggacgtgaaccaggacaactacatcgacgccttcgagtgcatggtgtgcaccaaggtgtgggccaacatcagactgcaggagaaggtgagcaagagcaaggtgggcatcgagcccgccggctggcccagctag

SEQ ID NO: 225290 - DNA, 3825 bp, Artificial Sequence
  derived and/or modified sequence
gctccagtcctagtccagttggagaagcggagagtttcccctgtcttaaagaagagggcccccgcagccttcccgagaactttccatagggccgtggcctcaggcggactgcgaaccaagatcatcagcagggggcggcccggtgttcttagaacccgggtcccaagagcttgtgaacagggcacgagtgaaaacccggatccaggctggctccgccggaacgcgccccgagctcgcccgcgcggccgcctcttccgctcctgatcggctcttcgggtcttcccggcgcccaggcttgggctcatagggagaaaggaagctgcgctgcattctgcgggacgaaccctgctccgcgcgagaatttttttgattccttcttatttggagaaatctccagctgctctgatgatagcctaagaagactgcatgctgcttcctctcgatgccaagccagaccctctcacaacctcggatctcagtccttcatggagacctggtcccagcaggaatggcagtgcaggaaattggcgcccagatggttcttccatgtgaagttgtctcgggctctgggctgacgagagaacacctggtaaccaggttagccctctgtcagtcacccagggcagggcagcatggtgcggattcagaggaggaagcttttggcatcttgcctgtgcgtcacagccaccgtctttctgcttgtcacactccaggtcatggttgagctggggaagtttgaaaggaaggagtttaaaagttccagtttgcaagatggacatacaaaaatggaggaagcacctacgcatcttaattcatttcttaagaaagaaggattgaccttcaacaggaaaagaaaatgggaattggacagctaccccattatgctctggtggtccccgctgacgggggagactgggaggttaggccaatgtggagcagatgcttgtttcttcaccatcaaccggacctacctccatcatcacatgaccaaagcattcctcttctatggtactgactttaacatagatagcttacctctgcctcggaaagcccatcatgactgggctgtttttcatgaagagtccccgaaaaacaattataagctctttcataaaccagtgatcaccttgttcaactacactgccacgttcagcaggcattcccacttgccactaactacccaatacttggagagcattgaagtcctgaagtcactccgatacctagttcctttgcagtccaaaaacaagcttagaaaaagacttgctccgctggtgtatgtacagtcagactgtgacccaccatcagacagggacagctatgttcgcgagctgatgacttacatcgaggtcgattcctatggtgaatgtttacgaaacaaagacctccctcagcagctgaaaaatccagcctctatggatgccgatggcttttataggatcattgcacagtataagtttatcctagcttttgagaatgcagtttgtgatgactacatcactgagaagttctggaggccactgaaactgggggtagtccctgtatattacggatcccccagcatcacagactggcttccaagtaacaaaagtgctattcttgtatcagaattttctcaccccagggaactggcaagttacatcagacgactggattctgatgacagattgtatgaggcctatgtagaatggaagctgaagggtgagatctctaaccagcgacttctgacagctctcagggaacggaaatggggagtgcaagacgtcaaccaggacaattacatcgatgcatttgagtgtatggtgtgcaccaaggtgtgggctaatatcaggcttcaggaaaagggcttaccacccaaaagatgggaggcagaagatacccacctgagttgcccagagcccacagtgtttgctttctcaccactccggactccacctttgagctctttgcgagagatgtggatttccagctttgaacaatccaagaaagaagcccaggcactaaggtggctggttgataggaatcaaaacttttcatctcaagagttttggggcctagtattcaaggactgatttcaaaaatgatcagaatgaaacagactagagccttcttgaggtttattttctaggttgccttaatatttgaacataatagctattctgttgactatccatcaggataataattagttgctgcagtactcataatgagccctttcaaggaatagatgtaaattacccttaggggtagccactatattttttatactaaaaaaggaaatatttcttatggacactggttatcttccatgtccgtgtctgtggacccacatacttactgccttttgtggaaattcacctagagtgagtactttccttgtgcaatggagggagacgatctagctatagattcttgatactcacctcactctcaacagcttattggtatttggcaaacctggtatcctgcagccgagcatgaacatgaaatacattagaacttggcaatgagagatcccatctgttggtttccagggatgtaagtgagtaataaaagctgtttcaagtttatccactatccactcttcaagtgaaaagaacttatgtgtgtctaccttcttctccataccctgagccacctctctcactttctttagttgtgccttgccctatcgcctcccattttcccttcaaagtagaatgtcttgtaaagacacagtaactcctgtgtgttttgattagtgagatgttaccacttaccccttctgctgcgcagaataatattaagaattgctatgcttatgattcaggctggacagcctggacattttgagcagcgcgagagtagaagtgaatacccccaggaactccaattgtgctgaagctgatttgtctgttcgtaggatgatgtgcagcctgtcacagtggcagccacaggcattcagtttgtgggcatttcctgtcatttcggatcctgctatagggaaggttcagctctcctgtctggggcatctactggagcacctcagaagacaaggaggaaaacactggctcatgttttctttccatgtgagggaggggaggtttctagatgatactaaaagcctgttgccactgttgtgtcatgatttccattcttcatcatggaaagccacaagcctcagaaggcagccagaggacaggaagagtctgtgatgctcatgtctgtgtcatggcatgagggggaattgacgagtgcttgcttagcatcagctctcattgtattgaaggctgtgcccttggtgtgcttagcagtgagcagcgtcttcattaggtagctctggctgggctttgtcagccagcgtgtgagaaaggagaaccaaaaccaatacctccttatagaagccagaaggatcacattggatgagagaaggtgtctataactgggttcttcccaatcccagctctttcattaactaaatatgatcttggacatatctcttaacctccatcggccttagtttttgcatccaaaaagaagtgattgggctggtcttggaaggtttttttcttttttttcccctgtgtaacattcttcattgttcatcaacatttaagaaatttaattttgtagatgtttttactaaagagggtaacaaactattttggaactgctgtatgttattcaagggaagcacgctgtttggaggaaggagcatacttaatgggtagtattgaggatgaaagggaatttctctctctgccattttatttgataatattaaagaaataaagactggaaagggggattccttgttaaaggtcagattttaaattgcatataaaa

SEQ ID NO: 225291 - DNA, 1654 bp, Artificial Sequence
  derived and/or modified sequence
gtcttcccggcgcccaggcttgggctcatagggagaaaggaagctgcgctgcattctgcgggacgaaccctgctccgcgcgagaatttttttgattccttcttatttggagaaatctccagctgctctgatgatagcctaagaagactgcatgctgcttcctctcgatgccaagccagaccctctcacaacctcggatctcagtccttcatggagacctggtcccagcaggaatggcagtgcaggaaattggcgcccagatggttcttccatgtgaagttgtctcgggctctgggctgacgagagaacacctggtaaccaggttagccctctgtcagtcacccagggcagggcagcatggtgcggattcagaggaggaagcttttggcatcttgcctgtgcgtcacagccaccgtctttctgcttgtcacactccaggtcatggttgagctggggaagtttgaaaggaaggagtttaaaagttccagtttgcaagatggacatacaaaaatggaggaagcacctacgcatcttaattcatttcttaagaaagaaggattgaccttcaacaggaaaagaaaatgggaattggacagctaccccattatgctctggtggtccccgctgacgggggagactgggaggttaggccaatgtggagcagatgcttgtttcttcaccatcaaccggacctacctccatcatcacatgaccaaagcattcctcttctatggtcccaagaagaatcaccacctttggcagaaaatgatggtactgactttaacatagatagcttacctctgcctcggaaagcccatcatgactgggctgtttttcatgaagagtccccgaaaaacaattataagctctttcataaaccagtgatcaccttgttcaactacactgccacgttcagcaggcattcccacttgccactaactacccaatacttggagagcattgaagtcctgaagtcactccgatacctagttcctttgcagtccaaaaacaagcttagaaaaagacttgctccgctggtgtatgtacagtcagactgtgacccaccatcagacagggacagctatgttcgcgagctgatgacttacatcgaggtcgattcctatggtgaatgtttacgaaacaaagacctccctcagcagctgaaaaatccagcctctatggatgccgatggcttttataggatcattgcacagtataagtttatcctagcttttgagaatgcagtttgtgatgactacatcactgagaagttctggaggccactgaaactgggggtagtccctgtatattacggatcccccagcatcacagactggcttccaagtaacaaaagtgctattcttgtatcagaattttctcaccccagggaactggcaagttacatcagacgactggattctgatgacagattgtatgaggcctatgtagaatggaagctgaagggtgagatctctaaccagcgacttctgacagctctcagggaacggaaatggggagtgcaagacgtcaaccaggacaattacatcgatgcatttgagtgtatggtgtgcaccaaggtgtgggctaatatcaggcttcaggaaaaggtaagcaaatcaaaggtgggcatagagccagcaggctggccatcttga

SEQ ID NO: 225292 - DNA, 1440 bp, Artificial Sequence
  derived and/or modified sequence
atggtgcggatccagagaaggaagctcctggcctcctgcttatgcgtgacggctacagtgtttctgttggtcaccctgcaggtaatggtggaattggggaaatttgaacgcaaagagttcaaatcatcttcactgcaggatggccacacgaaaatggaggaggcccctacccatctgaattcctttcttaagaaggaaggcctcacattcaatcgtaagcgcaagtgggagctggactcgtacccgattatgctgtggtggagcccattaaccggagaaactggaaggctgggtcaatgtggcgcagatgcatgtttcttcacaattaataggacatatctacaccaccacatgactaaggcttttttattctacggcaccgacttcaacatcgattccctacccctgccccggaaagctcatcatgactgggccgtgtttcatgaggagagtcctaagaataactacaaactgtttcacaagcctgtgattacgctatttaactacaccgctaccttttctaggcactcccaccttcctttgactacacagtacctcgaaagtattgaggtcctgaagtccctccgttacctggtccctctgcagagtaaaaacaaactgcgcaagcgccttgcccctctggtgtacgtgcaaagtgattgtgatcctccttctgaccgtgatagctatgtgcgcgagcttatgacatacatcgaggtggatagttacggggaatgtctccgtaacaaggatctgcctcagcagctgaagaacccggcatccatggatgcagacggattctatagaatcattgcacagtacaagttcattctggctttcgaaaatgctgtctgcgatgactatataactgaaaaattttggcgcccattgaagctgggggtagtgccggtctactatggaagtccttctatcaccgattggttaccgtctaataaaagcgccatcctggtctcagaattttcccatccaagagaactggcatcctacatcagacggctagatagcgatgataggctctacgaagcgtatgtggagtggaaactgaagggggaaatttctaaccagagactcctgacagccctgagggaaaggaaatggggtgtccaagacgtgaatcaagacaattacatagatgcatttgagtgcatggtttgtacaaaagtgtgggctaacattaggctgcaggaaaagggactgcccccaaagcgatgggaggctgaggacacccatctttcatgtcccgaacctactgtgttcgccttttcccctcttagaacgcctccgctgagtagccttcgggaaatgtggatcagttctttcgagcagtccaagaaagaagcacaggcgttgaggtggctggttgatcgcaatcagaactttagctctcaggagttctggggcctggtgtttaaggattag

SEQ ID NO: 225293 - DNA, 1074 bp, Artificial Sequence
  derived and/or modified sequence
atgggcatcggacagctgccccactatgcacttgtggtccctgcagacggtggggactgggaagtgcgtccaatgtggagtaggtgtctctttctgcatcatcagcccgatctaccaccctcatcgcacgatcagtcgatcccattattgtggagtcaggaggaatctccacctttggccgaaaacgatggcaccgatttcaatatcgacagtctgcccttacccaggaaagcccatcacgactgggctgtgtttcacgaggagtctcctaagaataactacaagctatttcacaaacccgttattaccctgtttaattacacggcgaccttcagccggcactcccacctccccttgaccacccagtatcttgagtctatcgaggtcctgaagtctctgcggtacttggtccccttacaaagcaagaataaactgcgcaagcggctcgctcctctggtttacgtgcagtcagattgcgatccacctagtgaccgggatagttacgtccgtgagctgatgacctacatagaggttgatagttacggagaatgcttgaggaacaaggatctgccacagcagctaaagaaccctgcttcaatggatgctgacggcttttaccgtatcatagcacaatataagtttattcttgctttcgagaatgccgtctgcgacgactatattacagaaaagttttggcggcccctgaagttgggtgttgtgcccgtgtattatggcagtcctagcattactgattggcttccttccaacaaatctgctatcctggtgagtgaattctcccaccctagagagcttgcaagctacatccgcaggttggactcagacgatcgcctgtacgaggcctatgttgaatggaaattgaagggcgagatttctaatcagcgcctcctaactgctctgcgggaaaggaagtggggtgtgcaagatgttaatcaagataactatatcgatgcttttgagtgtatggtatgtactaaggtgtgggccaatatacgtctgcaggagaaggtgagtaaatccaaagtaggcatcgagccagccggatggccatcttag

SEQ ID NO: 225294 - DNA, 1440 bp, Artificial Sequence
  derived and/or modified sequence
atggtgcgcatccagaggaggaagctgctggccagctgcctgtgtgtgacagccaccgtcttcctgctggtgaccctgcaggtgatggtggagctgggcaagtttgagaggaaggagttcaagagcagcagcctgcaggacggccacaccaagatggaggaggcccccacccacctgaacagcttcctgaagaaggagggcctgaccttcaacaggaagaggaagtgggagctggacagctaccccatcatgctgtggtggagccccctgactggagagaccggccgcctgggccagtgtggggctgatgcctgcttcttcaccatcaacagaacctacctgcaccaccacatgaccaaggccttcctgttctatggaacagacttcaacatcgacagcctgcccctgcccaggaaggcccaccacgactgggccgtgttccacgaggagagccccaagaacaactacaagctgttccacaagcctgtgatcaccctcttcaactacacagccaccttcagccgccacagccacctgcccctgaccacccagtacctggagagcattgaggtgctgaagagcctgcgctacctggtgcccctgcagagcaagaacaagctgaggaagaggctggcccccctggtgtatgtgcagagcgactgtgaccccccaagtgaccgggacagctatgtgcgggagctgatgacctacatcgaggtggacagctatggagaatgtctgaggaacaaggacctgccccagcagctgaagaacccagcctccatggatgctgatggcttctaccgcatcatcgcccagtacaagttcatcctggcctttgaaaatgctgtgtgtgatgactacatcacagagaagttctggaggcccctgaagctgggcgtggtgcctgtgtactacggcagccccagcatcacagactggctgcccagcaacaagagcgccatcctggtgtctgagttcagccacccccgggagctggccagctacatccggcggctggacagtgatgaccggctgtatgaggcctacgtggagtggaagctgaagggggagatcagcaaccagaggctgctgacagccctgcgggagaggaagtggggcgtgcaggatgtgaaccaggacaactacattgatgcctttgagtgcatggtgtgcaccaaggtgtgggccaacatccggctgcaggagaagggcctgccccccaagcgctgggaggccgaggacacccacctgagctgcccagagcccaccgtgtttgccttcagccccctgcggaccccacccctgagcagcctgcgggagatgtggatcagcagctttgagcagagcaagaaggaggcccaggccctgcgctggctggtggacaggaaccagaacttcagcagccaggagttctggggcctggtgttcaaggactag

SEQ ID NO: 225295 - DNA, 1074 bp, Artificial Sequence
  derived and/or modified sequence
atgggcatcggccagctgccccactacgccctggtggtgcctgcagatggaggagactgggaggtgcggcccatgtggagccgctgcctcttcctgcaccaccagcctgacctgccccccagcagccatgaccagagcatccccctgctgtggagccaggaggagagcccccccctggctgaaaatgatggaacagacttcaacatcgacagcctgcccctgcccaggaaggcccaccacgactgggccgtgttccacgaggagagccccaagaacaactacaagctgttccacaagcctgtgatcaccctcttcaactacacagccaccttcagccgccacagccacctgcccctgaccacccagtacctggagagcattgaggtgctgaagagcctgcgctacctggtgcccctgcagagcaagaacaagctgaggaagaggctggcccccctggtgtatgtgcagagcgactgtgaccccccaagtgaccgggacagctatgtgcgggagctgatgacctacatcgaggtggacagctatggagaatgtctgaggaacaaggacctgccccagcagctgaagaacccagcctccatggatgctgatggcttctaccgcatcatcgcccagtacaagttcatcctggcctttgaaaatgctgtgtgtgatgactacatcacagagaagttctggaggcccctgaagctgggcgtggtgcctgtgtactacggcagccccagcatcacagactggctgcccagcaacaagagcgccatcctggtgtctgagttcagccacccccgggagctggccagctacatccggcggctggacagtgatgaccggctgtatgaggcctacgtggagtggaagctgaagggggagatcagcaaccagaggctgctgacagccctgcgggagaggaagtggggcgtgcaggatgtgaaccaggacaactacattgatgcctttgagtgcatggtgtgcaccaaggtgtgggccaacatccggctgcaggagaaggtgtccaagagcaaggtgggcatcgagcctgctggctggcccagctag

SEQ ID NO: 225296 - DNA, 1440 bp, Artificial Sequence
  derived and/or modified sequence
atggtgcggatccagcggcggaagctgctggccagctgcctgtgcgtgacggccaccgtttttttgcttgtcaccctccaggttatggtagagctgggcaagttcgagaggaaggaattcaagagtagcagccttcaagatggacataccaagatggaagaagctccgactcatctcaatagtttccttaaaaaagaaggcttgacctttaatcgcaagcgcaagtgggaattggactcctacccaatcatgctgtggtggtccccattaactggcgaaactggacgccttggtcaatgtggggcggatgcgtgcttctttaccattaaccggacctatctgcatcaccacatgacaaaggcctttcttttttatggcaccgactttaatattgactctttgcctctcccacggaaggctcaccacgactgggccgttttccatgaagaaagccctaagaataactataaactttttcacaagccagtgattaccctgttcaattatacggccacatttagtaggcattctcatctcccgttgactacacagtacctcgagtccattgaggtgctgaaaagccttagatatctggtcccactgcagagcaagaataagctacggaagcgcctggcacccctggtctatgttcagagtgattgtgatcctccttccgatagagattcctacgtcagagaattgatgacttatatagaagttgatagttacggggagtgtctcaggaacaaggacttgcctcagcaattgaagaaccctgccagcatggatgccgacggcttctatagaatcattgcccagtacaagtttatcctagcctttgagaatgccgtgtgcgacgactatatcacggagaagttttggcggccgctgaagctgggcgtggtgcccgtctattacggttctccgtctattactgactggctaccatccaacaaatctgccatccttgtttctgagtttagtcaccccagagagttagcgagttacattaggcgactcgacagcgatgacagactttatgaggcctacgtggagtggaagctcaagggcgagatttccaatcaaaggctcctgacagccttgcgagaacgaaagtggggggtacaagatgtaaaccaggataactacattgacgctttcgaatgtatggtgtgcacaaaggtgtgggccaacatccgactgcaggaaaagggtctcccccccaagcggtgggaggccgaagatacccacctctcctgccctgaacccacagtatttgcttttagtcctctgcgtaccccccccctttccagtttgcgggaaatgtggatcagctcctttgaacagagcaagaaagaagctcaagcccttagatggttggtcgatcgtaaccagaacttctcttctcaggaattttggggcttagtcttcaaggattag

SEQ ID NO: 225297 - DNA, 1074 bp, Artificial Sequence
  derived and/or modified sequence
atgggcatcggccagctgccccactacgccctggtggtgcccgccgacggaggagactgggaggtacgccctatgtggtcacgatgcttgtttttacaccaccagcccgacctgccacccagctcacatgaccagtccattccgctgctatggtctcaagaagagagcccaccccttgcggaaaacgacggcactgactttaatatcgactctctgccactaccccggaaggcacaccatgattgggcagtgtttcacgaggaatctccaaagaataactacaaactgttccacaaacccgtgattaccctgttcaactataccgccacatttagccgacattctcacctgccattgactactcaatacttggagagtatcgaggtactgaaatctctccggtaccttgtgccgctgcagtccaagaacaaactgagaaagcgccttgctccgctggtgtatgttcagtccgattgcgatcccccaagcgaccgggactcttatgttagagagctgatgacttacatcgaggtcgacagttatggcgaatgccttcgaaataaggaccttccgcagcagctaaagaatcctgctagtatggacgcagatggcttttatcggattatcgcccagtacaagtttattctggcgttcgagaatgctgtatgcgatgactatatcacagagaagttctggcgaccgctgaagctaggtgtggtacctgtgtattacggtagtccatcaataactgattggctgccatccaacaagtctgcgatactcgtatccgaattcagccatcctagagaactggcaagttacatccgtagattggactcagatgaccgcctgtacgaggcttacgtggagtggaagctgaaaggagagatttccaatcagaggctgctcacagccctgagggagagaaaatggggggtgcaggatgtgaaccaagacaattacatagacgccttcgagtgcatggtctgtaccaaagtctgggcgaacattcggcttcaggagaaggtgtccaagagtaaagtgggcattgaacccgctggatggccctcctag

SEQ ID NO: 225298 - DNA, 1440 bp, Artificial Sequence
  derived and/or modified sequence
atggtccgcattcagaggaggaagctactggcctcatgtctctgtgtcacggccactgtcttcctgctggttactctgcaagttatggtggagctgggcaaattcgagcgaaaggaattcaagagctcatccctgcaggacggccatacaaagatggaggaagctcccacccacttgaactccttcctgaagaaagagggtttgacatttaataggaaacgtaagtgggaactcgattcctaccccattatgttgtggtggagtccgctgaccggcgagaccggaagactggggcagtgcggagcggacgcatgcttctttactatcaataggacatacttgcaccaccatatgacgaaagctttcctcttttatggaaccgacttcaacatcgatagtttgcctttgccgcgtaaggctcaccatgactgggcagtgtttcacgaggaaagccccaagaataattataaactgtttcacaaacctgtgatcacactgttcaactataccgcgaccttttctcgacactcccatctgcccctaactacccagtacctggaatctatcgaggtgttaaagtcattaagatatttggtcccattacagagcaagaacaagctgagaaagcgcctggccccattggtgtatgttcagagtgactgcgatcccccaagtgaccgggattcatacgttagagaattgatgacatacatcgaggttgatagctatggtgagtgcctccgtaacaaagatctaccacagcagctcaagaatcccgcatcaatggatgcagacggtttctaccgcataatcgctcagtacaaatttatactggcattcgaaaatgccgtgtgcgacgattacattacggaaaaattttggcgcccactgaaactgggcgtggtgcccgtctattatggatcaccctccataaccgattggctgccctctaacaagagcgcgattttggtgtctgagttttcccatcctcgggaactggcgtcttatatccgccgtctcgactccgacgatcggctttacgaagcgtacgttgaatggaaactgaagggcgagatatctaaccagcgtctactcaccgcactacgcgagcgtaagtggggtgttcaggacgtgaatcaggataattatatcgacgccttcgaatgcatggtttgcacaaaggtatgggccaacattcgcctccaggaaaaaggcctaccacctaagcgatgggaggccgaagatacccacctgtcctgccccgaaccgactgtcttcgccttttctcctctgagaactccgccactgtcctctcttcgagagatgtggatttctagctttgagcagtccaaaaaagaggcccaagccctccgctggctggtcgatcgcaatcagaacttctcctctcaggaattttggggactggtgtttaaagactag

SEQ ID NO: 225299 - DNA, 1074 bp, Artificial Sequence
  derived and/or modified sequence
atggggatcggccagttgccgcactatgctttagtggtgccagccgatgggggagactgggaagtacgtcctatgtggagcaggtgtctgttccttcaccatcagcccgaccttcctccctcaagtcatgatcagtccattcccctgttgtggagccaggaggaatcccccccactcgcagaaaatgatggcaccgattttaatatcgattccttgcctctgcccagaaaggcacaccacgactgggccgtgttccatgaggaatcaccaaagaataactacaagctgtttcacaagcccgtcattacactcttcaattacactgccaccttctccagacattcgcatctcccgttgaccactcagtaccttgagtccatcgaggtcctcaaatctctgcgatacttggtgccactgcagagtaagaataaattgcgtaagcgactggctcctctagtttacgttcaatctgattgcgatccaccaagcgatagagactcatatgtcagggagctcatgacatacatcgaagtggacagctatggggaatgcctccgaaacaaggacctccctcagcagcttaagaaccccgcttccatggatgccgatggattctaccgcatcatcgcacaatataagttcatcttggccttcgaaaacgccgtgtgcgacgactacattaccgagaaattctggcgtcctctcaagttgggtgtggtgcctgtgtactacgggtctccttcaataaccgattggttgcctagcaataaatccgctatcctcgtcagcgagttcagtcacccgcgagaactggcttcatatattagaaggctcgactcggatgaccggctctacgaggcatatgtggagtggaagttgaaaggggagatcagcaatcagcggttgttgaccgctttacgggagagaaaatggggggtccaggacgtgaatcaagacaactacatcgacgccttcgagtgtatggtgtgcactaaggtgtgggcaaatattagactgcaagagaaggtgtctaaatctaaggtagggatcgagcctgccggatggccgtcttag

SEQ ID NO: 225300 - DNA, 1197 bp, Artificial Sequence
  derived and/or modified sequence
atggtaaacgacccacctgtgcccgccctgctgtgggctcaggaagttggccaagtgctggccggcagagcccgcaggttattactgcagttcggcgttctgttctgtacaattctcctgctcctttgggtaagcgtctttttatacgggtccttctattatagttatatgccaactgtgtcccacctaagccctgtgcacttttactacaggactgattgcgatagctcaacaacctcactttgttccttccctgtggccaatgtgtctctaactaaaggaggcagggatcgcgtgttgatgtatggccaaccctatcgcgtgaccctcgagctggagctgccggaaagtccagtgaaccaagaccttgggatgttcctggtcactatcagctgctacacaaggggaggccggatcatttccacttcttcccgctcagtgatgttacactatcgttccgacttgctgcagatgttagatacgctggttttctcttctctcttactgttcggttttgctgagcagaaacaattactcgaagtggagctgtacgcggactacagagagaatagctacgtacccaccacaggtgccatcatcgagatacactctaaaaggatccagctgtacggcgcgtacctgcgcatccacgcccactttaccggcctccgctatctcttgtacaacttcccaatgacctgcgcattcatcggagtggcttccaattttacgttcctgagcgtgatcgtactgtttagttatatgcagtgggtctggggcgggatctggccgaggcacaggttctcactccaggtaaatattcgtaaaagggataattcgagaaaagaagtgcagcgaagaatctccgctcatcaacccgggcccgaaggccaagaggaaagcacaccccaaagcgacgtgaccgaggacggagaaagtcccgaggacccatccggcaccgaaggtcagttgtcagaggaggaaaaacccgatcaacagcctttgagcggggaagaagagctggagcccgaagccagcgacggttccggctcttgggaagacgcagcactgctcaccgaagccaatttgccagcccccgcccccgcatccgcaagcgcaccagtgctggagactcttgggtcaagcgagcccgctggaggcgcactgagacaacgtccgacgtgcagtagcagttag

SEQ ID NO: 225301 - DNA, 1197 bp, Artificial Sequence
  derived and/or modified sequence
atggtgaacgatcctcctgtgcccgctcttctatgggctcaagaggtgggccaggtgctcgctggtcgagccagacgcctcttgctgcagtttggcgtacttttctgcaccatcctgctactgctgtgggtgtccgttttcctgtatggatctttctattatagctacatgcccaccgtgtcccacttgagtcctgtgcacttctattataggaccgattgtgatagttccaccactagcctgtgttccttccccgtggctaatgtgtcccttactaaaggcggccgcgaccgagtcctgatgtatggacagccttatcgcgtgaccctcgagttggaattacctgaaagcccagttaatcaagatctgggcatgttcctggtgaccatctcctgttatactcgcggaggtcgaatcatcagcaccagcagccgctcggtgatgctccattatcgaagcgacctcttgcagatgctggacaccctcgttttctcctctctgctgctcttcggctttgcagagcagaaacaactacttgaagtcgagctgtatgccgactaccgggagaatagctatgttcctaccacgggggcaataatcgaaattcacagcaagcgaatccagctgtatggggcctatctaagaatacatgcccacttcaccggtctacgttacctgttgtacaacttcccaatgacatgcgctttcatcggcgtggcctctaatttcactttcctatcagtgatagtgttgtttagctacatgcagtgggtctggggtggaatatggccaagacataggtttagcctgcaggtaaatatcagaaagcgcgacaattctcgaaaggaggtccagcggcggatctcagctcaccagccaggcccagaaggtcaagaagagtctacacctcagtctgacgtcactgaagatggggagtcaccagaggatccatccggaactgagggacagctgagcgaagaggaaaaacccgaccaacagccgttgagcggcgaagaggagctcgagcctgaagctagtgatggtagcggctcctgggaagatgccgccctgctgactgaggcaaatcttccagcacctgcacccgcaagcgcctccgcccccgtgcttgagactctcgggtcctctgagcctgccggtggcgccctccgccagagacctacctgctcatctagctag

SEQ ID NO: 225302 - DNA, 1197 bp, Artificial Sequence
  derived and/or modified sequence
atggtgaatgatccacccgttccagccctgctttgggcccaggaggtgggccaggtgctcgccggtagggctcgccggttgctactccagttcggagtacttttttgtacaattctactgctgctttgggtgagcgtgtttttatatggaagtttttattactcttacatgcccaccgtgagccacctcagtcccgtacacttctactatcgtactgattgtgacagctccacaacaagcctctgctccttccctgtggcaaacgtctctctgacaaagggagggcgcgaccgcgttctgatgtatggtcagccttatagagtcacattggaactcgagttacccgaaagcccagttaaccaggacctggggatgttcctagtgactatcagttgctacacaagaggagggcgtataatttccacctcctctcgatccgttatgctgcactatagatctgacttactgcaaatgttggataccctggtgttcagctctctccttctgttcggatttgcagaacagaagcagctgctggaggtggagctttatgccgactatcgcgagaacagctacgtgccaaccacaggggccatcattgagattcattccaaacgcatacaattgtatggggcttacttgcgtatccatgctcacttcacagggctgagatacttgttatataattttcctatgacatgtgcctttatcggtgtcgcaagtaacttcacgtttttatctgtgattgtattatttagctacatgcagtgggtttggggcggcatctggcctcggcataggttttcccttcaggtgaatatccgaaagagggataattccaggaaggaagttcaaaggcgaatttctgcacatcaacccgggcctgaaggacaggaggaaagtaccccgcagtccgacgttaccgaagacggcgaaagcccggaagacccttccggaacagaggggcagctttctgaagaggaaaaaccagaccaacaacctctgagcggagaagaagagctggaacctgaggcctccgacggctctggtagctgggaagacgcagccttgcttaccgaggccaatcttccagcaccagctccagcatccgcctcagcccccgtgctggagactctaggttcatctgagcccgccggcggagccctcaggcagcggccaacatgttcttccagctag

SEQ ID NO: 225303 - DNA, 1197 bp, Artificial Sequence
  derived and/or modified sequence
atggtgaatgacccccctgtgcctgccctgctgtgggcccaggaggtgggccaggtgctggccggccgggcccggcggctgctgctgcagtttggagtgctcttctgcaccatcctgctgctgctgtgggtgtctgtgttcctgtatggcagcttctactacagctacatgcccaccgtgagccacctgagccctgtgcacttctactacagaacagactgtgacagcagcaccaccagcctgtgcagcttccctgtggccaacgtgtccctgaccaagggcggccgggacagagtgctgatgtatggccagccctacagagtgaccctggagctggagctgcctgagagccctgtgaaccaggacctgggcatgttcctggtgaccatcagctgctacacccggggcggccgcatcatcagcaccagcagccgctctgtgatgctgcactacagaagtgacctgctgcagatgctggacaccctggtgttcagcagcctgctgctgtttggatttgctgagcagaagcagctgctggaggtggagctgtatgctgactacagagaaaattcctatgtgcccaccaccggggccatcatcgagatccacagcaagaggatccagctgtatggagcctacctgcgcatccacgcccacttcaccggcctgcgctacctgctgtacaacttccccatgacctgtgccttcatcggcgtggccagcaacttcaccttcctgtctgtgattgtgctcttctcctacatgcagtgggtgtggggcggcatctggcccaggcaccgcttcagcctgcaggtgaacatcaggaagagggacaacagcaggaaggaggtgcagaggcgcatcagcgcccaccagcccggccctgagggccaggaggagagcaccccccagagtgatgtgacagaagatggagagagccctgaggaccccagcggcacagagggccagctgtctgaggaggagaagccagaccagcagcccctgagcggggaggaggagctggagcctgaggccagtgatggcagcggctcctgggaggatgctgccctgctgacagaggccaacctgcctgccccagccccagccagcgccagcgcccctgtgctggagaccctgggcagcagcgagcctgctggaggagccctgcggcagaggcccacctgcagcagcagctag

SEQ ID NO: 225304 - DNA, 1197 bp, Artificial Sequence
  derived and/or modified sequence
atggtgaacgacccccccgtgcccgccctgctgtgggcccaggaggtcggacaggtattagcaggaagggccagacggttgctgctccagtttggagtcctgttttgcacaatcctactcctattatgggtgagtgtgtttctctatggcagcttctactactcctatatgccaacggtctctcatcttagcccagtgcacttctattaccgcactgattgtgacagctctaccaccagtttgtgttcattccccgtggctaacgtctccctcactaagggcgggagggacagagtgctgatgtatggacagccttatagagtgaccctggaattggagctgcccgagtcaccagtcaaccaggacctgggcatgttccttgttaccattagttgctatacgcgtggaggaaggatcatctccacttcctcaaggtccgtgatgctgcactataggtccgacctgctacagatgttggataccctggtgttttccagtctactgctgtttggattcgcagaacagaaacagctcctcgaagttgaactgtacgcagactatcgagagaattcctatgtgcccacgaccggcgcaatcattgagatccattcaaagagaatccagttatacggggcttatctgcggatccacgcccacttcacaggtttgcgatatcttttgtacaattttcctatgacgtgtgctttcatcggtgtagccagcaattttacgttccttagcgttattgttcttttttcttatatgcaatgggtttggggcggcatctggccaaggcaccggttcagcttacaggtcaatattaggaaaagagataactccaggaaagaggtacagagaaggatcagcgcgcatcagcctggccctgaggggcaggaagaatccactccacagagcgacgtgaccgaagacggagagtcgcccgaagatcccagtggaactgagggacagctcagcgaggaggaaaaacccgatcaacagcctctgtccggcgaggaggagctggagcctgaggccagcgacgggtctggctcatgggaagatgccgctctgctgacagaagcgaacttaccagcccccgcaccggcaagcgcaagcgcacctgtcctcgaaacactgggctcctccgagccggccgggggggctctgcgtcagagacctacttgctcttcctcatag

SEQ ID NO: 225305 - DNA, 1197 bp, Artificial Sequence
  derived and/or modified sequence
atggtgaacgacccccccgtgcccgccctgctgtgggcccaggaggtgggtcaggtgctggctggtcgggcacgccgactgctcctccaattcggcgttcttttttgcaccatactgctgttgctgtgggtcagtgtgttcctctatggtagcttttactactcctatatgcccaccgtgtcacatctgtcacccgtccatttttattataggactgattgtgacagtagcaccactagcttgtgtagtttcccggttgcaaatgtgagcctcactaaaggcgggcgagaccgggttttaatgtacggccagccctaccgcgtcacacttgagctcgaattacctgagtcacccgtgaaccaggatctgggtatgtttctggtaactataagttgttacacaagaggagggagaatcattagtacgtcgtcccgtagtgtcatgctccattatcgatctgatcttctacaaatgctcgacaccttagtattcagtagcctgctgctctttgggttcgccgaacaaaagcagctgctcgaggtggagttgtatgccgattatcgggaaaactcatacgtccccacaacaggcgccatcatcgagatccattccaaaagaattcagctctacggcgcttatcttaggattcacgctcacttcacggggctgagatacctcctgtataatttcccaatgacctgcgcttttattggcgttgcgagtaacttcacgtttctcagcgtgatcgtactcttttcttacatgcagtgggtgtggggcgggatttggccaagacatagattttcccttcaagtcaatattcggaagcgcgacaactcacgcaaagaggtgcagcggcggattagcgcccaccagccgggcccagaaggacaggaggaatccaccccgcagtcggatgttaccgaagatggagagagccctgaggatccatctgggaccgagggacaactctctgaagaagagaagccagatcaacaacccctgagcggagaggaggaactggagcctgaggctagtgacggatcaggatcctgggaggatgctgcactcctcacagaggctaacctacctgcacctgccccggcaagtgcttccgctccggtgctggaaacactgggttccagtgagccggccggcggtgctctgcgacaaagaccaacatgctcatctagttag

SEQ ID NO: 225306 - DNA, 1197 bp, Artificial Sequence
  derived and/or modified sequence
atggtgaacgacccccccgtgcccgccctgctgtgggcccaggaggtagggcaggtactggcaggtcgggctaggagactgctgttacagtttggcgttctgttctgcaccatcctccttcttctgtgggtctctgtgttcctttatggaagtttctattactcatacatgcccaccgtttcccatctgagccccgtgcacttttactacaggaccgactgcgattcttccacaacgtccctgtgcagtttccccgtggccaatgtgtcactaacgaagggtggaagggacagagtcttgatgtatggacagccataccgcgttaccctggaactggagctgccagagagccccgtgaaccaagatctcggtatgttcctcgtgacgatcagctgttacactagggggggacgaatcatctccaccagtagcagaagcgtgatgcttcactaccgctcagacctgctccagatgttggatacgttggtgttttcctcactgttattgttcggcttcgccgagcagaaacagctgctcgaagttgagctctatgcagactacagggaaaactcatacgtgccaacaacaggcgcgatcatcgagatccattccaagagaatacaactttacggtgcgtatctgagaattcacgcacactttactggtttgaggtatctgttatacaatttccctatgacatgcgcattcattggggtggcctcaaattttacattcctgagtgttatcgtgctgttctcatacatgcagtgggtatgggggggaatctggccccgacatagattttctctgcaggttaacatcagaaagagggacaattcacggaaggaggtgcaacggaggatctccgctcatcagccaggcccagagggacaggaggagtccacgcctcagagcgatgttacggaagacggggagtcacctgaggatccgagcggcactgagggccagttgagcgaagaggaaaagcccgatcagcagccgctgtcgggagaggaggagctcgagccagaagcctcagacggctcaggatcttgggaagatgccgcgctgttgaccgaggccaatctgccggcaccagcccctgcgtcggcctctgccccggtcctcgagactctcggcagcagcgagcccgccgggggcgccctgcgccagagacctacgtgctcctctagctag

SEQ ID NO: 225307 - DNA, 1197 bp, Artificial Sequence
  derived and/or modified sequence
atggtgaatgaccctccagtccccgctctcttatgggcccaggaggtgggacaagttctggcaggtcgggctcgcaggctgctactgcagttcggtgtgctcttttgtacaatactgttgcttctctgggtatcagtgttcttgtacggctccttttattattcctacatgcctactgtcagtcacctgtccccagtgcacttctactacagaacagactgcgactcctccaccacgagcctttgctcttttcctgtggcaaacgtatcactcacaaagggtggacgtgatcgagtgctgatgtatggccaaccatatcgagtgacacttgagctggagctgccagaatccccagtaaatcaagatttagggatgtttctagttaccatctcatgttacacaaggggcggaaggatcattagtacctctagccggagcgtcatgctgcattaccgttcagacctgcttcaaatgctggacacgcttgtcttttctagtctgctcctgttcgggttcgctgagcagaaacaacttctagaggttgaactctacgcggactatcgtgaaaactcatatgtgcctacaactggcgcaattatcgagatccatagtaagcggatccagctgtatggtgcctatctgcgtatccatgcgcattttacagggctccgctacctgctgtacaattttcccatgacgtgcgccttcattggagtggcttccaatttcacattcctttccgtcatcgtgctatttagctatatgcagtgggtttggggagggatttggcctcggcataggttctccttgcaggtgaacatcagaaaacgcgataacagtaggaaggaagttcagaggcgcataagtgcacaccaacctggcccagagggtcaggaggagtctaccccccagtctgacgtcacagaggatggagagagccccgaagatccttccggtacggagggacaattatctgaggaagaaaagcctgaccagcagcccttgtccggggaggaagaactcgagcctgaggcaagtgatggatccggcagctgggaagacgcagcactcctgactgaggctaatctaccagccccagccccagcttctgcctcagccccagtgttggagactctgggctcctccgagccagccggtggcgcactgcgacagcggcctacatgtagcagcagctag

SEQ ID NO: 225308 - DNA, 1197 bp, Artificial Sequence
  derived and/or modified sequence
atggttaacgacccacctgtgcccgctctgctctgggcacaggaggtcgggcaggttcttgccggaagagctagacgccttctgctccagtttggagtgttgttctgtactatacttctgctcctgtgggtgtccgtgtttttgtacggatctttctattatagctacatgcccaccgtcagccatctgtcccccgtacatttttactatcgcacagattgtgactcctctacaacatctctctgctcatttccagtagctaatgtgtcacttacaaaaggcggacgagatcgagtgctgatgtatggtcagccctatagagtgaccctggaattagagctgccagagagtcctgttaaccaggacctcgggatgttcctggtaacaattagttgctacacacgcggaggacgaataattagcacatcctccaggtcagttatgcttcactaccggtcagatctccttcaaatgctggacaccctagtgtttagttccctactactgttcggttttgccgagcagaagcaactgctagaggtcgagctgtatgcagattaccgagagaattcatacgttcctaccaccggcgcaattattgagattcattcaaagcgtatacagctctacggagcctatctaagaattcatgcacattttacggggctcagatacttactgtacaacttccccatgacttgtgcctttatcggagtggcctccaatttcaccttcctatccgttatcgtgctgtttagctatatgcagtgggtgtggggagggatctggcctcggcatagattttcactgcaggtcaatattagaaagagggataattcccggaaagaggttcagaggagaatcagtgcacaccagccaggccctgaaggtcaggaggaatcaacccctcaatcagacgtgaccgaggacggggagtctcctgaagacccttcaggtacagaaggacagctctctgaagaggaaaagccagatcagcagccgctgtcgggcgaagaggaactcgagcctgaagcttctgacggctctgggtcctgggaggacgccgcactgctaactgaggccaaccttccagcacctgcacccgcttctgcaagcgctccagttcttgaaactctgggctcttctgagcccgctggcggagcccttcgacagcgtccaacttgctcatctagctag

SEQ ID NO: 225309 - DNA, 1197 bp, Artificial Sequence
  derived and/or modified sequence
atggtgaatgaccccccagtgccagcacttctgtgggcgcaggaggtggggcaggtgctggctggcagagccaggcggctgctgttacagttcggcgtccttttctgcacaatactgttactcttgtgggtgagcgtgtttctgtatgggagcttttactacagctacatgccgaccgtctcacatctttctccagtacacttttactaccgtacagactgcgactcctctaccacgagcctttgctcattccctgtggccaacgtgagtctgaccaaggggggaagagacagagtgctgatgtatggccagccttaccgcgtcacattggagctggagctgccggagagtcccgtgaaccaggatttagggatgttcttggtgaccatctcttgctatacaagaggtggcagaatcatctccaccagttcccggtcggtaatgctccattacagaagcgatttgctacaaatgcttgacacactcgtcttttctagcctgcttctatttggctttgccgagcagaagcagttgttagaagttgaactctacgcagattacagagaaaattcgtatgtccctacaactggggctattattgagatccactctaaacggattcagttgtacggagcatacctgcgcatccacgcccatttcaccggcctacggtatctcctctataacttccccatgacctgcgcattcattggcgtagcatccaatttcactttcctgtcagtcatcgtactgttctcatacatgcaatgggtttggggcggaatctggccacggcatcgcttcagccttcaggttaacattcgaaaacgcgacaattcaagaaaagaagtgcagcgacgcattagtgcccaccaacctgggcctgaaggccaggaagaatctaccccccagtcagatgtgactgaagacggggagtcacccgaggatcccagtggaaccgaaggccaactgtcagaagaagaaaagccggaccagcagcccctgtctggtgaggaagagcttgaacccgaggcctctgacggttcgggctcatgggaggacgcagccctgctgactgaggctaacctaccagctcctgccccagccagcgcctcagcgcctgtcttggagactctgggttcttctgaacccgctggaggggcactgcgccagagacccacttgttcaagctcctag

SEQ ID NO: 225310 - DNA, 1197 bp, Artificial Sequence
  derived and/or modified sequence
atggtgaacgacccccccgtgcccgccctgctgtgggcccaggaggtgggccaggtgctggccggcagagccagaagactgctgctgcagttcggcgtgctgttctgcaccatcctgctgctgctgtgggtgagcgtgttcctgtacggcagcttctactacagctacatgcccaccgtgagccacctgagccccgtgcacttctactacagaaccgactgcgacagcagcaccaccagcctgtgcagcttccccgtggccaacgtgagcctgaccaagggcggcagagacagagtgctgatgtacggccagccctacagagtgaccctggagctggagctgcccgagagccccgtgaaccaggacctgggcatgttcctggtgaccatcagctgctacaccagaggcggcagaatcatcagcaccagcagcagaagcgtgatgctgcactacagaagcgacctgctgcagatgctggacaccctggtgttcagcagcctgctgctgttcggcttcgccgagcagaagcagctgctggaggtggagctgtacgccgactacagagagaacagctacgtgcccaccaccggcgccatcatcgagatccacagcaagagaatccagctgtacggcgcctacctgagaatccacgcccacttcaccggcctgagatacctgctgtacaacttccccatgacctgcgccttcatcggcgtggccagcaacttcaccttcctgagcgtgatcgtgctgttcagctacatgcagtgggtgtggggcggcatctggcccagacacagattcagcctgcaggtgaacatcagaaagagagacaacagcagaaaggaggtgcagagaagaatcagcgcccaccagcccggccccgagggccaggaggagagcaccccccagagcgacgtgaccgaggacggcgagagccccgaggaccccagcggcaccgagggccagctgagcgaggaggagaagcccgaccagcagcccctgagcggcgaggaggagctggagcccgaggccagcgacggcagcggcagctgggaggacgccgccctgctgaccgaggccaacctgcccgcccccgcccccgccagcgccagcgcccccgtgctggagaccctgggcagcagcgagcccgccggcggcgccctgagacagagacccacctgcagcagcagctag

SEQ ID NO: 225311 - protein, 259 aa, Artificial Sequence
  derived and/or modified sequence
MASPQGGQIAIAMRLRNQLQSVYKMDPLRNEEEVRVKIKDLNEHIVCCLCAGYFVDATTITECLHTFCKSCIVKYLQTSKYCPMCNIKIHETQPLLNLKLDRVMQDIVYKLVPGLQDSEEKRIREFYQSRGLDRVTQPTGEEPALSNLGLPFSSFDHSKAHYYRYDEQLNLCLERLSSGKDKNKSVLQNKYVRCSVRAEVRHLRRVLCHRLMLNPQHVQLLFDNEVLPDHMTMKQIWLSRWFGKPSPLLLQYSVKEKRR

SEQ ID NO: 225312 - DNA, 1792 bp, Artificial Sequence
  derived and/or modified sequence
tgaggtctccattggaatctctcccttctcgtatctccagttgcatttgatgttaatacctcatagcaaatttatccctttttaagtacccagagccggcggtgtagagctctcgagcgagcaccccgcgtagtccccaagtgcgggactgggcctatgctactacaggcgctcgctgcctaagcctgtctgtgtgtggcagtgtcctagtcgtcctcccctcctccttcggcatctgctctgcattagtctgtcccaggcctccgcaggcgccgatgattaaatcatcatcattaaccagggcctgccccccccatccccggcagcaggggggagaatgggggaataagatcactaccaagtccctgggggtctctcactccccatcccccggcaccctctccgagactctgcaaagcccaagaaactccctccgtgaagccgggagaagacccgccatctggacgaagctccgctacgcggacgccgacagggcggcattacgaggagaggacccaggaggggcttcttcagcagggtcgtcgtcacagaagaccgacgaccctgagcgggtagcgggcacagactgccaggcctttgggggtaggagggggcagtctttcgcaggctccgaaagttagtcttgaggtcgcgtagggcctattatgatgatttctacaggaggttgaagagataagacccttccctgtgctcccccccccccactccttaattacggattgagcaggggaggggccggtggggctcaggtgagcacacagggagaaagggacgtgggcggggccttacagagggtgagcgaatccgaaaagacctagaacctcgttgctgggagacaagtcccgccctgcaggcggcaccggaagtggccggctgggatcagcctttaagatggcgtctcctcaggggggccagattgcgatcgcgatgaggcttcggaaccagctccagtcagtgtacaagatggacccgctacggaacgaggaggaggttcgagtgaagatcaaagacttgaatgaacacattgtttgctgcctatgcgccggctacttcgtggatgccaccaccatcacagagtgtcttcatactttctgcaagagttgtattgtgaagtacctccaaactagcaagtactgccccatgtgcaacattaagatccacgagacacagccactgctcaacctcaaactggaccgggtcatgcaggacatcgtgtataagctggtgcctggcttgcaagacagtgaagagaaacggattcgggaattctaccagtcccgaggtttggaccgggtcacccagcccactggggaagagccagcactgagcaacctcggcctccccttcagcagctttgaccactctaaagcccactactatcgctatgatgagcagttgaacctgtgcctggagcggctgagttctggcaaagacaagaataaaagcgtcctgcagaacaagtatgtccgatgttctgttagagctgaggtacgccatctccggagggtcctgtgtcaccgcttgatgctaaaccctcagcatgtgcagctcctttttgacaatgaagttctccctgatcacatgacaatgaagcagatatggctctcccgctggttcggcaagccatcccctttgcttttacaatacagtgtgaaagagaagaggaggtaggggccaagcccccaccccatcccactccccttccctccccagatatttatgtgaaatgaactgcagctttattttttgaaataaaaacttttaaaaagca

SEQ ID NO: 225313 - DNA, 780 bp, Artificial Sequence
  derived and/or modified sequence
atggccagcccccagggcggccagatcgccatcgccatgagactgagaaaccagctgcagagcgtgtacaagatggaccccctgagaaacgaggaggaggtgagagtgaagatcaaggacctgaacgagcacatcgtgtgctgcctgtgcgccggctacttcgtggacgccaccaccatcaccgagtgcctgcacaccttctgcaagagctgcatcgtgaagtacctgcagaccagcaagtactgccccatgtgcaacatcaagatccacgagacccagcccctgctgaacctgaagctggacagagtgatgcaggacatcgtgtacaagctggtgcccggcctgcaggacagcgaggagaagagaatcagagagttctaccagagcagaggcctggacagagtgacccagcccaccggcgaggagcccgccctgagcaacctgggcctgcccttcagcagcttcgaccacagcaaggcccactactacagatacgacgagcagctgaacctgtgcctggagagactgagcagcggcaaggacaagaacaagagcgtgctgcagaacaagtacgtgagatgcagcgtgagagccgaggtgagacacctgagaagagtgctgtgccacagactgatgctgaacccccagcacgtgcagctgctgttcgacaacgaggtgctgcccgaccacatgaccatgaagcagatctggctgagcagatggttcggcaagcccagccccctgctgctgcagtacagcgtgaaggagaagagaagatag

SEQ ID NO: 225314 - DNA, 780 bp, Artificial Sequence
  derived and/or modified sequence
atggccagcccacagggtggccaaattgctattgctatgagattaaggaaccagctccaatcggtgtataaaatggatccactgagaaatgaagaggaggtgcgtgttaaaataaaggatctgaatgaacatattgtgtgctgtctctgtgccggctattttgtggacgctactacgattaccgaatgcctgcataccttttgcaaatcttgcatcgtcaaatatctgcaaacatccaaatattgccccatgtgtaacataaaaattcatgagactcagcccctgctgaatttgaagctcgatagggttatgcaggacattgtctataagttggtcccaggactccaggactccgaggaaaaacggattagggagttctaccaaagcagaggcctggatcgagtgacacagcccacaggtgaggagcccgcactcagtaacctgggacttccattctccagctttgatcattcaaaagctcactactaccgatacgatgaacaactcaacctttgtctggaacgtctgtctagcggcaaggacaaaaacaaaagcgtgttgcagaacaaatatgtcagatgcagcgtccgcgccgaagtcagacacttgcggcgggtcctgtgtcaccgcttaatgcttaacccacaacacgtgcagctcctgttcgacaacgaagtcctacccgatcacatgacaatgaaacaaatctggcttagtaggtggtttggtaagccatcccctctccttctgcagtattcagtgaaggagaagcggcgctag

SEQ ID NO: 225315 - DNA, 780 bp, Artificial Sequence
  derived and/or modified sequence
atggccagcccccagggcggccagatcgccatcgccatgaggctgaggaaccagctgcagagcgtgtacaagatggaccccctgagaaatgaggaggaggtgcgggtgaagatcaaggacctgaatgagcacatcgtgtgctgcctgtgtgccggctactttgtggatgccaccaccatcacagagtgcctgcacaccttctgcaagagctgcatcgtgaagtacctgcagaccagcaagtactgccccatgtgcaacatcaagatccacgagacccagcccctgctgaacctgaagctggacagagtgatgcaggacatcgtgtacaagctggtgcccggcctgcaggacagcgaggagaagaggatccgggagttctaccagagccggggcctggacagagtgacccagcccactggagaggagcccgccctgagcaacctgggcctgcccttcagcagctttgaccacagcaaggcccactactaccgctatgatgagcagctgaacctgtgcctggagcggctgagcagcggcaaggacaagaacaagtctgtgctgcagaacaagtatgtgcgctgcagcgtgcgggcagaggtgcgccacctgcggcgggtgctgtgccaccggctgatgctgaacccccagcacgtgcagctgctgtttgacaatgaggtgctgcctgaccacatgaccatgaagcagatctggctgagccgctggtttgggaagcccagccccctgctgctgcagtacagcgtgaaggagaagagaagatag

SEQ ID NO: 225316 - DNA, 780 bp, Artificial Sequence
  derived and/or modified sequence
atggccagcccccagggcggccagatcgccatcgccatgcggctgaggaaccagcttcagtcagtttataagatggatcccctgcggaatgaagaggaggtgcgtgtgaaaattaaggatctgaacgagcacatcgtctgctgcctctgcgccggctactttgtggacgccacgacgatcactgagtgtctgcacactttttgcaagtcatgcatcgtgaagtatctgcagaccagcaagtattgccctatgtgcaatataaagatccatgaaacgcagccactgctgaatttaaaactcgaccgagtaatgcaggatattgtgtacaaactcgtacccggcctgcaggacagcgaagagaaaaggatccgggagttttaccaaagccgaggcctggatagagttacgcagcctacaggggaggaaccagccttatccaatcttggcctccctttcagtagttttgaccattctaaggcacactactatcgctacgacgaacagctgaatctgtgcctggaaagactgagctctggtaaggataagaataagagcgtgctccagaataaatatgtgagatgctcggtacgggccgaggtgcgtcacctgaggagggttctctgtcataggctaatgctaaatcctcagcacgtgcaactcctcttcgacaacgaggtcttgccggaccacatgaccatgaagcagatttggctatccaggtggtttgggaaacccagcccactgctgctgcaatactccgtgaaagagaaacggcggtag

SEQ ID NO: 225317 - DNA, 780 bp, Artificial Sequence
  derived and/or modified sequence
atggcctccccacaagggggacagatcgccatcgcgatgaggctccgcaatcaattgcagagtgtttacaagatggatcccctgaggaatgaagaagaagtgagagtcaagatcaaagatctgaatgaacacattgtatgctgcctgtgtgcaggctacttcgtcgacgccaccacgataaccgagtgccttcacaccttctgtaagagctgtatagtaaagtatttgcagactagcaagtactgcccaatgtgtaacatcaaaatacacgagacccaacctctcctcaatctgaaactggacagggtgatgcaggacatcgtttacaaacttgttcccggactacaggactctgaggagaagaggatcagggaattttaccagagccggggacttgatagggtcacacagcccacgggcgaggagccagccctttcgaacctgggcctccctttctcctctttcgaccactctaaagcccactattatagatacgacgaacagctgaacctgtgtctggagcgcctgtcaagcgggaaggataaaaacaaatcagtgcttcagaataaatatgtgaggtgcagtgttcgagccgaggtgcgccatctgaggagagtcctgtgccacagactaatgctgaacccgcagcacgtccaactgttgttcgacaatgaggttcttcccgatcacatgaccatgaagcagatttggctcagtaggtggttcggaaagcccagcccactattgctgcagtacagtgttaaggagaaacgacgctag

SEQ ID NO: 225318 - protein, 395 aa, Artificial Sequence
  derived and/or modified sequence
MAAPDGRVVSRPQRLGQGSGQGPKGSGACLHPLDSLEQKETQEQTSGQLVMLRKAQEFFQTCDAEGKGFIARKDMQRLHKELPLSLEELEDVFDALDADGNGYLTPQEFTTGFSHFFFSQNNPSQEDAGEQVAQRHEEKVYLSRGDEDLGDMGEDEEAQFRMLMDRLGAQKVLEDESDVKQLWLQLKKEEPHLLSNFEDFLTRIISQLQEAHEEKNELECALKRKIAAYDEEIQHLYEEMEQQIKSEKEQFLLKDTERFQARSQELEQKLLCKEQELEQLTQKQKRLEGQCTALHHDKHETKAENTKLKLTNQELARELERTSWELQDAQQQLESLQQEACKLHQEKEMEVYRVTESLQREKAGLLKQLDFLRCVGGHWPVLRAPPRSLGSEGPV

SEQ ID NO: 225319 - DNA, 1188 bp, Artificial Sequence
  derived and/or modified sequence
atggccgctcccgacggccgagtggtatcacgtcctcagagattgggacaggggagcggccagggcccaaaagggtccggtgcttgcttgcaccctttagacagcttggagcagaaagagacacaggagcagaccagcggacagttagttatgctacgcaaggcccaggaattctttcaaacatgcgatgccgaggggaaagggttcatcgctcgcaaagatatgcaaaggcttcataaagagttaccattatcactcgaggagttggaggatgtcttcgacgcccttgatgccgacgggaatggttacctaactccacaagagttcacgactggcttctcacacttcttttttagccagaacaatccttcccaggaggacgctggcgaacaggttgcccaaaggcacgaggaaaaggtgtacctgtctaggggagacgaagatcttggcgatatgggagaggatgaagaggcccagtttcgcatgctgatggatcgattgggagcgcagaaggtcttggaggatgagtccgacgtcaaacagctgtggttgcaattgaaaaaagaggaaccccacttgttatctaactttgaagacttcctgactcggatcatctcccagctgcaggaggcacacgaggaaaagaacgagctggagtgcgctttgaaacgtaagatcgccgcttatgatgaagagatacagcatctctacgaggagatggagcagcagattaagtctgagaaagaacagttccttctcaaggatactgagaggtttcaggcccgcagccaagagctcgaacagaagctcctgtgcaaggagcaggaactggaacaactgactcagaaacagaagcgtcttgaggggcagtgcacagccctgcatcatgacaagcatgagaccaaggcagaaaatacaaaactcaagttgaccaaccaagagctggctcgagagctggaaagaaccagttgggaacttcaagacgcgcagcagcagctggagagcctgcagcaggaggcgtgcaagctgcaccaggaaaaggagatggaagtgtacagagtaaccgagagcctccaaagggagaaggccgggctgcttaaacaattggacttccttcgctgtgtgggcgggcactggcctgtgcttcgcgcccctccaaggtctctcggatccgagggccctgtttag

SEQ ID NO: 225320 - DNA, 1188 bp, Artificial Sequence
  derived and/or modified sequence
atggccgccccagatggccgggtggtgtcccggccccagaggctgggccagggcagcggccagggccccaagggcagcggggcctgcctgcaccccctggacagcctggagcagaaggagacccaggagcagaccagcggccagctggtgatgctgaggaaggcccaggagttcttccagacctgtgatgctgagggcaagggcttcatcgccaggaaggacatgcagaggctgcacaaggagctgcccctgagcctggaggagctggaggatgtgtttgatgccctggatgctgatggaaatggctacctgaccccccaggagttcaccaccggcttcagccacttcttcttcagccagaacaaccccagccaggaggatgctggggagcaggtggcccagagacatgaggagaaggtgtacctgagcagaggagatgaggacctgggggacatgggagaagatgaggaggcccagttcaggatgctgatggaccggctgggcgcccagaaggtgctggaggatgaaagtgatgtgaagcagctgtggctgcagctgaagaaggaggagccccacctgctgagcaactttgaggacttcctgacccgcatcatcagccagctgcaggaggcccacgaggagaagaatgagctggagtgtgccctgaagaggaagattgctgcctatgatgaggagatccagcacctgtatgaggagatggagcagcagatcaagtctgagaaggagcagttcctgctgaaggacacagagcgcttccaggcccggagccaggagctggagcagaagctgctgtgcaaggagcaggagctggagcagctgacccagaagcagaagaggctggagggccagtgcacagccctgcaccacgacaagcatgagaccaaggccgagaacaccaagctgaagctgaccaaccaggagctggcccgggagctggagaggacctcctgggagctgcaggatgcccagcagcagctggagagcctgcagcaggaggcctgcaagctgcaccaggagaaggagatggaggtgtacagagtgacagagagcctgcagcgggagaaggccggcctgctgaagcagctggacttcctgcgctgtgtgggcggccactggcctgtgctgcgggccccacccaggagcctgggcagcgagggccctgtgtag

SEQ ID NO: 225321 - DNA, 1188 bp, Artificial Sequence
  derived and/or modified sequence
atggccgcccccgacggccgggtggtgagccggccccagcggctggggcagggaagtggtcagggccctaaaggatcaggcgcttgcctccatcctctggattccctggaacagaaggagacacaggagcagacatcaggacagttggtcatgctgaggaaggcacaagagtttttccaaacctgtgacgcagaaggcaaaggctttatagcccgaaaagatatgcagcgacttcataaagagctcccattgagccttgaggagttggaggatgtgttcgacgctctggacgctgatgggaacggatatttgaccccccaagagttcacaacgggtttttcacacttcttcttcagtcagaataatcccagccaggaggacgccggtgagcaggtggcccaacggcacgaagagaaggtctacctgagccggggagacgaggatttaggagacatgggagaagacgaggaggcgcaattcaggatgttgatggaccgacttggtgcccaaaaggttctagaggatgagtctgacgttaaacaactgtggttgcagctgaaaaaggaggaacctcatctattgtccaacttcgaggattttctcactaggataatttcgcagctgcaggaagcccacgaggagaaaaacgaactggagtgcgcattgaagcggaaaattgctgcgtatgacgaagagatccaacatctgtatgaggaaatggaacagcagatcaagagtgagaaggaacagttcctcctcaaagatactgagagatttcaggcccgctcccaggaattggagcaaaagctgctgtgtaaggagcaggagttggaacaattgacccaaaaacagaagcgtctggaggggcagtgcacggctctacatcacgataaacatgagactaaagctgaaaacacaaaactgaaattgactaatcaggaattagcccgcgaactggaaaggacatcatgggaactacaagatgctcagcaacagctggagtccctccagcaagaggcctgcaaattgcatcaggagaaggagatggaggtgtacagagtcacagagtccctgcaaagggagaaagctggtctcttaaagcaactggacttcctaagatgtgtgggcgggcactggcccgtactcagagcaccacctagatctcttggatccgaaggccccgtctag

SEQ ID NO: 225322 - DNA, 1188 bp, Artificial Sequence
  derived and/or modified sequence
atggctgcgcctgatggaagggtggtgagccgaccgcagagactggggcaaggaagtggccaaggcccaaaaggcagtggcgcatgcctacatcctctggatagcttggaacagaaggaaactcaggagcaaacatctgggcaactggtaatgctgagaaaggcccaagagtttttccagacatgcgacgccgagggcaaagggttcattgcaaggaaagacatgcagaggttgcataaagaactccctttaagcctggaagagctcgaggacgtgtttgatgcactcgacgctgatggaaatggatatctgactcctcaagaattcactactgggttctctcatttctttttcagccagaacaatcccagtcaagaagacgccggagagcaggtggcccagaggcacgaggagaaggtctatctgtccagaggggacgaggacctcggcgacatgggcgaggacgaggaggcacagttccgtatgttgatggaccgactgggagctcagaaggtgcttgaagatgagtcagatgtgaagcaattgtggctgcagttaaagaaagaggaaccccatttgctgtctaactttgaggacttcttaacccgcatcatctcacaactccaggaggctcatgaagaaaaaaatgaactggaatgcgcactcaagaggaagattgcagcatacgacgaagaaattcagcacctatatgaggagatggagcagcagattaaatctgagaaggaacaattcttactgaaagatacagagcgattccaagcacgcagccaagagttggagcagaagcttttgtgtaaagaacaggaactcgagcagctcactcagaaacagaagcgcctggagggtcagtgcaccgcactgcatcacgacaaacacgaaacaaaagctgagaacaccaaactgaaattgacaaatcaggaactggcccgagagctagaaagaacctcatgggagctgcaggacgcccaacagcagcttgaaagtctccaacaagaggcctgtaaattgcatcaggagaaggaaatggaagtgtatagggtaactgaatctctacagagagaaaaagccggtctgctgaagcagctggactttctgaggtgtgtgggcggtcattggcctgttctcagagctccccctcgcagcctggggtctgaaggtcccgtgtag

SEQ ID NO: 225323 - DNA, 1188 bp, Artificial Sequence
  derived and/or modified sequence
atggccgcccccgacggcagagtggtgagcagaccccagagactgggccagggcagcggccagggccccaagggcagcggcgcctgcctgcaccccctggacagcctggagcagaaggagacccaggagcagaccagcggccagctggtgatgctgagaaaggcccaggagttcttccagacctgcgacgccgagggcaagggcttcatcgccagaaaggacatgcagagactgcacaaggagctgcccctgagcctggaggagctggaggacgtgttcgacgccctggacgccgacggcaacggctacctgaccccccaggagttcaccaccggcttcagccacttcttcttcagccagaacaaccccagccaggaggacgccggcgagcaggtggcccagagacacgaggagaaggtgtacctgagcagaggcgacgaggacctgggcgacatgggcgaggacgaggaggcccagttcagaatgctgatggacagactgggcgcccagaaggtgctggaggacgagagcgacgtgaagcagctgtggctgcagctgaagaaggaggagccccacctgctgagcaacttcgaggacttcctgaccagaatcatcagccagctgcaggaggcccacgaggagaagaacgagctggagtgcgccctgaagagaaagatcgccgcctacgacgaggagatccagcacctgtacgaggagatggagcagcagatcaagagcgagaaggagcagttcctgctgaaggacaccgagagattccaggccagaagccaggagctggagcagaagctgctgtgcaaggagcaggagctggagcagctgacccagaagcagaagagactggagggccagtgcaccgccctgcaccacgacaagcacgagaccaaggccgagaacaccaagctgaagctgaccaaccaggagctggccagagagctggagagaaccagctgggagctgcaggacgcccagcagcagctggagagcctgcagcaggaggcctgcaagctgcaccaggagaaggagatggaggtgtacagagtgaccgagagcctgcagagagagaaggccggcctgctgaagcagctggacttcctgagatgcgtgggcggccactggcccgtgctgagagccccccccagaagcctgggcagcgagggccccgtgtag

SEQ ID NO: 225324 - DNA, 2186 bp, Artificial Sequence
  derived and/or modified sequence
gtcgggcggagcaggcggctgcttgacagctgagagccgagcgggcggcgcgggcaggtccacgggaagcctacacgcccaaggtcatgccctgaccacagctgcccttcaggaggctggcacggagccacctggggccattgggctgtttgtcaagggtggggcagcagcaacttgccactcttcctccatgagcccagccagagcctccactgggcacttagcacaagaaaaaccctgcaggagccggatccagagcgctgggattcagcaggagtgccaggagaattcaacacaggtgtgctgcctcctctcctgccaggtgtgtggctgcacaggagtcttgctgatggtggaattcaagtcaccagtggccaaagtaccctccaggtgtgaagagttgcaggtcctccgaggagccgggagctgcaaggttctgaaaaagacttcaagaaactgactaatcgcgatggctgcccctgacgggagggtagtctccagaccccagagacttggtcaggggtctggccaggggccaaaggggagtggagcctgcctgcatcccctggacagcctggagcagaaggagactcaggagcaaacgtcgggccagctagtcatgctgaggaaggcacaggagttctttcagacctgtgatgctgaaggcaagggcttcatcgccaggaaggatatgcagaggctgcataaggagctaccgctcagcctggaggaactggaggatgtgtttgatgccctggatgctgatggcaatggctatctgaccccacaggagttcactactggatttagtcacttcttcttcagccagaataacccaagtcaggaagatgcaggtgaacaggtggcccagcgccatgaagagaaggtgtatctgtccagaggggatgaggatctgggcgacatgggcgaagatgaggaagcccagttccggatgctgatggacagacttggagcccaaaaggtgttggaagatgaaagtgatgtcaagcagctctggttgcagctgaagaaggaggaacctcatttactgtccaactttgaagacttcctgaccagaatcatctcccagctccaagaagcccatgaggagaagaatgaactggagtgtgccctaaaaaggaaaattgctgcttatgatgaagaaatccagcatctctatgaggagatggaacaacaaatcaaaagtgagaaggagcagtttctcctgaaggacacagagaggtttcaagcccgcagtcaagagctggagcagaaactgttatgtaaggagcaggagctggagcagctcacccagaagcagaaaaggctggaaggtcagtgcacagccctgcatcatgacaagcatgagaccaaggctgagaataccaagctgaaactcactaaccaggagctggcccgggagctggagcggacttcctgggagctccaggatgctcagcagcagttggaaagcctccagcaagaggcctgcaaactccaccaagagaaggagatggaagtgtaccgtgtgacggagagtctacagcgtgagaaggccgggctcctcaagcagctggatttcctaaggtgcgtcggtgggcactggcctgtgctgagagcacctcccagaagcctggggtcggaaggaccagtctgagggtcatccttgcctacgtgctggaaaaacgtgcctgctgagagagtgccctcaattcccttggtccccagtgcagtgtttggaccaccaagtagccactctattatgtttggtccgtttacacatgcgcccacatccagtttattcctcctggtggggaggctctgccccactcctctgagtccctcacaggactgtgcttggtacttgatctcatgcgagcagagctgggtttaatgagcatttaatctatgctagaaatattatctcgttcattgtcagcaaaactgttaggtgagtagggcagttcattcacaggaatttactgatgggaagttgatattagaggaaagaagtaatttaccacaggcgacacagctactctctgatggggccagaatggaaatccgtaactcggctgtgttctgttcatgtttgttgaatgagtaaatgaatcacaaacagagcaccaagaaaaagctttctcagccttcaaagacccccagcaataaactcaaagtttactggt

SEQ ID NO: 225325 - protein, 206 aa, Artificial Sequence
  derived and/or modified sequence
MARGGWRRLRRLLSAGQLLFQGRALLVTNTLGCGALMAAGDGVRQSWEIRARPGQVFDPRRSASMFAVGCSMGPFLHYWYLSLDRLFPASGLRGFPNVLKKVLVDQLVASPLLGVWYFLGLGCLEGQTVGESCQELREKFWEFYKADWCVWPAAQFVNFLFVPPQFRVTYINGLTLGWDTYLSYLKYRSPVPLTPPGCVALDTRAD

SEQ ID NO: 225326 - DNA, 621 bp, Artificial Sequence
  derived and/or modified sequence
atggccagaggcggctggagaagactgagaagactgctgagcgccggccagctgctgttccagggcagagccctgctggtgaccaacaccctgggctgcggcgccctgatggccgccggcgacggcgtgagacagagctgggagatcagagccagacccggccaggtgttcgaccccagaagaagcgccagcatgttcgccgtgggctgcagcatgggccccttcctgcactactggtacctgagcctggacagactgttccccgccagcggcctgagaggcttccccaacgtgctgaagaaggtgctggtggaccagctggtggccagccccctgctgggcgtgtggtacttcctgggcctgggctgcctggagggccagaccgtgggcgagagctgccaggagctgagagagaagttctgggagttctacaaggccgactggtgcgtgtggcccgccgcccagttcgtgaacttcctgttcgtgcccccccagttcagagtgacctacatcaacggcctgaccctgggctgggacacctacctgagctacctgaagtacagaagccccgtgcccctgaccccccccggctgcgtggccctggacaccagagccgactag

SEQ ID NO: 225327 - DNA, 621 bp, Artificial Sequence
  derived and/or modified sequence
atggctcggggaggctggaggaggctgaggaggttgttgagcgctgggcagctattgtttcagggccgggctttattggtaaccaacacgctcggatgcggagccctcatggcagcgggcgatggggtgaggcaaagttgggagatcagagcccgcccaggccaggtctttgatcctaggcggtccgccagtatgttcgccgtcggttgtagtatgggtccctttctccactattggtacctgagcttggacagactttttcccgccagcggcctgcgaggctttcccaatgttctgaagaaagtgctggtggatcaacttgtcgcatctccccttctgggggtctggtattttctcgggctgggttgcttggaagggcaaactgtcggcgagtcctgccaagaacttagagaaaaattttgggagttctataaagcagactggtgcgtatggcctgctgcacaatttgtaaactttttgttcgtccctccccagtttagggtgacctacatcaatgggctgacacttggctgggacacatatttatcttatctcaaataccgaagcccagtcccgcttacccctcccgggtgtgttgctttggacacccgcgctgactag

SEQ ID NO: 225328 - DNA, 621 bp, Artificial Sequence
  derived and/or modified sequence
atggcccggggcggctggaggcggctgcggcggctgctgtctgctggccagctgctcttccagggccgggccctgctggtgaccaacaccctgggctgtggggccctgatggctgctggagatggagtgcggcagagctgggagatccgggcccggcccggccaggtgtttgacccccggcgcagcgcctccatgtttgctgtgggctgcagcatgggccccttcctgcactactggtacctgagcctggacaggctcttccctgccagcggcctgcggggcttccccaacgtgctgaagaaggtgctggtggaccagctggtggccagccccctgctgggcgtgtggtacttcctgggcctgggctgcctggagggccagacagtgggggagagctgccaggagctgcgggagaagttctgggagttctacaaggctgactggtgtgtgtggccagctgcccagtttgtgaacttcctgtttgtgcccccccagttccgggtgacctacatcaatggcctgaccctgggctgggacacctacctgagctacctgaagtaccgcagccctgtgcccctgaccccacctggctgtgtggccctggacaccagggctgactag

SEQ ID NO: 225329 - DNA, 1358 bp, Artificial Sequence
  derived and/or modified sequence
cggcgcggcgaaagcagagcggcgcgccggttccttggttcctgagggcgatggcgcggggtggctggcgccggctacgccgcctgttatccgcggggcagcttctattccagggccgcgcgctgctcgtcactaacacgctgggctgcggcgcgctcatggcggccggtgatggcgtgcgccagtcctgggagatccgcgcccggcccggccaggttttcgacccacggcgctccgcgagcatgtttgcggtgggctgcagcatgggtcccttcctgcactactggtacttgtcgctggaccgcctattccctgcgtctggcctccgaggcttcccaaatgtcctcaagaaggtcctcgtggatcagctggtagcctctccattgctgggcgtctggtacttcttgggccttggctgcctggagggtcagacagtgggtgagagctgccaggagctgcgggagaagttctgggaattctacaaggcagactggtgcgtgtggcctgctgcgcagttcgtgaacttcctcttcgtgcccccccaatttcgagtcacctacatcaacggcctgacgctgggctgggacacgtacctgtcctacttgaagtaccggagcccagttcctctgacacccccaggctgtgtggccctggacacccgagcagactgaactgtctgcttcctggaccagatgcaagactgtctcctggcggaccaccccctctgacagaaggggaatgggctcctgcagcaagctcgggtcttgagccacgtcccagcaccacttcagctccggagcattgggctgagccgccctttccaagctcacttctgggactgagtttcctcaaccggaacacacccatgaagatggatgatcatcccctagcccttctcagcaggaacctcatgcgacctgtgaccaagatgtcccatcctcagcacagggcccactctgccaaccagtctcaagcaccagcccctcaacactgccatccacctggctctgggccaagccaccaatccagagctccctcaggtcctgggactaaggcggggacatgactgatcccctcagagcaggctcaggcctggagtcggcccccaaaagtttcacatagggccaggcagcctctgtgtttctttccctggtcctgaactgtggaaatgccattaaactctctctataatgtaactgaaactgctggctgggcgcagtggctcccacctgtaatctcagcccttcccgaggctgaggtggaaggattgctcgaggccaggtgttcgagaccagcctgggcaacatagcaagaccctgtctctatttatattgaaaaataaaaataacaaaagaaaa

SEQ ID NO: 225330 - DNA, 621 bp, Artificial Sequence
  derived and/or modified sequence
atggcccggggcggctggcggcggctgcggcggctgctgagcgccggccagctgctgtttcagggccgagccctgctggtcactaacaccctgggatgtggcgcccttatggctgcgggtgacggtgtgagacagtcctgggaaatccgggccaggcctggacaggtcttcgatccgcgaagatcagccagtatgttcgcggtcggttgttcaatgggcccttttcttcattactggtatctgtccctcgatcgacttttccctgcatcaggacttcggggtttcccaaatgtccttaaaaaggttctggttgaccaactggtcgcgagtccactgcttggtgtatggtacttcctgggcttaggctgcctcgaaggccagactgtcggtgagagctgtcaggagttacgtgaaaagttttgggagttttataaagccgactggtgcgtgtggccagctgctcagttcgtcaacttcctgttcgtgccacctcaattcagagttacatatattaatggccttacgctgggctgggacacgtatcttagttacctgaaatatcgttcccctgtgcccctaaccccccccggttgcgtggctctcgacacaagagctgattag

SEQ ID NO: 225331 - DNA, 621 bp, Artificial Sequence
  derived and/or modified sequence
atggctaggggcggatggagacggctccgcagattactgtcagctgggcagttattatttcaaggccgagcgctactagttaccaataccctcgggtgtggggcattgatggcagcaggcgacggcgttcggcagtcgtgggaaattagggctagaccaggtcaggtcttcgaccctagaaggtccgcttcgatgttcgccgtggggtgctcaatgggaccttttctgcattattggtacctcagtctggacagactgttcccggcttccgggttgcgcggttttcccaatgtcctcaaaaaggtactggtcgaccaactggtggcttcacctttgctgggggtctggtactttctgggactgggttgcctggaaggtcagacagtgggcgaaagttgtcaggagctccgagagaaattttgggagttctataaagccgactggtgtgtctggcccgctgcgcagttcgtgaacttcctattcgtgccaccgcagtttcgagttacttacatcaacgggctgacactcgggtgggacacatacttgagttacttgaaataccgtagccccgttcctctcaccccaccaggctgcgttgcactggatacgagagccgattag

SEQ ID NO: 225332 - protein, 696 aa, Artificial Sequence
  derived and/or modified sequence
MSYGSITFGDVAIDFSHQEWEYLSLVQKTLYQEVMMENYDNLVSLAGHSVSKPDLITLLEQGKEPWMIVREETRGECTDLDSRCEIISDGKMQLYRKHSCVTLHQRIHNGQKPYECKQCQKSFSHLTELMVHQTIHTSEEPDQCEKFRKAFSHLTDLRKHQKINAREKPYECEECGKVFSYPANLAQHGKVHVEKPYECKECGEAFRTSRQLTVHHRFHYGEKPYECKECGKAFSVYGRLSRHQSIHTGEKPFECNKCGKSFRLKAGLKVHQSIHTGEKPHECKECGKAFRQFSHLVGHKRIHTGEKPYECKECGKGFTCRYQLTMHQRIYSGEKHYECKENGEAFSSGHQLTAPHTFESVEKPYKCEECGKAFSVHGRLTRHQGIHSGKKPYECNKCGKSFRLNSSLKIHQNIHTGEKPYKCKECGKAFSQRAHLAHHNRIHTGYKPFECKECGKSFRCASYLVIHERIHTGEKPYVCQECGKGFSYSHKLTIHRRVHTGEKPYECKECGKAFSVSGQLTQHLSIHSGKKPFECNKCGKSFRFISVLKAHQNIHSAEKPYECKECGKAFRHATSLIYHDRTHAGEKSYECKECGETFSHASHLIIHERIHTSDKPYECKRCGKAFHCASYLVRHESVHADGNPYMCEECGKAFNSSHELSIHHRVHTGEKPFKCNKCRRSFRLRSILEVHQRIHI

SEQ ID NO: 225333 - DNA, 2091 bp, Artificial Sequence
  derived and/or modified sequence
atgagctacggcagcatcaccttcggcgacgtggccatcgacttcagccaccaggagtgggagtacctgagcctggtgcagaagaccctgtaccaggaggtgatgatggagaactacgacaacctggtgagcctggccggccacagcgtgagcaagcccgacctgatcaccctgctggagcagggcaaggagccctggatgatcgtgagagaggagaccagaggcgagtgcaccgacctggacagcagatgcgagatcatcagcgacggcaagatgcagctgtacagaaagcacagctgcgtgaccctgcaccagagaatccacaacggccagaagccctacgagtgcaagcagtgccagaagagcttcagccacctgaccgagctgatggtgcaccagaccatccacaccagcgaggagcccgaccagtgcgagaagttcagaaaggccttcagccacctgaccgacctgagaaagcaccagaagatcaacgccagagagaagccctacgagtgcgaggagtgcggcaaggtgttcagctaccccgccaacctggcccagcacggcaaggtgcacgtggagaagccctacgagtgcaaggagtgcggcgaggccttcagaaccagcagacagctgaccgtgcaccacagattccactacggcgagaagccctacgagtgcaaggagtgcggcaaggccttcagcgtgtacggcagactgagcagacaccagagcatccacaccggcgagaagcccttcgagtgcaacaagtgcggcaagagcttcagactgaaggccggcctgaaggtgcaccagagcatccacaccggcgagaagccccacgagtgcaaggagtgcggcaaggccttcagacagttcagccacctggtgggccacaagagaatccacaccggcgagaagccctacgagtgcaaggagtgcggcaagggcttcacctgcagataccagctgaccatgcaccagagaatctacagcggcgagaagcactacgagtgcaaggagaacggcgaggccttcagcagcggccaccagctgaccgccccccacaccttcgagagcgtggagaagccctacaagtgcgaggagtgcggcaaggccttcagcgtgcacggcagactgaccagacaccagggcatccacagcggcaagaagccctacgagtgcaacaagtgcggcaagagcttcagactgaacagcagcctgaagatccaccagaacatccacaccggcgagaagccctacaagtgcaaggagtgcggcaaggccttcagccagagagcccacctggcccaccacaacagaatccacaccggctacaagcccttcgagtgcaaggagtgcggcaagagcttcagatgcgccagctacctggtgatccacgagagaatccacaccggcgagaagccctacgtgtgccaggagtgcggcaagggcttcagctacagccacaagctgaccatccacagaagagtgcacaccggcgagaagccctacgagtgcaaggagtgcggcaaggccttcagcgtgagcggccagctgacccagcacctgagcatccacagcggcaagaagcccttcgagtgcaacaagtgcggcaagagcttcagattcatcagcgtgctgaaggcccaccagaacatccacagcgccgagaagccctacgagtgcaaggagtgcggcaaggccttcagacacgccaccagcctgatctaccacgacagaacccacgccggcgagaagagctacgagtgcaaggagtgcggcgagaccttcagccacgccagccacctgatcatccacgagagaatccacaccagcgacaagccctacgagtgcaagagatgcggcaaggccttccactgcgccagctacctggtgagacacgagagcgtgcacgccgacggcaacccctacatgtgcgaggagtgcggcaaggccttcaacagcagccacgagctgagcatccaccacagagtgcacaccggcgagaagcccttcaagtgcaacaagtgcagaagaagcttcagactgagaagcatcctggaggtgcaccagagaatccacatctag

SEQ ID NO: 225334 - DNA, 2091 bp, Artificial Sequence
  derived and/or modified sequence
atgagttacggaagcattaccttcggagacgtggccatcgatttttcacaccaggaatgggagtatctgtctctggtgcaaaagaccctctaccaagaggtcatgatggaaaactatgataacctggtctctctcgccggtcacagcgtgtctaaacctgatctcattaccttgctggagcaggggaaggaaccgtggatgattgtgcgagaggagacgcggggggaatgtaccgatttggactcccgctgcgagatcatctccgacggcaaaatgcagctgtaccgtaagcactcctgcgtgaccctccaccaacgaattcataacgggcagaaaccctacgagtgcaaacaatgccaaaaatctttctcacatctcacagaactgatggtgcatcagactatccacacaagcgaggagccggatcagtgtgagaagttccggaaggcgttttctcatctcaccgatctccgcaagcatcaaaagattaatgcacgcgaaaagccctacgaatgtgaagaatgtggtaaggtcttcagctaccccgcgaacctggctcaacatgggaaggtgcacgtagaaaagccatatgaatgtaaggagtgcggtgaggctttcagaaccagtagacagctgacggtgcatcatcggtttcactatggggaaaagccttacgagtgcaaagaatgcggtaaggcttttagcgtgtacggcaggctgtcgcggcatcagtcaatccacactggagaaaaaccattcgagtgtaataaatgcggcaagtctttcagactcaaagccgggctgaaagtccaccagagtatccatactggagaaaagccccacgaatgcaaagagtgcggcaaggcctttagacagttcagccacctggtgggacataagagaatacatactggggagaagccgtacgagtgcaaggagtgtgggaagggctttacttgcagatatcagctgacaatgcaccagaggatttatagtggagaaaagcattacgagtgcaaagagaacggggaggcattctcaagtggccaccagctaacagcaccacatacctttgaatccgtggagaagccctacaagtgtgaagaatgtggcaaagctttcagtgtgcacggccgcctgacacggcaccaggggattcatagtgggaaaaagccttacgagtgcaataagtgtgggaagtccttccggcttaactctagcctcaagatacaccagaatatccatactggagagaaaccctacaagtgtaaagagtgtggtaaggccttctcccagagggcacacctggcccaccacaaccggatccataccggctacaagccttttgagtgcaaagagtgtggtaaatcttttagatgcgccagctatctcgtgatccacgaacgaattcacacaggagagaaaccttacgtctgccaggagtgtggtaaggggttcagttactcacacaagctaacgatacatcgcagagtgcacactggcgaaaaaccatatgagtgtaaggagtgcgggaaagcattctccgtaagcggccagctcacacaacacctgagtatccattccggcaagaaacccttcgagtgcaacaaatgtggcaaatcttttaggttcatttctgtgctgaaagcacaccaaaatattcactccgctgagaagccctatgaatgcaaggaatgtggcaaggccttcaggcatgccaccagcctcatctatcacgacaggactcatgcgggcgagaagagctacgagtgcaaggagtgcggggaaactttcagccacgccagtcatctgataatccatgagcgtatacacacatccgacaaaccttacgaatgtaagcggtgtggcaaagcgttccactgcgccagctatctggtaagacatgaatcagtgcatgctgatggcaacccatatatgtgcgaggaatgcggcaaagccttcaacagctcccacgagttgtccatccatcaccgagtccatacaggtgaaaaaccattcaaatgcaacaagtgccggagatccttcagactcagaagcattctggaagttcatcagagaattcatatatag

SEQ ID NO: 225335 - DNA, 2091 bp, Artificial Sequence
  derived and/or modified sequence
atgtcctatggcagcatcacctttggagatgtggccatcgacttcagccaccaggagtgggagtacctgagcctggtgcagaagaccctgtaccaggaggtgatgatggagaactatgacaacctggtgtccctggccggccacagcgtgtccaagccagacctgatcaccctgctggagcagggcaaggagccctggatgattgtgcgggaggagaccagaggagagtgcacagacctggacagccgctgtgagatcatcagtgatggcaagatgcagctgtacaggaagcacagctgtgtgaccctgcaccagaggatccacaacggccagaagccctatgagtgcaagcagtgccagaagagcttcagccacctgacagagctgatggtgcaccagaccatccacaccagcgaggagccagaccagtgtgagaagttcaggaaggccttcagccacctgacagacctgaggaagcaccagaagatcaatgcccgggagaagccctatgaatgtgaggagtgtgggaaggtgttctcctacccagccaacctggcccagcacggcaaggtgcacgtggagaagccctatgagtgcaaggaatgtggggaggccttccgcaccagccggcagctgactgtgcaccaccgcttccactacggggagaagccctatgagtgcaaggaatgtgggaaggccttctctgtgtatggccgcctgagccgccaccagagcatccacactggagagaagccctttgagtgcaacaagtgtgggaagagcttccggctgaaggccggcctgaaggtgcaccagagcatccacactggagagaagccccatgagtgcaaggaatgtgggaaggccttccggcagttcagccacctggtgggccacaagaggatccacactggagagaagccctatgagtgcaaggaatgtgggaagggcttcacctgccgctaccagctgaccatgcaccagaggatctacagcggggagaagcactatgagtgcaaggaaaatggagaggccttcagcagcggccaccagctgacagccccccacacctttgagagcgtggagaagccctacaagtgtgaagaatgtgggaaggccttctctgtgcacggccgcctgaccaggcaccagggcatccacagcggcaagaagccctatgagtgcaacaagtgtgggaagagcttccggctgaacagcagcctgaagatccaccagaacatccacactggagagaagccctacaagtgcaaggaatgtgggaaggccttcagccagagggcccacctggcccaccacaaccgcatccacacaggctacaagccctttgagtgcaaggaatgtgggaagagcttccgctgtgccagctacctggtgattcatgagcgcatccacactggagagaagccctacgtgtgccaggagtgtgggaagggcttctcctacagccacaagctgaccatccaccggcgggtgcacactggagagaagccctatgagtgcaaggaatgtgggaaggccttctctgtgtctggccagctgacccagcacctgagcatccacagcggcaagaagccctttgagtgcaacaagtgtgggaagagcttccgcttcatctctgtgctgaaggcccaccagaacatccacagcgctgagaagccctatgagtgcaaggaatgtgggaaggccttcagacatgccaccagcctcatctaccatgacaggacccacgccggggagaagagctatgagtgcaaggaatgtggggagaccttcagccacgccagccacctgatcatccacgagcgcatccacaccagtgacaagccctatgagtgcaagagatgtgggaaggccttccactgtgccagctacctggtgagacatgaatctgtgcatgctgatggcaacccctacatgtgtgaagaatgtgggaaggccttcaacagcagccatgagctgagcatccaccaccgggtgcacactggagagaagcccttcaagtgcaacaagtgcagaagaagcttccggctgcggagcatcctggaggtgcaccagaggatccacatctag

SEQ ID NO: 225336 - DNA, 2091 bp, Artificial Sequence
  derived and/or modified sequence
atgagctacggcagcatcaccttcggcgacgtggccatcgacttctctcaccaagagtgggagtacctgagccttgtgcaaaaaacactgtatcaagaagtcatgatggaaaactatgacaacctggttagcttagccggacactctgtttctaagcctgacttgatcaccctgcttgaacagggaaaagaaccctggatgattgttagagaagagacacgcggggaatgtacggatctggattcaaggtgcgagattatcagcgatgggaaaatgcagctgtatcggaagcacagttgcgtgactctgcatcagcgaattcacaacggccagaagccttacgagtgcaagcagtgtcaaaaatctttttcgcacctgactgaactgatggtccatcagaccatccatacctcagaggaacctgatcagtgtgagaagttccggaaagcgttctcacatctgacagatctccgcaagcatcaaaaaatcaatgcgagagagaagccgtacgaatgtgaggaatgcgggaaggttttctcttacccggccaacctggcacaacacggcaaggttcacgtggaaaagccatacgaatgcaaagagtgtggcgaagcattccgcactagcagacagttgactgtccaccatagattccattacggcgaaaagccttatgaatgcaaggaatgcggcaaagcattcagcgtgtacggaaggctgagccgccaccagtccattcatactggcgagaaaccattcgaatgtaacaagtgtggaaagagctttagactaaaggccggcctgaaggttcaccagagcatacacactggagaaaagccccacgagtgtaaagagtgtggcaaagctttccgccagttcagtcacctggtgggccataaacgcatccacaccggcgaaaaaccatacgaatgcaaagagtgtggtaaagggttcacttgtcgctaccagctgaccatgcaccagaggatctatagcggcgaaaaacactacgaatgtaaggagaatggtgaggcttttagctcaggacaccagttgacggcaccacatacctttgaaagtgttgagaaaccctacaagtgcgaggaatgcggaaaagcgttctctgttcatggcagactcactagacaccagggtatacatagtggcaaaaagccttacgagtgcaacaaatgtggtaagtcatttcggctgaactcctcgctcaaaattcaccaaaatatccacacgggggaaaaaccttacaaatgcaaggaatgcggaaaagccttctcccaaagggcccacctggcacatcataaccggatccatacaggttacaagccctttgaatgcaaagaatgcggtaagtctttccgttgtgcaagctaccttgtgatccacgagcggattcataccggtgaaaagccatacgtatgccaagaatgtggcaaggggttttcctattcgcacaaactcaccattcaccggcgggtgcacacgggtgagaagccatatgaatgtaaagaatgcggcaaagccttcagtgtctccgggcagctgactcagcacttatccatacactccggcaagaaaccttttgaatgtaacaagtgtggaaagtctttccggttcatctccgtgctcaaagcacatcagaacatccatagcgctgagaagccctacgagtgcaaggagtgtggcaaggctttcaggcacgcaacatcgctgatttaccacgacaggacacatgctggggagaaatcttacgagtgcaaagagtgtggcgaaaccttttctcacgcttcacacctgatcatccacgaaaggatccacactagcgacaaaccttatgaatgcaaacgatgtgggaaagcatttcattgcgcctcctatctcgttcgccatgaaagtgtgcacgctgatggaaatccatatatgtgcgaggaatgtggcaaagcctttaacagttcccacgagctatccattcatcacagggtgcacacaggtgagaaaccattcaaatgtaataaatgccggcggagcttccgcctacggtccatccttgaagtgcatcaaagaatccacatatag

SEQ ID NO: 225337 - DNA, 2091 bp, Artificial Sequence
  derived and/or modified sequence
atgtcttacggatcgatcaccttcggggacgtggctatagatttctctcaccaggaatgggaatacctaagcctggtgcagaaaacattgtatcaggaagtgatgatggaaaactatgacaaccttgtatcattggctggacacagtgtgagcaagccagacctgatcactttactcgagcaaggtaaagaaccctggatgattgtccgagaggaaacacgaggggaatgtaccgacctggactctagatgcgaaatcatcagcgatggcaaaatgcagctctaccgtaagcattcttgcgttacgctgcaccaaagaatacataacggacagaagccatacgaatgcaagcaatgtcagaagagcttctctcacctgaccgaactgatggtccaccagaccattcacaccagtgaggaacccgatcaatgtgagaaattcaggaaggccttctctcacctgactgacctcaggaaacaccagaagattaacgctcgggaaaagccttatgaatgtgaagaatgcggaaaggttttttcctacccggcaaatcttgctcaacatgggaaggtccatgttgaaaaaccctacgaatgcaaggaatgcggcgaggcatttagaacgtcgagacagctaacagtgcaccacagattccactatggagaaaagccttatgagtgcaaggaatgcgggaaggctttctccgtgtacggtagactctccagacaccagagcatccatacaggcgagaaaccatttgagtgtaacaagtgtggcaagtcctttaggcttaaggctggcctgaaagtccatcagtccatccataccggcgagaaaccccatgaatgcaaggaatgcggaaaagcctttaggcagttctctcatttagtcggccataagagaatacacaccggggaaaagccctacgaatgcaaggagtgtggaaaggggttcacctgtagataccaattaaccatgcaccagcggatatactctggtgagaagcattatgagtgcaaggaaaacggagaggccttctccagtggccaccagttaacggcacctcacacattcgagtcagtggaaaagccctataaatgtgaggagtgcggcaaggccttcagtgtacatgggagattaactaggcaccagggaattcacagtggaaagaaaccttacgagtgcaataagtgcggcaaatcttttaggctgaactctagcttaaagatccatcagaacatccacaccggcgaaaaaccgtacaaatgtaaggagtgcggcaaggccttctcacagcgcgctcatttggcccatcacaatcgaatccataccggatataaaccctttgagtgtaaagagtgcgggaagtcttttcgatgcgcttcttatctggtgatccacgagcgcattcacacaggagagaagccctatgtttgccaagagtgcggcaaaggattctcctactcacacaaacttacaattcaccgtcgcgtgcacacaggggaaaagccctatgaatgtaaggagtgcggtaaggcattctcggtgtcaggacaacttacgcagcatctgagcattcacagtgggaaaaagcctttcgaatgcaacaaatgcggtaaatcattccgctttatctcggttctgaaggcacatcaaaatatccactcggccgaaaagccttacgaatgcaaagaatgcggcaaagcctttcggcatgcaacttccctgatctatcatgatcggacacacgcaggagaaaaatcctatgagtgtaaggaatgtggcgaaactttttcacacgcatctcacctgataatccacgagagaatccatactagtgacaaaccctacgaatgtaagagatgtggaaaagcttttcactgcgcaagctacttggttaggcatgagtcagtccacgcagatggcaacccatacatgtgtgaagagtgtggaaaggccttcaattcttctcacgaattgagcatccaccaccgggttcacactggcgagaagccttttaagtgtaacaagtgcaggcggagcttccgtctccgctcaatcctggaagtgcaccagaggatacatatatag

SEQ ID NO: 225338 - DNA, 4364 bp, Artificial Sequence
  derived and/or modified sequence
gatctgcgcatgcgcactcgaggcaaggcggccactcccagaagtctccggggctcgagcggtgggtgggaggcgcggtccaagtggtcgctgccgtatttctcgtaggtttttaggattctggactccatttctcaccggtacctgcggtcctgactgttctggcttggactacatattacaaaggcaacggagaaaacttggacccctggctccggttccgggaccttttggttccacctgaagaaggcggcgcaggtcactgcgggagcctctgcagccccagcccgccgcccgcgtggtaccctgcgtggcggtgagagtggggctgcaggaggcgctcagagcgcggaggcccccaggcgggccgggcgagtctcccgcctcctcaggccctagggtgctggagctgcggaggaggggcccgtctctaggagacaggcggggagcgtgagagaccgcgcagcggcgacaggaccggcttgcctgtgtgacgtgggtgcagttgcgggactgtgaggggtcttggttcttttgactttgctcttctggtagagaaacgccaaggactgatcaactcttgccagtctcaaaccatgtcctatggatcaataacattcggggatgtggccatagacttctctcatcaggagtgggaatatctcagcctggttcagaagaccttgtaccaggaggtgatgatggagaactatgacaacttagtctcattggcaggacattccgtatctaagccagatttaatcaccttattggagcaaggaaaagagccatggatgattgtgagggaagaaacaagaggagagtgtacagatttggattcaagatgtgaaataatcagcgatgggaaaatgcagctttataggaaacactcatgtgttactctccatcagagaattcataatggacagaaaccatatgagtgtaagcaatgtcagaagtcctttagtcatcttacagaactcatggtacatcaaacaattcatactagtgaggaacctgatcaatgtgaaaagtttaggaaggcatttagccatcttacagaccttagaaagcatcagaaaattaatgctcgtgagaaaccttatgaatgtgaagaatgtgggaaggtcttcagttatcctgcaaaccttgctcaacatgggaaagttcatgttgagaaaccctatgaatgtaaagagtgtggggaagcttttaggactagccgtcaacttactgtacatcatagatttcattatggtgagaaaccctacgaatgtaaggaatgtggcaaggcctttagtgtgtatggacgacttagtcgacatcagagtattcacactggtgagaagccctttgaatgtaacaaatgtgggaagtcctttaggctcaaagcaggccttaaagtacatcagagtattcatactggagagaagccacatgaatgtaaggaatgtggaaaggcctttcgtcagttttcccaccttgtgggtcataaaagaattcatactggagaaaaaccctatgaatgcaaggaatgcgggaagggctttacatgtaggtatcaacttaccatgcatcagagaatttattcaggggagaaacactatgaatgtaaagaaaatggggaggcttttagtagtggccatcaacttactgcacctcatacatttgaaagtgttgagaaaccttataagtgtgaggaatgtgggaaagcctttagtgtgcatggacgacttactcgacatcagggtattcatagtggtaagaaaccctatgaatgtaacaaatgtgggaagtcctttaggctcaattcatcccttaaaatacatcaaaatattcataccggtgagaaaccctacaaatgtaaggaatgtgggaaggccttcagtcagcgtgcacaccttgcccatcataacagaattcatactggttacaaaccctttgaatgtaaagaatgtgggaagtcctttcgttgtgcctcatatcttgttatacatgagagaattcatacaggagagaaaccctatgtatgtcaagagtgtgggaagggttttagttatagccataaactcactatacatcgcagagttcatactggtgagaaaccttatgaatgtaaggaatgtgggaaggcctttagtgtatctggacaacttactcagcatctgagtattcacagtggtaagaaaccctttgaatgcaacaaatgcgggaagtcttttaggttcatttctgtacttaaagcccatcagaatattcatagcgctgagaaaccctacgaatgtaaggaatgtggcaaggcctttcgtcatgccacaagcctcatatatcatgaccgaactcatgctggtgaaaagtcctatgaatgtaaagaatgtggggaaacttttagtcatgcttcacatcttattattcatgagagaattcataccagtgataaaccctatgaatgtaaaagatgtgggaaggcatttcactgtgcctcatatcttgttagacatgaaagcgttcatgctgatggaaatccctatatgtgtgaagagtgtgggaaagcttttaatagtagccatgaacttagtatacatcatagagttcatactggtgagaaaccctttaaatgtaacaaatgcagaaggtcctttaggcttagatccatccttgaagtacatcagagaattcatatttgatagagaaattgtggcatatacaggtagtaaagaaagcacattgtgtcaatggatttatcccactgaacaatttgaatgaagacaatgtggaatggctttgagatacagttcagtttttattaggcatcaatttgtattggtgtgaacttttcaaaatgtaaatcatatatgcagtttctttggtatgacctgtgttaactcagattcagagaatttataatgtatttttttaataacataagaaaacttttctgatattcctctagttttggattgccaaaatattcacagtagaggaaaactgagaaaacgtaggaaaccattctttatacttgcatgtaaacatcttccagcaacaatcatttattgttaaacctggaaaaagccattacacaggaaacctctgttgatataagcgatgatgggaaaggctatttagccactctgcatatttaatgctcatgatcaacatctgcttcctatagctgggatgatatgggggaagatatttatcccttctggggatcatatataaatgatgatagtagtacctacagtatagtgctgttagaattacatgagttagatgtggaggtcagagtggaagcaggtgtgagagggtcccgcagaagaaaacatggctgccaaagtgtttgagtccatcggcaagtttggcctggccttagctgttgcaggaggcatggtgaactctgccttatgtaatgtggatgctgggcacagagctgccatctttgaccaattccgtggagtacagaacattgtggtaggggaagggactcactttctcatcccatgtgtacaaaaaccaattatctttgactgctgttctcaaccacgtagtgcgccagtcatcactggtagcaaagatttacagaatgtcaacatcacactgtgcatcctcttccggcccatcactagccagcttcctcgcatcttcaccagcattggagaggactacgatgagtgtgtgctgccgttcattaccacggagatcctcaagtcactggtggctcgctttgatgctggagaactaatcacccagagggagctggtctccagccaggtgagcaacaaccttatggagtgagcagccacctttgggctcattctggacgacgtgtctttgacacatctgaccttcttgaaggagttaacagacaggtggccccccaggaagcagagagcgccagatttgtggtggaaaaggcggccatcatctctgctgagggtgactccaaggcagctgagctgatcgccaactcactggccactgcaggggacggccagagcgagctgtgcaagctggaagctgcagaagacattgcataccagctctcatgctctcggaacatcacctgcctgccggcagggcagtccgtgctcctccagctgccctagtgaggccccagcctacctgcacctccgtgaggcaactgggccacagccccgatgattcgtaacaccacctttcgccctcaccccagaaatcactgaaatttcatgattggcttaaagtgaaggaagtaaaggtaaaatcacttcagatctctaaaaaacaaagaattacatgagttagtacatgaaaaaattatgggaaactacatgaaatatactgttacgttcaataaacattagcttctgtatataataatatca

SEQ ID NO: 225339 - protein, 462 aa, Artificial Sequence
  derived and/or modified sequence
MGPDRVTARELCENDDLATSLVLDPYLGFRTHKMNVSPVPPLRRQQHLRSALETFLRQRDLEAAYRALTLGGWTARYFQSRGPRQEAALKTHVYRYLRAFLPESGFTILPCTRYSMETNGAKIVSTRAWKKNEKLELLVGCIAELREADEGLLRAGENDFSIMYSTRKRSAQLWLGPAAFINHDCKPNCKFVPADGNAACVKVLRDIEPGDEVTCFYGEGFFGEKNEHCECHTCERKGEGAFRTRPREPALPPRPLDKYQLRETKRRLQQGLDSGSRQGLLGPRACVHPSPLRRDPFCAACQPLRLPACSARPDTSPLWLQWLPQPQPRVRPRKRRRPRPRRAPVLSTHHAARVSLHRWGGCGPHCRLRGEALVALGQPPHARWAPQQDWHWARRYGLPYVVRVDLRRLAPAPPATPAPAGTPGPILIPKQALAFAPFSPPKRLRLVVSHGSIDLDVGGEEL

SEQ ID NO: 225340 - DNA, 1389 bp, Artificial Sequence
  derived and/or modified sequence
atgggccccgacagagtgaccgccagagagctgtgcgagaacgacgacctggccaccagcctggtgctggacccctacctgggcttcagaacccacaagatgaacgtgagccccgtgccccccctgagaagacagcagcacctgagaagcgccctggagaccttcctgagacagagagacctggaggccgcctacagagccctgaccctgggcggctggaccgccagatacttccagagcagaggccccagacaggaggccgccctgaagacccacgtgtacagatacctgagagccttcctgcccgagagcggcttcaccatcctgccctgcaccagatacagcatggagaccaacggcgccaagatcgtgagcaccagagcctggaagaagaacgagaagctggagctgctggtgggctgcatcgccgagctgagagaggccgacgagggcctgctgagagccggcgagaacgacttcagcatcatgtacagcaccagaaagagaagcgcccagctgtggctgggccccgccgccttcatcaaccacgactgcaagcccaactgcaagttcgtgcccgccgacggcaacgccgcctgcgtgaaggtgctgagagacatcgagcccggcgacgaggtgacctgcttctacggcgagggcttcttcggcgagaagaacgagcactgcgagtgccacacctgcgagagaaagggcgagggcgccttcagaaccagacccagagagcccgccctgccccccagacccctggacaagtaccagctgagagagaccaagagaagactgcagcagggcctggacagcggcagcagacagggcctgctgggccccagagcctgcgtgcaccccagccccctgagaagagaccccttctgcgccgcctgccagcccctgagactgcccgcctgcagcgccagacccgacaccagccccctgtggctgcagtggctgccccagccccagcccagagtgagacccagaaagagaagaagacccagacccagaagagcccccgtgctgagcacccaccacgccgccagagtgagcctgcacagatggggcggctgcggcccccactgcagactgagaggcgaggccctggtggccctgggccagcccccccacgccagatgggccccccagcaggactggcactgggccagaagatacggcctgccctacgtggtgagagtggacctgagaagactggcccccgccccccccgccacccccgcccccgccggcacccccggccccatcctgatccccaagcaggccctggccttcgcccccttcagcccccccaagagactgagactggtggtgagccacggcagcatcgacctggacgtgggcggcgaggagctgtag

SEQ ID NO: 225341 - DNA, 1389 bp, Artificial Sequence
  derived and/or modified sequence
atgggacctgatagggttacagcccgagagctgtgtgagaacgatgacctggctacctcattagtgctcgatccttatctagggttccgcacccataaaatgaatgtgtcacccgttcctcccctgaggcgacagcagcacctgcggtctgcacttgagacgttcctcaggcagcgggatctggaggctgcatatagagctctgaccctcggcggctggacagcccgttactttcagagcagaggccctagacaggaagcagcccttaaaacccacgtatacagatatctacgcgccttcctccctgaatcaggctttaccattctcccgtgcactcggtattctatggaaactaatggtgcaaagattgttagtaccagagcgtggaagaagaacgaaaaactcgagcttttggttggttgtatcgcagagctgagggaagctgatgaaggcctcttgcgagccggtgaaaacgatttttcgatcatgtactctaccagaaagagatcggcgcagctgtggttgggacccgcggcatttataaatcacgactgtaagccaaattgtaagtttgttccagcagacggcaatgcagcctgtgtcaaagtgctccgggacatagagcctggagacgaggttacctgcttctacggcgaaggtttctttggggaaaagaacgagcattgcgaatgccacacatgtgaacgcaaaggggagggagcattccgcacccgtccccgagaaccagccctgcctccacggccactggacaagtaccagctgcgggagaccaagagacggctgcagcagggacttgacagcggttccagacaggggctgttaggcccccgagcgtgtgttcacccctctccacttcgcagagatccattctgcgctgcttgccagcctttgcgcctgcccgcatgctccgcacgcccagatacctcccctctgtggctgcagtggttgcctcagccacagccaagggtgcgtccaagaaagcggcgccgacctcgcccacgtcgggcccctgtgctcagcacccaccacgccgcccgcgtttcattgcaccggtgggggggttgtgggccacattgccggctgcggggggaggcgctggtggccctgggccagccacctcacgctcggtgggctcctcagcaggactggcattgggctcggagatacgggctgccatatgtcgttcgggtcgaccttaggcggctcgccccagcccctccagcgacacccgctccagcaggaacaccaggacccatcctaatcccgaagcaagcgctcgccttcgctcccttctctccacctaaaagattgcgacttgtagtgtcacacggtagtatcgacttggatgtcggtggggaggagctctag

SEQ ID NO: 225342 - DNA, 1389 bp, Artificial Sequence
  derived and/or modified sequence
atgggccctgacagagtgacagcccgggagctgtgtgaaaatgatgacctggccaccagcctggtgctggacccctacctgggcttccgcacccacaagatgaatgtgtcccctgtgccccccctgcggcggcagcagcacctgcggagcgccctggagaccttcctgcggcagagggacctggaggccgcctaccgggccctgaccctgggcggctggacagcccgctacttccagagccggggcccccggcaggaggccgccctgaagacccacgtgtaccgctacctgcgggccttcctgcctgagagcggcttcaccatcctgccctgcacccgctacagcatggagaccaatggagccaagatcgtgtccacccgggcctggaagaagaatgagaagctggagctgctggtgggctgcatcgccgagctgcgggaggctgatgagggcctgctgcgggctggagaaaatgacttcagcatcatgtacagcaccaggaagaggtctgcccagctgtggctgggccctgctgccttcatcaaccacgactgcaagcccaactgcaagtttgtgcctgcagatggaaatgctgcctgtgtgaaggtgctgcgggacatcgagcctggagatgaggtgacctgcttctatggagagggcttcttcggggagaagaatgagcactgtgagtgccacacctgtgagaggaaaggagagggcgccttccgcacccggccccgggagcccgccctgcccccccggcccctggacaagtaccagctgcgggagaccaagaggcggctgcagcagggcctggacagcggcagccggcagggcctgctgggcccccgggcctgtgtgcaccccagccccctgcggcgggaccccttctgtgccgcctgccagcccctgcggctgcctgcctgcagcgcccggccagacaccagccccctgtggctgcagtggctgccccagccccagccccgggtgcggcccaggaagagaagaagaccccggccccggcgggcccctgtgctgagcacccaccacgccgcccgggtgtccctgcaccgctggggcggctgcggcccccactgccgcctgcggggggaggccctggtggccctgggccagccccctcatgcccgctgggccccccagcaggactggcactgggcccggcgctatggcctgccctacgtggtgcgggtggacctgcggcggctggccccagcccccccagccaccccagccccagctggcaccccaggccccatcctgatccccaagcaggccctggcctttgcccccttcagcccccccaagaggctgcggctggtggtgagccacggcagcattgacctggatgtgggcggggaggagctgtag

SEQ ID NO: 225343 - DNA, 1389 bp, Artificial Sequence
  derived and/or modified sequence
atgggccccgaccgggtgaccgcccgggagctgtgcgagaacgacgaccttgccacaagcctggttctggatccttatctggggttccgcacacacaaaatgaatgtgagcccagtgcccccccttcgccgtcagcaacatctgaggagcgctctggagactttcctgcggcagagagatttggaagccgcttacagagcactcaccctgggagggtggacggctagatattttcagagtagaggccctcgacaggaagccgcgctgaaaacacatgtctacaggtaccttcgcgcctttctgcctgagtctggctttacgattctgccctgtacaagatactcaatggaaacaaacggtgctaaaatcgtatccacgcgggcctggaagaagaatgaaaaactggagctgcttgtcggctgtatagccgaacttcgagaggctgacgagggtttactgcgggctggggaaaatgactttagtatcatgtatagtactaggaaacggagtgctcagctttggctaggccccgctgcgtttattaatcatgactgtaagccaaactgcaagttcgtgccagcagacggtaacgctgcctgcgtaaaggtcctccgcgacatcgagcccggcgacgaggtgacatgtttctatggagagggcttctttggagagaagaatgagcattgcgagtgtcacacatgcgaaaggaaaggtgagggcgcttttcgcacccggccaagggaaccggcgcttcccccacgacctctcgataaatatcagctgcgtgagactaaacggcgtctgcagcagggcttagatagcggatcaaggcagggactgctcggcccgcgcgcctgcgtccacccaagtccacttcggcgtgacccgttctgtgctgcttgtcagccactcaggctcccagcatgctcagcacgccctgatactagcccgctgtggcttcagtggctcccccagccccaaccacgggtccgacctcgaaagcggagaagacctaggccccgacgcgctccagtgttgtctactcatcatgcagcaagggtgtctctccatcgttggggaggctgcggccctcattgccgcttgcgcggtgaagccctggttgccctgggccagcctcctcacgcccgctgggccccgcagcaggactggcattgggcaaggagatatgggctgccatacgtggtccgggtggatctgagacgactggctccagccccacccgcaacacccgcgcccgccggaaccccaggcccaattctgattccgaaacaggcactcgccttcgcccccttttcaccaccgaagcggcttaggctggtcgtgtctcatggaagcatagacctggacgtcggcggcgaggagttgtag

SEQ ID NO: 225344 - DNA, 1389 bp, Artificial Sequence
  derived and/or modified sequence
atgggccctgatagagtaactgcacgggagctctgcgagaacgacgatctagcgacatcattggttctggatccatacctgggctttcggacccacaaaatgaacgtgagccctgtgcctcccctgagacgccagcagcacctgagatctgccttagaaacctttctgcgccaaagagacctggaggccgcttatagagccctgactcttggtggatggactgccagatatttccagtcacggggtcctagacaggaggccgctttgaagacacacgtataccggtatctcagagcgttcctgcctgagtctggattcacaattctgccttgcacgcgctattcgatggagacaaatggtgcaaagattgtgtccacaagggcctggaaaaagaacgagaagttggagctgctcgttggatgcatcgctgaactccgagaggccgacgagggtttgctaagagccggagagaatgacttctccatcatgtatagcactcgtaagcggagcgcccagttatggctggggcctgcagccttcattaaccacgattgtaagcccaattgtaagtttgtgcccgcagacggaaacgctgcctgcgtaaaggttctgcgggacatcgaacccggtgacgaggtcacatgcttctacggcgaggggtttttcggagagaagaacgaacactgcgagtgtcatacttgcgaacgtaagggggagggtgcgttccgcaccaggccaagggaacctgccctgcctccaaggcctttagataaatatcagctgcgagagacaaaacgacggctccagcaggggctggatagcgggagcaggcaggggctgctgggacctagggcttgcgtgcatccatctccccttcggagggaccccttctgcgctgcttgccagccattacgactgccggcatgctcggccagacccgatactagtcccttgtggctgcaatggcttcctcaaccacagcccagggttagacccagaaagagacgacgaccacggcctagacgcgctcctgtgttgtctactcaccacgctgcccgtgtctcactccaccgatggggtggctgtggtcctcattgccggctgcggggagaggcactggtggcgctgggacagccacctcacgctcgatgggctcctcaacaggattggcattgggccagacggtatggattaccatatgtggtacgggtcgacctgaggagactagctccggctccccctgccacacccgcacccgctggcacccctggacccattctcattcctaaacaagctctggcatttgcgccattcagcccgccaaagaggctcagactggttgtgtctcacggaagcattgatctggacgtcggaggagaggagctctag

SEQ ID NO: 225345 - DNA, 2308 bp, Artificial Sequence
  derived and/or modified sequence
gagcagatgggaggtgcggcgacagtgtttgacgagagccgaaggaggctgtgggaggtgttggcggcggcggcgcgggcgcctgaggaggaggaggagaagcggatgagatcgtggggctcaccagcgtcccccatggcttctgagtagcgtgggagtggagtcagcaccaagccaggctccccgcgcctgccttgccctcacctgctcctgctctctgccagaggcagcatggtccgcagggcaccatggggcccgacagagtgacagcacgagaactgtgcgagaacgacgacctggccaccagcctcgtcctggacccctacctcggtttccgcacccataagatgaacgtcagccctgtgccccccctgcggcgacagcagcacctgcgctcagcgctggaaactttcctgaggcagcgggacctggaggctgcgtaccgggccctgacgctgggaggctggacggcccgctacttccagagccggggcccgcggcaggaggctgccctcaagacccacgtctatcgctacctccgtgccttcctgccggaaagtggctttaccatcctgccctgcacgcgctactccatggagaccaacggggccaagatcgtgtccactcgtgcttggaaaaagaatgagaagctggagctgctggtgggctgcattgcagagctgcgggaggcagatgaggggctgctgagggccggtgagaatgacttcagcatcatgtactcaacccgcaagcggagtgctcagctgtggctgggcccagccgccttcatcaaccatgactgcaaacccaactgcaagtttgtgcctgcagatgggaacgcagcctgcgtgaaggtgctccgggacattgagcctggggacgaggtgacatgcttctacggcgagggcttcttcggcgagaagaatgagcactgtgaatgccacacctgtgagaggaaaggtgaaggagctttccgaaccaggcctagggagcccgcgttgccaccacggcccctggacaagtaccagctgcgtgagaccaagcggcggctgcagcaaggcctggacagtggcagccgacagggcctgctgggccctcgggcctgcgtgcacccatccccgctgcgccgggacccattctgcgccgcctgccagcccctgcgcctgccagcctgcagcgcccgcccagacacctcacccctctggctccagtggctgcctcagccccagccccgagtgcggccccggaagcgccgacgcccccggccccggagggccccagtgctctccacccaccacgctgcccgcgtctccctgcaccgatggggaggctgtggcccccactgccgcctgcgaggagaggccctggtggccctgggccagcccccccacgcccgctgggcccctcagcaggactggcactgggcccggcgctatgggctgccttacgtggtgcgtgtggaccttcgtcgcctggccccagccccaccagctaccccagcccctgctgggaccccaggccccatcctgatcccgaagcaggccctcgccttcgcccccttctccccacccaagcgcctacggctggtggtcagccacggctccatcgacctggatgtcggcggtgaagagctgtgacaggccggacggggaggcccagcagggagagagggtctctctcctagctgctacccaggacctccagaaggagcccttggacctctgggagggagctgacccttgactccagcatagctctgaccctggaatggggttggtttggacacccccagggatctgagccctgaccctttgtgactgctgacccctgagccacccccactcccacagggagccccggccatttgctgccctccccacccctgccccagcctcaggactgcaggagccatccgcccccctcagccccttcctccccagggagcaaagccataaggggcaggggccaccccacggcatctccccagaagtacaggcctcaggaggaggtggaactgatgtagggggtggcactccccagagactgccctcacgaggggactgggttcgctctcagctctgcagctgtctgcggtggggggaaggttggggggtgtctggaggcatgttcccctcaccaccccccgtgggtctcagggaggccgggtgtgacctcatctttctcatggtgctatcctggtgctattggggtggggagctccctcccctcccccacaccagaaaggggtatgttgggggcttggaagcacttgaactttttattttattaaaaccttgttataagcagc

SEQ ID NO: 225346 - DNA, 888 bp, Artificial Sequence
  derived and/or modified sequence
gagagccgaaggaggctgtgggaggtgttggcggcggcggcgcgggcgcctgaggaggaggaggagaagcggatgagatcgtggggctcaccagcgtcccccatggcttctgagtagcgtgggagtggagtcagcaccaagccaggctccccgcgcctgccttgccctcacctgctcctgctctctgccagaggcagcatggtccgcagggcaccatggggcccgacagagtgacagcacgagaactgtgcgagaacgacgacctggccaccagcctcgtcctggacccctacctcggtttccgcacccataagatgaacgtcagcccccggccttgcagggaacaacgcaggcagctgtggtggcaggagcagggaggccagagagccccaggggccaggactcaggatgctgtccagacatgcccaggagaggccgctggttgtcctgtagcccggaagcagaaggaatcaggagggttggctccagggcggcattgagggtgcaccctctggagcacagacctcgatggggcaccccgggaggcatgacaaagggatccagatttttggctccagagtcagaactgagttggggtcctggcgatgccacccctggcctttggtttttcatctcagatggggttggtgaggatctctggaactctgcgggctggtcaagtgtgccggagggttttggacagcgaatgcgtggccctggtctgacaccacacacagacgctgggggggatggaaacaaaaggcggcattcggagaggctctgcagggccagtgtgctccagccaccttgagcacacgagagggcggccagctctccagcgatctagaaccatctggcttcacagaagccatgctgggcatcgacgga

SEQ ID NO: 225347 - protein, 449 aa, Artificial Sequence
  derived and/or modified sequence
MRECISIHVGQAGVQIGNACWELYCLEHGIQPDGQMPSDKTIGGGDDSFNTFFSETGAGKHVPRAVFVDLEPTVIDEVRTGTYRQLFHPEQLITGKEDAANNYARGHYTIGKEIIDLVLDRIRKLADQCTGLQGFLVFHSFGGGTGSGFTSLLMERLSVDYGKKSKLEFSIYPAPQVSTAVVEPYNSILTTHTTLEHSDCAFMVDNEAIYDICRRNLDIERPTYTNLNRLISQIVSSITASLRFDGALNVDLTEFQTNLVPYPRIHFPLATYAPVISAEKAYHEQLTVAEITNACFEPANQMVKCDPRHGKYMACCLLYRGDVVPKDVNAAIATIKTKRTIQFVDWCPTGFKVGINYQPPTVVPGGDLAKVQRAVCMLSNTTAVAEAWARLDHKFDLMYAKRAFVHWYVGEGMEEGEFSEAREDMAALEKDYEEVGADSADGEDEGEEY

SEQ ID NO: 225348 - DNA, 1350 bp, Artificial Sequence
  derived and/or modified sequence
atgagagaatgcattagcattcacgttggccaggccggcgtgcagatcggaaatgcctgttgggagctgtactgtcttgaacatgggatccagcccgacgggcagatgccctcagacaagaccatcgggggaggagacgacagttttaacaccttcttctccgagaccggcgcagggaaacatgtgccgagagccgtgttcgtcgatctcgaaccgacagtcattgacgaagtacggacgggcacttatcgtcagctattccacccagaacagttaataactggaaaagaggacgctgccaataattatgcccggggtcactatacaatcgggaaggagataattgatctcgtcttagatagaatcaggaaactggccgaccagtgtacaggactgcaggggttcctcgtttttcactcttttgggggtggtaccggatctggatttacgtccctgcttatggagcgcttgtctgtagattatggcaagaagagtaagctggaattcagcatctaccccgcccctcaggttagcaccgccgtcgtcgaaccttataattccatccttaccacccatactaccctcgagcactccgactgtgcattcatggtagataacgaagcgatctacgacatatgtcgacgaaatctagatatcgagcgacccacctatacgaaccttaatagactgattagccaaattgtgagtagcatcactgcaagcctgcgcttcgacggtgctttaaatgtcgacctgacagagttccagactaacctggtaccttatcctcgtatccattttcccctagcaacctacgccccggttatttctgctgagaaggcataccacgagcaattaacagttgccgagataacgaatgcttgttttgaacccgcaaatcagatggtgaagtgtgacccacgtcatggtaaatacatggcctgctgcctgttgtataggggagacgtcgtgcctaaggacgtcaacgccgctatcgcaacaattaagactaagaggactattcagttcgtggactggtgccccacagggtttaaagtcgggattaattaccagccaccaaccgtggtgccagggggagatctagctaaagtgcaacgggccgtgtgcatgctgtcaaatactaccgctgtggccgaggcatgggcacggcttgaccacaaattcgatctgatgtacgcaaaacgagcttttgttcattggtatgtgggcgaaggaatggaggagggcgaattctctgaagctagggaagatatggcagccctcgagaaggactacgaagaggtcggcgcagactcggcagatggagaggacgagggagaagaatattag

SEQ ID NO: 225349 - DNA, 1350 bp, Artificial Sequence
  derived and/or modified sequence
atgagggagtgcatcagcatccacgtgggccaggccggcgtgcagattggaaatgcctgctgggagctgtactgcctggagcacggcatccagccagatggccagatgcccagcgacaagaccatcggcggcggagatgacagcttcaacaccttcttcagcgagaccggggccggcaagcacgtgcccagggctgtgtttgtggacctggagcccaccgtgattgatgaggtgaggacaggcacctaccggcagctgttccaccctgagcagctgatcaccgggaaggaggatgctgccaacaactatgcccggggccactacaccatcggcaaggagatcatcgacctggtgctggaccgcatcaggaagctggccgaccagtgcaccggcctgcagggcttcctggtgttccacagctttggaggcggcactggaagtggcttcaccagcctgctgatggagcggctgtctgtggactatggcaagaagagcaagctggagttcagcatctacccagccccccaggtgtccacagctgtggtggagccctacaacagcatcctgaccacccacaccaccctggagcacagcgactgtgccttcatggtggacaatgaggccatctatgacatctgcagaagaaacctggacatcgagcggcccacctacaccaacctgaacagactcatcagccagatcgtgagcagcatcacagccagcctgcgctttgatggagccctgaatgtggacctgacagagttccagaccaacctggtgccctacccccgcatccacttccccctggccacctacgcccctgtgatctctgctgagaaggcctaccacgagcagctgactgtggccgagatcaccaatgcctgctttgagcccgccaaccagatggtgaagtgtgaccccaggcatggcaagtacatggcctgctgcctgctgtacagaggagatgtggtgcccaaggatgtgaatgctgccatcgccaccatcaagaccaagaggaccatccagtttgtggactggtgccccaccggcttcaaggtgggcatcaactaccagcccccaacagtggtgcctggaggagacctggccaaggtgcagagagctgtgtgcatgctgagcaacaccacagctgtggccgaggcctgggcccggctggaccacaagtttgacctgatgtatgccaagagggcctttgtgcactggtacgtgggggagggcatggaggagggggagttcagcgaggcccgggaggacatggccgccctggagaaggactatgaggaggtgggcgctgacagcgcagatggagaagatgaaggagaggagtactag

SEQ ID NO: 225350 - DNA, 1350 bp, Artificial Sequence
  derived and/or modified sequence
atgcgggagtgcatcagcatccacgtgggccaggccggcgtgcagattggaaacgcctgttgggagctctactgtctagaacatgggatccaacccgatggtcagatgccatcagacaaaactatcggcggcggtgacgactccttcaatactttctttagcgaaacaggcgctgggaaacacgtgccccgcgccgtgttcgtggatttggagcctacagttattgatgaggtgcggaccgggacttaccgccaactctttcacccagagcagttaatcacaggcaaagaagatgcagcgaacaattacgcaagaggtcactatacaattgggaaggaaatcatcgacctggtgctcgacaggattcggaagctggccgatcagtgcacaggcctccaggggttcctggtgttccactcattcggtggcgggacaggttctggatttacatctctcctgatggaaagacttagcgtggactacggtaaaaagagcaaactggaattcagtatctatccagccccccaagtgagtacagccgtggttgaaccctacaattctatcttgactactcatactactctggaacactcggattgtgccttcatggtagacaacgaagcgatttatgatatctgcagacggaatctggatatcgagcgccccacctataccaatcttaatcggttgatttcacaaatagttagctcgataaccgctagcctgcgattcgacggtgcgctaaatgtggatctcaccgaattccagacaaatcttgttccttatccaaggattcacttccctcttgccacctacgctccggtgatctcagcagaaaaagcgtatcatgagcagctaaccgttgcagagatcactaacgcttgttttgagccagcaaatcagatggtcaaatgcgacccgcgtcacggaaagtatatggcttgctgcttgctctatagaggagatgtggtacccaaagacgtgaacgccgcaatagccacaataaagacgaaacggaccattcagtttgttgattggtgccccactggcttcaaagtcggaatcaattaccagccgcccactgtcgtgcctgggggagatcttgccaaagtccaacgggccgtttgcatgctgagcaacaccacagccgtggcggaggcatgggctagactcgatcacaaattcgatctgatgtatgcaaaaagggcctttgtgcattggtatgtcggcgagggaatggaggagggtgaattttcagaggcccgggaggacatggccgcccttgaaaaggattacgaagaggttggagccgatagcgcggatggtgaggatgagggcgaagagtactag

SEQ ID NO: 225351 - DNA, 1350 bp, Artificial Sequence
  derived and/or modified sequence
atgagggaatgtatcagtattcacgtgggccaggccggtgttcaaatcgggaacgcctgctgggagctatattgcttagaacacggcattcaaccagacggtcagatgccctcagataagaccatcggcggaggagatgactcctttaatactttttttagcgagaccggcgctggaaaacacgtgcccagggctgtgtttgtggatctggaacccaccgtcatcgacgaggtcagaacaggcacttacaggcaactctttcacccagagcagcttattaccggaaaagaggatgcggcaaataattatgccagaggccattatactattggcaaggaaatcatcgacctcgtcctcgaccgtattcgcaagttggccgatcagtgtacagggctgcaaggattccttgtttttcactcatttggcggaggaaccggctcaggctttacttcgctgctgatggaacgccttagtgttgattatggcaagaaatccaagttagaattcagcatctaccccgctcctcaggtgagtacggcagtggtagagccctataacagtatcttaaccacccataccaccttagagcattccgattgtgcttttatggtcgacaatgaggcaatctatgacatctgtagacgtaatctagacattgaaagacccacttacacaaatctgaaccgcttaatatctcagatcgtaagcagtatcaccgcgagccttcggttcgatggcgctttaaacgtagatttaactgagttccaaacgaacctcgttccctaccctcgcatacattttcccctagccacatacgctcccgtcatatcagctgaaaaggcatatcatgagcaactaaccgttgcagaaattactaatgcctgctttgaaccagccaaccagatggtgaagtgtgacccaagacatggtaaatacatggcgtgctgcttgctatacaggggcgacgtcgtgccgaaggacgtgaatgcagccatcgccacaataaagacaaaaaggactatacagttcgtcgattggtgccctactgggtttaaggtgggaattaactaccagcccccaacggtcgtccccggaggtgacctggctaaggtgcaaagggcagtctgcatgttgtccaataccacagccgtcgccgaagcctgggcaagacttgaccacaaattcgatttaatgtacgcgaagcgagccttcgtccactggtacgtgggtgagggcatggaggaaggggagttttccgaggcgcgagaagacatggcagccttggagaaggactacgaggaggtcggtgctgactcagccgacggtgaagacgagggggaggagtattag

SEQ ID NO: 225352 - DNA, 1724 bp, Artificial Sequence
  derived and/or modified sequence
gaacttttgaatccgccaatcagcgccgcgcgcccccactccgcgggtgcggccgggcgcaggccagggctcgaaggtggggccgcagcggcacggggcggggtctggggcccgccctcccgacacgtggccggggaccgggtatataaggcccttcggggccggccaccctttcactacttctcccccggactccttggtagtctgttagtgggagatccttgttgccgtcccttcgcctccttcaccgccgcagaccccttcaagttctagtcatgcgtgagtgcatctccatccacgttggccaggctggtgtccagattggcaatgcctgctgggagctctactgcctggaacacggcatccagcccgatggccagatgccaagtgacaagaccattgggggaggagatgattccttcaacaccttcttcagtgaaacgggtgctggcaagcatgtgccccgggcagtgtttgtagacttggaacccacagtcattgatgaagttcgcactggcacttaccgccagctcttccaccctgagcaactcatcacaggcaaggaagatgctgccaataactatgcccgagggcactacaccattggcaaggagatcattgacctcgtgttggaccgaattcgcaagctggctgaccagtgcaccggtcttcagggcttcttggttttccacagctttggtgggggaactggttctgggttcacctcgctgctcatggaacgtctctcagttgattatggcaagaagtccaagctggagttctccatttacccggcgccccaggtttccacagctgtagttgagccctacaactccatcctcaccacccacaccaccctggagcactctgattgtgccttcatggtagacaatgaggccatctatgacatctgtcgtagaaacctcgatatcgagcgcccaacctacactaaccttaaccgccttattagccagattgtgtcctccatcactgcttccctgagatttgatggagccctgaatgttgacctgacagaattccagaccaacctggtgccctacccccgcatccacttccctctggccacatatgcccctgtcatctctgctgagaaagcctaccacgaacagcttactgtagcagagatcaccaatgcttgctttgagccagccaaccagatggtgaaatgtgaccctcgccatggtaaatacatggcttgctgcctgttataccgtggtgacgtggttcccaaagatgtcaatgctgccattgccaccatcaaaaccaagcgtaccatccagtttgtggattggtgccccactggcttcaaggttggcattaattaccagcctcccactgtggtgcctggcggagacctggccaaggtacagagagctgtgtgcatgctgagcaataccacagctgttgccgaggcctgggctcgcctggaccacaagtttgacctgatgtatgccaagcgtgcctttgttcactggtacgtgggtgaggggatggaggaaggcgagttttcagaggcccgtgaggacatggctgcccttgagaaggattatgaggaggttggagcagatagtgctgacggagaggatgagggtgaagagtattaacctgtgtgctgtacttttacactcctttgtcttggaactgtcttatttttgttctgtaaatgtctattgccgtaaattgttaataaaattgaagtttcc

SEQ ID NO: 225353 - DNA, 1350 bp, Artificial Sequence
  derived and/or modified sequence
atgagagagtgcatcagcatccacgtgggccaggccggcgtgcagatcggcaacgcctgctgggagctgtactgcctggagcacggcatccagcccgacggccagatgcccagcgacaagaccatcggcggcggcgacgacagcttcaacaccttcttcagcgagaccggcgccggcaagcacgtgcccagagccgtgttcgtggacctggagcccaccgtgatcgacgaggtgagaaccggcacctacagacagctgttccaccccgagcagctgatcaccggcaaggaggacgccgccaacaactacgccagaggccactacaccatcggcaaggagatcatcgacctggtgctggacagaatcagaaagctggccgaccagtgcaccggcctgcagggcttcctggtgttccacagcttcggcggcggcaccggcagcggcttcaccagcctgctgatggagagactgagcgtggactacggcaagaagagcaagctggagttcagcatctaccccgccccccaggtgagcaccgccgtggtggagccctacaacagcatcctgaccacccacaccaccctggagcacagcgactgcgccttcatggtggacaacgaggccatctacgacatctgcagaagaaacctggacatcgagagacccacctacaccaacctgaacagactgatcagccagatcgtgagcagcatcaccgccagcctgagattcgacggcgccctgaacgtggacctgaccgagttccagaccaacctggtgccctaccccagaatccacttccccctggccacctacgcccccgtgatcagcgccgagaaggcctaccacgagcagctgaccgtggccgagatcaccaacgcctgcttcgagcccgccaaccagatggtgaagtgcgaccccagacacggcaagtacatggcctgctgcctgctgtacagaggcgacgtggtgcccaaggacgtgaacgccgccatcgccaccatcaagaccaagagaaccatccagttcgtggactggtgccccaccggcttcaaggtgggcatcaactaccagccccccaccgtggtgcccggcggcgacctggccaaggtgcagagagccgtgtgcatgctgagcaacaccaccgccgtggccgaggcctgggccagactggaccacaagttcgacctgatgtacgccaagagagccttcgtgcactggtacgtgggcgagggcatggaggagggcgagttcagcgaggccagagaggacatggccgccctggagaaggactacgaggaggtgggcgccgacagcgccgacggcgaggacgagggcgaggagtactag

SEQ ID NO: 225354 - DNA, 705 bp, Artificial Sequence
  derived and/or modified sequence
atgtcagtgaaagagggtgcccagagaaagtgggctgctctgaaagagaaactcggcccacaggattccgacccaacagaggccaatctggaaagcgccgatccagaactttgcattagactgctccagatgcccagtgtagttaactattctggattgcgcaagagacttgaaggttcagatggcgggtggatggtacagttcctggaacagagcggtctggatctgctgttggaggccctggcacgactgtctggccgaggggttgctcgcatttctgacgcactcctccagctgacttgcgtgagttgtgttcgcgcagtaatgaatagccgacaaggtatagagtatatccttagtaaccaaggatacgtgcgccagttgtcccaagctcttgatacatccaatgtgatggtcaaaaagcaagtattcgagctgctggccgcactctgcatctatagtccagaggggcatgtcctcacccttgacgccctggatcactacaagaccgtctgctctcagcagtacagattcagcattgtgatgaatgaactctctggatccgacaacgttccatacgtggtaactttgctgagtgttataaatgccgttatcttgggccccgaggatctccgggccaggacacagctgcggaacgagttcatcggtctgcaacttctcgatgtgctcgcgaggctgaggtag

SEQ ID NO: 225355 - DNA, 1689 bp, Artificial Sequence
  derived and/or modified sequence
aggagccaccgtccgagccttgcggagcgcggcagtgggcgccggctgcccgcagcccctgacccggccccggacggagcgccggccgcaccaccgccctctggccgttgcctcaccggctcggcaagatgtcggtgaaggagggcgcacagcgcaagtgggcagcgctgaaggagaagctggggccacaggattcggaccccacggaggccaacctggagagcgcggaccccgagctgtgcatccggctgctccagatgccctctgtggtcaactactccggcctgcgcaagcgcctggagggcagcgacggcggctggatggtgcagttcctggagcagagcggcctggacctgctgctggaggcgctggcgcggctgtcgggccgcggcgttgcacgtatctccgacgccctgctgcagctcacctgcgtcagctgcgtgcgcgccgtcatgaactcgcggcagggcatcgagtacatcctcagcaaccagggctacgtgcgccagctctcccaggccctggacacatccaacgtgatggtgaagaagcaggtgtttgagctactggctgccctgtgcatctactctcccgagggccacgtgctgaccctggacgccctggaccactacaagacggtgtgcagccagcagtaccgcttcagcattgtcatgaacgagctctccggcagcgacaacgtgccctacgtggtcaccctgcttagcgtgatcaacgccgtcatcttgggccccgaggacctgcgcgcgcgcacccagctgcggaacgagtttatcgggctgcagctgctggacgtcctggctcgcctgcggtgagtccccactgtagcggtcctgccggctccccctcctgctcccaaggccaggcccacctgccctttggctcccagccacctcacctaagcagcacctccagatggcagggaggtggctccctcggagtaaccccaggggtccagccagaagccaggtctcaggctagaatccagctcactgtccctggcagctgcccacagaaactagggttgcagcagccatagaaaggacagaatgagctcatatcctttgcacaccgtggatggagctggaggccgtgatcctaagtgaaccaacccagaaacagaaaatgaaatgccaataagagggaactacagggtggttcacgtggacgcaagatggagacagggacacgggctccagggcgagagttgaaaaactacctacagggtacagtgttcgtcgctacttggtgtcaggcccactagaacaagggtccccaaccgccaggctgcggaccggtacctggcctattggaaccgggccacgcagcaggaagtgagcggtgggcgggcattcctgcctgagctgcacctcatgtcagatcagcactgcattagattctccagcgcacgcacgcgcgcaagggatccaggctgcgcgctcctcatgacaatctaatgcctgatgatcgggggtggaacagttttatccctaaaccattcccgtcaccccagtctatggaaaaattgtcttccacaaaaccagtccctggtgccaaaaaggctggggaccactgccctagaaggcaaatcgcctacgttacacagtgtaccatgtggcaaacacgcacatgtacccccgagtctaaaataaaaattttttaaaaaagaaa

SEQ ID NO: 225356 - DNA, 705 bp, Artificial Sequence
  derived and/or modified sequence
atgtctgtgaaggagggcgcccagaggaagtgggccgccctgaaggagaagctgggcccccaggacagcgaccccacagaggccaacctggagagcgctgaccctgagctgtgcatccggctgctgcagatgcccagcgtggtgaactacagcggcctgaggaagaggctggagggcagtgatggcggctggatggtgcagttcctggagcagagcggcctggacctgctgctggaggccctggcccggctgagcggccggggcgtggcccgcatcagtgatgccctgctgcagctgacctgtgtgtcctgtgtgcgggctgtgatgaacagccggcagggcatcgagtacatcctgagcaaccagggctacgtgcggcagctgagccaggccctggacaccagcaatgtgatggtgaagaagcaggtgtttgagctgctggccgccctgtgcatctacagccctgagggccacgtgctgaccctggatgccctggaccactacaagacagtgtgcagccagcagtaccgcttcagcatcgtgatgaatgagctgagcggcagtgacaacgtgccctacgtggtgaccctgctgagcgtcatcaatgctgtgatcctgggccctgaggacctgcgggcccggacccagctgagaaatgagttcatcggcctgcagctgctggatgtgctggcccggctgaggtag

SEQ ID NO: 225357 - DNA, 705 bp, Artificial Sequence
  derived and/or modified sequence
atgagcgtgaaggagggcgcccagcggaagtgggccgccctgaaggagaagctggggccgcaagacagtgaccctacggaagccaatctggagtctgcggacccggaattgtgcatacgccttctccaaatgccctctgttgtgaattactctgggttacgcaaacggttagaaggatctgatgggggctggatggtgcaattcttggaacaatcgggactcgatctgctgcttgaagcacttgctcgtctatccggccgtggcgttgcacggattagtgatgcgcttctccagctgacctgtgtgtcttgtgtgcgagcagtgatgaatagtagacagggcatcgaatacatcctgtctaatcagggctacgttcgtcaactgagccaggccctggatacatctaacgttatggtgaaaaagcaggtctttgaactattggcagctttgtgtatctattcccccgaggggcacgttctgactctggatgcactcgaccactataagacagtgtgctcccagcagtatcgctttagtatcgtaatgaacgagcttagcgggtctgacaatgtgccttacgtcgtgactctactgtccgtgatcaacgccgtgattttgggtcctgaggaccttcgcgccagaactcagctccgcaatgagttcatcggcctgcagctgctggatgttttagcccgattgcggtag

SEQ ID NO: 225358 - DNA, 705 bp, Artificial Sequence
  derived and/or modified sequence
atgtccgtgaaggaaggtgcgcagaggaaatgggctgccctgaaagagaagctgggccctcaagactctgacccaaccgaggccaatctagagagcgccgaccccgagctgtgcattcgcttgctgcaaatgccatctgtcgtaaactactctggtctccgcaaaagactggaaggctccgacggtggctggatggttcaatttctagagcagtccgggctagacctgctgctcgaagccctggctcggctttctggaagaggggtggctaggatctcagacgccctgctgcagctcacttgcgtttcctgcgtgagagcagttatgaatagtcgtcagggaatcgaatatatcttatcaaatcagggctatgtgcggcagctatcccaggccctggatacttcaaacgtcatggttaaaaagcaggtgttcgagctcctcgccgctctctgcatttatagtcccgaggggcatgttctcacactcgatgctttagaccactacaagaccgtctgctcacaacagtaccgctttagcattgttatgaacgagctatcagggagcgataatgtcccctacgtcgtcacactactgagcgtgatcaatgcggtgatactgggtccagaagatcttcgagctcggacacaactgagaaacgagttcatcggtttgcagctcttggatgtgctcgcccgactgagatag

SEQ ID NO: 225359 - DNA, 705 bp, Artificial Sequence
  derived and/or modified sequence
atgagcgtgaaggagggcgcccagagaaagtgggccgccctgaaggagaagctgggcccccaggacagcgaccccaccgaggccaacctggagagcgccgaccccgagctgtgcatcagactgctgcagatgcccagcgtggtgaactacagcggcctgagaaagagactggagggcagcgacggcggctggatggtgcagttcctggagcagagcggcctggacctgctgctggaggccctggccagactgagcggcagaggcgtggccagaatcagcgacgccctgctgcagctgacctgcgtgagctgcgtgagagccgtgatgaacagcagacagggcatcgagtacatcctgagcaaccagggctacgtgagacagctgagccaggccctggacaccagcaacgtgatggtgaagaagcaggtgttcgagctgctggccgccctgtgcatctacagccccgagggccacgtgctgaccctggacgccctggaccactacaagaccgtgtgcagccagcagtacagattcagcatcgtgatgaacgagctgagcggcagcgacaacgtgccctacgtggtgaccctgctgagcgtgatcaacgccgtgatcctgggccccgaggacctgagagccagaacccagctgagaaacgagttcatcggcctgcagctgctggacgtgctggccagactgagatag

SEQ ID NO: 225360 - protein, 619 aa, Artificial Sequence
  derived and/or modified sequence
MAAAPPLSKAEYLKRYLSGADAGVDRGSESGRKRRKKRPKPGGAGGKGMRIVDDDVSWTAISTTKLEKEEEEDDGDLPVVAEFVDERPEEVKQMEAFRSSAKWKLLGGHNEDLPSNRHFRHDTPDSSPRRVRHGTPDPSPRKDRHDTPDPSPRRARHDTPDPSPLRGARHDSDTSPPRRIRHDSSDTSPPRRARHDSPDPSPPRRPQHNSSGASPRRVRHDSPDPSPPRRARHGSSDISSPRRVHNNSPDTSRRTLGSSDTQQLRRARHDSPDLAPNVTYSLPRTKSGKAPERASSKTSPHWKESGASHLSFPKNSKYEYDPDISPPRKKQAKSHFGDKKQLDSKGDCQKATDSDLSSPRHKQSPGHQDSDSDLSPPRNRPRHRSSDSDLSPPRRRQRTKSSDSDLSPPRRSQPPGKKAAHMYSGAKTGLVLTDIQREQQELKEQDQETMAFEAEFQYAETVFRDKSGRKRNLKLERLEQRRKAEKDSERDELYAQWGKGLAQSRQQQQNVEDAMKEMQKPLARYIDDEDLDRMLREQEREGDPMANFIKKNKAKENKNKKVRPRYSGPAPPPNRFNIWPGYRWDGVDRSNGFEQKRFARLASKKAVEELAYKWSVEDM

SEQ ID NO: 225361 - DNA, 1860 bp, Artificial Sequence
  derived and/or modified sequence
atggccgccgccccccccctgagcaaggccgagtacctgaagagatacctgagcggcgccgacgccggcgtggacagaggcagcgagagcggcagaaagagaagaaagaagagacccaagcccggcggcgccggcggcaagggcatgagaatcgtggacgacgacgtgagctggaccgccatcagcaccaccaagctggagaaggaggaggaggaggacgacggcgacctgcccgtggtggccgagttcgtggacgagagacccgaggaggtgaagcagatggaggccttcagaagcagcgccaagtggaagctgctgggcggccacaacgaggacctgcccagcaacagacacttcagacacgacacccccgacagcagccccagaagagtgagacacggcacccccgaccccagccccagaaaggacagacacgacacccccgaccccagccccagaagagccagacacgacacccccgaccccagccccctgagaggcgccagacacgacagcgacaccagcccccccagaagaatcagacacgacagcagcgacaccagcccccccagaagagccagacacgacagccccgaccccagcccccccagaagaccccagcacaacagcagcggcgccagccccagaagagtgagacacgacagccccgaccccagcccccccagaagagccagacacggcagcagcgacatcagcagccccagaagagtgcacaacaacagccccgacaccagcagaagaaccctgggcagcagcgacacccagcagctgagaagagccagacacgacagccccgacctggcccccaacgtgacctacagcctgcccagaaccaagagcggcaaggcccccgagagagccagcagcaagaccagcccccactggaaggagagcggcgccagccacctgagcttccccaagaacagcaagtacgagtacgaccccgacatcagcccccccagaaagaagcaggccaagagccacttcggcgacaagaagcagctggacagcaagggcgactgccagaaggccaccgacagcgacctgagcagccccagacacaagcagagccccggccaccaggacagcgacagcgacctgagcccccccagaaacagacccagacacagaagcagcgacagcgacctgagcccccccagaagaagacagagaaccaagagcagcgacagcgacctgagcccccccagaagaagccagccccccggcaagaaggccgcccacatgtacagcggcgccaagaccggcctggtgctgaccgacatccagagagagcagcaggagctgaaggagcaggaccaggagaccatggccttcgaggccgagttccagtacgccgagaccgtgttcagagacaagagcggcagaaagagaaacctgaagctggagagactggagcagagaagaaaggccgagaaggacagcgagagagacgagctgtacgcccagtggggcaagggcctggcccagagcagacagcagcagcagaacgtggaggacgccatgaaggagatgcagaagcccctggccagatacatcgacgacgaggacctggacagaatgctgagagagcaggagagagagggcgaccccatggccaacttcatcaagaagaacaaggccaaggagaacaagaacaagaaggtgagacccagatacagcggccccgcccccccccccaacagattcaacatctggcccggctacagatgggacggcgtggacagaagcaacggcttcgagcagaagagattcgccagactggccagcaagaaggccgtggaggagctggcctacaagtggagcgtggaggacatgtag

SEQ ID NO: 225362 - DNA, 1860 bp, Artificial Sequence
  derived and/or modified sequence
atggccgctgcgcctcccctgtccaaggccgaatacctcaaacgctatctgtcaggagctgacgccggcgtggaccggggttctgagagtggcagaaaaaggaggaaaaagcgacccaaaccaggcggggcagggggtaaagggatgcgtattgtggatgatgatgtttcctggactgccatctccactaccaagctggaaaaagaagaagaggaagacgacggggatctgccagtggtggccgaatttgtggacgagagacctgaagaggtcaaacagatggaggcttttcgcagctccgccaagtggaaactcctgggcgggcacaacgaagatctacccagcaaccggcacttccgccacgacaccccggacagctccccccgtagggtgagacacgggactccggacccatctccccgtaaggatcgccatgatacaccagaccctagccccaggcgggccagacatgacactccagaccctagtcccctgagaggcgctagacacgatagcgacacgtccccccctaggcgaatcaggcatgatagcagtgatacctccccacccagacgggccaggcacgactctcctgacccgagccccccacggcggccccagcataatagtagcggagcctccccacgacgggtgcgccacgactccccggaccccagcccaccccggagagcccgccacgggagttccgacattagttctccaagacgcgtacataataacagcccagacacgtcaagacgcacgctcggaagtagtgatacccagcaactccgccgggcccgccatgatagccctgatctcgcgcccaacgttacctactccttgccaagaaccaaatccggaaaggctcccgaaagggcgagcagtaagacgagcccccactggaaagaaagcggagccagtcacctgtctttccctaaaaattcaaaatacgagtacgaccccgatatcagccccccgcggaagaagcaagccaaatcccatttcggggacaagaagcagcttgacagtaagggcgattgccagaaagccacagacagtgacttatcctcaccgaggcacaaacagagtcccggacaccaggacagcgactccgacttgtctcccccgcggaaccgaccgcgacatcgctcttcagacagcgacctctcaccacctcggaggagacagaggacaaaaagtagcgatagtgacttgtcaccacctaggagaagccagccgccagggaagaaagccgcacacatgtattccggagctaagaccggcctggttttaactgacatccagagggagcagcaggagttgaaggaacaggaccaggagaccatggcgttcgaagctgaattccagtatgccgaaactgtttttagagacaagtccggccggaagagaaatctgaaactggaaaggctggagcaacgccggaaggctgagaaggattctgaacgagacgaactctatgctcaatggggaaagggcttggcccagagccgccagcagcagcagaatgtggaggatgccatgaaagaaatgcagaagccactggcaagatacatagacgacgaagatcttgacagaatgctgcgggagcaggagcgagagggggatccaatggctaattttatcaagaagaataaggctaaggaaaacaaaaacaagaaagtacgccctcgctactccggcccagcgccacctccaaatcgatttaatatatggccaggataccgttgggacggagtagatagatcgaacggattcgagcaaaagcgctttgcccggttagcttccaaaaaagctgtggaggaattggcctataaatggtccgtggaagacatgtag

SEQ ID NO: 225363 - DNA, 1860 bp, Artificial Sequence
  derived and/or modified sequence
atggctgctgccccacccctgagcaaggccgagtacctgaagcgctacctgagcggggctgatgctggggtggaccggggcagcgagagcggcaggaagaggaggaagaagaggcccaagccaggaggagctgggggcaagggcatgagaattgtggatgatgatgtgtcctggacagccatcagcaccaccaagctggagaaggaggaggaggaggatgatggagacctgcctgtggtggccgagtttgtggatgagaggcctgaggaggtgaagcagatggaggccttccgcagcagcgccaagtggaagctgctgggcggccacaatgaagacctgcccagcaacagacacttcagacatgacaccccagacagcagccccaggagagtgagacatggcaccccagaccccagccccaggaaggacagacatgacaccccagaccccagcccccggcgggcccggcatgacaccccagaccccagccccctgcggggggcccggcatgacagcgacaccagccccccccggcgcatcagacatgacagcagtgacaccagccccccaagaagagcccggcatgacagcccagaccccagccccccccggcggccccagcacaacagcagcggggccagcccccggcgggtgagacatgacagcccagaccccagccccccaagaagagcccggcacggcagcagtgacatcagcagcccccggcgggtgcacaacaacagcccagacaccagcaggaggaccctgggcagcagtgacacccagcagctgcggcgggcccggcatgacagcccagacctggccccaaatgtgacctacagcctgcccaggaccaagagcggcaaggcccctgagcgggccagcagcaagaccagcccccactggaaggagagcggggccagccacctgtccttccccaagaacagcaaatatgaatatgaccctgacatcagcccccccaggaagaagcaggccaagagccactttggagacaagaagcagctggacagcaaaggagactgccagaaggccacagacagcgacctgagcagccccaggcacaagcagagccctggccaccaggacagcgacagcgacctgagcccccccaggaaccggcccaggcacaggagcagtgacagcgacctgagccccccccggcggcggcagaggaccaagagcagtgacagcgacctgagccccccccggcgcagccagcccccaggcaagaaggccgcccacatgtacagcggggccaagacaggcctggtgctgacagacatccagcgggagcagcaggagctgaaggagcaggaccaggagaccatggcctttgaggccgagttccagtatgcagagaccgtcttccgggacaagagcggcaggaagaggaacctgaagctggagcggctggagcagaggaggaaggccgagaaggacagcgagagagatgagctgtatgcccagtggggcaagggcctggcccagagccggcagcagcagcagaatgtggaggatgccatgaaggagatgcagaagcccctggcccgctacattgatgatgaggacctggacaggatgctgcgggagcaggagcgggagggggaccccatggccaacttcatcaagaagaacaaggccaaggagaacaagaacaagaaggtgcggccccgctacagcggccctgcccccccacccaaccgcttcaacatctggccaggctaccgctgggatggagtggacaggagcaatggatttgagcagaagagatttgcccggctggccagcaagaaggctgtggaggagctggcctacaagtggagcgtggaggacatgtag

SEQ ID NO: 225364 - DNA, 1860 bp, Artificial Sequence
  derived and/or modified sequence
atggccgccgccccccccctgagcaaggccgagtacctgaagcggtaccttagtggcgctgacgctggcgttgaccggggttccgagtctgggcgcaaacgacgaaaaaagcggcccaagcctgggggcgccggtggcaaggggatgcggatagttgatgatgatgtctcgtggacggctatctccaccaccaagctcgaaaaggaggaggaagaggacgatggggacctccctgtggtggcggagttcgtggacgaacggcccgaggaggttaaacaaatggaggccttcagatcaagcgctaagtggaagctgctgggcggtcataacgaagatctccccagtaatagacacttccgacacgacactcccgactcatctcccaggagggtcaggcacggcacacccgatccatcccccaggaaggaccgtcacgacacccctgatccatctccacgaagagccagacacgacacccctgacccctctcccctgagaggcgcccgtcacgactccgacacaagtcccccaaggcggataagacatgatagctcagatacttcaccccctagacgggcaagacatgattctccagatccaagcccgcctcggcggccgcagcacaattcaagcggcgcttccccgaggagggtccggcacgactcccctgacccctcaccaccacggcgggcgagacacggctcctccgatatctcctccccgagaagagtccacaacaatagccctgatacatccaggaggactctcggttcctctgatactcagcaactccgtcgggcacggcacgactcacccgacctcgcccctaacgtaacctatagtttaccaaggaccaaatccggaaaagccccagaaagggcctcgtctaaaaccagcccccattggaaggagagcggcgcctctcatctcagttttcccaagaatagcaagtacgaatatgacccagacatatcgcctccgcgaaagaaacaggccaagagtcactttggtgacaagaagcaattggattccaagggcgactgtcagaaggccactgactccgacctctccagtcccaggcacaaacaatcgcccggccaccaagactcggactcagacttatcccccccacggaaccgccctcggcatagaagttctgacagcgatttgagtccccccaggaggcgccaaagaacaaaaagctctgatagtgacctatctccacctcggagaagtcagccccccgggaaaaaggcggcacacatgtatagcggtgctaagaccgggctggttctgacagatattcaacgagagcaacaagaactgaaggaacaagaccaggaaacaatggcgtttgaggctgagttccaatacgccgagacagtatttagagataagtccggacgtaagaggaatcttaaactggagcggctggaacagcggcgaaaggccgaaaaagactccgaacgcgacgagctgtacgctcagtgggggaagggtctggcgcagtccaggcagcaacagcaaaatgtcgaggacgctatgaaggagatgcagaaacccctggcacggtacatagacgacgaagaccttgaccgaatgcttcgcgaacaggagcgcgagggcgaccctatggccaatttcattaagaagaacaaagctaaggagaataagaacaagaaggttagaccaagatattccgggcccgcccctccgcccaaccgttttaacatttggcctgggtatcggtgggacggcgtggaccgttccaacggctttgagcagaagaggttcgctcgcctggccagcaaaaaggcagtcgaggaactagcatataagtggtcagtggaagacatgtag

SEQ ID NO: 225365 - DNA, 1860 bp, Artificial Sequence
  derived and/or modified sequence
atggccgcagccccacctctctccaaggcagagtacctcaagaggtacctgagcggtgcggatgcgggagtggatcgcggttccgagtctggtcgtaagaggaggaaaaaacggcctaagcccggtggagcaggtggcaagggaatgagaatcgtggatgatgatgtgagctggactgccatctccaccactaagttggaaaaagaggaagaggaagacgacggagacctgcccgttgtggcagaatttgtggacgagagacccgaggaagtgaagcagatggaggccttccgctccagcgcaaagtggaagctgctcgggggacacaatgaagacctcccaagtaacagacatttcagacatgacacgccagactccagccccagacgggtcagacatgggacgcctgacccaagccctcgtaaggatagacatgatactccagacccatctccaaggagggctcgtcacgacactcctgacccttctcccttgaggggagcgcgtcatgattctgacacgtctcctcctagacggatcagacatgactctagcgatacgtcaccccctaggcgggctaggcatgactcccctgatccttctcctcccaggagaccgcagcataacagttctggagctagtccgagaagagtgcggcacgattcccctgacccaagccctccaaggcgggcaaggcacggctccagtgatatatcttcccccagacgcgtccataacaattctccagacacgtcccgccgaactttgggtagcagtgatacccaacaacttaggagggccagacacgactcacctgacctcgcccctaatgtgacatactccctgccgagaactaaatcaggaaaagcacccgagcgagcctccagcaaaacatctccccactggaaggagagcggagcaagccaccttagtttccccaaaaactctaagtacgagtatgacccagatatctctccccctaggaaaaaacaggctaagagtcacttcggggataaaaaacagctggactccaagggagattgtcagaaagcaacagattcagacctgtcatcgccaagacacaagcaatctcccggacatcaggattcagattctgatctgagtccccctcgcaataggccccgacaccgctctagcgatagtgatttgagtcccccacggagaaggcaacgaacaaaaagttccgacagcgacctgtccccaccacggagaagccagccccctgggaagaaagctgcccacatgtatagcggcgcaaagacgggcctggtgctcaccgatattcagcgagagcaacaggagcttaaagagcaagaccaggagacgatggcattcgaggccgaatttcagtacgcagaaactgtctttcgagataagtcaggccgtaagaggaaccttaagttggagcgcctggaacaaagaagaaaagccgaaaaggactccgaaagggatgagctgtacgctcagtggggtaaagggttggcacagagtcgccagcaacagcagaatgtcgaagatgctatgaaggagatgcagaaacctctggcgagatatatcgacgatgaggacctggacaggatgctgagggaacaagagcgcgaaggcgacccaatggccaacttcatcaagaagaacaaggcaaaggaaaacaagaataaaaaggtccggccaagatacagcggtccagctcctccacccaataggttcaatatatggcccggttaccgatgggacggtgttgatcgaagcaatggctttgaacagaagcggtttgcacgcttggcatctaaaaaagccgtcgaggaactggcttacaaatggtcggttgaagacatgtag

SEQ ID NO: 225366 - DNA, 2196 bp, Artificial Sequence
  derived and/or modified sequence
cgtctctctgcccccgccgctgccatggcggcagctccgccgctttccaaggccgagtatctgaagcgttacttgtccggggcagatgccggcgtcgaccggggatctgagtccggtcgcaagcgtcgcaaaaagcggccgaagcctggcggggccggcggcaagggaatgcggattgtggatgatgatgtgagctggacagctatctccacaaccaaactagaaaaggaggaagaggaagatgatggagatttgcctgtggtggcagagtttgtggatgagcggccagaagaggtaaagcagatggaggcctttcgttccagtgccaaatggaagcttctgggaggccacaacgaagacctaccctcaaacagacattttcgtcacgataccccggattcatctcctaggagggtccgtcatggtaccccagatccatctcctaggaaggaccgtcatgacaccccggatccatctcctaggagggcccgtcatgacaccccggatccttctcccctcagaggggctcgtcatgactcagacacatctcctcccaggaggatccgtcatgactcctcagacacttcacccccaaggagggcccgtcatgattctccagatccttctcccccaaggaggcctcagcataattcttcaggtgcatctcctaggagagtccgtcatgattcaccagatccctctcctcctaggcgagcccgtcatggttcctcagatatctcttcccccagaagggtccataacaactcccctgacacatctaggaggactcttggctcttcagacacacagcaactcagaagggcccgtcatgactcccctgatttggctcctaatgtcacttattccctgcccagaaccaaaagtggtaaagccccagaaagagcctctagcaagacttctccacattggaaggagtcaggagcctcccatttgtcattcccaaagaacagcaaatatgagtatgaccctgacatctctcctccacgaaaaaagcaagcaaaatcccattttggagacaagaagcagcttgattccaaaggtgactgccagaaagcaactgattcagacctttcttctccacggcataaacaaagtccagggcaccaggattctgattcagatctgtcacctccacggaatagacctagacaccggagctctgattctgacctctctccaccaaggaggagacagaggaccaaatcttctgattctgacctgtccccgcctcgaaggagtcagcctcctggaaagaaggctgcacacatgtattctggggctaaaactgggttggtgttaactgacatacagcgagaacagcaggagctcaaggaacaggatcaagaaaccatggcatttgaagctgaatttcaatatgctgaaaccgtatttcgagataagtctggtcgtaagaggaatttgaaactcgaacgtttagagcaaaggaggaaagcagaaaaggactcagagagagatgagctgtatgcccagtggggaaaagggcttgcccagagccggcaacagcaacaaaatgtggaggatgcaatgaaagagatgcaaaagcctctggcccgctatattgatgacgaagatctggataggatgctaagagaacaggaaagagagggggaccctatggccaacttcatcaagaagaataaggccaaggagaacaagaataaaaaagtgagacctcgctacagtggtccagcacctcctcccaacagatttaatatctggcctggatatcgctgggacggagtggacagatccaatggatttgaacagaagcgctttgccaggcttgccagcaagaaggcagtggaggaacttgcctacaaatggagtgttgaggatatgtaactttcctgaggctgtgggggtggctgggctgtggtagtgggcataggcagcgagatatccagtggtaacagttgtctgtgctaataattggagcccacacagaccagcaacttgttgaatgccagttttgaccacagaagaatattcgagacctgatgtttggactgaggtacctgtacttcttgggtgtgacagcaccggctgttgctggctttcagaggaagcattgatttctcattgaccagggtttgttcttggtagggtttttctttttcttttttaaataaacatgtatttatttttttaaaatta

SEQ ID NO: 225367 - protein, 645 aa, Artificial Sequence
  derived and/or modified sequence
MASLLQDQLTTDQDLLLMQEGMPMRKVRSKSWKKLRYFRLQNDGMTVWHARQARGSAKPSFSISDVETIRNGHDSELLRSLAEELPLEQGFTIVFHGRRSNLDLMANSVEEAQIWMRGLQLLVDLVTSMDHQERLDQWLSDWFQRGDKNQDGKMSFQEVQRLLHLMNVEMDQEYAFSLFQAADTSQSGTLEGEEFVQFYKALTKRAEVQELFESFSADGQKLTLLEFLDFLQEEQKERDCTSELALELIDRYEPSDSGKLRHVLSMDGFLSYLCSKDGDIFNPACLPIYQDMTQPLNHYFICSSHNTYLVGDQLCGQSSVEGYIRALKRGCRCVEVDVWDGPSGEPVVYHGHTLTSRILFKDVVATVAQYAFQTSDYPVILSLETHCSWEQQQTMARHLTEILGEQLLSTTLDGVLPTQLPSPEELRRKILVKGKKLTLEEDLEYEEEEAEPELEESELALESQFETEPEPQEQNLQNKDKKKKSKPILCPALSSLVIYLKSVSFRSFTHSKEHYHFYEISSFSETKAKRLIKEAGNEFVQHNTWQLSRVYPSGLRTDSSNYNPQELWNAGCQMVAMNMQTAGLEMDICDGHFRQNGGCGYVLKPDFLRDIQSSFHPEKPISPFKAQTLSIPYRHLQLIFPINSV

SEQ ID NO: 225368 - protein, 762 aa, Artificial Sequence
  derived and/or modified sequence
MASLLQDQLTTDQDLLLMQEGMPMRKVRSKSWKKLRYFRLQNDGMTVWHARQARGSAKPSFSISDVETIRNGHDSELLRSLAEELPLEQGFTIVFHGRRSNLDLMANSVEEAQIWMRGLQLLVDLVTSMDHQERLDQWLSDWFQRGDKNQDGKMSFQEVQRLLHLMNVEMDQEYAFSLFQAADTSQSGTLEGEEFVQFYKALTKRAEVQELFESFSADGQKLTLLEFLDFLQEEQKERDCTSELALELIDRYEPSDSGKLRHVLSMDGFLSYLCSKDGDIFNPACLPIYQDMTQPLNHYFICSSHNTYLVGDQLCGQSSVEGYIRALKRGCRCVEVDVWDGPSGEPVVYHGHTLTSRILFKDVVATVAQYAFQTSDYPVILSLETHCSWEQQQTMARHLTEILGEQLLSTTLDGVLPTQLPSPEELRRKILVKGKKLTLEEDLEYEEEEAEPELEESELALESQFETEPEPQEQNLQNKDKKKKSKPILCPALSSLVIYLKSVSFRSFTHSKEHYHFYEISSFSETKAKRLIKEAGNEFVQHNTWQLSRVYPSGLRTDSSNYNPQELWNAGCQMVAMNMQTAGLEMDICDGHFRQNGGCGYVLKPDFLRDIQSSFHPEKPISPFKAQTLLIQVISGQQLPKVDKTKEGSIVDPLVKVQIFGVRLDTARQETNYVENNGFNPYWGQTLCFRVLVPELAMLRFVVMDYDWKSRNDFIGQYTLPWTCMQQGYRHIHLLSKDGISLRPASIFVYICIQEGLEGDES

SEQ ID NO: 225369 - protein, 111 aa, Artificial Sequence
  derived and/or modified sequence
  misc_feature (1)..(1): Xaa can be any naturally occurring amino acid
XPLVKVQIFGVRLDTARQETNYVENNGFNPYWGQTLCFRVLVPELAMLRFVVMDYDWKSRNDFIGQYTLPWTCMQQGYRHIHLLSKDGISLRPASIFVYICIQEGLEGDES

SEQ ID NO: 225370 - DNA, 2289 bp, Artificial Sequence
  derived and/or modified sequence
atggccagcctgctgcaggaccagctgaccaccgaccaggacctgctgctgatgcaggagggcatgcccatgagaaaggtgagaagcaagagctggaagaagctgagatacttcagactgcagaacgacggcatgaccgtgtggcacgccagacaggccagaggcagcgccaagcccagcttcagcatcagcgacgtggagaccatcagaaacggccacgacagcgagctgctgagaagcctggccgaggagctgcccctggagcagggcttcaccatcgtgttccacggcagaagaagcaacctggacctgatggccaacagcgtggaggaggcccagatctggatgagaggcctgcagctgctggtggacctggtgaccagcatggaccaccaggagagactggaccagtggctgagcgactggttccagagaggcgacaagaaccaggacggcaagatgagcttccaggaggtgcagagactgctgcacctgatgaacgtggagatggaccaggagtacgccttcagcctgttccaggccgccgacaccagccagagcggcaccctggagggcgaggagttcgtgcagttctacaaggccctgaccaagagagccgaggtgcaggagctgttcgagagcttcagcgccgacggccagaagctgaccctgctggagttcctggacttcctgcaggaggagcagaaggagagagactgcaccagcgagctggccctggagctgatcgacagatacgagcccagcgacagcggcaagctgagacacgtgctgagcatggacggcttcctgagctacctgtgcagcaaggacggcgacatcttcaaccccgcctgcctgcccatctaccaggacatgacccagcccctgaaccactacttcatctgcagcagccacaacacctacctggtgggcgaccagctgtgcggccagagcagcgtggagggctacatcagagccctgaagagaggctgcagatgcgtggaggtggacgtgtgggacggccccagcggcgagcccgtggtgtaccacggccacaccctgaccagcagaatcctgttcaaggacgtggtggccaccgtggcccagtacgccttccagaccagcgactaccccgtgatcctgagcctggagacccactgcagctgggagcagcagcagaccatggccagacacctgaccgagatcctgggcgagcagctgctgagcaccaccctggacggcgtgctgcccacccagctgcccagccccgaggagctgagaagaaagatcctggtgaagggcaagaagctgaccctggaggaggacctggagtacgaggaggaggaggccgagcccgagctggaggagagcgagctggccctggagagccagttcgagaccgagcccgagccccaggagcagaacctgcagaacaaggacaagaagaagaagagcaagcccatcctgtgccccgccctgagcagcctggtgatctacctgaagagcgtgagcttcagaagcttcacccacagcaaggagcactaccacttctacgagatcagcagcttcagcgagaccaaggccaagagactgatcaaggaggccggcaacgagttcgtgcagcacaacacctggcagctgagcagagtgtaccccagcggcctgagaaccgacagcagcaactacaacccccaggagctgtggaacgccggctgccagatggtggccatgaacatgcagaccgccggcctggagatggacatctgcgacggccacttcagacagaacggcggctgcggctacgtgctgaagcccgacttcctgagagacatccagagcagcttccaccccgagaagcccatcagccccttcaaggcccagaccctgctgatccaggtgatcagcggccagcagctgcccaaggtggacaagaccaaggagggcagcatcgtggaccccctggtgaaggtgcagatcttcggcgtgagactggacaccgccagacaggagaccaactacgtggagaacaacggcttcaacccctactggggccagaccctgtgcttcagagtgctggtgcccgagctggccatgctgagattcgtggtgatggactacgactggaagagcagaaacgacttcatcggccagtacaccctgccctggacctgcatgcagcagggctacagacacatccacctgctgagcaaggacggcatcagcctgagacccgccagcatcttcgtgtacatctgcatccaggagggcctggagggcgacgagagctag

SEQ ID NO: 225371 - DNA, 336 bp, Artificial Sequence
  derived and/or modified sequence
tgacccctggtgaaggtgcagatcttcggcgtgagactggacaccgccagacaggagaccaactacgtggagaacaacggcttcaacccctactggggccagaccctgtgcttcagagtgctggtgcccgagctggccatgctgagattcgtggtgatggactacgactggaagagcagaaacgacttcatcggccagtacaccctgccctggacctgcatgcagcagggctacagacacatccacctgctgagcaaggacggcatcagcctgagacccgccagcatcttcgtgtacatctgcatccaggagggcctggagggcgacgagagctag

SEQ ID NO: 225372 - DNA, 1938 bp, Artificial Sequence
  derived and/or modified sequence
atggcctcactgttgcaggatcagctgacaacagatcaggacctgctcctgatgcaagagggtatgcccatgcgcaaggttaggtctaagtcgtggaagaagctgaggtactttcgccttcagaatgacggcatgactgtgtggcacgcccggcaggcccgcgggagcgccaaaccaagctttagcatctccgatgtcgagacaattagaaacgggcacgatagtgaactgctgcggagccttgcagaggagctgcccctggagcaagggtttaccattgtcttccacggacgacgcagcaacctggacttgatggcaaatagtgtcgaggaagcccagatctggatgcgcggactgcagctgctggtggacctggtgacctctatggaccatcaggagaggcttgatcagtggctgagcgattggttccagcgtggggataagaatcaggacgggaaaatgtcgtttcaagaagtgcagcggttattgcatctgatgaatgttgagatggaccaagagtatgctttctccctctttcaggctgccgatacaagtcagtctggaaccttagagggagaagagttcgttcagttttacaaggctttaactaagagagccgaagtgcaagagctgtttgagtccttttctgccgatggccaaaaactcacactgcttgaattcctggacttccttcaggaagagcagaaggaacgagattgcacctctgagcttgccttggagctaatcgatagatatgaaccttccgacagcgggaagctcaggcacgtgttgtccatggatgggttcctgtcatacctatgcagcaaggacggtgatattttcaaccccgcatgccttcctatttaccaggatatgacacagccactaaaccactatttcatctgcagcagccacaatacatatctagtcggggaccagctgtgcggacaatcctctgtcgagggttatattcgtgccctgaagcgtggctgtcgatgtgtggaggtcgacgtttgggacggtccctcgggagaaccagtggtctaccacggtcataccctcaccagcagaatcctattcaaagacgtggtcgcaacggtggcacaatatgccttccagacaagcgattaccctgtgatactatcattggaaacgcactgttcttgggagcagcaacaaacaatggctcggcacctcaccgagatactcggtgagcagctgttgtcaacaactcttgatggtgtcctgcccactcagctgccatcccccgaggagctgagacgaaaaattctggtcaagggaaaaaagttaaccttagaagaggatttagaatatgaggaggaggaagctgaacctgagctggaggagtctgaactcgccctggagtctcagttcgagaccgaaccagagccccaagagcagaatttacagaataaggacaaaaaaaaaaagtccaagcctattctctgccccgcgctgtcttctcttgtgatctatttaaaatcggtatcatttcgaagctttacccattctaaagaacactaccatttttatgagatctcttctttctccgagaccaaggcaaaacggctcattaaagaggccgggaacgaatttgtccagcacaacacctggcagctgtctcgggtttaccctagcggactccggaccgactcgagtaattacaatccccaggaactctggaacgccggatgtcagatggtagccatgaatatgcagactgcagggcttgaaatggacatttgcgacggccattttagacaaaacggcgggtgcggatatgtcctcaagcccgattttcttagagacattcagagctcgtttcacccagagaagcccatttctcccttcaaggctcaaactttgtctattccataccggcacctccaacttatcttccctatcaatagcgtgtag

SEQ ID NO: 225373 - DNA, 2289 bp, Artificial Sequence
  derived and/or modified sequence
atggccagcctgcttcaggatcagctgacgaccgaccaagatctactgctaatgcaggagggcatgccaatgcggaaggtacgctctaaaagctggaagaaactgcgatatttcaggctgcagaacgacgggatgacagtgtggcacgcccggcaagcccgtggcagtgcaaagccaagtttcagtatctctgacgtcgagacaattcgtaatgggcacgactctgagctcctgcgcagccttgctgaagagcttcctctcgagcagggatttaccatcgtgtttcacgggcgtcgctccaatttggatttgatggctaattccgttgaggaggctcaaatctggatgcgtggtttgcagctattggtggatctggtgacatctatggatcaccaggagagacttgaccaatggctctctgactggttccagagaggcgacaagaaccaagacggcaagatgagttttcaggaagtgcagagattgctgcatctgatgaacgtagagatggaccaggaatacgcgttttctctctttcaagccgccgacacgtcccaatccgggactcttgagggcgaagagtttgtccagttttataaggccttgacaaagcgcgcggaggttcaagaactgtttgagtcattctcagcagatggacagaagctgacattactggagttcttggatttccttcaagaagaacagaaagagagggattgcacatcagagctcgcgttggaattaatcgatcgctatgagccctctgattccggcaaactccgccacgtgctcagtatggacggttttttgtcttacctatgctcaaaagacggagacatcttcaatcctgcctgcctgcctatctaccaagacatgactcagcccctgaaccactacttcatctgcagttctcataatacctacctggtcggggaccagctttgtggtcagtcgagtgtagaggggtacatccgggctttgaagagagggtgcagatgtgtggaggtggacgtgtgggacggaccctctggggaaccggtggtctaccacggccataccctaacctcacgcattttgttcaaagatgtcgtggccaccgttgcgcaatacgccttccagacttctgactatcccgtaatcttatctcttgaaacgcattgctcttgggagcagcagcagacaatggcaagacatttgactgaaatactgggtgagcagctgcttagcaccacactggatggagtgcttccaacgcaactgccttcaccagaggaactaagaagaaagatactggtgaagggcaagaagctgacacttgaggaggatcttgaatacgaggaagaggaggccgagcccgaactcgaagaatccgagctcgctctagagagccagtttgaaactgagcccgagccacaagagcagaacctgcaaaataaggacaaaaaaaaaaaatcaaaaccgattctgtgtcccgccctatcctccctggtaatctatctgaagtctgtttctttcaggtcatttactcacagcaaagaacattatcacttttacgaaatcagtagcttctccgaaacgaaggccaaacggcttatcaaggaagccggcaatgagttcgtccaacacaacacctggcagctttcaagggtatacccatctggcctccgcactgactccagcaactacaatccccaggagctatggaatgcgggctgccagatggtcgccatgaacatgcaaacagctggcttggaaatggatatatgtgacggacacttccgccaaaatggcggatgtgggtacgtcctcaaacccgacttcctgcgggacatacagtcttcgttccaccctgagaaacccatttcaccattcaaggctcagaccctgctcattcaggttattagcggacagcaactgcctaaggttgacaagacaaaagaggggtcaatcgttgatcccctcgttaaagtgcagatttttggggtgagactggatacagccagacaagaaaccaattacgtggagaataatggcttcaatccctattgggggcagacactgtgctttcgggtgcttgtgcctgaactggccatgctcagatttgtggttatggactatgattggaagtctcggaacgatttcatcggccaatataccctgccctggacatgtatgcagcagggatatcgtcacattcatctgcttagtaaagatgggattagcctgcgccccgcatctatatttgtgtatatttgcatccaagaagggcttgagggggatgagtcctag

SEQ ID NO: 225374 - DNA, 2289 bp, Artificial Sequence
  derived and/or modified sequence
atggcttcgctgctgcaggaccagcttacaaccgatcaggacttgctcctgatgcaagaggggatgcctatgaggaaggtacggtccaagtcctggaagaagttgcggtatttcaggctccaaaatgatggcatgactgtctggcacgcccgacaggcccggggatccgccaaacctagttttagcatcagtgatgtagagactatcagaaacggtcacgactcagagctgctacggtcgctggcggaggagctgccactcgaacagggtttcactatagtgttccacggtagaagatctaatcttgaccttatggctaatagcgttgaagaggctcagatatggatgcgaggtctccagctgctagtcgatttagtgactagcatggaccaccaggaacgactcgatcagtggctgtcggattggtttcagcgcggcgataaaaaccaggacggtaaaatgagcttccaagaagtgcagcggctgctccatctaatgaacgtcgagatggaccaggaatacgcatttagtttgttccaagctgcggacacatcacagagtggtactctcgagggtgaagagttcgttcaattctacaaagctttgacgaagagagccgaggtgcaagaactctttgagagcttcagtgctgatggccaaaagctgacgctgcttgagttcctggacttccttcaggaggagcagaaggaacgcgactgcacctccgaactggctctggaactgatcgatcggtatgagccatccgactccggcaagcttagacacgtgctcagcatggacggatttctatcttacctctgttctaaagacggagatatatttaacccagcgtgcctcccaatctaccaggatatgactcagcctctgaatcactacttcatttgcagctcccacaatacctatttggtgggtgaccagttgtgcggccaatcctctgtcgagggatacatcagagcactgaagcggggatgtcgctgtgtggaggttgacgtgtgggacggaccttcgggggagcctgtggtatatcatggccacacccttacatcgaggatcctctttaaagacgtggtcgccaccgtcgcccagtacgcatttcagacgagcgattatccagttattttgagtctggagactcattgctcctgggagcagcagcaaaccatggcaagacacctgaccgagatactcggagagcagctgttgagcaccacattggatggagtgctcccaacccaacttcctagccccgaagagcttaggcgaaaaattctagtcaaggggaaaaaactgaccctcgaggaggaccttgagtatgaagaagaggaagcggaacccgagttggaggaatctgagctggctctcgagtcgcagtttgagacagaacctgaaccccaggagcagaacctacagaacaaagacaagaaaaaaaaatcaaaacccatcctttgtccagcactgagttctttagtgatttacctcaagtcagtgtcgttcagatcatttactcattccaaagaacactatcatttttacgaaatctcttctttttccgaaactaaggccaaaagactcatcaaggaggcgggcaacgaattcgtacaacacaacacttggcagttatcacgggtctacccatctggactgcgtacagacagcagcaattataatccacaggagctctggaacgcaggctgtcaaatggttgctatgaatatgcagacagcaggtttggagatggatatctgcgatggccactttaggcagaatggcggatgcggttacgtgctgaagcccgattttcttcgggatattcagagcagttttcatcctgaaaagcctatatccccttttaaggcccagactttactgatccaagtaatcagtggccagcagctgcccaaagtcgacaagaccaaggaagggtccatcgttgacccactcgtcaaagtccagatcttcggggttcgtttggatacagcccggcaggaaacgaattatgtggagaataatgggtttaatccctactgggggcaaacactctgttttcgggtcttagtgccggagctggccatgctgaggtttgtggtgatggattacgattggaagagtcggaatgatttcatagggcagtacacactgccgtggacttgcatgcagcagggctaccggcatatccacctactatcaaaagacggaatatccctccgccctgcaagtatttttgtgtacatctgcattcaagagggactcgaaggagatgagagttag

SEQ ID NO: 225375 - DNA, 336 bp, Artificial Sequence
  derived and/or modified sequence
tgaccgctggtgaaagtgcagatctttggagtacggttggacacagctaggcaggagaccaactacgtggagaataacggcttcaacccatattggggccagactctatgttttagggtcctggtgcccgagctagccatgctgagattcgtggttatggactatgattggaagtctagaaatgattttatcggtcagtatacactcccatggacttgcatgcagcagggatacaggcacatacatctcttaagtaaggatggcatctctttacgtcccgcttctatcttcgtgtatatctgtattcaggagggtctggagggagatgaatcctag

SEQ ID NO: 225376 - DNA, 1938 bp, Artificial Sequence
  derived and/or modified sequence
atggccagcctgctgcaggaccagctgaccacagaccaggacctgctgctgatgcaggagggcatgcccatgaggaaggtgcgcagcaagtcctggaagaagctgcgctacttccggctgcagaatgatggcatgacagtgtggcacgcccggcaggcccggggcagcgccaagcccagcttcagcatcagtgatgtggagaccatcagaaatggacatgattctgagctgctgcggagcctggccgaggagctgcccctggagcagggcttcaccatcgtgttccacggccgccgcagcaacctggacctgatggccaacagcgtggaggaggcccagatctggatgaggggcctgcagctgctggtggacctggtgacctccatggaccaccaggagcggctggaccagtggctgagtgactggttccagagaggagacaagaaccaggacggcaagatgtccttccaggaggtgcagaggctgctgcacctgatgaatgtggagatggaccaggagtatgccttcagcctcttccaggccgctgacaccagccagagcggcaccctggagggggaggagtttgtgcagttctacaaggccctgaccaagagagctgaggtgcaggagctgtttgagagcttcagcgcagatggccagaagctgaccctgctggagttcctggacttcctgcaggaggagcagaaggagcgggactgcaccagcgagctggccctggagctgattgacagatatgagcccagcgacagcggcaagctgcggcacgtgctgtccatggatggcttcctgagctacctgtgcagcaaggatggagacatcttcaacccagcctgcctgcccatctaccaggacatgacccagcccctgaaccactacttcatctgcagcagccacaacacctacctggtgggggaccagctgtgtggccagagctctgtggagggctacatccgggccctgaagaggggctgccgctgtgtggaggtggatgtgtgggatggccccagcggggagcctgtggtgtaccacggccacaccctgaccagccgcatcctcttcaaggatgtggtggccaccgtggcccagtatgccttccagaccagtgactaccctgtgatcctgagcctggagacccactgctcctgggagcagcagcagaccatggcccggcacctgacagagatcctgggggagcagctgctgagcaccaccctggatggagtgctgcccacccagctgcccagccctgaggagctgcggaggaagatcctggtgaagggcaagaagctgaccctggaggaggacctggagtatgaggaggaggaggccgagcctgagctggaggagagcgagctggccctggagagccagtttgaaacagagcctgagccccaggagcagaacctgcagaacaaggacaagaagaagaagagcaagcccatcctgtgcccagccctgagcagcctggtgatctacctgaagtctgtgtccttccgctccttcacccacagcaaggagcactaccacttctatgagatcagcagcttcagcgagaccaaggccaagaggctcatcaaggaggccggaaatgaatttgtgcagcacaacacctggcagctgagccgggtgtaccccagcggcctgaggacagacagcagcaactacaacccccaggagctgtggaatgccggctgccagatggtggccatgaacatgcagacagctggcctggagatggacatctgtgatggccacttccggcagaatggaggctgcggctacgtgctgaagccagacttcctgcgggacatccagagcagcttccaccctgagaagcccatcagccccttcaaggcccagaccctgagcatcccctaccgccacctgcagctgatcttccccatcaacagcgtgtag

SEQ ID NO: 225377 - DNA, 2289 bp, Artificial Sequence
  derived and/or modified sequence
atggccagcctgctgcaggaccagctgaccacagaccaggacctgctgctgatgcaggagggcatgcccatgaggaaggtgcgcagcaagtcctggaagaagctgcgctacttccggctgcagaatgatggcatgacagtgtggcacgcccggcaggcccggggcagcgccaagcccagcttcagcatcagtgatgtggagaccatcagaaatggacatgattctgagctgctgcggagcctggccgaggagctgcccctggagcagggcttcaccatcgtgttccacggccgccgcagcaacctggacctgatggccaacagcgtggaggaggcccagatctggatgaggggcctgcagctgctggtggacctggtgacctccatggaccaccaggagcggctggaccagtggctgagtgactggttccagagaggagacaagaaccaggacggcaagatgtccttccaggaggtgcagaggctgctgcacctgatgaatgtggagatggaccaggagtatgccttcagcctcttccaggccgctgacaccagccagagcggcaccctggagggggaggagtttgtgcagttctacaaggccctgaccaagagagctgaggtgcaggagctgtttgagagcttcagcgcagatggccagaagctgaccctgctggagttcctggacttcctgcaggaggagcagaaggagcgggactgcaccagcgagctggccctggagctgattgacagatatgagcccagcgacagcggcaagctgcggcacgtgctgtccatggatggcttcctgagctacctgtgcagcaaggatggagacatcttcaacccagcctgcctgcccatctaccaggacatgacccagcccctgaaccactacttcatctgcagcagccacaacacctacctggtgggggaccagctgtgtggccagagctctgtggagggctacatccgggccctgaagaggggctgccgctgtgtggaggtggatgtgtgggatggccccagcggggagcctgtggtgtaccacggccacaccctgaccagccgcatcctcttcaaggatgtggtggccaccgtggcccagtatgccttccagaccagtgactaccctgtgatcctgagcctggagacccactgctcctgggagcagcagcagaccatggcccggcacctgacagagatcctgggggagcagctgctgagcaccaccctggatggagtgctgcccacccagctgcccagccctgaggagctgcggaggaagatcctggtgaagggcaagaagctgaccctggaggaggacctggagtatgaggaggaggaggccgagcctgagctggaggagagcgagctggccctggagagccagtttgaaacagagcctgagccccaggagcagaacctgcagaacaaggacaagaagaagaagagcaagcccatcctgtgcccagccctgagcagcctggtgatctacctgaagtctgtgtccttccgctccttcacccacagcaaggagcactaccacttctatgagatcagcagcttcagcgagaccaaggccaagaggctcatcaaggaggccggaaatgaatttgtgcagcacaacacctggcagctgagccgggtgtaccccagcggcctgaggacagacagcagcaactacaacccccaggagctgtggaatgccggctgccagatggtggccatgaacatgcagacagctggcctggagatggacatctgtgatggccacttccggcagaatggaggctgcggctacgtgctgaagccagacttcctgcgggacatccagagcagcttccaccctgagaagcccatcagccccttcaaggcccagaccctgctgatccaggtgatcagcggccagcagctgcccaaggtggacaagaccaaggagggcagcatcgtggaccccctggtgaaggtgcagatcttcggcgtgcggctggacacagcccggcaggagaccaactacgtggagaacaacggcttcaacccctactggggccagaccctgtgcttccgggtgctggtgcctgagctggccatgctgcgctttgtggtgatggactatgactggaagagcagaaatgacttcatcggccagtacaccctgccctggacctgcatgcagcagggctaccgccacatccacctgctgagcaaggatggcatcagcctgcggcctgccagcatctttgtgtacatctgcatccaggagggcctggagggagatgagagctag

SEQ ID NO: 225378 - DNA, 336 bp, Artificial Sequence
  derived and/or modified sequence
tgacccctggtgaaggtgcagatctttggagtgcggctggacacagcccggcaggagaccaactacgtggagaacaacggcttcaacccctactggggccagaccctgtgcttccgggtgctggtgcctgagctggccatgctgcgctttgtggtgatggactatgactggaagagcagaaatgacttcatcggccagtacaccctgccctggacctgcatgcagcagggctaccgccacatccacctgctgagcaaggatggcatcagcctgcggcctgccagcatctttgtgtacatctgcatccaggagggcctggagggagatgagagctag

SEQ ID NO: 225379 - DNA, 1938 bp, Artificial Sequence
  derived and/or modified sequence
atggccagcctgctgcaggaccagctgaccaccgaccaggacctgttgctgatgcaggaaggcatgcctatgcggaaggtaaggtctaaatcctggaaaaaactgagatactttagactccagaacgatggtatgacagtgtggcacgcccgccaggcccgcgggagcgcgaaaccctccttctccatttccgacgtggaaacaattagaaacggacacgattcagagttattgagatctctggccgaagaactaccattagagcagggattcactattgttttccacgggaggcggtcaaatctggacctcatggctaactctgtggaagaggctcagatctggatgagaggcctccaacttctggtggatcttgtaacctccatggaccatcaggagcgactggatcagtggctcagcgactggttccagagaggtgacaagaaccaggatggcaaaatgagctttcaggaggtgcagaggctccttcatctgatgaatgttgagatggatcaggaatatgcttttagcctgtttcaggcagctgacacctcacagtccgggactctcgagggagaggaattcgtgcagttctataaagctctcaccaaaagggcggaagttcaggagctgtttgaaagtttttctgccgacggtcagaagctaaccctcctggaattcctggactttttacaagaggagcagaaggaaagagactgcacctcagagcttgcactggagttgattgaccggtacgaaccctcggatagcggtaagctgcgacacgtgttgtccatggacggattcttgagttacttgtgctccaaggatggagatattttcaaccccgcatgcctgccaatatatcaggacatgactcagcctctcaaccattactttatttgttcctcccacaacacctatctagtgggagatcagctgtgtggacagtctagtgtcgagggctacatccgtgcacttaagcgaggatgtaggtgcgtagaggtggatgtttgggatggcccaagcggggagcccgttgtttaccatggccacaccttgacgagtcgaattctctttaaggacgttgtggccaccgtagcccaatacgcttttcagacctccgattatcctgtaattctcagtctcgagacccattgttcctgggagcagcagcagacaatggctagacatctgaccgagattctcggggaacaattactgagcacaacgcttgatggggttctccccacccaacttccatcaccagaggagctgagaaggaagatcctcgtgaagggaaagaaactgaccctggaagaggatctcgagtatgaggaagaagaagccgagccagagttggaggagagcgagttagctctcgaatcccaatttgagacagagccagaaccgcaggagcagaatcttcagaacaaagataagaagaagaagtcaaagccaatcctttgtcccgctctatcctcactcgttatttacttaaaaagcgtgtcctttcggtcttttacgcactccaaagagcattatcacttttacgaaatttcttctttcagtgagactaaggctaagcggttgatcaaagaagctggcaatgaatttgtgcaacacaacacctggcagctttcaagggtctacccctccggtcttcgaacagatagcagtaattacaacccacaggaactctggaatgctggatgccaaatggtggctatgaatatgcagacagctgggctcgagatggatatctgcgacggccactttcggcagaatggcggatgtgggtatgtgctaaagcctgacttccttcgggatatacagagcagcttccaccctgaaaaaccaatcagtccttttaaggctcagaccctgagtatcccttataggcaccttcaactcatcttcccaatcaactctgtatag

SEQ ID NO: 225380 - DNA, 2289 bp, Artificial Sequence
  derived and/or modified sequence
atggccagcctgctgcaggaccagctgaccaccgaccaggacctgctgctgatgcaggagggaatgccgatgaggaaggtccgatctaagtcctggaagaaactgcggtattttcgtttacagaacgacggtatgaccgtgtggcatgcccggcaggctaggggatctgccaagccctccttttcaatctcagatgtggaaacaatcagaaatgggcacgatagcgaactgctacgctccctcgctgaagaattgcccttggaacagggattcacaattgtgttccatggacggaggtctaatctggatctgatggcaaactctgtcgaggaagcccagatttggatgaggggacttcagctgctggtggacctggtaacgagtatggaccaccaggaacggcttgatcagtggctgtctgactggttccaaagaggagataagaaccaggacggcaaaatgagctttcaagaggttcaacgcctgttacaccttatgaatgtcgagatggaccaggagtatgccttcagcctctttcaggctgcagataccagccagtccgggactctggagggggaggaatttgtgcagttctacaaggcgctgaccaagcgcgctgaggtgcaggagctgttcgagtctttttctgccgacggtcaaaagctcaccttgctagaattcctcgactttctgcaagaggagcagaaggaacgggattgtacatcagaactcgcgctggaactgatcgacagatacgaaccaagcgattcagggaaactccggcatgtgctcagcatggatggtttcctcagttacctgtgctccaaggatggcgacatttttaaccccgcctgcctacccatctatcaggatatgactcagccactgaaccactacttcatttgttcctcccacaatacatacctagtgggtgatcaattgtgtggccagtcgagtgtagaggggtacatccgtgcattgaagagaggttgtcggtgtgtggaagtggacgtgtgggatggtccttcaggagaacccgtagtgtatcacggacatacgctcacttctagaatcttgttcaaggacgtggtggctaccgtagctcagtacgctttccagacatccgactaccccgtgatcctttctctcgagacccattgtagttgggagcagcagcagaccatggcacgacacctgaccgagattttgggcgagcagctgctgtctacaacgctcgacggggttctgccaacacagctgccaagcccggaggagcttcggcgcaagatcctcgtgaaggggaaaaagctgactctggaagaggatcttgaatatgaggaggaggaggcagagcctgagctggaagaaagcgaactagcccttgaatcccagttcgagacggaaccagaaccgcaggagcagaatctgcaaaacaaagataaaaaaaagaagagcaagcccatcttatgtcccgcgttatcttctctcgtgatttacttaaagagcgtgagttttcgctcgttcactcacagcaaagaacactatcacttttacgagatctcttccttcagcgagacgaaggccaagagactgataaaggaagccggaaatgagtttgtacaacacaatacctggcagctgtcccgcgtatacccttccgggctgagaacagacagttccaattataacccccaagagttatggaacgctgggtgccagatggtcgccatgaacatgcaaaccgctggactggaaatggacatctgtgacggccatttcaggcagaatggggggtgtggctatgtgttgaagcctgacttcttgagagacatccagtcctcttttcaccccgagaagcctatctctcccttcaaggctcagacgctcttgatccaggtgatctccggccagcagctgccaaaagtcgacaaaacgaaggagggcagcatagtggatcccctggtcaaagtgcagatttttggtgtgcgtttggataccgctagacaggagaccaactacgtcgagaataatgggtttaacccctattggggtcagactttgtgttttcgcgttctggtcccagagctcgccatgctacgcttcgtcgtcatggactatgattggaagtcaaggaacgattttattgggcagtataccttgccttggacttgcatgcaacaaggataccgacacatacaccttctgtctaaagacggaatcagcctgagaccagcaagcatttttgtgtatatttgtatccaggagggcctcgaaggcgacgagtcatag

SEQ ID NO: 225381 - DNA, 2289 bp, Artificial Sequence
  derived and/or modified sequence
atggccagcctgctgcaggaccagctgaccaccgaccaggacctgctgctgatgcaggagggtatgcccatgcgaaaggtccgcagtaagtcatggaaaaagctgagatatttccgcttgcagaatgacgggatgactgtttggcacgcaaggcaagcccggggcagcgccaagccttcgttctccatctcagacgtggaaacgatcaggaatggacacgactcagagcttctccgctcccttgccgaagaactccccttagagcaggggtttactatcgtgtttcatgggcgccgcagtaatctggacctcatggcaaacagtgtggaggaggcgcagatttggatgcgggggcttcagctcctcgtcgatctcgtgacttctatggaccaccaggagaggcttgatcagtggttgtcagattggttccaaagaggtgataaaaaccaggacggcaaaatgtcattccaggaggtccagcgcctcctccatctgatgaatgttgaaatggaccaggaatatgcattttctctcttccaagccgctgatacttctcagagcggcaccctggagggtgaagagtttgtgcaattctataaagcgcttaccaagagggccgaagtccaagagttgttcgaatccttttcggctgacggccagaagctcactctgctcgagttcctcgacttcttgcaggaggagcagaaagaaagagattgtacatctgaactggcactggaactcattgaccggtatgaaccgtcagatagtggaaaactcaggcatgtgctttccatggatggctttttgagttacctatgcagtaaggacggcgatattttcaatcctgcatgcctcccaatctaccaggatatgacccagcctctgaaccactattttatctgttcttcccataacacctacctcgtcggcgaccaactgtgtggtcagtcctccgtggagggctacatcagagctctgaagcgcggttgtaggtgcgttgaagtggacgtgtgggatggccccagcggggaaccagtagtctaccatggacatacacttacaagccgcattctgtttaaagacgtcgtcgctaccgtggctcaatacgcttttcagacctcagactaccccgtgattctatcactggaaacacattgctcatgggagcagcagcagacaatggccaggcacctgaccgagatcctgggcgaacagctgctgtctactacacttgacggtgtcttacctacccagcttccaagtcccgaggaactccgacggaagattctagtgaaggggaagaagttgaccctggaggaggatctcgaatacgaagaggaagaggcagagccggagttggaggagtccgagctggcactggagagccagtttgagacggagcccgagccccaggaacaaaacctgcagaataaggacaagaagaaaaagtctaagccaatcctctgccccgctctctcaagtcttgtgatttatctcaaaagcgttagttttagatcgttcacccacagcaaagaacattaccacttctacgagatcagcagctttagcgaaacaaaagcaaaaagacttatcaaagaagcaggtaatgaatttgtgcagcataacacgtggcagttgtctcgagtgtacccatctggtctcagaaccgactcatctaattataatccacaggaactctggaatgccggttgtcaaatggtcgcaatgaatatgcagacagcgggactggaaatggacatctgcgacggccacttccgacagaacggaggctgcggctacgttctgaagccagatttccttcgcgacatacagtcatccttccatcccgaaaagcctattagcccgtttaaggctcagacactgttgattcaagtgatctccggtcaacagctgcccaaggttgataaaactaaagagggctccatcgtcgatcccctcgtcaaggtgcagatattcggtgtcaggctggacacggcacgtcaggaaaccaattatgtagagaacaatgggttcaatccctactggggccaaaccctttgctttagggtgctcgtgcccgagctggcgatgttgcgctttgtggtgatggattatgactggaaaagccgcaatgactttattggtcagtacacccttccctggacctgcatgcagcaaggttacagacatattcacctgctaagcaaagacggcatcagcctcaggcctgccagtatattcgtgtacatctgcatccaggaaggccttgaaggcgatgagtcctag

SEQ ID NO: 225382 - DNA, 336 bp, Artificial Sequence
  derived and/or modified sequence
tgacccctggtgaaggtgcagatcttcggcgtgcggctggacaccgcccgccaggaaacaaactacgtggagaataacggatttaacccgtactggggccaaaccctttgtttccgtgtcctagttccggagttagcgatgctcagatttgtcgtcatggattatgattggaagtcgcgaaatgacttcatcggacagtacactctcccatggacatgtatgcagcagggttaccggcacatccaccttctgagtaaagacggtatctccctgcgacccgctagcattttcgtgtatatctgtattcaggaggggctggaaggtgacgagtcgtag

SEQ ID NO: 225383 - DNA, 1938 bp, Artificial Sequence
  derived and/or modified sequence
atggcctcactgctgcaagaccagctaaccaccgaccaggacctgctcctgatgcaggagggaatgcctatgagaaaggtccggtccaagagctggaaaaagctgcggtactttaggttgcagaacgacgggatgactgtgtggcacgcccgtcaagcaagaggctccgctaagccctctttctccatcagcgacgtcgaaactattagaaacgggcatgattctgaattgttaagatcgttagccgaagaactgcctcttgaacaaggattcactatcgtcttccacggtaggcgatcaaacctggaccttatggctaactccgtcgaagaggcccagatctggatgagaggactgcagctcctcgtggatttagttacctctatggaccaccaggagagactggatcaatggctctcagactggttccagcgaggagacaagaaccaggacggcaagatgagctttcaggaggtccagaggttattgcatcttatgaatgtggagatggatcaagaatatgctttttcgctgttccaggctgcagacacctcccagtccggcacacttgagggggaggaatttgtgcagttttataaagccttgacaaaacgggcagaggtccaggaactgttcgaaagcttctctgccgacggtcagaaactaacactactcgagtttctcgatttcctgcaagaggaacagaaagaacgagattgcacttccgagctcgctcttgagctgatcgatcgctacgagccatccgactccggtaaattgcggcatgttctgtctatggacggattcctgtcctatctttgctctaaggacggagacatattcaacccagcttgcctccctatctaccaagacatgacccagccacttaatcactacttcatctgctcctcacacaacacatacttggtgggagatcagctctgcggacaatcaagcgtggaaggatatattagggccctcaaaaggggctgcaggtgtgttgaggttgatgtttgggacgggccaagcggagagccagtagtttaccatggccatacccttacgtccaggatcttatttaaggatgtggtcgcaactgtggcccagtacgcctttcagacttcagactatccggttatcctcagtctggagacccactgttcctgggagcagcagcagaccatggctcgacacctcaccgaaatcctgggggagcagctgttgagtaccaccttagatggagtcttgcctactcagctgccaagtcccgaggagctgcggagaaagattctcgtgaaggggaaaaaactgacactagaggaggacttggagtacgaagaggaagaggccgaacccgagcttgaagaatcagaactggccctggaaagccagtttgagacagagccggaacctcaagaacagaatttacagaacaaagacaaaaaaaaaaagagcaagccaatcctgtgccccgcattgtcctccctagttatctatcttaagagtgtgtctttcagaagcttcacccactccaaagagcattaccacttttacgaaatcagttctttcagcgaaaccaaggcaaagaggcttatcaaagaagcaggcaatgaattcgtgcagcataatacatggcagctgtcgcgggtgtacccatcgggtctccggactgactcatccaattataacccgcaagagctctggaatgcaggatgccagatggtggcaatgaatatgcaaactgccggactggaaatggatatctgcgatggccacttccgccagaatggcggttgcgggtacgttttgaaaccagattttctgcgggatatacagagttcattccaccccgagaaacctattagtccgtttaaagcccagacactgagcattccttacagacatcttcagctgatcttcccgatcaacagtgtttag

SEQ ID NO: 225384 - DNA, 2738 bp, Artificial Sequence
  derived and/or modified sequence
gtagaagaggggaggaaacaagccagtgcaaggggagcaaaagagaaaaggagccaggctgggcttcctgatcccacagcatcgcagagctcgggaggcacagctcacagacacaggaaacacaggactgctattctgctctcctgcccacggtgatctggtgccagctggtggaacagtgggtgatggcgtccctgctgcaagaccagctgaccactgatcaggacttgctgctgatgcaggaaggcatgccgatgcgcaaggtgaggtccaaaagctggaagaagctaagatacttcagacttcagaatgacggcatgacagtctggcatgcacggcaggccaggggcagtgccaagcccagcttctcaatctctgatgtggagacaatacgtaatggccatgattccgagttgctgcgtagcctggcagaggagctccccctggagcagggcttcaccattgtcttccatggccgccgctccaacctggacctgatggccaacagtgttgaggaggcccagatatggatgcgagggctccagctgttggtggatcttgtcaccagcatggaccatcaggagcgcctggaccaatggctgagcgattggtttcaacgtggagacaaaaatcaggatggtaagatgagtttccaagaagttcagcggttattgcacctaatgaatgtggaaatggaccaagaatatgccttcagtctttttcaggcagcagacacgtcccagtctggaaccctggaaggagaagaattcgtacagttctataaggcattgactaaacgtgctgaggtgcaggaactgtttgaaagtttttcagctgatgggcagaagctgactctgctggaatttttggatttcctccaagaggagcagaaggagagagactgcacctctgagcttgctctggaactcattgaccgctatgaaccttcagacagtggcaaactgcggcatgtgctgagtatggatggcttcctcagctacctctgctctaaggatggagacatcttcaacccagcctgcctccccatctatcaggatatgactcaacccctgaaccactacttcatctgctcttctcataacacctacctagtgggggaccagctttgtggccagagcagcgtcgagggatatatacgggccctgaagcgggggtgccgctgcgtggaggtggatgtatgggatggacctagcggggaacctgtcgtttaccacggacacaccctgacctcccgcatcctgttcaaagatgtcgtggccacagtagcacagtatgccttccagacatcagactacccagtcatcttgtccctggagacccactgcagctgggagcagcagcagaccatggcccgtcatctgactgagatcctgggggagcagctgctgagcaccaccttggatggggtgctgcccactcagctgccctcgcctgaggagcttcggaggaagatcctggtgaaggggaagaagttaacacttgaggaagacctggaatatgaggaagaggaagcagaacctgagttggaagagtcagaattggcgctggagtcccagtttgagactgagcctgagccccaggagcagaaccttcagaataaggacaaaaagaagaaatccaagcccatcttgtgtccagccctctcttccctggttatctacttgaagtctgtctcattccgcagcttcacacattcaaaggagcactaccacttctacgagatatcatctttctctgaaaccaaggccaagcgcctcatcaaggaggctggcaatgagtttgtgcagcacaatacttggcagttaagccgtgtgtatcccagcggcctgaggacagactcttccaactacaacccccaggaactctggaatgcaggctgccagatggtggccatgaatatgcagactgcagggcttgaaatggacatctgtgatgggcatttccgccagaatggcggctgtggctatgtgctgaagccagacttcctgcgtgatatccagagttctttccaccctgagaagcccatcagccctttcaaagcccagactctcttaatccaggtgatcagcggtcagcaactccccaaagtggacaagaccaaagaggggtccattgtggatccactggtgaaagtgcagatctttggcgttcgtctagacacagcacggcaggagaccaactatgtggagaacaatggttttaatccatactgggggcagacactatgtttccgggtgctggtgcctgaacttgccatgctgcgttttgtggtaatggattatgactggaaatcccgaaatgactttattggtcagtacaccctgccttggacctgcatgcaacaaggttaccgccacattcacctgctgtccaaagatggcatcagcctccgcccagcttccatctttgtgtatatctgcatccaggaaggcctggagggggatgagtcctgaggttgcaactagaaattcagaggggcttggaatagagaaacctaaagaagcatcatcccctccatccccaacttcctcaaagcccaaagccaagggaaggataaatcaaggctcaaggcttccccagcaaagattagggaaagagacttgaccccaggactgtactacgactcttaagagaacactgcacagcactcaaagtcccccactggactgcttcctccttagccccactggtataaatacatctctctccaatttggc

SEQ ID NO: 225385 - DNA, 2289 bp, Artificial Sequence
  derived and/or modified sequence
atggctagtctgctgcaggatcaactaacaacggaccaagatcttttgctcatgcaggagggcatgcctatgcgcaaagtacggtcaaagagttggaagaagctcagatattttaggctgcagaacgacggtatgactgtttggcatgcacggcaggcgcgtgggtccgcaaagccctccttcagcatctctgacgtagaaacgataagaaatggtcacgactccgagctgcttcgctcactggcagaggagttacctctggagcagggtttcaccattgtgtttcacgggaggagatcaaacctggacttgatggcaaactctgtcgaggaggctcagatttggatgcgtgggcttcagttgctcgtcgaccttgtcacatctatggatcatcaagaacgcctcgaccagtggctgagcgactggttccaacgcggtgacaaaaaccaagatggcaagatgagctttcaggaggtgcagagactgctgcatctgatgaatgtcgagatggatcaagagtacgcattctcattattccaagccgcagatactagccagagcggcaccttagaaggggaagagtttgttcagttctacaaagcgcttacaaagagggcggaagtccaggagctgttcgagtctttctctgcggacgggcagaaattaaccctgctcgaatttctggatttcctgcaggaggagcagaaggaaagggattgtacgagcgaactcgcccttgagttgattgaccgctatgaaccatcagattccggaaagctccgtcacgtgcttagcatggatggcttcctgtcctacctatgctctaaggatggggatatattcaatcctgcttgcctacccatctaccaggatatgacccagccattgaaccactattttatctgcagttctcataatacataccttgtgggcgaccagctctgtggacagtcttcagttgagggatatattagggcactcaagcgtggttgtcgctgtgtggaagttgatgtctgggacgggccttcaggggagccagtggtgtatcacgggcacaccctcactagtagaattctgttcaaagatgtagtcgccactgtggcccaatatgcattccagactagtgactatccagtgatcctttcattggagacccactgcagctgggagcagcaacagaccatggctaggcacctgacagagatcctgggggagcagctactttcaaccacgctggatggcgtcctccccacgcaacttccgagtccagaagagttgcgacgcaaaatactggtcaaagggaagaagttgaccctggaagaggatctggaatatgaggaggaagaggcagagccagagcttgaggagtccgaattagcactggagtctcagtttgaaacagagccagaaccccaggagcagaacctgcagaacaaagataagaagaaaaagtcaaagccgatactgtgtccagctctgtcaagcctcgtgatctaccttaaaagtgtctctttccggtcgtttactcacagtaaggagcactaccacttttacgagatttcttccttcagcgaaactaaagctaaaagactgatcaaggaggcaggcaacgaattcgttcagcacaacacctggcaactgagtcgggtgtacccatccggactccggaccgactcatctaattataatccgcaagagctgtggaatgcgggatgccagatggtggctatgaacatgcagaccgctggtctcgagatggacatctgcgacggtcattttagacagaatggcggttgtggctacgtgctgaagccagattttctcagagatattcagtcctcattccaccccgagaaaccaatctccccgttcaaagcacaaaccctgctcatccaggtgatctcgggacaacagctacccaaagtcgataagacgaaagagggttccattgtagacccactggttaaggtacagattttcggggtgcgactggacacagcacgtcaagagactaactacgtcgagaacaacggcttcaatccttattggggtcaaacactatgcttccgggttttggtgcctgagctggccatgctgagatttgtcgtaatggactatgactggaagtcccgaaacgatttcatcgggcaatacaccctgccctggacctgcatgcagcaggggtaccggcatatccacctgctgtccaaagatggcataagtttgcggcctgcatcaatcttcgtgtacatctgcattcaagagggcctggagggagacgagtcatag

SEQ ID NO: 225386 - DNA, 2289 bp, Artificial Sequence
  derived and/or modified sequence
atggcaagtctactgcaggaccaactcacaactgaccaggaccttttgctaatgcaggaggggatgccaatgaggaaagtgagaagcaagtcttggaaaaagttgaggtattttaggctgcagaacgatggaatgacggtctggcacgcacgacaagccaggggcagcgccaagcctagctttagcatttccgatgttgagaccattcgaaacggacatgacagcgagttgttaagaagcctggccgaggagttgccactggagcagggattcactatagtcttccacggaaggagaagcaatctcgacctgatggcaaactccgtggaggaggcccagatctggatgcgcggactccagctgctggtcgatctggtgacatccatggatcaccaggagcgactggaccagtggctgagcgattggttccaacggggtgacaagaatcaggatgggaagatgtctttccaggaagttcaacgcctactgcatctgatgaatgtggagatggatcaggagtacgcattcagtttgttccaggccgctgatactagtcagagtggaacgctggagggcgaagaatttgtccaattttataaagccttaacaaagcgggctgaggtacaggagctgtttgagtccttcagtgccgacggacaaaagttaactttactcgagttcctggactttctccaggaggaacagaaagaaagggattgtactagtgagctggccctggagttgatcgaccgatacgagccctccgacagtgggaagttacgtcacgtgttgagtatggatggtttcctgagctatctctgcagcaaggatggtgatatattcaatccggcatgtctgcctatttatcaggacatgacacagcctttgaatcattacttcatctgcagttcccacaacacctatctcgtaggcgaccagctctgcggccaatcttccgttgaggggtatattcgagcccttaaacggggatgccggtgtgtcgaggtggatgtgtgggatggccctagcggcgaacctgttgtctatcacggccacacactgacgtctaggatcctgtttaaagacgtagtggccacagtggcccagtacgcatttcagacgtccgactaccccgtgatcctgagtctggaaacccactgctcttgggaacagcagcagacgatggccaggcatctcacggaaattctgggggaacaactgctcagcacgactttagatggggttttgcctactcaattgccttcgcctgaagagctgcgccgaaagatactcgtgaaaggcaagaagctcacactggaggaggatttggagtatgaggaagaggaggctgaacctgagttagaagagtccgaactggctctggaatctcagttcgaaactgaacccgagccccaagagcagaatctccagaataaggacaagaagaaaaagagcaaacctatactctgcccggctctgtcaagtttagtaatctacctgaagtcagtatcgtttcgctcattcacacactcgaaggagcactaccatttttatgagatctcgtccttttctgaaacaaaggccaagcgcttaatcaaggaagccggaaacgagttcgtgcagcacaatacctggcagctgtccagggtgtaccccagcggcttgagaaccgatagttctaactataatcctcaggagctctggaacgccggttgtcagatggtcgcaatgaacatgcaaacagcaggactagaaatggacatatgcgacggacactttagacagaacggcggatgcggttacgtgctgaagcctgacttcctgcgggacatccagtcctcgttccatcctgagaagcccattagcccctttaaggcccagacacttttgatccaggtgatctcaggccaacagctgcccaaggtcgataaaacgaaagagggaagcatcgtggatccactggtcaaagtgcaaatttttggtgtgaggctcgacaccgctcgacaagagacaaattatgtcgaaaacaatgggtttaatccttactggggccagacgctgtgttttagagttctggtgcccgagctcgccatgctgcgattcgtggtaatggactatgattggaagtcacggaatgattttatcggccaatacactctgccttggacatgcatgcagcaggggtatagacatattcatctattgtccaaggacggaatatctctacgacctgcttccattttcgtctacatctgcatccaagagggactagagggggatgagagttag

SEQ ID NO: 225387 - DNA, 2176 bp, Artificial Sequence
  derived and/or modified sequence
agtcacagcagccagctgctgtagaagaggggaggaaacaagccagtgcaaggggagcaaaagagaaaaggagccaggctgggcttcctgatcccacagcatcgcagagctcgggaggcacagctcacagacacaggaaacacaggactgctattctgctctcctgcccacggtgatctggtgccagctggtggaacagtgggtgatggcgtccctgctgcaagaccagctgaccactgatcaggacttgctgctgatgcaggaaggcatgccgatgcgcaaggtgaggtccaaaagctggaagaagctaagatacttcagacttcagaatgacggcatgacagtctggcatgcacggcaggccaggggcagtgccaagcccagcttctcaatctctgatgtggagacaatacgtaatggccatgattccgagttgctgcgtagcctggcagaggagctccccctggagcagggcttcaccattgtcttccatggccgccgctccaacctggacctgatggccaacagtgttgaggaggcccagatatggatgcgagggctccagctgttggtggatcttgtcaccagcatggaccatcaggagcgcctggaccaatggctgagcgattggtttcaacgtggagacaaaaatcaggatggtaagatgagtttccaagaagttcagcggttattgcacctaatgaatgtggaaatggaccaagaatatgccttcagtctttttcaggcagcagacacgtcccagtctggaaccctggaaggagaagaattcgtacagttctataaggcattgactaaacgtgctgaggtgcaggaactgtttgaaagtttttcagctgatgggcagaagctgactctgctggaatttttggatttcctccaagaggagcagaaggagagagactgcacctctgagcttgctctggaactcattgaccgctatgaaccttcagacagtggcaaactgcggcatgtgctgagtatggatggcttcctcagctacctctgctctaaggatggagacatcttcaacccagcctgcctccccatctatcaggatatgactcaacccctgaaccactacttcatctgctcttctcataacacctacctagtgggggaccagctttgtggccagagcagcgtcgagggatatatacgggccctgaagcgggggtgccgctgcgtggaggtggatgtatgggatggacctagcggggaacctgtcgtttaccacggacacaccctgacctcccgcatcctgttcaaagatgtcgtggccacagtagcacagtatgccttccagacatcagactacccagtcatcttgtccctggagacccactgcagctgggagcagcagcagaccatggcccgtcatctgactgagatcctgggggagcagctgctgagcaccaccttggatggggtgctgcccactcagctgccctcgcctgaggagcttcggaggaagatcctggtgaaggggaagaagttaacacttgaggaagacctggaatatgaggaagaggaagcagaacctgagttggaagagtcagaattggcgctggagtcccagtttgagactgagcctgagccccaggagcagaaccttcagaataaggacaaaaagaagaaatccaagcccatcttgtgtccagccctctcttccctggttatctacttgaagtctgtctcattccgcagcttcacacattcaaaggagcactaccacttctacgagatatcatctttctctgaaaccaaggccaagcgcctcatcaaggaggctggcaatgagtttgtgcagcacaatacttggcagttaagccgtgtgtatcccagcggcctgaggacagactcttccaactacaacccccaggaactctggaatgcaggctgccagatggtggccatgaatatgcagactgcagggcttgaaatggacatctgtgatgggcatttccgccagaatggcggctgtggctatgtgctgaagccagacttcctgcgtgatatccagagttctttccaccctgagaagcccatcagccctttcaaagcccagactctctcaatcccataccgacatctacaactaatctttcccatcaactctgtgtgaaggcaggttgcaactagaaattcagaggggctt

SEQ ID NO: 225388 - DNA, 336 bp, Artificial Sequence
  derived and/or modified sequence
tgaccattggttaaggttcagatcttcggggtcagactcgatacagcaaggcaagagaccaactacgtggagaataatgggtttaatccatactggggccaaacactgtgtttcagggtcttggtgcccgaactggctatgctgaggtttgtggtgatggattatgattggaaatcccggaatgacttcatcggacagtacaccttaccatggacttgcatgcagcagggctatcgccacatacatttgcttagtaaggatgggattagtctgaggcctgccagcattttcgtatatatctgcatccaggagggattagagggagatgagtcctag

SEQ ID NO: 225389 - DNA, 3232 bp, Artificial Sequence
  derived and/or modified sequence
cttctctccccaccccacccccactactccctcacattgaccagtgtcctgggcctttaagagttggatgggctggactggagagagctcacacctctccccttcttactgcttccctccggctataacttgccagtcacagcagccagctgctgtagaagaggggaggaaacaagccagtgcaaggggagcaaaagagaaaaggagccaggctgggcttcctgatcccacagcatcgcagagctcgggaggcacagctcacagacacaggaaacacaggactgctattctgctctcctgcccacggtgatctggtgccagctggtggaacagtgggtgatggcgtccctgctgcaagaccagctgaccactgatcaggacttgctgctgatgcaggaaggcatgccgatgcgcaaggtgaggtccaaaagctggaagaagctaagatacttcagacttcagaatgacggcatgacagtctggcatgcacggcaggccaggggcagtgccaagcccagcttctcaatctctgatgtggagacaatacgtaatggccatgattccgagttgctgcgtagcctggcagaggagctccccctggagcagggcttcaccattgtcttccatggccgccgctccaacctggacctgatggccaacagtgttgaggaggcccagatatggatgcgagggctccagctgttggtggatcttgtcaccagcatggaccatcaggagcgcctggaccaatggctgagcgattggtttcaacgtggagacaaaaatcaggatggtaagatgagtttccaagaagttcagcggttattgcacctaatgaatgtggaaatggaccaagaatatgccttcagtctttttcaggcagcagacacgtcccagtctggaaccctggaaggagaagaattcgtacagttctataaggcattgactaaacgtgctgaggtgcaggaactgtttgaaagtttttcagctgatgggcagaagctgactctgctggaatttttggatttcctccaagaggagcagaaggagagagactgcacctctgagcttgctctggaactcattgaccgctatgaaccttcagacagtggcaaactgcggcatgtgctgagtatggatggcttcctcagctacctctgctctaaggatggagacatcttcaacccagcctgcctccccatctatcaggatatgactcaacccctgaaccactacttcatctgctcttctcataacacctacctagtgggggaccagctttgtggccagagcagcgtcgagggatatatacgggccctgaagcgggggtgccgctgcgtggaggtggatgtatgggatggacctagcggggaacctgtcgtttaccacggacacaccctgacctcccgcatcctgttcaaagatgtcgtggccacagtagcacagtatgccttccagacatcagactacccagtcatcttgtccctggagacccactgcagctgggagcagcagcagaccatggcccgtcatctgactgagatcctgggggagcagctgctgagcaccaccttggatggggtgctgcccactcagctgccctcgcctgaggagcttcggaggaagatcctggtgaaggggaagaagttaacacttgaggaagacctggaatatgaggaagaggaagcagaacctgagttggaagagtcagaattggcgctggagtcccagtttgagactgagcctgagccccaggagcagaaccttcagaataaggacaaaaagaagaaatccaagcccatcttgtgtccagccctctcttccctggttatctacttgaagtctgtctcattccgcagcttcacacattcaaaggagcactaccacttctacgagatatcatctttctctgaaaccaaggccaagcgcctcatcaaggaggctggcaatgagtttgtgcagcacaatacttggcagttaagccgtgtgtatcccagcggcctgaggacagactcttccaactacaacccccaggaactctggaatgcaggctgccagatggtggccatgaatatgcagactgcagggcttgaaatggacatctgtgatgggcatttccgccagaatggcggctgtggctatgtgctgaagccagacttcctgcgtgatatccagagttctttccaccctgagaagcccatcagccctttcaaagcccagactctcttaatccaggtgatcagcggtcagcaactccccaaagtggacaagaccaaagaggggtccattgtggatccactggtgaaagtgcagatctttggcgttcgtctagacacagcacggcaggagaccaactatgtggagaacaatggttttaatccatactgggggcagacactatgtttccgggtgctggtgcctgaacttgccatgctgcgttttgtggtaatggattatgactggaaatcccgaaatgactttattggtcagtacaccctgccttggacctgcatgcaacaaggttaccgccacattcacctgctgtccaaagatggcatcagcctccgcccagcttccatctttgtgtatatctgcatccaggaaggcctggagggggatgagtcctgaggtgggcatttcacgggaagggttggtgtgctggctttagacggggagaaacatctggaaggatgctcgagagaacaaatggaggtggtgaaaatcaagctttggattgtgcattcctaggcacaaaattacctcattcttcctaacaagcaatctgggacctgattttccaccttttttctcttttcttcccttcctttgttttcataagcctttggtatctttcctgcccttttcctttgtgtactctatactggagttcccttcttcctcttgctgtaggctcaatcccataccgacatctacaactaatctttcccatcaactctgtgtgaaggcaggttgcaactagaaattcagaggggcttggaatagagaaacctaaagaagcatcatcccctccatccccaacttcctcaaagcccaaagccaagggaaggataaatcaaggctcaaggcttccccagcaaagattagggaaagagacttgaccccaggactgtactacgactcttaagagaacactgcacagcactcaaagtcccccactggactgcttcctccttagccccactggtataaatacatctctctccaatttggc

SEQ ID NO: 225390 - DNA, 649 bp, Artificial Sequence
  derived and/or modified sequence
tccactggtgaaagtgcagatctttggcgttcgtctagacacagcacggcaggagaccaactatgtggagaacaatggttttaatccatactgggggcagacactatgtttccgggtgctggtgcctgaacttgccatgctgcgttttgtggtaatggattatgactggaaatcccgaaatgactttattggtcagtacaccctgccttggacctgcatgcaacaaggttaccgccacattcacctgctgtccaaagatggcatcagcctccgcccagcttccatctttgtgtatatctgcatccaggaaggcctggagggggatgagtcctgaggctcaatcccataccgacatctacaactaatctttcccatcaactctgtgtgaaggcaggttgcaactagaaattcagaggggcttggaatagagaaacctaaagaagcatcatcccctccatccccaacttcctcaaagcccaaagccaagggaaggataaatcaaggctcaaggcttccccagcaaagattagggaaagagacttgaccccaggactgtactacgactcttaagagaacactgcacagcactcaaagtcccccactggactgcttcctccttagccccactggtataaatacatctctctcc

SEQ ID NO: 225391 - DNA, 1938 bp, Artificial Sequence
  derived and/or modified sequence
atggccagcctgctgcaggaccagctgaccaccgaccaggacctgctgctgatgcaggagggcatgcccatgagaaaggtgagaagcaagagctggaagaagctgagatacttcagactgcagaacgacggcatgaccgtgtggcacgccagacaggccagaggcagcgccaagcccagcttcagcatcagcgacgtggagaccatcagaaacggccacgacagcgagctgctgagaagcctggccgaggagctgcccctggagcagggcttcaccatcgtgttccacggcagaagaagcaacctggacctgatggccaacagcgtggaggaggcccagatctggatgagaggcctgcagctgctggtggacctggtgaccagcatggaccaccaggagagactggaccagtggctgagcgactggttccagagaggcgacaagaaccaggacggcaagatgagcttccaggaggtgcagagactgctgcacctgatgaacgtggagatggaccaggagtacgccttcagcctgttccaggccgccgacaccagccagagcggcaccctggagggcgaggagttcgtgcagttctacaaggccctgaccaagagagccgaggtgcaggagctgttcgagagcttcagcgccgacggccagaagctgaccctgctggagttcctggacttcctgcaggaggagcagaaggagagagactgcaccagcgagctggccctggagctgatcgacagatacgagcccagcgacagcggcaagctgagacacgtgctgagcatggacggcttcctgagctacctgtgcagcaaggacggcgacatcttcaaccccgcctgcctgcccatctaccaggacatgacccagcccctgaaccactacttcatctgcagcagccacaacacctacctggtgggcgaccagctgtgcggccagagcagcgtggagggctacatcagagccctgaagagaggctgcagatgcgtggaggtggacgtgtgggacggccccagcggcgagcccgtggtgtaccacggccacaccctgaccagcagaatcctgttcaaggacgtggtggccaccgtggcccagtacgccttccagaccagcgactaccccgtgatcctgagcctggagacccactgcagctgggagcagcagcagaccatggccagacacctgaccgagatcctgggcgagcagctgctgagcaccaccctggacggcgtgctgcccacccagctgcccagccccgaggagctgagaagaaagatcctggtgaagggcaagaagctgaccctggaggaggacctggagtacgaggaggaggaggccgagcccgagctggaggagagcgagctggccctggagagccagttcgagaccgagcccgagccccaggagcagaacctgcagaacaaggacaagaagaagaagagcaagcccatcctgtgccccgccctgagcagcctggtgatctacctgaagagcgtgagcttcagaagcttcacccacagcaaggagcactaccacttctacgagatcagcagcttcagcgagaccaaggccaagagactgatcaaggaggccggcaacgagttcgtgcagcacaacacctggcagctgagcagagtgtaccccagcggcctgagaaccgacagcagcaactacaacccccaggagctgtggaacgccggctgccagatggtggccatgaacatgcagaccgccggcctggagatggacatctgcgacggccacttcagacagaacggcggctgcggctacgtgctgaagcccgacttcctgagagacatccagagcagcttccaccccgagaagcccatcagccccttcaaggcccagaccctgagcatcccctacagacacctgcagctgatcttccccatcaacagcgtgtag

SEQ ID NO: 225392 - protein, 499 aa, Artificial Sequence
  derived and/or modified sequence
MSFGSEHYLCSSSSYRKVFGDGSRLSARLSGAGGAGGFRSQSLSRSNVASSAACSSASSLGLGLAYRRPPASDGLDLSQAAARTNEYKIIRTNEKEQLQGLNDRFAVFIEKVHQLETQNRALEAELAALRQRHAEPSRVGELFQRELRDLRAQLEEASSARSQALLERDGLAEEVQRLRARCEEESRGREGAERALKAQQRDVDGATLARLDLEKKVESLLDELAFVRQVHDEEVAELLATLQASSQAAAEVDVTVAKPDLTSALREIRAQYESLAAKNLQSAEEWYKSKFANLNEQAARSTEAIRASREEIHEYRRQLQARTIEIEGLRGANESLERQILELEERHSAEVAGYQDSIGQLENDLRNTKSEMARHLREYQDLLNVKMALDIEIAAYRKLLEGEETRFSTSGLSISGLNPLPNPSYLLPPRILSATTSKVSSTGLSLKKEEEEEEASKVASKKTSQIGESFEEILEETVISTKKTEKSNIEETTISSQKI

SEQ ID NO: 225393 - DNA, 1500 bp, Artificial Sequence
  derived and/or modified sequence
atgagcttcggcagcgagcactacctgtgcagcagcagcagctacagaaaggtgttcggcgacggcagcagactgagcgccagactgagcggcgccggcggcgccggcggcttcagaagccagagcctgagcagaagcaacgtggccagcagcgccgcctgcagcagcgccagcagcctgggcctgggcctggcctacagaagaccccccgccagcgacggcctggacctgagccaggccgccgccagaaccaacgagtacaagatcatcagaaccaacgagaaggagcagctgcagggcctgaacgacagattcgccgtgttcatcgagaaggtgcaccagctggagacccagaacagagccctggaggccgagctggccgccctgagacagagacacgccgagcccagcagagtgggcgagctgttccagagagagctgagagacctgagagcccagctggaggaggccagcagcgccagaagccaggccctgctggagagagacggcctggccgaggaggtgcagagactgagagccagatgcgaggaggagagcagaggcagagagggcgccgagagagccctgaaggcccagcagagagacgtggacggcgccaccctggccagactggacctggagaagaaggtggagagcctgctggacgagctggccttcgtgagacaggtgcacgacgaggaggtggccgagctgctggccaccctgcaggccagcagccaggccgccgccgaggtggacgtgaccgtggccaagcccgacctgaccagcgccctgagagagatcagagcccagtacgagagcctggccgccaagaacctgcagagcgccgaggagtggtacaagagcaagttcgccaacctgaacgagcaggccgccagaagcaccgaggccatcagagccagcagagaggagatccacgagtacagaagacagctgcaggccagaaccatcgagatcgagggcctgagaggcgccaacgagagcctggagagacagatcctggagctggaggagagacacagcgccgaggtggccggctaccaggacagcatcggccagctggagaacgacctgagaaacaccaagagcgagatggccagacacctgagagagtaccaggacctgctgaacgtgaagatggccctggacatcgagatcgccgcctacagaaagctgctggagggcgaggagaccagattcagcaccagcggcctgagcatcagcggcctgaaccccctgcccaaccccagctacctgctgccccccagaatcctgagcgccaccaccagcaaggtgagcagcaccggcctgagcctgaagaaggaggaggaggaggaggaggccagcaaggtggccagcaagaagaccagccagatcggcgagagcttcgaggagatcctggaggagaccgtgatcagcaccaagaagaccgagaagagcaacatcgaggagaccaccatcagcagccagaagatctag

SEQ ID NO: 225394 - DNA, 1500 bp, Artificial Sequence
  derived and/or modified sequence
atgtccttcggcagcgagcactacctctgctcttcctcctcctaccggaaagtatttggagatggatctcgattgtctgcgcgcctctcgggcgcaggaggggcaggcgggtttaggtcccaaagcctttcgcgctccaatgtagcttcttcagctgcctgttcttctgccagctctctgggcctagggttagcatacaggaggccaccagcttcagacggcctggacctgagtcaggcagctgcaagaactaacgagtacaagattatacgtacaaatgagaaagaacaactgcaaggcctgaacgacagattcgcagtgtttatcgaaaaggtccaccagctggagacccagaacagggctctggaggcagaactggccgcgctgaggcagcgccacgccgaaccgagcagagtaggggagctcttccagcgggaattacgcgacctccgcgcccagctcgaggaggcttcatcagcccgctcccaagcccttctggagagagatggccttgcggaggaggtgcagagactccgcgctcgctgcgaggaagagtcccggggtcgggaaggagcggagagggcactcaaagcccagcagagagacgtggatggagccacacttgccaggttagaccttgagaagaaggtggaaagtctgctggacgagctcgccttcgttaggcaggtgcacgacgaggaggtagcagagctgcttgccacgctgcaagctagttcccaggccgcggccgaggtcgatgttacagtggctaagcccgaccttacgtccgccctcagagagattcgagcgcagtacgagagcctagctgcaaaaaatttacagtcagcagaagagtggtacaagtccaaattcgccaatttgaatgagcaggccgccaggtctaccgaggccattcgcgcaagccgtgaagagattcatgaataccgaagacagcttcaagcccgcacaatcgagatcgaggggctccgcggcgccaacgagtccctcgagaggcagattctggagctggaagaacggcatagtgctgaagtagccggctaccaggactctatcggacaactggagaatgacctccgaaacacaaagagcgagatggctcgacacctgagggaatatcaggacttgttgaacgtgaagatggcgctggacatcgagatcgctgcttataggaagctcctggaaggcgaggagactcggttcagcacttccggactcagcatatcgggactgaaccccctgcccaacccttcctatctattaccaccacgaattttatccgccaccacgtcaaaagtcagttcgactggactgagtcttaagaaggaagaggaggaggaagaggccagtaaggtagcgtcgaaaaaaacatcgcagatcggcgaaagtttcgaggaaattctggaggagactgtgatttctaccaaaaagaccgaaaaaagtaacattgaggagactaccatctcctcgcagaaaatttag

SEQ ID NO: 225395 - DNA, 3231 bp, Artificial Sequence
  derived and/or modified sequence
cttctgtagctcgcgttgaagccgcacgtccggccccgatcccggcaccatgagcttcggctcggagcactacctgtgctcctcctcctcctaccgcaaggtgttcggggatggctctcgcctgtccgcccgcctctctggggccggcggcgcgggcggcttccgctcgcagtcgctgtcccgcagcaatgtggcctcctcggccgcctgctcctcggcctcgtcgctcggcctcggcctggcctatcgccggccgccggcgtccgacgggctggacctgagccaggcggcggcgcgcaccaacgagtacaagatcatccgcaccaacgagaaggagcagctgcagggcctcaacgaccgcttcgccgtgttcatcgagaaggtgcatcagctggagacgcagaaccgcgcgttggaggccgagctggccgcgctgcgacagcgccacgctgagccgtcgcgcgtcggcgagctcttccagcgcgagctgcgcgacctgcgcgcgcagctggaggaggccagctcggctcgctcgcaggccctgctggagcgcgacgggctggcggaggaggtgcagcggctgcgggcgcgctgcgaggaggagagccgcggacgcgaaggcgccgagcgcgccctgaaggcgcagcagcgcgacgtggacggcgccacgctggcccgcctggacctggagaagaaggtggagtcgctgctggacgagctggccttcgtacgccaggtgcacgacgaggaggtagccgagctgctggccacgctgcaggcgtcgtcgcaggccgcggccgaggtggacgtgactgtggctaaaccagacctgacctcggctctgagggagatccgcgcccagtatgagtccctggccgctaagaacctgcagtccgcggaagaatggtacaagtccaagtttgccaacctgaacgagcaggcggcgcgcagcaccgaggccatccgggccagccgcgaggagatccacgagtatcggcgccagctgcaggcgcgcaccatcgagatcgagggcctgcgcggggccaacgagtccttggagaggcagatcctggagctggaggagcggcacagtgccgaggtagctggctaccaggatagcattgggcagctggagaatgatctgaggaacaccaagagtgagatggcacgccaccttcgggaataccaggacttgctcaatgtcaaaatggctcttgacattgagatagcagcttacaggaaactgctggaaggcgaggagacacgttttagcaccagtgggttaagcatttcggggctgaatccacttcccaatccaagttacctgctcccacctagaatcctcagtgctacaacctccaaagtctcatccactgggctatcacttaagaaagaggaggaggaggaggaggcatctaaggtagcctctaagaaaacctcccagataggggaaagttttgaagaaatattagaggagacagtaatatctactaagaaaaccgagaaatcaaatatagaagaaaccaccatttcaagccaaaaaatataattccattgctttgaaaaagttaatgcttaagagggaatgatatgcatttgacttgttaaacagcctattcctgaactataacacctgccaccactataaaatgtcttcaaggcttcagtctcatatttagtattgaatacttacattctctaataagaaaaccaccccttagattgaagtaaactgcagtcctggagcaatcacagatgagttatctaagaatacagctttctgaccttcagctcacgcttcacagtgatcgatgattcaggtgcagaggaagtacaaactaaggtgctaaatctgcgatcatcgtcatttgctgtgaactgaaattaaaactattcatgctacccagccattacccagctaaataatcttactctagatacctaaaacataagatcactgccagagataaactaatggtccacacccaattccactctgatagaattatttcacaaataataggtgtttgtttaatggacacttttcacctccttcaattccatatatccttttcttctatgtaggaaaaaaatagtctagtgtagtattcttcccttttaaacacattttggttcttctcaaaagaacttacccccattcgcgctctgctcagtgggtaaaattagatgcatgttgaccatgtctatgattcgtgtaattacttatccctgcccatttcatattctttcaattctgtaggttaaaaaaatggcagtgatgaattttaagggtttcccccaacatataaaataatgcaaagaatccctagactttaggctttcagcttacacaaatctatttaattaggaaaaaaactattaaggatgtagcttttcacctttactttagaagcacagtaaatatcccaaactgtgatgaagccgaccttagatttagtagtgtaagctagaagaagtgagtgtttctatgagtggaaaaagccaaggtgtcatttatgtgtcagttcatttgtggtgatatagaattagctttttcatccccttacccttagaatccacgtattccccttcccactagcctaggtcataaagaggcgttgctttcactctcctatgccttttacgagtgctaagtgtaggatattttgtcaccagaacacaatgctaccgccccaaagtaaaagaaaccacttctggtcaatcaacactaccagcgtatatataagaaagacatctttctcttttctaaaagacttccctaacacttaccccatggctgcacagttggtggggtcctgccggagaggaagagacactcagaccagagaaggggtgtgcatgcgcctactcgcttgctagaagtagattctggacagtcagctcttcatctgcccaactgtgtagcatctgcattgcccagtctttcatgtgtgccaaggctgatgcaggatttgttctctgtccagcagtcacttcggccagagctgaagagttgccccgtctctgttccatgtctcctttaagagctctggtgataaggacatgatgcttttactgaactttcttatcctagcacatgcttcaatagttcaaggaacttgaaaaatacttttccttacctttaccccatccctgtctttactcctcacacttactgtaagacattagtaacataataaattaaaagtcacacgaatctcaccaacataa

SEQ ID NO: 225396 - DNA, 1500 bp, Artificial Sequence
  derived and/or modified sequence
atgagctttggaagtgagcactacctgtgcagcagcagcagctacaggaaggtgtttggagatggcagccggctgagcgcccggctgagcggggccggcggggccggcggcttccgcagccagagcctgagccgcagcaatgtggccagcagcgctgcctgcagcagcgccagcagcctgggcctgggcctggcctacagaagacctccagccagtgatggcctggacctgagccaggccgccgcccggaccaatgagtacaagatcatccgcaccaatgagaaggagcagctgcagggcctgaatgacagatttgctgtgttcatcgagaaggtgcaccagctggagacccagaacagagccctggaggccgagctggccgccctgcggcagagacatgctgagcccagccgggtgggggagctgttccagcgggagctgcgggacctgcgggcccagctggaggaggccagcagcgcccggagccaggccctgctggagagagatggcctggccgaggaggtgcagaggctgcgggcccgctgtgaggaggagagccggggccgggagggcgctgagcgggccctgaaggcccagcagagagatgtggatggagccaccctggcccggctggacctggagaagaaggtggagagcctgctggatgagctggcctttgtgcggcaggtgcatgatgaggaggtggccgagctgctggccaccctgcaggccagcagccaggccgctgctgaggtggatgtgacagtggccaagccagacctgaccagcgccctgcgggagatccgggcccagtatgagagcctggccgccaagaacctgcagagcgctgaggagtggtacaagagcaagtttgccaacctgaatgagcaggccgcccggagcacagaggccatccgggccagccgggaggagatccacgagtaccgccggcagctgcaggcccggaccatcgagattgagggcctgcggggggccaatgaaagcctggagcggcagatcctggagctggaggagcggcacagcgctgaggtggccggctaccaggacagcatcggccagctggagaatgacctgaggaacaccaagtctgagatggcccggcacctgcgggagtaccaggacctgctgaatgtgaagatggccctggacattgaaattgctgcctacaggaagctgctggagggggaggagacccgcttcagcaccagcggcctgagcatcagcggcctgaaccccctgcccaaccccagctacctgctgcccccacgcatcctgagcgccaccaccagcaaggtgagcagcacaggcctgagcctgaagaaggaggaggaggaggaggaggccagcaaggtggccagcaagaagaccagccagatcggggagagctttgaggagatcctggaggagaccgtcatcagcaccaagaagacagagaagagcaacatcgaggagaccaccatcagcagccagaagatctag

SEQ ID NO: 225397 - DNA, 1500 bp, Artificial Sequence
  derived and/or modified sequence
atgagcttcggcagcgagcactacctgtgcagcagcagcagctaccgtaaggtgtttggagatggctcgcgcctgagcgctaggctaagcggagccggcggcgccggcgggtttcggtcgcaatcgttatccaggagcaacgtggcttcttccgccgcctgtagctcagcctcttctctgggattggggcttgcgtatcgtcgtcctcctgccagtgacggtctggatctttctcaggctgcggcccgcaccaacgagtacaaaatcattcgaactaatgagaaggagcagctccagggacttaacgacagatttgcggtatttatcgagaaagtccaccagctggagacccagaatagagccctggaggccgagctagccgctctgcgacagcgacatgctgagccttcacgggttggggagcttttccagagggagctgagagacttacgggcgcagcttgaagaagcatcttcggcccggagtcaagcattgctggaacgagacgggctggcggaagaggtccagcgcctgcgtgccagatgtgaagaagaaagtcgcgggcgggaaggtgcggagcgggccttgaaggcccagcagcgcgacgttgatggcgcaaccttggctcgattggacctcgagaagaaagtggaatccctgttggacgagctcgcttttgttagacaggttcatgatgaagaagtggcggagctcctggccacactgcaagcgtcctcccaggctgctgccgaggtggatgttaccgtggcaaaacctgacttgaccagtgctctgagggagatccgagctcaatacgaatctctcgccgcgaagaacctccagagcgctgaggagtggtacaaatcaaaatttgctaatctaaatgaacaggccgccagatccaccgaagctatccgggcttccagggaggagatccacgaatatcgaagacaactgcaggcccggacaatcgagatagagggccttcggggggccaatgaaagcctcgagcgtcagattctggagctggaggagcgccattctgccgaagttgccggatatcaggattctattggacagttggaaaacgacctccggaatacaaaaagcgaaatggcccgacatctccgcgaataccaagacctgctcaacgtgaaaatggcactggacatcgagattgctgcttacagaaaactcttggaaggcgaagagactaggttctctacaagcgggctgagcattagcggactcaaccccctgcccaatcctagctatctgctgcccccgcggatcctgagtgcaaccacatcgaaagtcagctcaacaggactgtcgctgaaaaaagaagaagaagaggaagaggccagcaaggtggcttctaaaaaaacttctcagatcggggagtcttttgaagagatcctggaagaaaccgtaattagcaccaagaagactgagaagtcaaatattgaagagacaaccatctcctcccagaagatatag

SEQ ID NO: 225398 - DNA, 1500 bp, Artificial Sequence
  derived and/or modified sequence
atgagttttggaagtgaacattacctctgttcaagcagcagctaccgaaaggtcttcggggacggatcgagactttctgccagactctctggcgcagggggtgccggaggatttcggtcccagagcttgagtcgcagcaacgtggcaagtagcgcagcatgttcctccgcttctagccttggactgggcctggcttaccggagacctcccgcatcagacggtcttgatttgagccaggctgcggctaggacaaatgaatataagatcatccgaactaacgaaaaggagcagctgcaaggtttgaacgatcgcttcgccgtgttcatcgaaaaagtccatcagttggagacgcagaatagagccttggaggcagagctcgctgcacttcggcagcggcacgccgagccatcacgtgttggggagctgttccaaagagaactccgcgatcttagggcccagctcgaagaggcatcctctgcacgcagccaggctctgctggagagggacggcctcgccgaagaggttcagagattgcgcgctcgatgcgaggaggagtctagaggacgtgagggcgctgagcgggcattaaaggctcagcaaagagacgtggacggagcgaccctggccagactcgacctggaaaagaaggtggagagcctactggatgagctcgccttcgtcaggcaagtgcacgatgaggaggttgctgagctgctggcaactctccaagccagttcccaggccgcagctgaggtcgatgtcactgtggcaaaaccggatctcacctcagccctgagagagattcgcgctcagtacgaaagtttggctgcgaagaatctgcagtcggcggaggagtggtacaagtctaagttcgcgaatctgaatgaacaagcagcaagaagtacagaggccatcagagcctcacgtgaggaaattcatgagtatcgacgccagctgcaagcgagaacaattgagatagaggggctgcggggagcgaacgagagcttagaacgacagatccttgaactggaagagcggcattcagccgaagttgcaggataccaagattccattggacagcttgagaacgacctgcgtaacacaaaaagcgagatggccagacatttaagggagtaccaagatcttttgaatgtgaaaatggctctcgatattgaaattgccgcttacaggaagctgctggagggcgaggagactcggttcagcactagcgggctgtctatatcaggccttaatccgctgcctaatccatcctatctcctgcctccaaggatactgtccgcaactaccagtaaggtcagcagtacgggactttctttgaaaaaagaagaggaggaagaggaggcctcgaaagtggcatcaaaaaaaacaagtcaaattggcgagtcctttgaagagattctggaggagaccgtgatctccacaaaaaagacggaaaaatccaatatagaagaaaccaccatctccagtcagaagatttag

SEQ ID NO: 225399 - protein, 151 aa, Artificial Sequence
  derived and/or modified sequence
MPASQSRARARDRNNVLNRAEFLSLNQPPKGGPEPRSSGRKASGPSAQPPPAGDGARERRQSQQLPEEDCMQLNPSFKGIAFNSLLAIDICMSKRLGVCAGRAASWASARSMVKLIGITGHGIPWIGGTILCLVKSSTLAGQEVLMNLLLD

SEQ ID NO: 225400 - protein, 271 aa, Artificial Sequence
  derived and/or modified sequence
MPASQSRARARDRNNVLNRAEFLSLNQPPKGGPEPRSSGRKASGPSAQPPPAGDGARERRQSQQLPEEDCMQLNPSFKGIAFNSLLAIDICMSKRLGVCAGRAASWASARSMVKLIGITGHGIPWIGGTILCLVKSSTLAGQEVLMNLLLALLLDIMTVAGVQKLIKRRGPYETSPSLLDYLTMDIYAFPAGHASRAAMVSKFFLSHLVLAVPLRVLLVLWALCVGLSRVMIGRHHVTDVLSGFVIGYLQFRLVELVWMPSSTCQMLISAW

SEQ ID NO: 225401 - DNA, 816 bp, Artificial Sequence
  derived and/or modified sequence
atgcccgccagccagagcagagccagagccagagacagaaacaacgtgctgaacagagccgagttcctgagcctgaaccagccccccaagggcggccccgagcccagaagcagcggcagaaaggccagcggccccagcgcccagcccccccccgccggcgacggcgccagagagagaagacagagccagcagctgcccgaggaggactgcatgcagctgaaccccagcttcaagggcatcgccttcaacagcctgctggccatcgacatctgcatgagcaagagactgggcgtgtgcgccggcagagccgccagctgggccagcgccagaagcatggtgaagctgatcggcatcaccggccacggcatcccctggatcggcggcaccatcctgtgcctggtgaagagcagcaccctggccggccaggaggtgctgatgaacctgctgctggccctgctgctggacatcatgaccgtggccggcgtgcagaagctgatcaagagaagaggcccctacgagaccagccccagcctgctggactacctgaccatggacatctacgccttccccgccggccacgccagcagagccgccatggtgagcaagttcttcctgagccacctggtgctggccgtgcccctgagagtgctgctggtgctgtgggccctgtgcgtgggcctgagcagagtgatgatcggcagacaccacgtgaccgacgtgctgagcggcttcgtgatcggctacctgcagttcagactggtggagctggtgtggatgcccagcagcacctgccagatgctgatcagcgcctggtag

SEQ ID NO: 225402 - DNA, 816 bp, Artificial Sequence
  derived and/or modified sequence
atgcctgcatcccaatcacgagctagagcccgggaccgcaataatgtgctgaaccgcgccgagtttctgtctctcaaccagcctcctaagggggggcccgagccgagaagctcaggacgcaaggctagtggcccatcagcccagccaccgccagcaggcgatggggccagagagcgaaggcagtctcagcaattgcccgaggaagattgtatgcagctcaatcccagtttcaaaggaatcgcttttaattcactgttagctatcgacatctgcatgtcgaaacgtctcggtgtgtgcgctggccgagccgcctcatgggccagcgctcgctcaatggtgaagctgatcggtatcacagggcacgggatcccatggattggagggacaatactttgcctggtgaaaagttctactctggctgggcaagaggtgctcatgaatctgctgctggcactgttgctcgacataatgaccgtggccggagtgcagaaactgatcaagaggcgaggcccctatgagacctcaccatcacttctggactacctgactatggatatctacgctttcccggcgggccatgcttctcgggctgctatggtgtccaaattctttttgtcgcatctcgtccttgccgtgcctctgagagttctgcttgtgctgtgggctttgtgtgtcggtctgagcagagtgatgataggccggcatcacgtgacagacgtactgtccggattcgtgattgggtacttacaattccgcttagtcgagctggtttggatgccgtcctctacctgccagatgctgatctcagcatggtag

SEQ ID NO: 225403 - DNA, 816 bp, Artificial Sequence
  derived and/or modified sequence
atgcctgccagccagagccgggcccgggcccgggacagaaataatgtgctgaacagagctgagttcctgagcctgaaccagccccccaagggcggccctgagcccaggagcagcggcaggaaggccagcggccccagcgcccagcccccacctgctggagatggagcccgggagcggcggcagagccagcagctgcctgaggaggactgcatgcagctgaaccccagcttcaagggcatcgccttcaacagcctgctggccatcgacatctgcatgagcaagaggctgggcgtgtgtgccggccgggccgcctcctgggccagcgcccgctccatggtgaagctgattggcatcactggacatggcatcccctggattggaggcaccatcctgtgcctggtgaagagcagcaccctggccggccaggaggtgctgatgaacctgctgctggccctgctgctggacatcatgacagtggccggcgtgcagaagctgatcaagaggcggggcccctatgagaccagccccagcctgctggactacctgaccatggacatctatgccttccctgctggccacgccagcagagctgccatggtgtccaagttcttcctgagccacctggtgctggccgtgcccctgcgggtgctgctggtgctgtgggccctgtgtgtgggcctgagccgggtgatgattggccgccaccacgtgacagatgtgctgagcggcttcgtcatcggctacctgcagttccggctggtggagctggtgtggatgcccagcagcacctgccagatgctgatcagcgcctggtag

SEQ ID NO: 225404 - DNA, 816 bp, Artificial Sequence
  derived and/or modified sequence
atgcccgccagccagagccgggcccgggcccgggaccggaacaacgtccttaaccgggccgagttcctatcactgaaccagcctcctaaaggagggccagagccacgtagttcaggacgaaaagcttcaggcccaagcgcacaacccccacccgctggggacggagcccgtgagagacgccagtctcagcagctgccagaagaagattgtatgcaattgaacccatcatttaagggaattgcattcaacagcctgctggccatcgacatctgtatgtcgaaacggcttggtgtgtgcgccggaagggcagcctcctgggccagcgcaagatcaatggtcaaactgatcggtataacaggtcacggaataccttggatcggtggaacgatattgtgcctcgtgaaatcgagcacccttgccggacaggaggtactgatgaatctgctcctcgccctgttattagatatcatgaccgtggctggcgttcagaagcttattaaaagaagaggcccctacgaaacttctccttctctgcttgattacctgacgatggatatttatgcatttcccgctggtcatgcctcacgagcagccatggtatcaaagttctttctgtctcatctcgtcctggcagtccctctgagagtcctgctcgtcctttgggctctctgcgtcggcctcagccgtgtgatgatcgggagacaccacgttaccgatgtgctaagtgggtttgtgatcggctatcttcaatttcggttggtcgagttggtatggatgccgtcttcaacttgccagatgttgattagcgcatggtag

SEQ ID NO: 225405 - DNA, 2095 bp, Artificial Sequence
  derived and/or modified sequence
aaatagcccaggcccgaggcagccaggccgcagctgtggactcctcacctcccggaggctctgctggtgcaggccccgcattggagggctcgattggctgcccggctggcactgacgtccccttggagctgggtggcagaggagataaacagccatgtgcaactctccacactatatttaacagctgcggcggagaaggcagggaggcagccacggtggcggctctgggggcagctcttgtcttcggggagaaggcccttggagccgggctggcatcggccttctcggggtgagcgaggtcaccatgccagcttcccagagccgggcccgtgcccgggaccgcaacaacgtcctcaaccgggctgagttcctgtccctgaaccagccccccaaggggggcccggagccccgcagctcgggcagaaaggcctcgggcccatcagcacagcccccacctgctggtgacggggccagagagcgacgccagtcacagcagctgccagaggaggactgcatgcagctgaacccctccttcaagggcatcgccttcaactccctgctggccatcgatatctgtatgtccaagcggctgggggtgtgcgctggccgggcggcgtcctgggccagtgcccgctccatggtcaagctcatcggcatcacgggccacggcatcccctggatcggaggcaccatcctctgcctggtgaagagcagcacactggccggccaggaggtgctcatgaatctgctcctggccctgctcctggacatcatgacggtggccggcgtgcagaagctcatcaagcggcgcggcccgtacgagacgagccccagcctcctggactacctcaccatggacatctacgccttcccggccgggcacgccagccgcgccgccatggtgtccaagttcttcctcagccacctggtgctggcggtgcccctgcgtgtgctgctggtgctctgggccctctgcgtgggcctgtcccgcgtgatgatcggccgccaccacgtcacggacgtcctctccggctttgtcatcggctacctccagttccgtctggtggagctggtctggatgccctccagcacctgccagatgctcatctctgcctggtgaagcgcccgccggcccacacaagcctctgggggcagggctggccctagagaaggggcagggggtggcgaggtggcgggcgtgggtggaacagagcggccaggagtcagagcggccacccccacctcatcttcccctcctggctggaggctggcgaacccaggccacccctcccggagacaagcgtgtttggcagtgccaggcctcttgcccctttgcttggactccaagtctcctctctaggcagccaggacccacccatggggacagccctatttagcttctgctctgggaacagcaaaaatcaggatggtgggaggggccgagtcttgtcttgtcctttcatcatcatgactgttgagttcttggctgtgcccatcacgccacagcacgacgcctgccaaaatgcccccaacctactgcctgatgcaggtgccattgccattagcggtcatcgacagcttagggcagcactttccaacgggtgcccatgggacaccagcctgcgagatgcttttgggggaaaggggttttgtggttcaataactttcggaagtgctgcacactctgtccccaagttggacattcacaaaggccgttattgccgtaaaggctctgacaagccctatagaaaagcttcttgctaaaccttctttaacccatgttttctaaacttatttgaccacagaacccttttcttggggaacagctattaacccccaaggaattattggttcctcaagtgcgttttgggagctgctgccagagagctaaagggcctggggtgtgagctgactctcctctggggaggccgggtgcacacgccacagcccgaggaaagtgctggccaccgcccgtgggcatcgatgaggctttggcccccaggggccggactccgtgtgacctaataggtcgtttccaagtcacccgttttggatgtgcatttcatgtgacaatacagatgacatgcaaatggcc

SEQ ID NO: 225406 - DNA, 816 bp, Artificial Sequence
  derived and/or modified sequence
atgcccgcttctcagagcagagctcgcgcacgcgacaggaacaatgtattgaatcgtgcagagtttctcagtctgaaccagccaccaaagggagggccagagcccagaagtagcggcagaaaagcctccggaccctcagcacagcccccaccagcaggcgacggagcgcgagaacggaggcagagccagcagctgcctgaggaagattgtatgcaactaaatccctcttttaaaggaatcgcgtttaatagcctgttggccattgatatttgcatgtcaaagcggctcggggtctgtgctggcagggcagctagctgggcctctgcgaggtctatggtcaaacttatcggcattaccggacacggcataccctggataggcggaaccattctgtgtctggttaaaagctctactctcgctggtcaagaggtgcttatgaacttacttctggctctgttgcttgatattatgacggttgcaggcgtgcagaagctgattaaacgtaggggcccttacgagacgtccccaagtttgctcgactatctgacgatggacatctacgctttccctgcgggacacgccagccgtgccgcaatggtaagcaagtttttcttaagtcacctcgtgctggccgtgcctctgcgtgtcctcctggtcctctgggccctttgcgtaggcctttcacgggttatgatcggtaggcatcacgtaacggatgtgttgtccggctttgtcatcggctatctgcagtttaggttggtggagctagtatggatgccatcctccacctgtcagatgttgatcagcgcctggtag

SEQ ID NO: 225407 - protein, 396 aa, Artificial Sequence
  derived and/or modified sequence
MEFLKTCVLRRNACTAVCFWRSKVVQKPSVRRISTTSPRSTVMPAWVIDKYGKNEVLRFTQNMMMPIIHYPNEVIVKVHAASVNPIDVNMRSGYGATALNMKRDPLHVKIKGEEFPLTLGRDVSGVVMECGLDVKYFKPGDEVWAAVPPWKQGTLSEFVVVSGNEVSHKPKSLTHTQAASLPYVALTAWSAINKVGGLNDKNCTGKRVLILGASGGVGTFAIQVMKAWDAHVTAVCSQDASELVRKLGADDVIDYKSGSVEEQLKSLKPFDFILDNVGGSTETWAPDFLKKWSGATYVTLVTPFLLNMDRLGIADGMLQTGVTVGSKALKHFWKGVHYRWAFFMASGPCLDDIAELVDAGKIRPVIEQTFPFSKVPEAFLKVERGHARGKTVINVV

SEQ ID NO: 225408 - protein, 226 aa, Artificial Sequence
  derived and/or modified sequence
MEFLKTCVLRRNACTAVCFWRSKVVQKPSVRRISTTSPRSTVMPAWVIDKYGKNEVLRFTQNMMMPIIHYPNEVIVKVHAASVNPIDVNMRSGYGATALNMKRDPLHVKIKGEEFPLTLGRDVSGVVMECGLDVKYFKPGDEVWAAVPPWKQGTLSEFVVVSGNEVSHKPKSLTHTQAASLPYVALTAWSAINKVGGLNDKNCTGKRISGKESIIAGHFSWPVAHV

SEQ ID NO: 225409 - DNA, 1191 bp, Artificial Sequence
  derived and/or modified sequence
atggagtttctgaaaacgtgcgtgttgcggcgaaacgcgtgcactgctgtgtgtttctggagaagtaaggtggttcagaagccttccgtgaggagaatttcaaccacgtccccacggtccaccgtgatgcccgcctgggtcattgataagtacggtaaaaacgaggtgctgaggtttacacagaacatgatgatgccgattatccattaccccaacgaggtcatcgtgaaggtgcatgcggcgtctgtgaacccaatcgatgtcaatatgcgcagtggatacggagccactgcgctcaatatgaagagggatcccttacacgtgaaaatcaagggcgaagaattccctctgaccttagggcgagacgtgtcaggcgtggtaatggaatgcggcttggacgttaagtattttaaaccgggcgatgaagtttgggccgccgtcccaccctggaaacaaggcacgttgagcgaattcgtggttgtgagtggcaacgaggtgtctcacaagcccaagagtttgacacatactcaggccgccagccttccatatgtggccctgaccgcatggagcgcaattaataaggtggggggtctgaatgacaaaaattgtacgggaaaacgcgttctgattctcggtgcgagcgggggcgttggtacgttcgcaatacaggtcatgaaagcttgggatgcgcacgtcaccgcagtgtgcagccaagacgcatccgaactggtccgaaagcttggcgctgatgacgttattgactataaatctggctccgttgaggagcagttaaagagtttgaagccttttgactttatcctggataacgttggaggatccacagaaacttgggctcccgactttctgaaaaagtggtccggcgcaacctacgtaactctcgtgacaccgtttttgctgaatatggatcgactgggaatcgcggacgggatgttacagactggggtgacagtgggcagcaaagccctgaagcatttctggaaaggagtccattatcggtgggctttctttatggcctctggcccctgtcttgacgatatcgcggagttggttgacgctggcaagatcaggccagttattgagcagaccttcccattcagcaaagtgcctgaagccttcctcaaggtagagcggggacatgccagagggaagactgtgatcaacgtggtgtag

SEQ ID NO: 225410 - DNA, 681 bp, Artificial Sequence
  derived and/or modified sequence
atggagttcctgaagacctgtgtcttgcggcggaatgcctgtacagcggtatgcttttggcgtagcaaagttgtacagaagccaagcgtacggcgcatctccactacatccccacggagtactgtcatgcctgcgtgggtcatcgataagtatggcaagaatgaagtgttgcggtttacacagaatatgatgatgcctatcatccattaccccaatgaagtcatagtcaaggttcacgcagctagcgtgaatccaatcgatgtgaacatgcgaagcggctatggggcaactgccctgaacatgaaacgtgatccccttcatgtaaaaatcaagggtgaagagttccctctcacactgggccgcgatgtgtctggagtcgtgatggaatgtggcttggacgttaagtattttaaacctggtgatgaggtatgggcagcagtacctccatggaaacaggggaccctcagtgagtttgtggttgtatcaggaaacgaggtcagtcataagccaaaatcgctcacacacacccaagctgcgtccttgccatatgtggcgctgaccgcttggtctgccatcaataaagtggggggcttaaatgataaaaactgcaccggcaagcggatcagcggcaaggagtcaatcatcgctggacacttctcttggcccgtcgctcacgtgtag

SEQ ID NO: 225411 - DNA, 1191 bp, Artificial Sequence
  derived and/or modified sequence
atggagttcctgaagacctgtgtgctgcggagaaatgcctgcacagctgtgtgcttctggaggagcaaggtggtgcagaagcccagcgtgcggcgcatcagcaccaccagccccaggagcacagtgatgcctgcctgggtgattgacaagtatggcaagaatgaggtgctgcgcttcacccagaacatgatgatgcccatcatccactacccaaatgaggtgattgtgaaggtgcacgccgcctctgtgaaccccattgatgtgaacatgaggagcggctacggggccacagccctgaacatgaagagggaccccctgcacgtgaagatcaagggggaggagttccccctgaccctgggcagagatgtgtctggagtggtgatggagtgtggcctggatgtgaagtacttcaagccaggagatgaggtgtgggccgctgtgcccccctggaagcagggcaccctgtctgaatttgtggtggtgtctggaaatgaggtgagccacaagcccaagagcctgacccacacccaggccgccagcctgccctacgtggccctgacagcctggagcgccatcaacaaggtgggcggcctgaatgacaagaactgcaccgggaagagggtgctgatcctgggcgccagcggcggcgtgggcacctttgccatccaggtgatgaaggcctgggatgcccacgtgacagctgtgtgcagccaggatgccagcgagctggtgaggaagctgggcgcagatgatgtgattgactacaagagcggctctgtggaggagcagctgaagagcctgaagccctttgacttcatcctggacaacgtgggcggcagcacagagacctgggccccagacttcctgaagaagtggagcggggccacctacgtgaccctggtgacccccttcctgctgaacatggaccggctgggcattgctgatggcatgctgcagacaggagtgacagtgggcagcaaggccctgaagcacttctggaagggcgtgcactaccgctgggccttcttcatggccagcggcccctgcctggatgacattgctgagctggtggatgctgggaagatccggcctgtgattgagcagaccttccccttcagcaaggtgcctgaggccttcctgaaggtggagcggggccacgcccggggcaagacagtcatcaacgtggtgtag

SEQ ID NO: 225412 - DNA, 681 bp, Artificial Sequence
  derived and/or modified sequence
atggagttcctgaagacctgtgtgctgcggagaaatgcctgcacagctgtgtgcttctggaggagcaaggtggtgcagaagcccagcgtgcggcgcatcagcaccaccagccccaggagcacagtgatgcctgcctgggtgattgacaagtatggcaagaatgaggtgctgcgcttcacccagaacatgatgatgcccatcatccactacccaaatgaggtgattgtgaaggtgcacgccgcctctgtgaaccccattgatgtgaacatgaggagcggctacggggccacagccctgaacatgaagagggaccccctgcacgtgaagatcaagggggaggagttccccctgaccctgggcagagatgtgtctggagtggtgatggagtgtggcctggatgtgaagtacttcaagccaggagatgaggtgtgggccgctgtgcccccctggaagcagggcaccctgtctgaatttgtggtggtgtctggaaatgaggtgagccacaagcccaagagcctgacccacacccaggccgccagcctgccctacgtggccctgacagcctggagcgccatcaacaaggtgggcggcctgaatgacaagaactgcaccgggaagaggatcagcggcaaggagagcatcatcgccggccacttctcctggcctgtggcccacgtgtag

SEQ ID NO: 225413 - DNA, 1191 bp, Artificial Sequence
  derived and/or modified sequence
atggagttcctgaagacctgcgtgctgcggcggaacgcctgcaccgccgtgtgcttctggaggagcaaggtggtccagaagcccagcgtgaggagaatctcgaccacctccccaagatcaaccgtgatgccagcgtgggtaatcgataaatatgggaagaacgaggtgctgaggtttactcagaatatgatgatgccaatcatccattatcccaacgaagtcattgtgaaggttcacgcggccagtgttaatcccattgacgtgaacatgcgtagtggttatggtgccaccgcactgaatatgaaacgagacccgctccacgtgaagattaagggcgaggagttccccctcaccctggggagggatgtgagcggggtggtgatggaatgcggccttgacgtgaaatacttcaaacctggcgacgaggtgtgggcagccgttccaccatggaaacagggaactctaagcgagttcgtcgtcgtgtcagggaacgaggtatcacataagccaaagtcccttacacacactcaggcggccagcctgccatacgtcgccctgaccgcctggagcgctataaacaaagttgggggactgaacgataaaaattgcacaggaaagcgcgtgctcatccttggtgcatcaggaggcgttgggaccttcgcaatccaggtgatgaaggcttgggacgcccacgtgacggcagtctgcagtcaggacgcctccgaactagttagaaagctgggagccgacgatgttatcgactacaagtccggctccgtggaggaacagcttaaaagcctgaagccgtttgacttcatactggacaacgtgggagggtctaccgaaacctgggcacctgatttcctaaaaaaatggagtggagcaacttacgtgactctggtgactccattcctgcttaacatggatagactcggcattgctgacggaatgctccaaacgggcgtcacagttggatccaaggcactgaagcatttttggaaaggagtgcactacagatgggcgttttttatggccagcggtccctgtctcgatgatattgccgaattagtggacgccggtaaaatcagaccggtgatcgagcagacattccccttctccaaagtgccggaggcatttcttaaagtagagagaggccacgcgcgggggaagacagtgattaatgtcgtgtag

SEQ ID NO: 225414 - DNA, 681 bp, Artificial Sequence
  derived and/or modified sequence
atggagttcctgaagacctgcgtgctgcggcggaacgcctgcaccgcagtatgtttttggcggtccaaggtggtgcagaagcctagcgtgaggagaattagcaccaccagccctaggtccaccgtaatgcctgcatgggtcatcgataaatacgggaagaacgaagtcctccgcttcacgcagaatatgatgatgcctattattcactatcctaatgaagtgatcgtcaaggttcatgcagccagcgtaaatcccatcgatgtgaatatgaggagcggttacggggcaaccgcgctaaacatgaaaagagatccgttgcacgtgaaaattaaaggcgaggagttccctctaacactgggtcgagatgtcagtggcgttgtaatggagtgcggattggacgtcaagtactttaaacctggggatgaggtctgggccgccgtgcctccctggaaacagggaacattgtctgaatttgttgtggtctctggcaatgaagtttctcacaaacccaagtccttgacacacacacaggctgcgtccctgccgtacgttgctctcacagcctggagtgccatcaataaggtggggggattgaatgacaagaattgtaccggcaagcgcatctccggaaaggagagcatcattgccggccacttcagttggcccgttgcccacgtctag

SEQ ID NO: 225415 - DNA, 1191 bp, Artificial Sequence
  derived and/or modified sequence
atggaatttctcaagacctgcgtactgaggagaaacgcctgcactgccgtgtgtttttggcggagcaaagtggttcagaaaccatccgtccggcgaattagcactacaagcccacgcagtactgtgatgcctgcatgggtcatcgacaaatatggaaagaacgaggtactccgattcactcaaaatatgatgatgcccatcatacactacccgaatgaggtgatagtcaaggtgcatgcagctagtgtgaatcccattgacgtgaacatgagaagcggctacggtgctaccgctctaaacatgaaaagagatcccttacatgtcaagatcaagggcgaggaattccctttaacactcggaagggacgtctctggagtagtgatggagtgcggcctggatgtaaaatattttaaaccaggcgacgaagtttgggctgccgtgcccccatggaagcaggggaccctttcagagttcgtagtggtgagtggcaatgaggtgtctcataagcccaagtctcttacccatacccaagcggcatctcttccctacgttgccctgacagcgtggtcggcgatcaataaagtgggcggactaaatgacaaaaattgtactggcaagcgcgtgttgatcctgggagcctctggaggagtcgggacattcgccatccaggtaatgaaagcctgggatgcccacgtgactgcagtgtgtagccaggacgccagcgaacttgtcagaaaattaggtgctgacgacgtcattgactataagtccggatccgtcgaggagcaactgaagtcactcaaaccattcgatttcattctcgacaacgtcggcggatccacggagacttgggccccagatttccttaagaaatggtcaggggcaacatacgttaccttagttactccctttctgcttaatatggatcgactgggtattgccgacggcatgctgcagacgggcgtgactgtggggtccaaagctttgaagcatttctggaagggggtgcattatagatgggcattctttatggcctcaggtccgtgcctggacgatattgcggagctagtggatgctggcaaaatccgtcccgtgatcgaacaaaccttcccattcagtaaggtccctgaggcgttcctaaaagtggagcggggacacgcgcgaggtaaaacggtgataaacgtggtgtag

SEQ ID NO: 225416 - DNA, 681 bp, Artificial Sequence
  derived and/or modified sequence
atggaattcttgaagacctgcgtcctcagacgtaacgcttgtactgccgtatgcttttggaggtccaaggtcgtgcagaagccttccgtgagaagaatttccaccacgtcccctcgcagtactgtaatgccagcctgggttatcgacaagtacggcaagaatgaggttctgagattcacccagaacatgatgatgcctattattcattacccaaacgaggtgatcgtcaaggtccacgctgccagtgtgaacccaattgacgtgaatatgcggagtggttacggcgcaaccgccctcaacatgaagcgtgaccctctgcacgttaaaatcaaaggcgaagagtttccccttactctgggccgtgatgtgtcaggcgtggtgatggaatgtggtttggacgtcaagtattttaaacccggtgatgaagtgtgggctgcagtgccaccctggaaacagggcaccttgtccgagttcgttgtagtcagcggtaacgaagtgtcccacaagcctaagtcactcacgcacacccaagctgcttctctgccctacgtggctctcacagcgtggagcgcaataaacaaagtcgggggattgaatgacaaaaactgcaccgggaaacgaatctctggtaaagaatcaataatagctggccatttctcatggcctgtggctcatgtgtag

SEQ ID NO: 225417 - DNA, 1682 bp, Artificial Sequence
  derived and/or modified sequence
ccggcggctaaggagagcgggcaggcaaggagattccgggccagggtcgcggcggcagtcggcaagcgttcgattctctggcgttggatcgcgagcggtgtctgcttgtcccgccgagggctcccaggacagggcagggatctagggggtttgcgcacctgctttttaatgccccgcccccccttttttttttaaagtggagggggtgaaagtgagggaggagaatggacagaatactgactggaacgttaattcgagcatttcatatgcgaagagcggaataacagttccgtattcttctttcagtttctccattagattagcttcattttcgaatgctccgttttgcatgcttaattttgaaactagcccgtggtttggcagaatttgactgaattcaggggtgagagtttgatccagtccaagtgtatttgaatttgagcacgcagttcaaccagtgtttacaatggaatttctgaagacttgtgtacttagaagaaatgcatgcactgcggtttgcttctggagaagcaaagttgtccaaaagccttcagttagaaggattagtactacctctcctaggagcactgtcatgcctgcttgggtgatagataaatatgggaagaatgaagtgcttcgattcactcagaacatgatgatgcctatcatacactatccaaatgaagtcattgtcaaagttcacgctgccagtgtaaatcctatagacgttaatatgagaagtggttatggagctacagctttaaatatgaagcgtgatcctttacacgtgaaaatcaaaggagaagaatttcctctgactctgggtcgggatgtctctggcgtggtgatggaatgtgggcttgatgtgaaatacttcaagcctggagatgaggtctgggctgcagttcctccttggaaacaaggcactctttcagagtttgttgtagtcagtgggaatgaggtctctcacaaacccaaatcactcactcatactcaagctgcctctttgccatatgtggctctcacagcctggtctgctataaacaaagttggtggcctgaatgacaagaattgcacaggaaaacgtgttctaatcttaggcgcttcaggcggagttggtacttttgctatacaggtaatgaaagcatgggatgctcatgtgacagcagtttgctcccaagatgccagtgaacttgtaaggaagcttggtgcagacgatgtaattgattacaaatctggaagtgtggaagagcagttgaaatccttaaaaccatttgattttatccttgataatgttggcggatccactgaaacatgggctccagattttctcaagaaatggtcaggagccacctatgtgactttggtgactcctttcctcctgaacatggaccgattgggcatagcagatggcatgttgcagacaggagtcactgtaggttcaaaggcattaaagcatttctggaaaggagtccattatcgctgggcatttttcatggccagtggcccatgtttagatgacattgcagaactggtggatgcgggaaagatccggccagttattgaacaaacctttcctttttctaaagttccagaagccttcctgaaggtggaaagaggacacgcacgaggaaagactgtaattaatgttgtttaaataaaaatgcagtttagtgattgtt

SEQ ID NO: 225418 - DNA, 2266 bp, Artificial Sequence
  derived and/or modified sequence
gcaaagccatcccggcggctaaggagagcgggcaggcaaggagattccgggccagggtcgcggcggcagtcggcaagcgttcgattctctggcgttggatcgcgagcggtgtctgcttgtcccgccgagggctcccaggacagggcagggatctagggggtttgcgcacctgctttttaatgccccgcccccccttttttttttaaagtggagggggtgaaagtgagggaggagaatggacagaatactgactggaacgttaattcgagcatttcatatgcgaagagcggaataacagttccgtattcttctttcagtttctccattagattagcttcattttcgaatgctccgttttgcatgcttaattttgaaactagcccgtggtttggcagaatttgactgaattcaggggtgagagtttgatccagtccaagtgtatttgaatttgagcacgcagttcaaccagtgtttacaatggaatttctgaagacttgtgtacttagaagaaatgcatgcactgcggtttgcttctggagaagcaaagttgtccaaaagccttcagttagaaggattagtactacctctcctaggagcactgtcatgcctgcttgggtgatagataaatatgggaagaatgaagtgcttcgattcactcagaacatgatgatgcctatcatacactatccaaatgaagtcattgtcaaagttcacgctgccagtgtaaatcctatagacgttaatatgagaagtggttatggagctacagctttaaatatgaagcgtgatcctttacacgtgaaaatcaaaggagaagaatttcctctgactctgggtcgggatgtctctggcgtggtgatggaatgtgggcttgatgtgaaatacttcaagcctggagatgaggtctgggctgcagttcctccttggaaacaaggcactctttcagagtttgttgtagtcagtgggaatgaggtctctcacaaacccaaatcactcactcatactcaagctgcctctttgccatatgtggctctcacagcctggtctgctataaacaaagttggtggcctgaatgacaagaattgcacaggaaaacgcatttctggaaaggagtccattatcgctgggcatttttcatggccagtggcccatgtttagatgacattgcagaactggtggatgcgggaaagatccggccagttattgaacaaacctttcctttttctaaagttccagaagccttcctgaaggtggaaagaggacacgcacgaggaaagactgtaattaatgttgtttaaataaaaatgcagtttagtgattgttgacgttcttatttggtgagtgcctgtgagcccaaatttttttctagccatccctttcaaacatttttccagattagattatacattccatgatacaagctttaaaaaataaacacaccattttggccagtaattgatataaaaatatcagcacttggatttgtctgtagtcagtagaaattcgaagttttttcaagctgttccttcacactggctttgcaggttgttgtggcaccttctgttttactagcttaaactactttattgtcttttttgttttagagacagggtctcgctgtgtcacccaggctggagtgcagtggcacaatcacagctcactgcagccttgaccttaagcgattctcctgcttcagcctctcaagtaggtaggactacaggtatgcatcaccacacccagctagtttttttgtatttttagtagagacagttttgccatgttgcccaggctggtctcaaactcctgggcttaagtgatccaccatgtcagtctcccaaagttctgggattacaggcgtgaaccaccctgctgggcctgatcgtcttaatgtacaatactaaaactttcagtgtatagatggatgttggcatgaagagataatttaaagctggttccttcttgaattcatcactgagcagctttctaactgccaaggtttccttttttgttcctccaccataatgtggtcaccacagctcttaaagttctaaatctcttagtgtcatatataaaaatctgcctggtgattcatttgtttatgctcttaatattgaaaggtgagagcagagtttctaactttttaaaacccttacatcttgcataaggattaggcctgtttcggcaattgaaacatgcttctctgagggcttttccatggaaattgcagccttccaatggagcccaaagcttgccactttgatgtcaa

SEQ ID NO: 225419 - DNA, 1191 bp, Artificial Sequence
  derived and/or modified sequence
atggagttcctgaagacctgcgtgctgagaagaaacgcctgcaccgccgtgtgcttctggagaagcaaggtggtgcagaagcccagcgtgagaagaatcagcaccaccagccccagaagcaccgtgatgcccgcctgggtgatcgacaagtacggcaagaacgaggtgctgagattcacccagaacatgatgatgcccatcatccactaccccaacgaggtgatcgtgaaggtgcacgccgccagcgtgaaccccatcgacgtgaacatgagaagcggctacggcgccaccgccctgaacatgaagagagaccccctgcacgtgaagatcaagggcgaggagttccccctgaccctgggcagagacgtgagcggcgtggtgatggagtgcggcctggacgtgaagtacttcaagcccggcgacgaggtgtgggccgccgtgcccccctggaagcagggcaccctgagcgagttcgtggtggtgagcggcaacgaggtgagccacaagcccaagagcctgacccacacccaggccgccagcctgccctacgtggccctgaccgcctggagcgccatcaacaaggtgggcggcctgaacgacaagaactgcaccggcaagagagtgctgatcctgggcgccagcggcggcgtgggcaccttcgccatccaggtgatgaaggcctgggacgcccacgtgaccgccgtgtgcagccaggacgccagcgagctggtgagaaagctgggcgccgacgacgtgatcgactacaagagcggcagcgtggaggagcagctgaagagcctgaagcccttcgacttcatcctggacaacgtgggcggcagcaccgagacctgggcccccgacttcctgaagaagtggagcggcgccacctacgtgaccctggtgacccccttcctgctgaacatggacagactgggcatcgccgacggcatgctgcagaccggcgtgaccgtgggcagcaaggccctgaagcacttctggaagggcgtgcactacagatgggccttcttcatggccagcggcccctgcctggacgacatcgccgagctggtggacgccggcaagatcagacccgtgatcgagcagaccttccccttcagcaaggtgcccgaggccttcctgaaggtggagagaggccacgccagaggcaagaccgtgatcaacgtggtgtag

SEQ ID NO: 225420 - DNA, 681 bp, Artificial Sequence
  derived and/or modified sequence
atggagttcctgaagacctgcgtgctgagaagaaacgcctgcaccgccgtgtgcttctggagaagcaaggtggtgcagaagcccagcgtgagaagaatcagcaccaccagccccagaagcaccgtgatgcccgcctgggtgatcgacaagtacggcaagaacgaggtgctgagattcacccagaacatgatgatgcccatcatccactaccccaacgaggtgatcgtgaaggtgcacgccgccagcgtgaaccccatcgacgtgaacatgagaagcggctacggcgccaccgccctgaacatgaagagagaccccctgcacgtgaagatcaagggcgaggagttccccctgaccctgggcagagacgtgagcggcgtggtgatggagtgcggcctggacgtgaagtacttcaagcccggcgacgaggtgtgggccgccgtgcccccctggaagcagggcaccctgagcgagttcgtggtggtgagcggcaacgaggtgagccacaagcccaagagcctgacccacacccaggccgccagcctgccctacgtggccctgaccgcctggagcgccatcaacaaggtgggcggcctgaacgacaagaactgcaccggcaagagaatcagcggcaaggagagcatcatcgccggccacttcagctggcccgtggcccacgtgtag

SEQ ID NO: 225421 - protein, 123 aa, Artificial Sequence
  derived and/or modified sequence
MARYEEVSVSGFEEFHRAVEQHNGKTIFAYFTGSKDAGGKSWCPDCVQAEPVVREGLKHISEGCVFIYCQVGEKPYWKDPNNDFRKNLKVTAVPTLLKYGTPQKLVESECLQANLVEMLFSED

SEQ ID NO: 225422 - DNA, 372 bp, Artificial Sequence
  derived and/or modified sequence
atggcccggtatgaagaggtttcagtaagtggctttgaggagttccaccgggccgtggagcaacacaacggcaaaacaattttcgcgtacttcacggggtccaaggacgccggagggaagtcgtggtgtccagactgtgtgcaggcagagcccgttgtcagagaaggcctgaagcatatatccgaaggctgtgtgtttatctactgccaagttggggaaaaaccatactggaaggatcctaacaatgatttccgcaaaaatctgaaagtgaccgcagttccgacgctcctgaagtacgggaccccgcagaaactagttgagagcgagtgcctgcaagctaatcttgttgagatgttgttttctgaggattag

SEQ ID NO: 225423 - DNA, 372 bp, Artificial Sequence
  derived and/or modified sequence
atggcccgctatgaggaggtgtctgtgtctggctttgaggagttccacagagctgtggagcagcacaacgggaagaccatctttgcctacttcaccggcagcaaggatgctgggggcaagtcctggtgcccagactgtgtgcaggccgagcctgtggtgcgggagggcctgaagcacatcagcgagggctgtgtgttcatctactgccaggtgggggagaagccctactggaaggaccccaacaatgacttcaggaagaacctgaaggtgacagctgtgcccaccctgctgaagtatggcaccccccagaagctggtggagagtgaatgtctgcaggccaacctggtggagatgctgttcagcgaggactag

SEQ ID NO: 225424 - DNA, 372 bp, Artificial Sequence
  derived and/or modified sequence
atggcccggtacgaggaggtgagcgtgagcggcttcgaggagttccatcgggctgtagagcaacacaatggaaaaacgatcttcgcttactttaccggcagcaaggatgcaggcggcaaaagctggtgcccagattgtgtccaggctgaacctgtagtgcgggaaggtctgaaacatatttccgaggggtgcgtgttcatttactgtcaggtgggcgaaaagccttattggaaggaccctaacaatgatttcaggaaaaatttaaaagtgactgccgtgccaacactcttgaaatacggcactccacaaaaactggttgaatctgagtgtcttcaggctaacctggtggagatgctgttctccgaggactag

SEQ ID NO: 225425 - DNA, 372 bp, Artificial Sequence
  derived and/or modified sequence
atggccaggtacgaggaggtgtctgtctccggcttcgaagagtttcaccgcgcagtagaacagcataatggcaagactatctttgcatacttcactggctcgaaggatgctggcggaaagagctggtgccccgattgtgtccaggccgaacctgtggtacgcgagggacttaagcatattagcgaaggctgcgtgttcatctattgccaggtaggcgagaaaccttactggaaagaccccaacaatgacttccggaaaaacctaaaggtcaccgcagttcctactcttcttaagtacggtactcctcagaaacttgtggagagtgagtgcctgcaggccaatttagtcgagatgctgttcagtgaggactag

SEQ ID NO: 225426 - DNA, 2278 bp, Artificial Sequence
  derived and/or modified sequence
aggccctgaactatttaaggatccaggtgttgcaaggcggtaagttttgcagccagtgtccatgaggtcggggctgggactagattagggtagatctaagcctgggcttgggagtgcagctagcgcagaaagatctgaggaactagagcaaaaagccatgcggatggattgtggtcgtcagaggctcccgtagtctttagcggcgctggcttccgcaggctccgccctctcttgcccacccggaaacagcctcgccccgcctacgcgggacccaaccgcggcgaccggacgtgcactcctccagtagcggctgcacgtcgtgccaatggcccgctatgaggaggtgagcgtgtccggcttcgaggagttccaccgggccgtggaacagcacaatggcaagaccattttcgcctactttacgggttctaaggacgccggggggaaaagctggtgccccgactgcgtgcaggctgaaccagtcgtacgagaggggctgaagcacattagtgaaggatgtgtgttcatctactgccaagtaggagaaaagccttattggaaagatccaaataatgacttcagaaaaaacttgaaagtaacagcagtgcctacactacttaagtatggaacacctcaaaaactggtagaatctgagtgtcttcaggccaacctggtggaaatgttgttctctgaagattaagattttaggatggcaatcatgtcttgatgtcctgatttgttctagtatcaataaactgtatacttgctttgaattcatgttagcaataaatgatgttaaaaaaactggcatgtgtctaaacaatagagtgctattaaaatgcccatgaacctttagtttgcctgtaatacatggatatttttaagatataaagaagtcttcagaaatagcagtaaaggctcaaaggaacgtattcttgaaggtgacggaaatacctaaaaactcctaaaggtgcagagcacaccttccaaatctctcaaaagatcagtatcttttattttaagttatctccatctgcaaagcaactgatgatattcctgaaaccccttctttgattttggaatgtagaacctaacctcaccactgaaggaaagcacatgacctctaatctagcctctgcttaattcaggcagttttgttttgtttaataaaaaacagactcctgagcactagaagcagtttgttttgcagctgtctcaatgtgctttacttgggatgaggcaggtggcggagagcggccggaaagactctataacccagttctgggaagaactccaagctgggagtcagtcacactgactctaccacttactagctgtgtaaccacaggcaagttactcaccccgtccaaacctcagttttctcttctataaacaaggttcttagaataaaatgagaattcaaggaagcacttaacatagcacctggtttgtggtacctcccaaatcaatggtagctttcccaaatgaacacaagtatttgaggctcctcatgtttgttctaaagtcaagagtccagttagtaactaaccactagttgtcctgccatgactaggtcaagtgaggccacagtgattcagtgattcttaaagccaccttgcaaagcaggtaatacagttatttcctgtcctgcagaattcaagaacctttatgcagttcctgtcctatgatttaaagaggtcagtgactccgctactctcactacatcttagagtagagtggtagagtagttgatctgagacagtaaggttccaggagatggtcttgccctactatatgtcaggaacagctagccttagaattcagtatacttggtggcccacccctaccccatgccccagtgccttatttggtctaaagcacctaacttttccattcttaatcagctgattatgctaaatgcgtaaaaaagaaaaacaccttacaaatccacagggaaatcaaagaacaattcaggtttaacagaaatagtctattaacaataaaaagttggatgaaaaagcacactaaaggttctaggggctaccataataaaggtagataggaagagttttcattttttttgtcttcactgtacaaaagaaatacattatatacatgtattaagtgcctcgtttgtatccagtttttcattttcccgatgtgttattttgctgttgctgctctgccaaggcttgctgaaggcgcatccgcttccgggaatagtgctgccaatgtagaatctgctgttcatcaataaatttcgcacactgagcattcacca

SEQ ID NO: 225427 - DNA, 372 bp, Artificial Sequence
  derived and/or modified sequence
atggccagatacgaggaggtgagcgtgagcggcttcgaggagttccacagagccgtggagcagcacaacggcaagaccatcttcgcctacttcaccggcagcaaggacgccggcggcaagagctggtgccccgactgcgtgcaggccgagcccgtggtgagagagggcctgaagcacatcagcgagggctgcgtgttcatctactgccaggtgggcgagaagccctactggaaggaccccaacaacgacttcagaaagaacctgaaggtgaccgccgtgcccaccctgctgaagtacggcaccccccagaagctggtggagagcgagtgcctgcaggccaacctggtggagatgctgttcagcgaggactag

SEQ ID NO: 225428 - protein, 705 aa, Artificial Sequence
  derived and/or modified sequence
MPVPWFLLSLALGRSPVVLSLERLVGPQDATHCSPGLSCRLWDSDILCLPGDIVPAPGPVLAPTHLQTELVLRCQKETDCDLCLRVAVHLAVHGHWEEPEDEEKFGGAADSGVEEPRNASLQAQVVLSFQAYPTARCVLLEVQVPAALVQFGQSVGSVVYDCFEAALGSEVRIWSYTQPRYEKELNHTQQLPALPWLNVSADGDNVHLVLNVSEEQHFGLSLYWNQVQGPPKPRWHKNLTGPQIITLNHTDLVPCLCIQVWPLEPDSVRTNICPFREDPRAHQNLWQAARLQLLTLQSWLLDAPCSLPAEAALCWRAPGGDPCQPLVPPLSWENVTVDKVLEFPLLKGHPNLCVQVNSSEKLQLQECLWADSLGPLKDDVLLLETRGPQDNRSLCALEPSGCTSLPSKASTRAARLGEYLLQDLQSGQCLQLWDDDLGALWACPMDKYIHKRWALVWLACLLFAAALSLILLLKKDHAKGWLRLLKQDVRSGAAARGRAALLLYSADDSGFERLVGALASALCQLPLRVAVDLWSRRELSAQGPVAWFHAQRRQTLQEGGVVVLLFSPGAVALCSEWLQDGVSGPGAHGPHDAFRASLSCVLPDFLQGRAPGSYVGACFDRLLHPDAVPALFRTVPVFTLPSQLPDFLGALQQPRAPRSGRLQERAEQVSRALQPALDSYFHPPGTPAPGRGVGPGAGPGAGDGT

SEQ ID NO: 225429 - protein, 70 aa, Artificial Sequence
  derived and/or modified sequence
MPVPWFLLSLALGRSPVVLSLERLVGPQDATHCSPGLSCRLWVTYSACLGTSCLLRAPCWRLRTCRQSWC

SEQ ID NO: 225430 - DNA, 2118 bp, Artificial Sequence
  derived and/or modified sequence
atgccagtcccctggtttcttctgagcctggctctggggcgcagtccagtggtcttgagcctcgagagattggtaggcccacaggatgctacccattgttctcccggactctcctgtaggttgtgggacagtgatattctttgcttgccaggagacatagtgcctgccccagggcctgtgctcgccccgacccaccttcaaacagaattagtgctgcgttgtcaaaaggaaactgactgcgacctctgcctccgagtcgccgtccaccttgccgtccatgggcactgggaggaacccgaggatgaggaaaagtttgggggagctgccgattccggtgtcgaagaacctcgcaacgccagtttgcaggcccaggtggtactttctttccaagcttaccccacagcgcgctgcgtattgctcgaagtccaggtgcctgcagctcttgtgcagtttgggcagagtgtgggtagtgtggtgtacgactgttttgaggcagctctgggaagcgaggtccgtatttggtcctacactcaacctagatatgagaaggagctgaaccatacacaacagctgcctgcactgccctggctaaatgtgtctgctgatggcgacaacgttcatctcgtccttaacgtctcagaagagcagcacttcggattgtctctttactggaatcaagtgcagggaccacccaaaccacgttggcataagaacttaaccgggccacaaataatcacactgaatcatactgacctggtcccctgtctgtgcattcaggtgtggccattagaaccagactctgttcggacaaatatttgtcccttccgcgaggatcctcgcgctcaccagaatctctggcaagctgcccgtctccagctactcactctgcagagttggctcctcgacgccccttgctcgctgcccgcggaggctgccctttgttggagggctccgggcggagacccttgtcagcccttagtaccacccctctcttgggaaaacgttacagtggacaaggtgctagaatttcctttgctcaaaggacacccaaacctgtgcgtgcaggtgaattccagcgaaaagcttcaactgcaagagtgtctgtgggctgactccttgggtcctctcaaggatgacgtcttactgctagaaacccggggcccacaggacaacagaagcttgtgcgcgctcgaaccctccgggtgtacaagcttgccaagcaaagccagcacacgagccgcgcgcttaggggagtatctgctccaagatctgcagagtgggcaatgcctgcaattatgggatgacgacctgggggccctgtgggcctgtcccatggacaaatacattcacaagaggtgggcgttggtgtggctcgcttgtctgcttttcgccgcagccctgtcgcttatactcctcctgaagaaagaccacgcaaagggctggctgcgtcttctcaaacaggacgtcagaagtggcgcagcagcgcgagggcgggccgctctcttactgtattcagctgacgatagcgggtttgaaagattggtgggggctttggcatccgctctgtgccagctccccctgcgcgtcgcagtggatctctggagtaggagagagcttagtgcccaaggtcctgtagcctggtttcacgcacaaagacggcagaccctccaggaaggcggagtggtagtgcttctgttctctcccggagccgtggctctgtgcagcgagtggctgcaggacggcgtcagcggcccgggcgcccacggtcctcacgacgcctttcgggcctccctgtcttgcgtgctgcctgactttcttcaggggcgagcccctggcagttacgtaggcgcatgtttcgaccgcttgttacatcctgatgccgttcctgccctctttaggaccgtccccgtgtttacacttccctctcagctcccagattttcttggggcactgcagcagcccagggcaccacgttcaggacgcctgcaggagagagccgaacaggtcagcagagctctccaacctgccctcgactcctacttccatccacccggaacaccagcgccaggccgcggagtcggtccgggagctggtcctggggccggtgacggaacctag

SEQ ID NO: 225431 - DNA, 2384 bp, Artificial Sequence
  derived and/or modified sequence
acagccagcagcctgccgggagccaaaacgaaagcactccgtgctggaagtaggaggagagtcaggactcccaggacagagagtgcacaaactacccagcacagccccctccgccccctctggaggctgaagagggattccagcccctgccacccacagacacgggctgactggggtgtctgccccccttgggggggggcagcacagggcctcaggcctgggtgccacctggcacctagaagatgcctgtgccctggttcttgctgtccttggcactgggccgaagcccagtggtcctttctctggagaggcttgtggggcctcaggacgctacccactgctctccgggcctctcctgccgcctctgggacagtgacatactctgcctgcctggggacatcgtgcctgctccgggccccgtgctggcgcctacgcacctgcagacagagctggtgctgaggtgccagaaggagaccgactgtgacctctgtctgcgtgtggctgtccacttggccgtgcatgggcactgggaagagcctgaagatgaggaaaagtttggaggagcagctgactcaggggtggaggagcctaggaatgcctctctccaggcccaagtcgtgctctccttccaggcctaccctactgcccgctgcgtcctgctggaggtgcaagtgcctgctgcccttgtgcagtttggtcagtctgtgggctctgtggtatatgactgcttcgaggctgccctagggagtgaggtacgaatctggtcctatactcagcccaggtacgagaaggaactcaaccacacacagcagctgcctgccctgccctggctcaacgtgtcagcagatggtgacaacgtgcatctggttctgaatgtctctgaggagcagcacttcggcctctccctgtactggaatcaggtccagggccccccaaaaccccggtggcacaaaaacctgactggaccgcagatcattaccttgaaccacacagacctggttccctgcctctgtattcaggtgtggcctctggaacctgactccgttaggacgaacatctgccccttcagggaggacccccgcgcacaccagaacctctggcaagccgcccgactgcaactgctgaccctgcagagctggctgctggacgcaccgtgctcgctgcccgcagaagcggcactgtgctggcgggctccgggtggggacccctgccagccactggtcccaccgctttcctgggagaacgtcactgtggacaaggttctcgagttcccattgctgaaaggccaccctaacctctgtgttcaggtgaacagctcggagaagctgcagctgcaggagtgcttgtgggctgactccctggggcctctcaaagacgatgtgctactgttggagacacgaggcccccaggacaacagatccctctgtgccttggaacccagtggctgtacttcactacccagcaaagcctccacgagggcagctcgccttggagagtacttactacaagacctgcagtcaggccagtgtctgcagctatgggacgatgacttgggagcgctatgggcctgccccatggacaaatacatccacaagcgctgggccctcgtgtggctggcctgcctactctttgccgctgcgctttccctcatcctccttctcaaaaaggatcacgcgaaagggtggctgaggctcttgaaacaggacgtccgctcgggggcggccgccaggggccgcgcggctctgctcctctactcagccgatgactcgggtttcgagcgcctggtgggcgccctggcgtcggccctgtgccagctgccgctgcgcgtggccgtagacctgtggagccgtcgtgaactgagcgcgcaggggcccgtggcttggtttcacgcgcagcggcgccagaccctgcaggagggcggcgtggtggtcttgctcttctctcccggtgcggtggcgctgtgcagcgagtggctacaggatggggtgtccgggcccggggcgcacggcccgcacgacgccttccgcgcctcgctcagctgcgtgctgcccgacttcttgcagggccgggcgcccggcagctacgtgggggcctgcttcgacaggctgctccacccggacgccgtacccgcccttttccgcaccgtgcccgtcttcacactgccctcccaactgccagacttcctgggggccctgcagcagcctcgcgccccgcgttccgggcggctccaagagagagcggagcaagtgtcccgggcccttcagccagccctggatagctacttccatcccccggggactcccgcgccgggacgcggggtgggaccaggcgcgggacctggggcgggggacgggacttaaataaaggcagacgctgtttttcta

SEQ ID NO: 225432 - DNA, 2118 bp, Artificial Sequence
  derived and/or modified sequence
atgcctgtgccctggttcctgctgagcctggccctgggccgcagccctgtggtgctgagcctggagcggctggtgggcccccaggatgccacccactgcagccctggcctgagctgccgcctgtgggacagcgacatcctgtgcctgcccggggacatcgtgcctgcccctggccctgtgctggcccccacccacctgcagacagagctggtgctgcgctgccagaaggagacagactgtgacctgtgcctgcgggtggccgtgcacctggccgtgcacggccactgggaggagccagaagatgaggagaagtttggaggagctgctgacagcggcgtggaggagcccagaaatgccagcctgcaggcccaggtggtgctgtccttccaggcctaccccacagcccgctgtgtgctgctggaggtgcaggtgcctgctgccctggtgcagtttggccagagcgtgggctctgtggtgtatgactgctttgaagctgccctgggcagcgaggtgcgcatctggagctacacccagcccaggtatgagaaggagctgaaccacacccagcagctgcctgccctgccctggctgaatgtgtctgcagatggagacaacgtgcacctggtgctgaatgtgtctgaggagcagcacttcggcctgagcctgtactggaaccaggtgcagggcccccccaagccccgctggcacaagaacctgaccggcccccagatcatcaccctgaaccacacagacctggtgccctgcctgtgcatccaggtgtggcccctggagccagattctgtgaggaccaacatctgccccttccgggaggacccccgggcccaccagaacctgtggcaggccgcccggctgcagctgctgaccctgcagagctggctgctggatgccccctgcagcctgcctgctgaggccgccctgtgctggagggcccctggaggagacccctgccagcccctggtgccccccctgtcctgggagaatgtgacagtggacaaggtgctggagttccccctgctgaagggccaccccaacctgtgtgtgcaggtgaacagcagcgagaagctgcagctgcaggagtgcctgtgggccgacagcctgggccccctgaaggatgatgtgctgctgctggagacccggggcccccaggacaacagaagcctgtgtgccctggagcccagcggctgcaccagcctgcccagcaaggccagcaccagggctgcccggctgggggagtacctgctgcaggacctgcagagcggccagtgcctgcagctgtgggatgatgacctgggcgccctgtgggcctgccccatggacaagtacatccacaagcgctgggccctggtgtggctggcctgcctgctgtttgctgctgccctgagcctcatcctgctgctgaagaaggaccacgccaagggctggctgcggctgctgaagcaggatgtgcgctctggagctgctgcccggggccgggccgccctgctgctgtacagcgcagatgattctggctttgagcggctggtgggcgccctggccagcgccctgtgccagctgcccctgcgggtggccgtggacctgtggagccggcgggagctgagcgcccagggccctgtggcctggttccacgcccagaggcggcagaccctgcaggagggcggcgtggtggtgctgctcttcagccctggagctgtggccctgtgcagcgagtggctgcaggatggagtgtctggccctggggcccacggcccccatgatgccttccgggccagcctgagctgtgtgctgcctgacttcctgcagggccgggcccctggcagctatgtgggcgcctgctttgaccggctgctgcacccagatgctgtgcctgccctcttcagaacagtgcctgtgttcaccctgcccagccagctgcctgacttcctgggcgccctgcagcagccccgggcccccaggagcggccgcctgcaggagcgggcagagcaggtgtcccgggccctgcagcctgccctggacagctacttccaccccccaggcaccccagcccctggccggggcgtgggccctggagctggccctggagctggagatggcacctag

SEQ ID NO: 225433 - DNA, 2118 bp, Artificial Sequence
  derived and/or modified sequence
atgcccgtgccctggttcctgctgagcctggccctgggccggagcccggtggtcctgtcgctggagcgattggtgggtccccaagatgctacccattgctctcctgggctgtcctgccggttgtgggatagcgacatcctttgtttgcccggcgacattgtgcctgcacctggtccggttctcgctcctactcacctgcagaccgagctggttctaaggtgtcaaaaggaaacggactgcgacttgtgtctaagggtggccgtacacttggccgttcacgggcactgggaagaaccagaggacgaggaaaaatttggcggggcagccgactccggggtggaggaacctagaaatgcaagcctacaagcccaggttgtcctctcattccaagcctaccctacagctcgatgcgttttgctggaggtccaggtgcccgcagctcttgtccagtttggccagtccgtgggatcagtggtgtacgactgcttcgaagcggcgctgggtagcgaggtgaggatatggagctacactcaacctcgctatgaaaaagagctgaatcacacccagcaactgcctgcactgccttggttgaacgtctcggccgacggagataacgtgcacctggtcctgaacgtgtccgaagagcaacacttcgggctcagcctttattggaatcaagttcagggtccacccaagccaaggtggcataagaacctgaccggtccccagataattacactgaatcatactgatctggtcccatgcttatgcattcaagtgtggcctctggagcccgactccgttagaacaaacatctgcccttttcgagaagatcctcgggcccatcaaaatctttggcaggcggcccggctacagctgctgaccttacaaagctggctcctggatgcgccctgctcactgcctgcggaagccgccctatgctggcgagcccccggcggggatccctgccaacccctggtgcccccactgagctgggaaaacgtgactgtggataaagtgctcgagttccccttactgaaggggcacccaaacctgtgcgttcaagttaactctagtgagaagctgcagctgcaggaatgcctgtgggcagatagcctgggtcccctgaaggacgacgttctcctgctggagacaaggggcccccaggataacagatcactgtgtgccctcgagccttctggatgcacatccttaccatctaaggccagcacccgagctgcccggctgggggagtatctgctgcaagatttgcagtcgggacagtgcctacagctgtgggacgatgacctgggggccctctgggcttgtcccatggataaatacattcacaaacggtgggctctcgtatggctggcatgtctgctgtttgcagcagccctgagcctcattctgctcctgaaaaaggaccatgccaaaggatggctcagactgttaaaacaagacgtcagaagcggggccgctgcccgaggacgtgcagctctgttgctctacagcgctgatgatagcgggttcgagcgacttgtgggcgctcttgcatccgctttatgtcaacttccactccgcgtggccgttgacctttggagcagaagagagctctctgcacagggtcctgtcgcctggttccacgcccagaggagacagaccttacaggagggtggagtggttgtgcttctgttctctcctggcgccgtggccctttgtagcgaatggctgcaagatggggtgagcggtccaggtgctcacggccctcacgacgccttccgcgctagtctctcctgtgtcctccctgatttccttcaaggaagggcccccggcagctatgttggggcttgcttcgatcgcctgttacacccagacgctgttcccgctctctttcggacggtgcctgtgttcactttaccgagccagctccccgatttccttggcgcattacagcagcctcgcgcaccgcgatcagggcgcctacaggaaagggctgagcaggtgtccagagccctgcagcccgctctagactcgtacttccatccaccgggaacacccgcccccgggcggggtgtgggacccggcgcagggccaggcgctggggacggaacctag

SEQ ID NO: 225434 - DNA, 2118 bp, Artificial Sequence
  derived and/or modified sequence
atgcctgtgccctggtttctgctttctctagctctgggtcggtccccagtggtcctttctctcgagagattggtgggtccacaggacgctactcattgtagcccaggtctaagttgcagactgtgggacagtgatatcctgtgcttaccaggcgatattgtccctgcgccaggtcccgtgctcgcaccaacccacttacagaccgaactcgtcctccgctgtcagaaggaaactgactgtgacctgtgtcttcgcgtggctgtgcacctggcagttcacggtcattgggaggagccagaagacgaagagaagttcggcggtgcagcagattctggagtggaggagccacgtaacgccagtctgcaggcccaagtcgtgctgtcttttcaggcttaccccactgccaggtgtgtgctgctggaggtgcaggtcccggcagcactggtgcagttcggccagagcgtcgggtccgtggtttatgactgcttcgaagctgccctggggagcgaagtgaggatctggtcctacacgcagcctaggtatgaaaaggagctgaaccatacacagcagttacccgcactgccctggctaaacgtgagcgccgacggcgacaacgttcacttggtgttgaacgtgtcagaggaacagcactttggccttagcctctattggaatcaggttcagggcccaccaaaacctcgctggcataagaatctgaccgggccacagatcattacactcaatcacactgatctcgtgccatgcttatgtattcaagtatggccgctcgaaccggatagcgtcaggaccaacatatgtccttttagagaggatccgagagcccaccagaatttgtggcaggccgctcggctccagctccttactttgcaaagctggctgcttgacgcaccttgttctctgccagccgaagctgccctgtgctggcgagcacctggaggggatccttgtcagccacttgtccccccattatcatgggaaaatgtgaccgtcgacaaagtcctggagttcccattactcaagggccacccaaacctgtgtgtccaggttaattcgtccgagaaactgcagctgcaggagtgcctatgggctgacagcctggggcctttaaaggacgacgtcctgctcttggaaacccgagggcctcaggataatagatcactttgcgccctggaaccttctggctgtaccagtcttccttccaaagccagtactagagccgctagactcggcgaatatctgctccaagatctccagagcggtcagtgtcttcagctctgggacgacgacctcggagcgctctgggcctgcccaatggacaaatacattcacaagcgctgggccttggtgtggctggcatgcttgctattcgcggctgccctttcgcttattttactgttaaaaaaagaccatgcgaagggttggctgcgtctcctgaaacaggatgtcaggagcggcgcagcggcaagaggccgagccgcattacttctttactcagccgacgatagcggcttcgagcggctggtgggagcgctggcaagtgcactttgtcagctgcctctccgagtcgcagtggacctgtggtcaaggcgcgaactctcagcacaggggccagtcgcctggttccatgcccagcgtagacagactctccaggaagggggtgttgtggtgctgctgtttagcccgggtgccgtggcgctgtgctcagaatggctgcaggatggtgtttccggcccaggggctcatggccctcacgacgcctttagagctagtctatcttgcgtgctccctgacttcctccagggcagggccccaggatcgtacgtgggggcttgcttcgaccgtctactgcacccagacgcagtaccggctttatttcgcacggtgccagttttcacactgccctctcagctccccgattttcttggggcactacagcagcctcgggcaccaagaagtggacgcctgcaggagcgagccgagcaggtgtcccgggctctccagccagccctcgattcctatttccatcccccaggtaccccggcaccaggcaggggcgtgggccctggcgctggacccggtgccggagacggcacatag

SEQ ID NO: 225435 - DNA, 2118 bp, Artificial Sequence
  derived and/or modified sequence
atgcccgtgccctggttcctgctgagcctggccctgggcagaagccccgtggtgctgagcctggagagactggtgggcccccaggacgccacccactgcagccccggcctgagctgcagactgtgggacagcgacatcctgtgcctgcccggcgacatcgtgcccgcccccggccccgtgctggcccccacccacctgcagaccgagctggtgctgagatgccagaaggagaccgactgcgacctgtgcctgagagtggccgtgcacctggccgtgcacggccactgggaggagcccgaggacgaggagaagttcggcggcgccgccgacagcggcgtggaggagcccagaaacgccagcctgcaggcccaggtggtgctgagcttccaggcctaccccaccgccagatgcgtgctgctggaggtgcaggtgcccgccgccctggtgcagttcggccagagcgtgggcagcgtggtgtacgactgcttcgaggccgccctgggcagcgaggtgagaatctggagctacacccagcccagatacgagaaggagctgaaccacacccagcagctgcccgccctgccctggctgaacgtgagcgccgacggcgacaacgtgcacctggtgctgaacgtgagcgaggagcagcacttcggcctgagcctgtactggaaccaggtgcagggcccccccaagcccagatggcacaagaacctgaccggcccccagatcatcaccctgaaccacaccgacctggtgccctgcctgtgcatccaggtgtggcccctggagcccgacagcgtgagaaccaacatctgccccttcagagaggaccccagagcccaccagaacctgtggcaggccgccagactgcagctgctgaccctgcagagctggctgctggacgccccctgcagcctgcccgccgaggccgccctgtgctggagagcccccggcggcgacccctgccagcccctggtgccccccctgagctgggagaacgtgaccgtggacaaggtgctggagttccccctgctgaagggccaccccaacctgtgcgtgcaggtgaacagcagcgagaagctgcagctgcaggagtgcctgtgggccgacagcctgggccccctgaaggacgacgtgctgctgctggagaccagaggcccccaggacaacagaagcctgtgcgccctggagcccagcggctgcaccagcctgcccagcaaggccagcaccagagccgccagactgggcgagtacctgctgcaggacctgcagagcggccagtgcctgcagctgtgggacgacgacctgggcgccctgtgggcctgccccatggacaagtacatccacaagagatgggccctggtgtggctggcctgcctgctgttcgccgccgccctgagcctgatcctgctgctgaagaaggaccacgccaagggctggctgagactgctgaagcaggacgtgagaagcggcgccgccgccagaggcagagccgccctgctgctgtacagcgccgacgacagcggcttcgagagactggtgggcgccctggccagcgccctgtgccagctgcccctgagagtggccgtggacctgtggagcagaagagagctgagcgcccagggccccgtggcctggttccacgcccagagaagacagaccctgcaggagggcggcgtggtggtgctgctgttcagccccggcgccgtggccctgtgcagcgagtggctgcaggacggcgtgagcggccccggcgcccacggcccccacgacgccttcagagccagcctgagctgcgtgctgcccgacttcctgcagggcagagcccccggcagctacgtgggcgcctgcttcgacagactgctgcaccccgacgccgtgcccgccctgttcagaaccgtgcccgtgttcaccctgcccagccagctgcccgacttcctgggcgccctgcagcagcccagagcccccagaagcggcagactgcaggagagagccgagcaggtgagcagagccctgcagcccgccctggacagctacttccacccccccggcacccccgcccccggcagaggcgtgggccccggcgccggccccggcgccggcgacggcacctag

SEQ ID NO: 225436 - protein, 600 aa, Artificial Sequence
  derived and/or modified sequence
MATPLPGRAGGPATPLSPTRLSRLQEKEELRELNDRLAHYIDRVRALELENDRLLLKISEKEEVTTREVSGIKALYESELADARRVLDETARERARLQIEIGKLRAELDEVNKSAKKREGELTVAQGRVKDLESLFHRSEVELAAALSDKRGLESDVAELRAQLAKAEDGHAVAKKQLEKETLMRVDLENRCQSLQEELDFRKSVFEEEVRETRRRHERRLVEVDSSRQQEYDFKMAQALEELRSQHDEQVRLYKLELEQTYQAKLDSAKLSSDQNDKAASAAREELKEARMRLESLSYQLSGLQKQASAAEDRIRELEEAMAGERDKFRKMLDAKEQEMTEMRDVMQQQLAEYQELLDVKLALDMEINAYRKLLEGEEERLKLSPSPSSRVTVSRATSSSSGSLSATGRLGRSKRKRLEVEEPLGSGPSVLGTGTGGSGGFHLAQQASASGSVSIEEIDLEGKFVQLKNNSDKDQSLGNWRIKRQVLEGEEIAYKFTPKYILRAGQMVTVWAAGAGVAHSPPSTLVWKGQSSWGTGESFRTVLVNADGEEVAMRTVKKSSVMRENENGEEEEEEAEFGEEDLFHQQGDPRTTSRGCYVM

SEQ ID NO: 225437 - DNA, 1803 bp, Artificial Sequence
  derived and/or modified sequence
atggccacccctttgccgggtcgtgccggagggccggctactcctctatctcccacaagactgtctaggctccaggagaaggaggagctacgcgagcttaatgacagactggctcactatatcgatagggtgcgagctcttgagcttgagaacgaccgtctattgctgaaaatcagcgaaaaggaagaggtgacaacccgggaggtatccggaatcaaggctctgtacgaaagtgaattagccgacgcacgccgggtcctggatgagaccgcccgagagagggcaagattacagatcgagatcggaaaattacgcgccgagctagatgaggtaaataagtcagctaagaagcgggagggcgagctgaccgtggctcagggtcgagttaaggacctggaatctctttttcatcgcagcgaagtggaactagccgcggccctgagcgataagcgtggtttagagagcgatgttgccgagctgagggcccagctggccaaagcggaggacgggcacgccgtagccaagaagcaattggaaaaagaaactctcatgcgggtggatttagagaatcgctgccaatctctccaagaggaactggacttccggaaaagtgtgtttgaggaggaggtcagagagacaagaaggcggcacgagaggcgcctggttgaggtggacagcagccgtcaacaggagtatgatttcaaaatggcccaggccttggaggagttgcgatctcaacatgatgagcaagttaggctctacaaactcgaactggagcagacctatcaggctaagctcgactcagcaaagctgtctagtgatcagaacgataaggcagccagcgctgcccgggaggaattgaaagaggctcgaatgaggctcgagtcactgagctaccagcttagcggccttcagaagcaggccagcgcagctgaggatcggattagggaacttgaagaagcaatggctggggaacgtgacaaattccggaagatgctggatgccaaggaacaagagatgaccgagatgagagatgtgatgcaacaacagctggccgaataccaggagctcctagacgttaaacttgccttggatatggaaataaatgcttatcgcaagttgctggaaggtgaagaagaacgactaaaacttagcccctccccctccagtagagttacagtttccagggcgaccagtagtagctccgggagtcttagcgccactgggcggctgggccgctctaaacgcaagcgactcgaagttgaggaacctctaggctccgggccctctgtgctgggaactggaacaggcggctccggcggcttccatttagcacagcaggcctcggccagcggctccgtgtccattgaggagattgacctggaaggaaaatttgtgcaactcaagaataactcagataaggaccagtcgttgggtaactggcgcatcaagcgccaggtgcttgaaggcgaggagatcgcctataagtttactcctaaatacatactgagagctggccagatggtcaccgtatgggccgctggcgccggcgtagcacatagtcccccctctaccctcgtctggaagggacagtctagctgggggacaggcgagtcctttcgtacagtcttagtgaatgccgatggagaagaggtggccatgcgcactgtgaaaaagtcttcggttatgagggagaacgagaatggggaagaggaggaagaggaggccgagttcggggaagaagacctttttcatcagcagggtgaccctagaacgacctcgaggggatgttacgtgatgtag

SEQ ID NO: 225438 - DNA, 1803 bp, Artificial Sequence
  derived and/or modified sequence
atggctacccccctcccagggagagccggcggccctgccacgcctttatctccaactaggctgtcacgattgcaggagaaggaggagcttcgtgagctgaacgaccgcctggctcactacatcgaccgagtgcgagcgctggagctcgagaacgacagactgctgcttaagattagtgaaaaagaagaagtgacaacacgcgaagttagcgggattaaggctctgtatgaaagcgagctggccgacgctcgacgtgttctcgatgaaaccgcgagagagagggccagactccagattgagattggaaaacttcgcgcggagcttgacgaggtgaataaatccgcgaaaaaacgcgagggagaactcacggtcgcccagggcagggtgaaggatctagaatccttgtttcacagatctgaagtcgaactggctgcggctctgtcagataaacggggtctcgagtccgacgttgccgagctgcgcgcccagctggcaaaggccgaagacggccatgcagttgcaaagaaacaactcgaaaaagagacccttatgcgagttgaccttgaaaatagatgtcaaagcctccaggaggagctggacttcaggaagagtgtgtttgaagaggaggtgcgagagactaggaggcgtcatgagaggaggttagtggaggtggacagttctagacagcaggagtatgattttaaaatggctcaagctctggaggaactcaggtcacagcacgacgagcaggtgcgcctttacaagttggagttggaacagacgtatcaggccaagttagattctgccaaattatcttctgaccaaaacgataaagccgcatcagccgcccgcgaggagcttaaggaagccaggatgaggctggagtctctgagctaccagctctcaggactgcaaaaacaggctagtgcggcagaggacagaatccgagaacttgaagaggccatggccggagaaagagataagtttcgaaaaatgctcgacgccaaagagcaggagatgacggagatgcgagatgtcatgcagcaacaactggcagagtaccaggagctcctagatgtgaagctcgccctcgatatggaaatcaatgcatatagaaaattgctagaaggagaggaagaacgcctgaagctctcaccctcacctagcagtcgcgttactgtgtctagggccaccagctcaagcagcggctccttatctgcaacgggccgcttgggaaggtctaaacgcaaacgactggaggtcgaggagcccctgggcagcggaccttccgtgttgggaactggtaccggaggttctggcggctttcacctggctcagcaggcctcagccagtggttctgtgtctatcgaggagatcgatctggaaggtaagttcgtgcagcttaaaaacaatagcgataaagatcagtctctaggaaactggcggataaaacgacaggtactggagggcgaagaaatcgcctacaagtttacaccaaagtatatcctgcgcgctggacagatggtgactgtgtgggctgccggtgccggggttgcgcatagccctccctcgactttggtgtggaagggacagtcctcttggggaacaggcgagtcatttagaaccgttctcgttaatgcagatggcgaggaggtcgctatgaggaccgtaaaaaaatccagcgtgatgagagaaaacgagaatggggaggaggaagaagaggaggccgagttcggagaggaggacttatttcaccagcagggtgatcctaggactacctctaggggctgctatgtaatgtag

SEQ ID NO: 225439 - DNA, 4671 bp, Artificial Sequence
  derived and/or modified sequence
gccgcggcgggcggcgggcgcggcgcggcgcggcgccatcttgcagccggcggcgcggattgaatgagcccgccgagcccgggccgccgtcgggagcagcgcaggccgcgagccgccgccaccatggccacgccgctgcccggccgcgcgggcgggcccgccacgccgctgtcgcccacgcgcctgtcgcggctgcaggagaaggaggagctgcgcgagctcaacgaccgcctggcgcactacatcgaccgcgtccgcgcgctggagctggagaacgaccggctcctgctcaagatctcagagaaggaggaggtgaccacgcgcgaggtgagtggcatcaaggcgctgtacgagtcggagctggccgatgcccggagagtcctggatgagacggctcgagagcgtgcccggctgcagatagagattgggaagctgagggcagagttggacgaggtcaacaagagcgccaagaagagggagggcgagcttacggtggcccagggccgtgtgaaggacctggagtccctgttccaccggagcgaggtggagctggcagctgccctcagcgacaagcgcggcctggagagtgacgtggctgagctgcgggcccagctggccaaggccgaggacggtcatgcagtggccaaaaagcagctggagaaggagacgctgatgcgtgtggacctggagaaccgctgccagagcctgcaggaggagctggacttccggaagagtgtgttcgaggaggaggtgcgggagacgcggcggcggcacgagcggcgcctggtggaggtggacagcagccggcagcaggagtacgacttcaagatggcacaggcgctggaggagctgcggagccagcacgacgagcaagtgcggctctacaagctggagctggagcagacctaccaggccaagctggacagcgccaagctgagctctgaccagaacgacaaggcggccagtgcggctcgcgaggagctgaaggaggcccgcatgcgcctggagtccctcagctaccagctctccggcctccagaagcaggccagtgccgctgaagatcgcattcgggagctggaggaggccatggccggggagcgggacaagttccggaagatgctggacgccaaggagcaggagatgacggagatgcgggacgtgatgcagcagcagctggccgagtaccaggagctgctggacgtgaagctggccctggacatggagatcaacgcctaccggaagctcctggagggcgaggaggagaggctgaagctgtcccccagcccatcctcgcgcgtcaccgtctcacgagccacctcgagcagcagcggcagcttgtccgccaccgggcgcctgggccgcagtaagcggaagcggctggaggtggaggagcccttgggcagcggcccaagcgtcctgggcacgggcacgggtggcagcggtggcttccacctggcccagcaggcctcggcctcgggtagcgtcagcatcgaggagatcgacctggagggcaagtttgtgcagctcaagaacaactcggacaaggatcagtctctggggaactggagaatcaagaggcaggtcttggagggggaggagatcgcctacaagttcacgcccaagtacatcctgcgcgccggccagatggtcacggtgtgggcagctggtgcgggggtggcccacagccccccctcgacgctggtgtggaagggccagagcagctggggcacgggcgagagcttccgcaccgtcctggttaacgcggatggcgaggaagtggccatgaggactgtgaagaagtcctcggtgatgcgtgagaatgagaatggggaggaagaggaggaggaagccgagtttggcgaggaggatcttttccaccaacagggggacccgaggaccacctcaagaggctgctacgtgatgtgaacccacactcctcatccacacacctttctttacccagagccactgaaaactatttttatatcattggctttctttagttcttgatacatttctagagaatttctaagcgaactgccagaacgtgtgggtgggtctcccccagccctccctcctggcgggtctcctccagcctcacttcgctgccacttcgccgctgccccggagacttttcaatcccaccccactcctcatctcaccatttggtcaaattggaagcccagggccaggacccggaggtttagaagatgcttgggcttggagggaggagggccggcgaggctagcgaggggacaggagacggccctgctgcggacggagcgcggaaactgcgtaggaattcagtggtggtgggtttttttaaggctttctacaaaaccaaattcagaatccaggcgtcgacctggtggggcccggggccaagcctgcattctggctgcccagcttcggacagcgggaactcctcaggcagccacgcagcgggtgtgggccagcatggggatggcgtggcccccagggcgggttttcactccgctgcctgggcttccagattcccgttctggcagcgcaccggccgggtttctcggaccgttgactttatttgggggagttttcccgcagttcagttcctgactgtgcaaggccaacagggcaggggaggggaagacctggggaaggaagaatgaggacagtcccgtcgtaagacctgtcacaacaataagcagggaggggagatgtggaggggacacatctggttgccttggaggcagaagctgtgagtttcagaacagctgtctgcagggaacgccaccatgttgaccctctggaggagagcgctgtggagcccctcccgtgttccagctccgtctgccctgtgcctatatatacacatgcgtctatccatactgtgcttttatctgtgattttctcgctgaaaccatgtttctcagacaggccaaggccacctgactcctatcacgacgcacccaagcccctcagtccagcttcccaatgcctggcaccccccttcggcaatagctcaccgtttacaccctccctcatagatacacagaagttatttttttaatggatatttatttttttacattggtcagtacacaggtcaggagctcacgccagggccttgaggacaggctgaccctcctccccggggtggcgtggggctggggcaccctccgacggcagagcctccttcagaaagtgcagctcaagtcttaaagacaccaaaactgagccatgggcacgcgccgtctccgggccatggcgttcactgcagggcgggggcggcaccgctcccctgtgactgcatcccgcctccctggggacctgcctgtggcaggaaggaatggggggccccagccccaggccgggaaggagccagcggccgacaaagcagaaacacccgctgctccacgtagcccctgctcgctgtccttgctctcagaagtcccggtcccatgtagatagaggggggcgcatcttaccaaagcatttcctcctggaggctacgccgctgtgctcccagtcaggcggctggtagggagctttgcctgccccggggataccctctgccagccgctggaagtgggaatgctggcgacagactgtgtcctctttcccaccttcatagcaggaatcacccggacccgactggctgggcttcgtgctagcgagggttctgggggtgggtcttggtgatcttgtcctatggggagtctgcagtggtctcagccacatcctatgtattttggctctggaggagcaaagctgtatcctggagttggtctgtgatttgccgacagccttgcaggctgggctcagggacaaagtcccccccaaaacccgcaggtcctcatgtccagacgctgcccagtcctgtcctgaaaacagcacgccccaggcccacagaaccccccaccctacatttgccttgggtggagctgggggtggtcctaggactgcgggtgcccttagctgaagggggtggggagaagcgtggactgggcagcctgtgggtaattggaggttcattgagaattgagtctttggaaacactaagaaaatcaaatttttaaaagttatttatggcctgggaaacaatttgcatttgtccccaaatacgcttagctgtgtgccgcttagaacgatgcgaaaccatccctctgtgtaagcccgtgccgtgtgactcgaagcctagcgccctccctgcgaagcatcagacgccacccagccctggggggaggcccacgcctgctggaccaacgcgggttctggggtgcacagcgccaggttaacgctgaagcctgccccgctgagcccaggagccgggaggcctgcgggctgacccagaatccgatcatgcacctgtcctcatgccagcggctttggctggggttggtctgaagcctgcacgcggcagttctttgttaaagatctgagggactcctcagtcctggggcgtcgccgcctgcagcctcttccaagccctgcgtccagcgagcgtcacagcacaacctgcaaaaacggagctgggctgcagctggggctggcatggactttcatttcagagattcggtttttaagaagatgcatgcctaatgtgttcttttttttttccaatgatttgtaatatacattttatgactggaaacttttttgtacaacactccaataaacattttgatttta

SEQ ID NO: 225440 - DNA, 4634 bp, Artificial Sequence
  derived and/or modified sequence
catcttgcagccggcggcgcggattgaatgagcccgccgagcccgggccgccgtcgggagcagcgcaggccgcgagccgccgccaccatggccacgccgctgcccggccgcgcgggcgggcccgccacgccgctgtcgcccacgcgcctgtcgcggctgcaggagaaggaggagctgcgcgagctcaacgaccgcctggcgcactacatcgaccgcgtccgcgcgctggagctggagaacgaccggctcctgctcaagatctcagagaaggaggaggtgaccacgcgcgaggtgagtggcatcaaggcgctgtacgagtcggagctggccgatgcccggagagtcctggatgagacggctcgagagcgtgcccggctgcagatagagattgggaagctgagggcagagttggacgaggtcaacaagagcgccaagaagagggagggcgagcttacggtggcccagggccgtgtgaaggacctggagtccctgttccaccggagcgaggtggagctggcagctgccctcagcgacaagcgcggcctggagagtgacgtggctgagctgcgggcccagctggccaaggccgaggacggtcatgcagtggccaaaaagcagctggagaaggagacgctgatgcgtgtggacctggagaaccgctgccagagcctgcaggaggagctggacttccggaagagtgtgttcgaggaggaggtgcgggagacgcggcggcggcacgagcggcgcctggtggaggtggacagcagccggcagcaggagtacgacttcaagatggcacaggcgctggaggagctgcggagccagcacgacgagcaagtgcggctctacaagctggagctggagcagacctaccaggccaagctggacagcgccaagctgagctctgaccagaacgacaaggcggccagtgcggctcgcgaggagctgaaggaggcccgcatgcgcctggagtccctcagctaccagctctccggcctccagaagcaggccagtgccgctgaagatcgcattcgggagctggaggaggccatggccggggagcgggacaagttccggaagatgctggacgccaaggagcaggagatgacggagatgcgggacgtgatgcagcagcagctggccgagtaccaggagctgctggacgtgaagctggccctggacatggagatcaacgcctaccggaagctcctggagggcgaggaggagaggctgaagctgtcccccagcccatcctcgcgcgtcaccgtctcacgagccacctcgagcagcagcggcagcttgtccgccaccgggcgcctgggccgcagtaagcggaagcggctggaggtggaggagcccttgggcagcggcccaagcgtcctgggcacgggcacgggtggcagcggtggcttccacctggcccagcaggcctcggcctcgggtagcgtcagcatcgaggagatcgacctggagggcaagtttgtgcagctcaagaacaactcggacaaggatcagtctctggggaactggagaatcaagaggcaggtcttggagggggaggagatcgcctacaagttcacgcccaagtacatcctgcgcgccggccagatggtcacggtgtgggcagctggtgcgggggtggcccacagccccccctcgacgctggtgtggaagggccagagcagctggggcacgggcgagagcttccgcaccgtcctggttaacgcggatggcgaggaagtggccatgaggactgtgaagaagtcctcggtgatgcgtgagaatgagaatggggaggaagaggaggaggaagccgagtttggcgaggaggatcttttccaccaacagggggacccgaggaccacctcaagaggctgctacgtgatgtgaacccacactcctcatccacacacctttctttacccagagccactgaaaactatttttatatcattggctttctttagttcttgatacatttctagagaatttctaagcgaactgccagaacgtgtgggtgggtctcccccagccctccctcctggcgggtctcctccagcctcacttcgctgccacttcgccgctgccccggagacttttcaatcccaccccactcctcatctcaccatttggtcaaattggaagcccagggccaggacccggaggtttagaagatgcttgggcttggagggaggagggccggcgaggctagcgaggggacaggagacggccctgctgcggacggagcgcggaaactgcgtaggaattcagtggtggtgggtttttttaaggctttctacaaaaccaaattcagaatccaggcgtcgacctggtggggcccggggccaagcctgcattctggctgcccagcttcggacagcgggaactcctcaggcagccacgcagcgggtgtgggccagcatggggatggcgtggcccccagggcgggttttcactccgctgcctgggcttccagattcccgttctggcagcgcaccggccgggtttctcggaccgttgactttatttgggggagttttcccgcagttcagttcctgactgtgcaaggccaacagggcaggggaggggaagacctggggaaggaagaatgaggacagtcccgtcgtaagacctgtcacaacaataagcagggaggggagatgtggaggggacacatctggttgccttggaggcagaagctgtgagtttcagaacagctgtctgcagggaacgccaccatgttgaccctctggaggagagcgctgtggagcccctcccgtgttccagctccgtctgccctgtgcctatatatacacatgcgtctatccatactgtgcttttatctgtgattttctcgctgaaaccatgtttctcagacaggccaaggccacctgactcctatcacgacgcacccaagcccctcagtccagcttcccaatgcctggcaccccccttcggcaatagctcaccgtttacaccctccctcatagatacacagaagttatttttttaatggatatttatttttttacattggtcagtacacaggtcaggagctcacgccagggccttgaggacaggctgaccctcctccccggggtggcgtggggctggggcaccctccgacggcagagcctccttcagaaagtgcagctcaagtcttaaagacaccaaaactgagccatgggcacgcgccgtctccgggccatggcgttcactgcagggcgggggcggcaccgctcccctgtgactgcatcccgcctccctggggacctgcctgtggcaggaaggaatggggggccccagccccaggccgggaaggagccagcggccgacaaagcagaaacacccgctgctccacgtagcccctgctcgctgtccttgctctcagaagtcccggtcccatgtagatagaggggggcgcatcttaccaaagcatttcctcctggaggctacgccgctgtgctcccagtcaggcggctggtagggagctttgcctgccccggggataccctctgccagccgctggaagtgggaatgctggcgacagactgtgtcctctttcccaccttcatagcaggaatcacccggacccgactggctgggcttcgtgctagcgagggttctgggggtgggtcttggtgatcttgtcctatggggagtctgcagtggtctcagccacatcctatgtattttggctctggaggagcaaagctgtatcctggagttggtctgtgatttgccgacagccttgcaggctgggctcagggacaaagtcccccccaaaacccgcaggtcctcatgtccagacgctgcccagtcctgtcctgaaaacagcacgccccaggcccacagaaccccccaccctacatttgccttgggtggagctgggggtggtcctaggactgcgggtgcccttagctgaagggggtggggagaagcgtggactgggcagcctgtgggtaattggaggttcattgagaattgagtctttggaaacactaagaaaatcaaatttttaaaagttatttatggcctgggaaacaatttgcatttgtccccaaatacgcttagctgtgtgccgcttagaacgatgcgaaaccatccctctgtgtaagcccgtgccgtgtgactcgaagcctagcgccctccctgcgaagcatcagacgccacccagccctggggggaggcccacgcctgctggaccaacgcgggttctggggtgcacagcgccaggttaacgctgaagcctgccccgctgagcccaggagccgggaggcctgcgggctgacccagaatccgatcatgcacctgtcctcatgccagcggctttggctggggttggtctgaagcctgcacgcggcagttctttgttaaagatctgagggactcctcagtcctggggcgtcgccgcctgcagcctcttccaagccctgcgtccagcgagcgtcacagcacaacctgcaaaaacggagctgggctgcagctggggctggcatggactttcatttcagagattcggtttttaagaagatgcatgcctaatgtgttcttttttttttccaatgatttgtaatatacattttatgactggaaacttttttgtacaacactccaataaacattttgatttt

SEQ ID NO: 225441 - DNA, 1803 bp, Artificial Sequence
  derived and/or modified sequence
atggccacccccctgcccggccgggccggcggccctgccacccccctgagccccacccggctgagccggctgcaggagaaggaggagctgcgggagctgaatgaccggctggcccactacatcgacagagtgcgggccctggagctggagaatgaccggctgctgctgaagatcagcgagaaggaggaggtgaccacccgggaggtgtctggcatcaaggccctgtatgagagcgagctggctgatgcccggcgggtgctggatgaaacagcccgggagcgggcccggctgcagattgaaattggcaagctgcgggcagagctggatgaggtgaacaagagcgccaagaagcgggagggggagctgactgtggcccagggccgggtgaaggacctggagagcctcttccacaggtctgaggtggagctggccgccgccctgagtgacaagaggggcctggagagtgatgtggccgagctgcgggcccagctggccaaggccgaggatggccatgctgtggccaagaagcagctggagaaggagaccctgatgagggtggacctggagaaccgctgccagagcctgcaggaggagctggacttcaggaagtctgtgtttgaggaggaggtgcgggagaccaggagaagacatgaaagaaggctggtggaggtggacagcagccggcagcaggagtatgacttcaagatggcccaggccctggaggagctgcggagccagcatgatgagcaggtgcggctgtacaagctggagctggagcagacctaccaggccaagctggacagcgccaagctgagcagtgaccagaatgacaaggccgccagcgctgcccgggaggagctgaaggaggccaggatgaggctggagagcctgagctaccagctgagcggcctgcagaagcaggccagcgctgctgaggaccgcatccgggagctggaggaggccatggccggggagcgggacaagttcaggaagatgctggatgccaaggagcaggagatgacagagatgagagatgtgatgcagcagcagctggccgagtaccaggagctgctggatgtgaagctggccctggacatggagatcaatgcctacaggaagctgctggagggggaggaggagcggctgaagctgagccccagccccagcagccgggtgacagtgtcccgggccaccagcagcagcagcggcagcctgagcgccaccggccgcctgggccgcagcaagaggaagaggctggaggtggaggagcccctgggcagcggccccagcgtgctgggcaccggcaccggcggcagcggcggcttccacctggcccagcaggccagcgccagcggctctgtgtccattgaggagattgacctggagggcaagtttgtgcagctgaagaacaacagcgacaaggaccagagcctgggcaactggaggatcaagaggcaggtgctggagggggaggagatcgcctacaagttcacccccaagtacatcctgcgggccggccagatggtgacagtgtgggccgccggggccggcgtggcccacagcccccccagcaccctggtgtggaagggccagagctcctggggcaccggggagagcttcagaacagtgctggtgaatgctgatggagaggaggtggccatgaggacagtgaagaagagctctgtgatgagagaaaatgaaaatggagaggaggaggaggaggaggccgagtttggagaagaagatctcttccaccagcagggcgaccccaggaccaccagccggggctgctacgtgatgtag

SEQ ID NO: 225442 - DNA, 1803 bp, Artificial Sequence
  derived and/or modified sequence
atggccacccccctgcccggccgggccggcggccccgccacccccctatccccaacccgtctaagccggctgcaagagaaagaagagctaagagaattaaatgataggcttgcacactacatagacagagtaagagcgctggagctggagaatgaccgtctgttgctgaaaatttctgaaaaagaagaggtcactaccagggaggtctctgggataaaggcgctgtacgagtctgagctcgccgatgcccgccgggtgctagatgaaacggcccgtgagagggctcgcctgcagatcgaaataggcaagctgcgtgccgagcttgacgaagttaacaaatcagccaaaaaaagggagggcgaactgactgtcgcccagggacgggtcaaggaccttgagtccttgttccacaggtcggaggtggagttggcagctgctctctcagataaacggggcctggaatcagacgttgctgaactacgcgcccagttagcaaaggccgaagatggacatgccgtagcaaagaagcagttggagaaggagacattaatgagggtcgacctggagaaccgctgccaaagcctccaggaggaactggacttcagaaagagtgtcttcgaagaggaagtgagggaaactagaagacggcatgagaggagattagtagaggtcgatagctctaggcagcaagagtacgactttaagatggcacaggccctcgaggagctgaggtcccagcatgatgaacaagtgagactctataagctggagcttgagcagacgtatcaggccaaacttgactctgcaaagctctcgagtgatcagaatgacaaagcagccagtgcagctcgcgaagaactgaaggaggcccgaatgcgactcgaatctctgagctaccagctgagcggtctgcagaagcaagctagcgcggcggaggatcgcatccgcgaactagaagaggcaatggcaggtgaaagggacaagttcaggaagatgctagacgctaaagaacaagaaatgactgagatgcgggacgtgatgcagcaacagctcgccgaataccaagagctgctcgacgtgaaacttgcactcgatatggagatcaacgcctatcgcaagctgctagagggggaggaggagcgcctgaagttatctccaagcccaagcagtcgggtaaccgtctctagggccacctccagctcaagcggctccctctcagcaacaggccgcctggggcggtcaaagcgtaagcggctcgaggttgaggaaccgctgggctctgggccgtccgttttagggaccggtacagggggctctggaggcttccatctggctcagcaggccagtgccagtggctccgttagcattgaggagattgatctggaaggtaagttcgtccagttgaaaaacaatagcgacaaagatcaatccttaggtaattggcggatcaagagacaggtgttagagggtgaagaaattgcatataagttcaccccaaagtacatcctgcgggcggggcagatggtcaccgtgtgggcggcaggagccggtgttgcacactctcccccatccacactggtgtggaagggccagtcaagctggggtactggagaatcctttcggacggtcctcgttaacgcagatggagaggaggtcgccatgcggacagttaaaaagagcagtgtaatgagagaaaatgaaaacggggaggaggaggaagaggaggctgaatttggggaggaggatctgtttcaccaacagggggatccgagaactacctcccgggggtgctacgtcatgtag

SEQ ID NO: 225443 - DNA, 1803 bp, Artificial Sequence
  derived and/or modified sequence
atggccacccccctgcccggccgggccggcggccccgccacccccctcagtcccaccaggcttagccggctccaagaaaaggaggaactccgcgaactgaatgacagattggcccactacatcgatcgggtgcgggctctggaacttgagaatgatagactccttctaaagatttctgaaaaggaggaagttactaccagggaggtgagcggcatcaaggcgctctatgaaagcgagctcgccgatgcaagaagggttctggacgagacagcccgcgagagggcccgtcttcagattgagatagggaagctccgtgcagaacttgacgaagtaaataagagcgcaaaaaagagagagggcgagctgacagtagcgcaggggcgcgtgaaggatttggagagtctgttccaccgttccgaagtggagctggcggctgctctgagcgataagcgcgggttggagtccgatgttgcagaattacgggcacaattggccaaggcggaggacggccacgccgtcgctaagaagcagctggaaaaagagaccctcatgcgagtggacctcgaaaatcggtgccagtccttgcaggaggaactcgacttcagaaagagtgtctttgaagaagaagtcagagagacccgcagaaggcacgagaggaggttggtggaggtcgactcctcccggcaacaggagtacgacttcaagatggcacaggccctggaggaacttaggagccagcacgacgaacaagtgcggctctataaactcgagctagaacaaacctaccaagccaagctggatagtgcgaaactatcaagtgaccagaatgacaaagccgcaagcgcagcccgggaggaactgaaggaagctcgaatgagactcgagtcactgagctatcaactgagcggcttacagaagcaggctagtgcagccgaagatcgcataagagagttggaagaggctatggctggagaaagggacaagtttcgcaaaatgctggatgcaaaagagcaggagatgaccgaaatgagagatgtgatgcagcaacagctcgcagagtaccaagagctgttagatgtcaagctggccctcgatatggagatcaacgcttatcgaaagctcctggagggtgaggaggagcgactgaaactgtccccatcaccatcatctcgcgtgaccgtcagtagagcgaccagttccagctcgggctctctgtcagccaccggcaggctcggacggtccaaaaggaagagattagaggtcgaagaacccctggggtcgggtccatccgtactcggtaccggcacaggcgggagcgggggcttccatctggcccagcaggccagtgctagcgggagcgtcagcattgaggagattgacctcgagggcaaattcgtgcaactaaagaataattccgataaggatcagtcactgggcaactggaggattaagcgccaggtcctggagggagaggagatagcctacaaatttacaccaaagtatatcctgcgtgcaggccagatggtcacagtgtgggcggctggtgccggagtggctcactcaccccctagcactctggtgtggaaagggcaatcaagttgggggaccggagaatcattccgtacagtgctggtgaacgctgatggtgaggaggtggccatgcggaccgtgaagaaatcctccgttatgagagaaaacgagaatggagaagaggaggaggaggaagcagagtttggggaggaggacttgttccaccagcagggggatccaagaacaacatcaaggggatgttacgtgatgtag

SEQ ID NO: 225444 - DNA, 1803 bp, Artificial Sequence
  derived and/or modified sequence
atggccactccactccctggcagagctgggggaccagccacgccactgtctccaacgagactatctcggttacaagagaaagaggaactgagagagttgaacgaccgcctggcacactacatcgatcgagtacgcgctctcgaattggaaaatgatagactactgttgaagatcagcgagaaggaagaagtaactacaagggaggtgtccggcattaaggcactctacgagtctgagttagctgacgctcgcagagtgctggatgagactgctcgggagcgcgcacgcctgcagatcgagattggtaagttaagagccgagctggatgaggtgaataagtcggccaaaaaaagggagggggagctaaccgttgcccagggtcgcgtgaaggatttagaatcgctctttcaccgctcagaagtggaactcgctgccgcactctcagataaacgcggtctggagtcagacgtggctgaactgcgagctcagttagccaaagccgaggacggacacgcagttgctaaaaagcagctggagaaagagactttaatgcgggtggacctcgagaaccggtgtcagtcactgcaggaggagctggacttcaggaagtcagtgttcgaagaggaggtcagggagacccgtaggagacacgagcgtaggctggtggaagtggacagctcgaggcagcaggaatacgactttaaaatggcacaggcactagaagagctgcggtctcagcacgatgaacaagtgagactttataaactagaactcgaacaaacctaccaagcgaagttggactccgccaagctctccagtgatcaaaatgataaagctgccagtgccgctcgagaagagcttaaagaagccaggatgagactcgagagcctgagctaccagctgtcaggccttcagaagcaggccagtgcggctgaagatagaatccgcgaattggaggaggcaatggcaggtgaacgcgacaagttcagaaagatgttagacgctaaggagcaggaaatgactgagatgcgggacgtcatgcaacagcagcttgcggagtatcaggagcttctggatgttaagcttgcccttgacatggagataaatgcttatcgaaaactgcttgagggcgaggaggagcgtctgaaactgagcccaagcccatcgagcagggtaacagtgagtagggctacctcctcatctagtgggagcttgagcgccacaggtcggctgggacgttctaagagaaaacgcctagaagtggaggaacctcttggctctggtcccagtgtgctgggtaccgggactgggggttccgggggattccacctcgcccaacaagcatctgcttccggaagtgtgtccatcgaagaaatagacttggagggtaaattcgtgcagcttaagaacaattcggacaaagaccagagtctgggcaactggcgcattaagaggcaggtactggagggggaggagatcgcttataagttcactcctaagtacattctgcgggcaggccaaatggtgacagtttgggccgcaggagccggagtagctcacagtccccctagcactctggtgtggaaggggcagtcaagctggggaactggcgagagtttccgaacggtcctcgttaatgccgatggggaagaggttgccatgagaactgtcaagaagagcagtgtaatgagggagaatgaaaatggcgaggaagaggaggaggaagctgaattcggcgaggaggatttgttccaccagcagggtgacccaagaaccacctctcgaggttgttatgtgatgtag

SEQ ID NO: 225445 - DNA, 1803 bp, Artificial Sequence
  derived and/or modified sequence
atggcaacccctctacccggacgagccggaggacctgctacccctttatccccaacgcggctgagtcgcctgcaggaaaaggaagagctgagggagctgaacgataggcttgctcattatattgaccgggtgagagctttagaactcgagaacgataggctgctgctcaaaatctccgaaaaggaagaagttactacaagggaagtcagtggcattaaggcgctgtatgagtccgagctggcggacgcgaggcgggtgctcgatgagactgccagggagagggctagactgcagatagagataggaaagctccgtgccgaattggacgaggttaataagagcgcgaaaaaacgggaaggggagctcaccgttgctcagggtagagtaaaggatctcgagtccttgttccaccggagcgaagtagaactggctgctgcactgagtgataagcgtggtctggaatctgacgtggcggaactgcgggcacaactggcaaaagccgaggatggacatgcagtggccaaaaaacaactggagaaagaaactctgatgagagtggatctggaaaatagatgccagtctctgcaggaggaactcgattttcgaaagtccgtgttcgaagaggaagtccgtgaaacgagacgcagacacgagcgcagacttgtggaggttgactcatcaaggcagcaagagtatgatttcaagatggcccaggcactcgaggagctaagatctcaacacgatgagcaagtgcgtctgtacaagttagaactcgagcagacatatcaggccaaactcgattccgctaaattgtcttcagaccagaatgataaagccgcttccgccgctcgggaggagttgaaagaagcacggatgcgactcgagtccctgtcataccaactgagtggcttacagaaacaggccagtgctgcagaagatcgaatccgagagctggaggaggccatggccggagagcgggacaaatttagaaaaatgctggacgccaaggagcaggagatgactgagatgagggacgtgatgcagcagcagctcgcagagtaccaagagcttcttgatgtcaaactggcactggacatggagattaatgcctaccgcaagttgttggagggggaagaagaacgactgaagctctctccgagtccaagctctcgggtcacggtttcgcgcgcaacaagttcttctagtggctccctgagcgcaactgggagactgggaagaagcaagcggaagaggctggaggtggaggagcctttggggagtgggccaagcgtgctcggcactgggacaggtggcagcggcggttttcatctagcgcagcaggcatctgcttctgggtctgtgtcaattgaagaaattgatctcgagggaaagttcgtgcagctaaagaacaactcagataaggaccagtccctgggaaattggcgcattaagcgacaagtgcttgaaggtgaagagatagcgtacaagtttaccccaaaatatattctgcgcgcagggcaaatggtgactgtttgggcagcaggcgcaggcgttgcccacagcccaccgagtacccttgtgtggaaaggccagtccagttggggtactggcgagtcttttcggacagtgctggtgaatgctgacggcgaagaggtcgcaatgaggacggtgaaaaagtcatccgttatgcgggagaacgagaacggggaggaagaggaggaggaggccgaatttggcgaagaggacctgtttcatcaacagggcgatcctcgtacgacatcccgcggatgttatgtgatgtag

SEQ ID NO: 225446 - DNA, 1803 bp, Artificial Sequence
  derived and/or modified sequence
atggccacccccctgcccggcagagccggcggccccgccacccccctgagccccaccagactgagcagactgcaggagaaggaggagctgagagagctgaacgacagactggcccactacatcgacagagtgagagccctggagctggagaacgacagactgctgctgaagatcagcgagaaggaggaggtgaccaccagagaggtgagcggcatcaaggccctgtacgagagcgagctggccgacgccagaagagtgctggacgagaccgccagagagagagccagactgcagatcgagatcggcaagctgagagccgagctggacgaggtgaacaagagcgccaagaagagagagggcgagctgaccgtggcccagggcagagtgaaggacctggagagcctgttccacagaagcgaggtggagctggccgccgccctgagcgacaagagaggcctggagagcgacgtggccgagctgagagcccagctggccaaggccgaggacggccacgccgtggccaagaagcagctggagaaggagaccctgatgagagtggacctggagaacagatgccagagcctgcaggaggagctggacttcagaaagagcgtgttcgaggaggaggtgagagagaccagaagaagacacgagagaagactggtggaggtggacagcagcagacagcaggagtacgacttcaagatggcccaggccctggaggagctgagaagccagcacgacgagcaggtgagactgtacaagctggagctggagcagacctaccaggccaagctggacagcgccaagctgagcagcgaccagaacgacaaggccgccagcgccgccagagaggagctgaaggaggccagaatgagactggagagcctgagctaccagctgagcggcctgcagaagcaggccagcgccgccgaggacagaatcagagagctggaggaggccatggccggcgagagagacaagttcagaaagatgctggacgccaaggagcaggagatgaccgagatgagagacgtgatgcagcagcagctggccgagtaccaggagctgctggacgtgaagctggccctggacatggagatcaacgcctacagaaagctgctggagggcgaggaggagagactgaagctgagccccagccccagcagcagagtgaccgtgagcagagccaccagcagcagcagcggcagcctgagcgccaccggcagactgggcagaagcaagagaaagagactggaggtggaggagcccctgggcagcggccccagcgtgctgggcaccggcaccggcggcagcggcggcttccacctggcccagcaggccagcgccagcggcagcgtgagcatcgaggagatcgacctggagggcaagttcgtgcagctgaagaacaacagcgacaaggaccagagcctgggcaactggagaatcaagagacaggtgctggagggcgaggagatcgcctacaagttcacccccaagtacatcctgagagccggccagatggtgaccgtgtgggccgccggcgccggcgtggcccacagcccccccagcaccctggtgtggaagggccagagcagctggggcaccggcgagagcttcagaaccgtgctggtgaacgccgacggcgaggaggtggccatgagaaccgtgaagaagagcagcgtgatgagagagaacgagaacggcgaggaggaggaggaggaggccgagttcggcgaggaggacctgttccaccagcagggcgaccccagaaccaccagcagaggctgctacgtgatgtag

SEQ ID NO: 225447 - protein, 376 aa, Artificial Sequence
  derived and/or modified sequence
MLKKISVGVAGDLNTVTMKLGCVLMAWALYLSLGVLWVAQMLLAASFETLQCEGPVCTEESSCHTEDDLTDAREAGFQVKAYTFSEPFHLIVSYDWLILQGPAKPVFEGDLLVLRCQAWQDWPLTQVTFYRDGSALGPPGPNREFSITVVQKADSGHYHCSGIFQSPGPGIPETASVVAITVQELFPAPILRAVPSAEPQAGSPMTLSCQTKLPLQRSAARLLFSFYKDGRIVQSRGLSSEFQIPTASEDHSGSYWCEAATEDNQVWKQSPQLEIRVQGASSSAAPPTLNPAPQKSAAPGTAPEEAPGPLPPPPTPSSEDPGFSSPLGMPDPHLYHQMGLLLKHMQDVRVLLGHLLMELRELSGHRKPGTTKATAE

SEQ ID NO: 225448 - DNA, 1131 bp, Artificial Sequence
  derived and/or modified sequence
atgctgaagaaaatatccgtgggcgtcgcaggcgacctgaacacagtgacaatgaagcttgggtgcgtgcttatggcctgggccctctacctttccctcggcgtcctgtgggtggctcagatgcttctcgcagcgagttttgagacactccaatgcgagggccctgtgtgtaccgaggagtcaagctgccacacagaggacgatctgactgacgccagagaggccggttttcaggtcaaagcctacactttctctgagccctttcacttaattgttagctacgactggcttatccttcagggtccagccaaacccgtcttcgagggagaccttctggtgctgagatgccaggcgtggcaggattggcctctgacccaagttacattctacagagacggttctgccctaggtcctcctggccctaatagggagttctctatcaccgttgtacagaaggccgactctggacattaccactgttcaggaattttccagtctccagggccaggcatccctgagactgcatccgttgtagccattacagtccaagaactttttcccgcacctattctaagggcagtccccagcgctgaacctcaggccggatcaccgatgacgttgagctgtcagaccaaacttcctctacagcggagtgctgctcgactactgtttagcttctacaaggatggccgaattgttcagagcagggggttaagctccgagttccaaattccaacggcatcagaggatcactcaggatcctattggtgcgaagccgcaaccgaggataaccaggtttggaagcaaagcccacagttggaaattcgggtgcagggtgctagcagtagtgccgcaccccctacacttaatccagccccacagaaaagtgcagcgcctggaactgcccctgaggaggccccaggcccactgcctcccccaccaacacccagttccgaggaccccggattttctagcccccttgggatgccggatcctcacctataccaccaaatggggctcttactcaaacacatgcaagacgtgcgggtgctgctggggcacctgctgatggaacttcgggagctgtctggacacaggaagcccggtaccacaaaagcaactgctgagtag

SEQ ID NO: 225449 - DNA, 1131 bp, Artificial Sequence
  derived and/or modified sequence
atgctgaaaaaaatttctgtgggcgttgccggagatctgaatactgtgactatgaaactggggtgtgttctgatggcctgggccctgtatctgtctctgggggtcctgtgggttgcccaaatgctgctagctgcctcttttgaaactcttcaatgtgaagggcctgtgtgcacagaagaatccagctgccacacagaggacgatcttacggatgcaagggaggctggatttcaggtcaaagcttacacattttctgaaccattccaccttatagtgtcatatgactggttgatactccagggtcctgctaaaccagtgttcgaaggcgatttgttagtgttgagatgccaagcatggcaagattggccactgacacaggttacattctatcgtgatggctcagctctagggccccctggtcctaatcgagaattttccatcaccgtggtgcaaaaggccgattccggccattatcactgctcaggtatattccagtctccaggcccaggaattcccgaaaccgcaagtgtggttgcgattacagtgcaagaactcttccccgcaccaatcctgcgggccgttccctccgctgagccccaggctggttctccaatgacactatcatgtcaaacaaaactccctcttcagcgaagcgctgccagactgctgttctctttctataaggatggccgtatcgtgcaaagtagaggccttagcagcgagtttcagattcccacagccagcgaagatcacagcgggagctattggtgcgaagctgctacggaggacaatcaggtatggaagcagtcaccccagctggaaattcgcgtgcagggtgcatctagtagtgccgccccccccacccttaatccggctccgcaaaagtctgcggcccccggaactgcccctgaggaagctccaggtcccttgcctccccccccaacccccagcagtgaggaccccggtttcagtagtcccctgggcatgcctgatcctcatctctaccaccaaatgggactcttactgaaacatatgcaggacgtgcgggtactgctcggtcacctcttaatggaattgcgagagcttagcggacaccgcaagccaggcactactaaggcgaccgcagaatag

SEQ ID NO: 225450 - DNA, 1131 bp, Artificial Sequence
  derived and/or modified sequence
atgctaaaaaaaatttctgttggtgtagcgggggatctaaatactgtcactatgaaactcggctgtgtcttaatggcctgggcactttacttatctctgggggtgctgtgggtggctcagatgctgctggccgcctctttcgaaacactgcaatgcgagggaccagtgtgcaccgaagagagcagctgtcataccgaagacgatttgacagacgcacgcgaagcgggatttcaggtcaaagcatacactttctctgaaccttttcacctgatcgttagttatgattggttaattctgcagggccctgccaaaccggtgttcgaaggggatctgttagtactccggtgccaggcgtggcaggactggcccctgacccaagtgacattctatagagatggcagcgcccttggtccacctggaccaaaccgggaattcagtataacggtagtccagaaggcagactccggtcactaccactgctcagggatcttccaatcacctggtccaggcatccccgagactgccagtgtcgttgcgattaccgtacaagaacttttccctgcaccgatcctaagagctgtgccaagtgccgagccacaagctgggtcaccaatgactctgagctgccagacaaaacttccactacaacgctcagccgcacggctgctgttcagcttctacaaggacggacggattgtacaaagcagaggcctgtcttccgagttccagatccctacagcttccgaggatcacagcggatcatattggtgcgaggctgccacagaagacaatcaggtttggaagcaatccccccagttagaaattcgtgtacagggcgcatcttcctccgctgctcctccaacactgaaccctgccccccaaaaaagcgctgcacctgggacagcaccagaagaggctcccggcccactgcccccaccccccacacccagctcagaagatccaggattttcgtctccactcggaatgcctgatccacacctttaccaccaaatgggtctgctcctcaagcacatgcaggacgtgagagtattgctcggccacctgttgatggaactgagggagctgagcggccacaggaaacctggaaccaccaaggccacagcagagtag

SEQ ID NO: 225451 - DNA, 2341 bp, Artificial Sequence
  derived and/or modified sequence
ggccagctggctatcagacaatgacatgctttgacaggcccctgagctctgtgagtaaattcttgaacagctgagagtgctaccattttgtcatagccctaagggtgcagatgatgctgaaagcgtgttggccaaatctgaatgatgaaagccaattacaaactagaaaatgaaaacagaccccagatgcaaggagatgagacagttaaatttacttcctcttttctaatctgagaggtttcatgttgaagaaaatcagtgttggggttgcaggagacctaaacacagtcaccatgaagctgggctgtgtcctcatggcctgggccctctacctttcccttggtgtgctctgggtggcccagatgctactggctgccagttttgagacgctgcagtgtgagggacctgtctgcactgaggagagcagctgccacacggaggatgacttgactgatgcaagggaagctggcttccaggtcaaggcctacactttcagtgaacccttccacctgattgtgtcctatgactggctgatcctccaaggtccagccaagccagtttttgaaggggacctgctggttctgcgctgccaggcctggcaagactggccactgactcaggtgaccttctaccgagatggctcagctctgggtccccccgggcctaacagggaattctccatcaccgtggtacaaaaggcagacagcgggcactaccactgcagtggcatcttccagagccctggtcctgggatcccagaaacagcatctgttgtggctatcacagtccaagaactgtttccagcgccaattctcagagctgtaccctcagctgaaccccaagcaggaagccccatgaccctgagttgtcagacaaagttgcccctgcagaggtcagctgcccgcctcctcttctccttctacaaggatggaaggatagtgcaaagcagggggctctcctcagaattccagatccccacagcttcagaagatcactccgggtcatactggtgtgaggcagccactgaggacaaccaagtttggaaacagagcccccagctagagatcagagtgcagggtgcttccagctctgctgcacctcccacattgaatccagctcctcagaaatcagctgctccaggaactgctcctgaggaggcccctgggcctctgcctccgccgccaaccccatcttctgaggatccaggcttttcttctcctctggggatgccagatcctcatctgtatcaccagatgggccttcttctcaaacacatgcaggatgtgagagtcctcctcggtcacctgctcatggagttgagggaattatctggccaccggaagcctgggaccacaaaggctactgctgaatagaagtaaacagttcatccatgatctcacttaaccaccccaataaatctgattctttattttctcttcctgtcctgcacatatgcataagtacttttacaagttgtcccagtgttttgttagaataatgtagttaggtgagtgtaaataaatttatataaagtgagaattagagtttagctataattgtgtattctctcttaacacaacagaattctgctgtctagatcaggaatttctatctgttatatcgaccagaatgttgtgatttaaagagaactaatggaagtggattgaatacagcagtctcaactgggggcaattttgccccccagaggacattgggcaatgtttggagacattttggtcattatacttggggggttgggggatggtgggatgtgtgtgctactggcatccagtaaatagaagccaggggtgccgctaaacatcctataatgcacagggcagtaccccacaacgaaaaataatctggcccaaaatgtcagttgtactgagtttgagaaaccccagcctaatgaaaccctaggtgttgggctctggaatgggactttgtcccttctaattattatctctttccagcctcattcagctattcttactgacataccagtctttagctggtgctatggtctgttctttagttctagtttgtatcccctcaaaagccattatgttgaaatcctaatccccaaggtgatggcattaagaagtgggcctttgggaagtgattagatcaggagtgcagagccctcatgattaggattagtgcccttatttaaaaaggccccagagagctaactcacccttccaccatatgaggacgtggcaagaagatgacatgtatgagaaccaaaaaacagctgtcgccaaacaccgactctgtcgttgccttgatcttgaacttccagcctccagaactatgagaaataaaattctgttgtttgtaa

SEQ ID NO: 225452 - DNA, 1131 bp, Artificial Sequence
  derived and/or modified sequence
atgctgaagaagatcagcgtgggcgtggccggcgacctgaacaccgtgaccatgaagctgggctgcgtgctgatggcctgggccctgtacctgagcctgggcgtgctgtgggtggcccagatgctgctggccgccagcttcgagaccctgcagtgcgagggccccgtgtgcaccgaggagagcagctgccacaccgaggacgacctgaccgacgccagagaggccggcttccaggtgaaggcctacaccttcagcgagcccttccacctgatcgtgagctacgactggctgatcctgcagggccccgccaagcccgtgttcgagggcgacctgctggtgctgagatgccaggcctggcaggactggcccctgacccaggtgaccttctacagagacggcagcgccctgggcccccccggccccaacagagagttcagcatcaccgtggtgcagaaggccgacagcggccactaccactgcagcggcatcttccagagccccggccccggcatccccgagaccgccagcgtggtggccatcaccgtgcaggagctgttccccgcccccatcctgagagccgtgcccagcgccgagccccaggccggcagccccatgaccctgagctgccagaccaagctgcccctgcagagaagcgccgccagactgctgttcagcttctacaaggacggcagaatcgtgcagagcagaggcctgagcagcgagttccagatccccaccgccagcgaggaccacagcggcagctactggtgcgaggccgccaccgaggacaaccaggtgtggaagcagagcccccagctggagatcagagtgcagggcgccagcagcagcgccgccccccccaccctgaaccccgccccccagaagagcgccgcccccggcaccgcccccgaggaggcccccggccccctgccccccccccccacccccagcagcgaggaccccggcttcagcagccccctgggcatgcccgacccccacctgtaccaccagatgggcctgctgctgaagcacatgcaggacgtgagagtgctgctgggccacctgctgatggagctgagagagctgagcggccacagaaagcccggcaccaccaaggccaccgccgagtag

SEQ ID NO: 225453 - DNA, 1131 bp, Artificial Sequence
  derived and/or modified sequence
atgcttaaaaaaatctctgtgggcgtggccggcgatctcaacaccgtcacgatgaaactgggctgtgtgttaatggcttgggctctatatctgtctctgggcgttctttgggtggcacagatgctgctggcagcgtccttcgagacccttcagtgcgagggacctgtgtgtacagaggaaagttcatgccatactgaggacgatctgacggatgctcgcgaagcaggatttcaggtgaaggcatatacattttccgagcccttccacctgatcgtgtcctatgactggttgatcttacagggtccggcaaaaccagtgttcgagggagatttactggtgcttaggtgtcaagcctggcaagattggcccttaacgcaagtcaccttttatcgtgatggatctgcactgggtccgcctggacccaatcgcgaattctcgattaccgtcgtgcagaaggctgacagtggtcactatcactgctcggggatctttcagtcgcccggacctggaatcccggaaaccgcttccgtggtcgccatcaccgttcaggaacttttccccgctccaatcttgagagcagttccaagtgccgagcctcaagctgggagtccaatgacccttagttgccaaactaaactgccactgcagcgttccgccgctcggctgctgttctccttttataaagacggacgtatcgtgcaaagtagggggcttagcagcgaatttcaaatccctaccgctagcgaggatcattccggctcttattggtgtgaggcagctactgaagacaaccaggtatggaagcagtcccctcagctggagataagggtccagggcgcctcgtcgagcgcagctccgcccacattaaatcctgccccccagaagtcagcagcgcctggaacagcccccgaggaggccccgggacctctcccacccccaccaacgccaagcagcgaggatccaggcttttcatccccacttggaatgcctgacccccacctgtatcaccagatggggctgctgttgaaacacatgcaagatgtccgagttctcctaggccatctgctcatggaactgagagaattgtctggacacagaaaacctggtacaaccaaagccactgcggagtag

SEQ ID NO: 225454 - DNA, 1131 bp, Artificial Sequence
  derived and/or modified sequence
atgctgaagaagatctctgtgggcgtggccggggacctgaacacagtgaccatgaagctgggctgtgtgctgatggcctgggccctgtacctgagcctgggcgtgctgtgggtggcccagatgctgctggccgccagctttgagaccctgcagtgtgagggccctgtgtgcacagaggagagcagctgccacacagaagatgacctgacagatgcccgggaggccggcttccaggtgaaggcctacaccttcagcgagcccttccacctgattgtgtcctatgactggctgatcctgcagggccctgccaagcctgtgtttgaaggagacctgctggtgctgcgctgccaggcctggcaggactggcccctgacccaggtgaccttctacagagatggcagcgccctgggccccccaggccccaaccgggagttcagcatcaccgtggtgcagaaggctgacagcggccactaccactgcagcggcatcttccagagccctggccctggcatccctgagacagcctctgtggtggccatcaccgtgcaggagctgtttcctgcccccatcctgcgggctgtgcccagcgctgagccccaggccggcagccccatgaccctgagctgccagaccaagctgcccctgcagaggtctgctgcccggctgctcttctccttctacaaggatggccgcatcgtgcagagccggggcctgagcagcgagttccagatccccacagccagcgaggaccacagcggcagctactggtgtgaggccgccacagaggacaaccaggtgtggaagcagagcccccagctggagatccgggtgcagggcgccagcagcagcgctgccccacccaccctgaacccagccccccagaagtctgctgcccctggaacagcccctgaggaggcccctggccccctgcccccaccacccacccccagcagtgaagatcctggcttcagcagccccctgggcatgccagacccccacctgtaccaccagatgggcctgctgctgaagcacatgcaggatgtgcgggtgctgctgggccacctgctgatggagctgcgggagctgagcggccacaggaagccaggcaccaccaaggccacagctgagtag

SEQ ID NO: 225455 - DNA, 1131 bp, Artificial Sequence
  derived and/or modified sequence
atgctgaagaagatcagcgtgggcgtggccggcgacctgaacaccgttacaatgaagctgggatgcgtgctgatggcctgggccctgtacctaagcctcggggttttatgggtggctcaaatgttgctggcagcctccttcgagaccctccagtgcgagggaccagtttgcacggaggagtcttcctgtcacacagaggacgatctaaccgatgctagggaagcggggtttcaggtaaaggcctacaccttctccgagccatttcacctgatagtcagctacgactggctgatccttcagggacctgctaagcccgttttcgaaggagacctcctcgtcctaaggtgtcaggcttggcaagattggcccctcacacaagttaccttctatcgagacggatccgcactcggtcctccggggcccaatcgagagttttctatcacggtggtccaaaaagcagatagtggccattaccactgcagcgggatctttcaaagtcctggtcctgggatacctgaaacagcgtccgtggtcgcaattacagtgcaggaactgtttcccgcacctatcctccgggcagttccgtctgcggaacctcaagctggaagtccaatgactctgtcttgccaaaccaagttacctttgcaacgttcggcagcccgccttttatttagcttctacaaggatggtcggatagtccagagccgcggtctgagttcggagttccagatcccgactgcctcggaggatcatagtggcagctactggtgcgaggcagccacagaggataaccaggtctggaagcagagcccccaactggaaattagagtgcagggggcttctagctctgcagccccccctaccctcaaccccgccccacaaaagtcagccgcgccgggcaccgctccggaggaagcaccgggccccttgcctccccccccaaccccctcatccgaagatcccggctttagctcgccactcggaatgccagatccccacctgtatcaccagatggggttgctgctgaaacatatgcaggacgttcgtgtgctcctagggcatcttttaatggagctgagagagctgagcggccacagaaaacctggtaccactaaagcaactgcagagtag

SEQ ID NO: 225456 - RNA, 1131 nt, Artificial Sequence
  derived and/or modified sequence
augcugaaaaaaauuucugugggcguugccggagaucugaauacugugacuaugaaacugggguguguucugauggccugggcccuguaucugucucuggggguccuguggguugcccaaaugcugcuagcugccucuuuugaaacucuucaaugugaagggccugugugcacagaagaauccagcugccacacagaggacgaucuuacggaugcaagggaggcuggauuucaggucaaagcuuacacauuuucugaaccauuccaccuuauagugucauaugacugguugauacuccaggguccugcuaaaccaguguucgaaggcgauuuguuaguguugagaugccaagcauggcaagauuggccacugacacagguuacauucuaucgugauggcucagcucuagggcccccugguccuaaucgagaauuuuccaucaccguggugcaaaaggccgauuccggccauuaucacugcucagguauauuccagucuccaggcccaggaauucccgaaaccgcaagugugguugcgauuacagugcaagaacucuuccccgcaccaauccugcgggccguucccuccgcugagccccaggcugguucuccaaugacacuaucaugucaaacaaaacucccucuucagcgaagcgcugccagacugcuguucucuuucuauaaggauggccguaucgugcaaaguagaggccuuagcagcgaguuucagauucccacagccagcgaagaucacagcgggagcuauuggugcgaagcugcuacggaggacaaucagguauggaagcagucaccccagcuggaaauucgcgugcagggugcaucuaguagugccgccccccccacccuuaauccggcuccgcaaaagucugcggcccccggaacugccccugaggaagcuccaggucccuugccuccccccccaacccccagcagugaggaccccgguuucaguaguccccugggcaugccugauccucaucucuaccaccaaaugggacucuuacugaaacauaugcaggacgugcggguacugcucggucaccucuuaauggaauugcgagagcuuagcggacaccgcaagccaggcacuacuaaggcgaccgcagaauag

SEQ ID NO: 225457 - RNA, 1131 nt, Artificial Sequence
  derived and/or modified sequence
augcuaaaaaaaauuucuguugguguagcgggggaucuaaauacugucacuaugaaacucggcugugucuuaauggccugggcacuuuacuuaucucugggggugcuguggguggcucagaugcugcuggccgccucuuucgaaacacugcaaugcgagggaccagugugcaccgaagagagcagcugucauaccgaagacgauuugacagacgcacgcgaagcgggauuucaggucaaagcauacacuuucucugaaccuuuucaccugaucguuaguuaugauugguuaauucugcagggcccugccaaaccgguguucgaaggggaucuguuaguacuccggugccaggcguggcaggacuggccccugacccaagugacauucuauagagauggcagcgcccuugguccaccuggaccaaaccgggaauucaguauaacgguaguccagaaggcagacuccggucacuaccacugcucagggaucuuccaaucaccugguccaggcauccccgagacugccagugucguugcgauuaccguacaagaacuuuucccugcaccgauccuaagagcugugccaagugccgagccacaagcugggucaccaaugacucugagcugccagacaaaacuuccacuacaacgcucagccgcacggcugcuguucagcuucuacaaggacggacggauuguacaaagcagaggccugucuuccgaguuccagaucccuacagcuuccgaggaucacagcggaucauauuggugcgaggcugccacagaagacaaucagguuuggaagcaauccccccaguuagaaauucguguacagggcgcaucuuccuccgcugcuccuccaacacugaacccugccccccaaaaaagcgcugcaccugggacagcaccagaagaggcucccggcccacugcccccaccccccacacccagcucagaagauccaggauuuucgucuccacucggaaugccugauccacaccuuuaccaccaaaugggucugcuccucaagcacaugcaggacgugagaguauugcucggccaccuguugauggaacugagggagcugagcggccacaggaaaccuggaaccaccaaggccacagcagaguag

SEQ ID NO: 225458 - protein, 215 aa, Artificial Sequence
  derived and/or modified sequence
MADLHRQLQEYLAQGKAGGPAAAEPLLAAEKAEEPGDRPAEEWLGRAGLRWTWARSPAESAAAGLTCLPSVTRGQRLAAGGGCLLLAALCFGLAALYAPVLLLRARKFALLWSLGSALALAGSALLRGGAACGRLLRCEEAPSRPALLYMAALGATLFAALGLRSTLLTVLGAGAQVAALLAALVGLLPWGGGTALRLALGRLGRGAGLAKVLPV

SEQ ID NO: 225459 - DNA, 648 bp, Artificial Sequence
  derived and/or modified sequence
atggccgacctgcacagacagctgcaggagtacctggcccagggcaaggccggcggccccgccgccgccgagcccctgctggccgccgagaaggccgaggagcccggcgacagacccgccgaggagtggctgggcagagccggcctgagatggacctgggccagaagccccgccgagagcgccgccgccggcctgacctgcctgcccagcgtgaccagaggccagagactggccgccggcggcggctgcctgctgctggccgccctgtgcttcggcctggccgccctgtacgcccccgtgctgctgctgagagccagaaagttcgccctgctgtggagcctgggcagcgccctggccctggccggcagcgccctgctgagaggcggcgccgcctgcggcagactgctgagatgcgaggaggcccccagcagacccgccctgctgtacatggccgccctgggcgccaccctgttcgccgccctgggcctgagaagcaccctgctgaccgtgctgggcgccggcgcccaggtggccgccctgctggccgccctggtgggcctgctgccctggggcggcggcaccgccctgagactggccctgggcagactgggcagaggcgccggcctggccaaggtgctgcccgtgtag

SEQ ID NO: 225460 - DNA, 648 bp, Artificial Sequence
  derived and/or modified sequence
atggccgatctgcaccggcagcttcaggagtacctagcacaagggaaggctgggggcccagcagccgcagagccgttgttagccgccgagaaggccgaagagccaggtgatcggccagccgaggagtggctcggacgagctggcctgcgctggacatgggcaagaagcccagcggagtccgcagctgccggcctaacctgcttacctagcgtgacgagagggcaacgcctcgccgccggcggagggtgtttgttgttagctgccctgtgcttcgggctagcagcactttacgcccccgtgttgcttctacgcgctcggaagttcgccctgctatggtcgcttgggtctgcccttgcgctcgcgggctccgccctgctcagaggtggggctgcctgcgggcggctcttgaggtgcgaggaagcacccagccgcccagctctcctctatatggccgccttaggcgccacattgttcgcggctctcgggctccggtctacactcctgacagtcttgggggctggcgcccaagtggccgcattactggcagcactggtgggtcttctgccttggggtgggggcactgcgttacgcctggcgttgggtcgattggggagaggagctggattggccaaggttctccccgtgtag

SEQ ID NO: 225461 - DNA, 648 bp, Artificial Sequence
  derived and/or modified sequence
atggctgacctgcaccggcagctgcaggagtacctggcccagggcaaggccggcggccctgctgctgctgagcccctgctggccgctgagaaggccgaggagcccggggacaggcctgctgaggagtggctgggccgggccggcctgcgctggacctgggcccggagccctgctgagagcgctgctgctggcctgacctgcctgcccagcgtgacccggggccagaggctggccgccggcggcggctgcctgctgctggccgccctgtgcttcggcctggccgccctgtatgcccctgtgctgctgctgcgggccaggaagtttgccctgctgtggagcctgggcagcgccctggccctggccggcagcgccctgctgcggggcggggccgcctgtggccgcctgctgcgctgtgaggaggcccccagcaggcctgccctgctgtacatggccgccctgggcgccaccctgtttgctgccctgggcctgcggagcaccctgctgactgtgctgggcgctggggcccaggtggccgccctgctggccgccctggtgggcctgctgccctggggcggcggcacagccctgcggctggccctgggccgcctgggcagaggagctggcctggccaaggtgctgcctgtgtag

SEQ ID NO: 225462 - DNA, 648 bp, Artificial Sequence
  derived and/or modified sequence
atggccgacctgcaccggcagctgcaggagtacctggcccagggcaaggcggggggacctgcagccgcagagcccctcctggctgctgaaaaagcggaagaacccggtgaccgcccagcggaagagtggctagggagggctggcctccgttggacctgggcaagatcccccgccgagtctgccgccgccggcttgacttgcctcccaagcgtcacgcggggccaaaggctggcagccggtggaggatgtctcctgctcgctgcattgtgcttcgggttagctgccttgtacgccccggttctgttactgagggcacgcaaatttgccctgctgtggtccctaggaagcgccctcgccctcgctggttccgcactgctgaggggcggcgccgcatgcgggcgcctgctgaggtgtgaggaggccccctctaggcccgccctgctttatatggccgctttgggggccactttgttcgcagcgctggggcttcgttctacactcttgacggtattgggcgctggcgcccaggtggcagctttactcgctgccctggtgggactgttaccatggggcggaggaacagctctccggcttgcgttaggaagacttgggcgtggcgccggtctggcaaaggtgctgcccgtttag

SEQ ID NO: 225463 - DNA, 648 bp, Artificial Sequence
  derived and/or modified sequence
atggccgatctccaccgacagctccaggaataccttgcccagggcaaagcgggtggccctgctgctgcggagcccctgctcgccgctgagaaagccgaagaacctggcgatcgaccagccgaggagtggctgggcagagccggactgcgttggacgtgggcgcgatcccccgctgagtccgctgctgctgggctgacgtgcctccccagcgttaccagaggccagcggcttgccgcagggggtgggtgtttacttctcgcggctctctgctttggtttagctgcactgtatgctcccgtactgctgctcagggcacggaaattcgccctcctgtggtcactgggatcagctttggcactggccggaagcgccctcctcaggggaggcgctgcctgcggccgattgctgagatgcgaagaagccccaagcagacctgccctgctgtatatggctgcgttgggagcgaccctgttcgcggcactcggattacgttctaccctgcttacagtgttgggggcaggtgcccaggtggctgccttgctggctgcgctggtgggtctgctgccctggggtggcggtactgccctgagattagcactaggcagactcggtcgcggtgctggactggcaaaagtcctgccagtgtag

SEQ ID NO: 225464 - DNA, 2789 bp, Artificial Sequence
  derived and/or modified sequence
gaacttttttaaaaattaaatttttattttgagatcactgtttgtgttcagttgtaagaaacaagagagattctgtgtaccctttacccattcctccatgttgcaaaactagcacaatatcaccgccacggtagacgcagtgaggccataagacatttccgtcagcaaaagggtcacttcttgtgcccctttagaaccacacccacccctgccttccaactattaatgctggcaggacttagccagaccgcaagggcgcctactccgaacaaggaagagggtcaggcgctgggagggcgactgcaagcggacaggcagcacctgcgaccacggtacttggggacaccacaaaagtccgcagagcaggcaccgcggcacttccgcgagcgccgcaggccctgcccctttcgccgtcgccgaccaattgccgcccgaagaccgaaccgcttcagcggagggccggaagtgagccgcagcttttcctttctgccaccgccttgtccaagatggcggacctccaccgccagctgcaggagtacctggcgcaggggaaagctggcggcccggcggccgcggagccgctgctcgccgcggagaaggcggaggagcccggggaccggccggcggaggagtggctgggccgcgcgggcttgcgctggacgtgggcgcggagccctgcggagtcggcagcggccggcctgacgtgcctcccgagcgtgacgcgcgggcagcggctggcggcgggcggcgggtgcctgctgctggctgcactgtgtttcggcctagccgcgctctacgcaccggtgttgctgctgcgcgcgcgcaagttcgcgctgctctggtcactgggctcggcgctggcgttggcgggaagcgcgctgctgcggggcggcgcggcgtgcggacgcctgctgcgctgcgaagaagcgccgtcccggcccgcgctgctctacatggcagcgctgggcgccacgctgttcgccgcgctgggccttcgcagcacgctgctcacggtgctgggcgcgggcgcgcaggtggccgcgctgctggccgcgctggttgggctgctgccctggggcggcggcaccgcgctgcgcctcgcactgggtcgcctgggccgcggcgccggcctcgccaaggtgctgcccgtgtgaggacctcgcgccctcgccgctggggaagtacgcggagccagcgccgtcggagaccgcgccggccgagctgaggactgcacgccgctgtgcggaagcccgtggcgaaggccctgccctaacagcctgcgagtctaatccgggagcggctgctgccagcggaggcgacagcagcgttgggagctcctcgatgtcagctttttgtgctggacttggcacacgctctgaaaactgagattttgtcattgaactggtgacaggatgtgagacggttattagaagttgctttcgaagtaactgtggtcttaggttcggctgagtaaagaaaaaggatttttcttcgagttagctgctcttgtgatttttctcaggctgttttgtcattttaaaatccagtggtagatgtagcttagcgacggtagttttttgttttggctatactaagacttggaaattattctctccagtgtcagcgaatccagaagggtatcagattaaacaccgaattcagccactggacttttaaaagtacttaagatggtttatctcgggttttttcttcagttaacaaaatcataaatatggtgccttataacatgaaaggaaaattagttgtgtatttcacgacgaaagcgacggaccaaaagaaatttcctgccccaagaagcatgggatccaggaaggggcgcgtagatgcttaacggtctcttcggaaatcctgcaaatagaaagataattctagatccggaatacctgtatctggtggaaaccatggatttctacaagctcgaattattcctcattgtatagcctgctttgtaaactagtttacaatttgcaggctgatcttaagatttttttatatctaattgctgctgccttcattttaggttcagcagttacttttaactaccttaatttattgccagaaggtatgagcctaacattctgatgagtccagaaaactacgttttgtcagtagcaatacactaggaagtaaaatatatttagaatttaaacattgtgtgccagtggtcctcgcgcttgactgcacatcagttacttgaagagccacacctcagatcaatgcagtcagaacctgggaagtaggtcccagacatcaggacctttttaaagctccccaagtgattctacgttccccaagtttgaggaccacttttctgtgcattggcttgcacaatttgaaagtaatgcttttcctgagctggatcccagtgttgccttaacagggtgtctgtcgtgccgcagtagagcactgctgcttcctccaaccccaaaatttatgttcctaagtaagtcaggtccctaagccccgtcccaagaagtgacacaagtggccaacatccacactgtaggcttgcaggctacccgccctgagatttggtaaagaacactgccttgttccccatcagtaaacaaggttacctacctcaggaggctgcttgtgagagagcaaatgcagtatcttcagaatgatttatttttttaattaattgtaaagacttgtgccattggctgctctttctagtcccctaaatttctgttctagttttaaatttctctagaacttgcaatagttgggggttttataatgatgttttacaatgtttatttctt

SEQ ID NO: 225465 - protein, 230 aa, Artificial Sequence
  derived and/or modified sequence
MTKTSTCIYHFLVLSWYTFLNYYISQEGKDEVKPKILANGARWKYMTLLNLLLQTIFYGVTCLDDVLKRTKGGKDIKFLTAFRDLLFTTLAFPVSTFVFLAFWILFLYNRDLIYPKVLDTVIPVWLNHAMHTFIFPITLAEVVLRPHSYPSKKTGLTLLAAASIAYISRILWLYFETGTWVYPVFAKLSLLGLAAFFSLSYVFIASIYLLGEKLNHWKWGDMRQPRKKRK

SEQ ID NO: 225466 - DNA, 693 bp, Artificial Sequence
  derived and/or modified sequence
atgacgaagactagcacttgtatctaccatttcctggttctgtcctggtatactttccttaactactacattagccaagaagggaaagatgaagtcaagccaaagatcttggcaaatggagcccgctggaaatacatgaccctcctgaatctgctgctgcagacaattttctacggggtcacatgcctggacgatgtgctgaagcgaactaaggggggcaaggatatcaagttcctgacagccttccgtgaccttttgtttaccaccctggcatttcctgtgagtactttcgtgttccttgcattctggatcctgttcctctataacagagacctgatctaccccaaggtccttgataccgtaataccagtgtggctcaatcacgcgatgcatacttttatattccctatcactctggcagaggtggtgctgcgccctcatagctaccccagcaaaaagacaggcctcactctgttggccgccgccagcattgcttacattagccgcattctctggctttacttcgagacagggacatgggtgtatcctgtatttgcgaaattgtcgctcctaggcctcgctgccttttttagcctttcttatgtgttcattgcgtctatttacctgctaggagaaaaactcaatcactggaagtggggcgatatgagacaacctcgaaaaaaacgaaagtag

SEQ ID NO: 225467 - DNA, 693 bp, Artificial Sequence
  derived and/or modified sequence
atgaccaagaccagcacctgcatctaccacttcctggtgctgtcctggtacaccttcctgaactactacatcagccaggagggcaaggatgaggtgaagcccaagatcctggccaatggagcccgctggaagtacatgaccctgctgaacctgctgctgcagaccatcttctacggcgtgacctgcctggatgatgtgctgaagaggaccaagggcggcaaggacatcaagttcctgacagccttccgggacctgctcttcaccaccctggccttccctgtgtccacctttgtgttcctggccttctggatcctcttcctgtacaacagagacctgatctaccccaaggtgctggacaccgtcatccctgtgtggctgaaccacgccatgcacaccttcatcttccccatcaccctggccgaggtggtgctgcggccccacagctaccccagcaagaagacaggcctgaccctgctggccgccgccagcatcgcctacatcagccgcatcctgtggctgtactttgaaacaggcacctgggtgtaccctgtgtttgccaagctgagcctgctgggcctggccgccttcttcagcctgtcctatgtgttcatcgccagcatctacctgctgggggagaagctgaaccactggaagtggggagacatgaggcagcccaggaagaagaggaagtag

SEQ ID NO: 225468 - DNA, 693 bp, Artificial Sequence
  derived and/or modified sequence
atgaccaagaccagcacctgcatctaccacttcctggtgctgagctggtatacttttctgaactactacatcagtcaggagggcaaggacgaagtgaagcccaagatcctcgcaaatggagctaggtggaaatacatgacgttgctgaatttactcttacaaacaatattctatggagtgacatgcttagacgatgtgctcaagaggacaaagggcggaaaggacatcaaatttctgaccgcctttcgcgacctattgttcacaaccctggctttcccagtatctacatttgtgtttcttgcattttggatcctcttcctgtacaatcgggacttgatataccctaaggtgctcgataccgtaatcccagtgtggctgaatcacgcaatgcacaccttcatcttccccattactctcgccgaggtggtgttaaggccacactcttatccaagcaagaaaaccgggctcaccctgctggcagccgccagcatagcctatataagccgcattctttggctttattttgagaccgggacctgggtctatcctgtgttcgcgaaactttcacttctgggtctggccgccttcttctctctgtcttatgtctttattgcctcaatatacttgttgggtgagaagctcaaccattggaagtggggcgatatgcgtcagccacggaagaaacgcaaatag

SEQ ID NO: 225469 - DNA, 693 bp, Artificial Sequence
  derived and/or modified sequence
atgacgaagacttctacttgtatctaccactttttagttctatcatggtacaccttcttgaactactacatcagccaggaggggaaggatgaagtgaaacctaagatcctggcaaacggggcacgctggaagtatatgacactattaaatctccttttacagactatcttctatggagttacgtgtcttgatgacgtgcttaagcgtaccaaaggtggtaaagatatcaaattccttacagccttccgggacctgttgttcaccacgctcgccttccccgtttcaaccttcgtcttccttgctttttggattctgttcttgtacaaccgcgacttaatatatccaaaggtgctggatactgtcatacctgtctggcttaatcatgccatgcacacgttcatattccctatcacactggctgaggtcgtgctacgacctcactcctacccctcaaagaaaactggtctgactctcctggcagccgcttccatcgcctatatttcaaggatactctggctgtactttgagacagggacatgggtctacccagtatttgctaaactgagcctgctcggactagccgctttcttcagtcttagttacgtcttcatcgccagcatctacctgctaggagagaaattgaaccattggaaatggggggatatgagacagccacgcaagaaaagaaagtag

SEQ ID NO: 225470 - DNA, 1927 bp, Artificial Sequence
  derived and/or modified sequence
gaaaagaaaagagactacagccatggaagtatttcgctagattttcctagtatttcatgcttacttcatttaaccatgcccctgccccagtgccctagtgaaacagtacaatgtacagctcttgcattgctacctgcccttctcaaagcccacatgttgtattttatgcaaatctacagattatctatcattatctaaatgcaggcatctgaaaaccagcagtaatcctgcctctgaagtttatcaggaaaggagcttaaaagagaaccaaattcagcctgtgttggaactctcagtcccagaggggtgtggtttgtagctctccggcctgctgttggacttaggctgtgacccacagaaggacgccagaaagtactcaagacattcacggtgccccggtcagcactcgccatgacgaagacttctacatgcatataccacttccttgttctgagctggtatactttcctcaattattacatctcacaggaaggaaaagacgaggtgaaacccaaaatcttggcaaatggtgcaaggtggaaatatatgacgctgcttaatctgctcttgcagaccattttctacggggtcacctgcctggatgatgtgctgaaaagaaccaaagggggaaaagacattaagttcctaactgccttcagagacctgcttttcaccactctggcttttcctgtatccacgtttgtatttttggcattctggatcctctttctctacaatcgagatctcatttaccccaaggtcctagatactgtcatccccgtgtggctgaatcatgcaatgcacactttcatattccccatcacattggctgaagtcgtcctcaggcctcactcctatccatcaaagaagacaggactcaccttgctggctgctgccagcattgcttacatcagccgcatcctatggctctactttgagacgggtacctgggtgtatcctgtgtttgccaaactcagcctcttgggtctagcagctttcttctctctcagctacgtcttcatcgccagcatctacctacttggagagaagctcaaccactggaaatggggtgacatgaggcagccacggaagaagaggaagtaattgcacaccattttccaagaaccaagaaagaagaaaacacaagagatttttctcatcttttttttttttttctggtggagggaggtggtggaggaacatagcaaagtaggagggacagagagtgatacttaaatttaataagaggttcgtgaaggtagcttaacttgagaactcttggttttttgaaaggttgactgcacatgccaaaaacaactcctgctatctcagaattaattatctttgaccttcgtggaggatggtctctggttaaaatctggccaaagaaactcacataaacttggtgttagagaacatctagagagagagagaggaacttagagtcatttaaactcttcagtttacagagaaggatgctgaggacctagatgagaagttacctgcaaaaggcaaaagggttacttagtgtcagaaccaaggcaatgacttctctctcccagatctcctagctactggtcctgggccatttttttttttttaaataatcccaactttctttaaaagacaagcatttcagtaagctagttattttcatgggttgctcatccatttttttcagtgatctaaaaatgtagggagatggctactactgaagttgtctgtctacttgggataatagcaaattaattgaagacaatgggaaagtaagttataaaaaatactgggaaatctgtttctcttctgagcaagcattcagggcaggtataaacatcaaacatagtgacattgtcaaaacctcttccatttgaacattgattaattcatcaaataaatggtatagtaataaattttgcttgcagaagaa

SEQ ID NO: 225471 - DNA, 693 bp, Artificial Sequence
  derived and/or modified sequence
atgaccaagaccagcacctgcatctaccacttcctggtgctgagctggtacaccttcctgaactactacatcagccaggagggcaaggacgaggtgaagcccaagatcctggccaacggcgccagatggaagtacatgaccctgctgaacctgctgctgcagaccatcttctacggcgtgacctgcctggacgacgtgctgaagagaaccaagggcggcaaggacatcaagttcctgaccgccttcagagacctgctgttcaccaccctggccttccccgtgagcaccttcgtgttcctggccttctggatcctgttcctgtacaacagagacctgatctaccccaaggtgctggacaccgtgatccccgtgtggctgaaccacgccatgcacaccttcatcttccccatcaccctggccgaggtggtgctgagaccccacagctaccccagcaagaagaccggcctgaccctgctggccgccgccagcatcgcctacatcagcagaatcctgtggctgtacttcgagaccggcacctgggtgtaccccgtgttcgccaagctgagcctgctgggcctggccgccttcttcagcctgagctacgtgttcatcgccagcatctacctgctgggcgagaagctgaaccactggaagtggggcgacatgagacagcccagaaagaagagaaagtag

SEQ ID NO: 225472 - protein, 587 aa, Artificial Sequence
  derived and/or modified sequence
MPTALCPRVLAPKESEEPRKMRSPPGENPSPQGELPSPESSRRLFRRFRYQEAAGPREALQRLWDLCGGWLRPERHTKEQILELLVLEQFLAILPREIQSWVRAQEPESGEQAVAAVEALEREPGRPWQWLKHCEDPVVIDDGDSPLDQEQEQLPVEPHSDLAKNQDAQPITLAQCLGLPSRPPSQLSGDPVLQDAFLLQEENVRDTQQVTTLQLPPSRVSPFKDMILCFSEEDWSLLDPAQTGFYGEFIIGEDYGVSMPPNDLAAQPDLSQGEENEPRVPELQDLQGKEVPQVSYLDSPSLQPFQVEERRKREELQVPEFQACPQTVVPQNTYPAGGNPRSLENSLDEEVTIEIVLSSSGDEDSQHGPYCTEELGSPTEKQRSLPASHRSSTEAGGEVQTSKKSYVCPNCGKIFRWRVNFIRHLRSRREQEKPHECSVCGELFSDSEDLDGHLESHEAQKPYRCGACGKSFRLNSHLLSHRRIHLQPDRLQPVEKREQAASEDADKGPKEPLENGKAKLSFQCCECGKAFQRHDHLARHRSHFHLKDKARPFQCRYCVKSFTQNYDLLRHERLHMKRRSKQALNSY

SEQ ID NO: 225473 - DNA, 2453 bp, Artificial Sequence
  derived and/or modified sequence
ggcccgcgcccggcctccgcggcgccgcctcccagcccagagcccagcgctcaggaaggtgcgggcgggggagaaagcaacaccattgtttttcaggcgcctccatttgcccccgagccgagccgtggctttccggatgatcgggagacgcggtctggacgggccgggaaaggagccgggcgcctgcggagaccccgcctcagcgagtacgcccggccgggcgggctgggaggatgaggacggctgccctggacttccgccgccacaggagggttttcggccggacgccgggagggagctccaggctgtgagctccatttgtaaaggtcttaataacaagaacagtgacttcggctccggagcttcaagatagtggcctgcttggcctgcccatctcggatctctccaggaggacccagccacccaagggtcgtcttctgctgctgacccccatcaaatcccatcatgcccacagccctgtgcccccgagtcttggctccgaaggaaagtgaggagcccaggaaaatgaggagcccacctggagagaaccctagcccccagggggagcttcccagccccgagtcctctcggcgtctcttccgccgtttccgctaccaggaggcggcgggcccccgggaggccctgcagcgcctctgggacctgtgcgggggctggctgcggcctgagaggcacaccaaggagcagattctggagctgctggtgctggagcagttcctggccatcctgccccgggagatccagagctgggtgcgggcgcaggagcctgagagcggagagcaggctgtggccgcggtggaggcactggaacgggagcccgggagaccctggcagtggctcaagcactgtgaagaccctgtggtgattgatgatggggacagccctctggaccaggagcaggagcagctgccggtagagccccacagcgaccttgcaaagaaccaggatgcccagcccataaccctggcacagtgcctggggctcccaagcagaccaccaagccagctcagcggggacccagttctgcaagatgctttccttcttcaggaagagaatgtgcgggacacacagcaggtgaccaccctccagctacccccgagtcgggtttctccattcaaggacatgattttatgcttctctgaagaggattggtcccttctagatcctgcccagactggcttctatggagagttcatcattggggaggattacggggtctcaatgcctccaaacgacctagctgcccagccagatctctcccagggagaggagaatgagccacgcgttccagagttgcaggatctccagggcaaagaagtgccccaggtctcctacttggactctccaagtctccagccattccaggtagaagaaagaaggaaacgtgaggagctgcaggtgccagagttccaggcctgcccacagacggtggtgcctcaaaacacctacccagctggcggcaacccgcgatctctagagaacagcctggatgaagaagtgaccatcgagatcgttctctccagctctggggacgaggactcccagcatggcccgtactgcacagaagagctggggagccccacagagaagcagcgcagcctccccgcctcccaccggagcagcaccgaggccggaggcgaggtgcagacctccaagaagtcctacgtgtgtccgaactgtgggaaaatcttccgctggagggtcaacttcatccggcatctgcggagccgcagggagcaggagaagccgcacgagtgctcggtgtgcggggagctgttcagcgacagcgaggacctggatgggcacctagagagccacgaggcccagaagccttaccggtgtggtgcctgcgggaagagcttccgcctgaactcccacctgctctcccaccggcggatacacctgcagccggacagactccagccggtggagaagagagagcaggcggcatccgaggacgcggacaagggtcccaaagagccgctggaaaacggcaaggccaaactgagcttccagtgctgtgagtgtgggaaggccttccagcggcacgaccacctggctcggcaccgcagccactttcacctgaaggacaaagcccggcccttccagtgccggtactgcgtcaagagcttcacgcagaactatgacctcctccgccacgagcgcctgcacatgaagcgccgttccaagcaggctctgaactcctactgagcctctccgcctggggcggcctcaccctggctggtgctgccccctcaccttggtactgatcagcgcccccacccaggacataccttccccaggatagagagcacacctccctcctgtccttgctctcaggtagtgagcgttcgggtggtgccatgggagcactctccctcccccaggtaatgaaagagtggccaagtgaaaaaaaaaaaaaaaaaaaaaaaaaa

SEQ ID NO: 225474 - DNA, 1764 bp, Artificial Sequence
  derived and/or modified sequence
atgcccaccgccctgtgccccagagtgctggcccccaaggagagcgaggagcccagaaagatgagaagcccccccggcgagaaccccagcccccagggcgagctgcccagccccgagagcagcagaagactgttcagaagattcagataccaggaggccgccggccccagagaggccctgcagagactgtgggacctgtgcggcggctggctgagacccgagagacacaccaaggagcagatcctggagctgctggtgctggagcagttcctggccatcctgcccagagagatccagagctgggtgagagcccaggagcccgagagcggcgagcaggccgtggccgccgtggaggccctggagagagagcccggcagaccctggcagtggctgaagcactgcgaggaccccgtggtgatcgacgacggcgacagccccctggaccaggagcaggagcagctgcccgtggagccccacagcgacctggccaagaaccaggacgcccagcccatcaccctggcccagtgcctgggcctgcccagcagaccccccagccagctgagcggcgaccccgtgctgcaggacgccttcctgctgcaggaggagaacgtgagagacacccagcaggtgaccaccctgcagctgccccccagcagagtgagccccttcaaggacatgatcctgtgcttcagcgaggaggactggagcctgctggaccccgcccagaccggcttctacggcgagttcatcatcggcgaggactacggcgtgagcatgccccccaacgacctggccgcccagcccgacctgagccagggcgaggagaacgagcccagagtgcccgagctgcaggacctgcagggcaaggaggtgccccaggtgagctacctggacagccccagcctgcagcccttccaggtggaggagagaagaaagagagaggagctgcaggtgcccgagttccaggcctgcccccagaccgtggtgccccagaacacctaccccgccggcggcaaccccagaagcctggagaacagcctggacgaggaggtgaccatcgagatcgtgctgagcagcagcggcgacgaggacagccagcacggcccctactgcaccgaggagctgggcagccccaccgagaagcagagaagcctgcccgccagccacagaagcagcaccgaggccggcggcgaggtgcagaccagcaagaagagctacgtgtgccccaactgcggcaagatcttcagatggagagtgaacttcatcagacacctgagaagcagaagagagcaggagaagccccacgagtgcagcgtgtgcggcgagctgttcagcgacagcgaggacctggacggccacctggagagccacgaggcccagaagccctacagatgcggcgcctgcggcaagagcttcagactgaacagccacctgctgagccacagaagaatccacctgcagcccgacagactgcagcccgtggagaagagagagcaggccgccagcgaggacgccgacaagggccccaaggagcccctggagaacggcaaggccaagctgagcttccagtgctgcgagtgcggcaaggccttccagagacacgaccacctggccagacacagaagccacttccacctgaaggacaaggccagacccttccagtgcagatactgcgtgaagagcttcacccagaactacgacctgctgagacacgagagactgcacatgaagagaagaagcaagcaggccctgaacagctactag

SEQ ID NO: 225475 - DNA, 1764 bp, Artificial Sequence
  derived and/or modified sequence
atgcctacagccctatgcccgcgagtgctggcccctaaggaatctgaagagccacgaaaaatgagatctcccccgggggagaacccgagcccacaaggggagttaccttccccagaatcatcacgacgtctgttccgtaggttccgataccaagaagctgctggcccccgggaggctctgcagaggctgtgggacctgtgcggaggctggttgcgcccggagagacacacaaaagaacagatcctggagttgctagttctcgagcagttccttgccatcctgccgagggaaatccagtcctgggtgcgtgctcaggaacccgagagtggagagcaggcggtcgcagcagtggaggccctagagagagagcccggacgcccctggcagtggctgaagcactgcgaagaccctgtggtgatagacgacggtgattctcccctcgatcaagagcaagaacagctgccagtcgagccacactcagacttagctaagaaccaagacgctcagcctatcacactggcacaatgtttagggcttccgagccggcccccttcccagcttagcggagaccccgttctccaggatgcattccttctgcaagaagagaacgtgagggatacacagcaggtgaccaccctgcagctgccgccctccagagtttccccattcaaagacatgattctgtgcttttcagaggaggattggtcccttctggaccccgcacagaccggattctacggggaatttataatcggagaggactacggggtgtccatgccacccaacgatttagcagcacaacctgatctgtctcaaggtgaagaaaatgaaccccgcgttcctgagttgcaggatttgcaggggaaggaggttccccaggtatcctacctggatagcccttctctgcaacctttccaagtagaagaacgaagaaagcgagaagagctccaggttcccgagtttcaggcatgtccacagactgtggtcccacaaaatacataccctgccgggggaaaccccagatccctggagaactcccttgacgaggaggttaccatcgagatcgtgcttagctcttctggagatgaggactcacaacatggaccatattgcactgaggagttgggttccccgacagagaagcagcggtccctcccagctagccatcgctcttccaccgaggccgggggcgaggtacagacctcaaaaaaatcctacgtgtgcccaaattgcggaaagattttcagatggcgtgtgaatttcattagacacctccgaagtcgaagagagcaagagaaaccgcatgaatgttccgtgtgtggcgagctgttttccgactccgaggacctggacggtcacctggagagtcacgaggctcagaaaccttaccggtgtggagcctgcggaaagagtttccggcttaacagccaccttctgtctcaccgcagaattcatttgcagcccgacaggcttcaacccgtggagaagcgtgagcaagctgcatctgaggatgccgacaagggccctaaggagccccttgaaaatggaaaggccaagttgtcatttcagtgttgtgaatgtggcaaagcatttcaacggcacgaccatctggctaggcaccgtagtcactttcatttaaaagataaggcccggccatttcagtgtcgatactgtgttaagagctttactcaaaactacgacttactgcgccacgagaggctgcatatgaagcgccgcagtaaacaagctctgaattcttactag

SEQ ID NO: 225476 - DNA, 1764 bp, Artificial Sequence
  derived and/or modified sequence
atgcccacagccctgtgcccccgggtgctggcccccaaggagagcgaggagcccaggaagatgaggagccccccaggagagaaccccagcccccagggcgagctgcccagccctgagagcagccggcggctcttccgccgcttccgctaccaggaggccgccggcccccgggaggccctgcagaggctgtgggacctgtgtggcggctggctgcggcctgagcggcacaccaaggagcagatcctggagctgctggtgctggagcagttcctggccatcctgccccgggagatccagagctgggtgcgggcccaggagcctgagagcggggagcaggccgtggccgctgtggaggccctggagcgggagcccggccggccctggcagtggctgaagcactgtgaagatcctgtggtgattgatgatggagacagccccctggaccaggagcaggagcagctgcctgtggagccccacagcgacctggccaagaaccaggatgcccagcccatcaccctggcccagtgcctgggcctgcccagcaggcctcccagccagctgagcggggaccctgtgctgcaggatgccttcctgctgcaggaggagaatgtgcgggacacccagcaggtgaccaccctgcagctgccccccagccgggtgagccccttcaaggacatgatcctgtgcttcagcgaggaggactggagcctgctggaccctgcccagacaggcttctacggggagttcatcattggagaagattatggagtgtccatgcccccaaatgacctggccgcccagcctgacctgagccagggcgaggagaatgagccccgggtgcctgagctgcaggacctgcagggcaaggaggtgccccaggtgtcctacctggacagccccagcctgcagcccttccaggtggaggagaggaggaagcgggaggagctgcaggtgcctgagttccaggcctgcccccagacagtggtgccccagaacacctacccagctgggggcaaccccaggagcctggagaacagcctggatgaggaggtgaccattgaaattgtgctgagcagcagtggagatgaggacagccagcacggcccctactgcacagaggagctgggcagccccacagagaagcagaggagcctgcctgccagccacaggagcagcacagaagctggaggagaggtgcagaccagcaagaagagctatgtgtgccccaactgtgggaagatcttccgctggagggtgaacttcatccgccacctgcggagccggcgggagcaggagaagccccatgagtgcagcgtgtgtggggagctgttcagtgacagcgaggacctggatggccacctggagagccatgaggcccagaagccctaccgctgtggggcctgtgggaagagcttccggctgaacagccacctgctgagccaccggcgcatccacctgcagcctgaccggctgcagcctgtggagaagcgggagcaggccgcctctgaagatgctgacaagggccccaaggagcccctggagaatggcaaggccaagctgtccttccagtgctgtgaatgtgggaaggccttccagagacatgaccacctggcccggcacaggagccacttccacctgaaggacaaggcccggcccttccagtgccgctactgtgtgaagagcttcacccagaactatgacctgctgcggcatgagcggctgcacatgaagaggaggagcaagcaggccctgaacagctactag

SEQ ID NO: 225477 - DNA, 1764 bp, Artificial Sequence
  derived and/or modified sequence
atgcccaccgccctgtgcccccgggtgctggcccccaaggagagcgaagagcccaggaagatgagatctcctcctggggagaacccttcgccccagggcgagctcccttctcctgaatcttcccggagactgttccggcgattccgctaccaagaagcagctggtcctagggaggcgctgcagcgtctgtgggatctttgtggggggtggctgagacctgagcgacacacaaaggagcagatcctagagctgttagtgttggagcagtttttagcaattctccctcgggagatacagtcctgggtgcgggctcaggagcccgaaagtggggagcaggccgtggctgccgtggaggcacttgagcgtgagccaggccggccatggcagtggctgaagcattgcgaggaccctgtggttatcgacgacggagacagtccattagatcaggagcaggaacagctccccgtggaaccccacagtgacttggcaaagaatcaggatgctcaacctataacacttgcacagtgtcttggcctaccctctcggcctcctagccagctgagtggtgatccagtgcttcaggacgcattcttactccaggaagagaatgtccgggatacccaacaggtcacaactctccagctgcccccatctcgagtatctccttttaaagatatgattctttgtttcagcgaagaagattggagcctccttgatccagcccagacaggattctacggggaatttattatcggtgaagactacggcgtgtcgatgcctccaaacgaccttgcagcacagccagatttgtcacagggtgaggaaaacgagccaagagtgcctgaattgcaggatcttcaagggaaggaagtgccgcaggtgtcctacctggattccccatcgcttcagcctttccaggtcgaagagagaagaaagagggaggagctgcaagtgcccgaatttcaggcgtgtcctcagaccgtggtgcctcagaacacttatcccgccggggggaatccccgctcactcgagaacagcctggacgaagaggtgaccattgaaatcgttctttcatcctcgggcgacgaggattctcaacatgggccatactgtacagaggaactcggctcaccgaccgaaaaacagcgaagtttacccgcctcccacagaagctccacagaggccggcggggaggtgcagaccagtaagaaaagctacgtatgtcctaattgtggaaaaatatttagatggagggtcaactttattagacatcttcggtcgagaagagagcaggaaaagccccacgagtgctccgtgtgtggcgaactgttctccgactcagaggatttggacgggcacctggagtcacacgaagcacagaagccttataggtgtggagcatgcggcaagtctttccgtctgaactcccatctgctgagccaccgcagaattcacctgcagccggaccgcctgcagccagtggaaaagagagagcaggcagcctctgaagatgcagacaagggccccaaggagcctttggaaaacggcaaagctaaactctctttccagtgctgtgaatgtggaaaggcttttcagcgtcatgatcacctggctcggcacaggtcgcactttcacctgaaggacaaggcacggccattccaatgtcgttattgcgtgaagtcctttacacaaaattacgatctcctgcgacacgaaaggctgcatatgaaacggcgctccaagcaggcattgaatagctactag

SEQ ID NO: 225478 - DNA, 1764 bp, Artificial Sequence
  derived and/or modified sequence
atgccaaccgccttatgcccacgggtgctcgcacccaaggaatccgaggagccacgcaagatgaggagccccccaggggaaaacccttcacctcagggagagctccctagcccagaatcaagtcgcaggctattccgcaggttccgataccaggaggctgccggaccacgcgaggcgttgcagcgcctgtgggacctttgtgggggatggcttcgacctgagaggcacacgaaggaacagatcttggagctactcgtgcttgagcagttcctggcaatcctgccgagggaaattcagagttgggtgagggcccaggaacctgagtcaggcgagcaggccgtcgccgctgttgaagcacttgagcgggagcccggacgcccttggcagtggttaaagcactgtgaagaccccgttgtcattgatgacggggatagcccactggatcaggaacaggagcagctgccagttgaacctcactccgatttggccaagaatcaggatgcccagcctattacccttgcccagtgcctcggtctgccatcccggcctcccagccaacttagcggcgaccccgtacttcaggacgcattcctgcttcaggaggagaacgtgagagatactcagcaagtaaccaccttgcagcttccgccatctagggttagtcctttcaaggatatgatcctgtgcttttccgaggaagactggtccctgcttgaccctgcacagaccggcttttacggggagtttataatcggcgaggattacggagtgtctatgcctcccaacgacctggcagcccagccagacctctcccaaggcgaagagaacgaaccgagagttccagagctgcaagatctccagggtaaggaggttccacaggttagctacctcgactcaccttccctgcagcccttccaggtagaagaaaggcgtaagagggaggaactccaggtgcctgaattccaagcgtgtcctcagactgtcgtcccccagaacacttatcctgcaggaggtaaccccaggtccttagaaaattctctggacgaggaagttacaattgaaattgtcctgagttcttctggcgacgaagactctcagcacggaccatactgcacggaggagcttggctccccaaccgagaagcagaggagtttacccgcatcccaccggtctagcaccgaggcaggcggagaagtccagacgagcaagaagtcttacgtgtgccccaactgcggcaaaattttcaggtggagggtcaacttcatcagacacctgaggtcgcgcagagagcaagagaagcctcacgagtgtagcgtatgcggggagttgttcagcgattctgaagacctcgacggacatcttgagtcccacgaggcccagaaaccctacagatgcggagcttgcggaaagtccttcaggctgaatagccatctgctctcccatagacgcatccacctccagcccgatagactgcagcccgtggaaaagcgagagcaggccgcttctgaagatgctgataagggtccaaaagaacctttagaaaacggaaaggctaaactatccttccagtgttgcgagtgcggtaaggccttccagcgccatgatcacctggctaggcatcgaagccacttccacctcaaagacaaggcaaggccatttcagtgtcggtattgcgtcaaatcattcactcaaaactatgacctccttaggcacgagcggctccacatgaagagaaggagcaagcaggcactcaattcttattag

SEQ ID NO: 225479 - DNA, 5336 bp, Artificial Sequence
  derived and/or modified sequence
ggcccgcgcccggcctccgcggcgccgcctcccagcccagagcccagcgctcaggaaggtgcgggcgggggagaaagcaacaccattgtttttcaggcgcctccatttgcccccgagccgagccgtggctttccggatgatcgggagacgcggtctggacgggccgggaaaggagccgggcgcctgcggagaccccgcctcagcgagtacgcccggccgggcgggctgggaggatgaggacggctgccctggacttccgccgccacaggagggttttcggccggacgccgggagggagctccaggctgtgagctccatttgtaaaggtcttaataacaagaacagtgacttcggctccggagcttcaagatagtggcctgcttggcctgcccatctcggatctctccaggaggacccagccacccaagggtcgtcttctgctgctgacccccatcaaatcccatcatgcccacagccctgtgcccccgagtcttggctccgaaggaaagtgaggagcccaggaaaatgaggagcccacctggagagaaccctagcccccagggggagcttcccagccccgagtcctctcggcgtctcttccgccgtttccgctaccaggaggcggcgggcccccgggaggccctgcagcgcctctgggacctgtgcgggggctggctgcggcctgagaggcacaccaaggagcagattctggagctgctggtgctggagcagttcctggccatcctgccccgggagatccagagctgggtgcgggcgcaggagcctgagagcggagagcaggctgtggccgcggtggaggcactggaacgggagcccgggagaccctggcagtggctcaagcactgtgaagaccctgtggtgattgatgatggggacagccctctggaccaggagcaggagcagctgccggtagagccccacagcgaccttgcaaagaaccaggatgcccagcccataaccctggcacagtgcctggggctcccaagcagaccaccaagccagctcagcggggacccagttctgcaagatgctttccttcttcaggaagagaatgtgcgggacacacagcaggtgaccaccctccagctacccccgagtcgggtttctccattcaaggacatgattttatgcttctctgaagaggattggtcccttctagatcctgcccagactggcttctatggagagttcatcattggggaggattacggggtctcaatgcctccaaacgacctagctgcccagccagatctctcccagggagaggagaatgagccacgcgttccagagttgcaggatctccagggcaaagaagtgccccaggtctcctacttggactctccaagtctccagccattccaggtagaagaaagaaggaaacgtgaggagctgcaggtgccagagttccaggcctgcccacagacggtggtgcctcaaaacacctacccagctggcggcaacccgcgatctctagagaacagcctggatgaagaagtgaccatcgagatcgttctctccagctctggggacgaggactcccagcatggcccgtactgcacagaagagctggggagccccacagagaagcagcgcagcctccccgcctcccaccggagcagcaccgaggccggaggcgaggtgcagacctccaagaagtcctacgtgtgtccgaactgtgggaaaatcttccgctggagggtcaacttcatccggcatctgcggagccgcagggagcaggagaagccgcacgagtgctcggtgtgcggggagctgttcagcgacagcgaggacctggatgggcacctagagagccacgaggcccagaagccttaccggtgtggtgcctgcgggaagagcttccgcctgaactcccacctgctctcccaccggcggatacacctgcagccggacagactccagccggtggagaagagagagcaggcggcatccgaggacgcggacaagggtcccaaagagccgctggaaaacggcaaggccaaactgagcttccagtgctgtgagtgtgggaaggccttccagcggcacgaccacctggctcggcaccgcagccactttcacctgaaggacaaagcccggcccttccagtgccggtactgcgtcaagagcttcacgcagaactatgacctcctccgccacgagcgcctgcacatgaagcgccgttccaagcaggctctgaactcctactgagcctctccgcctggggcggcctcaccctggctggtgctgccccctcaccttggtactgatcagcgcccccacccaggacataccttccccaggatagagagcacacctccctcctgtccttgctctcaggtagtgagcgttcgggtggtgccatgggagcactctccctcccccaggtaatgaaagagtggccaagtgagtgttctgtttctgctgtgccaaaaaacgggggggatgtgccatcaccaggttggacatgccaggtgttctgcgtcttagagacccttggcccatgctccccaagctcggggagtaaaactgggctatcccccgtcagggcggcaccctggtcaccagccaaacctcagtatactccctcccctccttccctgtctgaacgctaggatctgctcctgaagctccaggatgcctgcacttccactgagaagctgctggcggatgttggactagaggaaagaagaaggcagggtgggactgatgggctcagtggggagcagggccaggcacactgagccagacatgtcatgtctgagccccagattcgtggccatcaggtaggcaggagcaccccgcagatccaagatgatcaggcagcccttttgggctggcctctgtggcaggggtctgcagagctccttcttgaggtttggaaacagtcgtcatacctgttgattttcctgggggccaatcactagggatctggagctcaccaaaaacaaagcttacattttaatttgtgttgcacacctaccccataatgtctttataccccaaagatccttggtaaatgcttgtgggttggaagcggagttgtcatcgtttaaaaggcacttaagtcccttcttccaatctgtcctgtctaggaatgtggagctctgcccccagtgaggggttctcctgtctgggtgagccaagctccagaacagaaccttgcctgacaacacacttgatagatacattagcttggagtgctggtgtgtccaaacactggctggcttagaacaacaggagtgtattccctgacagttctgggaggtgcacgtccaagatcagggtgtcctcagagttggtgccttccgagagctgtgagggagaagcggcttcatgcctttgctggcagttgccattccttggtgtgtggaagcgtcacccagtctctgccttcatctccacatggcactcttgctgtgtgcgtgtctgtctccaaacctccctttgtttaaggacaccagtcatatcggattagagcccatcccaccgactccagtataacctcatctgtatccgcagcaaccgtttaccaataaggtcacattctgaggtactagaggttgggacttcaacatcggaatttgaaagggacagcattcagcccatgactccagataaacgtgaggtatgctatatcattcctaatttacagatgagtcaatacaaacttgagtgagcttgctcacaattccatcaaaggcagggttcagacccaagtttcagcatttagggcaggtgtcctctgcatggaagaatcatactcaatagccgtaaacgctgacaaattccccttcctccctgccttctgatgggggctgggcaggccagctggagctgtgtctcctgctgggattccggactgagagtgacagcaggtagtgaaacctcaagcaatttaaaacatggtattgttcctggaagactggttatgttggctagggtcagcaagagagggcatcaaggctgtagtctagcagtgatttaatctgcaagtcaaaccagacgggtattttgtattattcatatgtcacatcctaccaacagacagtaagtcaggcaaggctcctggtgctccttgtcactcacgtaattttcacatcaggaaaactctgggctgggtgcagtggctcacacctgtaatcctagcactttgggaaaccaaggtgggtggattgcctagctcagtgacaccagcctgggccacatggcaaaaccccgtctgtaccaaaaatgcaaaaaattagctgggtgtggtgttgacgtttgcggtcccagctactctggaggctgaggtgggaggattgcttgagtctgggaggcagaagttgcagtaagccgagatcatgccactgcacaagctaggtgacagaatgagactctgtctcaaaaataattaaaaagcctctgccccaaactcgttaaaagattttataaccacaactgctgtttctgtgtagatgcatctgcatgcccaggagcagtaaatgcaataaaatcatttggttatactttgaacacaaaataaacggttgaggcttttactttctaaatagtttgtctcttgtatcaacatagctggaaaagggagaaatccgatttttaaggccaagggaggggaaaattccaagtagaagccaggctctctgtacacgtttaccccacctacctgtgtgctcctacctgtgctgaggattctctctgtagctctaaggtcttgggaaggttattcaccttcctgcttcagacgtctgactcaagagaagaacactgttctacttaccagagtgtttttctgtgtaaaaccacatcatgaaggagaaagcgacaaagggaatgtgaggggctggaagccacagggaggctgtctcttgagtccccaccactgatccagagccaaccaaggcacctcaggaaatggaaggccacattgcctctggatttggaaatcctcctgggtaatgtaactgaaacccaggttgatgccatgcagcaggagcagcagggggaacgtgctctcaggagaggtcggccaaccctccagcccaacacccttcaccacagtggtggaggaggctgcacccaggagatctttgtctcccttttggccactgatacctttggccttatctgacaacagctacccctcgatccttccctcccaccccaggggctgggcagctggctggagctttgtgtccaccttgctctggaggttgagacccccatctgagcaacatcctctctctttgttcctctgatcccttggcatcgtcacaaacccacaggtgcataataaaaacttgctgagtcaatat

SEQ ID NO: 225480 - DNA, 555 bp, Artificial Sequence
  derived and/or modified sequence
atgttcctgtcacctggggaggggcctgctacggaaggcggcggcttgggacctggtgaggaagccccgaagaagaagcaccggcgcaaccggacaacctttacaacataccagctccaccaactagagcgggcgtttgaggccagtcactatcccgatgtctactcacgcgaggaactggctgcgaaggtgcacctccccgaagtgagagtccaggtctggtttcaaaaccggcgggcaaagtggcgccgacaagaaagactcgaatctggaagcggcgccgtggctgcacccaggctgcccgaggcccctgctctccctttcgccagaccacccgcaatgtctctccccctggagccctggctgggccccgggcctcccgccgtgccgggactgccacggttacttggtcctggccccggcctccaagctagcttcggtccccacgccttcgctcctacattcgctgacggattcgccttagaggaggcgtctctgcggttgttggcgaaggagcatgcgcaggctctcgatcgtgcctggccacctgcctag

SEQ ID NO: 225481 - DNA, 555 bp, Artificial Sequence
  derived and/or modified sequence
atgttcctgagccctggagagggccctgccacagaaggaggcggcctgggccctggagaggaggcccccaagaagaagcacagaagaaacagaaccaccttcaccacctaccagctgcaccagctggagcgggcctttgaggccagccactacccagatgtgtacagccgggaggagctggccgccaaggtgcacctgcctgaggtgcgggtgcaggtgtggttccagaacagaagagccaagtggaggcggcaggagcggctggagagcggcagcggggctgtggccgccccccggctgcctgaggccccagccctgccctttgcccggcccccagccatgagcctgcccctggagccctggctgggccctggccccccagctgtgcccggcctgccccggctgctgggccctggccctggcctgcaggccagctttggcccccacgcctttgcccccacctttgctgatggctttgccctggaggaggccagcctgcggctgctggccaaggagcacgcccaggccctggaccgggcctggcccccagcctag

SEQ ID NO: 225482 - DNA, 555 bp, Artificial Sequence
  derived and/or modified sequence
atgttcctgagccccggcgagggccccgccaccgagggcggcggcctggggcccggagaagaggctcctaagaaaaaacatcgcaggaatcgcactactttcaccacctaccagttacaccagcttgagagagccttcgaagcctcacactatcccgatgtgtacagcagggaggagctcgcagccaaggtacacctcccagaagtccgagtgcaggtttggtttcagaataggcgggctaagtggagacggcaggagcggttggagtccgggtcaggcgcagtagccgcccctagactgcccgaagctccagcccttccattcgcacgacccccagctatgagcctgccgctggagccgtggctcgggccagggccgccagcagttccgggtctgcccaggctgctcggccccggtccaggactacaggcttcattcgggcctcacgccttcgcgccaacgtttgccgacggtttcgctctggaggaagccagtttgagactgctagcgaaggaacacgcgcaagctctggacagagcctggccccccgcatag

SEQ ID NO: 225483 - DNA, 555 bp, Artificial Sequence
  derived and/or modified sequence
atgttcctgtccccaggggaggggcctgctacggaggggggaggactcgggccaggggaggaagcaccaaaaaaaaagcaccggagaaatcggactacctttactacgtaccagctgcaccagttggaacgcgctttcgaggcaagccattatcccgatgtgtacagccgggaggagttggcagctaaggtgcaccttccagaggtgagagtacaggtttggtttcagaaccggagggcaaaatggcgtcgccaggaacgcctggagagcgggtcgggcgcagtcgctgcccctagacttcctgaggcacccgctctgccatttgcaagaccaccagctatgtccttgccattagagccatggctaggtcctggccctcccgcagtgccaggccttccgcgactcctgggccctggaccaggtttacaagcttctttcggaccccatgccttcgctcccactttcgctgatggcttcgctcttgaagaagcctccctgaggctcttggccaaggaacatgcacaggcccttgaccgagcgtggccgcctgcttag

SEQ ID NO: 225484 - DNA, 555 bp, Artificial Sequence
  derived and/or modified sequence
atgttcctgagccccggcgagggccccgccaccgagggcggcggcctgggccccggcgaggaggcccccaagaagaagcacagaagaaacagaaccaccttcaccacctaccagctgcaccagctggagagagccttcgaggccagccactaccccgacgtgtacagcagagaggagctggccgccaaggtgcacctgcccgaggtgagagtgcaggtgtggttccagaacagaagagccaagtggagaagacaggagagactggagagcggcagcggcgccgtggccgcccccagactgcccgaggcccccgccctgcccttcgccagaccccccgccatgagcctgcccctggagccctggctgggccccggcccccccgccgtgcccggcctgcccagactgctgggccccggccccggcctgcaggccagcttcggcccccacgccttcgcccccaccttcgccgacggcttcgccctggaggaggccagcctgagactgctggccaaggagcacgcccaggccctggacagagcctggccccccgcctag

SEQ ID NO: 225485 - protein, 110 aa, Artificial Sequence
  derived and/or modified sequence
MAKHHPDLIFCRKQAGVAIGRLCEKCDGKCVICDSYVRPCTLVRICDECNYGSYQGRCVICGGPGVSDAYYCKECTIQEKDRDGCPKIVNLGSSKTDLFYERKKYGFKKR

SEQ ID NO: 225486 - DNA, 1086 bp, Artificial Sequence
  derived and/or modified sequence
ggcaggaacaatgggggttaaaggtcggacggaagttcccgaagcttccggtggccggcttagttaggagctatggctaaacatcatcctgatttgatcttttgccgcaagcaggctggtgttgccatcggaagactgtgtgaaaaatgtgatggcaagtgtgtgatttgtgactcctatgtgcgtccctgcactctggtgcgcatatgtgatgagtgtaactatggatcttaccaggggcgctgtgtgatctgtggaggacctggggtctctgatgcctattattgtaaggagtgcaccatccaggagaaggacagagatggctgcccaaagattgtcaatctggggagctctaagacagacctcttctatgaacgcaaaaaatacggcttcaagaagaggtgattggtgggtggccccttcctccccccaacatcagtctgctgcagctgccagaaaacatgcctactactaccagcagaaagggagcagagcccagagcatcaccaggagtgcctgctagtgtactggcagcttgccaccccctcctctcccttcacccagacacgtggtagggatggaaaaggattcttcacagagcactctggcacaccatatcggagaaaacttgatagattagttaatggtttttcttgaattcgagaagcaaagatctgttctccatattggtatgttctccctcaaccaagatcttctaaaaagaaataatattttagtcttctgcttgaggaactgactgtgaagcgacgcccagtgaaaaacatgttcttgcagcagctctggtggcagctgtccttgaggaacctttggtgtgtggtgggaagctatcagaacaagaaatgtaggcatttcccgttttttttggggggggggtgggggggcagggctctgccctcttgaaaggcatttacttgtttaacacttgtccagctacagtggggtacagtagctggctattcacaggcatcatcatagcccactagtctcatattattttccttttgagaaattggaaactctttctgttgctattatattaataaagttggtgtttattttctggta

SEQ ID NO: 225487 - DNA, 333 bp, Artificial Sequence
  derived and/or modified sequence
atggcaaagcaccaccctgatctgatcttttgcagaaagcaggccggcgtggccatcggtaggctctgtgagaagtgtgacgggaagtgcgtcatctgtgactcctacgtgagaccatgcactctggtgagaatctgcgacgagtgcaattatggatcataccagggacgttgtgtgatttgcggcggccccggagtgagcgatgcatactattgtaaggaatgtaccatccaggagaaagaccgggacggatgccccaaaattgtcaatcttggctcttcaaagacggaccttttttacgaaaggaaaaagtatgggttcaagaagaggtag

SEQ ID NO: 225488 - DNA, 333 bp, Artificial Sequence
  derived and/or modified sequence
atggccaagcaccacccagacctgatcttctgcaggaagcaggccggcgtggccatcggccgcctgtgtgagaagtgtgatggaaaatgtgtgatctgtgacagctatgtgcggccctgcaccctggtgcgcatctgtgatgagtgcaactacggcagctaccagggccgctgcgtcatctgtggcggccctggggtgtctgatgcctactactgcaaggagtgcaccatccaggagaaggacagagatggctgccccaagatcgtgaacctgggcagcagcaagacagacctcttctatgaaaggaagaagtatggcttcaagaagaggtag

SEQ ID NO: 225489 - DNA, 333 bp, Artificial Sequence
  derived and/or modified sequence
atggccaagcaccaccccgacctgatcttctgccggaagcaggccggtgttgccatcggccggttgtgcgaaaagtgcgacgggaagtgtgttatttgcgattcctacgtgcggccctgtactttggtgcgtatttgcgatgaatgcaactacggtagctaccaggggagatgcgtaatatgcggcgggcccggcgtgtcggacgcatactactgtaaggagtgtaccattcaggaaaaggatcgcgacgggtgtcccaagattgtgaatttgggctcttccaagacagatctgttctacgagcgcaagaaatacggcttcaagaaacgatag

SEQ ID NO: 225490 - DNA, 333 bp, Artificial Sequence
  derived and/or modified sequence
atggcaaagcaccaccccgacctgatcttttgtaggaagcaggccggtgtcgcaatcgggcgattgtgtgaaaagtgcgatgggaagtgcgtgatctgtgacagctatgtgagaccctgcactctggtgcgtatctgtgacgagtgcaattatgggtcgtatcaaggcaggtgtgtcatctgtgggggaccaggcgtgtctgatgcatactactgcaaagagtgcaccattcaggagaaggatcgggatggttgtccaaagatcgtcaatttgggctccagcaaaaccgacctcttttatgagcgtaaaaagtatggctttaaaaagcggtag

SEQ ID NO: 225491 - DNA, 333 bp, Artificial Sequence
  derived and/or modified sequence
atggccaagcaccaccccgacctgatcttctgcagaaagcaggccggcgtggccatcggcagactgtgcgagaagtgcgacggcaagtgcgtgatctgcgacagctacgtgagaccctgcaccctggtgagaatctgcgacgagtgcaactacggcagctaccagggcagatgcgtgatctgcggcggccccggcgtgagcgacgcctactactgcaaggagtgcaccatccaggagaaggacagagacggctgccccaagatcgtgaacctgggcagcagcaagaccgacctgttctacgagagaaagaagtacggcttcaagaagagatag

SEQ ID NO: 225492 - protein, 2540 aa, Artificial Sequence
  derived and/or modified sequence
MAVETRAELVGKRFLCVAVGDEARSERWESGRGWRSWRAGVIRAVSHRDSRNPDLAVYVEFDDLEWDKREWVKVYEDFSTFLVEYHLIWAKRNDPSQTQGSKSKQIQWPALTFKPLVERNIPSSVTAVEFLVDKQLDFLTEDSAFQPYQDDIDSLNPVLRDNPQLHEEVKVWVKEQKVQEIFMQGPYSLNGYRVRVYRQDSATQWFTGIITHHDLFTRTMIVMNDQVLEPQNVDPSMVQMTFLDDVVHSLLKGENIGITSRRRSRANQNVNAVHSHYTRAQANSPRPAMNSQAAVPKQNTHQQQQQRSIRPNKRKGSDSSIPDEEKMKEEKYDYISRGENPKGKNKHLMNKRRKPEEDEKKLNMKRLRTDNVSDFSESSDSENSNKRIIDNSSEQKPENELKNKNTSKINGEEGKPHNNEKAGEETLKNSQPPWDQIQEDKKHEEAEKRKSVDTQLQEDMIIHSSEQSTVSDHNSNDLLPQECNMDKTHTMELLPKEKFVSRPPTPKCVIDITNDTNLEKVAQENSSTFGLQTLQKMDPNVSDSKHSIANAKFLETAKKDSDQSWVSDVVKVDLTQSSVTNASSGNDHLNMEKEKYVSYISPLSAVSVMEDKLHKRSPPPETIKSKLNTSVDTHKIKSSPSPEVVKPKITHSPDSVKSKATYVNSQATGERRLANKIEHELSRCSFHPIPTRSSTLETTKSPLIIDKNEHFTVYRDPALIGSETGANHISPFLSQHPFPLHSSSHRTCLNPGTHHPALTPAPHLLAGSSSQTPLPTINTHPLTSGPHHAVHHPHLLPTVLPGVPTASLLGGHPRLESAHASSLSHLALAHQQQQQLLQHQSPHLLGQAHPSASYNQLGLYPIIWQYPNGTHAYSGLGLPSSKWVHPENAVNAEASLRRNSPSPWLHQPTPVTSADGIGLLSHIPVRPSSAEPHRPLKITAHSSPPLTKTLVDHHKEELERKAFMEPLRSVASTSAKNDLDLNRSQTGKDCHLHRHFVDPVLNQLQRPPQETGERLNKYKEEHRRILQESIDVAPFTTKIKGLEGERENYSRVASSSSSPKSHIIKQDMDVERSVSDLYKMKHSVPQSLPQSNYFTTLSNSVVNEPPRSYPSKEVSNIYGDKQSNALAAAAANPQTLTSFITSLSKPPPLIKHQPESEGLVGKIPEHLPHQIASHSVTTFRNDCRSPTHLTVSSTNTLRSMPALHRAPVFHPPIHHSLERKEGSYSSLSPPTLTPVMPVNAGGKVQESQKPPTLIPEPKDSQANFKSSSEQSLTEMWRPNNNLSKEKTEWHVEKSSGKLQAAMASVIVRPSSSTKTDSMPAMQLASKDRVSERSSAGAHKTDCLKLAEAGETGRIILPNVNSDSVHTKSEKNFQAVSQGSVPSSVMSAVNTMCNTKTDVITSAADTTSVSSWGGSEVISSLSNTILASTSSECVSSKSVSQPVAQKQECKVSTTAPVTLASSKTGSVVQPSSGFSGTTDFIHLKKHKAALAAAQYKSSNASETEPNAIKNQTLSASLPLDSTVICSTINKANSVGNGQASQTSQPNYHTKLKKAWLTRHSEEDKNTNKMENSGNSVSEIIKPCSVNLIASTSSDIQNSVDSKIIVDKYVKDDKVNRRKAKRTYESGSESGDSDESESKSEQRTKRQPKPTYKKKQNDLQKRKGEIEEDLKPNGVLSRSAKERSKLKLQSNSNTGIPRSVLKDWRKVKKLKQTGESFLQDDSCCEIGPNLQKCRECRLIRSKKGEEPAHSPVFCRFYYFRRLSFSKNGVVRIDGFSSPDQYDDEAMSLWTHENFEDDELDIETSKYILDIIGDKFCQLVTSEKTALSWVKKDAKIAWKRAVRGVREMCDACEATLFNIHWVCQKCGFVVCLDCYKAKERKSSRDKELYAWMKCVKGQPHDHKHLMPTQIIPGSVLTDLLDAMHTLREKYGIKSHCHCTNKQNLQVGNFPTMNGVSQVLQNVLNHSNKISLCMPESQQQNTPPKSEKNGGSSPESDVGTDNKLTPPESQSPLHWLADLAEQKAREEKKENKELTLENQIKEEREQDNSESPNGRTSPLVSQNNEQGSTLRDLLTTTAGKLRVGSTDAGIAFAPVYSMGAPSSKSGRTMPNILDDIIASVVENKIPPSKTSKINVKPELKEEPEESIISAVDENNKLYSDIPHSWICEKHILWLKDYKNSSNWKLFKECWKQGQPAVVSGVHKKMNISLWKAESISLDFGDHQADLLNCKDSIISNANVKEFWDGFEEVSKRQKNKSGETVVLKLKDWPSGEDFKTMMPARYEDLLKSLPLPEYCNPEGKFNLASHLPGFFVRPDLGPRLCSAYGVVAAKDHDIGTTNLHIEVSDVVNILVYVGIAKGNGILSKAGILKKFEEEDLDDILRKRLKDSSEIPGALWHIYAGKDVDKIREFLQKISKEQGLEVLPEHDPIRDQSWYVNKKLRQRLLEEYGVRTCTLIQFLGDAIVLPAGALHQVQNFHSCIQVTEDFVSPEHLVESFHLTQELRLLKEEINYDDKLQVKNILYHAVKEMVRALKIHEDEVEDMEEN

SEQ ID NO: 225493 - DNA, 8536 bp, Artificial Sequence
  derived and/or modified sequence
gcggtggcggcggctgggctgcctcggggtcttcgacggccgcgttgggttttgtttcagttttcttgtgtggcgctgcagcacaaggctgcgaatctgggagtccaaaggagtgtttgcggggagggcccgaggtcgctgtgtccggggcagagcggccggttcgtcccgagtctgcgctctttcgggtccgctgctgtgtcccggtccgctctcctcagcatgagcggccggtaggagtgaggtttcatcggttccctcgcactggaggaggcagcggccgcttcggcagcgacagctatggcggtagagacgcgggcagagctggtgggtaagcggttcctgtgtgtggcggtcggcgacgaggcacgttcggagcgctgggagagcggacgcggctggcgaagctggcgagcgggggtcatccgagccgtgtcacacagggacagccgcaatccggacctggcggtgtatgtggaatttgatgatcttgaatgggataaacgagagtgggttaaagtttatgaagatttttcaactttcttggtggaataccacttaatctgggccaaaaggaatgaccctagccagactcagggatcaaagagcaaacagattcagtggcctgcattgactttcaaacctctggttgaaagaaatatacccagttcagtcactgcagtagaattccttgtagataagcaactggattttttaactgaagatagtgcctttcagccctaccaggacgacatagacagcctaaacccagttctcagggacaacccgcagcttcatgaggaagtgaaagtctgggtaaaggaacaaaaggttcaggagatttttatgcaaggtccttattccttaaatggatacagagtgagagtatatagacaagactctgccacccagtggtttactggcataattactcatcatgatctcttcacccgcaccatgatcgttatgaatgatcaggtactagaaccacagaatgtcgatccttctatggttcaaatgacctttctagatgatgttgttcactctttgttaaaaggtgaaaatattggcattacatcacgacgcaggtctcgtgccaatcaaaacgtcaacgctgttcacagccattatacacgtgcccaagcaaatagtcccagaccagcaatgaactcccaagctgctgtaccaaaacagaatacacaccagcaacagcaacaaagaagtatccgtccaaataagaggaagggctcagatagcagtataccagatgaagagaagatgaaggaggaaaaatatgattatatatcacgaggagaaaatcctaaaggtaaaaacaaacacttgatgaataaaagaaggaaacctgaggaggatgaaaagaaactaaatatgaaaagacttcgaactgacaatgtttcagacttttctgagagcagtgactcagaaaattcaaataagagaataatagataattcctcagaacagaagccagagaatgaattgaaaaataaaaatacttcaaaaataaatggagaagaaggaaaaccccataataatgagaaggcaggagaagagaccctaaaaaatagccagcctccctgggatcaaatacaggaagataaaaaacatgaagaagcagagaagcggaagtctgttgacactcagcttcaagaagatatgattattcattcgtcagaacagtccacagtttctgatcataattctaatgatttacttcctcaggaatgcaatatggataaaacacataccatggaattgctaccaaaggagaagtttgtatccagaccacccacaccaaaatgtgttattgatattacaaatgacactaatttagaaaaggtggctcaggaaaactcaagtacctttggccttcagacacttcagaaaatggatcctaatgttagtgattcaaaacactctattgcaaatgcaaaattcttggaaacagcaaaaaaagattctgaccagagctgggtcagtgatgtagttaaagtggatctaacccaatcaagtgttacaaatgcttcttcaggaaatgatcacttgaacatggaaaaagagaagtatgtctcttacatttctcctttaagtgcagtttctgtcatggaagataagctgcataagcgaagtccacctccagagactataaaatctaaacttaatacttcagtagatactcacaagataaaatccagcccatcacctgaagttgttaaacccaaaataactcattctcctgattctgtaaagtctaaggccacttatgtgaacagccaagctactggtgaaagaagattggcaaataagatagaacatgagctatcaagatgcagttttcatccaattcctactcgaagcagtacattagaaactacaaagagtcctcttatcattgataaaaatgagcattttacagtttacagagatcctgcacttattgggtcagaaacaggagctaatcatatttcacctttcctaagccagcatccttttcctcttcactcctcatctcatagaacctgtttaaatccaggtacccatcatcctgccttaactcctgcaccccatttactagccggatcatctagtcaaactccattacctaccattaacactcatcctctgactagtggtccacaccatgctgttcatcaccctcatttacttcccactgtgttacctggagtgcctactgcctccttacttggtggccacccacgactagagagtgctcatgccagcagcttgagccacttagcgctagcacaccagcaacaacaacagttgttacagcaccagtcacctcatcttcttggacaagcccatccttctgcttcatataatcagcttggactttatccaattatttggcagtatccaaatggaacacatgcatactcaggacttggtttgccttcttctaagtgggttcacccagaaaatgcagttaatgctgaagcttcattaaggaggaattctcccagtccttggctacatcagcccacccctgtgacctcagcagatggtattggattacttagtcacattcctgtcagaccttccagtgcagagcctcatcggcctcttaaaattacagcccattccagtccaccattgacaaaaactttagtagatcatcataaggaagaattagaaagaaaagcttttatggaaccattacggtctgttgcatccacatcagccaaaaatgacctggatctaaataggtcacagactggaaaagattgtcacttacataggcattttgtggatccagtattaaatcagttacagaggccaccccaggagactggagagaggttaaacaaatacaaagaggaacaccgtcgaattcttcaagaaagtattgatgttgctccctttacaactaaaatcaagggacttgagggtgagagagagaattattccagagtggcatcatcatcttccagtcctaaaagccatatcatcaaacaagatatggatgtagaacgctcagtatcagatctttataaaatgaagcactcagtgcctcagagtttaccccaaagtaactatttcactacattgtctaatagtgtggtcaatgaaccaccaagatcatacccatccaaagaagtttcaaatatttacggtgataaacagagtaatgcccttgcagcggcagcagctaatcctcaaactctgacttcatttataacatctctttcaaagcctccacctttgattaaacaccaaccagaaagtgaaggtttagtaggcaagataccagaacatcttccacatcagattgcatctcactcagtaacaaccttcagaaatgattgtaggagtcctacccatttgacagtttcttctacaaatacactccgcagtatgcctgcattacatagagcaccagtatttcacccaccaatccatcacagcctggaaagaaaggaaggcagctatagtagtctttcccctccaactttaactccggtgatgccagtaaatgctggtggtaaagttcaagaatcacagaagcctccaactctaatacccgaaccaaaagactcccaggcaaattttaagagttcttcagaacagagtttgacggagatgtggagacctaataataacctcagcaaagagaaaactgaatggcatgtggagaaaagcagcggaaagttacaggctgctatggcatctgtcattgtgcgtccatcttctagtacaaaaactgatagtatgccagcaatgcagttagcttctaaagatcgtgttagtgaaagatcttcagctggggcacataaaacagattgcctcaaactagcagaagccggagaaactggaagaatcattttgccaaatgtgaattcagacagtgttcacacaaaatctgaaaaaaactttcaggctgtctcacagggcagtgttcccagttcagtcatgtctgctgtaaatacgatgtgtaataccaaaacggatgtaatcacatctgctgccgatactaccagtgtttccagctggggtggttcagaagtaatttcctctttatcaaataccattttggcctctacatcatcagaatgtgtatcttcaaaaagtgtcagtcagccagtggctcaaaaacaagaatgcaaggtcagcaccacagcaccagttacattagccagtagtaagacaggaagtgttgttcaacccagttctgggttctcaggcacaactgattttatccatttaaaaaagcacaaggcagcattggctgcagctcagtataaaagtagtaatgccagtgagactgaacctaatgctataaaaaatcagacactttcagcctcccttcctctggatagcactgtaatctgtagtacaattaacaaagcaaactctgtaggaaatgggcaagcttcccagacaagtcaaccaaactaccatactaaactgaaaaaggcctggctcaccagacactcagaagaagataaaaatactaataaaatggaaaattcagggaattctgtatcagaaattattaagccatgttctgtcaacttaatagcctctacatctagtgatatacaaaatagtgtagatagtaagatcatagttgataaatatgtaaaagatgataaagtcaacaggagaaaagccaaaagaacttatgaatctggctctgaaagtggagactcagatgaaagtgaaagcaagtcagagcaaaggactaaaagacaacctaagccaacttacaaaaagaagcaaaatgatttgcaaaagagaaaaggtgaaatagaagaagatttgaaacccaatggagttctcagcaggagtgccaaagaaagaagtaaactgaagttgcaaagcaacagtaatagttgtcatttagtaaaaacggagtagttagaatagatggtttctcttctcctgaccaatatgatgatgaagctatgagtttgtggacacatgaaaattttgaagatgatgaactagatatagagacttctaaatatatcttggatataataggtgataagttctgtcaattagtaacatctgaaaaaacagctttgtcctgggtgaaaaaggatgccaaaattgcctggaaaagagcagtgagaggagtccgggagatgtgtgatgcatgtgaagcaacattgtttaacattcactgggtctgccaaaaatgtggatttgtggtctgcttagattgttacaaggcaaaggaaaggaagagttctagagataaagaactatatgcttggatgaagtgtgtgaagggacagcctcatgatcacaaacatttaatgccaacccaaattatacctggttctgttttgacagatcttctagatgccatgcacactcttagggaaaaatatggtattaaatcccattgtcattgtactaacaaacagaatttacaagttggaaattttcctacaatgaatggtgtatctcaagttttacagaatgttcttaatcacagtaataaaatttctctgtgcatgcctgagtctcagcagcaaaatactcctccgaagtctgagaaaaatggtggcagcagcccagagagtgatgtaggcacagataacaagttaactcctccagaatcccagtcaccactgcactggttagcagatcttgcagagcaaaaagccagagaggaaaaaaaagaaaacaaagaacttacccttgaaaaccaaattaaagaagaaagagaacaagacaactctgaatctccaaatggcagaacatcacctcttgtgtcccagaataatgaacaaggctcaaccttacgggatttgctgactacaacagctggaaagctacgtgtggggtctacagatgctggcattgcctttgccccagtatattcaatgggagccccaagtagcaaaagtggacggactatgcctaacattcttgatgacataattgcttcagttgttgaaaacaaaattccaccaagtaaaacctccaagataaatgtaaaaccagagcttaaagaagagcctgaagaaagcataatatctgcagtggatgaaaataataaattatacagtgatataccacattcttggatctgtgagaagcatattttatggcttaaggattataagaatagcagtaattggaagcttttcaaagaatgttggaaacaaggacagcctgcagtggtttctggtgtgcataagaaaatgaacattagcctatggaaggcggaatcaattagtcttgattttggagaccaccaagctgatctcctgaactgcaaagatagcatcatttcaaatgccaatgttaaggaattctgggatggttttgaagaagtttcaaaacggcagaaaaacaagagtggagaaacagttgttttaaaattgaaagactggccttcaggagaagacttcaagactatgatgccagcaagatacgaagatcttttaaaaagtctgccattgccagaatattgtaatccagaaggaaaattcaatttggcctctcatttgccaggattttttgtacgtcctgatctaggacccaggttgtgcagtgcctatggtgtagttgctgctaaagatcatgatataggaacaacaaatctccatattgaagtttctgatgttgtaaatatactagtttatgttggcatagcaaaaggaaatggcattctctcaaaagcaggaattctcaagaaatttgaggaagaagatttggatgacattttaaggaaaagattgaaggactcaagtgaaatacctggtgctctgtggcatatttatgctgggaaagatgttgacaagataagggaatttcttcaaaagatttcaaaagaacaaggccttgaagttctaccagaacatgatccaatacgtgaccaaagttggtatgtgaacaaaaagctccgtcaaaggctgcttgaagaatatggagtcagaacctgtactcttattcagttccttggtgatgctattgttttgccagcgggagcacttcatcaggttcagaattttcacagctgtattcaggtaactgaagattttgtgtctccagaacatcttgtagagtcatttcatttaacacaggaactgagacttttgaaggaagaaatcaattatgatgataaactacaggttaaaaatattttgtatcatgcagtcaaagaaatggtgagagccttgaagatacacgaggatgaagtagaggatatggaagaaaattaagtgtgatccagtttgatatttttaggttgttgaactgggattacttaaccttgaatgatgatatgtatgcacactgactttaagcttcataaaaccatcagtgccaagaaattctctttgtagtaattacttgttactgacaccacagcagtatagcatatgtcacagctcctgtgattcaatgttataaaacaagcagaattttaaaagcagcactatatagctgttttgtattatagtgtatatgatgtttgtgaaaatgccagatttaaaatgatgtatttatttttggtaaaaaataaaaaattctatgctatattgttgatcaagtgtaaatgtgaccttgtacagtttactaaaattactgatatttttcactacattgagacagttactgtgagaataggacacaaacaccagctattgcctgcatctgggaaattgctgaatcgcacagcagtcatgtcataatcagaaaattactgccaaataattgtaaaatttgtaaagtataaagtatataaagtagatactaaatacagacacttcaatattttgttgaagctattgactgtacaattaaacattttcaaaaggtgtaatttatttaaaattgtctcattttggtaaaatttatgtgaacttttaaagctaaatattaaacttaatatgctatgtaaatatatacatatatacatttaatgatgtatttttttaaaacattggcttgcttttgttaaagtgcaagtgttacatatggctttgtacattaaagttgaaaggggttttacattttccattaaaaggactttatc

SEQ ID NO: 225494 - DNA, 8666 bp, Artificial Sequence
  derived and/or modified sequence
cacaaggctgcgaatctgggagtccaaaggagtgtttgcggggagggcccgaggtcgctgtgtccggggcagagcggccggttcgtcccgagtctgcgctctttcgggtccgctgctgtgtcccggtccgctctcctcagcatgagcggccggtaggagtgaggtttcatcggttccctcgcactggaggaggcagcggccgcttcggcagcgacagctatggcggtagagacgcgggcagagctggtgggtaagcggttcctgtgtgtggcggtcggcgacgaggcacgttcggagcgctgggagagcggacgcggctggcgaagctggcgagcgggggtcatccgagccgtgtcacacagggacagccgcaatccggacctggcggtgtatgtggaatttgatgatcttgaatgggataaacgagagtgggttaaagtttatgaagatttttcaactttcttggtggaataccacttaatctgggccaaaaggaatgaccctagccagactcagggatcaaagagcaaacagattcagtggcctgcattgactttcaaacctctggttgaaagaaatatacccagttcagtcactgcagtagaattccttgtagataagcaactggattttttaactgaagatagtgcctttcagccctaccaggacgacatagacagcctaaacccagttctcagggacaacccgcagcttcatgaggaagtgaaagtctgggtaaaggaacaaaaggttcaggagatttttatgcaaggtccttattccttaaatggatacagagtgagagtatatagacaagactctgccacccagtggtttactggcataattactcatcatgatctcttcacccgcaccatgatcgttatgaatgatcaggtactagaaccacagaatgtcgatccttctatggttcaaatgacctttctagatgatgttgttcactctttgttaaaaggtgaaaatattggcattacatcacgacgcaggtctcgtgccaatcaaaacgtcaacgctgttcacagccattatacacgtgcccaagcaaatagtcccagaccagcaatgaactcccaagctgctgtaccaaaacagaatacacaccagcaacagcaacaaagaagtatccgtccaaataagaggaagggctcagatagcagtataccagatgaagagaagatgaaggaggaaaaatatgattatatatcacgaggagaaaatcctaaaggtaaaaacaaacacttgatgaataaaagaaggaaacctgaggaggatgaaaagaaactaaatatgaaaagacttcgaactgacaatgtttcagacttttctgagagcagtgactcagaaaattcaaataagagaataatagataattcctcagaacagaagccagagaatgaattgaaaaataaaaatacttcaaaaataaatggagaagaaggaaaaccccataataatgagaaggcaggagaagagaccctaaaaaatagccagcctccctgggatcaaatacaggaagataaaaaacatgaagaagcagagaagcggaagtctgttgacactcagcttcaagaagatatgattattcattcgtcagaacagtccacagtttctgatcataattctaatgatttacttcctcaggaatgcaatatggataaaacacataccatggaattgctaccaaaggagaagtttgtatccagaccacccacaccaaaatgtgttattgatattacaaatgacactaatttagaaaaggtggctcaggaaaactcaagtacctttggccttcagacacttcagaaaatggatcctaatgttagtgattcaaaacactctattgcaaatgcaaaattcttggaaacagcaaaaaaagattctgaccagagctgggtcagtgatgtagttaaagtggatctaacccaatcaagtgttacaaatgcttcttcaggaaatgatcacttgaacatggaaaaagagaagtatgtctcttacatttctcctttaagtgcagtttctgtcatggaagataagctgcataagcgaagtccacctccagagactataaaatctaaacttaatacttcagtagatactcacaagataaaatccagcccatcacctgaagttgttaaacccaaaataactcattctcctgattctgtaaagtctaaggccacttatgtgaacagccaagctactggtgaaagaagattggcaaataagatagaacatgagctatcaagatgcagttttcatccaattcctactcgaagcagtacattagaaactacaaagagtcctcttatcattgataaaaatgagcattttacagtttacagagatcctgcacttattgggtcagaaacaggagctaatcatatttcacctttcctaagccagcatccttttcctcttcactcctcatctcatagaacctgtttaaatccaggtacccatcatcctgccttaactcctgcaccccatttactagccggatcatctagtcaaactccattacctaccattaacactcatcctctgactagtggtccacaccatgctgttcatcaccctcatttacttcccactgtgttacctggagtgcctactgcctccttacttggtggccacccacgactagagagtgctcatgccagcagcttgagccacttagcgctagcacaccagcaacaacaacagttgttacagcaccagtcacctcatcttcttggacaagcccatccttctgcttcatataatcagcttggactttatccaattatttggcagtatccaaatggaacacatgcatactcaggacttggtttgccttcttctaagtgggttcacccagaaaatgcagttaatgctgaagcttcattaaggaggaattctcccagtccttggctacatcagcccacccctgtgacctcagcagatggtattggattacttagtcacattcctgtcagaccttccagtgcagagcctcatcggcctcttaaaattacagcccattccagtccaccattgacaaaaactttagtagatcatcataaggaagaattagaaagaaaagcttttatggaaccattacggtctgttgcatccacatcagccaaaaatgacctggatctaaataggtcacagactggaaaagattgtcacttacataggcattttgtggatccagtattaaatcagttacagaggccaccccaggagactggagagaggttaaacaaatacaaagaggaacaccgtcgaattcttcaagaaagtattgatgttgctccctttacaactaaaatcaagggacttgagggtgagagagagaattattccagagtggcatcatcatcttccagtcctaaaagccatatcatcaaacaagatatggatgtagaacgctcagtatcagatctttataaaatgaagcactcagtgcctcagagtttaccccaaagtaactatttcactacattgtctaatagtgtggtcaatgaaccaccaagatcatacccatccaaagaagtttcaaatatttacggtgataaacagagtaatgcccttgcagcggcagcagctaatcctcaaactctgacttcatttataacatctctttcaaagcctccacctttgattaaacaccaaccagaaagtgaaggtttagtaggcaagataccagaacatcttccacatcagattgcatctcactcagtaacaaccttcagaaatgattgtaggagtcctacccatttgacagtttcttctacaaatacactccgcagtatgcctgcattacatagagcaccagtatttcacccaccaatccatcacagcctggaaagaaaggaaggcagctatagtagtctttcccctccaactttaactccggtgatgccagtaaatgctggtggtaaagttcaagaatcacagaagcctccaactctaatacccgaaccaaaagactcccaggcaaattttaagagttcttcagaacagagtttgacggagatgtggagacctaataataacctcagcaaagagaaaactgaatggcatgtggagaaaagcagcggaaagttacaggctgctatggcatctgtcattgtgcgtccatcttctagtacaaaaactgatagtatgccagcaatgcagttagcttctaaagatcgtgttagtgaaagatcttcagctggggcacataaaacagattgcctcaaactagcagaagccggagaaactggaagaatcattttgccaaatgtgaattcagacagtgttcacacaaaatctgaaaaaaactttcaggctgtctcacagggcagtgttcccagttcagtcatgtctgctgtaaatacgatgtgtaataccaaaacggatgtaatcacatctgctgccgatactaccagtgtttccagctggggtggttcagaagtaatttcctctttatcaaataccattttggcctctacatcatcagaatgtgtatcttcaaaaagtgtcagtcagccagtggctcaaaaacaagaatgcaaggtcagcaccacagcaccagttacattagccagtagtaagacaggaagtgttgttcaacccagttctgggttctcaggcacaactgattttatccatttaaaaaagcacaaggcagcattggctgcagctcagtataaaagtagtaatgccagtgagactgaacctaatgctataaaaaatcagacactttcagcctcccttcctctggatagcactgtaatctgtagtacaattaacaaagcaaactctgtaggaaatgggcaagcttcccagacaagtcaaccaaactaccatactaaactgaaaaaggcctggctcaccagacactcagaagaagataaaaatactaataaaatggaaaattcagggaattctgtatcagaaattattaagccatgttctgtcaacttaatagcctctacatctagtgatatacaaaatagtgtagatagtaagatcatagttgataaatatgtaaaagatgataaagtcaacaggagaaaagccaaaagaacttatgaatctggctctgaaagtggagactcagatgaaagtgaaagcaagtcagagcaaaggactaaaagacaacctaagccaacttacaaaaagaagcaaaatgatttgcaaaagagaaaaggtgaaatagaagaagatttgaaacccaatggagttctcagcaggagtgccaaagaaagaagtaaactgaagttgcaaagcaacagtaatactggcattcctcgttcagtattgaaagattggcgtaaagtcaagaagctgaagcaaactggggaatcctttttacaggatgactcctgctgtgagatagggcctaatttacaaaagtgtcgagaatgtagacttattcgcagtaaaaaaggagaagaaccagctcactcaccagtattttgtagattttactactttagacggttgtcatttagtaaaaacggagtagttagaatagatggtttctcttctcctgaccaatatgatgatgaagctatgagtttgtggacacatgaaaattttgaagatgatgaactagatatagagacttctaaatatatcttggatataataggtgataagttctgtcaattagtaacatctgaaaaaacagctttgtcctgggtgaaaaaggatgccaaaattgcctggaaaagagcagtgagaggagtccgggagatgtgtgatgcatgtgaagcaacattgtttaacattcactgggtctgccaaaaatgtggatttgtggtctgcttagattgttacaaggcaaaggaaaggaagagttctagagataaagaactatatgcttggatgaagtgtgtgaagggacagcctcatgatcacaaacatttaatgccaacccaaattatacctggttctgttttgacagatcttctagatgccatgcacactcttagggaaaaatatggtattaaatcccattgtcattgtactaacaaacagaatttacaagttggaaattttcctacaatgaatggtgtatctcaagttttacagaatgttcttaatcacagtaataaaatttctctgtgcatgcctgagtctcagcagcaaaatactcctccgaagtctgagaaaaatggtggcagcagcccagagagtgatgtaggcacagataacaagttaactcctccagaatcccagtcaccactgcactggttagcagatcttgcagagcaaaaagccagagaggaaaaaaaagaaaacaaagaacttacccttgaaaaccaaattaaagaagaaagagaacaagacaactctgaatctccaaatggcagaacatcacctcttgtgtcccagaataatgaacaaggctcaaccttacgggatttgctgactacaacagctggaaagctacgtgtggggtctacagatgctggcattgcctttgccccagtatattcaatgggagccccaagtagcaaaagtggacggactatgcctaacattcttgatgacataattgcttcagttgttgaaaacaaaattccaccaagtaaaacctccaagataaatgtaaaaccagagcttaaagaagagcctgaagaaagcataatatctgcagtggatgaaaataataaattatacagtgatataccacattcttggatctgtgagaagcatattttatggcttaaggattataagaatagcagtaattggaagcttttcaaagaatgttggaaacaaggacagcctgcagtggtttctggtgtgcataagaaaatgaacattagcctatggaaggcggaatcaattagtcttgattttggagaccaccaagctgatctcctgaactgcaaagatagcatcatttcaaatgccaatgttaaggaattctgggatggttttgaagaagtttcaaaacggcagaaaaacaagagtggagaaacagttgttttaaaattgaaagactggccttcaggagaagacttcaagactatgatgccagcaagatacgaagatcttttaaaaagtctgccattgccagaatattgtaatccagaaggaaaattcaatttggcctctcatttgccaggattttttgtacgtcctgatctaggacccaggttgtgcagtgcctatggtgtagttgctgctaaagatcatgatataggaacaacaaatctccatattgaagtttctgatgttgtaaatatactagtttatgttggcatagcaaaaggaaatggcattctctcaaaagcaggaattctcaagaaatttgaggaagaagatttggatgacattttaaggaaaagattgaaggactcaagtgaaatacctggtgctctgtggcatatttatgctgggaaagatgttgacaagataagggaatttcttcaaaagatttcaaaagaacaaggccttgaagttctaccagaacatgatccaatacgtgaccaaagttggtatgtgaacaaaaagctccgtcaaaggctgcttgaagaatatggagtcagaacctgtactcttattcagttccttggtgatgctattgttttgccagcgggagcacttcatcaggttcagaattttcacagctgtattcaggtaactgaagattttgtgtctccagaacatcttgtagagtcatttcatttaacacaggaactgagacttttgaaggaagaaatcaattatgatgataaactacaggttaaaaatattttgtatcatgcagtcaaagaaatggtgagagccttgaagatacacgaggatgaagtagaggatatggaagaaaattaagtgtgatccagtttgatatttttaggttgttgaactgggattacttaaccttgaatgatgatatgtatgcacactgactttaagcttcataaaaccatcagtgccaagaaattctctttgtagtaattacttgttactgacaccacagcagtatagcatatgtcacagctcctgtgattcaatgttataaaacaagcagaattttaaaagcagcactatatagctgttttgtattatagtgtatatgatgtttgtgaaaatgccagatttaaaatgatgtatttatttttggtaaaaaataaaaaattctatgctatattgttgatcaagtgtaaatgtgaccttgtacagtttactaaaattactgatatttttcactacattgagacagttactgtgagaataggacacaaacaccagctattgcctgcatctgggaaattgctgaatcgcacagcagtcatgtcataatcagaaaattactgccaaataattgtaaaatttgtaaagtataaagtatataaagtagatactaaatacagacacttcaatattttgttgaagctattgactgtacaattaaacattttcaaaaggtgtaatttatttaaaattgtctcattttggtaaaatttatgtgaacttttaaagctaaatattaaacttaatatgctatgtaaatatatacatatatacatttaatgatgtatttttttaaaacattggcttgcttttgttaaagtgcaagtgttacatatggctttgtacattaaagttgaaaggggttttacattttccattaaaaggactttatcaaaaattga

SEQ ID NO: 225495 - DNA, 8149 bp, Artificial Sequence
  derived and/or modified sequence
cctgacccagatcggaggatgcagtagtgcttcagctgcaggatttcttagtcgttaacaccacagtgctgatgacaaagagcgagttgtaatcctcatcactgccagggctgagccagagcagacagaaaatcgtcatttgctcgttggagacttgttaggttacagctcctgcttcgttctgtggtcttggcttttcttcctatacaatgacgccgctgcaagtgagctcagaaatgcttggtttgagagccatttgcctgtgatttttgaagactaaagaagtatttacactagatactcttccagaacaaaatagaaatttcagcaaatacttactgacctttaaagccttgttgtggatttctgagatttaaagatactttaaaattctcaagaacaaaactttcaaacctctggttgaaagaaatatacccagttcagtcactgcagtagaattccttgtagataagcaactggattttttaactgaagatagtgcctttcagccctaccaggacgacatagacagcctaaacccagttctcagggacaacccgcagcttcatgaggaagtgaaagtctgggtaaaggaacaaaaggttcaggagatttttatgcaaggtccttattccttaaatggatacagagtgagagtatatagacaagactctgccacccagtggtttactggcataattactcatcatgatctcttcacccgcaccatgatcgttatgaatgatcaggtactagaaccacagaatgtcgatccttctatggttcaaatgacctttctagatgatgttgttcactctttgttaaaaggtgaaaatattggcattacatcacgacgcaggtctcgtgccaatcaaaacgtcaacgctgttcacagccattatacacgtgcccaagcaaatagtcccagaccagcaatgaactcccaagctgctgtaccaaaacagaatacacaccagcaacagcaacaaagaagtatccgtccaaataagaggaagggctcagatagcagtataccagatgaagagaagatgaaggaggaaaaatatgattatatatcacgaggagaaaatcctaaaggtaaaaacaaacacttgatgaataaaagaaggaaacctgaggaggatgaaaagaaactaaatatgaaaagacttcgaactgacaatgtttcagacttttctgagagcagtgactcagaaaattcaaataagagaataatagataattcctcagaacagaagccagagaatgaattgaaaaataaaaatacttcaaaaataaatggagaagaaggaaaaccccataataatgagaaggcaggagaagagaccctaaaaaatagccagcctccctgggatcaaatacaggaagataaaaaacatgaagaagcagagaagcggaagtctgttgacactcagcttcaagaagatatgattattcattcgtcagaacagtccacagtttctgatcataattctaatgatttacttcctcaggaatgcaatatggataaaacacataccatggaattgctaccaaaggagaagtttgtatccagaccacccacaccaaaatgtgttattgatattacaaatgacactaatttagaaaaggtggctcaggaaaactcaagtacctttggccttcagacacttcagaaaatggatcctaatgttagtgattcaaaacactctattgcaaatgcaaaattcttggaaacagcaaaaaaagattctgaccagagctgggtcagtgatgtagttaaagtggatctaacccaatcaagtgttacaaatgcttcttcaggaaatgatcacttgaacatggaaaaagagaagtatgtctcttacatttctcctttaagtgcagtttctgtcatggaagataagctgcataagcgaagtccacctccagagactataaaatctaaacttaatacttcagtagatactcacaagataaaatccagcccatcacctgaagttgttaaacccaaaataactcattctcctgattctgtaaagtctaaggccacttatgtgaacagccaagctactggtgaaagaagattggcaaataagatagaacatgagctatcaagatgcagttttcatccaattcctactcgaagcagtacattagaaactacaaagagtcctcttatcattgataaaaatgagcattttacagtttacagagatcctgcacttattgggtcagaaacaggagctaatcatatttcacctttcctaagccagcatccttttcctcttcactcctcatctcatagaacctgtttaaatccaggtacccatcatcctgccttaactcctgcaccccatttactagccggatcatctagtcaaactccattacctaccattaacactcatcctctgactagtggtccacaccatgctgttcatcaccctcatttacttcccactgtgttacctggagtgcctactgcctccttacttggtggccacccacgactagagagtgctcatgccagcagcttgagccacttagcgctagcacaccagcaacaacaacagttgttacagcaccagtcacctcatcttcttggacaagcccatccttctgcttcatataatcagcttggactttatccaattatttggcagtatccaaatggaacacatgcatactcaggacttggtttgccttcttctaagtgggttcacccagaaaatgcagttaatgctgaagcttcattaaggaggaattctcccagtccttggctacatcagcccacccctgtgacctcagcagatggtattggattacttagtcacattcctgtcagaccttccagtgcagagcctcatcggcctcttaaaattacagcccattccagtccaccattgacaaaaactttagtagatcatcataaggaagaattagaaagaaaagcttttatggaaccattacggtctgttgcatccacatcagccaaaaatgacctggatctaaataggtcacagactggaaaagattgtcacttacataggcattttgtggatccagtattaaatcagttacagaggccaccccaggagactggagagaggttaaacaaatacaaagaggaacaccgtcgaattcttcaagaaagtattgatgttgctccctttacaactaaaatcaagggacttgagggtgagagagagaattattccagagtggcatcatcatcttccagtcctaaaagccatatcatcaaacaagatatggatgtagaacgctcagtatcagatctttataaaatgaagcactcagtgcctcagagtttaccccaaagtaactatttcactacattgtctaatagtgtggtcaatgaaccaccaagatcatacccatccaaagaagtttcaaatatttacggtgataaacagagtaatgcccttgcagcggcagcagctaatcctcaaactctgacttcatttataacatctctttcaaagcctccacctttgattaaacaccaaccagaaagtgaaggtttagtaggcaagataccagaacatcttccacatcagattgcatctcactcagtaacaaccttcagaaatgattgtaggagtcctacccatttgacagtttcttctacaaatacactccgcagtatgcctgcattacatagagcaccagtatttcacccaccaatccatcacagcctggaaagaaaggaaggcagctatagtagtctttcccctccaactttaactccggtgatgccagtaaatgctggtggtaaagttcaagaatcacagaagcctccaactctaatacccgaaccaaaagactcccaggcaaattttaagagttcttcagaacagagtttgacggagatgtggagacctaataataacctcagcaaagagaaaactgaatggcatgtggagaaaagcagcggaaagttacaggctgctatggcatctgtcattgtgcgtccatcttctagtacaaaaactgatagtatgccagcaatgcagttagcttctaaagatcgtgttagtgaaagatcttcagctggggcacataaaacagattgcctcaaactagcagaagccggagaaactggaagaatcattttgccaaatgtgaattcagacagtgttcacacaaaatctgaaaaaaactttcaggctgtctcacagggcagtgttcccagttcagtcatgtctgctgtaaatacgatgtgtaataccaaaacggatgtaatcacatctgctgccgatactaccagtgtttccagctggggtggttcagaagtaatttcctctttatcaaataccattttggcctctacatcatcagaatgtgtatcttcaaaaagtgtcagtcagccagtggctcaaaaacaagaatgcaaggtcagcaccacagcaccagttacattagccagtagtaagacaggaagtgttgttcaacccagttctgggttctcaggcacaactgattttatccatttaaaaaagcacaaggcagcattggctgcagctcagtataaaagtagtaatgccagtgagactgaacctaatgctataaaaaatcagacactttcagcctcccttcctctggatagcactgtaatctgtagtacaattaacaaagcaaactctgtaggaaatgggcaagcttcccagacaagtcaaccaaactaccatactaaactgaaaaaggcctggctcaccagacactcagaagaagataaaaatactaataaaatggaaaattcagggaattctgtatcagaaattattaagccatgttctgtcaacttaatagcctctacatctagtgatatacaaaatagtgtagatagtaagatcatagttgataaatatgtaaaagatgataaagtcaacaggagaaaagccaaaagaacttatgaatctggctctgaaagtggagactcagatgaaagtgaaagcaagtcagagcaaaggactaaaagacaacctaagccaacttacaaaaagaagcaaaatgatttgcaaaagagaaaaggtgaaatagaagaagatttgaaacccaatggagttctcagcaggagtgccaaagaaagaagtaaactgaagttgcaaagcaacagtaatactggcattcctcgttcagtattgaaagattggcgtaaagtcaagaagctgaagcaaactggggaatcctttttacaggatgactcctgctgtgagatagggcctaatttacaaaagtgtcgagaatgtagacttattcgcagtaaaaaaggagaagaaccagctcactcaccagtattttgtagattttactactttagacggttgtcatttagtaaaaacggagtagttagaatagatggtttctcttctcctgaccaatatgatgatgaagctatgagtttgtggacacatgaaaattttgaagatgatgaactagatatagagacttctaaatatatcttggatataataggtgataagttctgtcaattagtaacatctgaaaaaacagctttgtcctgggtgaaaaaggatgccaaaattgcctggaaaagagcagtgagaggagtccgggagatgtgtgatgcatgtgaagcaacattgtttaacattcactgggtctgccaaaaatgtggatttgtggtctgcttagattgttacaaggcaaaggaaaggaagagttctagagataaagaactatatgcttggatgaagtgtgtgaagggacagcctcatgatcacaaacatttaatgccaacccaaattatacctggttctgttttgacagatcttctagatgccatgcacactcttagggaaaaatatggtattaaatcccattgtcattgtactaacaaacagaatttacaagttggaaattttcctacaatgaatggtgtatctcaagttttacagaatgttcttaatcacagtaataaaatttctctgtgcatgcctgagtctcagcagcaaaatactcctccgaagtctgagaaaaatggtggcagcagcccagagagtgatgtaggcacagataacaagttaactcctccagaatcccagtcaccactgcactggttagcagatcttgcagagcaaaaagccagagaggaaaaaaaagaaaacaaagaacttacccttgaaaaccaaattaaagaagaaagagaacaagacaactctgaatctccaaatggcagaacatcacctcttgtgtcccagaataatgaacaaggctcaaccttacgggatttgctgactacaacagctggaaagctacgtgtggggtctacagatgctggcattgcctttgccccagtatattcaatgggagccccaagtagcaaaagtggacggactatgcctaacattcttgatgacataattgcttcagttgttgaaaacaaaattccaccaagtaaaacctccaagataaatgtaaaaccagagcttaaagaagagcctgaagaaagcataatatctgcagtggatgaaaataataaattatacagtgatataccacattcttggatctgtgagaagcatattttatggcttaaggattataagaatagcagtaattggaagcttttcaaagaatgttggaaacaaggacagcctgcagtggtttctggtgtgcataagaaaatgaacattagcctatggaaggcggaatcaattagtcttgattttggagaccaccaagctgatctcctgaactgcaaagatagcatcatttcaaatgccaatgttaaggaattctgggatggttttgaagaagtttcaaaacggcagaaaaacaagagtggagaaacagttgttttaaaattgaaagactggccttcaggagaagacttcaagactatgatgccagcaagatacgaagatcttttaaaaagtctgccattgccagaatattgtaatccagaaggaaaattcaatttggcctctcatttgccaggattttttgtacgtcctgatctaggacccaggttgtgcagtgcctatggtgtagttgctgctaaagatcatgatataggaacaacaaatctccatattgaagtttctgatgttgtaaatatactagtttatgttggcatagcaaaaggaaatggcattctctcaaaagcaggaattctcaagaaatttgaggaagaagatttggatgacattttaaggaaaagattgaaggactcaagtgaaatacctggtgctctgtggcatatttatgctgggaaagatgttgacaagataagggaatttcttcaaaagatttcaaaagaacaaggccttgaagttctaccagaacatgatccaatacgtgaccaaagttggtatgtgaacaaaaagctccgtcaaaggctgcttgaagaatatggagtcagaacctgtactcttattcagttccttggtgatgctattgttttgccagcgggagcacttcatcaggttcagaattttcacagctgtattcaggtaactgaagattttgtgtctccagaacatcttgtagagtcatttcatttaacacaggaactgagacttttgaaggaagaaatcaattatgatgataaactacaggttaaaaatattttgtatcatgcagtcaaagaaatggtgagagccttgaagatacacgaggatgaagtagaggatatggaagaaaattaagtgtgatccagtttgatatttttaggttgttgaactgggattacttaaccttgaatgatgatatgtatgcacactgactttaagcttcataaaaccatcagtgccaagaaattctctttgtagtaattacttgttactgacaccacagcagtatagcatatgtcacagctcctgtgattcaatgttataaaacaagcagaattttaaaagcagcactatatagctgttttgtattatagtgtatatgatgtttgtgaaaatgccagatttaaaatgatgtatttatttttggtaaaaaataaaaaattctatgctatattgttgatcaagtgtaaatgtgaccttgtacagtttactaaaattactgatatttttcactacattgagacagttactgtgagaataggacacaaacaccagctattgcctgcatctgggaaattgctgaatcgcac

SEQ ID NO: 225496 - DNA, 7623 bp, Artificial Sequence
  derived and/or modified sequence
atggcggtggagacaagggccgaattggtgggaaaacgcttcctttgcgtcgccgtcggggatgaggcgaggtccgagagatgggaatccgggaggggctggaggagctggagagccggcgtcatcagggccgtgagccacagggatagtcggaatcccgatctggccgtctacgtggagttcgatgacctggagtgggacaagcgggagtgggtgaaagtgtatgaggatttctccacgttcctggtggagtatcacctgatttgggcaaagcgaaatgacccatcccaaacacaggggtctaaaagcaagcaaattcaatggcctgccttgactttcaagccgcttgttgagcgcaacattccgagctctgtaacggcagtggaatttctagtggacaagcagttggacttcctgactgaagattcagcgttccagccttaccaggatgatatcgacagtttgaaccccgtattgcgcgataatccacaactacatgaagaagtgaaagtgtgggtcaaagagcagaaagtccaagaaatcttcatgcaggggccctactccctgaacgggtacagagtcagggtgtatcgccaggacagcgccactcagtggtttaccggcataatcacgcaccacgatctgttcacgcgcaccatgattgtaatgaatgaccaggttctcgaaccacagaatgtggacccaagcatggtgcagatgactttcctggacgatgtagtccacagcttattgaaaggcgaaaatatcggcattacgtcccgtcggcgctcccgggcaaaccagaatgtcaacgcagtgcactcccactatacaagagcccaggccaactcacccaggcctgcaatgaactcccaggcagcagtgcctaagcagaacacgcaccagcaacagcagcagaggagtattcgccccaataaacgcaagggcagtgacagcagcattcctgacgaggagaagatgaaagaggagaagtacgattacatttctcggggtgagaatccaaaaggtaagaacaagcacctaatgaataagaggcggaagccagaagaagacgaaaaaaaactcaacatgaaaaggctgcgcaccgacaacgtgtccgacttttcggagtcttctgattctgaaaactctaataagcggatcattgataattcctcagagcagaagccggaaaatgagttgaaaaacaagaataccagtaaaattaacggtgaagagggtaagccccacaacaacgagaaagcaggcgaagaaactcttaagaattcccagcctccctgggaccaaattcaggaagacaagaagcatgaagaagctgagaaaagaaagagcgtcgacactcaacttcaagaagacatgattatacatagcagtgagcagagtacagtttcagaccacaatagcaacgacctgttaccccaggaatgcaacatggacaaaacccatacaatggagttgctcccaaaggaaaagttcgttagccggcctccgacaccaaaatgcgtgatcgacattactaacgacactaatctcgaaaaggtagcgcaagagaattcttccaccttcggcctccagacacttcagaagatggaccctaatgtttccgattcaaagcacagcattgctaacgctaaattcctggagacagccaagaaggactctgatcagtcctgggtctctgacgtggtcaaggtggatctcactcagtcatctgtcaccaacgcttcatcagggaatgaccatctgaatatggaaaaagaaaaatacgtttcttacatctctccactgtccgccgtgtctgtaatggaggataaactccacaaacggtcccccccacccgagaccattaagagcaagctgaataccagcgtggatactcataaaattaagtctagcccctccccggaggtggttaaaccaaagatcactcactccccagattccgttaaaagcaaagcgacttacgttaacagtcaagccaccggcgagcggcgactagccaacaaaattgagcatgagcttagccgatgtagttttcaccccatccccacccggagttccactctggagactaccaagagtcccttgataattgacaaaaatgagcattttacggtctaccgcgaccctgccctcataggctccgagactggagccaaccacatcagcccttttttaagccaacatccttttccgttgcactcatccagtcatcgcacatgcctgaatccaggtacccaccacccagccctgacacccgctccccatttactggctggcagttcctcacagacacccctacctacaataaatacccatccactgacatctggccctcatcatgccgtgcaccacccccacctgctacctacagtgctccccggggtaccgaccgcttcactccttggcggccatccacgtctagaatccgctcacgcttcgagtctgtctcacctggcattggcccatcagcagcaacaacagcttctgcaacatcaatcacctcatctgctcggacaagctcacccctccgcatcctataaccagctggggctctaccccattatctggcagtaccccaatgggacccacgcttactcggggctgggtcttccttcaagcaaatgggtacatccagagaacgctgttaatgctgaagcatccttgcgccggaactcccctagcccttggttacatcaacccacccctgtgacatcagctgacgggatcggcctactctcccacatccctgtgcgtccctcaagcgccgaaccccacaggcctcttaaaataaccgcccattcctcccccccactgacaaaaaccctagtggaccatcacaaggaagaactggagaggaaggccttcatggaacccctgcgctccgtggccagtacatcagctaagaacgatctcgatctgaataggagccagaccggcaaagattgccatctgcacagacattttgttgaccctgtgttgaatcaattgcaaagaccacctcaggaaactggggagcgactcaataagtataaggaagagcacagacgcattcttcaggagagcattgacgtcgcccctttcactacaaagattaagggcttagaaggggaacgcgagaactacagtagagtagcgtcatcgagttccagcccaaagtcgcacattattaaacaagacatggatgtcgaaaggtccgtaagcgacctgtacaagatgaagcattcagtaccacagagcctccctcagtcgaactatttcactaccttgagcaactccgttgtcaatgaaccccctcgctcatacccatctaaagaagtgagcaatatctatggtgataagcagtcaaatgcacttgccgctgctgccgctaatcctcaaactcttacttcatttatcacgagcctctcaaagccccctccccttattaagcaccagcccgagtcggaaggcttggtagggaagattcctgagcatttgcctcaccagatcgcctcccattccgtcaccacctttcgaaacgattgccggtcgcccacccatcttacagtcagttctacgaatactttgcggagcatgcctgctctgcaccgcgcacctgtatttcaccccccaattcaccattccctcgaaagaaaggaaggcagctattcctctctgagtccacctacgctaacccccgtgatgccggttaatgcggggggaaaggtccaggagagccagaaaccgcccaccctcattcctgagcctaaggactctcaggctaattttaagtcaagttctgagcagtctctgacggaaatgtggcgcccgaataataacctgtcgaaagagaaaaccgagtggcacgtggagaaatccagcggcaaacttcaggctgctatggccagcgtaatcgtgcgcccatcctcctctacaaaaactgacagtatgcctgcaatgcagctcgcctccaaagatcgggtgtctgaacgcagcagcgccggagcccataagactgattgtctgaaactcgctgaggccggagagaccggccggatcatattgcctaatgttaactctgatagtgtacacactaaatccgagaagaattttcaagccgtctctcagggtagcgtcccctcctccgtgatgtctgctgtcaataccatgtgtaataccaaaacagatgttatcacatccgctgctgatacaacctcagtgagtagctggggagggagcgaagtcattagctccctgtccaatacaatcttagcctccacaagcagcgagtgtgtgtcttccaaatccgtctcccaacccgtggctcagaagcaggagtgcaaggtatctaccacagcccctgtgactctagcatcttccaagacgggatcggtagtgcagccatcttcaggctttagtggtaccactgatttcatccatctgaaaaaacataaagcagctttagctgccgcgcagtataagagctcaaatgcatctgagacggagccaaatgcaattaagaaccagactttgagtgcaagcctcccactcgattctacagtgatatgctctacaatcaacaaggctaacagcgtagggaacggccaagctagccaaacgtcccagccaaattatcatacgaagctcaaaaaggcgtggttgacacggcactccgaagaggacaagaacactaacaagatggagaacagtggcaactccgtgagcgaaatcattaagccatgttctgtcaacctaattgcctccacttcctcggacattcagaactccgtagatagtaaaattattgtcgataaatacgtcaaagatgacaaagtgaatcgcagaaaggccaagagaacctacgagtcgggctccgagtccggggactctgatgagtctgagtctaaaagcgagcaacgcacaaagcgccaacccaagcccacctacaaaaaaaagcagaacgatcttcagaaaaggaagggggaaatcgaggaagacctcaagcccaatggagtgctttcacgctcggcgaaggagcggtctaaactgaagcttcaaagcaattccaacacaggaattcctcgttctgtgctgaaggattggaggaaggtgaagaagctgaagcaaaccggtgaaagttttctacaggacgactcatgctgtgaaatcggccctaatctgcagaaatgtagagagtgtagactgatccgcagcaaaaagggcgaggagcccgcacattcgcccgtgttctgcaggttctactatttccgccgattgagtttcagtaagaatggagtggtgcggatcgatggattctctagccccgaccagtacgatgatgaagctatgtcattgtggacacacgagaatttcgaggacgacgaactcgatattgagacatccaaatacatcctcgatattattggagataaattttgccaattagtgacttctgagaagacagccctgtcttgggtgaaaaaagacgctaagatagcctggaagagagcggtacgtggtgttcgtgaaatgtgcgacgcttgcgaggcaaccctttttaacatacactgggtgtgccaaaagtgcggcttcgtggtttgcttggactgctataaggcgaaagaacgtaaatcctccagagataaggaactttacgcctggatgaagtgtgtcaagggccagccacacgaccacaagcatctcatgccaactcagatcattcctggctccgtattgacagacctattggacgccatgcatactttacgcgagaaatatggcattaagagccactgccattgtacaaacaagcagaacctccaggtgggaaattttcccacaatgaacggcgtgtcacaggtgttgcagaatgtcctcaaccattcaaacaagatctccctgtgcatgcctgagagccagcagcagaatacacctcctaagagtgagaaaaacggcggtagctccccggagtccgacgtgggcaccgacaataagctgacgccacctgagagtcaaagtcccctacattggctggccgatctggctgagcagaaagcacgggaggaaaagaaggaaaataaagaacttactttagagaatcagataaaagaagagagggagcaggataacagtgagtctcctaacggccgtactagccccctggtttctcaaaacaacgagcagggctccactctgagggacctattaaccaccaccgccgggaagttgcgggtcgggtcaacggatgcggggattgcattcgcccctgtttattccatgggcgctccatctagcaaatccggaagaaccatgccgaacatcttagatgacataatcgctagcgtagtggaaaacaagattccccctagtaagacttctaagatcaacgtcaagccggagctgaaagaagagccagaagagtccatcatttcagcggtggacgagaacaataaattatactctgatatcccgcattcatggatctgcgaaaaacatatcctttggctgaaagattacaagaactcctctaattggaaactgtttaaagagtgttggaaacaaggacagcccgccgttgtttccggggttcacaagaagatgaacataagcttatggaaggctgagtctataagtctggacttcggggatcaccaggccgatctgttaaattgcaaggatagtattatttctaacgccaacgttaaggagttttgggacgggttcgaggaagtcagtaaacgacagaagaacaagagcggggaaactgtcgtgctcaagttgaaagactggccatctggagaagattttaagacgatgatgcccgcacgctacgaggacctgctcaaaagtctgcccctcccagagtactgtaacccagaagggaagtttaatctggcgtcccacctccccgggtttttcgtgcggccagacctaggtcccagactgtgttctgcctacggggtggttgctgccaaagaccatgacattgggactacgaacctgcatattgaagtgtctgatgttgtcaacattctagtctacgtggggatcgccaaggggaatgggatcctatctaaggccggaatacttaagaagtttgaggaagaggacttggatgatattctccgcaaaagactcaaggattcttcagaaattcccggggcgctgtggcatatttatgccggaaaggatgtggataaaatccgcgagtttttgcagaagatatcgaaagagcagggcctagaggtgctacctgaacatgatcccattagagaccagagctggtacgtaaacaagaagctgcgccagaggttactggaagagtacggggtgcggacctgcaccctaattcagttccttggcgatgccattgtccttcccgcaggggctctccatcaagttcaaaactttcactcttgcatacaggtgacagaagactttgtgagtcctgaacatctggtggagtccttccatttgacacaggagcttcgcctgctgaaggaagagataaactatgacgacaagctccaggttaagaatatcctttaccatgctgtgaaagagatggtcagggctttaaagatccatgaggatgaggtggaggatatggaggagaattag

SEQ ID NO: 225497 - DNA, 7623 bp, Artificial Sequence
  derived and/or modified sequence
atggctgtggagaccagggctgagctggtgggcaagcgcttcctgtgtgtggccgtgggagatgaggcccggtctgagcgctgggagagcggccggggctggaggtcctggagggctggggtcatccgggctgtgagccaccgggacagcagaaatccagacctggccgtgtatgtggagtttgatgacctggagtgggacaagcgggagtgggtgaaggtgtatgaggacttcagcaccttcctggtggagtaccacctgatctgggccaagagaaatgaccccagccagacccagggcagcaagagcaagcagatccagtggccagccctgaccttcaagcccctggtggagaggaacatccccagctctgtgacagctgtggagttcctggtggacaagcagctggacttcctgacagaagattctgccttccagccctaccaggatgacatcgacagcctgaaccctgtgctgcgggacaacccccagctgcacgaggaggtgaaggtgtgggtgaaggagcagaaggtgcaggagatcttcatgcagggcccctacagcctgaatggctacagagtgcgggtgtaccggcaggacagcgccacccagtggttcaccggcatcatcacccaccacgacctcttcaccaggaccatgattgtgatgaatgaccaggtgctggagccccagaatgtggaccccagcatggtgcagatgaccttcctggatgatgtggtgcacagcctgctgaagggggagaacatcggcatcaccagcagaagaagaagccgggccaaccagaatgtgaatgctgtgcacagccactacacccgggcccaggccaacagccccaggcctgccatgaacagccaggccgctgtgcccaagcagaacacccaccagcagcagcagcagaggagcatccggcccaacaagaggaaaggaagtgacagcagcatcccagatgaggagaagatgaaggaggagaagtatgactacatcagcagaggagagaaccccaagggcaagaacaagcacctgatgaacaagaggaggaagccagaagaagatgagaagaagctgaacatgaagaggctgaggacagacaacgtgtctgacttcagcgagagcagtgacagcgagaacagcaacaagaggatcatcgacaacagcagcgagcagaagccagaaaatgagctgaagaacaagaacaccagcaagatcaacggggaggagggcaagccccacaacaatgagaaggccggggaggagaccctgaagaacagccagcccccctgggaccagatccaggaggacaagaagcatgaggaggccgagaagaggaagtctgtggacacccagctgcaggaggacatgatcatccacagcagcgagcagagcacagtgtctgaccacaacagcaatgacctgctgccccaggagtgcaacatggacaagacccacaccatggagctgctgcccaaggagaagtttgtgtccaggcctcccacccccaagtgtgtgattgacatcaccaatgacaccaacctggagaaggtggcccaggagaacagcagcaccttcggcctgcagaccctgcagaagatggaccccaacgtgtctgacagcaagcacagcatcgccaatgccaagttcctggagacagccaagaaggacagcgaccagagctgggtgtctgatgtggtgaaggtggacctgacccagagctctgtgaccaatgccagcagtggaaatgaccacctgaacatggagaaggagaagtatgtgtcctacatcagccccctgtctgctgtgtctgtgatggaggacaagctgcacaagaggagccccccacctgagaccatcaagagcaagctgaacacctctgtggacacccacaagatcaagagcagccccagccctgaggtggtgaagcccaagatcacccacagcccagattctgtgaagagcaaggccacctacgtgaacagccaggccaccggggagcggcggctggccaacaagattgaacatgagctgagccgctgcagcttccaccccatccccaccaggagcagcaccctggagaccaccaagagccccctcatcatcgacaagaatgagcacttcaccgtgtacagagatcctgccctgattggcagcgagaccggggccaaccacatcagccccttcctgagccagcaccccttccccctgcacagcagcagccacaggacctgcctgaaccctggcacccaccacccagccctgaccccagccccccacctgctggccggcagcagcagccagacccccctgcccaccatcaacacccaccccctgaccagcggcccccaccacgctgtgcaccacccccacctgctgcccaccgtgctgcccggggtgcccacagccagcctgctgggcggccacccccggctggagagcgcccacgccagcagcctgagccacctggccctggcccaccagcagcagcagcagctgctgcagcaccagagcccccacctgctgggccaggcccaccccagcgccagctacaaccagctgggcctgtaccccatcatctggcagtaccccaacggcacccacgcctacagcggcctgggcctgcccagcagcaagtgggtgcacccagaaaatgctgtgaatgctgaggccagcctgcggaggaacagccccagcccctggctgcaccagcccacccctgtgaccagcgcagatggcatcggcctgctgagccacatccctgtgcggcccagcagcgctgagccccaccggcccctgaagatcacagcccacagcagcccccccctgaccaagaccctggtggaccaccacaaggaggagctggagaggaaggccttcatggagcccctgcggtctgtggccagcaccagcgccaagaatgacctggacctgaacagaagccagacaggcaaggactgccacctgcaccgccactttgtggaccctgtgctgaaccagctgcagaggcctccccaggagactggagagcggctgaacaagtacaaggaggagcaccggcgcatcctgcaggagagcattgatgtggcccccttcaccaccaagatcaagggcctggagggggagcgggagaactacagccgggtggccagcagcagcagcagccccaagagccacatcatcaagcaggacatggatgtggagaggtctgtgtctgacctgtacaagatgaagcacagcgtgccccagagcctgccccagagcaactacttcaccaccctgagcaacagcgtggtgaatgaaccacccaggagctaccccagcaaggaggtgagcaacatctacggggacaagcagagcaatgccctggccgctgctgctgccaacccccagaccctgaccagcttcatcaccagcctgagcaagcccccacccctcatcaagcaccagcctgagagcgagggcctggtgggcaagatccctgagcacctgccccaccagatcgccagccacagcgtgaccaccttcagaaatgactgccgcagccccacccacctgactgtgagcagcaccaacaccctgcgctccatgcctgccctgcaccgggcccctgtgttccacccccccatccaccacagcctggagaggaaggagggcagctacagcagcctgagcccccccaccctgacccctgtgatgcctgtgaatgctgggggcaaggtgcaggagagccagaagccacccaccctcatccctgagcccaaggacagccaggccaacttcaagagcagcagcgagcagagcctgacagagatgtggaggcccaacaacaacctgagcaaggagaagacagagtggcacgtggagaagagcagcggcaagctgcaggccgccatggccagcgtcatcgtgcggcccagcagcagcaccaagacagacagcatgcctgccatgcagctggccagcaaggacagagtgtctgagaggagcagcgctggggcccacaagacagactgcctgaagctggccgaggccggggagaccggccgcatcatcctgcccaacgtgaacagcgacagcgtgcacaccaagtctgagaagaacttccaggccgtgtcccagggctctgtgcccagctctgtgatgtctgctgtgaacaccatgtgcaacaccaagacagatgtgatcaccagcgctgctgacaccacctctgtgtcctcctggggcggcagcgaggtgatcagcagcctgagcaacaccatcctggccagcaccagcagtgaatgtgtgagcagcaagtctgtgtcccagcctgtggcccagaagcaggagtgcaaggtgtccaccacagcccctgtgaccctggccagcagcaagacaggctctgtggtgcagcccagcagcggcttcagcggcaccacagacttcatccacctgaagaagcacaaggccgccctggccgccgcccagtacaagagcagcaatgccagcgagacagagcccaatgccatcaagaaccagaccctgagcgccagcctgcccctggacagcaccgtcatctgcagcaccatcaacaaggccaacagcgtgggcaatggccaggccagccagaccagccagcccaactaccacaccaagctgaagaaggcctggctgaccaggcacagcgaggaggacaagaacaccaacaagatggagaacagcggcaacagcgtgtctgagatcatcaagccctgcagcgtgaacctgattgccagcaccagcagtgacatccagaacagcgtggacagcaagatcatcgtggacaagtatgtgaaggatgacaaggtgaacagaaggaaggccaagaggacctatgagagcggcagcgagagcggggacagtgatgagagcgagagcaagtctgagcagaggaccaagaggcagcccaagcccacctacaagaagaagcagaatgacctgcagaagaggaaaggagaaattgaggaggacctgaagcccaatggagtgctgagccgcagcgccaaggagaggagcaagctgaagctgcagagcaacagcaacacaggcatccccaggtctgtgctgaaggactggaggaaggtgaagaagctgaagcagacaggagagagcttcctgcaggatgacagctgctgtgagatcggccccaacctgcagaagtgcagagaatgtcgcctcatccgcagcaagaagggggaggagcccgcccacagccctgtgttctgccgcttctactacttccggcggctgtccttcagcaagaatggagtggtgagaattgatggcttcagcagcccagaccagtatgatgatgaggccatgagcctgtggacccatgagaactttgaagatgatgagctggacatcgagaccagcaagtacatcctggacatcattggagacaagttctgccagctggtgaccagcgagaagacagccctgtcctgggtgaagaaggatgccaagatcgcctggaagagagctgtgcggggcgtgcgggagatgtgtgatgcctgtgaggccaccctcttcaacatccactgggtgtgccagaagtgtggctttgtggtgtgcctggactgctacaaggccaaggagaggaagagcagccgggacaaggagctgtatgcctggatgaagtgtgtgaagggccagccccatgaccacaagcacctgatgcccacccagatcatccctggctctgtgctgacagacctgctggatgccatgcacaccctgcgggagaagtatggcatcaagagccactgccactgcaccaacaagcagaacctgcaggtgggcaacttccccaccatgaatggagtgtcccaggtgctgcagaatgtgctgaaccacagcaacaagatcagcctgtgcatgcctgagagccagcagcagaacaccccacccaagtctgagaagaatggaggcagcagccctgagagtgatgtgggcacagacaacaagctgaccccacctgagagccagagccccctgcactggctggccgacctggccgagcagaaggcccgggaggagaagaaggagaacaaggagctgaccctggagaaccagatcaaggaggagcgggagcaggacaacagcgagagccccaatggaagaaccagccccctggtgtcccagaacaatgagcagggcagcaccctgcgggacctgctgaccaccacagctgggaagctgcgggtgggcagcacagatgctggcatcgcctttgcccctgtgtacagcatgggcgcccccagcagcaagagcggccgcaccatgcccaacatcctggatgacatcatcgcctctgtggtggagaacaagatcccccccagcaagaccagcaagatcaacgtgaagccagagctgaaggaggagcctgaggagagcatcatctctgctgtggatgagaacaacaagctgtacagcgacatcccccacagctggatctgtgagaagcacatcctgtggctgaaggactacaagaacagcagcaactggaagctgttcaaggagtgctggaagcagggccagcctgctgtggtgtctggagtgcacaagaagatgaacatcagcctgtggaaggccgagagcatcagcctggactttggagaccaccaggccgacctgctgaactgcaaggacagcatcatcagcaatgccaacgtgaaggagttctgggatggctttgaggaggtgtccaagaggcagaagaacaagtctggagagaccgtggtgctgaagctgaaggactggcccagcggggaggacttcaagaccatgatgcctgcccgctatgaggacctgctgaagagcctgcccctgcctgagtactgcaaccctgagggcaagttcaacctggccagccacctgcccggcttctttgtgcggccagacctgggcccccggctgtgcagcgcctacggcgtggtggccgccaaggaccatgacatcggcaccaccaacctgcacatcgaggtgtctgatgtggtgaacatcctggtgtatgtgggcatcgccaagggaaatggcatcctgagcaaggccggcatcctgaagaagtttgaggaggaggacctggatgacatcctgaggaagaggctgaaggacagcagcgagatccctggggccctgtggcacatctatgccggcaaggatgtggacaagatccgggagttcctgcagaagatcagcaaggagcagggcctggaggtgctgcctgagcatgaccccatccgggaccagagctggtacgtgaacaagaagctgcggcagaggctgctggaggagtatggagtgaggacctgcaccctcatccagttcctgggagatgccatcgtgctgcctgctggggccctgcaccaggtgcagaacttccacagctgcatccaggtgacagaagattttgtgtccccagagcacctggtggagagcttccacctgacccaggagctgcggctgctgaaggaggagatcaactatgatgacaagctgcaggtgaagaacatcctgtaccacgctgtgaaggagatggtgcgggccctgaagatccatgaagatgaggtggaggacatggaggagaactag

SEQ ID NO: 225498 - DNA, 7623 bp, Artificial Sequence
  derived and/or modified sequence
atggccgtggagacccgggccgagctggtgggcaagcggttcctgtgtgtcgccgttggtgacgaggcgagaagtgaacggtgggaatcaggacgcggctggcgttcatggcgagcgggcgtaatcagagctgtgtcacatagagacagcagaaacccagatcttgcggtctatgtggaattcgacgatcttgaatgggataagagggagtgggtcaaggtgtacgaagacttttcgactttccttgttgagtatcatctcatttgggccaaaagaaacgatccatcccagactcagggatctaaatctaagcaaatccagtggccagctctgaccttcaagcctcttgtggaacgcaacatcccttcatcagtaaccgcggttgagtttttagttgacaagcagctcgacttccttacagaagactccgccttccaaccatatcaggacgacattgattcgctgaatcccgtcttgagagataatccccaactccacgaagaggtgaaagtttgggtcaaagagcagaaagtgcaggagattttcatgcagggtccatactccctgaacgggtaccgggtgcgagtgtatcgccaggatagtgcaacacagtggtttacaggaatcatcacccaccatgacctgtttacccgcactatgatcgttatgaacgaccaagtgttagagccccagaatgtggaccccagcatggtgcagatgacttttcttgatgatgtggttcactccctcttaaagggcgaaaacattgggatcacctctagacgacggagtcgagctaaccaaaacgtgaatgccgtgcactctcattacacacgtgctcaggccaacagtcccaggcccgcaatgaattctcaagccgccgttcccaagcagaacacccatcaacaacaacaacagcggagcatccggcctaacaagcgaaagggcagcgacagctccatcccagatgaggagaaaatgaaggaggaaaaatatgactacatctccagaggagaaaatcctaaaggaaagaataagcatctgatgaacaaaaggagaaagccagaggaggacgagaaaaaactgaacatgaagcggctgcgaactgacaacgtgtcagacttcagtgagagttccgattctgagaattccaataaacggatcattgataatagcagcgaacagaagccggagaatgaactcaagaataaaaacacatccaaaataaatggcgaagaagggaaaccacacaacaatgaaaaggccggagaggagacactaaagaacagtcaacccccttgggaccagattcaggaagataagaagcacgaggaagcggagaaaagaaaaagcgtggatacacagctgcaagaagatatgatcatccatagcagcgaacaatccactgtgagtgatcataactccaatgacctgctgccacaggaatgtaatatggataagacacacaccatggagctcctacctaaagagaagttcgtgagtaggcctcctacccctaagtgcgtgatcgacattaccaatgataccaacctggagaaggtggctcaagagaacagcagtacatttgggcttcagaccctgcagaaaatggatcctaatgtctccgatagcaagcacagcatagccaacgccaaatttctggaaacagcgaaaaaagatagtgaccagtcttgggtgagcgatgtcgttaaagtggacctgacacagtcatccgtgaccaacgctagctccgggaatgatcatctgaacatggaaaaggagaagtacgtatcctacatctctcccttgtcggcagtatcagtgatggaagacaaactccacaaacgttcacctcctccggaaactattaaatctaaactcaataccagcgtggacacccataagataaagagtagcccctctccagaggtggtgaagcccaagataacacattcacccgactcagtgaagtccaaagcgacatacgtgaacagccaggcaacaggcgagagacggctagcaaacaaaatagagcacgagcttagcagatgctccttccatcccatccctacgcgctcttcaacgctggagactacaaagagccctctaattatcgacaagaacgagcacttcaccgtctaccgcgaccccgctctgatcggttccgaaacgggcgctaatcatattagcccattccttagtcagcatcctttccccctgcactcctcatcacaccgaacctgtctgaatcccgggacacaccatcccgcattgacccccgcaccacatctccttgctggatccagtagccagaccccgctgcccactatcaatacgcatccactcactagcggacctcaccatgctgtgcaccacccccacctgctcccaacggtgctgcccggcgtccctacagcatcactgctgggtggccaccccaggctggagtctgcgcacgcgtcaagcctctcacatctagctcttgctcatcagcagcaacagcagctcttgcagcaccagtcaccacatctgttaggtcaagcccacccgagtgcatcttacaatcagttaggactctatccgatcatctggcagtaccctaacggcacgcacgcatatagcggtttagggttgccttcttccaagtgggttcatcctgaaaacgcagtcaacgccgaggcatcactgagaagaaattccccatcgccctggctgcaccaaccgacccccgtcaccagcgctgacggtatcggattgctcagtcatattccagtgcgaccaagtagcgccgagcctcaccgacctctgaagattacagcacattcaagcccacccttgacgaagaccttggtggaccaccacaaggaggaattagagcgcaaggcgtttatggagcccctgcgttccgtggcttccacaagtgcaaagaacgacctcgatctaaatagaagccaaacaggcaaagactgtcatctgcaccgccatttcgtggacccggttctgaatcagcttcagaggccacctcaggagaccggtgagcggttgaataagtacaaggaggagcacaggcgaatccttcaagaaagcatagatgtggccccatttacaacaaagattaaaggattggagggcgagcgggagaattactctcgagtggcatccagttccagcagtcccaagagccacatcattaaacaggacatggatgtcgaaagatcagtatcagacctgtacaagatgaagcactccgttccccagtcactgcctcagagtaactactttactactctgagcaactccgtggtcaatgaacctccaaggagctacccgtccaaagaagtcagcaatatatatggtgataaacagtccaacgcgctggctgcagccgcagcaaaccctcagacactcacaagtttcataacttcattgtccaagccccctccattgatcaagcatcagcccgaatctgaaggattggtcggaaagattcccgaacacctgccacaccagattgcatcgcactctgttaccacattccgtaacgactgtcgtagtccaacacacctgacggtgagctctactaacacattacggagtatgcctgcactgcacagagcccctgtgtttcacccccccattcaccattcactggagagaaaggagggatcatactctagcctgtccccccctacgctgaccccagttatgcccgtgaacgcaggaggcaaggtgcaggaatctcagaagcctccaacgctgatcccagagcctaaagattcacaagccaatttcaagagctctagcgaacagagcctgaccgagatgtggcggccaaataataatctgtcaaaagagaagaccgaatggcacgtggagaaatcatccggcaagttgcaggcggctatggctagcgtgatagttcgcccaagttctagcaccaagactgattccatgcccgcgatgcagcttgcttccaaggaccgcgtgtccgaacggagttccgccggtgcccacaaaactgattgcctgaagctggcagaggcaggcgaaaccggacgtatcatcctgccaaatgtaaattcagactcggtgcacacaaagagtgaaaaaaatttccaagcagtgagccagggcagcgtgcccagctcagtgatgtctgctgtgaacactatgtgtaacaccaagactgatgtgattacctctgccgctgacacaacaagcgtgtcatcatggggcggctcggaagttatcagcagtctgtccaacaccatcctggctagcacaagcagcgagtgtgtgtcatcaaaaagcgtcagccagcccgtggcccaaaagcaggagtgtaaggtgtcgacgactgctccagtcaccctcgccagttctaaaactggttccgtggtgcagcctagctccggattcagtggaacaaccgacttcatccatttgaagaagcacaaggcagcactcgcagccgcacaatataaatcctctaacgcttctgaaaccgagcctaacgccatcaaaaatcagactctgagtgcgagcctgcccctggactccaccgtgatatgtagcacaattaacaaggcaaattcggtgggcaacggccaggctagccagacttctcagcctaactatcataccaaactgaaaaaagcttggctgacacgacattccgaggaggacaaaaataccaacaagatggaaaactcaggcaactcagtcagcgaaattatcaagccttgttccgtcaatctgattgctagtacttcctctgatatacagaactccgtcgactccaaaatcatcgtcgacaagtatgttaaggacgacaaagttaaccggcgcaaggccaagcgtacatatgaatccggtagtgaatcaggcgattcagatgagtcagagtctaaaagcgaacagcgcaccaagagacagcccaagccaacttacaaaaagaaacaaaatgacctacagaagaggaaaggagagatagaggaagacctgaaaccaaatggtgtcctctccaggagcgccaaagaaaggtcaaagttaaaactccagtccaactcaaacaccggtatcccaaggtcagtactgaaagactggaggaaagtcaagaaactgaaacaaacgggtgaaagcttccttcaggacgatagctgttgtgaaatcgggcctaacttacagaaatgcagagaatgcagactcattcgctccaaaaagggcgaagagcctgcacattctcctgtgttctgccgtttttactattttcgccgcttaagcttttccaagaacggcgtggtcagaatcgacgggttctcgtctcctgaccaatacgatgatgaggctatgtcgctgtggacccacgagaactttgaggacgacgaattggacatcgagactagcaaatacatcctggatatcattggcgacaagttttgtcaactagtgacatccgagaaaactgccctgagctgggtaaaaaaagatgcgaagattgcctggaagcgcgcagtgaggggcgttagagagatgtgcgacgcatgcgaagcaaccctgttcaatattcactgggtttgccagaagtgtggattcgtagtgtgtcttgattgctacaaagcaaaagagaggaaaagctccagagataaggaactgtacgcttggatgaaatgcgtgaagggtcaacctcacgaccacaaacacctgatgccgacacaaattatccctgggagcgtcctaactgacctgctggatgccatgcatactctgagagagaaatatgggatcaaatctcactgtcattgtactaacaagcaaaacctgcaagtcgggaactttcccaccatgaacggggtttcacaagttctccagaatgtactaaaccatagcaataaaatctccctgtgcatgccagaaagccaacaacagaacacccctccgaagtctgagaaaaatggaggctcctcaccggagtccgatgtcggtaccgacaacaagcttactccacctgaatcacaatcccccctgcactggcttgcagaccttgctgagcaaaaggcccgagaagagaagaaggagaacaaagagctcacgctggagaatcagatcaaagaggaacgagaacaagataactctgagtctccaaacgggagaacttcacctttggtgtcacagaacaacgaacagggatcaaccttaagagacctactaaccactaccgctggcaaactgcgagtaggcagcacagatgccggcattgcctttgcacccgtgtatagtatgggagccccttcctctaagtcagggcggacaatgccaaacatcctagacgatataattgcttctgttgtggagaacaagatccccccctccaagacctcaaagattaatgtgaagcctgagctcaaggaggagcccgaagagagtattatcagcgcagttgatgaaaacaacaagctgtattccgacattccccacagttggatctgcgagaagcacatactctggctgaaagactacaaaaactcctccaactggaagctgtttaaggaatgttggaagcagggacagcctgccgtcgtgagcggcgtgcacaaaaaaatgaacatctctctgtggaaggccgagtccatatcgctggacttcggcgatcaccaggccgacctgctgaattgcaaggatagcattatttctaatgccaatgtaaaagagttttgggatgggttcgaggaggtgagtaagcgtcagaaaaacaaatcaggtgaaactgtcgtgctcaagctgaaggattggccgtcgggggaggacttcaagaccatgatgccggcacgctacgaagatttgctgaaatctctgcctctacctgagtactgcaatcccgaaggaaaattcaatctggcaagtcacctgccgggcttcttcgtgagacctgacctcggacccaggctctgttctgcttatggggttgtggcagcaaaggatcacgacattggaactactaacctccacatcgaggtgtcagacgtggtgaatatcctggtatacgtcggaattgctaagggcaatggaatcctctcaaaggccgggattcttaagaagtttgaagaagaggatctcgatgacattttgaggaagcgcttaaaggactcctctgaaattcctggtgccctgtggcacatttacgccgggaaggacgttgataaaattcgggagttcctgcagaagatcagcaaggagcaagggctggaagtcttgccagagcacgaccccataagagaccagtcctggtacgtgaacaaaaagctccggcagagactcctggaggagtacggggtccgcacatgtacgctaattcagttcctcggagacgctatagtgttgcctgcaggtgcgttgcaccaggtgcagaactttcacagttgcatacaggtgacagaagacttcgttagccccgagcacctagtcgagagtttccatttgactcaggagttgcgactgctgaaggaagagattaactatgacgacaagttgcaggtgaagaacatactgtatcatgctgtcaaagagatggtgagggctcttaaaatacatgaagacgaggtggaagacatggaagagaattag

SEQ ID NO: 225499 - DNA, 7622 bp, Artificial Sequence
  derived and/or modified sequence
atggcggtcgagacaagggcagaattggtcgggaaacgctttctgtgtgtcgctgtgggtgacgaagcccgatcagagcgctgggagagcggcagagggtggaggtcatggcgagcgggagtgatacgtgccgtgagtcacagggactccaggaacccagacttagcagtgtatgtggagtttgatgacttagaatgggataagcgcgagtgggtcaaggtctatgaggatttttcgactttcctcgtcgagtaccacctgatctgggcaaagagaaatgacccctcccaaacacaaggatccaagagtaagcagatccagtggccagccctcacattcaaaccattagttgaaagaaacatcccaagttccgtcaccgccgtggaattcctggttgataagcaattggattttctgaccgaggactctgcttttcaaccgtaccaggacgatattgactcgcttaatcccgttctgcgagacaaccctcagctgcatgaagaagtgaaagtgtgggttaaggaacagaaagtgcaagagatatttatgcagggcccttattccctgaatggctaccgagtgcgggtctacagacaggattctgccacccagtggttcacaggtatcattacacatcacgatctcttcacgcggaccatgattgtgatgaatgaccaggtactggagccccagaatgttgaccctagcatggtccagatgacatttctagacgatgtcgttcattcgttgttgaagggagagaatattgggattacttccagaaggcgcagcagagctaatcagaacgttaatgccgtgcactctcattatacaagagcacaggcaaactcccctcgccctgcgatgaactcccaggcagcagtgcccaaacagaacactcatcagcaacagcagcagcggtctataagaccaaacaagcgaaaagggagcgattcctccattcctgacgaagagaagatgaaggaggagaaatacgactacatctcaagaggggagaatccaaagggcaagaataagcatctgatgaacaaacggagaaagcctgaggaggacgagaagaagctcaacatgaagcgcctccggaccgataatgtgagtgacttttcagagtcttcagattctgaaaatagcaacaaaaggataatcgacaattcctcagagcagaagcccgagaacgagctgaaaaacaagaacactagcaaaattaatggggaggaggggaagccacacaataacgagaaggctggagaggaaactttaaagaacagccaaccaccctgggaccagatacaggaagacaaaaagcatgaggaggccgagaaacgtaagagcgtggacacccaactccaagaggatatgatcatacactcctcagagcagtcaaccgtgtctgaccacaacagtaatgacttgttaccccaggagtgcaatatggacaaaacacatactatggagctgcttccaaaggagaagttcgtttcgagaccccctactccaaagtgcgtgattgacatcactaatgacaccaacctggagaaggtggcacaggaaaacagttctacattcggactacaaacgttacaaaaaatggatcctaatgtgagcgactccaagcactccatcgccaatgcgaagtttttggagactgcgaagaaagactccgaccagtcttgggtgtctgacgtcgttaaggtagatctaacccagtcatccgtgacaaacgcctccagcgggaacgaccatcttaatatggagaaggaaaaatatgttagctatatttcccccctgagtgcagtttccgtcatggaagataaactccacaagaggtcaccaccaccagaaacaattaaatccaagctgaacactagcgtcgatacacacaagataaaatcgtcaccgtcccccgaagtggtaaagcccaagatcacccacagccctgatagtgtgaaaagtaaggctacatatgtaaattcacaggccaccggtgaacgtcggctggcaaataaaattgaacatgagctaagcaggtgtagctttcacccaattcccactaggtccagcactctggaaaccaccaaatctccactgatcatcgacaagaacgaacactttacagtatatcgcgatccagccctgataggctctgagaccggagctaatcacatcagcccgttcctgagtcaacaccctttccctctgcacagcagtagccatcgcacctgccttaatccaggtacccaccacccggctttgacccctgctccgcaccttctagcgggatcaagttcccaaactcccctcccaaccataaatacccaccccctaacctcaggccctcaccacgctgtgcatcatccacacctactgcctaccgttctgcctggcgtgccaacagcatctcttttaggaggacacccacgcttggaatcagcccatgcaagttcgttatcacacctggccctagctcaccagcagcagcagcagctgctacagcaccaatccccgcacctgctaggtcaggctcaccctagcgcgagctataatcaactcggactatacccaatcatctggcaatatccaaatggcacgcacgcatacagtgggcttggccttcctagcagtaaatgggtgcaccccgaaaacgcggtcaatgctgaagcttctctgagacgcaattcaccgtccccttggttgcaccagcctaccccagtcacctccgccgatggcattggattactctcccatatccccgtgcgcccttcgagtgcagagccgcaccgcccactgaagattaccgcccacagctcccccccactgactaaaaccctagtcgatcatcacaaggaggagctggaacggaaagcctttatggaaccgctacggtctgtagcttcaacaagcgcaaagaacgatctcgatcttaaccggtcccaaacgggcaaagactgtcatctccatcgacatttcgtcgacccggtgcttaaccaactgcagaggccccctcaggagacaggtgaaaggctgaacaaatataaggaggagcatcggagaattctgcaggagtctattgacgtggctccctttacaacaaaaattaaaggtctcgaaggggaacgcgagaactacagtcgagttgctagctcctcttcctcacccaagagtcatataatcaagcaggacatggatgtggaaaggtccgtctctgatctctacaaaatgaagcacagcgtgccacagagtctgccccagagtaactattttaccactctgagcaattccgtggtaaatgaacccccacggtcctatccgagcaaggaagtgagtaatatttacggggataaacaatcgaatgctctcgccgcagccgctgccaatccgcaaaccctgactagcttcatcacaagtctgagcaagcctccgcctttgataaaacaccagcctgaaagcgagggtctcgtggggaagatcccagaacacctgccacaccagatcgccagccacagcgtgactaccttccgcaatgattgtagatctcctactcatctgaccgtgagctcaacaaacaccctacgcagtatgccagctcttcaccgagcaccagtatttcatccacctattcaccatagcctggagaggaaggagggaagttatagcagtctttctccaccaacactcacccctgtcatgcctgtcaacgcaggcggaaaagtgcaggaaagccagaaaccacccaccctgatacctgagcctaaggattctcaggctaactttaagagcagttccgaacagtctctgacagagatgtggcgcccaaacaacaacctctctaaggaaaagaccgaatggcacgtggagaaatctagtgggaaactgcaggcggctatggcttctgtgatcgtgcggccttccagttcaacaaaaacagattccatgccagccatgcagctggcgagcaaggaccgtgtcagcgaaagaagctcagccggtgcacataagaccgactgtctgaagctcgcggaggcaggtgagacagggagaatcatcctgcctaacgtgaattcagactctgtgcacactaagagcgaaaaaaacttccaggcggtgtcccaggggtccgtccctagttctgtgatgtctgccgtcaacacgatgtgcaataccaaaacagatgttatcacttctgcagccgacacaacaagtgtttcctcttggggcggatctgaagtgatatcctcactgagtaacacaatcctcgcctcgacctcctcggagtgcgtgagttctaagagcgtgtcccagcccgttgcccagaaacaagagtgcaaggtctcaaccacagctccagtgaccttggcatcatctaaaacaggcagtgtagtgcaaccctcgtctggcttttctggaacgaccgacttcattcatctgaaaaagcacaaggccgctctggctgccgctcagtacaaatcatcaaatgcatcagagaccgagccgaacgccattaaaaaccagactttgtcagcttctctgcctctggacagcactgtgatttgtagtacaataaataaggcaaatagtgttggtaacggacaggcttcccaaacatcacagcctaattaccatacaaaattaaagaaggcttggctcactcggcatagcgaagaagacaagaatactaacaagatggaaaatagcgggaattcggtctcggaaataataaaaccttgttcagtcaatctaatcgcgtcaacttcctccgatatccagaacagcgtagacagcaagattattgtggataaatatgtgaaagatgacaaggtcaacaggagaaaagccaaacgcacctatgagtctggaagtgagtccggggacagtgatgagagcgaaagtaagtctgagcagcgcacaaagaggcagcccaaaccaacctataagaagaaacagaatgacttgcagaagcggaaaggtgagatagaggaagatctgaaaccaaacggggtcttgtcacggtctgcaaaagaaaggagtaagctcaaattgcagtccaattccaacaccggaatccccaggtctgttcttaaagactggcggaaagtcaagaagctaaagcaaaccggtgaaagtttcctccaagatgattcctgctgtgaaatagggccaaacctccagaaatgcagagagtgcaggcttattcgaagcaagaagggtgaggagcccgctcactcccccgtcttctgtagattttattacttcagaaggctctcttttagtaagaatggtgtcgtgagaatcgatggcttttcgagtccagaccagtatgacgacgaggctatgtctctgtggacccatgagaattttgaagatgacgaactcgatatagaaacatcaaaatatatactggacatcattggtgataagttctgtcagctggtcactagcgagaagacagcactgtcctgggtcaagaaagatgcaaagatagcctggaagcgggcagtgaggggggtgcgcgaaatgtgcgatgcctgtgaggccacgctgtttaatattcactgggtgtgccagaaatgtggattcgtggtttgcctggattgctacaaggcgaaggagcgcaaaagctcacgtgataaagaactgtacgcttggatgaaatgtgtgaaaggtcaaccccacgaccacaagcacctgatgccaacccagatcatccctgggagtgtcctcactgatctgctggacgctatgcacacactgcgcgagaagtatggcatcaagtcccattgccactgcacaaataagcaaaatcttcaggtgggcaacttcccgactatgaatggagtgagccaggtgcttcaaaacgtattgaaccattcaaacaagatctcgctgtgcatgcccgagtctcagcagcagaacactccccctaagagcgagaagaacggaggaagttcccctgagtccgacgttggcactgataacaaacttacgcctcctgaaagtcagtctcccctccactggctcgccgacctagccgaacagaaagcacgagaagagaagaaggaaaacaaagagctgaccctcgagaaccagatcaaggaggagcgtgaacaagataatagcgagagtccaaacggacgcacatcccctctcgtaagccagaataatgaacagggaagtacactgcgggacctgctaaccacgactgccggaaaacttagggtgggctccacagacgccggaattgccttcgcacccgtctatagcatgggggctccctcttccaaatcaggaaggactatgccaaacattcttgacgacatcatagcttcagtggtggaaaataagatacccccttctaaaacctctaagattaatgtgaaacccgagctcaaggaagagcctgaggaaagcatcataagcgctgtcgacgaaaacaataagctatactcagacatccctcatagttggatctgtgagaagcacatcctgtggttgaaagattataagaatagcagtaactggaagctattcaaagagtgctggaagcaaggtcagcctgccgttgtctccggcgtccacaagaaaatgaacatcagtctatggaaagccgagtccataagtttagacttcggagatcaccaggcagatctccttaactgcaaagactccattatttcaaacgcgaacgtgaaagaattttgggacggtttcgaggaagtgtcaaagagacagaagaacaagagtggcgagacagtggtgctaaagctaaaggactggccaagcggggaagactttaagacaatgatgcctgctcgctatgaggacctgttaaaatctctgcccctccccgaatattgcaatccagaggggaagttcaacctcgccagtcatctgccgggtttcttcgtgagaccagatttaggccctcggctgtgcagcgcatatggagtggtggccgcaaaggatcacgacatcggcaccactaacctgcacatagaggtaagcgacgttgttaacatattagtgtacgtggggatcgccaagggaaacggaatactaagcaaagctggtatcttaaagaagtttgaagaggaagacctcgacgacattctgagaaaaaggctgaaggacagtagcgagattcctggcgctctgtggcatatctacgccggaaaagacgtggacaaaattagagaattcctgcagaagatttcaaaggagcagggcctggaagtcctacccgaacacgatcccatacgagaccaatcatggtatgttaacaaaaaacttcgtcagcggctgctggaggagtacggcgttaggacgtgtaccctcatccagttcctaggcgatgctattgtgctgccagccggagctttgcaccaggttcagaatttccactcgtgtatacaggttaccgaggatttcgttagcccggagcacctcgtggaaagcttccatctaacccaagagctgcgtctgctgaaggaggagatcaactatgacgataagcttcaggtaaagaacatcctctaccacgcagtcaaggagatggtcagagctctcaaaattcacgaggacgaagtcgaggatatggaggagaatta

SEQ ID NO: 225500 - DNA, 7623 bp, Artificial Sequence
  derived and/or modified sequence
atggccgtggagaccagagccgagctggtgggcaagagattcctgtgcgtggccgtgggcgacgaggccagaagcgagagatgggagagcggcagaggctggagaagctggagagccggcgtgatcagagccgtgagccacagagacagcagaaaccccgacctggccgtgtacgtggagttcgacgacctggagtgggacaagagagagtgggtgaaggtgtacgaggacttcagcaccttcctggtggagtaccacctgatctgggccaagagaaacgaccccagccagacccagggcagcaagagcaagcagatccagtggcccgccctgaccttcaagcccctggtggagagaaacatccccagcagcgtgaccgccgtggagttcctggtggacaagcagctggacttcctgaccgaggacagcgccttccagccctaccaggacgacatcgacagcctgaaccccgtgctgagagacaacccccagctgcacgaggaggtgaaggtgtgggtgaaggagcagaaggtgcaggagatcttcatgcagggcccctacagcctgaacggctacagagtgagagtgtacagacaggacagcgccacccagtggttcaccggcatcatcacccaccacgacctgttcaccagaaccatgatcgtgatgaacgaccaggtgctggagccccagaacgtggaccccagcatggtgcagatgaccttcctggacgacgtggtgcacagcctgctgaagggcgagaacatcggcatcaccagcagaagaagaagcagagccaaccagaacgtgaacgccgtgcacagccactacaccagagcccaggccaacagccccagacccgccatgaacagccaggccgccgtgcccaagcagaacacccaccagcagcagcagcagagaagcatcagacccaacaagagaaagggcagcgacagcagcatccccgacgaggagaagatgaaggaggagaagtacgactacatcagcagaggcgagaaccccaagggcaagaacaagcacctgatgaacaagagaagaaagcccgaggaggacgagaagaagctgaacatgaagagactgagaaccgacaacgtgagcgacttcagcgagagcagcgacagcgagaacagcaacaagagaatcatcgacaacagcagcgagcagaagcccgagaacgagctgaagaacaagaacaccagcaagatcaacggcgaggagggcaagccccacaacaacgagaaggccggcgaggagaccctgaagaacagccagcccccctgggaccagatccaggaggacaagaagcacgaggaggccgagaagagaaagagcgtggacacccagctgcaggaggacatgatcatccacagcagcgagcagagcaccgtgagcgaccacaacagcaacgacctgctgccccaggagtgcaacatggacaagacccacaccatggagctgctgcccaaggagaagttcgtgagcagaccccccacccccaagtgcgtgatcgacatcaccaacgacaccaacctggagaaggtggcccaggagaacagcagcaccttcggcctgcagaccctgcagaagatggaccccaacgtgagcgacagcaagcacagcatcgccaacgccaagttcctggagaccgccaagaaggacagcgaccagagctgggtgagcgacgtggtgaaggtggacctgacccagagcagcgtgaccaacgccagcagcggcaacgaccacctgaacatggagaaggagaagtacgtgagctacatcagccccctgagcgccgtgagcgtgatggaggacaagctgcacaagagaagccccccccccgagaccatcaagagcaagctgaacaccagcgtggacacccacaagatcaagagcagccccagccccgaggtggtgaagcccaagatcacccacagccccgacagcgtgaagagcaaggccacctacgtgaacagccaggccaccggcgagagaagactggccaacaagatcgagcacgagctgagcagatgcagcttccaccccatccccaccagaagcagcaccctggagaccaccaagagccccctgatcatcgacaagaacgagcacttcaccgtgtacagagaccccgccctgatcggcagcgagaccggcgccaaccacatcagccccttcctgagccagcaccccttccccctgcacagcagcagccacagaacctgcctgaaccccggcacccaccaccccgccctgacccccgccccccacctgctggccggcagcagcagccagacccccctgcccaccatcaacacccaccccctgaccagcggcccccaccacgccgtgcaccacccccacctgctgcccaccgtgctgcccggcgtgcccaccgccagcctgctgggcggccaccccagactggagagcgcccacgccagcagcctgagccacctggccctggcccaccagcagcagcagcagctgctgcagcaccagagcccccacctgctgggccaggcccaccccagcgccagctacaaccagctgggcctgtaccccatcatctggcagtaccccaacggcacccacgcctacagcggcctgggcctgcccagcagcaagtgggtgcaccccgagaacgccgtgaacgccgaggccagcctgagaagaaacagccccagcccctggctgcaccagcccacccccgtgaccagcgccgacggcatcggcctgctgagccacatccccgtgagacccagcagcgccgagccccacagacccctgaagatcaccgcccacagcagcccccccctgaccaagaccctggtggaccaccacaaggaggagctggagagaaaggccttcatggagcccctgagaagcgtggccagcaccagcgccaagaacgacctggacctgaacagaagccagaccggcaaggactgccacctgcacagacacttcgtggaccccgtgctgaaccagctgcagagacccccccaggagaccggcgagagactgaacaagtacaaggaggagcacagaagaatcctgcaggagagcatcgacgtggcccccttcaccaccaagatcaagggcctggagggcgagagagagaactacagcagagtggccagcagcagcagcagccccaagagccacatcatcaagcaggacatggacgtggagagaagcgtgagcgacctgtacaagatgaagcacagcgtgccccagagcctgccccagagcaactacttcaccaccctgagcaacagcgtggtgaacgagccccccagaagctaccccagcaaggaggtgagcaacatctacggcgacaagcagagcaacgccctggccgccgccgccgccaacccccagaccctgaccagcttcatcaccagcctgagcaagcccccccccctgatcaagcaccagcccgagagcgagggcctggtgggcaagatccccgagcacctgccccaccagatcgccagccacagcgtgaccaccttcagaaacgactgcagaagccccacccacctgaccgtgagcagcaccaacaccctgagaagcatgcccgccctgcacagagcccccgtgttccacccccccatccaccacagcctggagagaaaggagggcagctacagcagcctgagcccccccaccctgacccccgtgatgcccgtgaacgccggcggcaaggtgcaggagagccagaagccccccaccctgatccccgagcccaaggacagccaggccaacttcaagagcagcagcgagcagagcctgaccgagatgtggagacccaacaacaacctgagcaaggagaagaccgagtggcacgtggagaagagcagcggcaagctgcaggccgccatggccagcgtgatcgtgagacccagcagcagcaccaagaccgacagcatgcccgccatgcagctggccagcaaggacagagtgagcgagagaagcagcgccggcgcccacaagaccgactgcctgaagctggccgaggccggcgagaccggcagaatcatcctgcccaacgtgaacagcgacagcgtgcacaccaagagcgagaagaacttccaggccgtgagccagggcagcgtgcccagcagcgtgatgagcgccgtgaacaccatgtgcaacaccaagaccgacgtgatcaccagcgccgccgacaccaccagcgtgagcagctggggcggcagcgaggtgatcagcagcctgagcaacaccatcctggccagcaccagcagcgagtgcgtgagcagcaagagcgtgagccagcccgtggcccagaagcaggagtgcaaggtgagcaccaccgcccccgtgaccctggccagcagcaagaccggcagcgtggtgcagcccagcagcggcttcagcggcaccaccgacttcatccacctgaagaagcacaaggccgccctggccgccgcccagtacaagagcagcaacgccagcgagaccgagcccaacgccatcaagaaccagaccctgagcgccagcctgcccctggacagcaccgtgatctgcagcaccatcaacaaggccaacagcgtgggcaacggccaggccagccagaccagccagcccaactaccacaccaagctgaagaaggcctggctgaccagacacagcgaggaggacaagaacaccaacaagatggagaacagcggcaacagcgtgagcgagatcatcaagccctgcagcgtgaacctgatcgccagcaccagcagcgacatccagaacagcgtggacagcaagatcatcgtggacaagtacgtgaaggacgacaaggtgaacagaagaaaggccaagagaacctacgagagcggcagcgagagcggcgacagcgacgagagcgagagcaagagcgagcagagaaccaagagacagcccaagcccacctacaagaagaagcagaacgacctgcagaagagaaagggcgagatcgaggaggacctgaagcccaacggcgtgctgagcagaagcgccaaggagagaagcaagctgaagctgcagagcaacagcaacaccggcatccccagaagcgtgctgaaggactggagaaaggtgaagaagctgaagcagaccggcgagagcttcctgcaggacgacagctgctgcgagatcggccccaacctgcagaagtgcagagagtgcagactgatcagaagcaagaagggcgaggagcccgcccacagccccgtgttctgcagattctactacttcagaagactgagcttcagcaagaacggcgtggtgagaatcgacggcttcagcagccccgaccagtacgacgacgaggccatgagcctgtggacccacgagaacttcgaggacgacgagctggacatcgagaccagcaagtacatcctggacatcatcggcgacaagttctgccagctggtgaccagcgagaagaccgccctgagctgggtgaagaaggacgccaagatcgcctggaagagagccgtgagaggcgtgagagagatgtgcgacgcctgcgaggccaccctgttcaacatccactgggtgtgccagaagtgcggcttcgtggtgtgcctggactgctacaaggccaaggagagaaagagcagcagagacaaggagctgtacgcctggatgaagtgcgtgaagggccagccccacgaccacaagcacctgatgcccacccagatcatccccggcagcgtgctgaccgacctgctggacgccatgcacaccctgagagagaagtacggcatcaagagccactgccactgcaccaacaagcagaacctgcaggtgggcaacttccccaccatgaacggcgtgagccaggtgctgcagaacgtgctgaaccacagcaacaagatcagcctgtgcatgcccgagagccagcagcagaacaccccccccaagagcgagaagaacggcggcagcagccccgagagcgacgtgggcaccgacaacaagctgaccccccccgagagccagagccccctgcactggctggccgacctggccgagcagaaggccagagaggagaagaaggagaacaaggagctgaccctggagaaccagatcaaggaggagagagagcaggacaacagcgagagccccaacggcagaaccagccccctggtgagccagaacaacgagcagggcagcaccctgagagacctgctgaccaccaccgccggcaagctgagagtgggcagcaccgacgccggcatcgccttcgcccccgtgtacagcatgggcgcccccagcagcaagagcggcagaaccatgcccaacatcctggacgacatcatcgccagcgtggtggagaacaagatcccccccagcaagaccagcaagatcaacgtgaagcccgagctgaaggaggagcccgaggagagcatcatcagcgccgtggacgagaacaacaagctgtacagcgacatcccccacagctggatctgcgagaagcacatcctgtggctgaaggactacaagaacagcagcaactggaagctgttcaaggagtgctggaagcagggccagcccgccgtggtgagcggcgtgcacaagaagatgaacatcagcctgtggaaggccgagagcatcagcctggacttcggcgaccaccaggccgacctgctgaactgcaaggacagcatcatcagcaacgccaacgtgaaggagttctgggacggcttcgaggaggtgagcaagagacagaagaacaagagcggcgagaccgtggtgctgaagctgaaggactggcccagcggcgaggacttcaagaccatgatgcccgccagatacgaggacctgctgaagagcctgcccctgcccgagtactgcaaccccgagggcaagttcaacctggccagccacctgcccggcttcttcgtgagacccgacctgggccccagactgtgcagcgcctacggcgtggtggccgccaaggaccacgacatcggcaccaccaacctgcacatcgaggtgagcgacgtggtgaacatcctggtgtacgtgggcatcgccaagggcaacggcatcctgagcaaggccggcatcctgaagaagttcgaggaggaggacctggacgacatcctgagaaagagactgaaggacagcagcgagatccccggcgccctgtggcacatctacgccggcaaggacgtggacaagatcagagagttcctgcagaagatcagcaaggagcagggcctggaggtgctgcccgagcacgaccccatcagagaccagagctggtacgtgaacaagaagctgagacagagactgctggaggagtacggcgtgagaacctgcaccctgatccagttcctgggcgacgccatcgtgctgcccgccggcgccctgcaccaggtgcagaacttccacagctgcatccaggtgaccgaggacttcgtgagccccgagcacctggtggagagcttccacctgacccaggagctgagactgctgaaggaggagatcaactacgacgacaagctgcaggtgaagaacatcctgtaccacgccgtgaaggagatggtgagagccctgaagatccacgaggacgaggtggaggacatggaggagaactag

SEQ ID NO: 225501 - protein, 1121 aa, Artificial Sequence
  derived and/or modified sequence
MGAGGRRMRGAPARLLLPLLPWLLLLLAPEARGAPGCPLSIRSCKCSGERPKGLSGGVPGPARRRVVCSGGDLPEPPEPGLLPNGTVTLLLSNNKITGLRNGSFLGLSLLEKLDLRNNIISTVQPGAFLGLGELKRLDLSNNRIGCLTSETFQGLPRLLRLNISGNIFSSLQPGVFDELPALKVVDLGTEFLTCDCHLRWLLPWAQNRSLQLSEHTLCAYPSALHAQALGSLQEAQLCCEGALELHTHHLIPSLRQVVFQGDRLPFQCSASYLGNDTRIRWYHNRAPVEGDEQAGILLAESLIHDCTFITSELTLSHIGVWASGEWECTVSMAQGNASKKVEIVVLETSASYCPAERVANNRGDFRWPRTLAGITAYQSCLQYPFTSVPLGGGAPGTRASRRCDRAGRWEPGDYSHCLYTNDITRVLYTFVLMPINASNALTLAHQLRVYTAEAASFSDMMDVVYVAQMIQKFLGYVDQIKELVEVMVDMASNLMLVDEHLLWLAQREDKACSRIVGALERIGGAALSPHAQHISVELSAFPREVGGAGAGLHPVVYPCTALLLLCLFATIITYILNHSSIRVSRKGWHMLLNLCFHIAMTSAVFAGGITLTNYQMVCQAVGITLHYSSLSTLLWMGVKARVLHKELTWRAPPPQEGDPALPTPSPMLRFYLIAGGIPLIICGITAAVNIHNYRDHSPYCWLVWRPSLGAFYIPVALILLITWIYFLCAGLRLRGPLAQNPKAGNSRASLEAGEELRGSTRLRGSGPLLSDSGSLLATGSARVGTPGPPEDGDSLYSPGVQLGALVTTHFLYLAMWACGALAVSQRWLPRVVCSCLYGVAASALGLFVFTHHCARRRDVRASWRACCPPASPAAPHAPPRALPAAAEDGSPVFGEGPPSLKSSPSGSSGHPLALGPCKLTNLQLAQSQVCEAGAAAGGEGEPEPAGTRGNLAHRHPNNVHHGRRAHKSRAKGHRAGEACGKNRLKALRGGAAGALELLSSESGSLHNSPTDSYLGSSRNSPGAGLQLEGEPMLTPSEGSDTSAAPLSEAGRAGQRRSASRDSLKGGGALEKESHRRSYPLNAASLNGAPKGGKYDDVTLMGAEVASGGCMKTGLWKSETTV

SEQ ID NO: 225502 - protein, 1338 aa, Artificial Sequence
  derived and/or modified sequence
MGAGGRRMRGAPARLLLPLLPWLLLLLAPEARGAPGCPLSIRSCKCSGERPKGLSGGVPGPARRRVVCSGGDLPEPPEPGLLPNGTVTLLLSNNKITGLRNGSFLGLSLLEKLDLRNNIISTVQPGAFLGLGELKRLDLSNNRIGCLTSETFQGLPRLLRLNISGNIFSSLQPGVFDELPALKVVDLGTEFLTCDCHLRWLLPWAQNRSLQLSEHTLCAYPSALHAQALGSLQEAQLCCEGALELHTHHLIPSLRQVVFQGDRLPFQCSASYLGNDTRIRWYHNRAPVEGDEQAGILLAESLIHDCTFITSELTLSHIGVWASGEWECTVSMAQGNASKKVEIVVLETSASYCPAERVANNRGDFRWPRTLAGITAYQSCLQYPFTSVPLGGGAPGTRASRRCDRAGRWEPGDYSHCLYTNDITRVLYTFVLMPINASNALTLAHQLRVYTAEAASFSDMMDVVYVAQMIQKFLGYVDQIKELVEVMVDMASNLMLVDEHLLWLAQREDKACSRIVGALERIGGAALSPHAQHISVNARNVALEAYLIKPHSYVGLTCTAFQRREGGVPGTRPGSPGQNPPPEPEPPADQQLRFRCTTGRPNVSLSSFHIKNSVALASIQLPPSLFSSLPAALAPPVPPDCTLQLLVFRNGRLFHSHSNTSRPGAAGPGKRRGVATPVIFAGTSGCGVGNLTEPVAVSLRHWAEGAEPVAAWWSQEGPGEAGGWTSEGCQLRSSQPNVSALHCQHLGNVAVLMELSAFPREVGGAGAGLHPVVYPCTALLLLCLFATIITYILNHSSIRVSRKGWHMLLNLCFHIAMTSAVFAGGITLTNYQMVCQAVGITLHYSSLSTLLWMGVKARVLHKELTWRAPPPQEGDPALPTPSPMLRFYLIAGGIPLIICGITAAVNIHNYRDHSPYCWLVWRPSLGAFYIPVALILLITWIYFLCAGLRLRGPLAQNPKAGNSRASLEAGEELRGSTRLRGSGPLLSDSGSLLATGSARVGTPGPPEDGDSLYSPGVQLGALVTTHFLYLAMWACGALAVSQRWLPRVVCSCLYGVAASALGLFVFTHHCARRRDVRASWRACCPPASPAAPHAPPRALPAAAEDGSPVFGEGPPSLKSSPSGSSGHPLALGPCKLTNLQLAQSQVCEAGAAAGGEGEPEPAGTRGNLAHRHPNNVHHGRRAHKSRAKGHRAGEACGKNRLKALRGGAAGALELLSSESGSLHNSPTDSYLGSSRNSPGAGLQLEGEPMLTPSEGSDTSAAPLSEAGRAGQRRSASRDSLKGGGALEKESHRRSYPLNAASLNGAPKGGKYDDVTLMGAEVASGGCMKTGLWKSETTV

SEQ ID NO: 225503 - protein, 1256 aa, Artificial Sequence
  derived and/or modified sequence
MRGAPARLLLPLLPWLLLLLAPEARGAPGCPLSIRSCKCSGERPKGLSGGVPGPARRRVVCSGGDLPEPPEPGLLPNGTVTLLLSNNKITGLRNGSFLGLSLLEKLDLRNNIISTVQPGAFLGLGELKRLDLSNNRIGCLTSETFQGLPRLLRLNISGNIFSSLQPGVFDELPALKVVDLGTEFLTCDCHLRWLLPWAQNRSLQLSEHTLCAYPSALHAQALGSLQEAQLCCEGALELHTHHLIPSLRQVVFQGDRLPFQCSASYLGNDTRIRWYHNRAPVEGDEQAGILLAESLIHDCTFITSELTLSHIGVWASGEWECTVSMAQGNASKKVEIVVLETSASYCPAERVANNRGDFRWPRTLAGITAYQSCLQYPFTSVPLGGGAPGTRASRRCDRAGRWEPGDYSHCLYTNDITRVLYTFVLMPINASNALTLAHQLRVYTAEAASFSDMMDVVYVAQMIQKFLGYVDQIKELVEVMVDMASNLMLVDEHLLWLAQREDKACSRIVGALERIGGAALSPHAQHISVNARNVALEAYLIKPHSYVGLTCTAFQRREGGVPGTRPGSPGQNPPPEPEPPADQQLRFRCTTGRPNVSLSSFHIKNSVALASIQLPPSLFSSLPAALAPPVPPDCTLQLLVFRNGRLFHSHSNTSRPGAAGPGKRRGVATPVIFAGTSGCGVGNLTEPVAVSLRHWAEGAEPVAAWWSQEGPGEAGGWTSEGCQLRSSQPNVSALHCQHLGNVAVLMELSAFPREVGGAGAGLHPVVYPCTALLLLCLFATIITYILNHSSIRVSRKGWHMLLNLCFHIAMTSAVFAGGITLTNYQMVCQAVGITLHYSSLSTLLWMGVKARVLHKELTWRAPPPQEGDPALPTPSPMLRFYLIAGGIPLIICGITAAVNIHNYRDHSPYCWLVWRPSLGAFYIPVALILLITWIYFLCAGLRLRGPLAQNPKAGNSRASLEAGEELRGSTRLRGSGPLLSDSGSLLATGSARVGTPGPPEDGDSLYSPGVQRGAGDHALPVLGHVGLRGSGSVPALAAPGGVQLLVRGGSLRPGPLRLHSPLCQAEGRESLVARLLPPCLSRGPPCPAPGPARRRRGRFPGVRGGPPLPQVLPKRQQRPSAGSGPLQAHQPAAGPESGVRGGGGGRRGRRAGAGGHPGKPRPPPPQQRAPRASGAQEPGQGTPRGGGLRQEPAQGPARGRGGGAGAAVQRERQSAQQPHRQLPGQQPQQPGRRPAAGRRAHAHAVRGQRHQRRAAF

SEQ ID NO: 225504 - DNA, 5651 bp, Artificial Sequence
  derived and/or modified sequence
gggcgatgggttgatgggcgccgggggacgcaggatgcggggggcgcccgcgcgcctgctgctgccgctgctgccgtggctcctgctgctcctggcgcccgaggctcggggcgcgcccggctgcccgctatccatccgcagctgcaagtgctcgggggagcggcccaaggggctgagcggcggcgtccctggcccggctcggcggagggtggtgtgcagcggcggggacctcccggagcctcccgagcccggccttctgcctaacggcaccgttaccctgctcttgagcaataacaagatcacggggctccgcaatggctccttcctgggactgtcactgctggagaagctggacctgaggaacaacatcatcagcacagtgcagccgggcgccttcctgggcctgggggagctgaagcgtttagatctctccaacaaccggattggctgtctcacctccgagaccttccagggcctccccaggcttctccgactaaacatatctggaaacatcttctccagtctgcaacctggggtctttgatgagctgccagcccttaaggttgtggacttgggcaccgagttcctgacctgtgactgccacctgcgctggctgctgccctgggcccagaatcgctccctgcagctgtcggaacacacgctctgtgcttaccccagtgccctgcatgctcaggccctgggcagcctccaggaggcccagctctgctgcgagggggccctggagctgcacacacaccacctcatcccgtccctacgccaagtggtgttccagggggatcggctgcccttccagtgctctgccagctacctgggcaacgacacccgcatccgctggtaccacaaccgagcccctgtggagggtgatgagcaggcgggcatcctcctggccgagagcctcatccacgactgcaccttcatcaccagtgagctgacgctgtctcacatcggcgtgtgggcctcaggcgagtgggagtgcaccgtgtccatggcccaaggcaacgccagcaagaaggtggagatcgtggtgctggagacctctgcctcctactgccccgccgagcgtgttgccaacaaccgcggggacttcaggtggccccgaactctggctggcatcacagcctaccagtcctgcctgcagtatcccttcacctcagtgcccctgggcgggggtgccccgggcacccgagcctcccgccggtgtgaccgtgccggccgctgggagccaggggactactcccactgtctctacaccaacgacatcaccagggtgctgtacaccttcgtgctgatgcccatcaatgcctccaatgcgctgaccctggctcaccagctgcgcgtgtacacagccgaggccgctagcttttcagacatgatggatgtagtctatgtggctcagatgatccagaaatttttgggttatgtcgaccagatcaaagagctggtagaggtgatggtggacatggccagcaacctgatgctggtggacgagcacctgctgtggctggcccagcgcgaggacaaggcctgcagccgcatcgtgggtgccctggagcgcattgggggggccgccctcagcccccatgcccagcacatctcagtgaatgcgaggaacgtggcattggaggcctacctcatcaagccgcacagctacgtgggcctgacctgcacagccttccagaggagggagggaggggtgccgggcacacggccaggaagccctggccagaaccccccacctgagcccgagcccccagctgaccagcagctccgcttccgctgcaccaccgggaggcccaatgtttctctgtcgtccttccacatcaagaacagcgtggccctggcctccatccagctgcccccgagtctattctcatcccttccggctgccctggctcccccggtgcccccagactgcaccctgcaactgctcgtcttccgaaatggccgcctcttccacagccacagcaacacctcccgccctggagctgctgggcctggcaagaggcgtggcgtggccacccccgtcatcttcgcaggaaccagtggctgtggcgtgggaaacctgacagagccagtggccgtttcgctgcggcactgggctgagggagccgaacctgtggccgcttggtggagccaggaggggcccggggaggctgggggctggacctcggagggctgccagctccgctccagccagcccaatgtcagcgccctgcactgccagcacttgggcaatgtggccgtgctcatggagctgagcgcctttcccagggaggtggggggcgccggggcagggctgcaccccgtggtatacccctgcacggccttgctgctgctctgcctcttcgccaccatcatcacctacatcctcaaccacagctccatccgtgtgtcccggaaaggctggcacatgctgctgaacttgtgcttccacatagccatgacctctgctgtctttgcggggggcatcacactcaccaactaccagatggtctgccaggcggtgggcatcaccctgcactactcctccctatccacgctgctctggatgggcgtgaaggcgcgagtgctccataaggagctcacctggagggcaccccctccgcaagaaggggaccccgctctgcctactcccagtcctatgctccggttctatttgatcgctggagggattccactcattatctgtggcatcacagctgcagtcaacatccacaactaccgggaccacagcccctactgctggctggtgtggcgtccaagccttggcgccttctacatccctgtggctttgattctgctcatcacctggatctatttcctgtgcgccgggctacgcttacggggtcctctggcacagaaccccaaggcgggcaacagcagggcctccctggaggcaggggaggagctgaggggttccaccaggctcaggggcagcggccccctcctgagtgactcaggttcccttcttgctactgggagcgcgcgagtggggacgcccgggcccccggaggatggtgacagcctctattctccgggagtccagctaggggcgctggtgaccacgcacttcctgtacttggccatgtgggcctgcggggctctggcagtgtcccagcgctggctgccccgggtggtgtgcagctgcttgtacggggtggcagcctccgccctgggcctcttcgtcttcactcaccactgtgccaggcggagggacgtgagagcctcgtggcgcgcctgctgcccccctgcctctcccgcggccccccatgccccgccccgggccctgcccgccgccgcagaggacggttccccggtgttcggggagggccccccctccctcaagtcctccccaagcggcagcagcggccatccgctggctctgggcccctgcaagctcaccaacctgcagctggcccagagtcaggtgtgcgaggcgggggcggcggccggcggggaaggagagccggagccggcgggcacccggggaaacctcgcccaccgccaccccaacaacgtgcaccacgggcgtcgggcgcacaagagccgggccaagggacaccgcgcgggggaggcctgcggcaagaaccggctcaaggccctgcgcgggggcgcggcgggggcgctggagctgctgtccagcgagagcggcagtctgcacaacagccccaccgacagctacctgggcagcagccgcaacagcccgggcgccggcctgcagctggaaggcgagcccatgctcacgccgtccgagggcagcgacaccagcgccgcgccgctttctgaggcgggccgggcaggccagcgccgcagcgccagccgcgacagtctcaagggcggcggcgcgctggagaaggagagccatcgccgctcgtacccgctcaacgccgccagcctaaacggcgcccccaaggggggcaagtacgacgacgtcaccctgatgggcgcggaggtagccagcggcggctgcatgaagaccggactctggaagagcgaaactaccgtctaaggtggggcgggcgacgcggtagacgggctggccacgcggctcgttcccccgctcctcggggccctccaaggtgtctccgtagtcagcaggttggaggcagaggagccgatggctggaggaagcccacaggcggatgttccccacttgcctagagggcatccctctggggtagcgacagacaatcccagaaacacgcataatacatttccgtccagcccggggcagtctgactgtcggtgccctcccaggaacggggaaggcctccgtctgtgtgaaagggcacagcacatcccaggtgcaccctccccaagtactcccaccccgcctactgtccatgcggcctcactgggggccatcagcctcaccagcaaagcagagatgagagcgtgggaactgtgttctttcctccctgccctctactgatttcagcccagcccctgcctagatcctaggtcccttttcctcccgagtttggctggcacgagagctagcccagcacatgaagcaggtgatgttaagtcacaaggtgctgcttttcagatccactatgcaagaggggagggtggggccacgtgaaaggcagctctagacatcaaccagtcctgggggaggggagtgggaaccgggcacaactaggaacaatgccaccattcccacaggagtggtacttaaaccagacagcagggttcagaggtggcacaccgggacaaagctgaggccctgcacctcaacagctgactgccaggtgcctgtgggtgaactgaggggagtagagggagagggcaggtggaactggggcagaatctagtcatgccctaaagctagtcctgtaaacaatggtgccccagaaagctgcaggtggtgtttggagaagcagttacttttcagttacaagacccatctccctagtctcagccttacaacaccacgggactaaggaagagcacttccttgcctccgtaaggccagaggaagaaccatcccaatcatttgatctccagctccacagtagagagaaacctacaaaatgtcaaaccagcttcccgactcccaggagctcaagccaagcccagaggcagtggctggggtccctgcaggtcatgaggggcctatgcctttactccttttaaacaccagcacccgtcttttccccaacctaaaaccaaccaccagcatttcactacaggaccaaatggaaaccgagggaaccctgggtcttgggaagaacaacaggaaaccaaggtctgacctagggttccctcccagtcttcacatcactctggcctcatcaccaaggtgacagaggacacaggggagggggaaaacccacacacactccttggaatgggtcctgttatttatgcttgctgcacagacatattagaagaaaaaaaaaagctttgtattattcttccacatatgctggctgctgtttacacaccctgccaatgccttagcactggagagctttttgcaatatgctggggaaaggggagggagggaatgaaagtgccaaagaaaacatgtttttaagaactcgggttttatacaatagaatgttttctagcagatgcctcttgttttaatatattaaaattttgcaaagccctttgagctactg

SEQ ID NO: 225505 - DNA, 6022 bp, Artificial Sequence
  derived and/or modified sequence
atccatggcacggagcggcggcggcggcggcagcaggagcccggcgcgatccgctaggtcccagcccagcgcccagcgagcaggcgacgcggaggggccgggcctccagtgtcccgagggccgggcgctgagactccggccgcgcagctgggagctgcccgcgctgcgctgacagccgcgccgacgtcctccccgccggggcgctcgcaggacatgcccccggggcgcggcggcggggaccccggggctcgcctccgcccagggcccccctccacgccctcgggagccccgggcccccgctgagcactcctcccgcacgcctgggtccctccggccggcgcgcagcccggccccagcgctgtgggtccccgcggggcgatgggttgatgggcgccgggggacgcaggatgcggggggcgcccgcgcgcctgctgctgccgctgctgccgtggctcctgctgctcctggcgcccgaggctcggggcgcgcccggctgcccgctatccatccgcagctgcaagtgctcgggggagcggcccaaggggctgagcggcggcgtccctggcccggctcggcggagggtggtgtgcagcggcggggacctcccggagcctcccgagcccggccttctgcctaacggcaccgttaccctgctcttgagcaataacaagatcacggggctccgcaatggctccttcctgggactgtcactgctggagaagctggacctgaggaacaacatcatcagcacagtgcagccgggcgccttcctgggcctgggggagctgaagcgtttagatctctccaacaaccggattggctgtctcacctccgagaccttccagggcctccccaggcttctccgactaaacatatctggaaacatcttctccagtctgcaacctggggtctttgatgagctgccagcccttaaggttgtggacttgggcaccgagttcctgacctgtgactgccacctgcgctggctgctgccctgggcccagaatcgctccctgcagctgtcggaacacacgctctgtgcttaccccagtgccctgcatgctcaggccctgggcagcctccaggaggcccagctctgctgcgagggggccctggagctgcacacacaccacctcatcccgtccctacgccaagtggtgttccagggggatcggctgcccttccagtgctctgccagctacctgggcaacgacacccgcatccgctggtaccacaaccgagcccctgtggagggtgatgagcaggcgggcatcctcctggccgagagcctcatccacgactgcaccttcatcaccagtgagctgacgctgtctcacatcggcgtgtgggcctcaggcgagtgggagtgcaccgtgtccatggcccaaggcaacgccagcaagaaggtggagatcgtggtgctggagacctctgcctcctactgccccgccgagcgtgttgccaacaaccgcggggacttcaggtggccccgaactctggctggcatcacagcctaccagtcctgcctgcagtatcccttcacctcagtgcccctgggcgggggtgccccgggcacccgagcctcccgccggtgtgaccgtgccggccgctgggagccaggggactactcccactgtctctacaccaacgacatcaccagggtgctgtacaccttcgtgctgatgcccatcaatgcctccaatgcgctgaccctggctcaccagctgcgcgtgtacacagccgaggccgctagcttttcagacatgatggatgtagtctatgtggctcagatgatccagaaatttttgggttatgtcgaccagatcaaagagctggtagaggtgatggtggacatggccagcaacctgatgctggtggacgagcacctgctgtggctggcccagcgcgaggacaaggcctgcagccgcatcgtgggtgccctggagcgcattgggggggccgccctcagcccccatgcccagcacatctcagtgaatgcgaggaacgtggcattggaggcctacctcatcaagccgcacagctacgtgggcctgacctgcacagccttccagaggagggagggaggggtgccgggcacacggccaggaagccctggccagaaccccccacctgagcccgagcccccagctgaccagcagctccgcttccgctgcaccaccgggaggcccaatgtttctctgtcgtccttccacatcaagaacagcgtggccctggcctccatccagctgcccccgagtctattctcatcccttccggctgccctggctcccccggtgcccccagactgcaccctgcaactgctcgtcttccgaaatggccgcctcttccacagccacagcaacacctcccgccctggagctgctgggcctggcaagaggcgtggcgtggccacccccgtcatcttcgcaggaaccagtggctgtggcgtgggaaacctgacagagccagtggccgtttcgctgcggcactgggctgagggagccgaacctgtggccgcttggtggagccaggaggggcccggggaggctgggggctggacctcggagggctgccagctccgctccagccagcccaatgtcagcgccctgcactgccagcacttgggcaatgtggccgtgctcatggagctgagcgcctttcccagggaggtggggggcgccggggcagggctgcaccccgtggtatacccctgcacggccttgctgctgctctgcctcttcgccaccatcatcacctacatcctcaaccacagctccatccgtgtgtcccggaaaggctggcacatgctgctgaacttgtgcttccacatagccatgacctctgctgtctttgcggggggcatcacactcaccaactaccagatggtctgccaggcggtgggcatcaccctgcactactcctccctatccacgctgctctggatgggcgtgaaggcgcgagtgctccataaggagctcacctggagggcaccccctccgcaagaaggggaccccgctctgcctactcccagtcctatgctccggttctatttgatcgctggagggattccactcattatctgtggcatcacagctgcagtcaacatccacaactaccgggaccacagcccctactgctggctggtgtggcgtccaagccttggcgccttctacatccctgtggctttgattctgctcatcacctggatctatttcctgtgcgccgggctacgcttacggggtcctctggcacagaaccccaaggcgggcaacagcagggcctccctggaggcaggggaggagctgaggggttccaccaggctcaggggcagcggccccctcctgagtgactcaggttcccttcttgctactgggagcgcgcgagtggggacgcccgggcccccggaggatggtgacagcctctattctccgggagtccagaggggcgctggtgaccacgcacttcctgtacttggccatgtgggcctgcggggctctggcagtgtcccagcgctggctgccccgggtggtgtgcagctgcttgtacggggtggcagcctccgccctgggcctcttcgtcttcactcaccactgtgccaggcggagggacgtgagagcctcgtggcgcgcctgctgcccccctgcctctcccgcggccccccatgccccgccccgggccctgcccgccgccgcagaggacggttccccggtgttcggggagggccccccctccctcaagtcctccccaagcggcagcagcggccatccgctggctctgggcccctgcaagctcaccaacctgcagctggcccagagtcaggtgtgcgaggcgggggcggcggccggcggggaaggagagccggagccggcgggcacccggggaaacctcgcccaccgccaccccaacaacgtgcaccacgggcgtcgggcgcacaagagccgggccaagggacaccgcgcgggggaggcctgcggcaagaaccggctcaaggccctgcgcgggggcgcggcgggggcgctggagctgctgtccagcgagagcggcagtctgcacaacagccccaccgacagctacctgggcagcagccgcaacagcccgggcgccggcctgcagctggaaggcgagcccatgctcacgccgtccgagggcagcgacaccagcgccgcgccgctttctgaggcgggccgggcaggccagcgccgcagcgccagccgcgacagtctcaagggcggcggcgcgctggagaaggagagccatcgccgctcgtacccgctcaacgccgccagcctaaacggcgcccccaaggggggcaagtacgacgacgtcaccctgatgggcgcggaggtagccagcggcggctgcatgaagaccggactctggaagagcgaaactaccgtctaaggtggggcgggcgacgcggtagacgggctggccacgcggctcgttcccccgctcctcggggccctccaaggtgtctccgtagtcagcaggttggaggcagaggagccgatggctggaggaagcccacaggcggatgttccccacttgcctagagggcatccctctggggtagcgacagacaatcccagaaacacgcataatacatttccgtccagcccggggcagtctgactgtcggtgccctcccaggaacggggaaggcctccgtctgtgtgaaagggcacagcacatcccaggtgcaccctccccaagtactcccaccccgcctactgtccatgcggcctcactgggggccatcagcctcaccagcaaagcagagatgagagcgtgggaactgtgttctttcctccctgccctctactgatttcagcccagcccctgcctagatcctaggtcccttttcctcccgagtttggctggcacgagagctagcccagcacatgaagcaggtgatgttaagtcacaaggtgctgcttttcagatccactatgcaagaggggagggtggggccacgtgaaaggcagctctagacatcaaccagtcctgggggaggggagtgggaaccgggcacaactaggaacaatgccaccattcccacaggagtggtacttaaaccagacagcagggttcagaggtggcacaccgggacaaagctgaggccctgcacctcaacagctgactgccaggtgcctgtgggtgaactgaggggagtagagggagagggcaggtggaactggggcagaatctagtcatgccctaaagctagtcctgtaaacaatggtgccccagaaagctgcaggtggtgtttggagaagcagttacttttcagttacaagacccatctccctagtctcagccttacaacaccacgggactaaggaagagcacttccttgcctccgtaaggccagaggaagaaccatcccaatcatttgatctccagctccacagtagagagaaacctacaaaatgtcaaaccagcttcccgactcccaggagctcaagccaagcccagaggcagtggctggggtccctgcaggtcatgaggggcctatgcctttactccttttaaacaccagcacccgtcttttccccaacctaaaaccaaccaccagcatttcactacaggaccaaatggaaaccgagggaaccctgggtcttgggaagaacaacaggaaaccaaggtctgacctagggttccctcccagtcttcacatcactctggcctcatcaccaaggtgacagaggacacaggggagggggaaaacccacacacactccttggaatgggtcctgttatttatgcttgctgcacagacatattagaagaaaaaaaaaagctttgtattattcttccacatatgctggctgctgtttacacaccctgccaatgccttagcactggagagctttttgcaatatgctggggaaaggggagggagggaatgaaagtgccaaagaaaacatgtttttaagaactcgggttttatacaatagaatgttttctagcagatgcctcttgttttaatatattaaaattttgcaaagccctttgagctactg

SEQ ID NO: 225506 - DNA, 4017 bp, Artificial Sequence
  derived and/or modified sequence
atgggtgctgggggtcgtagaatgcggggcgcacccgccaggcttcttctgccgctcctgccttggttgcttctcctcctggcacccgaagcaaggggggcgccaggttgtcccctgtccatccgatcttgtaagtgcagcggcgaaaggccaaagggcctcagcgggggagtgcctggaccagcccgaaggcgcgttgtttgcagtggcggggacctaccagaaccaccagaacccgggctcctacctaatggcactgttacactcctcctttcaaataataaaatcactggtctccgaaatggctccttcctcggactctccttactcgaaaagctggacttacgcaataatataatcagcactgttcaaccaggtgcctttttgggattaggggaattgaagcgcttggacctgtctaacaaccgcatcggatgcctcacctcagagaccttccaaggccttcctcgtctgttgaggctcaatatcagcggaaatatcttttcatcgctgcagcccggggtgtttgatgagctgccagctcttaaggtggtagacctcgggaccgaattcctaacttgcgattgccacctaaggtggctgctcccttgggcacaaaatcgctccctgcagctcagtgaacacaccctgtgtgcttatccttctgccctgcacgcccaggccttgggaagtctccaggaggcacagctgtgctgtgagggcgccttggaactgcacacacatcacctcatacccagcttgaggcaggtggtgttccagggcgaccgcctgcctttccagtgctcagcatcctatttaggaaacgataccagaatacgctggtatcataatcgtgcccctgtcgagggggacgaacaagcaggaattcttctggccgaaagtctcatccacgattgcactttcataacctcagaactgactctgtctcacatcggcgtgtgggctagtggcgaatgggaatgcactgtcagtatggcacagggcaacgcgagcaaaaaggtcgagattgttgttctggagacttcagcttcatactgtcccgccgagagagtggcaaacaatcggggggattttcgctggccacggacacttgccgggatcaccgcttatcagagctgccttcagtatccatttacttctgttcctctgggcgggggagcacctggcactagggcttcacgcaggtgcgaccgggcaggacgttgggaaccaggtgactatagccactgcctatatacaaatgacataacaagggttctttatacctttgtactgatgcctatcaatgcttctaacgcgctgactctggcccaccagttgcgagtgtatacagccgaggctgctagcttcagcgacatgatggatgtggtgtacgtagcacagatgatccagaaatttctgggctatgttgatcagatcaaagaattggttgaagttatggtggatatggcctcgaacctgatgctggtggacgaacacttactgtggctcgctcagcgggaagataaggcatgctccaggatagttggggctctagaacggattggcggggccgccctctcacctcatgcacaacacatctccgtgaatgctcggaacgtagccctagaagcctatctgataaaacctcattcctatgtaggccttacgtgcacagctttccagcggcgtgagggaggcgtcccagggactcgccccgggtctccaggacaaaacccccccccggagcctgaaccccctgccgatcaacagctgcgtttccggtgcactacagggcgccctaatgtttccctttcaagttttcacatcaagaactcagtcgcgttagccagcattcagctgcccccctccctattcagctctttgcccgcggcactggcgccacccgttcctcccgattgtaccctccaactcctggtattcagaaatggtcggctctttcatagtcattccaacacttcccggcccggcgctgccggccccggtaaacggcgcggggtggcaacacccgttattttcgcaggcacctcaggctgtggcgtcggcaatctgactgagccagtggccgtaagtctcagacactgggcggagggagcagagccagtggccgcgtggtggtcacaggaaggcccaggagaggccggcggatggacctctgagggctgccaactgagatcgagtcagcctaacgtgagtgccctacactgtcagcacctggggaatgttgctgtcctgatggaactctctgcattccctcgtgaagttggtggcgcaggtgccgggcttcatccggtggtgtacccctgtaccgctttactgctactctgtctttttgcaaccatcattacctatattcttaaccatagttccatccgagtctcacgtaagggttggcacatgctgttgaacttgtgctttcacattgcaatgactagtgcagtgttcgccggcgggatcacgctgaccaattaccagatggtttgccaggccgtgggcataactctacactacagttcccttagcaccctgctgtggatgggagtgaaagccagggtgcttcataaggagctcacttggcgcgcgccccccccacaggagggggaccccgcattgccgactcctagccctatgctccgtttctatctcatcgcgggcggtattcctttgataatttgcggtatcactgctgccgttaacatccacaactatagagaccacagtccctactgttggctggtctggcgccctagcctgggcgcgttttacattcctgtcgccctgatcttgcttattacctggatttactttctctgtgctggcctgagacttcgcggtcccttagctcagaaccccaaggctggcaactctagagcatctttagaagctggagaagaactgaggggatccacccggctgaggggtagcggacccctgctgagcgacagtggaagcttgttggctacaggctctgcacgggtcggcacacccggacccccggaggatggcgattctctttacagtcccggtgtccagcttggagctctggtcactacccatttcctgtatttagccatgtgggcttgcggggcccttgcagtttcccagagatggctccctagggtcgtttgttcctgtctatatggcgtggcggcatccgcattgggcctttttgtgttcacccaccattgtgcacggcgccgggatgtcagagcttcttggcgcgcctgctgccctccggccagtcccgctgctccacacgccccccctcgagccctcccggcagccgcagaagatggttcacctgtatttggagaaggccctcccagtctgaaaagtagcccatcagggtccagtgggcacccattggcgttggggccctgcaaattgaccaatttgcagctcgcgcagagccaggtatgcgaagctggcgcagccgctgggggagagggcgaacctgagcccgctgggacccgggggaatctcgctcatcggcatccaaataacgttcatcacggaaggagagcacataagtctcgcgcaaagggtcaccgggcgggggaagcttgcggcaagaatagactgaaggccctaagaggcggagccgccggcgccttggagcttctctcctcagagagtggaagcctccacaatagccccaccgattcctacctcgggagtagcaggaatagtcctggcgccggtctgcaactggagggcgagcctatgctcactccttcagaggggtctgatacctcagctgcacctctcagcgaagcgggtcgtgctgggcagcggaggtccgcctccagggatagtctaaagggcggtggggccctggaaaaggagagccacaggaggtcttaccctctaaacgccgcttccttgaacggcgccccaaagggcgggaagtacgacgatgtgaccctgatgggtgcagaggttgctagtggcggatgtatgaagacaggcctgtggaagtctgagacaaccgtatag

SEQ ID NO: 225507 - DNA, 3771 bp, Artificial Sequence
  derived and/or modified sequence
atgcggggtgcccctgcgcgtttactgttaccccttcttccctggctgttactgttgctcgcgcccgaggcccggggcgcccctggttgccccctgagcatccgtagttgcaaatgttctggcgaaaggcccaaaggcctgtcaggcggagtgcccggccccgcccgacgacgtgtcgtgtgtagtggcggggacctccccgagccgcccgaacccggcctcctgcctaacggaaccgtaaccctgttgctgtctaacaataaaatcaccggacttcgcaacggtagctttcttggcctatcgctgctggagaaattggaccttaggaataatataatctccacggtgcagccaggggccttcttggggctcggtgaattaaagagattggacctgtctaacaaccgtattggatgcttaacatccgagacctttcagggcctgcccagactgctcagactaaatatctccggtaacatcttttcttccctccagcccggcgtttttgatgaactgccagctcttaaggtggtagacctgggcaccgagtttctgacgtgcgactgccatctcagatggctgcttccatgggctcagaatagaagcttgcagctctctgagcacacgctctgcgcgtacccttccgccttacacgcgcaggctttgggctctttgcaggaagctcagctgtgttgcgaaggagcccttgagttgcacacacaccatttaatcccctcactgaggcaggtggtctttcaaggggacagacttccatttcagtgtagcgcgtcatacctgggtaatgatacaaggattagatggtatcacaaccgcgcacccgttgagggggatgagcaagcaggtatcctacttgcagagtctctaatacatgactgtactttcattacttcagaactgacactttctcatatcggcgtctgggccagtggcgagtgggaatgtacggtgtccatggctcagggcaatgcaagcaagaaagtggaaatagtggtcctggagacaagtgcttcttactgtcccgctgaacgcgttgcaaacaacagaggagattttcggtggcccagaacactggctggaatcaccgcctatcagtcatgcctgcagtacccatttacctccgtacccctagggggcggggccccgggtaccagggcctcacgccggtgtgatagagcagggcggtgggagcccggcgattactcacattgtttgtacactaacgatattacgagagtcctgtataccttcgtgcttatgcctatcaatgcatctaatgccctcaccttggcacaccagttgcgagtctatacagccgaggcagcttccttttccgacatgatggatgtggtgtacgtcgcccaaatgatccagaagttcttggggtatgtcgatcaaattaaggagttggtcgaggtgatggtagatatggcttccaacctgatgctggtagacgagcatctgctgtggcttgcacagagggaggacaaggcgtgctctcgcatcgtgggagccctggaacgaattggcggggctgcactaagcccacacgcccaacatatcagcgtgaacgctagaaacgtcgccctggaggcttacctgattaaacctcatagctatgttggactcacgtgcacggcctttcagagacgtgagggcggggttcccggaactaggccaggcagcccgggtcagaacccccccccagagccagagcccccggcagatcagcaactgcgattccgctgcaccaccgggaggccaaacgtttccttgtcaagttttcatattaagaattcggtagcactggcaagcatccagctgcctccctccctatttagttccttgcctgccgctttagcccccccagtccccccagactgtactctgcagctcctcgtattcaggaacggccgcctgttccactcacatagcaacacttcaagaccaggggcggccggcccgggcaaaaggcggggagtcgcaacgccagtcattttcgccggtacctccggatgcggcgtcgggaatctaactgaaccagttgccgtatcgctgcgtcactgggccgaaggcgcagagcctgttgcggcctggtggtctcaggaaggccctggcgaagctggcgggtggacatcggagggatgccagttgcgtagctcacaaccaaacgttagcgcgctgcattgtcagcacctgggtaatgtggcggtgctcatggaactaagtgctttccctcgcgaggtcggaggggcgggtgcaggcctccatcctgtggtgtacccttgcacagccctcctgctcctgtgcctctttgccactattataacttacattctcaaccattccagtatcagggtgtccagaaaggggtggcacatgttattgaatctgtgtttccacatcgccatgacctctgcggtctttgccggcgggattactttgacaaattaccagatggtgtgtcaggcggtgggaattacactccattactcaagcttgtctacattgctgtggatgggagtaaaagccagagtcttgcacaaggaactgacgtggcgcgctccccctccacaggaaggcgacccagcgttacccactccctcaccgatgttacgcttctatctgatcgccggcggcatccccttgatcatttgcggaattaccgccgcagtgaacatacacaactatcgagaccactctccttactgctggctggtttggcggccaagtctgggcgctttttacatcccagtagcgctgatccttctgataacctggatctactttctgtgtgccgggctgaggctgaggggcccgctggcacagaatccaaaagccggcaattcacgggcaagcttggaggccggggaggagctgaggggttcaacacgtctgagggggagtgggccactgctttccgactctggctcgctgttagccaccggtagtgctagggtaggaacgccagggcctcctgaggatggggacagcctatatagtcctggagtgcagcgtggtgcgggcgaccacgctctccccgtgctcggccatgtgggcctgcgcgggagcggtagcgtccctgccctggcggccccaggaggagtacagctcttggtgcggggtggtagtctgcgccccgggcccctccgattgcactcccctctgtgtcaggccgagggacgagagagcctggtggcacgcttactgcctccatgtctctcacggggaccaccatgccccgcccccggccccgcgcgtcgtagacgaggaagattccctggcgtgaggggcgggcctccactgccccaggtgctgccaaagagacagcaacgcccttcagctggcagtggtcccttacaggcacaccagcctgcagccggtccagagtctggtgtccgcggaggcggagggggcaggagagggcggcgtgcgggggcaggcggccatcctggaaagcctcgcccaccccctccccaacagcgggctcctcgggcttcaggagcacaggagcccggtcagggaacaccacgaggtggaggtttgcgccaggagcctgcccaagggcccgcccgaggacgtgggggaggagctggcgccgcagtgcagcgcgagcgccaatccgcccaacagccacacagacagttgccaggacagcagcctcagcaacctggccgccgccctgcagctggacgtagagcccacgcccatgcggttagggggcagcgccaccagagacgagctgcattttag

SEQ ID NO: 225508 - DNA, 4017 bp, Artificial Sequence
  derived and/or modified sequence
atgggcgccggcggccgcaggatgagaggagccccagcccggctgctgctgcccctgctgccctggctgctgctgctgctggcccctgaggcccggggggcccctggctgccccctgagcatccgcagctgcaagtgcagcggggagcggcccaagggcctgtctggaggagtgcccggccctgcccggcggcgggtggtgtgcagcggcggggacctgcctgagcccccagagcccggcctgctgcccaacggcaccgtgaccctgctgctgagcaacaacaagatcaccggcctgagaaatggcagcttcctgggcctgagcctgctggagaagctggacctgaggaacaacatcatcagcacagtgcagcccggggccttcctgggcctgggggagctgaagaggctggacctgagcaacaaccgcatcggctgcctgaccagcgagaccttccagggcctgccccggctgctgcggctgaacatcagcggcaacatcttcagcagcctgcagcccggggtgtttgatgagctgcctgccctgaaggtggtggacctgggcacagagttcctgacctgtgactgccacctgcgctggctgctgccctgggcccagaacagaagcctgcagctgtctgagcacaccctgtgtgcctaccccagcgccctgcacgcccaggccctgggcagcctgcaggaggcccagctgtgctgtgagggcgccctggagctgcacacccaccacctgatccccagcctgcggcaggtggtgttccagggcgaccggctgcccttccagtgcagcgccagctacctgggcaatgacacccgcatccgctggtaccacaacagagcccctgtggagggagatgagcaggccggcatcctgctggccgagagcctcatccatgactgcaccttcatcaccagcgagctgaccctgagccacatcggcgtgtgggccagcggggagtgggagtgcaccgtgtccatggcccagggcaatgccagcaagaaggtggagatcgtggtgctggagaccagcgccagctactgcccagctgagcgggtggccaacaacagaggagacttccgctggcccaggaccctggccggcatcacagcctaccagagctgcctgcagtaccccttcacctctgtgcccctgggcggcggggcccctggcacccgggccagcagaagatgtgaccgggccggccgctgggagcccggggactacagccactgcctgtacaccaatgacatcaccagggtgctgtacacctttgtgctgatgcccatcaatgccagcaatgccctgaccctggcccaccagctgcgggtgtacacagctgaggccgccagcttcagtgacatgatggatgtggtgtatgtggcccagatgatccagaagttcctgggctacgtggaccagatcaaggagctggtggaggtgatggtggacatggccagcaacctgatgctggtggatgagcacctgctgtggctggcccagcgggaggacaaggcctgcagcagaattgtgggcgccctggagcgcatcggcggggccgccctgagcccccacgcccagcacatctctgtgaatgccagaaatgtggccctggaggcctacctgatcaagccccacagctatgtgggcctgacctgcacagccttccagaggcgggagggcggcgtgcccggcaccaggcctggcagccctggccagaaccccccacctgagcctgagcccccagctgaccagcagctgcgcttccgctgcaccaccggccggcccaacgtgtccctgagcagcttccacatcaagaacagcgtggccctggccagcatccagctgccccccagcctcttcagcagcctgcctgctgccctggcccctcctgtgcccccagactgcaccctgcagctgctggtgttcagaaatggccgcctcttccacagccacagcaacaccagcaggcctggagctgctggccctgggaagagaagaggagtggccacccctgtgatctttgctggcaccagcggctgcggcgtgggcaacctgacagagcctgtggccgtgtccctgcggcactgggccgagggcgctgagcctgtggccgcctggtggagccaggagggccctggagaggccggcggctggaccagcgagggctgccagctgcggagcagccagcccaacgtgtctgccctgcactgccagcacctgggcaatgtggccgtgctgatggagctgagcgccttcccccgggaggtgggcggggccggggccggcctgcaccctgtggtgtacccctgcacagccctgctgctgctgtgcctgtttgccaccatcatcacctacatcctgaaccacagcagcatccgggtgtccaggaagggctggcacatgctgctgaacctgtgcttccacatcgccatgaccagcgctgtgtttgctgggggcatcaccctgaccaactaccagatggtgtgccaggccgtgggcatcaccctgcactacagcagcctgagcaccctgctgtggatgggcgtgaaggcccgggtgctgcacaaggagctgacctggagggcccccccaccccaggagggggaccctgccctgcccacccccagccccatgctgcgcttctacctgattgctgggggcatccccctcatcatctgtggcatcacagctgctgtgaacatccacaactacagagaccacagcccctactgctggctggtgtggaggcccagcctgggcgccttctacatccctgtggccctgatcctgctgatcacctggatctacttcctgtgtgccggcctgcggctgcggggccccctggcccagaaccccaaggccggcaacagccgggccagcctggaggccggggaggagctgcggggcagcacccggctgcggggcagcggccccctgctgagtgacagcggcagcctgctggccactggaagtgcccgggtgggcaccccaggccccccagaagatggagacagcctgtacagccctggggtgcagctgggcgccctggtgaccacccacttcctgtacctggccatgtgggcctgtggggccctggccgtgtcccagcgctggctgccccgggtggtgtgcagctgcctgtatggagtggccgccagcgccctgggcctgtttgtgttcacccaccactgtgccaggagaagagatgtgcgggcctcctggagggcctgctgccccccagccagccctgctgcccctcatgccccaccccgggccctgcctgctgctgctgaagatggcagccctgtgtttggagagggcccccccagcctgaagagcagccccagcggcagcagcggccaccccctggccctgggcccctgcaagctgaccaacctgcagctggcccagagccaggtgtgtgaggccggggctgctgctggaggagagggggagcctgagcccgccggcacccggggcaacctggcccaccgccaccccaacaacgtgcaccacggccggcgggcccacaagagccgggccaagggccaccgggccggggaggcctgtgggaagaaccggctgaaggccctgcggggcggcgctgctggggccctggagctgctgagcagcgagagcggcagcctgcacaacagccccacagacagctacctgggcagcagcaggaacagccctggggccggcctgcagctggagggggagcccatgctgaccccatctgagggcagtgacaccagcgctgcccccctgtctgaggccggccgggccggccagaggagaagtgccagccgggacagcctgaagggcggcggggccctggagaaggagagccaccggcgcagctaccccctgaatgctgccagcctgaatggagcccccaagggcggcaagtatgatgatgtgaccctgatgggcgctgaggtggccagcggcggctgcatgaagacaggcctgtggaagtctgagaccaccgtgtag

SEQ ID NO: 225509 - DNA, 3771 bp, Artificial Sequence
  derived and/or modified sequence
atgagaggagccccagcccggctgctgctgcccctgctgccctggctgctgctgctgctggcccctgaggcccggggggcccctggctgccccctgagcatccgcagctgcaagtgcagcggggagcggcccaagggcctgagcggcggcgtgcccggccctgccaggagaagagtggtgtgcagcggcggggacctgcctgagcccccagagcccggcctgctgcccaatggaacagtgaccctgctgctgagcaacaacaagatcaccggcctgagaaatggcagcttcctgggcctgagcctgctggagaagctggacctgaggaacaacatcatcagcacagtgcagcccggggccttcctgggcctgggggagctgaagaggctggacctgagcaacaacagaattggctgcctgaccagcgagaccttccagggcctgccccggctgctgcggctgaacatcagcggcaacatcttcagcagcctgcagcccggggtgtttgatgagctgcctgccctgaaggtggtggacctgggcacagagttcctgacctgtgactgccacctgcgctggctgctgccctgggcccagaacagaagcctgcagctgtctgagcacaccctgtgtgcctaccccagcgccctgcacgcccaggccctgggcagcctgcaggaggcccagctgtgctgtgagggcgccctggagctgcacacccaccacctgatccccagcctgcggcaggtggtgttccagggcgaccggctgcccttccagtgcagcgccagctacctgggcaatgacacccgcatccgctggtaccacaacagagcccctgtggagggagatgagcaggccggcatcctgctggccgagagcctcatccatgactgcaccttcatcaccagcgagctgaccctgagccacatcggcgtgtgggccagcggggagtgggagtgcaccgtgtccatggcccagggcaatgccagcaagaaggtggagatcgtggtgctggagaccagcgccagctactgcccagctgagcgggtggccaacaacagaggagacttccgctggcccaggaccctggccggcatcacagcctaccagagctgcctgcagtaccccttcacctctgtgcccctgggcggcggggcccctggcacccgggccagccgccgctgtgacagagctggccgctgggagcccggggactacagccactgcctgtacaccaatgacatcaccagggtgctgtacacctttgtgctgatgcccatcaatgccagcaatgccctgaccctggcccaccagctgcgggtgtacacagctgaggccgccagcttcagtgacatgatggatgtggtgtatgtggcccagatgatccagaagttcctgggctacgtggaccagatcaaggagctggtggaggtgatggtggacatggccagcaacctgatgctggtggatgagcacctgctgtggctggcccagcgggaggacaaggcctgcagccgcatcgtgggcgccctggagagaattggaggagctgccctgagcccccacgcccagcacatctctgtgaatgccagaaatgtggccctggaggcctacctgatcaagccccacagctatgtgggcctgacctgcacagccttccagaggcgggagggcggcgtgcccggcacccggcccggcagccctggccagaaccccccacctgagcctgagcccccagctgaccagcagctgcgcttccgctgcaccaccggccggcccaacgtgtccctgagcagcttccacatcaagaacagcgtggccctggccagcatccagctgccccccagcctcttcagcagcctgcctgctgccctggcccctcctgtgcccccagactgcaccctgcagctgctggtgttcagaaatggccgcctcttccacagccacagcaacaccagcaggcctggagctgctggccctgggaagaggcggggcgtggccacccctgtgatctttgctggcaccagcggctgcggcgtgggcaacctgacagagcctgtggccgtgtccctgcggcactgggccgagggcgctgagcctgtggccgcctggtggagccaggagggccctggagaggccggcggctggaccagcgagggctgccagctgcggagcagccagcccaacgtgtctgccctgcactgccagcacctgggcaatgtggccgtgctgatggagctgagcgccttcccccgggaggtgggcggggccggggccggcctgcaccctgtggtgtacccctgcacagccctgctgctgctgtgcctgtttgccaccatcatcacctacatcctgaaccacagcagcatccgggtgtccaggaagggctggcacatgctgctgaacctgtgcttccacatcgccatgaccagcgctgtgtttgctgggggcatcaccctgaccaactaccagatggtgtgccaggccgtgggcatcaccctgcactacagcagcctgagcaccctgctgtggatgggcgtgaaggcccgggtgctgcacaaggagctgacctggagggcccccccaccccaggagggggaccctgccctgcccacccccagccccatgctgcgcttctacctgattgctgggggcatccccctcatcatctgtggcatcacagctgctgtgaacatccacaactacagagaccacagcccctactgctggctggtgtggaggcccagcctgggcgccttctacatccctgtggccctgatcctgctgatcacctggatctacttcctgtgtgccggcctgcggctgcggggccccctggcccagaaccccaaggccggcaacagccgggccagcctggaggccggggaggagctgcggggcagcacccggctgcggggcagcggccccctgctgagtgacagcggcagcctgctggccaccggcagcgcccgggtgggcaccccaggccccccagaagatggagacagcctgtacagccctggggtgcagagaggagctggggaccacgccctgcctgtgctgggccacgtgggcctgcggggcagcggctctgtgcctgccctggccgcccctggaggagtgcagctgctggtgcggggcggcagcctgcggcccggccccctgcggctgcacagccccctgtgccaggccgagggccgggagagcctggtggcccggctgctgcccccctgcctgagccggggccccccctgcccagcccctggccctgccaggagaagaagaggccgcttccctggggtgcggggcggcccccccctgccccaggtgctgcccaagaggcagcagaggcccagcgctggcagcggccccctgcaggcccaccagcctgctgctggccctgagagcggcgtgcggggcggcggcggcggccggcggggcagaagagctggagctgggggccaccctgggaagccccggcccccaccaccccagcagagggccccccgggccagcggggcccaggagcccggccagggcaccccccggggcggcggcctgcggcaggagcccgcccagggccctgcccggggccggggcggcggggccggggctgctgtgcagcgggagcggcagagcgcccagcagccccaccggcagctgcccggccagcagccccagcagcccggccggcggcctgctgctggccggcgggcccacgcccatgctgtgcggggccagaggcaccagaggcgggccgccttctag

SEQ ID NO: 225510 - DNA, 4017 bp, Artificial Sequence
  derived and/or modified sequence
atgggcgccggcggccggcggatgcggggcgcccccgcccggctgcttctccctcttctgccttggctgctacttctgctagctccagaagcacggggcgcccccggctgtcctctgtctatccgctcatgcaagtgtagcggcgaaagacctaaagggctgagcggaggcgtacctggacccgcccggcggagggtggtttgcagtggtggtgatttacctgaaccccccgaaccaggactgcttcccaacgggaccgtgacactcctgttgtccaacaataaaatcaccgggcttcgtaacggcagcttcctcggcctctccctcctggagaaactggatctacggaataacattatctcaactgttcagcctggagccttcctggggctcggtgagttgaagcgcttagatctgtcgaataatagaattggttgcctgaccagcgagacttttcaggggcttccccggctccttaggttaaacatatcggggaacatttttagctccctgcagcccggcgtgtttgatgaactcccggccctgaaagtggtggatttagggactgaattcctgacttgcgattgccatctccggtggctgctgccttgggcccaaaacagatccctacagctcagcgagcatactctgtgtgcatatccaagtgcactgcacgcccaggcactaggttctttacaagaggctcagctctgttgtgaaggggcactagaactacacacacaccacctcattccttccctgcgccaggtggttttccagggggatcgcctccccttccagtgttctgccagctatctgggaaatgatacacgcattaggtggtatcacaaccgcgctcccgttgaaggggacgagcaggcgggcatcttactggctgagtctcttattcacgactgcacgtttatcaccagcgaactgactcttagccatattggggtttgggccagtggcgaatgggagtgcacggttagtatggctcaggggaatgctagcaagaaggttgaaatcgtcgtgctcgagacgtctgcttcttattgccccgcggaacgagtggccaacaaccggggagattttcggtggccccggacactcgctggaattactgcatatcagagttgcctacagtacccatttacctcagtccccctgggaggaggcgcgcccggaacacgcgcatctcgccggtgcgatcgtgcgggccgctgggagccgggtgactacagccactgtctctatacaaatgacattacaagagtgctctatacttttgtactgatgccgattaacgcctcaaatgcgcttacactcgctcatcagctgcgcgtgtacactgctgaggcggccagcttttctgacatgatggacgtggtctacgtggcacagatgatccagaagtttttggggtatgtcgaccagattaaagagctagtcgaggtgatggtggacatggcgagtaatctgatgttagtggatgagcacctgctgtggctggctcagagagaggataaagcctgcagcaggatcgtgggagcactggaacggatcgggggggccgccctctccccccatgcccaacacatatctgtcaatgccagaaacgtggcactcgaggcatatttaattaagccccatagctatgtgggactcacctgtaccgcttttcagagacgcgaggggggtgtgccaggcacacggccaggcagccccggtcagaacccacccccagagcccgaaccacccgcagatcagcagctgcgattccgttgcaccactggtcgcccaaacgtgtctctatccagctttcacatcaaaaacagtgtggcccttgcctctatccaactgcccccctcgctgttttcctcgctgccagcggcattggcccctccagtgccaccagactgtactttgcagctgttggtgtttaggaatggacgcctttttcattctcacagcaacacttcaagaccgggagccgcggggccaggtaagcgaagaggggtcgctacccctgtgattttcgcgggtacgagcggatgcggggtaggcaatcttaccgaaccggtggctgtgtctctacgccactgggctgagggtgctgagccggtcgccgcgtggtggtctcaggaaggccctggcgaggcaggcggctggaccagcgagggatgtcagctccgcagctcccagccaaacgttagtgccctgcactgtcagcatctggggaacgtcgcagtcctgatggaactttcagcgtttccgcgggaagtggggggagccggagccggactgcatcccgtagtatatccatgtaccgcactgttgttgctctgcctgttcgccaccattattacttacattctgaaccattctagtatcagggttagccggaaggggtggcatatgctgctgaatctctgttttcacattgccatgacctccgccgtgttcgcaggcggcattactttaacaaactaccaaatggtatgccaggcagttggaattacactccactattcttcccttagcacactgctgtggatgggcgttaaggcgagagttctgcataaagaactcacctggagggccccccccccacaggagggggaccctgctctgcccaccccatccccaatgttgcggttttacttaattgctgggggtatacctcttattatttgcggcatcaccgctgccgtcaatattcacaattatcgtgatcacagcccctactgctggctggtgtggaggccgtcactcggcgcattctacattccggtggcattgatattgttaatcacatggatctactttctttgcgccggactgaggttgaggggcccgcttgcacaaaacccaaaggcaggcaacagccgcgccagcctggaggctggtgaggaactgcgtggctcaacacgtctccgcggcagcgggcccctgcttagtgatagcggcagcttgctggcaaccggctcagcccgcgtggggacccccgggccccccgaagatggcgactccctgtatagtcctggggtgcagctgggggccctggttactacccattttctgtacctagccatgtgggcatgtggcgcccttgcggtaagccagcggtggttaccccgtgtggtgtgcagctgcctttacggcgtcgctgctagcgctttgggactctttgttttcacccatcactgtgccagacggcgagatgtcagagcctcgtggcgggcctgctgtccaccggcatctcccgctgccccgcacgcgccacccagagcacttcctgccgctgccgaggatgggtcgcccgtgtttggggagggtcccccatctcttaagtcatccccatctgggtctagtggacacccactcgctctgggtccgtgcaaactcactaatctgcagctggcccagtctcaggtatgcgaagccggggccgcagctgggggtgagggggaaccagagcctgcgggtacccggggaaacctggcacaccgccacccgaacaacgtacatcacggcaggagagcacacaagtcaagagcaaagggtcaccgggccggcgaagcttgtggtaagaaccgcctgaaggctttaaggggtggcgcagctggcgccctcgagctgctaagttcagagtccggctctctgcacaattcacccacagattcctaccttgggtcatcaagaaactctccaggcgccggcctccagttggagggcgagcctatgctaacccccagcgagggatccgatacttctgctgccccactctcggaggctggtcgagctggccaacgtaggtccgccagccgggattctctgaagggcggcggcgcactcgagaaggaaagtcatcgcaggtcctatcccctcaacgccgcctcccttaacggtgctccaaaaggaggaaagtatgatgatgtgaccctgatgggcgccgaggtggcctcaggaggatgcatgaaaaccgggctgtggaagtccgagacaactgtctag

SEQ ID NO: 225511 - DNA, 3771 bp, Artificial Sequence
  derived and/or modified sequence
atgcggggcgcccccgcccggctgctgctgcccctgctgccctggttactcctcttactcgcacctgaagcacgtggcgcccccggttgtccactctcgatccgctcctgcaagtgttctggggagcgtcccaaaggcttatccggaggtgtcccagggcccgccaggagacgggttgtatgcagcggcggcgacttgccagaacctcccgaacctggtcttctgccaaatggcaccgtcaccttgttgctctctaacaacaaaattaccggtttacggaacggctctttcctcgggctgtcccttttggagaagctagacctgcgtaacaacatcatctctaccgtgcagcccggcgccttcctgggcttgggcgagttaaaaagacttgacctctctaataacaggataggttgtttgacaagcgagactttccaaggacttccacgcctgctgagactgaacataagtggtaatattttttcttctctgcagcctggcgtgtttgacgagctgcccgccctcaaagtggtggacctgggcaccgagttccttacctgtgactgccatctgcgatggttactgccctgggcccaaaataggtcactgcagctgtcagaacacaccctgtgtgcctacccgagcgcactgcatgctcaggccctaggaagcctgcaggaagcccaactatgctgcgaaggcgcacttgaactgcacacccatcacctgataccaagcctcagacaggtcgtcttccagggagatagattaccttttcagtgcagtgccagctacttggggaatgacactaggattcgttggtaccataatcgggctccagttgagggtgatgagcaagccggtattctgcttgccgaatctttgatccacgactgcaccttcattacctcagagctgacgctctctcacataggggtgtgggcttccggagaatgggagtgtaccgtttctatggcacaagggaatgcgtcaaaaaaagtggagatagttgtcttggaaactagcgcatcgtattgccccgccgagcgggtggccaataatagaggagacttcagatggccacggaccctcgccggaatcaccgcttaccagtcttgcttgcagtacccgttcacatctgtgccacttggaggaggcgctcccggaacgcgcgctagcaggcggtgtgatagggcagggcgctgggaaccaggggattatagccattgtctgtacacgaacgacattaccagagttctgtacactttcgtcttgatgccaatcaatgcttctaacgccctgacgctcgcacaccagctcagggtctacacagccgaggctgcaagtttcagtgacatgatggatgtagtctacgtggcccagatgatccagaaattcctgggctatgtggaccagatcaaggaactggtggaagtcatggttgacatggcgagcaacctcatgctcgtggatgagcacctgctctggttagcccagcgggaagataaagcatgttcaaggatcgtcggggcccttgagcgaatcggaggcgcggcactcagcccccacgcacagcacatatctgttaatgcgcgcaatgtggccctggaagcctacctgataaagcctcatagctatgtcggtctcacttgtacggcattccagaggagagaaggcggcgtcccaggcacccgcccagggagccccggacagaacccccctcctgagcctgaaccccccgctgatcaacaactgcggttcaggtgtaccaccgggcgcccaaatgtgagcctcagctctttccacattaaaaacagcgtagccctggcatctatacagttgccaccgtctctattcagctcccttcccgccgccctggcgccgccagtgccaccagactgcacgctccagctgttagtgttccgcaacgggcggttgtttcatagtcactctaatacctcaagacctggcgcagcaggtcctgggaaaaggcggggggtggctaccccagtcatttttgccggcaccagcggatgtggagtgggaaacttgaccgagccggtggcggtcagtctgcgccactgggcagagggcgccgaaccggtggctgcttggtggtcccaggaaggaccaggcgaggctgggggatggacttcagaggggtgtcagctgcgttccagccagcccaacgttagcgcgttacactgtcagcacctcgggaatgtagctgtcctgatggaactgtcagcattccctcgcgaagtgggcggcgccggggccgggcttcacccagtagtgtacccctgcaccgctctccttctgctgtgcctgttcgccaccataatcacatatatcttgaaccacagctctattcgcgtgtcccggaagggctggcacatgttgctgaacctatgcttccacatcgcaatgacatcggctgtatttgccggtggtatcaccctgaccaactaccagatggtctgccaggccgtgggaatcacactgcattacagtagcttgagtacattactgtggatgggagtcaaggcgcgggtcttgcataaagagctgacttggcgggccccacctcctcaggaaggggacccagcccttcctaccccctctcctatgttgaggttttatctaatcgccggcgggatccccctgatcatatgcggcatcaccgccgccgtgaatatccacaactaccgagaccactccccatactgctggctggtatggcgaccgtctctcggagctttttacattccagtggctctcattctcctgattacatggatttactttttatgcgccggcctgcgcctcaggggcccactggcacagaaccctaaggccgggaacagcagagcaagcttggaagctggtgaagagctgagaggcagtacgaggcttcgggggagcgggcctctgctatcggacagcgggtccctcctggctaccggatctgccagagtaggaacaccaggccccccagaggatggggatagcctgtattcccccggtgtccaacggggtgccggggatcacgcacttccggttttgggacatgtgggactgcgtggcagcggctccgtgcctgccctggcagcgcctggtggtgtacagctgctggtccgggggggctccctcaggcctggtccactcaggctgcattcgcccctgtgtcaggctgagggacgcgaatcccttgtagcaaggctgctacctccctgcctctctcgcggaccaccttgtcccgcccccggccctgcccgtaggcggagggggagattccctggggtgcggggaggacctccattgccccaggtgcttcccaaaaggcagcagaggccttcagccggatctggacccctacaggcacatcagcccgccgccggccccgagagtggggtgcgtgggggaggcggcgggcgtcgcggtcgcagggcaggagcaggggggcacccaggcaaacctaggccccctcctcctcagcagagagcacctagggcatcaggagcgcaggagccgggacagggaacccctcggggaggtggattgaggcaagagccagcacaaggcccagcaagggggaggggtggcggcgctggagctgctgtccaaagggaacgacagagtgcccagcagccacataggcagctgcccggccagcagcctcaacaaccagggcggcggcctgcagctggcaggcgcgcgcacgcacatgctgtgagaggacagcggcaccaaagacgggcagccttctag

SEQ ID NO: 225512 - DNA, 4017 bp, Artificial Sequence
  derived and/or modified sequence
atgggcgcaggaggtcgtagaatgcgcggagctccagctcgccttcttctccctctgttaccgtggctcctccttctgctcgcacccgaggccaggggtgcgccagggtgtcccctgtctatcagatcttgtaagtgcagcggggagagacccaaaggcttgtccggtggcgtaccagggcctgcacgaagaagagtagtgtgcagtgggggtgacttgccagagcctccagagcctgggctcctcccaaacggaacggtcaccctactactgagtaataacaaaatcacgggtctgcggaacgggagcttccttggcttaagcctcctcgaaaaactggatctgaggaataatataatctcaacagttcagccaggagcatttctaggtcttggtgagcttaaaaggctggacttgtccaataatcggatcggctgtctgacatccgagacatttcagggtctccccagactgttgcgactgaatataagcggaaacatcttctcctctctgcagccgggtgttttcgacgaactgcctgctctaaaagtagtggacctgggtacagagtttttaacttgcgactgccatctgaggtggctcctaccctgggcacaaaataggtccttgcaactgtctgagcacaccctgtgcgcctaccctagcgctctgcatgcccaggccttaggatcccttcaagaagctcagctttgttgtgagggagccctcgagctgcacacacatcacttgatcccctctttacggcaggtggtctttcagggggatcgcctgccgttccaatgctccgcctcatatcttggcaacgacacacggatacgctggtaccacaatagggcccctgtcgaaggtgacgaacaagctggcatactgctcgcagaatcattgattcacgactgtacctttatcacgtctgaactgaccctttcccacattggagtctgggcgtctggtgaatgggaatgtaccgtgagcatggcacaaggcaatgccagcaagaaagtggagatcgtagtcctagaaaccagcgctagctactgccctgccgagcgagtggctaataatcgcggagacttccggtggccaagaaccctggcaggcataacggcctatcagtcctgcctccagtacccttttaccagtgtccctctgggcggaggcgctccaggcactagagcttcccgcagatgtgacagggcaggccgttgggagccaggcgactatagccactgtttgtatacaaacgatatcacacgagtgctctatacatttgtgttgatgccaattaacgcgtccaacgccctcactctggcccaccagcttcgggtgtatacagcagaggctgcctctttctctgatatgatggatgtcgtatatgtggcacagatgatccagaaattcctcggctatgtggaccagatcaaagaactggtagaggtcatggttgacatggcttctaacttaatgcttgtagacgaacacctgctttggttggcccagcgagaggataaggcttgttctcggatcgtgggagctctggagaggatcggaggagccgcactgtccccccatgcccaacacattagcgtgaatgctcggaacgtggctctggaggcttacttgatcaaaccacactcctacgttggtctaacatgcactgcattccaacggagagaaggaggagtgccgggaacaaggcctggttctcccggacagaacccacccccagagccggaacctcccgcagaccagcagctgaggtttcggtgcaccaccggccgacctaacgtatcccttagctcttttcatattaagaacagtgtcgcgctggctagtatccagcttcctccaagtctgttttcaagtctccccgcagcccttgctcctcccgtccctcctgattgcacgctccaactgctggtcttcaggaatggtaggctgttccactctcactcaaacacctctcggcctggcgctgcgggacctggcaagcggagaggtgtggcaacccctgtcatttttgccggtacctccgggtgcggcgtgggtaatctgactgagcccgtagccgtttcccttcggcattgggctgaaggagccgaacctgtcgctgcttggtggagccaggaaggtccaggagaggccggaggctggacctccgagggatgccaactgcgcagctcccagcctaatgtgtccgccttgcactgtcagcacctgggtaatgtggcggtgctcatggaactttccgcctttcctcgcgaagtcgggggtgccggagctggccttcaccccgtggtgtatccctgtactgccctgttactgctgtgtctattcgccaccattatcacctatattctcaatcacagctctattagagtatcgaggaaagggtggcacatgctcctgaatttgtgttttcacatcgctatgacaagcgctgtatttgctggaggcattaccttaaccaattaccagatggtgtgccaggcagtgggtatcacactgcactattcgtcgctcagcacccttctctggatgggagtgaaagcccgagtactgcacaaagaacttacttggagggcccctccaccgcaagagggggatcctgcgctcccaacaccatcgcccatgctcaggttctacctgatcgcaggtgggatcccgctgataatatgcggcattacagccgcagttaatattcacaattatcgggaccactccccttactgctggctggtttggaggccttctctgggggctttctacatcccagttgctctgatcctgttgatcacatggatttactttctctgtgcagggttaaggctcagaggtcctctggcgcagaacccaaaagccggaaacagtcgggcttcgctggaagctggggaggagctgaggggtagtaccaggttgagaggctctggaccattattgtccgattccggctcccttcttgccaccggctccgctcgggtcggcacacccggaccgccagaagacggcgattctctatactccccaggggtgcagttgggagccctcgtgactacacactttctctatcttgccatgtgggcttgcggcgctcttgccgttagtcagcggtggcttcccagggtggtgtgttcctgcctatacggagtcgccgcaagtgctctgggcctcttcgtcttcacgcatcactgcgcaaggcgaagggatgtgagggccagttggagagcctgctgccctcccgcatctccggcagcaccacacgcccctcctagggcccttcctgctgctgcggaagatggctctccagtcttcggcgagggcccaccgtctctcaagtcctccccgagtggaagttccggccacccactggccctggggccttgtaagttgacaaatctccaactggcccaaagtcaggtttgtgaggctggtgcagctgccggtggcgagggtgagcccgagcccgcaggcacaagggggaacctggctcatcggcatcctaataacgtgcaccatgggaggagagcccacaaaagcagagctaagggtcaccgcgctggcgaagcctgtgggaagaatcgactgaaggctctgcggggaggagctgccggtgccctagagctgctgtccagcgaatccgggtcccttcacaactcccctaccgactcctatctagggagttcccggaacagccccggtgcaggattgcagctggagggggaacccatgctgactccatccgagggctcagacaccagcgccgcaccgttgtcagaggctggcagagccggacaaagaagaagcgcttctagagactcattgaagggaggcggagcgctggagaaggaaagccaccggaggtcctatccccttaacgccgctagcctgaacggggcaccaaaggggggaaaatacgatgatgtgaccctgatgggtgctgaggtggccagtggaggctgtatgaagaccggtttgtggaaaagcgagaccactgtgtag

SEQ ID NO: 225513 - DNA, 3771 bp, Artificial Sequence
  derived and/or modified sequence
atgagaggtgcccctgctcggctgctgctccccctgctgccttggctgttgctgctgctggccccagaagcgcgaggtgcccctggttgtccgctgagcatcagatcatgcaaatgttctggagaacggcctaaaggcctgagcggtggagtgcccggacccgctaggcggagagtcgtgtgctcaggcggtgacttgccagagccacccgaaccaggactcctgccgaacggtaccgttacacttctgctgagcaacaacaaaatcaccggtctgaggaatggctcctttctggggctgagccttcttgagaagctggacttgcgtaataatattataagtacagtccagccaggcgctttcctggggctgggagaactgaaaagactggatttgtccaacaacaggatcgggtgtctgacaagcgagacttttcagggcctaccccgacttttgaggcttaatatttcgggcaacattttttcttctctgcagcctggcgtgttcgatgagctccccgctctgaaggtggtggacctgggaaccgaattcctgacatgtgattgccatttgcgatggctgctgccctgggcccagaatcgttcgttgcagctgagtgagcacacactctgcgcctacccatccgcgcttcatgctcaggctctgggctcactgcaggaggcacagctttgctgcgaaggggctctggaactgcatacacatcatcttatcccaagtttgaggcaagtggtcttccagggtgataggctaccctttcagtgttcagcctcctacctcggcaacgacacccgcattcgctggtatcacaaccgcgcacccgtcgaaggggacgaacaggctggaattttgcttgccgaatcattaatccacgattgtacctttattaccagtgagctaaccctctctcacattggggtttgggcctcaggcgagtgggaatgcaccgttagcatggcccaaggaaacgcttctaaaaaggtggagattgttgtgctggagactagtgcctcctattgccctgccgagcgagtggctaataacaggggagacttcagatggccacggactttggccggtatcacggcctatcaaagttgccttcagtatcctttcacttccgttcctctgggtggtggcgctcccggaactcgggctagtcgtcgctgcgacagagccggaagatgggagcccggtgattacagccactgtctttacacaaacgacatcacccgcgttctgtacaccttcgtccttatgcccataaatgcttctaatgcgctcacactcgcccatcagcttagggtgtatactgccgaagcggctagcttcagcgacatgatggacgttgtgtatgtagcgcagatgatccaaaaatttctggggtacgttgatcagattaaagaattagtcgaggtcatggttgacatggctagcaacctgatgcttgtcgacgagcatctcctgtggctagcccaaagagaagataaggcttgtagtcggattgtgggggctctggagcgtattggaggcgctgctctgtcgccacacgcacaacatatttcagtgaacgcgcgaaatgtggctctggaggcctatctcattaagcctcatagctatgtgggactgacatgtaccgcattccaaaggcgggagggcggtgtgccagggacgcggccagggagccccggtcagaaccctcctcctgaaccagagccccctgcagatcagcagctccggtttcgttgcactactggaagacctaatgtgtcactgagctccttccatatcaagaattccgttgccctggcatccatccaactgcctccgtcactgttttcatctcttcctgccgcactggcccctcctgtgccaccagactgtacgctacagcttcttgtgtttcgcaatggcagactgtttcactctcatagcaacacttctagacctggggcagctgggcctggcaagagacgtggcgtggccacgccggtaatcttcgccggtacctctgggtgtggcgttggtaacctgaccgaaccagtagcagtgtcactgcggcactgggcagagggcgctgaaccggtggccgcttggtggagccaggaaggacccggagaggccggtgggtggacttcggaaggctgtcagttacgctcatcacagccaaatgttagtgcgctgcattgccagcaccttggaaacgtggcagtactgatggagttgtccgcgttcccacgcgaagtgggtggagccggagcgggactccaccccgtcgtgtacccctgcaccgcgcttcttcttctctgtctgtttgccacgattataacatacattcttaatcactctagtattagggtgagtagaaagggatggcacatgttgttaaatctctgttttcatatcgcaatgaccagtgcggtatttgcaggtgggatcaccctgactaactatcaaatggtttgtcaggcggtgggcattaccttacattattcctcactgtctactctgttgtggatgggggtgaaggctcgggtgctgcataaggagttaacatggagggcaccacctccacaagagggcgatcctgctctgcccacacccagccccatgctgagattctaccttatcgccggtgggatcccgctgatcatttgcggcatcacagccgctgtgaacatacataactatcgcgaccatagcccctattgctggctggtgtggcgaccatctctgggcgctttttatatccccgtggccctgattctgcttattacctggatctactttctgtgcgcagggttgagattgcgtggcccactggctcagaaccctaaagcaggtaatagccgcgcttccttggaagcgggagaggaactgcgtgggtctacaagattacgcggaagtggccctctgctttccgattcaggaagtttgctcgctaccggatccgccagggtaggaacccctggaccaccagaggacggcgatagcctgtatagccccggagtgcagaggggagcaggcgatcacgcccttccagtgcttggccacgtaggcctgagaggaagcggcagcgtccctgccctggctgcgccaggtggagtgcagctcctggttcggggaggcagcttgcgcccagggccactgcggttgcactcacctttgtgccaggcagaggggagagaatcactggtggcacggctcctcccaccttgtttgtcgagagggcctccatgccccgcaccaggtcccgctcggcgtagaagaggcagattcccgggagtgcggggaggccctccactgccccaggtactcccgaagcgccagcagagaccctccgccggttccgggcctctgcaagcccatcagcccgctgcaggacctgagtccggcgtgcgaggagggggaggcggtcgacgaggcagacgcgctggtgctgggggacatccgggaaaacctcggcctccaccccctcagcagagagcccctagagcctccggcgctcaagaacctggccagggtacccctcgcggaggcggactgcgacaggaacctgcgcaaggacctgctaggggaagggggggaggggcaggcgctgccgttcagcgggagcgacagtctgcacagcagccccacagacagcttccgggacagcagccccagcagccaggtagacgtcccgctgcaggcaggcgggcacacgcccacgcagtacggggtcagcgacaccaacgccgagccgctttctag

SEQ ID NO: 225514 - DNA, 4017 bp, Artificial Sequence
  derived and/or modified sequence
atgggcgccggcggcagaagaatgagaggcgcccccgccagactgctgctgcccctgctgccctggctgctgctgctgctggcccccgaggccagaggcgcccccggctgccccctgagcatcagaagctgcaagtgcagcggcgagagacccaagggcctgagcggcggcgtgcccggccccgccagaagaagagtggtgtgcagcggcggcgacctgcccgagccccccgagcccggcctgctgcccaacggcaccgtgaccctgctgctgagcaacaacaagatcaccggcctgagaaacggcagcttcctgggcctgagcctgctggagaagctggacctgagaaacaacatcatcagcaccgtgcagcccggcgccttcctgggcctgggcgagctgaagagactggacctgagcaacaacagaatcggctgcctgaccagcgagaccttccagggcctgcccagactgctgagactgaacatcagcggcaacatcttcagcagcctgcagcccggcgtgttcgacgagctgcccgccctgaaggtggtggacctgggcaccgagttcctgacctgcgactgccacctgagatggctgctgccctgggcccagaacagaagcctgcagctgagcgagcacaccctgtgcgcctaccccagcgccctgcacgcccaggccctgggcagcctgcaggaggcccagctgtgctgcgagggcgccctggagctgcacacccaccacctgatccccagcctgagacaggtggtgttccagggcgacagactgcccttccagtgcagcgccagctacctgggcaacgacaccagaatcagatggtaccacaacagagcccccgtggagggcgacgagcaggccggcatcctgctggccgagagcctgatccacgactgcaccttcatcaccagcgagctgaccctgagccacatcggcgtgtgggccagcggcgagtgggagtgcaccgtgagcatggcccagggcaacgccagcaagaaggtggagatcgtggtgctggagaccagcgccagctactgccccgccgagagagtggccaacaacagaggcgacttcagatggcccagaaccctggccggcatcaccgcctaccagagctgcctgcagtaccccttcaccagcgtgcccctgggcggcggcgcccccggcaccagagccagcagaagatgcgacagagccggcagatgggagcccggcgactacagccactgcctgtacaccaacgacatcaccagagtgctgtacaccttcgtgctgatgcccatcaacgccagcaacgccctgaccctggcccaccagctgagagtgtacaccgccgaggccgccagcttcagcgacatgatggacgtggtgtacgtggcccagatgatccagaagttcctgggctacgtggaccagatcaaggagctggtggaggtgatggtggacatggccagcaacctgatgctggtggacgagcacctgctgtggctggcccagagagaggacaaggcctgcagcagaatcgtgggcgccctggagagaatcggcggcgccgccctgagcccccacgcccagcacatcagcgtgaacgccagaaacgtggccctggaggcctacctgatcaagccccacagctacgtgggcctgacctgcaccgccttccagagaagagagggcggcgtgcccggcaccagacccggcagccccggccagaaccccccccccgagcccgagccccccgccgaccagcagctgagattcagatgcaccaccggcagacccaacgtgagcctgagcagcttccacatcaagaacagcgtggccctggccagcatccagctgccccccagcctgttcagcagcctgcccgccgccctggccccccccgtgccccccgactgcaccctgcagctgctggtgttcagaaacggcagactgttccacagccacagcaacaccagcagacccggcgccgccggccccggcaagagaagaggcgtggccacccccgtgatcttcgccggcaccagcggctgcggcgtgggcaacctgaccgagcccgtggccgtgagcctgagacactgggccgagggcgccgagcccgtggccgcctggtggagccaggagggccccggcgaggccggcggctggaccagcgagggctgccagctgagaagcagccagcccaacgtgagcgccctgcactgccagcacctgggcaacgtggccgtgctgatggagctgagcgccttccccagagaggtgggcggcgccggcgccggcctgcaccccgtggtgtacccctgcaccgccctgctgctgctgtgcctgttcgccaccatcatcacctacatcctgaaccacagcagcatcagagtgagcagaaagggctggcacatgctgctgaacctgtgcttccacatcgccatgaccagcgccgtgttcgccggcggcatcaccctgaccaactaccagatggtgtgccaggccgtgggcatcaccctgcactacagcagcctgagcaccctgctgtggatgggcgtgaaggccagagtgctgcacaaggagctgacctggagagccccccccccccaggagggcgaccccgccctgcccacccccagccccatgctgagattctacctgatcgccggcggcatccccctgatcatctgcggcatcaccgccgccgtgaacatccacaactacagagaccacagcccctactgctggctggtgtggagacccagcctgggcgccttctacatccccgtggccctgatcctgctgatcacctggatctacttcctgtgcgccggcctgagactgagaggccccctggcccagaaccccaaggccggcaacagcagagccagcctggaggccggcgaggagctgagaggcagcaccagactgagaggcagcggccccctgctgagcgacagcggcagcctgctggccaccggcagcgccagagtgggcacccccggcccccccgaggacggcgacagcctgtacagccccggcgtgcagctgggcgccctggtgaccacccacttcctgtacctggccatgtgggcctgcggcgccctggccgtgagccagagatggctgcccagagtggtgtgcagctgcctgtacggcgtggccgccagcgccctgggcctgttcgtgttcacccaccactgcgccagaagaagagacgtgagagccagctggagagcctgctgcccccccgccagccccgccgccccccacgccccccccagagccctgcccgccgccgccgaggacggcagccccgtgttcggcgagggcccccccagcctgaagagcagccccagcggcagcagcggccaccccctggccctgggcccctgcaagctgaccaacctgcagctggcccagagccaggtgtgcgaggccggcgccgccgccggcggcgagggcgagcccgagcccgccggcaccagaggcaacctggcccacagacaccccaacaacgtgcaccacggcagaagagcccacaagagcagagccaagggccacagagccggcgaggcctgcggcaagaacagactgaaggccctgagaggcggcgccgccggcgccctggagctgctgagcagcgagagcggcagcctgcacaacagccccaccgacagctacctgggcagcagcagaaacagccccggcgccggcctgcagctggagggcgagcccatgctgacccccagcgagggcagcgacaccagcgccgcccccctgagcgaggccggcagagccggccagagaagaagcgccagcagagacagcctgaagggcggcggcgccctggagaaggagagccacagaagaagctaccccctgaacgccgccagcctgaacggcgcccccaagggcggcaagtacgacgacgtgaccctgatgggcgccgaggtggccagcggcggctgcatgaagaccggcctgtggaagagcgagaccaccgtgtag

SEQ ID NO: 225515 - DNA, 3771 bp, Artificial Sequence
  derived and/or modified sequence
atgagaggcgcccccgccagactgctgctgcccctgctgccctggctgctgctgctgctggcccccgaggccagaggcgcccccggctgccccctgagcatcagaagctgcaagtgcagcggcgagagacccaagggcctgagcggcggcgtgcccggccccgccagaagaagagtggtgtgcagcggcggcgacctgcccgagccccccgagcccggcctgctgcccaacggcaccgtgaccctgctgctgagcaacaacaagatcaccggcctgagaaacggcagcttcctgggcctgagcctgctggagaagctggacctgagaaacaacatcatcagcaccgtgcagcccggcgccttcctgggcctgggcgagctgaagagactggacctgagcaacaacagaatcggctgcctgaccagcgagaccttccagggcctgcccagactgctgagactgaacatcagcggcaacatcttcagcagcctgcagcccggcgtgttcgacgagctgcccgccctgaaggtggtggacctgggcaccgagttcctgacctgcgactgccacctgagatggctgctgccctgggcccagaacagaagcctgcagctgagcgagcacaccctgtgcgcctaccccagcgccctgcacgcccaggccctgggcagcctgcaggaggcccagctgtgctgcgagggcgccctggagctgcacacccaccacctgatccccagcctgagacaggtggtgttccagggcgacagactgcccttccagtgcagcgccagctacctgggcaacgacaccagaatcagatggtaccacaacagagcccccgtggagggcgacgagcaggccggcatcctgctggccgagagcctgatccacgactgcaccttcatcaccagcgagctgaccctgagccacatcggcgtgtgggccagcggcgagtgggagtgcaccgtgagcatggcccagggcaacgccagcaagaaggtggagatcgtggtgctggagaccagcgccagctactgccccgccgagagagtggccaacaacagaggcgacttcagatggcccagaaccctggccggcatcaccgcctaccagagctgcctgcagtaccccttcaccagcgtgcccctgggcggcggcgcccccggcaccagagccagcagaagatgcgacagagccggcagatgggagcccggcgactacagccactgcctgtacaccaacgacatcaccagagtgctgtacaccttcgtgctgatgcccatcaacgccagcaacgccctgaccctggcccaccagctgagagtgtacaccgccgaggccgccagcttcagcgacatgatggacgtggtgtacgtggcccagatgatccagaagttcctgggctacgtggaccagatcaaggagctggtggaggtgatggtggacatggccagcaacctgatgctggtggacgagcacctgctgtggctggcccagagagaggacaaggcctgcagcagaatcgtgggcgccctggagagaatcggcggcgccgccctgagcccccacgcccagcacatcagcgtgaacgccagaaacgtggccctggaggcctacctgatcaagccccacagctacgtgggcctgacctgcaccgccttccagagaagagagggcggcgtgcccggcaccagacccggcagccccggccagaaccccccccccgagcccgagccccccgccgaccagcagctgagattcagatgcaccaccggcagacccaacgtgagcctgagcagcttccacatcaagaacagcgtggccctggccagcatccagctgccccccagcctgttcagcagcctgcccgccgccctggccccccccgtgccccccgactgcaccctgcagctgctggtgttcagaaacggcagactgttccacagccacagcaacaccagcagacccggcgccgccggccccggcaagagaagaggcgtggccacccccgtgatcttcgccggcaccagcggctgcggcgtgggcaacctgaccgagcccgtggccgtgagcctgagacactgggccgagggcgccgagcccgtggccgcctggtggagccaggagggccccggcgaggccggcggctggaccagcgagggctgccagctgagaagcagccagcccaacgtgagcgccctgcactgccagcacctgggcaacgtggccgtgctgatggagctgagcgccttccccagagaggtgggcggcgccggcgccggcctgcaccccgtggtgtacccctgcaccgccctgctgctgctgtgcctgttcgccaccatcatcacctacatcctgaaccacagcagcatcagagtgagcagaaagggctggcacatgctgctgaacctgtgcttccacatcgccatgaccagcgccgtgttcgccggcggcatcaccctgaccaactaccagatggtgtgccaggccgtgggcatcaccctgcactacagcagcctgagcaccctgctgtggatgggcgtgaaggccagagtgctgcacaaggagctgacctggagagccccccccccccaggagggcgaccccgccctgcccacccccagccccatgctgagattctacctgatcgccggcggcatccccctgatcatctgcggcatcaccgccgccgtgaacatccacaactacagagaccacagcccctactgctggctggtgtggagacccagcctgggcgccttctacatccccgtggccctgatcctgctgatcacctggatctacttcctgtgcgccggcctgagactgagaggccccctggcccagaaccccaaggccggcaacagcagagccagcctggaggccggcgaggagctgagaggcagcaccagactgagaggcagcggccccctgctgagcgacagcggcagcctgctggccaccggcagcgccagagtgggcacccccggcccccccgaggacggcgacagcctgtacagccccggcgtgcagagaggcgccggcgaccacgccctgcccgtgctgggccacgtgggcctgagaggcagcggcagcgtgcccgccctggccgcccccggcggcgtgcagctgctggtgagaggcggcagcctgagacccggccccctgagactgcacagccccctgtgccaggccgagggcagagagagcctggtggccagactgctgcccccctgcctgagcagaggccccccctgccccgcccccggccccgccagaagaagaagaggcagattccccggcgtgagaggcggcccccccctgccccaggtgctgcccaagagacagcagagacccagcgccggcagcggccccctgcaggcccaccagcccgccgccggccccgagagcggcgtgagaggcggcggcggcggcagaagaggcagaagagccggcgccggcggccaccccggcaagcccagacccccccccccccagcagagagcccccagagccagcggcgcccaggagcccggccagggcacccccagaggcggcggcctgagacaggagcccgcccagggccccgccagaggcagaggcggcggcgccggcgccgccgtgcagagagagagacagagcgcccagcagccccacagacagctgcccggccagcagccccagcagcccggcagaagacccgccgccggcagaagagcccacgcccacgccgtgagaggccagagacaccagagaagagccgccttctag

SEQ ID NO: 225516 - protein, 464 aa, Artificial Sequence
  derived and/or modified sequence
MPKKAKPTGSGKEEGPAPCKQMKLEAAGGPSALNFDSPSSLFESLISPIKTETFFKEFWEQKPLLIQRDDPALATYYGSLFKLTDLKSLCSRGMYYGRDVNVCRCVNGKKKVLNKDGKAHFLQLRKDFDQKRATIQFHQPQRFKDELWRIQEKLECYFGSLVGSNVYITPAGSQGLPPHYDDVEVFILQLEGEKHWRLYHPTVPLAREYSVEAEERIGRPVHEFMLKPGDLLYFPRGTIHQADTPAGLAHSTHVTISTYQNNSWGDFLLDTISGLVFDTAKEDVELRTGIPRQLLLVESTTVATRRLSGFLRTLADRLEGTKELLSSDMKKDFIMHRLPPYSAGDGAELSTPGGKLPRLDSVVRLQFKDHIVLTVLPDQDQSDEAQEKMVYIYHSLKNSRETHMMGNEEETEFHGLRFPLSHLDALKQIWNSPAISVKDLKLTTDEEKESLVLSLWTECLIQVV

SEQ ID NO: 225517 - protein, 112 aa, Artificial Sequence
  derived and/or modified sequence
MPKKAKPTGSGKEEGPAPCKQMKLEAAGGPSALNFDSPSSLFESLISPIKTETFFKEFWEQKPLLIQRDDPALATYYGSLFKLTDLKSLCSRGMYYGRDVNVCRCVNGKKKV

SEQ ID NO: 225518 - DNA, 843 bp, Artificial Sequence
  derived and/or modified sequence
atgccaaaaaaggccaagcctactgggtccgggaaagaggaggggcccgccccatgcaaacagatgaaactggaagccgcaggtggtcctagtgccctaaactttgactctccatctagtttattcgaatctttaatcagccctatcaagactgagacctttttcaaggagttctgggaacagaagccactcttgatccagagagatgacccagctctggctacttattacggtagtctcttcaaactgaccgacttgaagtcactgtgcagcaggggaatgtattatggaagagatgtgaacgtatgtcgctgtgtcaacggcaaaaagaaggtgctgaataaagatggtaaggctcatttccttcaactacggaaagactttgaccagaagcgcgccacgatccaattccatcaaccacagagattcaaggacgagctctggcgcatccaggaaaaactggaatgctatttcgggtcactggttgggagtaatgtgtatattaccccggccggcagtcagggtcttcctccacactacgacgatgtggaagtgttcatcctgcagctcgagggggaaaaacattggcggctttaccaccccaccgtgcctctggcacgggaatactcagtggaagccgaggaaagaattgggcggcctgtccatgaattcatgctcaagccaggggatcttctttactttccccgcggcaccatccaccaggccgacacccccgccggcctggcccattctacacacgtcaccatctctacttatcagaataacgacgccggcgccagaatgcgccgatgtgatctgcgagcgatcgccccacagaagtag

SEQ ID NO: 225519 - DNA, 1395 bp, Artificial Sequence
  derived and/or modified sequence
atgcctaaaaaagcaaagcctacaggatctggcaaggaggaaggtccagctccctgtaagcaaatgaagctcgaggccgccgggggtccttcagccttgaactttgacagtcctagctccctgttcgaatccctaatctcccccataaaaactgagacctttttcaaagagttttgggagcagaaacctctgctaatccagagagatgaccctgctctggctacatactacggcagtctctttaagctgacagatcttaaaagtctttgcagtcggggaatgtactacggcagagacgtgaacgtgtgtcgttgcgtaaatgggaaaaagaaagttttgaacaaggacggaaaggcacattttctgcagcttcgcaaagatttcgaccaaaagagggccacaatccagtttcatcagccccagaggttcaaggatgagctctggcggatacaggaaaaactggaatgctattttggctcgcttgtgggctccaacgtctatataacccccgcaggttctcagggcctacctccgcattacgacgacgtcgaagtgtttattctgcaactggagggtgaaaagcactggagattatatcacccgaccgtgcctctggctagagaatacagcgtcgaggcagaagaacgcataggacgacctgtgcacgaattcatgctcaagcccggggacctgctctatttccccaggggcaccatacaccaggcggacacacccgctggcctcgcccactccacccatgttacgatctcaacttaccagaataacagctggggagacttccttctcgacacaatcagcggactcgtgttcgacaccgctaaagaggacgtggaactcaggactggcatcccccggcaacttctcttggtcgagtctactaccgttgcgacacggcgtctcagcggatttctgaggacactggccgacagactagaaggcactaaagagttgctctcaagcgatatgaagaaggacttcattatgcaccggctacccccctattctgccggcgacggcgccgagctcagcacccctggaggtaaacttccccgcctggacagcgtggtccggctccagttcaaggaccacatcgtgctcacagtcctgcccgatcaagatcagagcgatgaggctcaggaaaaaatggtctacatataccatagtctgaaaaactcacgagagactcacatgatgggaaatgaagaggagacagaattccacggacttcggttccctctgagtcacctagacgccctgaagcaaatttggaactctcccgccatatcagtgaaggatttgaaacttacgaccgacgaggagaaggaatccctggtactcagcttgtggacggagtgcctaattcaggtggtgtag

SEQ ID NO: 225520 - DNA, 339 bp, Artificial Sequence
  derived and/or modified sequence
atgcctaagaaggccaaacctactggaagtggcaaggaggagggcccggcaccctgtaagcaaatgaaactggaggcagccggcgggccctccgctttgaacttcgactcccccagcagtctgttcgaatcgctcatcagccccatcaagaccgagaccttctttaaggagttttgggagcagaagccactgttgatccaacgcgatgaccccgctctagctacttattacggatctctgttcaagctgacggacttgaagtccctctgtagccggggcatgtattacggcagagacgtgaacgtctgcaggtgtgtaaacgggaagaagaaagtgtag

SEQ ID NO: 225521 - DNA, 843 bp, Artificial Sequence
  derived and/or modified sequence
atgcccaagaaggccaagcccaccggcagcggcaaggaggagggccctgccccctgcaagcagatgaagctggaggccgccggcggccccagcgccctgaactttgacagccccagcagcctgtttgagagcctcatcagccccatcaagacagagaccttcttcaaggagttctgggagcagaagcccctgctgatccagagagatgatcctgccctggccacctactacggcagcctcttcaagctgacagacctgaagagcctgtgcagccggggcatgtactacggcagagatgtgaatgtgtgccgctgtgtgaatggcaagaagaaggtgctgaacaaggatggcaaggcccacttcctgcagctgaggaaggactttgaccagaagagggccaccatccagttccaccagccccagcgcttcaaggatgagctgtggaggatccaggagaagctggagtgctacttcggcagcctggtgggcagcaatgtgtacatcaccccagctggcagccagggcctgcccccccactatgatgatgtggaggtgttcatcctgcagctggagggggagaagcactggaggctgtaccaccccaccgtgcccctggcccgggagtacagcgtggaggccgaggagagaattggccggcctgtgcatgagttcatgctgaagccaggggacctgctgtacttcccccggggcaccatccaccaggccgacaccccagctggcctggcccacagcacccacgtgaccatcagcacctaccagaacaatgatgctggggccaggatgagaagatgtgacctgcgggccatcgccccccagaagtag

SEQ ID NO: 225522 - DNA, 1395 bp, Artificial Sequence
  derived and/or modified sequence
atgcccaagaaggccaagcccaccggcagcggcaaggaggagggccctgccccctgcaagcagatgaagctggaggccgccggcggccccagcgccctgaactttgacagccccagcagcctgtttgagagcctcatcagccccatcaagacagagaccttcttcaaggagttctgggagcagaagcccctgctgatccagagagatgatcctgccctggccacctactacggcagcctcttcaagctgacagacctgaagagcctgtgcagccggggcatgtactacggcagagatgtgaatgtgtgccgctgtgtgaatggcaagaagaaggtgctgaacaaggatggcaaggcccacttcctgcagctgaggaaggactttgaccagaagagggccaccatccagttccaccagccccagcgcttcaaggatgagctgtggaggatccaggagaagctggagtgctacttcggcagcctggtgggcagcaatgtgtacatcaccccagctggcagccagggcctgcccccccactatgatgatgtggaggtgttcatcctgcagctggagggggagaagcactggaggctgtaccaccccaccgtgcccctggcccgggagtacagcgtggaggccgaggagagaattggccggcctgtgcatgagttcatgctgaagccaggggacctgctgtacttcccccggggcaccatccaccaggccgacaccccagctggcctggcccacagcacccacgtgaccatcagcacctaccagaacaacagctggggagacttcctgctggacaccatcagcggcctggtgtttgacacagccaaggaggatgtggagctgaggacaggcatcccccggcagctgctgctggtggagagcaccaccgtggccacccggcggctgagcggcttcctgcggaccctggccgaccggctggagggcaccaaggagctgctgagcagtgacatgaagaaggacttcatcatgcaccggctgcccccctacagcgctggagatggagctgagctgagcacccctgggggcaagctgccccggctggacagcgtggtgcggctgcagttcaaggaccacatcgtgctgactgtgctgcctgaccaggaccagagtgatgaggcccaggagaagatggtgtacatctaccacagcctgaagaacagccgggagacccacatgatgggaaatgaggaggagacagagttccacggcctgcgcttccccctgagccacctggatgccctgaagcagatctggaacagccctgccatctctgtgaaggacctgaagctgaccacagatgaggagaaggagagcctggtgctgagcctgtggacagagtgcctgatccaggtggtgtag

SEQ ID NO: 225523 - DNA, 339 bp, Artificial Sequence
  derived and/or modified sequence
atgcccaagaaggccaagcccaccggcagcggcaaggaggagggccctgccccctgcaagcagatgaagctggaggccgccggcggccccagcgccctgaactttgacagccccagcagcctgtttgagagcctcatcagccccatcaagacagagaccttcttcaaggagttctgggagcagaagcccctgctgatccagagagatgatcctgccctggccacctactacggcagcctcttcaagctgacagacctgaagagcctgtgcagccggggcatgtactacggcagagatgtgaatgtgtgccgctgtgtgaatggcaagaagaaggtgtag

SEQ ID NO: 225524 - DNA, 1349 bp, Artificial Sequence
  derived and/or modified sequence
gtgagtggggcgctctcgtgggcatcccagcgccggggcaggccgggtagtgcccgatcccgcggggcgcgcgctgctgctttaggcacccgggctcgggtgcgggtctgggagacctgtcggtcggcgagaagcctcggtggccggcgctgtggttgcgggacctgggacgcgctcccaggcgtcccacctccccggagactggggcagggtgggtggggcccggatctaggggtagggtcgcggaagccttggttacagagagtcgcacacgtggcctgctaatggtcgcgacaccggtgacgagcgcacggaaagtttggaggcttagcaaggagggtggtgccggcctccgcccggtggtggcagaactgcctgtgcgagcacggcttccacgtgggctgcgccgccgggcgtcatgtcgggcctaagagacacgctctacagctgtgaaatctgaagttcaggtttgcatttccttactgctttgtcttgaagacagaacgatgccaaagaaagcaaagcctacagggagtgggaaggaagaggggccggctccctgtaagcagatgaagttagaagcagctggggggccttcagctttaaactttgacagtcccagtagtctctttgaaagtttaatctcgcccatcaagacagagacttttttcaaggaattctgggagcagaagccccttctcattcagagagatgaccctgcactggccacatactatgggtccctgttcaagctaacagatctgaagagtctgtgcagccgggggatgtactatggaagagatgtgaatgtctgccggtgtgtcaatgggaagaagaaggttttaaataaagatggcaaagcacactttcttcagctgagaaaagattttgatcagaaaagggcaacgattcagtttcaccaacctcagagatttaaggatgagctttggaggatccaggagaagctggaatgttactttggctccttggttggctcgaatgtgtacataactcccgcaggatctcagggcctgccgccccattatgatgatgtcgaggttttcatcctgcagctggagggagagaaacactggcgcctctaccaccccactgtgcccctggcacgagagtacagcgtggaggccgaggaaaggatcggcaggccggtgcatgagtttatgctgaagccgggtgatttgttgtactttcccagaggaaccattcatcaagcggacactcctgcggggctggcccactctactcacgtgaccatcagcacctaccagaacaatgatgctggagctagaatgagaagatgtgacttgagggccattgctccccagaaatga

SEQ ID NO: 225525 - DNA, 2232 bp, Artificial Sequence
  derived and/or modified sequence
acaccggtgacgagcgcacggaaagtttggaggcttagcaaggagggtggtgccggcctccgcccggtggtggcagaactgcctgtgcgagcacggcttccacgtgggctgcgccgccgggcgtcatgtcgggcctaagagacacgctctacagctgtgaaatctgaagttcaggtttgcatttccttactgctttgtcttgaagacagaacgatgccaaagaaagcaaagcctacagggagtgggaaggaagaggggccggctccctgtaagcagatgaagttagaagcagctggggggccttcagctttaaactttgacagtcccagtagtctctttgaaagtttaatctcgcccatcaagacagagacttttttcaaggaattctgggagcagaagccccttctcattcagagagatgaccctgcactggccacatactatgggtccctgttcaagctaacagatctgaagagtctgtgcagccgggggatgtactatggaagagatgtgaatgtctgccggtgtgtcaatgggaagaagaaggttttaaataaagatggcaaagcacactttcttcagctgagaaaagattttgatcagaaaagggcaacgattcagtttcaccaacctcagagatttaaggatgagctttggaggatccaggagaagctggaatgttactttggctccttggttggctcgaatgtgtacataactcccgcaggatctcagggcctgccgccccattatgatgatgtcgaggttttcatcctgcagctggagggagagaaacactggcgcctctaccaccccactgtgcccctggcacgagagtacagcgtggaggccgaggaaaggatcggcaggccggtgcatgagtttatgctgaagccgggtgatttgttgtactttcccagaggaaccattcatcaagcggacactcctgcggggctggcccactctactcacgtgaccatcagcacctaccagaacaattcatggggagatttccttttggataccatctcggggcttgtatttgatactgcaaaggaagacgtggagttacggaccggcataccccggcagctgctcctggtggaatccacaactgttgctacaagacgattaagtggcttcctgaggacacttgcagaccggctggagggcaccaaagaactgctttcctcagacatgaagaaggattttattatgcacagactccccccttactctgcgggagatggggcagagctgtcaacaccaggtggaaagttaccgaggctggacagtgtagtgagactgcagtttaaagaccacattgtcctcacagtactgccggatcaagatcaatctgatgaagctcaagaaaagatggtgtacatctatcattccttaaagaatagtagagagacacacatgatgggaaatgaggaggaaacagagtttcatggacttcgcttccctttgtcacatttggatgcactgaagcaaatttggaatagtccagctatttctgtcaaggacctgaaacttactacagatgaggaaaaggaaagcctggtattatccctctggacagaatgtttaattcaagtagtctagtgcctttgcagaatcaaatgcctactattttatatgcatatattaaaagaaaagcaaagacctgagccgaggagaggatgaattcaagtttccttacctgcgtatctactaacaaacatgagacctccctgttacaggtggtcagttggccaaatgtactaacgggcacatgaaagaaagaacagcaaattaccaagtgtctcagaaaatgacaaaaccatattttgacaagtttatttaatccagtgtggtagaaaaggcacaattccaatgtatcatttagaattgaatgtcattaacctggctttgttctttggaagaaacaacttctttaaagagcttctttggctctagaaaaatttcaaacaattaaaataagaaaaaattttaaactggttttttataatgaaaatatacatacctttgtgtatagacaagcccatgcccattaaaataaagttatcctgtaacataaattttattaaataatacttccccacagatgagaggcacgcaacacctatggacaaaagggagttacagaggctgcttaaaagatggagaaaagcctgagattgaaggaggaaaaaaacccagtatttaaagtctataaaaaatactcaa

SEQ ID NO: 225526 - DNA, 664 bp, Artificial Sequence
  derived and/or modified sequence
gcttccaattcatttaccagcaaataattccgcaacgattggccgacagctgggttgtccaacaggttactgagaccaggttattcactgttttcaggaaggatagactgggaggaagaggatctgatttcgccactcattagctgtaaatctggtgcctcgggtttcatgtcactgggctcatctttgagcagaggaacctgatttactcagcttcttctgctggtactggtttttgcctcctggacatcaagctttgtaacctcatggtcacgaaaatacattgaggtttgcatttccttactgctttgtcttgaagacagaacgatgccaaagaaagcaaagcctacagggagtgggaaggaagaggggccggctccctgtaagcagatgaagttagaagcagctggggggccttcagctttaaactttgacagtcccagtagtctctttgaaagtttaatctcgcccatcaagacagagacttttttcaaggaattctgggagcagaagccccttctcattcagagagatgaccctgcactggccacatactatgggtccctgttcaagctaacagatctgaagagtctgtgcagccgggggatgtactatggaagagatgtgaatgtctgccggtgtgtcaatgggaagaagaaggttt

SEQ ID NO: 225527 - DNA, 843 bp, Artificial Sequence
  derived and/or modified sequence
atgcccaagaaggccaagcccaccggcagcggcaaggaggagggccccgccccatgcaaacagatgaagctggaagccgcggggggcccatctgccctgaacttcgactccccgtcgtccttgttcgaatcactgatttcccctatcaagaccgagaccttcttcaaagagttctgggagcagaaaccactgttaattcagagagatgaccctgctcttgccacatactacggctccctctttaagctgaccgatctgaaaagtctatgctctagaggcatgtattatggcagggacgtgaatgtttgcaggtgtgtgaacgggaagaagaaagtattgaataaggatggcaaggcccacttcctacagcttcgcaaagattttgatcagaaacgagcaaccatccagtttcatcagccacagcgtttcaaggatgagctatggcgcatacaggaaaaacttgagtgctacttcggctccttggtgggctctaatgtgtacataaccccagctgggtctcagggtctacccccccactacgatgacgtggaggtattcattttgcaattggaaggggagaagcattggagactgtatcatcctacagttcctctggctcgggaatacagcgtggaagcggaggagaggatcgggcggcctgttcacgagttcatgctgaaacctggcgacttactatactttcctagagggacaatccatcaggccgataccccagccgggctcgcccactctacacacgtgaccataagcacttaccagaataacgatgcgggcgcgagaatgagaaggtgtgacctgcgcgctatcgcaccccagaagtag

SEQ ID NO: 225528 - DNA, 1395 bp, Artificial Sequence
  derived and/or modified sequence
atgcccaagaaggccaagcccaccggcagcggcaaggaggagggccctgcaccttgtaaacagatgaagctggaagcagctggcggcccctcagcgcttaatttcgacagccctagctctctattcgagtcgttgatttcaccaattaaaacggaaaccttcttcaaagaattttgggagcagaagcctttgctcatacaaagggacgacccagcgttggctacttactacgggtccctctttaaactgaccgatttgaaatccctgtgctctcgggggatgtattatggaagagacgtgaacgtttgcaggtgtgtgaacgggaagaaaaaagtgctcaacaaagatgggaaagcacatttcttgcagctgagaaaagattttgatcaaaagcgggcaactattcagtttcaccagcctcaacggttcaaagacgagctctggagaatccaggagaaactggaatgttatttcgggagcctggtcggcagcaacgtgtacatcaccccggctggtagccagggactccccccccactatgatgatgttgaagtgtttattctgcagttggagggcgagaaacattggcggctgtaccatccaacagtgcccctggccagagaatactcagtagaggctgaagaacgaatcggcagacccgtgcatgagtttatgcttaagccaggcgatctgctatactttccacgaggcacaattcatcaggctgacactcccgcaggtctagctcatagcacccacgttaccatctcaacgtaccagaataattcctggggcgacttcctgctggatacgataagcggcctggtgtttgacactgctaaggaggacgtggagttaaggactgggatcccgcggcagctgctgttggtggaaagtactacagtagcgactaggaggctcagcggatttcttaggactttagccgatcgactcgaaggaacaaaagaattactttcttccgacatgaaaaaggatttcatcatgcatcgcctgcccccttactcagctggagacggcgcggagttgtctaccccagggggtaaattaccccggctggacagcgtagttagactccagtttaaagaccacatcgtgctcacggtgctcccagaccaggaccaatcagacgaagcgcaggaaaagatggtctatatttaccatagtttaaaaaattcgagggaaactcatatgatgggtaatgaggaggagaccgagtttcacggcctgcggtttcccctgtctcacctggacgctttaaaacagatctggaacagccccgccatctcggtcaaagacctcaaattgacaactgacgaagagaaagaaagtctcgtactgagtctgtggaccgaatgcttgatccaagtagtgtag

SEQ ID NO: 225529 - DNA, 339 bp, Artificial Sequence
  derived and/or modified sequence
atgcccaagaaggccaagcccaccggcagcggcaaggaggagggccctgccccctgcaagcagatgaagctggaagccgctggcgggcctagcgctctcaactttgattctccatcgtctcttttcgagtctcttatctctcccataaaaacagagacattctttaaggaattttgggaacagaaacctctgttgattcagcgggatgacccggccctagcaacatactacggctctctttttaagctaacagatctgaagtcgctttgcagcaggggaatgtactacggccgagacgtgaatgtctgtagatgcgtgaatggaaagaaaaaagtatag

SEQ ID NO: 225530 - DNA, 843 bp, Artificial Sequence
  derived and/or modified sequence
atgccaaagaaggcaaaaccaaccggctccgggaaagaggaggggccagcaccatgtaagcaaatgaagctggaggccgctggtgggccatccgcccttaacttcgatagccccagtagtctttttgaatcactgataagcccaataaaaacagaaacattcttcaaagaattctgggagcaaaagcctctgctgatccagcgcgacgaccctgcccttgcaacttactacggcagtctgttcaagctgactgatctcaaaagcctttgcagcagaggcatgtactacggaagagatgtcaatgtgtgccggtgcgtgaatggaaaaaagaaggtgctaaacaaggatggcaaggctcattttctccaacttcgcaaggatttcgatcagaagagggctacaatccagttccatcaaccccagcggttcaaggacgagctgtggcgaatccaagagaagttggagtgctactttgggagcctcgttggcagcaacgtttatattacacctgccggaagccagggacttcctccccactacgacgatgtcgaagttttcatactccagttggagggggagaaacattggaggctgtaccatcctaccgttcccctcgcaagggagtactccgtcgaagctgaagaaagaatcggccgaccagtgcatgagttcatgctgaagcctggagatctactctacttccccaggggaacaatccaccaggccgataccccagctggattagcccacagcacccacgtgacaattagtacctatcagaacaatgacgccggagccaggatgcgtcggtgcgacctgcgcgcaatcgccccacagaaatag

SEQ ID NO: 225531 - DNA, 1395 bp, Artificial Sequence
  derived and/or modified sequence
atgccaaagaaggccaagccaaccgggtccggcaaggaagaaggccctgccccatgtaagcaaatgaaactggaggcggcagggggtccatctgcactgaactttgatagcccctcctcactgttcgagtctctgatctcccctataaagacagaaaccttcttcaaagaattttgggagcagaaacctctgctcattcagagagatgatccagcactggctacttattacgggtctctatttaagctgactgaccttaaaagcctttgctctcgaggaatgtactatggtagagatgttaacgtgtgccggtgcgtgaacggtaaaaaaaaggtacttaacaaggatggaaaagcacacttcctgcagctgcgaaaggacttcgatcagaagagagctaccattcaatttcatcagccccaacgctttaaagacgaactgtggcgaatccaggaaaagctcgagtgttatttcggttctctggtggggagcaacgtctatatcacgcccgctggtagccagggactgccgcctcactacgacgatgtagaggtctttatcctgcagctggagggagaaaaacattggagactttaccacccaaccgtacctcttgccagggagtattccgtagaggccgaggagcgtattggtagacctgtgcatgaattcatgctcaaacctggtgatctgctgtattttccccgtgggaccattcatcaggcggatacgcccgcaggactggcgcactcaacacatgtaacaatttcgacataccagaacaactcatggggagacttcctcctcgacaccattagtgggctggtgtttgacacagctaaagaagatgtggagcttagaacaggcatccccagacagctgcttctggtggaaagtaccactgtggctacccgaaggcttagcgggtttctgcgaacactcgcagacaggttggaaggcacaaaggaactactgtctagcgatatgaagaaagattttattatgcatcgattacctccgtatagtgccggagatggggctgagctgtctacccccggaggaaaacttccaaggttagacagtgtggtacgcctacaattcaaagaccatatcgtgttgacagtactgccggatcaagaccagtcagatgaggctcaagaaaaaatggtgtacatctatcacagcctaaagaacagtcgtgaaacgcacatgatgggaaatgaagaagagacggagtttcacggcctgagattcccactgagtcatctggatgctctgaagcagatttggaattcgcctgccatttcggtcaaggatcttaagctaacaactgacgaggagaaagaaagtctggtgctgtctttatggaccgagtgcctcatacaggttgtatag

SEQ ID NO: 225532 - DNA, 339 bp, Artificial Sequence
  derived and/or modified sequence
atgcctaaaaaggctaaacctactggaagcgggaaggaagaggggccagccccttgtaagcagatgaagctggaggcagcagggggtccatcagccctgaactttgactccccttcgtccctgttcgaatccctaatctcccccatcaagacagagactttctttaaagaattttgggagcaaaagcccctgttgattcaacgggatgaccctgccttggctacttactatggaagtctttttaaactgaccgacctgaagagcctttgcagcaggggcatgtattacggccgagatgtgaacgtttgcagatgtgtcaacggaaaaaagaaggtgtag

SEQ ID NO: 225533 - DNA, 843 bp, Artificial Sequence
  derived and/or modified sequence
atgcccaagaaggccaagcccaccggcagcggcaaggaggagggccccgccccctgcaagcagatgaagctggaggccgccggcggccccagcgccctgaacttcgacagccccagcagcctgttcgagagcctgatcagccccatcaagaccgagaccttcttcaaggagttctgggagcagaagcccctgctgatccagagagacgaccccgccctggccacctactacggcagcctgttcaagctgaccgacctgaagagcctgtgcagcagaggcatgtactacggcagagacgtgaacgtgtgcagatgcgtgaacggcaagaagaaggtgctgaacaaggacggcaaggcccacttcctgcagctgagaaaggacttcgaccagaagagagccaccatccagttccaccagccccagagattcaaggacgagctgtggagaatccaggagaagctggagtgctacttcggcagcctggtgggcagcaacgtgtacatcacccccgccggcagccagggcctgcccccccactacgacgacgtggaggtgttcatcctgcagctggagggcgagaagcactggagactgtaccaccccaccgtgcccctggccagagagtacagcgtggaggccgaggagagaatcggcagacccgtgcacgagttcatgctgaagcccggcgacctgctgtacttccccagaggcaccatccaccaggccgacacccccgccggcctggcccacagcacccacgtgaccatcagcacctaccagaacaacgacgccggcgccagaatgagaagatgcgacctgagagccatcgccccccagaagtag

SEQ ID NO: 225534 - DNA, 1395 bp, Artificial Sequence
  derived and/or modified sequence
atgcccaagaaggccaagcccaccggcagcggcaaggaggagggccccgccccctgcaagcagatgaagctggaggccgccggcggccccagcgccctgaacttcgacagccccagcagcctgttcgagagcctgatcagccccatcaagaccgagaccttcttcaaggagttctgggagcagaagcccctgctgatccagagagacgaccccgccctggccacctactacggcagcctgttcaagctgaccgacctgaagagcctgtgcagcagaggcatgtactacggcagagacgtgaacgtgtgcagatgcgtgaacggcaagaagaaggtgctgaacaaggacggcaaggcccacttcctgcagctgagaaaggacttcgaccagaagagagccaccatccagttccaccagccccagagattcaaggacgagctgtggagaatccaggagaagctggagtgctacttcggcagcctggtgggcagcaacgtgtacatcacccccgccggcagccagggcctgcccccccactacgacgacgtggaggtgttcatcctgcagctggagggcgagaagcactggagactgtaccaccccaccgtgcccctggccagagagtacagcgtggaggccgaggagagaatcggcagacccgtgcacgagttcatgctgaagcccggcgacctgctgtacttccccagaggcaccatccaccaggccgacacccccgccggcctggcccacagcacccacgtgaccatcagcacctaccagaacaacagctggggcgacttcctgctggacaccatcagcggcctggtgttcgacaccgccaaggaggacgtggagctgagaaccggcatccccagacagctgctgctggtggagagcaccaccgtggccaccagaagactgagcggcttcctgagaaccctggccgacagactggagggcaccaaggagctgctgagcagcgacatgaagaaggacttcatcatgcacagactgcccccctacagcgccggcgacggcgccgagctgagcacccccggcggcaagctgcccagactggacagcgtggtgagactgcagttcaaggaccacatcgtgctgaccgtgctgcccgaccaggaccagagcgacgaggcccaggagaagatggtgtacatctaccacagcctgaagaacagcagagagacccacatgatgggcaacgaggaggagaccgagttccacggcctgagattccccctgagccacctggacgccctgaagcagatctggaacagccccgccatcagcgtgaaggacctgaagctgaccaccgacgaggagaaggagagcctggtgctgagcctgtggaccgagtgcctgatccaggtggtgtag

SEQ ID NO: 225535 - DNA, 339 bp, Artificial Sequence
  derived and/or modified sequence
atgcccaagaaggccaagcccaccggcagcggcaaggaggagggccccgccccctgcaagcagatgaagctggaggccgccggcggccccagcgccctgaacttcgacagccccagcagcctgttcgagagcctgatcagccccatcaagaccgagaccttcttcaaggagttctgggagcagaagcccctgctgatccagagagacgaccccgccctggccacctactacggcagcctgttcaagctgaccgacctgaagagcctgtgcagcagaggcatgtactacggcagagacgtgaacgtgtgcagatgcgtgaacggcaagaagaaggtgtag

SEQ ID NO: 225536 - protein, 366 aa, Artificial Sequence
  derived and/or modified sequence
MALPPGPAALRHTLLLLPALLSSGWGELEPQIDGQTWAERALRENERHAFTCRVAGGPGTPRLAWYLDGQLQEASTSRLLSVGGEAFSGGTSTFTVTAHRAQHELNCSLQDPRSGRSANASVILNVQFKPEIAQVGAKYQEAQGPGLLVVLFALVRANPPANVTWIDQDGPVTVNTSDFLVLDAQNYPWLTNHTVQLQLRSLAHNLSVVATNDVGVTSASLPAPGLLATRVEVPLLGIVVAAGLALGTLVGFSTLVACLVCRKEKKTKGPSRHPSLISSDSNNLKLNNVRLPRENMSLPSNLQLNDLTPDSRAVKPADRQMAQNNSRPELLDPEPGGLLTSQGFIRLPVLGYIYRVSSVSSDEIWL

SEQ ID NO: 225537 - DNA, 1101 bp, Artificial Sequence
  derived and/or modified sequence
atggccctgccccccggccccgccgccctgagacacaccctgctgctgctgcccgccctgctgagcagcggctggggcgagctggagccccagatcgacggccagacctgggccgagagagccctgagagagaacgagagacacgccttcacctgcagagtggccggcggccccggcacccccagactggcctggtacctggacggccagctgcaggaggccagcaccagcagactgctgagcgtgggcggcgaggccttcagcggcggcaccagcaccttcaccgtgaccgcccacagagcccagcacgagctgaactgcagcctgcaggaccccagaagcggcagaagcgccaacgccagcgtgatcctgaacgtgcagttcaagcccgagatcgcccaggtgggcgccaagtaccaggaggcccagggccccggcctgctggtggtgctgttcgccctggtgagagccaacccccccgccaacgtgacctggatcgaccaggacggccccgtgaccgtgaacaccagcgacttcctggtgctggacgcccagaactacccctggctgaccaaccacaccgtgcagctgcagctgagaagcctggcccacaacctgagcgtggtggccaccaacgacgtgggcgtgaccagcgccagcctgcccgcccccggcctgctggccaccagagtggaggtgcccctgctgggcatcgtggtggccgccggcctggccctgggcaccctggtgggcttcagcaccctggtggcctgcctggtgtgcagaaaggagaagaagaccaagggccccagcagacaccccagcctgatcagcagcgacagcaacaacctgaagctgaacaacgtgagactgcccagagagaacatgagcctgcccagcaacctgcagctgaacgacctgacccccgacagcagagccgtgaagcccgccgacagacagatggcccagaacaacagcagacccgagctgctggaccccgagcccggcggcctgctgaccagccagggcttcatcagactgcccgtgctgggctacatctacagagtgagcagcgtgagcagcgacgagatctggctgtag

SEQ ID NO: 225538 - DNA, 1101 bp, Artificial Sequence
  derived and/or modified sequence
atggctttgccgccaggacccgccgctctgcgccatacactgctactgctgcccgctcttctgtctagcgggtggggtgaactggaaccccagattgatggtcaaacatgggccgaacgcgccttgcgcgaaaacgagcgacatgccttcacgtgtcgggtagccggaggccctggaacaccacgtctggcctggtacctcgacggacagctgcaggaggcgtcaacttctaggctgctatcggtgggcggggaggcctttagcgggggaacttcaacctttactgtgacagcccacagagcacaacatgaactcaattgcagcttacaggaccctagatcaggcaggagcgcgaacgccagtgtaatactcaatgtccagtttaagccagaaatagcccaagttggggctaaataccaggaagcacagggtcctggtcttcttgtcgtgcttttcgccctagttcgggctaatccccctgcaaacgtgacttggattgatcaggacgggcctgtcaccgtgaacacctcagacttcctggttctcgatgctcagaactatccatggttaacaaaccatactgtgcagttgcagcttcgcagtttagctcataacctctctgtcgtagccaccaatgatgtgggcgttacaagtgcatccttgccagctccgggcttgctggctaccagagtggaggtgccactcctaggcattgtggtggccgccggccttgcactggggacgctagtgggtttttccacactggtggcgtgtcttgtatgtaggaaagagaagaaaactaagggtccaagtagacatccgtctctgatttcctccgacagcaataatctcaagctgaataatgtgcgcctgcctagagaaaatatgtccctaccttctaaccttcaactgaacgacctgactccagactcacgtgccgtgaagcccgcggatcggcagatggcccagaacaactctcgaccagagctgctggaccctgaacctggcgggctacttacatcccaggggtttattcgtctgcctgttctcggatacatataccgtgtgagttctgtctctagtgacgagatttggttgtag

SEQ ID NO: 225539 - DNA, 1101 bp, Artificial Sequence
  derived and/or modified sequence
atggccctgcccccaggccctgctgccctgcggcacaccctgctgctgctgcctgccctgctgagcagcggctggggcgagctggagccccagattgatggccagacctgggccgagcgggccctgcgggagaatgaaagacatgccttcacctgccgggtggccggcggccctggcaccccccggctggcctggtacctggatggccagctgcaggaggccagcaccagccggctgctgtctgtgggcggggaggccttcagcggcggcaccagcaccttcaccgtgacagcccaccgggcccagcacgagctgaactgcagcctgcaggaccccaggagcggccgcagcgccaatgccagcgtcatcctgaatgtgcagttcaagccagagatcgcccaggtgggcgccaagtaccaggaggcccagggccctggcctgctggtggtgctgtttgccctggtgcgggccaaccccccagccaacgtgacctggattgaccaggacggccctgtgacagtgaacaccagtgacttcctggtgctggatgcccagaactacccctggctgaccaaccacacagtgcagctgcagctgcggagcctggcccacaacctgtctgtggtggccaccaatgatgtgggcgtgaccagcgccagcctgcctgcccctggcctgctggccaccagggtggaggtgcccctgctgggcatcgtggtggccgccggcctggccctgggcaccctggtgggcttcagcaccctggtggcctgcctggtgtgcaggaaggagaagaagaccaagggccccagccgccaccccagcctcatcagcagtgacagcaacaacctgaagctgaacaacgtgcggctgccccgggagaacatgagcctgcccagcaacctgcagctgaatgacctgaccccagacagcagagctgtgaagccagctgaccggcagatggcccagaacaacagcaggcctgagctgctggaccctgagcccggcggcctgctgaccagccagggcttcatccggctgcctgtgctgggctacatctacagagtgtcctctgtgtccagtgatgagatctggctgtag

SEQ ID NO: 225540 - DNA, 1101 bp, Artificial Sequence
  derived and/or modified sequence
atggccctgccccccggccccgccgccctgcggcacaccctgctgctcctaccggctcttctaagcagcgggtggggggaactcgaacctcagatcgatggacagacctgggccgagagggcactcagagagaacgagaggcacgccttcacctgccgtgtggcaggcggccccggtacaccccgcctagcctggtatttggatggccagcttcaggaggcctcaacttctaggctgctctcagtcgggggggaagctttcagcggagggacctctactttcacagtaactgcacatcgcgctcagcacgaactgaactgctcactccaggatccaaggtcggggcgctctgcaaatgcttctgttatattgaacgtacagttcaaacctgagattgctcaggttggggctaagtaccaagaagcccagggcccaggactcctggtggtgctgtttgcgttggtcagagctaacccccccgccaacgtcacttggattgaccaagatggacccgtgaccgtgaatacaagcgatttcctcgtgctggacgcacagaattacccatggttgaccaaccatactgtgcagctccagctgagatcattggcccataacttatccgtagtcgcgactaacgatgtgggcgttaccagtgcgagtctgcccgctcctggcttgttggccacccgcgttgaagtgcccctgctcggcatagtcgtggctgctgggctggcactgggtacacttgtaggattctcaaccctcgtagcatgccttgtatgccggaaggagaagaaaaccaaaggccccagtcgccacccttcactgatctcctctgactccaataatctgaaactgaacaacgtccgactgccccgtgagaatatgtctctgcctagcaacttacagttgaatgatctgactcccgatagcagggcagtcaagcccgccgacagacaaatggctcagaacaactctcgaccagagctgctcgatcccgaaccaggcggcctgttaacaagtcaagggttcatcaggctcccggtgctgggctacatctatcgagtgtcaagcgtgtcatccgatgaaatctggctctag

SEQ ID NO: 225541 - DNA, 1101 bp, Artificial Sequence
  derived and/or modified sequence
atggcactgcctcccggtccagcagcccttcgccatacactcttgctgcttcctgcgctcctttcgtcaggatggggggagttagagccccaaattgatgggcagacatgggccgagagagcactgagagagaatgaacggcatgctttcacctgtcgggtggcgggtggtcccggtacaccgcgattggcctggtatctcgacggccagctgcaggaagcttccacttccaggctgctctctgtcgggggagaggcctttagtggcggaactagtaccttcaccgtgacagcccatcgcgcacaacacgagctcaactgttctctccaggacccaagatccggcagaagcgccaacgccagcgtcatcctgaacgtgcaattcaagcctgaaatcgcccaggtcggagcaaaatatcaggaagcacaaggccctggactcctggtcgtactgttcgcactagtccgcgctaacccacccgctaacgttacctggattgaccaggatggccctgttacagtgaatacgtccgactttctggttctggacgcacagaattacccatggctcactaaccacactgtacagctgcagctccgaagcctcgctcataatctgagcgtggtcgcaacaaatgacgtgggggtgacctccgccagcctcccggcacccggattgctggccacgcgagtggaagtcccacttcttggaattgtcgtggctgctggcctggccctgggcacactggttgggttcagcacactcgtggcctgcttggtatgtaggaaagagaagaagacaaagggccctagccgccacccaagcctgattagctccgactctaataatctgaaattgaataatgttcgtctgcctagggagaatatgagtctcccctccaacctccaacttaacgatctaacacccgactcccgtgcagtcaaacctgcagatcgccaaatggcccaaaacaattcacgtcctgaactgttggatcctgaaccaggcggtctgttgacatctcaaggattcattcgactgcctgtactaggctatatctaccgcgtatcttctgtaagttcagacgagatttggctttag

SEQ ID NO: 225542 - DNA, 2409 bp, Artificial Sequence
  derived and/or modified sequence
ccggcggcgctcggggagggagccagcagcctagggcctaggcccgggccaccatggcgctgcctccaggcccagccgccctccggcacacactgctgctcctgccagcccttctgagctcaggttggggggagttggagccacaaatagatggtcagacctgggctgagcgggcacttcgggagaatgaacgccacgccttcacctgccgggtggcaggggggcctggcacccccagattggcctggtatctggatggacagctgcaggaggccagcacctcaagactgctgagcgtgggaggggaggccttctctggaggcaccagcaccttcactgtcactgcccatcgggcccagcatgagctcaactgctctctgcaggaccccagaagtggccgatcagccaacgcctctgtcatccttaatgtgcaattcaagccagagattgcccaagtcggcgccaagtaccaggaagctcagggcccaggcctcctggttgtcctgtttgccctggtgcgtgccaacccgccggccaatgtcacctggatcgaccaggatgggccagtgactgtcaacacctctgacttcctggtgctggatgcgcagaactacccctggctcaccaaccacacggtgcagctgcagctccgcagcctggcacacaacctctcggtggtggccaccaatgacgtgggtgtcaccagtgcgtcgcttccagccccagggcttctggctacccgggtggaagtgccactgctgggcattgttgtggctgctgggcttgcactgggcaccctcgtggggttcagcaccttggtggcctgcctggtctgcagaaaagagaagaaaaccaaaggcccctcccggcacccatctctgatatcaagtgactccaacaacctaaaactcaacaacgtgcgcctgccacgggagaacatgtccctcccgtccaaccttcagctcaatgacctcactccagattccagagcagtgaaaccagcagaccggcagatggctcagaacaacagccggccagagcttctggacccggagcccggcggcctcctcaccagccaaggtttcatccgcctcccagtgctgggctatatctatcgagtgtccagcgtgagcagtgatgagatctggctctgagccgagggcgagacaggagtattctcttggcctctggacaccctcccgttcctccaaggcatcctctacctagctaggtcaccaacgtgaagaagttatgccactgccacttttgcttgccctcctggctggggtgccctccatgtcatgcacgtgatgcatttcactgggctgtaacccgcaggggcacaggtatctttggcaaggctaccagttggacgtaagcccctcatgctgactcagggtgggccctgcatgtgatgactgggcccttccagagggagctctttggccaggggtgttcagatgtcatccagcatccaagtgtggcatggcctgctgtataccccaccccagtactccacagcaccttgtacagtaggcatgggggcgtgcctgtgtgggggacagggagggccctgcatggattttcctccttcctatgctatgtagccttgttccctcaggtaaaatttaggaccctgctagctgtgcagaacccaattgccctttgcacagaaaccaacccctgacccagcggtaccggccaagcacaaacgtcctttttgctgcacacgtctctgcccttcacttcttctcttctgtccccacctcctcttgggaattctaggttacacgttggaccttctctactacttcactgggcactagacttttctattggcctgtgccatcgcccagtattagcacaagttagggaggaagaggcaggcgatgagtctagtagcacccaggacggcttgtagctatgcatcattttcctacggcgttagcactttaagcacatcccctaggggagggggtgagtgaggggcccagagccctctttgtggcttccccacgtttggccttctgggattcactgtgagtgtcctgagctctcggggttgatggtttttctctcagcatgtctcctccaccacgggaccccagccctgaccaacccatggttgcctcatcagcaggaaggtgcccttcctggaggatggtcgccacaggcacataattcaacagtgtggaagctttaggggaacatggagaaagaaggagaccacataccccaaagtgacctaagaacactttaaaaagcaacatgtaaatgattggaaattaatatagtacagaatatatttttcccttgttgagatcttcttttgtaatgtttttcatgttactgcctagggcggtgctgagcacacagcaagtttaataaacttgactgaattcatttaca

SEQ ID NO: 225543 - protein, 301 aa, Artificial Sequence
  derived and/or modified sequence
MFSHLPFDCVLLLLLLLLTRSSEVEYRAEVGQNAYLPCFYTPAAPGNLVPVCWGKGACPVFECGNVVLRTDERDVNYWTSRYWLNGDFRKGDVSLTIENVTLADSGIYCCRIQIPGIMNDEKFNLKLVIKPAKVTPAPTRQRDFTAAFPRMLTTRGHGPAETQTLGSLPDINLTQISTLANELRDSRLANDLRDSGATIRIGIYIGAGICAGLALALIFGALIFKWYSHSKEKIQNLSLISLANLPPSGLANAVAEGIRSEENIYTIEENVYEVEEPNEYYCYVSSRQQPSQPLGCRFAMP

SEQ ID NO: 225544 - DNA, 906 bp, Artificial Sequence
  derived and/or modified sequence
atgttcagccacctgcccttcgactgcgtgctgctgctgctgctgctgctgctgaccagaagcagcgaggtggagtacagagccgaggtgggccagaacgcctacctgccctgcttctacacccccgccgcccccggcaacctggtgcccgtgtgctggggcaagggcgcctgccccgtgttcgagtgcggcaacgtggtgctgagaaccgacgagagagacgtgaactactggaccagcagatactggctgaacggcgacttcagaaagggcgacgtgagcctgaccatcgagaacgtgaccctggccgacagcggcatctactgctgcagaatccagatccccggcatcatgaacgacgagaagttcaacctgaagctggtgatcaagcccgccaaggtgacccccgcccccaccagacagagagacttcaccgccgccttccccagaatgctgaccaccagaggccacggccccgccgagacccagaccctgggcagcctgcccgacatcaacctgacccagatcagcaccctggccaacgagctgagagacagcagactggccaacgacctgagagacagcggcgccaccatcagaatcggcatctacatcggcgccggcatctgcgccggcctggccctggccctgatcttcggcgccctgatcttcaagtggtacagccacagcaaggagaagatccagaacctgagcctgatcagcctggccaacctgccccccagcggcctggccaacgccgtggccgagggcatcagaagcgaggagaacatctacaccatcgaggagaacgtgtacgaggtggaggagcccaacgagtactactgctacgtgagcagcagacagcagcccagccagcccctgggctgcagattcgccatgccctag

SEQ ID NO: 225545 - DNA, 906 bp, Artificial Sequence
  derived and/or modified sequence
atgttcagtcatctaccattcgactgcgtgctacttctgctattgcttctgttaacaagaagcagcgaagttgagtatagggcagaagtggggcagaacgcttaccttccttgcttttacacaccagccgctcctggcaacttggtacctgtatgttgggggaaaggcgcctgtcctgtgtttgaatgcgggaatgtggtgttaaggaccgacgaacgagacgtgaactattggacatccagatattggttaaatggcgacttccgcaaaggggatgttagcctgaccatcgaaaacgtgactctagctgactctggtatctattgttgtcggattcaaatccctgggataatgaatgacgagaaattcaacctaaagctcgtgatcaaaccagcgaaggttaccccagcacctacacgacagcgcgactttactgctgccttcccccggatgctgaccactcggggacacgggccggccgagacccagaccttggggtccttacctgacatcaaccttacgcagattagtaccctggcaaatgagctccgcgattcccgtctggctaatgatctcagggattctggagctactattcgtattgggatttacattggcgctggcatctgtgctggcctcgccctagccttgatctttggcgccctgatcttcaagtggtatagccacagcaaagagaagattcagaatttgtcactgataagtctcgccaatcttcccccttctgggcttgccaatgccgtggccgaaggcatccggtccgaggaaaatatctatacaattgaggagaatgtatatgaggtcgaggagcctaacgaatattattgctatgtaagctctcgtcagcagccttcccagcccctgggctgccggttcgccatgccctag

SEQ ID NO: 225546 - DNA, 2907 bp, Artificial Sequence
  derived and/or modified sequence
agaatattagaacagagagccatgcatgtattatctaatacaattttctcattttataaattatataaatgaggaaactgagactcagcaaggttataggatacaacctaatctgtgttagaagaaggatgagagtgaggcttatgctgggagttgctatggtctgtaaatgtgaggataaggaacatgccattcactgttgtgttccacttcctagtccagtgcctggtgcaaagtaggggcttcataaactttggtcacaggcctgatgaagggactgatttgagtgaatgaatccatggatgatgcatctgtactttgtgttccccgctagtcagatggactcggacatgctccatttcaggtgtatctcatctgagacattattagagggttctctttatgtgccatgactgagtagcgttttcttccactgaagtattgcttcctctttgttgatatcacaggacagacatcagaacacttacaggatgtgtgtagtgtggcatgacagagaactttggtttcctttaatgtgactgtagacctggcagtgttactataagaatcactggcaatcagacacccgggtgtgctgagctagcactcagtgggggcggctactgctcatgtgattgtggagtagacagttggaagaagtacccagtccatttggagagttaaaactgtgcctaacagaggtgtcctctgacttttcttctgcaagctccatgttttcacatcttccctttgactgtgtcctgctgctgctgctgctactacttacaaggtcctcagaagtggaatacagagcggaggtcggtcagaatgcctatctgccctgcttctacaccccagccgccccagggaacctcgtgcccgtctgctggggcaaaggagcctgtcctgtgtttgaatgtggcaacgtggtgctcaggactgatgaaagggatgtgaattattggacatccagatactggctaaatggggatttccgcaaaggagatgtgtccctgaccatagagaatgtgactctagcagacagtgggatctactgctgccggatccaaatcccaggcataatgaatgatgaaaaatttaacctgaagttggtcatcaaaccagccaaggtcacccctgcaccgactcggcagagagacttcactgcagcctttccaaggatgcttaccaccaggggacatggcccagcagagacacagacactggggagcctccctgatataaatctaacacaaatatccacattggccaatgagttacgggactctagattggccaatgacttacgggactctggagcaaccatcagaataggcatctacatcggagcagggatctgtgctgggctggctctggctcttatcttcggcgctttaattttcaaatggtattctcatagcaaagagaagatacagaatttaagcctcatctctttggccaacctccctccctcaggattggcaaatgcagtagcagagggaattcgctcagaagaaaacatctataccattgaagagaacgtatatgaagtggaggagcccaatgagtattattgctatgtcagcagcaggcagcaaccctcacaacctttgggttgtcgctttgcaatgccatagatccaaccaccttatttttgagcttggtgttttgtctttttcagaaactatgagctgtgtcacctgactggttttggaggttctgtccactgctatggagcagagttttcccattttcagaagataatgactcacatgggaattgaactgggacctgcactgaacttaaacaggcatgtcattgcctctgtatttaagccaacagagttacccaacccagagactgttaatcatggatgttagagctcaaacgggcttttatatacactaggaattcttgacgtggggtctctggagctccaggaaattcgggcacatcatatgtccatgaaacttcagataaactagggaaaactgggtgctgaggtgaaagcataacttttttggcacagaaagtctaaaggggccactgattttcaaagagatctgtgatccctttttgttttttgtttttgagatggagtcttgctctgttgcccaggctggagtgcaatggcacaatctcggctcactgcaagctccgcctcctgggttcaagcgattctcctgcctcagcctcctgagtggctgggattacaggcatgcaccaccatgcccagctaatttgttgtatttttagtagagacagggtttcaccatgttggccagtgtggtctcaaactcctgacctcatgatttgcctgcctcggcctcccaaagcactgggattacaggcgtgagccaccacatccagccagtgatccttaaaagattaagagatgactggaccaggtctaccttgatcttgaagattcccttggaatgttgagatttaggcttatttgagcactgcctgcccaactgtcagtgccagtgcatagcccttcttttgtctcccttatgaagactgccctgcagggctgagatgtggcaggagctcccagggaaaaacgaagtgcatttgattggtgtgtattggccaagttttgcttgttgtgtgcttgaaagaaaatatctctgaccaacttctgtattcgtggaccaaactgaagctatatttttcacagaagaagaagcagtgacggggacacaaattctgttgcctggtggaaagaaggcaaaggccttcagcaatctatattaccagcgctggatcctttgacagagagtggtccctaaacttaaatttcaagacggtataggcttgatctgtcttgcttattgttgccccctgcgcctagcacaattctgacacacaattggaacttactaaaaatttttttttactgtt

SEQ ID NO: 225547 - DNA, 906 bp, Artificial Sequence
  derived and/or modified sequence
atgttcagccacctgccctttgactgtgtgctgctgctgctgctgctgctgctgaccaggagcagcgaggtggagtacagagctgaggtgggccagaatgcctacctgccctgcttctacaccccagctgcccctggcaacctggtgcctgtgtgctggggcaaaggagcctgccctgtgtttgaatgtggaaatgtggtgctgaggacagatgaaagagatgtgaactactggaccagccgctactggctgaatggagacttcagaaaaggagatgtgtccctgaccattgaaaatgtgaccctggccgacagcggcatctactgctgccgcatccagatccctggcatcatgaatgatgagaagttcaacctgaagctggtgatcaagccagccaaggtgaccccagcccccacccggcagagggacttcaccgctgccttccccaggatgctgaccacccggggccacggccctgctgagacccagaccctgggcagcctgcctgacatcaacctgacccagatcagcaccctggccaatgagctgcgggacagccggctggccaatgacctgcgggacagcggggccaccatcagaattggcatctacatcggggccggcatctgtgccggcctggccctggccctgatctttggagccctgatcttcaagtggtacagccacagcaaggagaagatccagaacctgagcctcatcagcctggccaacctgccccccagcggcctggccaatgctgtggccgagggcatccgctctgaggagaacatctacaccattgaagaaaatgtgtatgaggtggaggagcccaatgagtactactgctacgtgagcagccggcagcagcccagccagcccctgggctgccgctttgccatgccctag

SEQ ID NO: 225548 - DNA, 906 bp, Artificial Sequence
  derived and/or modified sequence
atgttcagccacctgcccttcgactgcgtgctgctgctgctgctgctgcttctcaccagatcttccgaggttgagtatcgggcagaagtgggacagaacgcgtacctgccttgcttctacacccctgctgccccaggcaacttggttccagtctgttggggcaagggagcttgtcctgtgtttgaatgtggaaacgtggtgttgcgcaccgatgagcgcgatgtcaactattggacaagtcgatactggttgaacggagacttccggaagggcgatgtatctcttacaatcgagaacgttaccctggcggattcagggatctactgttgtagaattcagattcccggaattatgaatgatgaaaagttcaaccttaagttggtgatcaagccggcaaaggtgacacctgctcctacgcgccagcgggatttcacagcagccttccctaggatgctcacgaccagaggccacggacctgctgaaacccagacccttggctccctgccagacatcaacctgacccagatttcaactcttgctaatgaattgagggactctcggctggccaatgatttgagagactctggggcaacaataagaatcgggatttacatcggggccggcatatgtgcaggattagcacttgccttgatcttcggtgccctcatatttaaatggtacagtcacagcaaggaaaaaatccagaacctcagccttatctctttagccaacctgccgccaagcggccttgccaacgctgtcgccgaaggcatccggtcagaagagaacatatatacaattgaagagaatgtctacgaagtggaggagcctaacgaatattactgttacgtgagtagtagacagcagccaagccaaccgctcggctgtcgctttgcaatgccttag

SEQ ID NO: 225549 - DNA, 906 bp, Artificial Sequence
  derived and/or modified sequence
atgttcagtcacctccctttcgactgcgtgctcctgctcttgctgcttctgctcacccgctcttctgaggtcgagtaccgcgctgaagtgggacagaatgcttatctgccctgcttctatacccctgccgcacctggtaatctggttcctgtgtgttggggaaaaggggcatgcccagttttcgagtgcggtaatgtcgtgcttcgcacggatgaacgggatgtaaattactggacgagcagatactggctgaatggggattttcggaaaggagacgtcagcctcacaattgagaatgtgacattggctgattctggcatatattgctgccggattcagatccctggaattatgaacgatgagaaattcaacctgaaattggtcatcaaaccagccaaggtgactcctgcacctacccggcagcgggacttcacggccgcattcccacgtatgctcaccactcgcggacacggtcccgcagagacccagaccttgggatccctgcccgatatcaacctgacccagatatctaccctcgctaacgagctgagagactcgcgtctggccaatgacctccgggattctggtgccactatcagaatcggcatttacataggcgctggcatttgcgccggattggccttggcactgatttttggggcactgatttttaagtggtactcacactccaaagaaaagatccagaatctgtctctgatctctttggctaaccttccacctagcgggctcgcaaacgcagtggcagaagggattcggagtgaggaaaatatctacaccatcgaagagaacgtctacgaagtggaggagcctaatgaatactattgctatgtgagctccaggcagcaaccgagccaacccctgggatgccgtttcgctatgccttag

SEQ ID NO: 225550 - protein, 237 aa, Artificial Sequence
  derived and/or modified sequence
MDKVCAVFGGSRGIGRAVAQLMARKGYRLAVIARNLEGAKAAAGDLGGDHLAFSCDVAKEHDVQNTFEELEKHLGRVNFLVNAAGINRDGLLVRTKTEDMVSQLHTNLLGSMLTCKAAMRTMIQQQGGSIVNVGSIVGLKGNSGQSVYSASKGGLVGFSRALAKEVARKKIRVNVVAPGFVHTDMTKDLKEEHLKKNIPLGRFGETIEVAHAVVFLLESPYITGHVLVVDGGLQLIL

SEQ ID NO: 225551 - protein, 179 aa, Artificial Sequence
  derived and/or modified sequence
MDKVCAVFGGSRGIGRAVAQLMARKGYRLAVIARNLEGAKAAAGDLGGDHLAFSCDVAKEHDVQNTFEELEKHLGRVNFLVNAAGINRDGLLVRTKTEDMVSQLHTNLLGSMLTCKAAMRTMIQQQGGSIVNVGSIVGLKGNSGQSVYSASKGGLVGFSRALAKEVARKKIRVNVVAPG

SEQ ID NO: 225552 - DNA, 714 bp, Artificial Sequence
  derived and/or modified sequence
atggacaaggtgtgcgccgtgttcggcggcagcagaggcatcggcagagccgtggcccagctgatggccagaaagggctacagactggccgtgatcgccagaaacctggagggcgccaaggccgccgccggcgacctgggcggcgaccacctggccttcagctgcgacgtggccaaggagcacgacgtgcagaacaccttcgaggagctggagaagcacctgggcagagtgaacttcctggtgaacgccgccggcatcaacagagacggcctgctggtgagaaccaagaccgaggacatggtgagccagctgcacaccaacctgctgggcagcatgctgacctgcaaggccgccatgagaaccatgatccagcagcagggcggcagcatcgtgaacgtgggcagcatcgtgggcctgaagggcaacagcggccagagcgtgtacagcgccagcaagggcggcctggtgggcttcagcagagccctggccaaggaggtggccagaaagaagatcagagtgaacgtggtggcccccggcttcgtgcacaccgacatgaccaaggacctgaaggaggagcacctgaagaagaacatccccctgggcagattcggcgagaccatcgaggtggcccacgccgtggtgttcctgctggagagcccctacatcaccggccacgtgctggtggtggacggcggcctgcagctgatcctgtag

SEQ ID NO: 225553 - DNA, 540 bp, Artificial Sequence
  derived and/or modified sequence
atggacaaggtgtgcgccgtgttcggcggcagcagaggcatcggcagagccgtggcccagctgatggccagaaagggctacagactggccgtgatcgccagaaacctggagggcgccaaggccgccgccggcgacctgggcggcgaccacctggccttcagctgcgacgtggccaaggagcacgacgtgcagaacaccttcgaggagctggagaagcacctgggcagagtgaacttcctggtgaacgccgccggcatcaacagagacggcctgctggtgagaaccaagaccgaggacatggtgagccagctgcacaccaacctgctgggcagcatgctgacctgcaaggccgccatgagaaccatgatccagcagcagggcggcagcatcgtgaacgtgggcagcatcgtgggcctgaagggcaacagcggccagagcgtgtacagcgccagcaagggcggcctggtgggcttcagcagagccctggccaaggaggtggccagaaagaagatcagagtgaacgtggtggcccccggctag

SEQ ID NO: 225554 - DNA, 714 bp, Artificial Sequence
  derived and/or modified sequence
atggataaggtatgtgctgtcttcggagggagtcgggggattggtcgagctgtggcccagctcatggctcggaagggctatcggttagccgttatagctagaaaccttgagggcgccaaagctgccgctggggacttggggggggatcacctagcttttagctgcgacgtggccaaagaacacgatgttcagaacaccttcgaggaacttgagaaacatctcgggcgcgttaacttcctggtcaatgcagctgggatcaatagggacgggttacttgtcaggactaaaacagaggatatggtgtcccaactgcacaccaatctgctgggctctatgctgacctgtaaagcagctatgaggaccatgattcagcaacaaggaggttcaatagttaacgtcggctccatagtcggactgaaaggcaattcaggtcaatcagtgtacagcgcgtctaaggggggcctggttgggttctcacgggctcttgcgaaagaagtcgcacgtaaaaagattcgcgtgaatgtagtcgcccccggctttgtccatacagatatgacgaaagacctgaaagaggaacacctgaagaagaatatacctctaggtcggtttggggaaactattgaggtggcccatgctgtcgttttcctcctggagagcccgtacattacggggcatgttctggttgtcgacggcggcctccagctgatcctctag

SEQ ID NO: 225555 - DNA, 540 bp, Artificial Sequence
  derived and/or modified sequence
atggataaagtgtgtgccgttttcgggggttccaggggtatcggcagagctgttgctcagctaatggcgcgcaagggctaccgtctcgcagtgattgccaggaacctcgagggcgccaaggccgctgccggggatctgggcggggaccaccttgcctttagctgtgatgtagctaaagagcatgatgtgcaaaatactttcgaagagcttgagaagcatctcgggcgtgttaattttcttgtgaatgcggccgggattaatagggacggcctactcgtgagaacaaaaactgaggatatggtctcccaactgcatacaaacctcctaggatctatgctgacctgtaaggccgctatgcgaaccatgatacaacagcagggtggcagcatagtcaacgtgggaagcatcgtgggactgaaaggcaactccggccagagcgtgtacagcgcctcaaaagggggccttgttgggttctctagggctctggcaaaggaggtggctaggaaaaagatccgagtgaacgtcgtggcacctggctag

SEQ ID NO: 225556 - DNA, 714 bp, Artificial Sequence
  derived and/or modified sequence
atggacaaggtgtgtgctgtgtttggaggcagccggggcatcggccgggctgtggcccagctgatggccaggaagggctaccgcctggccgtcatcgccaggaacctggagggcgccaaggctgctgctggggacctgggcggggaccacctggccttcagctgtgatgtggccaaggagcatgatgtgcagaacacctttgaggagctggagaagcacctgggccgggtgaacttcctggtgaatgctgctggcatcaacagagatggcctgctggtgaggaccaagacagaggacatggtgtcccagctgcacaccaacctgctgggctccatgctgacctgcaaggccgccatgaggaccatgatccagcagcagggcggcagcatcgtgaatgtgggcagcatcgtgggcctgaagggcaacagcggccagagcgtgtacagcgccagcaagggcggcctggtgggcttcagccgggccctggccaaggaggtggccaggaagaagatccgggtgaatgtggtggcccctggctttgtgcacacagacatgaccaaggacctgaaggaggagcacctgaagaagaacatccccctgggccgctttggagagaccatcgaggtggcccatgctgtggtgttcctgctggagagcccctacatcactggacatgtgctggtggtggatggcggcctgcagctgatcctgtag

SEQ ID NO: 225557 - DNA, 540 bp, Artificial Sequence
  derived and/or modified sequence
atggacaaggtgtgtgctgtgtttggaggcagccggggcatcggccgggctgtggcccagctgatggccaggaagggctaccgcctggccgtcatcgccaggaacctggagggcgccaaggctgctgctggggacctgggcggggaccacctggccttcagctgtgatgtggccaaggagcatgatgtgcagaacacctttgaggagctggagaagcacctgggccgggtgaacttcctggtgaatgctgctggcatcaacagagatggcctgctggtgaggaccaagacagaggacatggtgtcccagctgcacaccaacctgctgggctccatgctgacctgcaaggccgccatgaggaccatgatccagcagcagggcggcagcatcgtgaatgtgggcagcatcgtgggcctgaagggcaacagcggccagagcgtgtacagcgccagcaagggcggcctggtgggcttcagccgggccctggccaaggaggtggccaggaagaagatccgggtgaatgtggtggcccctggatag

SEQ ID NO: 225558 - DNA, 714 bp, Artificial Sequence
  derived and/or modified sequence
atggacaaggtgtgcgccgtgttcggcggcagccggggcatcggcagggcagtggcccagctgatggcgcggaagggctatcggctcgctgtgattgcccgaaacctggaaggagcaaaggctgccgccggtgacctaggtggcgatcacctcgcgtttagctgcgacgtggcaaaagaacatgatgttcaaaatactttcgaagaactggaaaaacatctgggacgggtgaatttcctggtgaacgccgccggaatcaatcgtgacggattgttggtacgaaccaagacagaggatatggtgagccaactgcatacaaatctcctaggttcaatgctcacctgcaaggcagccatgcgcacaatgattcagcaacagggcggctccatagttaatgtaggctccatagtcggtctcaagggtaactcggggcagagtgtatactcagcatcaaagggaggtctcgttgggttctcacgggccctcgctaaggaagtcgcacgcaagaagatcagggttaatgtggtcgcccctggcttcgtacataccgacatgacgaaggacctgaaagaggagcatctgaagaagaatattcccttgggccgttttggcgagacaatagaggtcgcgcacgcggttgtatttcttttggagtccccatacatcactggacacgttctagttgtcgacggggggctccagctcatcctgtag

SEQ ID NO: 225559 - DNA, 540 bp, Artificial Sequence
  derived and/or modified sequence
atggacaaggtgtgcgccgtgttcggcggcagccggggcatcggccgcgctgtggctcagcttatggctaggaaaggatatagactggccgtaattgcccgcaacctggagggggcaaaagccgcagccggggacctcggcggagatcacctggcctttagctgtgacgtagcgaaagagcatgatgtgcaaaatacatttgaagaactcgagaagcatctaggccgggtcaacttcttagtaaacgctgctggaatcaaccgagatggtcttctggtgcggactaaaacagaagacatggtttcacaactccacacgaacctccttggctctatgctgacgtgtaaggcagccatgcgcaccatgatacaacaacagggcggaagcattgttaatgtggggtccattgtcgggctcaagggcaactccggtcagtcagtttatagcgcgtccaaggggggccttgttgggttttcaagagctttagcgaaagaagttgcccggaaaaagattcgcgtgaacgtggtggcacccgggtag

SEQ ID NO: 225560 - DNA, 714 bp, Artificial Sequence
  derived and/or modified sequence
atggataaggtgtgcgctgtgttcggcggaagccggggtattgggcgtgccgtcgcacaactgatggcccgaaaagggtaccgcctagctgtgatagccaggaatctggagggagcaaaggccgctgctggcgatttgggtggtgaccacctcgctttttcatgcgatgtggccaaagagcacgacgtgcaaaacacctttgaagaactggaaaaacatctcggcagggtgaattttcttgttaacgctgccggaataaatcgggacggtttattggttagaaccaagactgaagacatggtgagtcagttgcacaccaacttactagggagtatgcttacctgtaaagcagccatgcgcactatgatacagcagcagggcggaagcattgtcaacgtcgggtctatcgttggcctcaaaggcaatagcgggcagtctgtgtactctgcttccaagggagggctggtcgggttcagtagagcactggcaaaggaggtagctagaaaaaaaattagggtcaatgtggtggccccaggctttgtgcataccgatatgaccaaagatctgaaagaagaacacctcaagaagaacatacccctcggcagattcggagagaccattgaggtggcccatgcagtggtctttcttctggagagcccctacattaccgggcacgtgttagtggtggacggaggactccaactgattctgtag

SEQ ID NO: 225561 - DNA, 540 bp, Artificial Sequence
  derived and/or modified sequence
atggataaagtatgtgctgtcttcggtggcagtaggggcataggtagggctgtggcacaattaatggctcgaaaaggataccgactagctgttatcgcaaggaatctggaaggcgctaaggcagcggcaggtgacctgggcggtgaccacctcgcattcagttgtgatgttgccaaggaacacgacgtccagaacacctttgaggaactcgagaagcatctgggcagagtaaactttctggtgaatgccgctgggatcaacagagacggactacttgtaagaacgaaaacagaggatatggtgagtcagctgcacacaaatctcctcggcagcatgctgacatgcaaagccgcaatgcgcacaatgatccagcagcagggcggaagcatcgtgaatgtcggcagtattgtgggtctcaaaggcaacagcggccagagcgtttactccgcttctaagggagggctcgtgggattttcacgcgctctggcgaaagaagtggccaggaagaagattagggtcaacgtggtagcaccaggttag

SEQ ID NO: 225562 - DNA, 3443 bp, Artificial Sequence
  derived and/or modified sequence
attactattgtgcggctgcaggaggtgtcgagcggcgttatttttttttgcggtttgcctttttttttcttttttttttttttggaaccgcggttgtttaaaagcctgagggaacctggagaggggctcccactccctaccctctttcctccgagtttgtgactccgagatggacaaagtgtgtgctgtttttggaggctcccgaggcattggcagagctgtggcccagttaatggcccggaaaggctaccgactggcggtcattgccagaaacctggaaggggccaaagccgccgccggtgacctcggcggagatcatttggcatttagctgtgatgttgctaaagaacatgatgttcaaaatacatttgaagagctggagaaacatttaggtcgagtaaatttcttggtaaatgcagctggtattaacagggatggtcttttagtaagaacaaaaactgaagatatggtatctcagcttcatactaacctcttgggttccatgctgacctgtaaagctgccatgaggactatgattcaacaacagggagggtctattgttaatgtaggaagcattgttggcttaaaaggcaactctggccagtccgtttacagtgccagtaaaggaggattagttggattttcacgtgctcttgctaaagaggtagcaagaaagaaaattagagtgaatgtagttgcaccaggatttgtacacacagatatgacgaaagacttgaaagaagaacatttaaagaaaaatattcctcttgggaggtttggagaaactattgaggtggcacatgcggttgtgtttcttttagaatcaccgtatattacagggcatgttctggtagtggatgggggattacaactcattttgtaatttgcagattattcagttataggggtgattagcatcaagggcacactttggctactgattagacaattatacctacatgggtaacatgtgctaatcaaacctgctgatgctacaaatgttaatttctgtctttataaaaatatgtctcaaaagaacaatgtgtgacaaattgtggtttttttttttttggtctaagttacatcagtgttgttttgtttaaaaagccttcatgagatacaattcacataccatataatcacacatttaaaatacacaattcagtggttttaacatatttaaatacatgtgcaatcatccccccagacaaattgtgttttctaaaggatgtgtatcacttacctttggttacctcatagactgtagcaatcttagtgtatagacattttgcaagtcatataaacaagtattgatttatatattttgtctcaaaagtggaaaaattatattgtctaattatgatgaattattttcttgtatcaagctgaattttctaaaagttaaccttgtgggctgttgccaaaataagagtatttagaggacactgattagttgtcaatactttagcaagcccactaaagataactatattccttttgcatgtgcttgggtgatcagtttttatacaggttgcaaaacatagtattcattaaagacatgaatttagaattgatttctttgagtggtatttctcttgattgagcagctagacaaaataatctgcaaatttaaatgtggcgcatttgactcattcttgagaaattctcataagtgaagaggattagcccttaaggttttaatacctggtacagtagtgaaccgcacagatttcatgaacttaggatgtgttttttattcatgaaaaacttagaatagtgaactattaatatttaaaaacgagaaatacaacatttaaaaaattaagagtattttgcattagtgattatgattcttatcccaaaattctagaaagtaataaattctgtatgaataagcataaaaaataaataaatatgcaataacattaaattaaatgtctttacaagaagcagtgaaggcactggtcttaagtgagaatatttgcctgggagtagagataaagacacaaaccgaatgtgaaataccaggtaataattattttgcattaaactctttttatcgggaatagtatgatattttcagtgtcactccattcatgttgatttggagctgacagttattttgtgtaagcagagatttaattttatattgaaagtcagtgcaaaattatgaataggatatactaataaatacaaagtaataacaaaagtcaaagcagtgttctaaataaaaattctgggttccttaaaaattattttaaatttatctttgaaatagttttcttagattaatctcaggatatgagaaagtcaattaagtgtgagtaaagttagtatcattaaacaaattgtctattaaatgcaagacgtggtaatatacagaatttatcaggcattaccaagtctaggcacatataggaaatgcagcactcagaatggtttcaatgtagtagttgatgcttgtaaggtaggggagcttattcagacatagtagatagtttctctaatgctgtctcaattgctggcctttggctacctgtacttccccattatggcagcccattcagtcttgagttttcttctctggacaccttatgctctgaaatcatgagcgaggctgattcaattggtgatttgggtagaaagcagtatgttttgctgacattaagatgtaggttatagataggtttagcctttaagtgtatgtttttatactttaaaataagaaatataaccttttaagctattccacctcctcccccagcctatctcaaactggtggaatatatggagagatcttgaaagaggtaaaataaaccttcactgctccactccaggtgaatccgcccactcccactgacctagtagaatttgtaatttaatacttaccttctatttctgaaatcagttgtgaactgttgccttatgttcagaggtttaagaacctcagtgaattcattttttaaaatctgctattctgagaagcattgaatgaattcttaacaagaagactcatctgtagctgtttgctgactcctatgagcccataagggttctgtgcttagcattaacaaaataaggtttataggtaaagccaatgtattaatttttttttgcatggagggctttaaaatttgtgctctttttcatattttattcatattcaatttatggtttgtaactgctttttagggagataattatatgttataaattagttttggggggaataattgtgcaaagaggataatttaatttacgtgcttctgttattcagaataaagagagaagactacgctgcatattcaagagttgtaccttaacattggtgaaacattttttctaagattttcaaaaggaatatgtgtaaattgagaaatcataaccactgtcctaacttggtaaacaaactgttcttaaataaagtatttaatgattttaaa

SEQ ID NO: 225563 - DNA, 1602 bp, Artificial Sequence
  derived and/or modified sequence
ctattgtgcggctgcaggaggtgtcgagcggcgttatttttttttgcggtttgcctttttttttcttttttttttttttggaaccgcggttgtttaaaagcctgagggaacctggagaggggctcccactccctaccctctttcctccgagtttgtgactccgagatggacaaagtgtgtgctgtttttggaggctcccgaggcattggcagagctgtggcccagttaatggcccggaaaggctaccgactggcggtcattgccagaaacctggaaggggccaaagccgccgccggtgacctcggcggagatcatttggcatttagctgtgatgttgctaaagaacatgatgttcaaaatacatttgaagagctggagaaacatttaggtcgagtaaatttcttggtaaatgcagctggtattaacagggatggtcttttagtaagaacaaaaactgaagatatggtatctcagcttcatactaacctcttgggttccatgctgacctgtaaagctgccatgaggactatgattcaacaacagggagggtctattgttaatgtaggaagcattgttggcttaaaaggcaactctggccagtccgtttacagtgccagtaaaggaggattagttggattttcacgtgctcttgctaaagaggtagcaagaaagaaaattagagtgaatgtagttgcaccaggttagtgaaaactttattaaaataacttgattatgattattgttttatagggaagccattatttggaacattagtaattgacatctgggtagaatagtttgtaaaatgattgtgaaaagaatcaaataatgaactgggggactcaaaaaaattttttgtacctcatattctatataaagtctatgtgttagcctgtttgcattgctctaaaggactgtctgaggtaattcataaaaaaaagaggcttatttggctctcgggcctgcaggctgtacaagcatgacaccaacatctgctcagcttctggtgaggcccaggaaactttttttcagtcatggcggaaggtaaagaggtagcagccaagtcatatggggatagcaggagcaagagagagaggaggtggcaggctctaaacaaccagctctggcatgaactaacagtgagaactcattatttaccatgtggagggcaccaagctattcatgaggaatccgcctccatgacccaaacacctcccgctaggcccacctccaacattgggaatcacatttcaacatgagatttggaggggacagacatccaaaccataagagtctttatttttaaattttgcactagtggaataacttaaggtggagagggtcttagaaataattttttccagtcatttttgtagattagaaaactgtacctgggattcagagtgacttgcctaaggttacacagctagtttatggaagaactgttactaaaagctttgtcttttgatttccacctaatgggagcttaaaaataatgtcctaccaggtatggtagctcatgtgggaggctgaggcaggagtattgtgaggccaggagttccagatcagcctgagcaacatagcaagatgctgtctgtaccg

SEQ ID NO: 225564 - protein, 272 aa, Artificial Sequence
  derived and/or modified sequence
MHLRLISWLFIILNFMEYIGSQNASRGRRQRRMHPNVSQGCQGGCATCSDYNGCLSCKPRLFFALERIGMKQIGVCLSSCPSGYYGTRYPDINKCTKCKADCDTCFNKNFCTKCKSGFYLHLGKCLDNCPEGLEANNHTMECVSIVHCEVSEWNPWSPCTKKGKTCGFKRGTETRVREIIQHPSAKGNLCPPTNETRKCTVQRKKCQKGERGKKGRERKRKKPNKGESKEAIPDSKSLESSKEIPEQRENKQQQKKRKVQDKQKSVSVSTVH

SEQ ID NO: 225565 - protein, 292 aa, Artificial Sequence
  derived and/or modified sequence
MHLRLISWLFIILNFMEYIGSQNASRGRRQRRMHPNVSQGCQGGCATCSDYNGCLSCKPRLFFALERIGMKQIGVCLSSCPSGYYGTRYPDINKCTKCKADCDTCFNKNFCTKCKSGFYLHLGKCLDNCPEGLEANNHTMECVSIVHCEVSEWNPWSPCTKKGKTCGFKRGTETRVREIIQHPSAKGNLCPPTNETRKCTVQRKKCQKGERGKKGRERKRKKPNKGESKEAIPDSKSLESSKEIPEQRENKQQQKKRKVQDKQKSGIEVTLAEGLTSVSQRTQPTPCRRRYL

SEQ ID NO: 225566 - DNA, 819 bp, Artificial Sequence
  derived and/or modified sequence
atgcacctgcggctaataagctggctcttcatcatattaaacttcatggagtatattggatcacagaacgcgtcccgcggtaggcgacagaggagaatgcaccccaacgtatctcagggctgccagggtggctgcgccacttgttctgactacaacggctgtctgagctgtaaacccagactgttcttcgcccttgagcggattggtatgaagcagataggcgtgtgtctgagcagctgccccagcgggtactatggaacgcggtatccagacattaacaagtgtaccaagtgtaaggccgattgcgatacgtgtttcaacaaaaatttctgtacaaagtgcaaaagtggtttctatttgcatctgggtaaatgcttagataattgccccgaaggcctggaggcgaataatcataccatggaatgcgtgagtatagtccattgcgaggtctctgagtggaatccttggagcccatgtacgaaaaaaggcaaaacgtgtggctttaagcgcggtacggagactcgagtgcgggagatcattcaacaccccagcgccaaagggaacctatgcccaccaaccaacgagactcgcaaatgtaccgtgcagaggaagaagtgccagaagggcgaaagaggtaaaaaggggagagagaggaagcggaagaaacccaataaaggagaatccaaggaagccatacctgactctaagagtctcgaaagctcaaaagaaatccctgaacagcgtgaaaacaaacaacaacagaagaaacgaaaggtgcaagacaagcagaagagtgtgagcgtgtcaaccgtgcactag

SEQ ID NO: 225567 - DNA, 879 bp, Artificial Sequence
  derived and/or modified sequence
atgcatctgaggctgatttcctggcttttcattatcttaaactttatggaatacatcggctcacaaaacgcaagccgcggtcggagacagcgccgaatgcatccaaatgtgtcccagggatgccagggtggttgtgcaacatgctctgattataacggatgcctgagttgtaagcctcggctgttctttgcccttgagcggatcgggatgaagcagattggagtgtgtttgtcaagctgcccctccggctattatggaacgcgatatccggatatcaacaagtgcacaaaatgcaaggccgattgcgacacctgcttcaataagaacttttgtactaagtgtaagtcaggtttctatctccacttaggaaaatgcctggacaactgccctgaggggctggaagctaataatcacaccatggagtgcgtgtctattgtacattgtgaagttagcgaatggaatccctggtccccatgcacaaagaaaggaaaaacatgcggatttaaaaggggcactgaaactagggttcgggagataatacagcatccgtcagcgaaggggaacctgtgtccccctactaatgaaactcgcaagtgcacagtccagaggaaaaaatgccagaagggtgagcgcggtaagaagggcagggagagaaaacgaaagaagccaaataagggtgaatctaaagaagcaatccctgatagcaagtccctcgagagttctaaggagatccctgagcagagggagaataaacagcagcagaaaaaacgaaaggttcaggataaacagaagtcaggcatcgaagttaccttagccgagggcctgacttcggtgtcccagcggacacagcctacgccttgtcggaggcgctatttgtag

SEQ ID NO: 225568 - DNA, 819 bp, Artificial Sequence
  derived and/or modified sequence
atgcatctgcggctcatctcctggctttttatcatcttgaacttcatggaatacatcggaagccaaaacgcttcaaggggacgtagacagagacggatgcacccaaatgttagccagggatgtcaggggggttgcgctacatgttcggactacaacggttgcctatcttgcaagccacgactgttcttcgcgttggagcgcattggcatgaagcaaattggagtttgcctcagcagctgtccaagcggatactatggcacccgctaccctgacatcaataagtgcacgaaatgcaaagcagactgcgatacctgtttcaataagaatttttgtaccaaatgtaaatccggcttctacttacatctcgggaagtgcctggataattgccctgaaggcctggaagcaaataatcatactatggaatgtgtgtctatcgtccactgcgaggttagtgaatggaacccctggtcaccctgtactaagaaagggaagacctgtggctttaaaaggggtaccgagactcgcgttcgcgaaataattcagcatccatcagctaaagggaacctgtgcccccctactaatgaaacccgcaagtgcaccgtgcagcgtaaaaaatgccagaaaggagaaagggggaaaaaaggacgtgaaaggaagaggaaaaagcccaataagggtgagtctaaggaggcaataccagactcaaagtcactggagtcctccaaagagattccagagcaacgggagaacaagcaacaacagaaaaaacgcaaagttcaggacaagcagaagagcgtgagtgtgtccaccgtgcactag

SEQ ID NO: 225569 - DNA, 879 bp, Artificial Sequence
  derived and/or modified sequence
atgcatcttagattgatctcatggctgtttatcatcttaaattttatggaatatatcggctcccaaaatgcctcaagaggaaggaggcagagacgaatgcaccccaatgtgagtcagggttgtcagggcggctgcgccacatgttccgattacaatggctgcctctcttgtaaacctcgccttttcttcgccctcgagaggatcggaatgaagcagataggggtgtgtctgtcgtcctgtccctctggctactacggcacacggtaccccgacatcaacaaatgcactaagtgtaaagccgactgcgatacatgctttaacaagaatttctgcacaaaatgtaagtctggattttatctccacttaggtaagtgcttggacaattgcccagagggccttgaggccaataatcatacgatggagtgcgttagcatagttcactgcgaggtgagtgagtggaacccatggtctccttgtacaaagaaggggaagacctgcgggttcaagaggggcacagagacgcgagtcagagaaattattcagcatccttcagcaaaaggtaatctatgtccgccaacgaatgagacacgtaagtgcaccgtccagcgtaaaaaatgccaaaaaggagagaggggaaaaaaaggccgcgaacgcaagaggaaaaagcctaacaaaggcgagagcaaagaagcgattccagattcaaaatctctggaatccagtaaggaaattccagaacagagggaaaacaagcaacagcagaagaagagaaaggtgcaagacaaacagaaaagcggcatcgaagtaaccctggctgaaggcttaacaagcgtttcccagcgcacacagcctacgccctgccgccgaagatatttatag

SEQ ID NO: 225570 - DNA, 819 bp, Artificial Sequence
  derived and/or modified sequence
atgcatctcagacttatttcctggttgtttataatactgaacttcatggagtatattggctctcagaatgcatcacgtggcaggcgtcagagaagaatgcatcctaacgtttcacagggctgccaagggggctgtgccacttgctctgactataacggttgcctgagctgtaaacctcgcctatttttcgcactggaacgcataggtatgaaacagattggtgtatgcttatcgagctgtcccagcgggtattacggcacccgatacccggacatcaataaatgtacaaagtgtaaggcagactgcgatacctgtttcaataagaatttttgtaccaaatgtaaatccggcttctacttacatctcgggaagtgcctggataattgccctgaaggcctggaagcaaataatcatactatggaatgtgtgtctatcgtccactgcgaggttagtgaatggaacccctggtcaccctgtactaagaaagggaagacctgtggctttaaaaggggtaccgagactcgcgttcgcgaaataattcagcatccatcagctaaagggaacctgtgcccccctactaatgaaacccgcaagtgcaccgtgcagagaaagaaatgtcagaaaggagaacggggtaaaaaaggtcgagagcggaagaggaaaaagcccaacaaaggcgagtctaaagaagcgatcccagactcaaaatccttggagtcttcaaaggaaatacctgaacagcgggagaataaacagcagcaaaaaaagaggaaagtccaggacaaacagaaaagtgtcagtgttagtacagtccactag

SEQ ID NO: 225571 - DNA, 879 bp, Artificial Sequence
  derived and/or modified sequence
atgcacctgcggttaatatcctggctgttcatcatcttgaactttatggagtacattgggagccaaaatgcaagtaggggtagacgtcagagacgcatgcacccaaacgtttcccagggctgccaaggcggatgtgcaacctgtagcgactataatggctgtctgtcgtgcaaaccaagattgttcttcgcccttgaaagaataggcatgaaacagataggtgtgtgcctgagcagttgcccgtcgggttattacggaaccagataccctgatatcaataagtgtacaaaatgtaaagccgactgtgatacctgcttcaacaaaaatttctgtacgaaatgtaagtctgggttttatctgcatttaggtaagtgcttagataattgtccggagggactggaggctaacaaccatactatggagtgcgtcagcatcgtgcattgcgaagtgagcgaatggaatccttggagcccatgcactaagaaaggtaagacatgtggatttaaaagaggtaccgagacacgcgttagggaaattattcaacatccatccgctaaggggaatctatgtccccctaccaacgagaccaggaaatgtaccgttcagcggaaaaagtgtcagaaaggagagcgcggtaagaaaggccgagagagaaagaggaagaaacctaataaaggggaatccaaggaggccatcccggactctaaatcactggaaagcagcaaagaaatcccagagcaaagagaaaacaagcaacagcaaaaaaagcgaaaggtccaagacaagcagaagtctggcatagaggtaaccctggccgaagggttaacatctgttagtcaacgcacacagcctacaccctgccggcgcagatacctatag

SEQ ID NO: 225572 - DNA, 819 bp, Artificial Sequence
  derived and/or modified sequence
atgcacctgagactgatcagctggctgttcatcatcctgaacttcatggagtacatcggcagccagaacgccagcagaggcagaagacagagaagaatgcaccccaacgtgagccagggctgccagggcggctgcgccacctgcagcgactacaacggctgcctgagctgcaagcccagactgttcttcgccctggagagaatcggcatgaagcagatcggcgtgtgcctgagcagctgccccagcggctactacggcaccagataccccgacatcaacaagtgcaccaagtgcaaggccgactgcgacacctgcttcaacaagaacttctgcaccaagtgcaagagcggcttctacctgcacctgggcaagtgcctggacaactgccccgagggcctggaggccaacaaccacaccatggagtgcgtgagcatcgtgcactgcgaggtgagcgagtggaacccctggagcccctgcaccaagaagggcaagacctgcggcttcaagagaggcaccgagaccagagtgagagagatcatccagcaccccagcgccaagggcaacctgtgcccccccaccaacgagaccagaaagtgcaccgtgcagagaaagaagtgccagaagggcgagagaggcaagaagggcagagagagaaagagaaagaagcccaacaagggcgagagcaaggaggccatccccgacagcaagagcctggagagcagcaaggagatccccgagcagagagagaacaagcagcagcagaagaagagaaaggtgcaggacaagcagaagagcgtgagcgtgagcaccgtgcactag

SEQ ID NO: 225573 - DNA, 879 bp, Artificial Sequence
  derived and/or modified sequence
atgcacctgagactgatcagctggctgttcatcatcctgaacttcatggagtacatcggcagccagaacgccagcagaggcagaagacagagaagaatgcaccccaacgtgagccagggctgccagggcggctgcgccacctgcagcgactacaacggctgcctgagctgcaagcccagactgttcttcgccctggagagaatcggcatgaagcagatcggcgtgtgcctgagcagctgccccagcggctactacggcaccagataccccgacatcaacaagtgcaccaagtgcaaggccgactgcgacacctgcttcaacaagaacttctgcaccaagtgcaagagcggcttctacctgcacctgggcaagtgcctggacaactgccccgagggcctggaggccaacaaccacaccatggagtgcgtgagcatcgtgcactgcgaggtgagcgagtggaacccctggagcccctgcaccaagaagggcaagacctgcggcttcaagagaggcaccgagaccagagtgagagagatcatccagcaccccagcgccaagggcaacctgtgcccccccaccaacgagaccagaaagtgcaccgtgcagagaaagaagtgccagaagggcgagagaggcaagaagggcagagagagaaagagaaagaagcccaacaagggcgagagcaaggaggccatccccgacagcaagagcctggagagcagcaaggagatccccgagcagagagagaacaagcagcagcagaagaagagaaaggtgcaggacaagcagaagagcggcatcgaggtgaccctggccgagggcctgaccagcgtgagccagagaacccagcccaccccctgcagaagaagatacctgtag

SEQ ID NO: 225574 - DNA, 819 bp, Artificial Sequence
  derived and/or modified sequence
atgcacttacgtttgatctcttggctgttcattatacttaacttcatggagtatattggcagccagaacgcctcaaggggaaggcggcagaggcggatgcacccaaacgtgtcccagggatgccagggtgggtgcgccacttgcagcgactacaacggatgtctctcatgcaaaccgagactattcttcgcactagaaagaatcggcatgaaacagatcggtgtgtgcttatcatcatgccccagtggttattacgggacacgatacccagatattaacaagtgcaccaagtgtaaggctgattgtgacacttgctttaacaagaatttctgtacaaaatgtaaatctggcttctatctccacctcggaaagtgtttagacaattgccctgaagggctcgaggcaaataatcacacaatggaatgcgtctccatcgttcattgcgaagtcagcgaatggaacccttggtcaccttgcacaaagaaagggaagacttgcggattcaagaggggcaccgaaaccagggtgagggaaataatccagcacccgagtgccaaaggaaacttgtgcccgcctaccaacgagacacgcaaatgcactgtgcagagaaagaagtgtcagaagggggaaaggggcaagaaaggaagagagagaaagcgcaaaaagcccaacaagggagagagtaaggaggcaattccagattcgaagagcctggaaagttccaaagaaattccggaacagagagaaaacaagcagcagcagaaaaaacgaaaagtgcaggacaaacagaagtcagtgtctgtgagcacagtacactag

SEQ ID NO: 225575 - DNA, 879 bp, Artificial Sequence
  derived and/or modified sequence
atgcacttgagactgattagctggctgtttattatcctgaatttcatggagtatattggctcccagaatgcctccagaggtcgtcggcagcggaggatgcacccgaacgtgtcccaaggttgccagggtggctgcgctacatgttccgactacaacggatgtctttcctgcaaacctcgactgtttttcgccttagaaagaatcggcatgaagcagattggcgtctgcctcagctcatgtcccagcggatactacgggactagatatcctgacattaataagtgcactaagtgcaaggcggactgtgacacttgctttaacaaaaatttctgcactaaatgcaaaagtgggttttatcttcatctgggcaaatgcctcgacaactgccccgaaggcttagaggcaaataatcacacgatggaatgcgtgagcatcgttcattgcgaggtcagtgaatggaatccatggagcccctgcaccaaaaaagggaaaacttgcggcttcaaacgcgggaccgaaactcgcgtgcgggagattatccagcatccttccgccaaaggtaacctttgtccccccaccaacgagactcgcaaatgtaccgtccagcgaaagaagtgccagaaaggcgaacgcgggaagaaaggacgcgaacggaagcggaagaagccaaataaaggcgagagtaaagaggccatccctgatagcaaatctctcgagagctccaaagagatccctgagcagagagagaacaaacagcaacagaagaaaaggaaggtgcaagacaagcaaaagtccggcatagaagttaccctcgccgaaggcttaacttcagtgtcacaaagaacccaacctactccttgtcgtcgccgctatctgtag

SEQ ID NO: 225576 - DNA, 2697 bp, Artificial Sequence
  derived and/or modified sequence
tccctcccccctccctgccctcctcctcctcctcccctatgtggtgctcccgggagcccagcccaacactggagcgtctcctgctcgcgcacgccagaagcagctcggggtctctccgccgccccttggccatggccgctgtgccgacggcgcccgctcccctgcgctccaggggcccccgccgctgcagccgcagccgccgcagcttctgagcccaaggggccgccgctgcagccgccgccgccgccgctcgcccgcccggatcccgcctgcggcagttgccgcacaacatgctacctgcggccgccccggcggctcctggaaccccggttcgcggcgatgccagccaccccagcgaagccgccgcagttcagtgcttggataatttgaaagtacaatagttggtttccctgtccacccgccccacttcgcttgccatcacagcacgcctatcggatgtgagaggagaagtcccgctgctcgggcactgtctatatacgcctaacacctacatatattttaaaaacattaaatataattaacaatcaaaagaaagaggagaaaggaagggaagcattactgggttactatgcacttgcgactgatttcttggctttttatcattttgaactttatggaatacatcggcagccaaaacgcctcccggggaaggcgccagcgaagaatgcatcctaacgttagtcaaggctgccaaggaggctgtgcaacatgctcagattacaatggatgtttgtcatgtaagcccagactattttttgctctggaaagaattggcatgaagcagattggagtatgtctctcttcatgtccaagtggatattatggaactcgatatccagatataaataagtgtacaaaatgcaaagctgactgtgatacctgtttcaacaaaaatttctgcacaaaatgtaaaagtggattttacttacaccttggaaagtgccttgacaattgcccagaagggttggaagccaacaaccatactatggagtgtgtcagtattgtgcactgtgaggtcagtgaatggaatccttggagtccatgcacgaagaagggaaaaacatgtggcttcaaaagagggactgaaacacgggtccgagaaataatacagcatccttcagcaaagggtaacctgtgtcccccaacaaatgagacaagaaagtgtacagtgcaaaggaagaagtgtcagaagggagaacgaggaaaaaaaggaagggagaggaaaagaaaaaaacctaataaaggagaaagtaaagaagcaatacctgacagcaaaagtctggaatccagcaaagaaatcccagagcaacgagaaaacaaacagcagcagaagaagcgaaaagtccaagataaacagaaatcggtatcagtcagcactgtacactagagggttccatgagattattgtagactcatgatgctgctatctcaaccagatgcccaggacaggtgctctagccattaggaccacaaatggacatgtcagttattgctctgtctaaacaacattcccagtagttgctatattcttcatacaagcatagttaacaacaaagagccaaaagatcaaagaagggatactttcagatggttgtcttgtgtgcttctctgcatttttaaaagacaagacattcttgtacatattatcaataggctataagatgtaacaacgaaatgatgacatctggagaagaaacatcttttccttataaaaatgtgttttcaagctgttgttttaagaagcaaaagatagttctgcaaattcaaagatacagtatcccttcaaaacaaataggagttcagggaagagaaacatccttcaaaggacagtgttgttttgaccgggagatctagagagtgctcagaattagggcctggcatttggaatcacaggatttatcatcacagaaacaactgttttaagattagttccatcactctcatcctgtatttttataagaaacacaagagtgcataccagaattgaatataccatatgggattggagaaagacaaatgtggaagaaatcatagagctggagactacttttgtgctttacaaaactgtgaaggattgtggtcacctggaacaggtctccaatctatgttagcactatgtggctcagcctctgttaccccttggattatatatcaacctgtaaacatgtgcctgtaacttacttccaaaaacaaaatcatacttattagaagaaaattctgattttatagaaaaaaaatagagcaaggagaatataacatgtttgcaaagtcatgtgttttctttctcaatgagggaaaaacaattttattacctgcttaatggtccacctggaactaaaagggatactattttctaacaaggtatatctagtaggggagaaagccaccacaataaatatatttgttaatagtttttcaagttttgttcactctgttttattgtttgttttattgagaaattcttactcttagagactcatgaattaagaaagagaattctgctaactcagagaacctggttcctatgtaattcagaatatattacatttctcagtaatatttgttttttgaatccacctttatctgagccaatggagatttacttatagcgtattaggagatatttattccattttcttattttaatcaacattctaattatagacacatgggcct

SEQ ID NO: 225577 - DNA, 1290 bp, Artificial Sequence
  derived and/or modified sequence
gccatcacagcacgcctatcggatgtgagaggagaagtcccgctgctcgggcactgtctatatacgcctaacacctacatatattttaaaaacattaaatataattaacaatcaaaagaaagaggagaaaggaagggaagcattactgggttactatgcacttgcgactgatttcttggctttttatcattttgaactttatggaatacatcggcagccaaaacgcctcccggggaaggcgccagcgaagaatgcatcctaacgttagtcaaggctgccaaggaggctgtgcaacatgctcagattacaatggatgtttgtcatgtaagcccagactattttttgctctggaaagaattggcatgaagcagattggagtatgtctctcttcatgtccaagtggatattatggaactcgatatccagatataaataagtgtacaaaatgcaaagctgactgtgatacctgtttcaacaaaaatttctgcacaaaatgtaaaagtggattttacttacaccttggaaagtgccttgacaattgcccagaagggttggaagccaacaaccatactatggagtgtgtcagtattgtgcactgtgaggtcagtgaatggaatccttggagtccatgcacgaagaagggaaaaacatgtggcttcaaaagagggactgaaacacgggtccgagaaataatacagcatccttcagcaaagggtaacctgtgtcccccaacaaatgagacaagaaagtgtacagtgcaaaggaagaagtgtcagaagggagaacgaggaaaaaaaggaagggagaggaaaagaaaaaaacctaataaaggagaaagtaaagaagcaatacctgacagcaaaagtctggaatccagcaaagaaatcccagagcaacgagaaaacaaacagcagcagaagaagcgaaaagtccaagataaacagaaatcggggattgaagtcaccctagctgaaggcctcaccagtgtttcacagaggacacagcccaccccttgcaggaggaggtatctctgagtgtgcagcacagaatcgcatgacccaccttaaccttcctgttgtcatggaaggatgcacggctgctctgtccactgtgattcctagccctctcaagatcactgctttctgaagaatttgcaatgactctggcttctggctgcttatctctggacacccgttctccaccagttgtacagttcatgtaatctacttggcttaattgattttccacttctctcttcctcttctaagatataaacattttaaatgattt

SEQ ID NO: 225578 - DNA, 819 bp, Artificial Sequence
  derived and/or modified sequence
atgcacctgcggctcatctcctggctgttcatcatcctgaacttcatggagtacatcggcagccagaatgccagccggggccggcggcagaggaggatgcaccccaacgtgtcccagggctgccagggcggctgtgccacctgcagcgactacaacggctgcctgagctgcaagcccaggctcttctttgccctggagcgcatcggcatgaagcagattggagtgtgcctgagcagctgccccagcggctactacggcacccgctacccagacatcaacaagtgcaccaagtgcaaggctgactgtgacacctgcttcaacaagaacttctgcaccaagtgcaagagcggcttctacctgcacctgggcaagtgcctggacaactgcccagagggcctggaggccaacaaccacaccatggagtgtgtgtccatcgtgcactgtgaggtgtctgagtggaacccctggagcccctgcaccaagaagggcaagacctgtggcttcaagaggggcacagagaccagggtgcgggagatcatccagcaccccagcgccaagggcaacctgtgcccccccaccaatgagaccaggaagtgcaccgtgcagaggaagaagtgccagaagggggagcggggcaagaagggccgggagaggaagaggaagaagcccaacaagggggagagcaaggaggccatcccagacagcaagagcctggagagcagcaaggagatccctgagcagcgggagaacaagcagcagcagaagaagaggaaggtgcaggacaagcagaagtctgtgtctgtgtccacagtgcactag

SEQ ID NO: 225579 - DNA, 879 bp, Artificial Sequence
  derived and/or modified sequence
atgcacctgcggctcatctcctggctgttcatcatcctgaacttcatggagtacatcggcagccagaatgccagccggggccggcggcagaggaggatgcaccccaacgtgtcccagggctgccagggcggctgtgccacctgcagcgactacaacggctgcctgagctgcaagcccaggctcttctttgccctggagcgcatcggcatgaagcagattggagtgtgcctgagcagctgccccagcggctactacggcacccgctacccagacatcaacaagtgcaccaagtgcaaggctgactgtgacacctgcttcaacaagaacttctgcaccaagtgcaagagcggcttctacctgcacctgggcaagtgcctggacaactgcccagagggcctggaggccaacaaccacaccatggagtgtgtgtccatcgtgcactgtgaggtgtctgagtggaacccctggagcccctgcaccaagaagggcaagacctgtggcttcaagaggggcacagagaccagggtgcgggagatcatccagcaccccagcgccaagggcaacctgtgcccccccaccaatgagaccaggaagtgcaccgtgcagaggaagaagtgccagaagggggagcggggcaagaagggccgggagaggaagaggaagaagcccaacaagggggagagcaaggaggccatcccagacagcaagagcctggagagcagcaaggagatccctgagcagcgggagaacaagcagcagcagaagaagaggaaggtgcaggacaagcagaagtctggaattgaggtgaccctggccgagggcctgacctctgtgtcccagaggacccagcccaccccctgcagaagacgctacctgtag

SEQ ID NO: 225580 - DNA, 819 bp, Artificial Sequence
  derived and/or modified sequence
atgcacctgcggctgatcagctggctgttcatcatcctgaacttcatggagtacatcggttcccagaatgcctctcgcggacgacgacaacggcggatgcaccccaatgtctcccagggttgccaaggcggatgcgctacctgcagcgactacaacggttgcctgtcttgcaagccacgtctgttctttgctcttgagaggatcggtatgaagcagattggggtatgcctaagctcttgcccctcgggctattacggtacacgataccccgacattaataagtgtacgaaatgtaaggctgattgcgacacgtgttttaacaagaacttctgcactaaatgcaagagcggcttctacctccatctaggaaagtgtttggataattgtcctgaagggctggaagccaataaccataccatggagtgcgtgagcattgtgcattgtgaagtttccgagtggaacccttggtctccatgcacaaaaaagggaaaaacttgcggctttaaacgggggactgagacacgggttagagaaatcatccagcatccgtctgcgaaagggaacctttgccctccaactaacgagactcgtaaatgcacggttcagaggaagaagtgccagaagggcgagagaggaaaaaagggaagagaacgaaagaggaaaaagcccaacaagggagagtctaaagaagccattcctgattcgaaatccctcgaaagtagtaaagagattcccgagcaacgagaaaataagcaacaacagaagaaacggaaggtccaggacaaacagaaatcggtttctgtgtccaccgtccattag

SEQ ID NO: 225581 - DNA, 879 bp, Artificial Sequence
  derived and/or modified sequence
atgcacctgcggctgatcagctggctgttcatcatcctgaacttcatggagtacatcggatcccagaatgcttcgagaggcaggagacaacgacgcatgcatcctaacgtatcgcagggctgccagggggggtgtgcaacatgcagtgactataacggctgcctcagttgtaagccacgcttatttttcgccctggagcgcatcggaatgaaacagatcggagtgtgtttgtcaagctgtccgtcaggatactacggcactcgttacccagacattaacaaatgcactaaatgcaaagccgactgcgatacttgtttcaacaagaacttctgtacaaagtgtaaatcgggtttctacctacacttaggcaagtgcctcgacaactgtcccgagggcttagaggctaacaaccacaccatggagtgcgtgtcgatagtccactgcgaggtgtcggagtggaatccttggagtccgtgcaccaaaaaaggaaagacatgcggcttcaaacgcggcacagagacacgcgttcgtgagattatccagcatccatcagccaaaggtaatctctgcccgcctactaacgaaacccgcaaatgcaccgtgcagagaaagaagtgccagaagggcgaacgcggcaaaaagggcagggagaggaaaaggaaaaaacccaataaaggtgagtccaaagaggctatccccgatagcaaatccctggaaagttcaaaggagataccagagcaacgagaaaataagcaacagcagaaaaagaggaaagtgcaggacaagcagaagtccgggatagaggtgacgctggccgagggattgactagcgttagtcaacgtacccagcctaccccttgtaggagacgatacctgtag

SEQ ID NO: 225582 - RNA, 819 nt, Artificial Sequence
  derived and/or modified sequence
augcaucugcggcucaucuccuggcuuuuuaucaucuugaacuucauggaauacaucggaagccaaaacgcuucaaggggacguagacagagacggaugcacccaaauguuagccagggaugucagggggguugcgcuacauguucggacuacaacgguugccuaucuugcaagccacgacuguucuucgcguuggagcgcauuggcaugaagcaaauuggaguuugccucagcagcuguccaagcggauacuauggcacccgcuacccugacaucaauaagugcacgaaaugcaaagcagacugcgauaccuguuucaauaagaauuuuuguaccaaauguaaauccggcuucuacuuacaucucgggaagugccuggauaauugcccugaaggccuggaagcaaauaaucauacuauggaaugugugucuaucguccacugcgagguuagugaauggaaccccuggucacccuguacuaagaaagggaagaccuguggcuuuaaaagggguaccgagacucgcguucgcgaaauaauucagcauccaucagcuaaagggaaccugugccccccuacuaaugaaacccgcaagugcaccgugcagcguaaaaaaugccagaaaggagaaagggggaaaaaaggacgugaaaggaagaggaaaaagcccaauaagggugagucuaaggaggcaauaccagacucaaagucacuggaguccuccaaagagauuccagagcaacgggagaacaagcaacaacagaaaaaacgcaaaguucaggacaagcagaagagcgugaguguguccaccgugcacuag

SEQ ID NO: 225583 - RNA, 879 nt, Artificial Sequence
  derived and/or modified sequence
augcaucuuagauugaucucauggcuguuuaucaucuuaaauuuuauggaauauaucggcucccaaaaugccucaagaggaaggaggcagagacgaaugcaccccaaugugagucaggguugucagggcggcugcgccacauguuccgauuacaauggcugccucucuuguaaaccucgccuuuucuucgcccucgagaggaucggaaugaagcagauaggggugugucugucguccugucccucuggcuacuacggcacacgguaccccgacaucaacaaaugcacuaaguguaaagccgacugcgauacaugcuuuaacaagaauuucugcacaaaauguaagucuggauuuuaucuccacuuagguaagugcuuggacaauugcccagagggccuugaggccaauaaucauacgauggagugcguuagcauaguucacugcgaggugagugaguggaacccauggucuccuuguacaaagaaggggaagaccugcggguucaagaggggcacagagacgcgagucagagaaauuauucagcauccuucagcaaaagguaaucuauguccgccaacgaaugagacacguaagugcaccguccagcguaaaaaaugccaaaaaggagagaggggaaaaaaaggccgcgaacgcaagaggaaaaagccuaacaaaggcgagagcaaagaagcgauuccagauucaaaaucucuggaauccaguaaggaaauuccagaacagagggaaaacaagcaacagcagaagaagagaaaggugcaagacaaacagaaaagcggcaucgaaguaacccuggcugaaggcuuaacaagcguuucccagcgcacacagccuacgcccugccgccgaagauauuuauag

SEQ ID NO: 225584 - RNA, 819 nt, Artificial Sequence
  derived and/or modified sequence
augcaucucagacuuauuuccugguuguuuauaauacugaacuucauggaguauauuggcucucagaaugcaucacguggcaggcgucagagaagaaugcauccuaacguuucacagggcugccaagggggcugugccacuugcucugacuauaacgguugccugagcuguaaaccucgccuauuuuucgcacuggaacgcauagguaugaaacagauugguguaugcuuaucgagcugucccagcggguauuacggcacccgauacccggacaucaauaaauguacaaaguguaaggcagacugcgauaccuguuucaauaagaauuuuuguaccaaauguaaauccggcuucuacuuacaucucgggaagugccuggauaauugcccugaaggccuggaagcaaauaaucauacuauggaaugugugucuaucguccacugcgagguuagugaauggaaccccuggucacccuguacuaagaaagggaagaccuguggcuuuaaaagggguaccgagacucgcguucgcgaaauaauucagcauccaucagcuaaagggaaccugugccccccuacuaaugaaacccgcaagugcaccgugcagagaaagaaaugucagaaaggagaacgggguaaaaaaggucgagagcggaagaggaaaaagcccaacaaaggcgagucuaaagaagcgaucccagacucaaaauccuuggagucuucaaaggaaauaccugaacagcgggagaauaaacagcagcaaaaaaagaggaaaguccaggacaaacagaaaagugucaguguuaguacaguccacuag

SEQ ID NO: 225585 - RNA, 879 nt, Artificial Sequence
  derived and/or modified sequence
augcaccugcgguuaauauccuggcuguucaucaucuugaacuuuauggaguacauugggagccaaaaugcaaguagggguagacgucagagacgcaugcacccaaacguuucccagggcugccaaggcggaugugcaaccuguagcgacuauaauggcugucugucgugcaaaccaagauuguucuucgcccuugaaagaauaggcaugaaacagauaggugugugccugagcaguugcccgucggguuauuacggaaccagauacccugauaucaauaaguguacaaaauguaaagccgacugugauaccugcuucaacaaaaauuucuguacgaaauguaagucuggguuuuaucugcauuuagguaagugcuuagauaauuguccggagggacuggaggcuaacaaccauacuauggagugcgucagcaucgugcauugcgaagugagcgaauggaauccuuggagcccaugcacuaagaaagguaagacauguggauuuaaaagagguaccgagacacgcguuagggaaauuauucaacauccauccgcuaaggggaaucuaugucccccuaccaacgagaccaggaaauguaccguucagcggaaaaagugucagaaaggagagcgcgguaagaaaggccgagagagaaagaggaagaaaccuaauaaaggggaauccaaggaggccaucccggacucuaaaucacuggaaagcagcaaagaaaucccagagcaaagagaaaacaagcaacagcaaaaaaagcgaaagguccaagacaagcagaagucuggcauagagguaacccuggccgaaggguuaacaucuguuagucaacgcacacagccuacacccugccggcgcagauaccuauag

SEQ ID NO: 225586 - protein, 434 aa, Artificial Sequence
  derived and/or modified sequence
MPDRDSYANGTGSSGGGPGGGGSEEASGAGVGSGGASSDAICRDFLRNVCKRGKRCRYRHPDMSEVSNLGVSKNEFIFCHDFQNKECSRPNCRFIHGSKEDEDGYKKTGELPPRLRQKVAAGLGLSPADLPNGKEEVPICRDFLKGDCQRGAKCKFRHLQRDFEFDARGGGGTGGGSTGSVLPGRRHDLYDIYDLPDRGFEDHEPGPKRRRGGCCPPDGPHFESYEYSLAPPRGVECRLLEEENAMLRKRVEELKKQVSNLLATNEVLLEQNAQFRNQAKVITLSSTAPATEQTLAPTVGTVATFNHGIAQTHTTLSSQALQPRPVSQQELVAPAGAPAAPPTNAAPPAAPPPPPPHLTPEITPLSAALAQTIAQGMAPPPVSMAPVAVSVAPVAPVAVSMAQPLAGITMSHTTTPMVTYPIASQSMRITAMPH

SEQ ID NO: 225587 - protein, 89 aa, Artificial Sequence
  derived and/or modified sequence
MPDRDSYANGTGSSGGGPGGGGSEEASGAGVGSGGASSDAICRDFLRNVCKRGKRCRYRHPDMSEVSNLGVSKNEFIFCHDFQNKECSR

SEQ ID NO: 225588 - protein, 45 aa, Artificial Sequence
  derived and/or modified sequence
MPDRDSYANGTGSSGGGPGGGGSEEASGAGVGSGGASSDAICRDF

SEQ ID NO: 225589 - protein, 79 aa, Artificial Sequence
  derived and/or modified sequence
MPDRDSYANGTGSSGGGPGGGGSEEASGAGVGSGGASSDAICRDFLRNVCKRGKRCRYRHPDMSEVSNLGVSKNEFIFC

SEQ ID NO: 225590 - DNA, 297 bp, Artificial Sequence
  derived and/or modified sequence
atgtggaaccccaatgctgggggccccccccaccctgtgccccagcccggctacccaggctgccagcccctgggcccctaccccccaccctacccacctccagcccctggcatcccccctgtgaaccccctggcccctggcatggtgggccctgctgtgattgtggacaagaagatgcagaagaagatgaagaaggcccacaagaagatgcacaagcaccagaagcaccacaagtaccacaagcacggcaagcacagcagcagcagcagcagcagcagcagcagtgacagcgactag

SEQ ID NO: 225591 - DNA, 1305 bp, Artificial Sequence
  derived and/or modified sequence
atgcccgacagagacagctacgccaacggcaccggcagcagcggcggcggccccggcggcggcggcagcgaggaggccagcggcgccggcgtgggcagcggcggcgccagcagcgacgccatctgcagagacttcctgagaaacgtgtgcaagagaggcaagagatgcagatacagacaccccgacatgagcgaggtgagcaacctgggcgtgagcaagaacgagttcatcttctgccacgacttccagaacaaggagtgcagcagacccaactgcagattcatccacggcagcaaggaggacgaggacggctacaagaagaccggcgagctgccccccagactgagacagaaggtggccgccggcctgggcctgagccccgccgacctgcccaacggcaaggaggaggtgcccatctgcagagacttcctgaagggcgactgccagagaggcgccaagtgcaagttcagacacctgcagagagacttcgagttcgacgccagaggcggcggcggcaccggcggcggcagcaccggcagcgtgctgcccggcagaagacacgacctgtacgacatctacgacctgcccgacagaggcttcgaggaccacgagcccggccccaagagaagaagaggcggctgctgcccccccgacggcccccacttcgagagctacgagtacagcctggccccccccagaggcgtggagtgcagactgctggaggaggagaacgccatgctgagaaagagagtggaggagctgaagaagcaggtgagcaacctgctggccaccaacgaggtgctgctggagcagaacgcccagttcagaaaccaggccaaggtgatcaccctgagcagcaccgcccccgccaccgagcagaccctggcccccaccgtgggcaccgtggccaccttcaaccacggcatcgcccagacccacaccaccctgagcagccaggccctgcagcccagacccgtgagccagcaggagctggtggcccccgccggcgcccccgccgccccccccaccaacgccgccccccccgccgcccccccccccccccccccccacctgacccccgagatcacccccctgagcgccgccctggcccagaccatcgcccagggcatggcccccccccccgtgagcatggcccccgtggccgtgagcgtggcccccgtggcccccgtggccgtgagcatggcccagcccctggccggcatcaccatgagccacaccaccacccccatggtgacctaccccatcgccagccagagcatgagaatcaccgccatgccccactag

SEQ ID NO: 225592 - DNA, 270 bp, Artificial Sequence
  derived and/or modified sequence
atgcccgacagagacagctacgccaacggcaccggcagcagcggcggcggccccggcggcggcggcagcgaggaggccagcggcgccggcgtgggcagcggcggcgccagcagcgacgccatctgcagagacttcctgagaaacgtgtgcaagagaggcaagagatgcagatacagacaccccgacatgagcgaggtgagcaacctgggcgtgagcaagaacgagttcatcttctgccacgacttccagaacaaggagtgcagcagatag

SEQ ID NO: 225593 - DNA, 138 bp, Artificial Sequence
  derived and/or modified sequence
atgcccgacagagacagctacgccaacggcaccggcagcagcggcggcggccccggcggcggcggcagcgaggaggccagcggcgccggcgtgggcagcggcggcgccagcagcgacgccatctgcagagacttctag

SEQ ID NO: 225594 - DNA, 240 bp, Artificial Sequence
  derived and/or modified sequence
atgcccgacagagacagctacgccaacggcaccggcagcagcggcggcggccccggcggcggcggcagcgaggaggccagcggcgccggcgtgggcagcggcggcgccagcagcgacgccatctgcagagacttcctgagaaacgtgtgcaagagaggcaagagatgcagatacagacaccccgacatgagcgaggtgagcaacctgggcgtgagcaagaacgagttcatcttctgctag

SEQ ID NO: 225595 - DNA, 1305 bp, Artificial Sequence
  derived and/or modified sequence
atgcccgatcgggactcttacgccaatggcactggctcatcgggcggaggccccggaggcgggggcagcgaagaagccagtggagccggcgtgggcagcggcggcgccagctccgacgccatctgcagggattttttacgcaatgtgtgcaagagagggaagcgatgcaggtacaggcacccagacatgtcagaagttagcaatttgggagtctcaaagaacgaatttattttttgtcatgactttcagaataaggaatgcagccggcccaactgccggtttatccatggcagtaaagaggacgaagatggctataagaagacaggtgagctgccgcctcggcttaggcagaaggtggctgctggcctcggtctgtcacccgccgatctgccaaacgggaaagaggaggtgcccatttgtagggactttttaaagggcgattgtcagaggggcgcaaaatgtaagttccgtcacttacagcgcgattttgaattcgatgcccgcggcggcgggggaaccggaggcgggagcaccggttctgttctgccagggcgacgtcatgacctgtacgatatttatgacctgcctgacaggggctttgaggatcatgaaccggggccaaaacgcagacgcggcggttgctgcccaccagatgggccacatttcgaatcttatgagtacagcctggcgcctcctaggggtgtggaatgtcgcctcttggaagaagagaatgctatgttgcgaaagagggtggaagagctgaaaaagcaggtaagcaacctgctggccacaaacgaggttctactggagcaaaatgcccagttccggaaccaggcaaaggttatcaccttgagcagcacagctccagctaccgagcagacactggcccccaccgttggaactgtggcgaccttcaatcatgggatagctcagacacacactacactgtcctcgcaagccttacaaccccgccctgtctcccagcaggaactggtcgcacctgcaggagcccctgccgccccacccaccaacgcagctccccccgccgcacctcccccaccccctccacacctaacccccgaaataacacctctgtctgcggcgctagcccagaccatcgcccagggcatggcgcctccacctgtgagcatggcacccgtggcggtctctgtcgccccggtagcccctgttgctgtatcaatggcccaacccctggctgggatcaccatgtcccacactacgacacccatggtgacctaccccattgcgtcgcagtcaatgagaataaccgcaatgccccactag

SEQ ID NO: 225596 - DNA, 270 bp, Artificial Sequence
  derived and/or modified sequence
atgcccgaccgggattcttatgccaacgggaccgggagctctggagggggaccgggcggcggtgggagcgaggaggcatcaggagctggcgtgggttcgggaggagcctcttcagacgctatttgtcgcgacttcctgcgtaacgtctgtaagcgagggaagagatgtaggtaccgacacccggacatgagtgaggttagcaatctaggggtatctaagaatgagtttattttctgtcacgatttccaaaacaaggagtgcagcaggtag

SEQ ID NO: 225597 - DNA, 138 bp, Artificial Sequence
  derived and/or modified sequence
atgccagacagggacagttatgccaacggaactggttcatctgggggagggcctggaggcggcggatcagaagaggcgagcggcgccggtgtgggcagcggcggcgcctcctccgacgccatctgcagagatttctag

SEQ ID NO: 225598 - DNA, 240 bp, Artificial Sequence
  derived and/or modified sequence
atgccagatagggatagctacgccaacggtactggatccagtggtggaggaccaggcggcggcgggtctgaggaagccagcggagccggggtgggtagtggaggggcgagttcagatgctatttgcagggattttctgcgcaatgtctgtaaaagaggcaaaaggtgtcggtaccggcatcctgacatgtccgaggtgagcaatctcggcgtcagcaagaatgaattcattttttgctag

SEQ ID NO: 225599 - DNA, 1305 bp, Artificial Sequence
  derived and/or modified sequence
atgccagaccgggacagctatgccaatggaacaggcagcagcggcggcggccctgggggcggcggcagcgaggaggccagcggggccggcgtgggcagcggcggggccagcagtgatgccatctgccgggacttcctgagaaatgtgtgcaagaggggcaagcgctgccgctaccgccacccagacatgtctgaggtgagcaacctgggcgtgtccaagaatgagttcatcttctgccacgacttccagaacaaggagtgcagccggcccaactgccgcttcatccacggcagcaaggaggatgaagatggctacaagaagacaggagagctgcccccccggctgcggcagaaggtggccgccggcctgggcctgagccctgctgacctgcccaacgggaaggaggaggtgcccatctgccgggacttcctgaagggggactgccagagaggagccaagtgcaagttccgccacctgcagagggactttgaatttgatgcccggggcggcggcggcactggaggcggcagcacaggctctgtgctgcctggaagaagacatgacctgtatgacatctatgacctgcctgaccggggctttgaagatcatgagcccggccccaagagaagaagaggaggctgctgccccccagatggcccccactttgagagctatgagtacagcctggccccaccccggggcgtggagtgccgcctgctggaggaggagaatgccatgctgaggaagagggtggaggagctgaagaagcaggtgagcaacctgctggccaccaatgaggtgctgctggagcagaatgcccagttcaggaaccaggccaaggtgatcaccctgagcagcacagccccagccacagagcagaccctggcccccaccgtgggcaccgtggccaccttcaaccacggcatcgcccagacccacaccaccctgagcagccaggccctgcagcccaggcctgtgtcccagcaggagctggtggccccagctggggccccagctgccccacccaccaatgctgcccctcctgctgcccctcctcctcctccaccccacctgaccccagagatcacccccctgtctgctgccctggcccagaccatcgcccagggcatggcccctcctcctgtgtccatggcccctgtggccgtgtctgtggcccctgtggcccctgtggccgtgtccatggcccagcccctggccggcatcaccatgagccacaccaccacccccatggtgacctaccccatcgccagccagagcatgaggatcacagccatgccccactag

SEQ ID NO: 225600 - DNA, 270 bp, Artificial Sequence
  derived and/or modified sequence
atgccagaccgggacagctatgccaatggaacaggcagcagcggcggcggccctgggggcggcggcagcgaggaggccagcggggccggcgtgggcagcggcggggccagcagtgatgccatctgccgggacttcctgagaaatgtgtgcaagaggggcaagcgctgccgctaccgccacccagacatgtctgaggtgagcaacctgggcgtgtccaagaatgagttcatcttctgccacgacttccagaacaaggagtgcagcaggtag

SEQ ID NO: 225601 - DNA, 138 bp, Artificial Sequence
  derived and/or modified sequence
atgccagaccgggacagctatgccaatggaacaggcagcagcggcggcggccctgggggcggcggcagcgaggaggccagcggggccggcgtgggcagcggcggggccagcagtgatgccatctgccgggacttctag

SEQ ID NO: 225602 - DNA, 240 bp, Artificial Sequence
  derived and/or modified sequence
atgccagaccgggacagctatgccaatggaacaggcagcagcggcggcggccctgggggcggcggcagcgaggaggccagcggggccggcgtgggcagcggcggggccagcagtgatgccatctgccgggacttcctgagaaatgtgtgcaagaggggcaagcgctgccgctaccgccacccagacatgtctgaggtgagcaacctgggcgtgtccaagaatgagttcatcttctgctag

SEQ ID NO: 225603 - DNA, 1305 bp, Artificial Sequence
  derived and/or modified sequence
atgcccgaccgggacagctacgccaacggcaccggcagcagcggcgggggacccgggggcggtgggtccgaggaagcctctggcgccggtgtcgggtccggaggtgcttcttccgatgcaatttgccgagacttcttacgaaatgtatgtaagcgcgggaaaagatgtcgctatcgccatcctgacatgagtgaggtgtccaacctgggcgttagtaagaatgagttcattttttgccatgacttccagaacaaggaatgttctcgccctaattgtagattcatccatggatctaaggaggatgaggatgggtacaagaaaacgggcgagctccccccccggcttcgccagaaagtcgcggccggactgggactctcccccgcggatctgcccaacggaaaagaggaggtacctatttgccgtgacttcctgaagggggactgccaacggggagcaaagtgtaaatttagacaccttcagcgggatttcgaattcgatgcaagagggggaggggggacagggggaggaagcaccgggtccgttttgccgggccgtcgacacgacctgtatgacatttacgacctgcccgataggggttttgaggaccatgaaccagggccaaagcgaaggcgtggggggtgttgtccacccgacggcccccactttgaaagctacgagtattccctcgccccccctcggggggtggagtgccggttgttagaagaagaaaatgccatgctccgaaagagagtcgaagaactgaagaagcaggtttccaaccttttagcaacaaatgaggtgctgctcgagcagaatgcccagtttcgtaatcaggccaaagtgataaccctgtcttcgacagccccggccacggagcagaccttggcacccaccgtgggcacagtggcgaccttcaatcacggtatagcccagactcacaccactctcagcagtcaggctctccagccccggcctgtgtctcagcaggagctcgttgccccagccggggccccagctgcccccccgactaacgcggcgcccccagccgcgccccctccgcctccaccgcatcttacccccgaaataacaccattatctgccgccctcgcccaaactatcgcccagggtatggccccaccccccgtatcaatggcccctgtggctgtgagcgtagctcctgtagcccctgttgcggtctccatggcccaacccttggctggcataacaatgtcacacacaacgacccccatggttacctaccctattgcttctcagtccatgaggattacagctatgcctcactag

SEQ ID NO: 225604 - DNA, 270 bp, Artificial Sequence
  derived and/or modified sequence
atgcccgaccgggacagctacgccaacggcaccggcagcagcggcggaggacccggaggcggcggttccgaggaagcatctggggcaggggtgggctcgggcggagcttcttccgacgctatctgcagagatttccttcgaaacgtctgtaaacgcggcaaacgttgcagatacagacatccagatatgtcagaggtttcaaatctgggtgtgagcaaaaatgagttcatcttctgccatgactttcagaacaaagagtgctcgcgatag

SEQ ID NO: 225605 - DNA, 138 bp, Artificial Sequence
  derived and/or modified sequence
atgcccgaccgggacagctacgccaacggcaccggcagcagcggcggtggccctggggggggtgggtcagaggaagcttccggcgctggcgtggggtccggcggggcatcttcagatgccatctgtcgggacttctag

SEQ ID NO: 225606 - DNA, 240 bp, Artificial Sequence
  derived and/or modified sequence
atgcccgaccgggacagctacgccaacggcaccggcagcagcggcggcgggcctggcggcggtggctccgaagaggcatccggcgccggagtgggaagcggaggagcatcttctgacgccatatgcagggactttctgagaaatgtgtgtaagagagggaagcgctgccgctacaggcacccagatatgtctgaagtcagcaacctgggggtctccaagaacgaattcatcttttgctag

SEQ ID NO: 225607 - DNA, 1305 bp, Artificial Sequence
  derived and/or modified sequence
atgcctgatagagacagctatgctaacgggaccgggtcaagtggagggggacccggtggcggaggctccgaggaggcttccggcgctggcgtgggttccggaggggcatccagcgatgcaatctgccgtgacttcctccgcaatgtgtgtaaacggggaaagcggtgtcggtatagacaccctgacatgagtgaggtctctaatctgggcgtatccaaaaatgagtttatcttctgtcatgacttccagaacaaggaatgcagccgccctaactgccgctttattcacggaagtaaagaagacgaggatggatacaagaaaaccggggaacttccccctcggctcagacagaaagtggccgctgggcttggtctgtccccagcggacctgccaaacggtaaagaggaagtgcctatctgcagagatttcctgaaaggggactgccagcgcggagcaaagtgcaagttcaggcacctccagagggactttgagttcgacgcgagaggaggcggaggaaccggaggtggctctacaggaagcgttctccctgggcgacgtcacgacctatacgacatctatgacctaccagaccggggttttgaggaccatgagccaggcccaaagaggcggagggggggatgctgtccgcctgatggccctcacttcgagagttacgaatatagcctggcccctccaagaggagttgagtgtcgcctgttggaggaagagaacgccatgcttaggaagcgcgtggaagaactgaaaaagcaagtgtcaaaccttcttgcaaccaacgaggtgctgctggagcaaaacgctcagttccggaatcaggcaaaggttattacattgagctctacggcaccagccaccgaacaaacccttgctcctacggttggcacagtcgccaccttcaaccacggcatcgcacagacgcacactacgttgagctcccaagcgctgcagcctaggcctgtatcccaacaggaactggtcgcccctgcaggggctccggctgcccctccaaccaacgcagctccacctgccgcaccccctccgcctcctccacatctgaccccggagatcacacccctgtccgcggctctggcccaaaccattgctcagggaatggccccaccacctgtctctatggcacccgtagccgtgtccgtcgcccctgtggcacccgtggcagtgagcatggcccagcctctggcgggaattactatgtctcacaccacgactcctatggtgacttacccaatcgcgagccagtctatgaggatcacagcaatgccacactag

SEQ ID NO: 225608 - DNA, 270 bp, Artificial Sequence
  derived and/or modified sequence
atgcccgatagagactcttacgcaaatggtactggctcaagtggcggaggccctggagggggtggcagcgaggaggccagcggggctggcgtggggtcaggtggagccagtagtgacgccatttgccgtgattttttgcgcaatgtctgcaagagaggtaaaaggtgtcgctacagacatcccgacatgtcagaggtctccaacctcggagtgtctaagaatgaatttatcttctgtcacgacttccagaacaaagagtgttctcggtag

SEQ ID NO: 225609 - DNA, 138 bp, Artificial Sequence
  derived and/or modified sequence
atgcccgatcgagactcttacgctaacggcacaggaagctctgggggtggtcccggtggtggagggagcgaagaagcgagtggggcaggagtggggtcaggaggcgcaagttccgacgccatctgccgcgacttctag

SEQ ID NO: 225610 - DNA, 240 bp, Artificial Sequence
  derived and/or modified sequence
atgcccgatcgtgattcatacgctaacggaacgggcagttccggaggaggcccagggggaggaggctctgaggaagctagcggagcaggggtggggtccggcggagccagtagcgatgcgatctgccgggattttcttagaaatgtgtgcaagcgcggaaaaaggtgccgttacagacatccggatatgtcagaagtctccaacctgggagtgtctaagaatgaattcattttttgttag

SEQ ID NO: 225611 - DNA, 2208 bp, Artificial Sequence
  derived and/or modified sequence
atgtcgcacgcgtacttcatacaccatagagtatggttccgggtctgctggctagagcgtcacttcttccgcaggaagcggaagagcgatcgggtaggcggctctttgtcgaagctagaggaccggcaggcggcagcagcaactacggcggcggcggcagaacccagcagtgatgtggaggtggagacccacaggagccccggacttcacctgagctacctcagtggtcaccaagagtggcaagataaagaaaaccctgagttgggcgggaccaggatgcctgaccgggacagctatgccaacggtaccgggagcagcggtggaggccctggaggtggtggcagcgaggaggccagtggggcaggggtaggcagtggcggggccagctcagatgccatctgtagagacttcttgaggaatgtgtgcaagcgaggcaagcgttgccgatatcgccacccagacatgagcgaggtgtccaacttgggggtgagcaaaaacgagttcatcttctgccatgacttccagaacaaggagtgtagccgcccaaattgccgtttcatccatggctccaaggaggatgaggatggctataagaagacaggagagcttcccccacggctgaggcagaaagtagcagctggccttggcctttcaccggctgacctaccaaatggcaaggaggaggtccctatctgccgtgactttctcaagggtgactgtcagagaggagccaagtgcaagttccgtcacctgcaacgggattttgagtttgatgctcggggtggaggaggcactggtgggggctcaacaggctcagtcctcccaggacgacgtcatgatctctatgatatctatgaccttcctgacaggggctttgaggaccatgagccaggcccaaaacgccggcgaggtggatgctgcccccctgatggccctcattttgagtcatatgaatatagtttggctccaccgcgaggggtggagtgcagactgctagaggaggagaatgccatgctcaggaagcgggtagaggagttaaagaagcaggtcagcaacctgctggccaccaatgaggtactactggaacaaaatgctcagttccgcaatcaggccaaggtcataaccctgagctccactgcaccagcgactgagcagactctggcccccactgtgggcactgttgccacttttaaccatggcattgcccagactcacactactctcagcagccaggctctacagcctcgtccagtgtcccagcaagaactggtggcccctgctggagctccagctgctcccccaactaatgctgcacctcctgctgctccaccacccccacccccacacttgaccccagagatcacgccactgtcagctgccctggctcaaacaattgcccagggaatggcacctccacctgtctccatggctcctgtggctgtatctgtggctcctgtggcccctgtggctgtatcgatggcccaacccttggcaggaatcacaatgagccacaccaccactcccatggtgacttaccctatcgcttcccagagcatgcgcatcacggccatgccacactgatggggctaatggacactcccctggtatagcctcgcagggctggggtcagggggcccttgcccactcacctagccttccccatccctgtctgaagggctcccttgagaactaggacaagagactacaaggagtatgtcctgaggaggggttgggatggtgtgttttctctcacctcccttttatgagggtcctcttgtccatcttcaagcctcacagtgggggcttgcagaggagtgcagactgaagccagcagagaggaaggactgactgaggggctgtgtcctcttatgggaatttgggaacatccctcgtcttgtcctctcttctgcacagcacaggttccagcactggttttagaagaaaaaaataccctgcccagagggaaagccaggaaagattgggaagtgggtggtcaggagagaaggcctgataggagccttcagacaatttgggtcctagttgcttgggttggacaatacaggaattgcttctgggccctgggaaagctgggaccatagtgctccagcccaaagactaggggagcattcattaccctagtttgacctgaaaatccatagggcagggcccactactttccaaagaaataaaagaacaattatttttaac

SEQ ID NO: 225612 - DNA, 743 bp, Artificial Sequence
  derived and/or modified sequence
aaggccccccagaaccgagctggctcgtcctcacaccccagggcagtgccccttttctgagtgaccccgcatcgcgagcaaacgccagcttcgtgacgtcacaaccctgcccatcccctcagcttgatgacacctggagctccagctccccgcttcacttcgcgcgcccttagtgtcccattcacgtagcccacggctgagcgccggcggcactgcacggaacctgccaagctagaagacttgctgcgggaaaactcctaggacttctttcgcaaactctagggtgttgggaagcgtcacaatcactgccttcaagtctaatcggccatcccaatgcactgtcagacgctgcctttttgagaacccagcagtgatgtggaggtggagacccacaggagccccggacttcacctgagctacctcagtggtcaccaagagtggcaagataaagaaaaccctgagttgggcgggaccaggatgcctgaccgggacagctatgccaacggtaccgggagcagcggtggaggccctggaggtggtggcagcgaggaggccagtggggcaggggtaggcagtggcggggccagctcagatgccatctgtagagacttcttgaggaatgtgtgcaagcgaggcaagcgttgccgatatcgccacccagacatgagcgaggtgtccaacttgggggtgagcaaaaacgagttcatcttctgccatgacttccagaacaaggagtgtagccg

SEQ ID NO: 225613 - DNA, 552 bp, Artificial Sequence
  derived and/or modified sequence
ctctttgtcgaagctagaggaccggcaggcggcagcagcaactacggcggcggcggcaggtgaagttcagtttgaaccctgaggaaatcctcacgttctcgaagctttgccgttttgtcagatttcttgtgacaaccaccccatagtcctccactcttactccttcttccacccaagtctctgtttttttcctgctcagaacccagcagtgatgtggaggtggagacccacaggagccccggacttcacctgagctacctcagtggtcaccaagagtggcaagataaagaaaaccctgagttgggcgggaccaggatgcctgaccgggacagctatgccaacggtaccgggagcagcggtggaggccctggaggtggtggcagcgaggaggccagtggggcaggggtaggcagtggcggggccagctcagatgccatctgtagagacttcttgaggaatgtgtgcaagcgaggcaagcgttgccgatatcgccacccagacatgagcgaggtgtccaacttgggggtgagcaaaaacgagttcatcttctgc

SEQ ID NO: 225614 - protein, 797 aa, Artificial Sequence
  derived and/or modified sequence
MASCRAWNLRVLVAVVCGLLTGIILGLGIWRIVIRIQRGKSTSSSSTPTEFCRNGGTWENGRCICTEEWKGLRCTIANFCENSTYMGFTFARIPVGRYGPSLQTCGKDTPNAGNPMAVRLCSLSLYGEIELQKVTIGNCNENLETLEKQVKDVTAPLNNISSEVQILTSDANKLTAENITSATRVVGQIFNTSRNASPEAKKVAIVTVSQLLDASEDAFQRVAATANDDALTTLIEQMETYSLSLGNQSVVEPNIAIQSANFSSENAVGPSNVRFSVQKGASSSLVSSSTFIHTNVDGLNPDAQTELQVLLNMTKNYTKTCGFVVYQNDKLFQSKTFTAKSDFSQKIISSKTDENEQDQSASVDMVFSPKYNQKEFQLYSYACVYWNLSAKDWDTYGCQKDKGTDGFLRCRCNHTTNFAVLMTFKKDYQYPKSLDILSNVGCALSVTGLALTVIFQIVTRKVRKTSVTWVLVNLCISMLIFNLLFVFGIENSNKNLQTSDGDINNIDFDNNDIPRTDTINIPNPMCTAIAALLHYFLLVTFTWNALSAAQLYYLLIRTMKPLPRHFILFISLIGWGVPAIVVAITVGVIYSQNGNNPQWELDYRQEKICWLAIPEPNGVIKSPLLWSFIVPVTIILISNVVMFITISIKVLWKNNQNLTSTKKVSSMKKIVSTLSVAVVFGITWILAYLMLVNDDSIRIVFSYIFCLFNTTQGLQIFILYTVRTKVFQSEASKVLMLLSSIGRRKSLPSVTRPRLRVKMYNFLRSLPTLHERFRLLETSPSTEEITLSESDNAKESI

SEQ ID NO: 225615 - DNA, 3140 bp, Artificial Sequence
  derived and/or modified sequence
ataactctaatcacttttttcatgttctccttgagtgaaggatgaggaaattgaaagcagagtatgcaccttttattaggagattcaaactgcatcctactggattagcctcaaaagtcctaaaatacaaagacatccatctgacagatcactgaggggaggacttgtttttctgttttagaatagtttccgattaaactttttagctcaagaagaaaagaagctagttatttctcacccaggagtggatttgtggtttggcttcaccatggcttcctgccgtgcctggaaccttagggtgctggtggctgtcgtgtgtggactactgactggcatcattttgggactgggcatctggaggattgtgatcaggatccaaagaggaaaatctacttcctcatcaagcacccctacagagttctgcaggaatggtggaacctgggaaaatggcagatgtatttgtacagaagagtggaaaggactgagatgtacaattgctaatttttgtgaaaatagtacctatatgggttttacttttgccagaatcccagtgggcagatatggaccatccttgcaaacatgtggcaaggatactccaaatgcgggcaatccaatggcagtccggttgtgcagtctctctctatatggagagatagaattacaaaaagtgacaataggaaattgcaatgaaaatctggaaaccctggaaaagcaggtaaaggatgtcacagcaccacttaataacatttcttctgaagtccagattttaacatctgatgccaataaattaactgctgagaacatcactagtgctacgcgagtggttggacagatattcaacacttccagaaatgcttcacctgaggcaaagaaagttgccatagtaacagtgagtcaactcctagatgccagtgaagatgcttttcaaagagttgctgctactgctaatgatgatgcccttacaacgcttattgagcaaatggagacttattccttgtctttgggtaatcaatcagtggtggaacctaacatagcaatacagtcagcaaatttctcttcagaaaatgcggtggggccttcaaatgttcgcttctctgtgcagaaaggagctagcagttctctagtttctagttcaacatttatacatacaaatgtggatggccttaacccagatgcacagactgagcttcaggtcttgcttaatatgacgaaaaattacaccaagacatgcggctttgtagtttatcaaaatgacaagcttttccaatcaaaaacttttacagctaaatcggattttagtcaaaaaattatctcaagcaaaactgatgaaaatgagcaagatcagagtgcttctgttgacatggtctttagtccaaagtacaaccaaaaagaatttcaactctattcctatgcctgtgtctattggaatttgtcagcgaaggactgggacacatatggctgtcaaaaagacaagggcactgatggattcctgcgctgccgctgcaaccatactactaattttgctgtattaatgactttcaaaaaggattatcaatatcccaaatcacttgacatattatccaacgttggatgtgcactgtctgttactggtctggctctcacagttatatttcagattgtcaccaggaaagtcagaaaaacctcagtaacctgggttttggtcaatctgtgcatatcaatgttgattttcaacctcctctttgtgtttggaattgaaaactccaataagaacttgcagacaagtgatggtgacatcaataatattgactttgacaataatgacatacccaggacagacaccattaacatcccgaatcccatgtgcactgcgattgccgccttactgcactattttctgttagtgacatttacctggaacgcactcagcgctgcacagctctattaccttctaataaggaccatgaagcctcttcctcggcatttcattcttttcatctcattaattggatggggagtcccagctatagtagtggctataacagtgggagttatttattctcagaatggaaataatccacagtgggaattagactaccggcaagagaaaatctgctggctggcaattccagaacccaatggtgttataaaaagtccgctgttgtggtcattcatcgtacctgtaaccattatcctcatcagcaatgttgttatgtttattacaatctcgatcaaagtgctgtggaagaataaccagaacctgacaagcacaaaaaaagtttcatccatgaagaagattgttagcacattatctgttgcagttgtttttggaattacctggattctagcatacctgatgctagttaatgatgatagcatcaggatcgtcttcagctacatattctgccttttcaacactacacagggattgcaaatttttatcctgtacactgttagaacaaaagtcttccagagtgaagcttccaaagtgttgatgttgctatcgtctattgggagaaggaagtcattgccttcagtgacgcggccgaggctgcgtgtaaagatgtataatttcctcaggtcattgccaaccttacatgaacgctttaggctactggaaacctctccgagtactgaggaaatcacactctctgaaagtgacaatgcaaaggaaagcatctagacagtaaaacttacctgttgtggtctttttaatcacctcgtttgagttttatctgtttctctcctttatttcccagtcctctcagaaagtcttcctcaatgtattttgctcaggattaagaattagataaaacctgttgtttattattattcggcataatggacttggtagtttttctatttttcaatagatttgtacttgaataaggtgaagaatttcacacaacatacaagagtaccattgttccttatatcgttaaatctttgtgacacactttgacaaaaatgtagaacctataacaaattcttttacaagttactataaaggacacaaagagaaaactttaccttccagaacaaaatgactcctgatgaacagtgtgtggggatttgcttgtatgtattaaacttttgacctctgaatattttacagtcgtatgtgcttgtacttttatttccaatgaagaatttggcaccaa

SEQ ID NO: 225616 - DNA, 2394 bp, Artificial Sequence
  derived and/or modified sequence
atggcatcctgtcgggcttggaacttgcgggtacttgtagctgtcgtatgtggactgcttactggaattattcttggtcttggcatctggaggatagtcatcagaatccagaggggtaaatctacttcttcatcctcaactcctaccgaattttgcaggaacggaggcacctgggagaatgggcgctgcatctgcacagaagagtggaaaggactccgatgcactatcgctaatttctgcgaaaattctacctacatgggttttacattcgctcgaattcccgtcggccggtacggccctagtcttcaaacatgcgggaaagatacccctaatgccggaaatcctatggcagtgcgtttgtgctccttgagcttatatggggagattgagttgcagaaggtcacgatcggcaattgcaatgaaaacctagaaactcttgagaagcaggtcaaggatgtaacagctccactgaataacataagctctgaggttcagatcctgactagcgacgctaacaagttgaccgccgagaacattacatctgccacgcgggtggtgggccaaatcttcaacacgtctaggaacgccagccctgaagctaagaaggtagcaatagtaacagtttcgcagctcctcgacgccagcgaagatgcttttcagagggtggccgccaccgccaatgacgacgccctgacaacgttaatcgaacagatggagacttatagcctgtccctgggaaaccagtcagtggttgaaccgaatattgccatccaatccgcaaatttttcctcagaaaacgctgtcggcccatctaacgttagattttccgtccagaagggcgccagctcctcattggtgtcatcatcgacgttcattcacactaacgttgatggactgaatcctgacgcccagacagagctgcaggtgctccttaacatgaccaaaaactacaccaaaacatgtggattcgtcgtgtaccagaacgataagctgtttcagtcaaaaactttcaccgccaagagtgacttctcccagaaaattattagcagcaaaaccgacgaaaacgagcaggatcagtcagcaagcgtggacatggtgttcagtccaaagtataaccagaaggagttccagctctactcctatgcctgcgtttattggaacctgagtgcaaaagattgggacacatacggctgtcagaaagacaaggggacagacggtttcctgcgctgtaggtgcaatcatacaaccaattttgcagtcctcatgaccttcaagaaagactaccaataccccaagagtttagacatcctcagcaatgtcggctgtgcgctctccgtgacgggtctggcgttgacggtgatattccagattgttacacgcaaagtgaggaaaacaagcgtaacctgggtcctggttaatctgtgcatctctatgctcatctttaatttactgttcgtatttgggattgagaactccaacaagaaccttcagacctcggacggtgacattaataatatcgacttcgacaacaacgacattccacgcaccgatactattaatattcccaaccccatgtgcactgctatagcagctttgctgcactatttcctcctggttacttttacttggaatgcactgtctgccgcccaactgtactatctgttgatccgaacaatgaagcccctcccacgccacttcatactcttcattagtcttattgggtggggtgttcctgccatcgtggtggcgatcaccgtgggggtaatctattctcagaatggcaataatccccagtgggagctggactaccgccaagaaaagatctgctggcttgcaatcccggaacctaatggagtcatcaaaagccctcttctctggtcctttattgtgcctgttacgattattttgatttctaacgtggtgatgttcatcacaatttcaatcaaagtgctgtggaagaataatcagaacctgactagcacaaagaaggtctctagtatgaagaagatcgtttcgacactgtccgtggcagtggtctttggcatcacttggatattagcctacctgatgttagtgaacgatgatagcatacgcattgttttctcatacattttctgtctgttcaacactacccagggcctccagatcttcatcctgtacactgttaggactaaagtgtttcagagcgaagctagcaaggtgttgatgctgctgtcttctattggacggagaaaatctctacccagtgtcaccagaccccgattgagggtgaagatgtacaactttttaagaagtttaccaactttacatgagagatttaggcttctcgaaacgagcccgtcgacagaagagattaccttatcagagagcgacaatgctaaggaatctatttag

SEQ ID NO: 225617 - DNA, 2394 bp, Artificial Sequence
  derived and/or modified sequence
atggccagctgccgggcctggaacctgcgggtgctggtggccgtggtgtgtggcctgctgaccggcatcatcctgggcctgggcatctggagaattgtcatccgcatccagaggggcaagagcaccagcagcagcagcacccccacagagttctgcagaaatggaggcacctgggagaatggccgctgcatctgcacagaggagtggaagggcctgcgctgcaccatcgccaacttctgtgagaacagcacctacatgggcttcacctttgcccgcatccctgtgggccgctatggccccagcctgcagacctgtgggaaggacaccccaaatgccggcaaccccatggctgtgcggctgtgcagcctgagcctgtatggagaaattgagctgcagaaggtgaccatcggcaactgcaatgaaaacctggagaccctggagaagcaggtgaaggatgtgacagcccccctgaacaacatcagcagcgaggtgcagatcctgaccagtgatgccaacaagctgacagctgagaacatcaccagcgccaccagggtggtgggccagatcttcaacaccagcagaaatgccagccctgaggccaagaaggtggccatcgtgacagtgtcccagctgctggatgcctctgaagatgccttccagagggtggccgccacagccaatgatgatgccctgaccaccctgattgagcagatggagacctacagcctgagcctgggcaaccagagcgtggtggagcccaacatcgccatccagagcgccaacttcagcagtgaaaatgctgtgggccccagcaatgtgcgcttctctgtgcagaagggggccagcagcagcctggtgagcagcagcaccttcatccacaccaacgtggatggcctgaacccagatgcccagacagagctgcaggtgctgctgaacatgaccaagaactacaccaagacctgtggctttgtggtgtaccagaatgacaagctgttccagagcaagaccttcaccgccaagagtgacttcagccagaagatcatcagcagcaagacagatgaaaatgagcaggaccagagcgcctctgtggacatggtgttcagccccaagtacaaccagaaggagttccagctgtacagctatgcctgtgtgtactggaacctgagcgccaaggactgggacacctacggctgccagaaggacaagggcacagatggcttcctgcgctgccgctgcaaccacaccaccaactttgctgtgctgatgaccttcaagaaggactaccagtaccccaagagcctggacatcctgagcaatgtgggctgtgccctgtctgtgacaggcctggccctgaccgtcatcttccagatcgtgaccaggaaggtgaggaagacctctgtgacctgggtgctggtgaacctgtgcatctccatgctgatcttcaacctgctgtttgtgtttggaattgagaacagcaacaagaacctgcagaccagtgatggagacatcaacaacatcgactttgacaacaatgacatccccaggacagacaccatcaacatccccaaccccatgtgcacagccatcgccgccctgctgcactacttcctgctggtgaccttcacctggaatgccctgtctgctgcccagctgtactacctgctgatccgcaccatgaagcccctgcccaggcacttcatcctcttcatcagcctgattggctggggcgtgcctgccatcgtggtggccatcaccgtgggcgtcatctacagccagaatggaaacaacccccagtgggagctggactaccggcaggagaagatctgctggctggccatccctgagcccaatggagtcatcaagagccccctgctgtggagcttcatcgtgcctgtgaccatcatcctgatcagcaatgtggtgatgttcatcaccatcagcatcaaggtgctgtggaagaacaaccagaacctgaccagcaccaagaaggtgtcctccatgaagaagatcgtgtccaccctgtctgtggccgtggtgtttggcatcacctggatcctggcctacctgatgctggtgaatgatgacagcatcagaattgtgttctcctacatcttctgcctcttcaacaccacccagggcctgcagatcttcatcctgtacacagtgaggaccaaggtgttccagagcgaggccagcaaggtgctgatgctgctgagcagcattggaagaaggaagagcctgcccagcgtgacccggccccggctgcgggtgaagatgtacaacttcctgcggagcctgcccaccctgcacgagcgcttccggctgctggagaccagccccagcacagaggagatcaccctgtctgagagtgacaatgccaaggagagcatctag

SEQ ID NO: 225618 - DNA, 2394 bp, Artificial Sequence
  derived and/or modified sequence
atggccagctgccgggcctggaacctgcgggtgctggtggccgtggtgtgtggccttttgacgggaatcatacttggattgggaatttggaggattgtgattaggatccagcgaggcaagtctacaagctcctcatctaccccaaccgagttttgtcgtaacggggggacctgggagaacgggcggtgcatctgcactgaggagtggaaggggcttcgctgtacaatcgcaaatttctgcgagaatagcacctatatgggctttaccttcgcacgcatccctgttggacgatatggcccctctttacaaacatgtgggaaagataccccaaatgccgggaatccaatggcagtacggctgtgctccctcagtctgtacggcgaaatcgagctccagaaggtgacgatcggaaactgcaacgaaaaccttgaaactctggagaagcaggtgaaagacgtgaccgcacccctgaacaacatttcctctgaagtccaaatcctgactagcgacgctaacaaactgactgcggaaaacattactagtgcgacccgcgtcgttggtcagatttttaacacgagcagaaacgcatctccggaggctaagaaagttgccatcgttacagtgagccagttactcgatgcttccgaggatgcctttcagagagtggcggctaccgcgaacgatgacgcccttaccacgctaatcgagcagatggagacctatagcctgtccctagggaatcagtcagtggtcgagccgaacattgccattcagtctgctaatttctccagcgagaatgccgtcggcccatctaacgtgaggttttctgtccaaaagggcgcaagctcctcactggtgtcctccagtacttttatccatactaacgtggatggactcaatcctgacgctcaaacggaacttcaggtcctcctgaacatgaccaagaactataccaagacctgtggctttgtggtgtaccaaaacgataagctgttccagtcaaagacatttacagcaaagtccgatttttctcagaagatcatctcttctaagaccgatgaaaacgaacaggatcagtcagcttctgtggatatggtgttttccccgaagtacaaccagaaagagtttcaactgtactcttatgcctgcgtgtattggaacctgtccgcaaaagattgggatacatacggctgtcagaaggataagggaactgatgggttcctgcgctgccggtgcaaccacaccaccaacttcgccgtattaatgacttttaaaaaagactaccaataccctaagtcactggacatcctttcaaacgtgggatgtgcattgtcagtgacaggactggccctgactgtgatcttccagatagtgacacggaaggtgagaaaaacttctgtgacatgggttctcgtgaatctgtgtatttccatgctgatatttaatttactctttgttttcggaattgaaaattctaacaagaatttacagacaagcgacggagacatcaacaatattgattttgacaataacgatatccctcgtactgacactataaacatccctaacccgatgtgcactgcgatcgctgctctgttacactactttcttctggtgacatttacttggaacgccctttcggccgcccagctttattatctgctgatcagaaccatgaaaccactgccaaggcattttatcttgtttattagcctgatcggatggggagtgcccgccatagtcgtggcgattactgttggcgttatatacagccagaatggaaacaacccccaatgggagctggactatcgacaggaaaagatctgctggctggccattcctgagcctaatggcgtcataaagtcccctttgctgtggtccttcatcgtgccagtgacaatcattctgattagcaatgttgtaatgtttatcactatcagtatcaaagtcctctggaagaacaatcagaacctgacctccacaaaaaaggtgtcatctatgaagaaaatagtcagtaccctatcagtggcggtggttttcggtatcacctggatcctcgcttacctgatgttagtgaatgatgactctattcggatcgtcttctcttacatcttttgcctctttaatacaacgcagggcctgcagatctttatcctgtacaccgttcgcacaaaggtttttcagagcgaggcctccaaggtgctgatgctgctctcctcaatcgggcggagaaaatctctgccctcagttaccaggcctaggttgagagtgaagatgtataacttcttgagaagcctccctaccctccacgaacgttttcggctgctcgaaacctcaccaagcactgaagaaataacccttagcgagtctgacaacgccaaagagagcatctag

SEQ ID NO: 225619 - DNA, 2394 bp, Artificial Sequence
  derived and/or modified sequence
atggcgtcttgtcgcgcttggaacctcagagtgctggtggcagttgtttgtgggctgctgacgggaataattctggggctgggcatctggcggattgtcattaggatccagcgcggtaagagcacctctagtagttccacacccactgaattctgcagaaatggcggtacatgggagaacggacgctgtatatgcactgaggagtggaagggtctgagatgcacaatagcaaacttctgtgaaaatagtacctatatgggcttcacctttgctcggatccctgtcggcagatatggtcccagtctccaaacatgcggaaaggatactcctaacgcaggtaacccgatggctgtgcggttgtgctccctctcattgtacggcgaaatcgagctacagaaagttaccattggtaattgcaacgaaaaccttgagacattagaaaagcaggtgaaagacgtcacagcccctctgaacaacattagctccgaagtccagattctgacttccgatgccaataagctcaccgccgagaatattacctcagccaccagggtggttggacagatcttcaacacatccagaaatgcctcaccagaggcaaagaaggtcgctatagtgaccgtgtcacagctgctcgacgcaagcgaagacgccttccaacgggtggctgcaaccgcgaacgatgacgccctgacaacacttatagagcaaatggaaacatactctctgtccctcggcaatcagagtgtggtggagccaaacatagccatccagtctgccaacttcagctccgagaacgccgtgggaccttcaaatgtaaggttcagcgtccaaaagggcgcttccagtagcctggtgagcagctccacattcattcacaccaacgtggatggccttaacccagatgcccaaacagagctccaagttctgctgaacatgacaaagaattataccaagacttgtggcttcgtggtttaccaaaacgacaaacttttccagtctaaaactttcactgctaaatccgacttctcccaaaaaatcatctctagcaagactgacgaaaatgagcaggatcaatccgcatccgtggacatggtgttctctcccaagtataaccaaaaagaattccagctatattcttacgcctgcgtgtactggaatcttagcgcaaaggattgggacacttacggatgtcagaaggacaaggggaccgacggttttctgaggtgcaggtgtaatcacaccactaacttcgcggtcctaatgaccttcaagaaagattaccaatatcctaaatcactggatattctctccaatgtgggatgcgccttatccgttactgggctggccttgacagttatctttcagattgtgactagaaaagtgaggaaaacaagtgtgacctgggtgctggtgaacctgtgtatctcaatgctgatattcaatctattgtttgttttcgggatagagaattccaataaaaatcttcagacgtctgacggggatatcaataatatcgattttgacaataatgatataccacgtaccgacactatcaatatcccaaatcctatgtgcactgctatagcagcgctgctgcattattttctgctcgtgacctttacctggaacgctctctcagctgctcaactgtattatctgcttatcaggacaatgaaaccactcccgagacactttatccttttcatatctctgatcggctggggtgtgccagctatcgtcgtggccataacggtcggagtgatatactctcagaatgggaataatccacaatgggaactggattaccgtcaagaaaaaatctgctggctcgccattcctgagcctaacggcgtgatcaagagccccctactctggagtttcatagtcccagtaacaattattttgatttccaatgtggtcatgtttatcactataagtataaaggtcctgtggaagaataatcaaaacctgaccagcaccaaaaaggtgtcttcaatgaaaaaaattgtgtccacactttccgtggcggtggtattcggaatcacgtggatcctggcctacctcatgctggttaacgatgattcaattaggatcgtgttttcctacatcttttgcctgtttaataccactcagggactccaaattttcatcttgtataccgtacggacgaaggtcttccagagcgaagcatccaaggtgttgatgctcctttcgtcaatcgggaggcgcaaaagcctccctagtgttaccaggccaaggctgagagtgaagatgtacaacttccttaggagtttgccgaccctacatgagcggttccgtctattggagacaagtccgtcaacagaggaaattactctgagcgaaagcgacaatgcgaaggaatccatctag

SEQ ID NO: 225620 - DNA, 2394 bp, Artificial Sequence
  derived and/or modified sequence
atggccagctgcagagcctggaacctgagagtgctggtggccgtggtgtgcggcctgctgaccggcatcatcctgggcctgggcatctggagaatcgtgatcagaatccagagaggcaagagcaccagcagcagcagcacccccaccgagttctgcagaaacggcggcacctgggagaacggcagatgcatctgcaccgaggagtggaagggcctgagatgcaccatcgccaacttctgcgagaacagcacctacatgggcttcaccttcgccagaatccccgtgggcagatacggccccagcctgcagacctgcggcaaggacacccccaacgccggcaaccccatggccgtgagactgtgcagcctgagcctgtacggcgagatcgagctgcagaaggtgaccatcggcaactgcaacgagaacctggagaccctggagaagcaggtgaaggacgtgaccgcccccctgaacaacatcagcagcgaggtgcagatcctgaccagcgacgccaacaagctgaccgccgagaacatcaccagcgccaccagagtggtgggccagatcttcaacaccagcagaaacgccagccccgaggccaagaaggtggccatcgtgaccgtgagccagctgctggacgccagcgaggacgccttccagagagtggccgccaccgccaacgacgacgccctgaccaccctgatcgagcagatggagacctacagcctgagcctgggcaaccagagcgtggtggagcccaacatcgccatccagagcgccaacttcagcagcgagaacgccgtgggccccagcaacgtgagattcagcgtgcagaagggcgccagcagcagcctggtgagcagcagcaccttcatccacaccaacgtggacggcctgaaccccgacgcccagaccgagctgcaggtgctgctgaacatgaccaagaactacaccaagacctgcggcttcgtggtgtaccagaacgacaagctgttccagagcaagaccttcaccgccaagagcgacttcagccagaagatcatcagcagcaagaccgacgagaacgagcaggaccagagcgccagcgtggacatggtgttcagccccaagtacaaccagaaggagttccagctgtacagctacgcctgcgtgtactggaacctgagcgccaaggactgggacacctacggctgccagaaggacaagggcaccgacggcttcctgagatgcagatgcaaccacaccaccaacttcgccgtgctgatgaccttcaagaaggactaccagtaccccaagagcctggacatcctgagcaacgtgggctgcgccctgagcgtgaccggcctggccctgaccgtgatcttccagatcgtgaccagaaaggtgagaaagaccagcgtgacctgggtgctggtgaacctgtgcatcagcatgctgatcttcaacctgctgttcgtgttcggcatcgagaacagcaacaagaacctgcagaccagcgacggcgacatcaacaacatcgacttcgacaacaacgacatccccagaaccgacaccatcaacatccccaaccccatgtgcaccgccatcgccgccctgctgcactacttcctgctggtgaccttcacctggaacgccctgagcgccgcccagctgtactacctgctgatcagaaccatgaagcccctgcccagacacttcatcctgttcatcagcctgatcggctggggcgtgcccgccatcgtggtggccatcaccgtgggcgtgatctacagccagaacggcaacaacccccagtgggagctggactacagacaggagaagatctgctggctggccatccccgagcccaacggcgtgatcaagagccccctgctgtggagcttcatcgtgcccgtgaccatcatcctgatcagcaacgtggtgatgttcatcaccatcagcatcaaggtgctgtggaagaacaaccagaacctgaccagcaccaagaaggtgagcagcatgaagaagatcgtgagcaccctgagcgtggccgtggtgttcggcatcacctggatcctggcctacctgatgctggtgaacgacgacagcatcagaatcgtgttcagctacatcttctgcctgttcaacaccacccagggcctgcagatcttcatcctgtacaccgtgagaaccaaggtgttccagagcgaggccagcaaggtgctgatgctgctgagcagcatcggcagaagaaagagcctgcccagcgtgaccagacccagactgagagtgaagatgtacaacttcctgagaagcctgcccaccctgcacgagagattcagactgctggagaccagccccagcaccgaggagatcaccctgagcgagagcgacaacgccaaggagagcatctag

SEQ ID NO: 225621 - protein, 303 aa, Artificial Sequence
  derived and/or modified sequence
MHPEPAPPPSRSSPELPPSGGSTTSGSRRSRRRSGDGEPPGAPPPPPPPSAVTYPDWIGQSYSEVMSLNEHSMQALSWRKLYLSRAKLKASSRTSALLSGFAMVAMVEVQLDADHDYPPGLLIAFSACTTVLVAVHLFALMISTCILPNIEAVSNVHNLNSVKESPHERMHRHIELAWAFSTVIGTLLFLAEVVLLCWVKFLPLKKQPGQPRPTSKPPASGAAANVSTSGITPGQAAAIASTTIMVPFGLIFIVFAVHFYRSLVSHKTDRQFQELNELAEFARLQDQLDHRGDHPLTPGSHYA

SEQ ID NO: 225622 - DNA, 912 bp, Artificial Sequence
  derived and/or modified sequence
atgcaccccgaaccagcacctcccccatcaaggtcctcccccgagctccctccaagcggcggctcaaccacctctggcagccgcaggtctcgaagacgttcaggggacggcgaacctccgggcgcacctcccccacccccgccaccctcagcggtgacctaccccgattggatcgggcaaagttacagcgaagttatgtccctaaacgagcatagcatgcaggccctatcttggagaaagctgtatctgagtcgcgctaagttgaaggcctcaagtcggacttcggcactgctgtccggattcgccatggtcgcgatggtcgaagtgcagctcgacgccgaccacgactaccccccaggtctgctgatcgcttttagtgcctgcacgacggtactggtggcggttcacctgtttgcgctgatgataagcacttgtattctgcccaatatcgaagcagtgtcaaatgtgcataatcttaatagcgtgaaggaatcacctcatgaaaggatgcatcgccacatagagctggcatgggccttttccactgttatagggaccctcctgttcctcgccgaggtcgttctcttgtgctgggtcaaatttctacctctgaaaaagcaacccggacaaccaaggcccacatcaaagccccccgcttccggcgctgctgccaatgtcagtacatccgggataactccagggcaggcagcggccatcgcttctacaacaataatggtgcccttcggtctgatctttatagtatttgcagtgcatttctatagaagtttagtgtcccacaaaaccgacagacagttccaggaactaaatgaactggcagagttcgctaggctgcaggatcaattggaccatagaggcgaccacccgctaacacccgggtcccattatgcatag

SEQ ID NO: 225623 - DNA, 912 bp, Artificial Sequence
  derived and/or modified sequence
atgcaccctgagcccgcccccccacccagccgcagcagccctgagctgcccccatctgggggcagcaccaccagcggcagccgccgcagcagaagaagaagtggagatggagagcccccaggggcccctcctcctcctcctccacccagcgctgtgacctacccagactggattggccagagctacagcgaggtgatgagcctgaatgagcacagcatgcaggccctgtcctggaggaagctgtacctgagccgggccaagctgaaggccagcagcaggaccagcgccctgctgagcggctttgccatggtggccatggtggaggtgcagctggatgctgaccatgactacccacctggcctgctgattgccttcagcgcctgcaccaccgtgctggtggccgtgcacctgtttgccctgatgatcagcacctgcatcctgcccaacatcgaggccgtgtccaatgtgcacaacctgaacagcgtgaaggagagcccccatgagaggatgcaccgccacatcgagctggcctgggccttcagcaccgtcatcggcaccctgctcttcctggccgaggtggtgctgctgtgctgggtgaagttcctgcccctgaagaagcagcccggccagccccggcccaccagcaagcccccagccagcggggctgctgccaacgtgtccaccagcggcatcaccccaggccaggccgccgccatcgccagcaccaccatcatggtgcccttcggcctcatcttcatcgtgtttgctgtgcacttctaccgcagcctggtgagccacaagacagaccggcagttccaggagctgaatgagctggccgagtttgcccggctgcaggaccagctggaccacagaggagaccaccccctgaccccaggcagccactacgcctag

SEQ ID NO: 225624 - DNA, 912 bp, Artificial Sequence
  derived and/or modified sequence
atgcaccccgagcccgcccccccccccagccggagcagccccgagctccccccatctggcggctctacaacttcggggagtcgacggtctcggcggagatcaggtgacggcgagcctcccggggctcctccccccccaccgccaccaagcgcggtgacttaccctgactggattggccagtcatactccgaggtgatgagcctcaacgaacactccatgcaagcgcttagttggcgcaagctctacctgtccagggccaagctgaaggcctcttcccggaccagtgctctgctgtctggttttgccatggtggcgatggtggaagtgcagctcgacgcagaccatgattatcctccaggccttttgatcgcgtttagcgcatgcacaactgtcctggtggccgtgcacctttttgccctgatgatctctacgtgtatactgcctaatatcgaggcagtgtccaacgtacataacttgaatagcgtgaaggagtcccctcatgagaggatgcatagacacatcgagctggcttgggccttctcaactgtgataggtaccctgctcttcctagccgaggtggttctcctctgttgggtcaaatttctgcctctgaagaagcagcctggacagccaagacccacatctaagcctcccgctagtggcgctgcagcgaatgtttccacctcagggatcacaccaggccaagccgctgcaatagcctccactaccattatggtgccattcggtcttatcttcatagtgttcgctgtccacttctaccggtccctggtttcacacaaaacggaccgacagttccaggagttgaatgagctggccgaatttgccagattgcaggaccagctggatcataggggggaccacccactgacgccaggaagccattacgcttag

SEQ ID NO: 225625 - DNA, 2139 bp, Artificial Sequence
  derived and/or modified sequence
gccgcccgggggcttttgccagcggcgccgcgggcctgcgtgctggggcagcgggcacttcttcgacctcgtcctcctcgtcctgtgcggccggccgggtgaggccgggcccgcgtagggggcagtcggcggctgcctccggcggaggtgcctcgcggcgcccgggccggcccgcgcctcggcggcgtgctccatgcatccggagcccgccccgcccccgagccgcagcagtcccgagcttcccccaagcggcggcagcaccaccagcggcagccgccggagccgccgccgcagcggggacggggagcccccgggggccccgccaccgccaccgccgccgtccgccgtcacctacccggactggatcggccagagttactccgaggtgatgagcctcaacgagcactccatgcaggcgctgtcctggcgcaagctctacttgagccgcgccaagcttaaagcctccagccggacctcggctctgctctccggcttcgccatggtggcaatggtggaggtgcagctggacgctgaccacgactacccaccggggctgctcatcgccttcagtgcctgcaccacagtgctggtggctgtgcacctgtttgcgctcatgatcagcacctgcatcctgcccaacatcgaggcggtgagcaacgtgcacaatctcaactcggtcaaggagtccccccatgagcgcatgcaccgccacatcgagctggcctgggccttctccaccgtcatcggcacgctgctcttcctagctgaggtggtgctgctctgctgggtcaagttcttgcccctcaagaagcagccaggccagccaaggcccaccagcaagccccccgccagtggcgcagcagccaacgtcagcaccagcggcatcaccccgggccaggcagctgccatcgcctcgaccaccatcatggtgcccttcggcctgatctttatcgtcttcgccgtccacttctaccgctcactggttagccataagactgaccgacagttccaggagctcaacgagctggcggagtttgcccgcttacaggaccagctggaccacagaggggaccaccccctgacgcccggcagccactatgcctaggcccatgtggtctgggcccttccagtgctttggccttacgcccttccccttgaccttgtcctgccccagcctcacggacagcctgcgcagggggctgggcttcagcaaggggcagagcatggagggaagaggatttttataagagaaatttctgcactttgaaactgtcctctaagagaataagcatttcctgttcttccagctccaggtccacctcctgttgggaggcggtggggggccaaagtggggccacacactcgctgtgtcccctctcctcccctgtgccagtgccacctgggtgcctcctcctgtcctgtccgtctcaacctccctcccgtccagcattgagtgtgtacatgtgtgtgtgacacataaatatactcataaggacacctccttcccgtgtcttgtatttgttgggcctgggctactgctcaccctggttaggtgagcctctaggaaaacttaaaacaaattttaagccaggtatggtggcacatacctgtggtctcagctattcaggaggccaaggcaggaggatctcttgagcccaggagtttgagaccccatctcaaacaaaaaatacaaaaattagccagccacggcgcctgcacttccagctcctttgagagactgaggcaggaagattgcctaagcccaggaggccaagtctgcagtgagctatggtaacaccactgcactccaacctgggcaacagagggagactctgtctctaaaaaaatagaaaaatttgccctgcatggtggctcacgcctgtaatcctagccctttggaaggccaaggcgggcagatcacttgaggtcgggagttcgagaccagcctgaccaacatggagaaaccccatctgtactaaaaatacaaaattagctgggtttggtggcgcatgcttgtaatcccagctactcgggaggctgaggcaggagaatcgcttgaacccaggaggcggaggttgcagtgagctgagatcgcgccattgcactccagcctgggcaacaacagtgaaactccgtctc

SEQ ID NO: 225626 - DNA, 912 bp, Artificial Sequence
  derived and/or modified sequence
atgcatccagagcctgccccacccccaagccgtagctctccagagctcccaccttccggcggttccaccacctcaggaagtaggagaagccgtagacgttccggagatggagagccaccaggcgcacccccaccaccacctccgcctagcgccgtgacctatccggattggattggccagagctatagcgaagttatgagtctgaatgagcatagcatgcaggcactttcatggcgtaaattgtacttatcaagggccaaactgaaggccagcagtaggacgtccgccctcctgtccgggttcgcaatggtagccatggtggaagtacagctggacgcagatcatgattaccccccagggttgctgatcgctttttctgcctgtaccactgtcctcgtggctgtgcatctatttgctctgatgatttccacctgtatcctcccaaatattgaagccgtgtcgaacgtgcacaatctgaacagtgtcaaagagagtcctcacgaaaggatgcatagacacatcgagctggcctgggcattctccacagtcattggaacccttcttttcctggccgaggtagtcttactctgttgggtgaaatttcttcccctcaaaaagcaacctggacagccacgccctacatcaaagcctcccgcatctggagccgctgcgaacgtgagcacgtcaggtatcaccccaggtcaggcagcagcaatagccagcaccacaatcatggtccccttcggtttgatatttattgtctttgccgtgcacttctatcgtagcttggtcagccacaagacggaccgtcagttccaggagctgaatgaactggccgaattcgcacggctgcaggatcagctggaccacagaggggatcacccactcacacccggttcccattatgcttag

SEQ ID NO: 225627 - DNA, 912 bp, Artificial Sequence
  derived and/or modified sequence
atgcaccccgagcccgcccccccccccagcagaagcagccccgagctgccccccagcggcggcagcaccaccagcggcagcagaagaagcagaagaagaagcggcgacggcgagccccccggcgcccccccccccccccccccccccagcgccgtgacctaccccgactggatcggccagagctacagcgaggtgatgagcctgaacgagcacagcatgcaggccctgagctggagaaagctgtacctgagcagagccaagctgaaggccagcagcagaaccagcgccctgctgagcggcttcgccatggtggccatggtggaggtgcagctggacgccgaccacgactacccccccggcctgctgatcgccttcagcgcctgcaccaccgtgctggtggccgtgcacctgttcgccctgatgatcagcacctgcatcctgcccaacatcgaggccgtgagcaacgtgcacaacctgaacagcgtgaaggagagcccccacgagagaatgcacagacacatcgagctggcctgggccttcagcaccgtgatcggcaccctgctgttcctggccgaggtggtgctgctgtgctgggtgaagttcctgcccctgaagaagcagcccggccagcccagacccaccagcaagccccccgccagcggcgccgccgccaacgtgagcaccagcggcatcacccccggccaggccgccgccatcgccagcaccaccatcatggtgcccttcggcctgatcttcatcgtgttcgccgtgcacttctacagaagcctggtgagccacaagaccgacagacagttccaggagctgaacgagctggccgagttcgccagactgcaggaccagctggaccacagaggcgaccaccccctgacccccggcagccactacgcctag

SEQ ID NO: 225628 - protein, 267 aa, Artificial Sequence
  derived and/or modified sequence
MAPWALLSPGVLVRTGHTVLTWGITLVLFLHDTELRQWEEQGELLLPLTFLLLVLGSLLLYLAVSLMDPGYVNVQPQPQEELKEEQTAMVPPAIPLRRCRYCLVLQPLRARHCRECRRCVRRYDHHCPWMENCVGERNHPLFVVYLALQLVVLLWGLYLAWSGLRFFQPWGQWLRSSGLLFATFLLLSLFSLVASLLLVSHLYLVASNTTTWEFISSHRIAYLRQRPSNPFDRGLTRNLAHFFCGWPSGSWETLWAEEEEEGSSPAV

SEQ ID NO: 225629 - protein, 281 aa, Artificial Sequence
  derived and/or modified sequence
MAPWALLSPGVLVRTGHTVLTWGITLVLFLHDTGEPDPERPRTHPIPQLRQWEEQGELLLPLTFLLLVLGSLLLYLAVSLMDPGYVNVQPQPQEELKEEQTAMVPPAIPLRRCRYCLVLQPLRARHCRECRRCVRRYDHHCPWMENCVGERNHPLFVVYLALQLVVLLWGLYLAWSGLRFFQPWGQWLRSSGLLFATFLLLSLFSLVASLLLVSHLYLVASNTTTWEFISSHRIAYLRQRPSNPFDRGLTRNLAHFFCGWPSGSWETLWAEEEEEGSSPAV

SEQ ID NO: 225630 - DNA, 804 bp, Artificial Sequence
  derived and/or modified sequence
atggccccctgggccctgctgagccccggcgtgctggtgagaaccggccacaccgtgctgacctggggcatcaccctggtgctgttcctgcacgacaccgagctgagacagtgggaggagcagggcgagctgctgctgcccctgaccttcctgctgctggtgctgggcagcctgctgctgtacctggccgtgagcctgatggaccccggctacgtgaacgtgcagccccagccccaggaggagctgaaggaggagcagaccgccatggtgccccccgccatccccctgagaagatgcagatactgcctggtgctgcagcccctgagagccagacactgcagagagtgcagaagatgcgtgagaagatacgaccaccactgcccctggatggagaactgcgtgggcgagagaaaccaccccctgttcgtggtgtacctggccctgcagctggtggtgctgctgtggggcctgtacctggcctggagcggcctgagattcttccagccctggggccagtggctgagaagcagcggcctgctgttcgccaccttcctgctgctgagcctgttcagcctggtggccagcctgctgctggtgagccacctgtacctggtggccagcaacaccaccacctgggagttcatcagcagccacagaatcgcctacctgagacagagacccagcaaccccttcgacagaggcctgaccagaaacctggcccacttcttctgcggctggcccagcggcagctgggagaccctgtgggccgaggaggaggaggagggcagcagccccgccgtgtag

SEQ ID NO: 225631 - DNA, 648 bp, Artificial Sequence
  derived and/or modified sequence
atggccccctgggccctgctgagccccggcgtgctggtgagaaccggccacaccgtgctgacctggggcatcaccctggtgctgttcctgcacgacaccgagctgagacagtgggaggagcagggcgagctgctgctgcccctgaccttcctgctgctggtgctgggcagcctgctgctgtacctggccgtgagcctgatggaccccggctacgtgaacgtgcagccccagccccaggaggagctgaaggaggagcagaccgccatggtgccccccgccatccccctgagaagatgcagatactgcctggtgctgcagcccctgagagccagacactgcagagagtgcagaagatgcgtgagaagatacgaccaccactgcccctggatggagaactgcgtgggcgagagaaaccaccccctgttcgtggtgtacctggccctgcagctggtggtgctgctgtggggcctgtacctggcctggagcggcctgagattcttccagccctggggccagtggctgagaagcagcggcctgctgttcgccaccttcctgctgctgagccacttcttctgcggctggcccagcggcagctgggagaccctgtgggccgaggaggaggaggagggcagcagccccgccgtgtag

SEQ ID NO: 225632 - DNA, 846 bp, Artificial Sequence
  derived and/or modified sequence
atggccccctgggccctgctgagccccggcgtgctggtgagaaccggccacaccgtgctgacctggggcatcaccctggtgctgttcctgcacgacaccggcgagcccgaccccgagagacccagaacccaccccatcccccagctgagacagtgggaggagcagggcgagctgctgctgcccctgaccttcctgctgctggtgctgggcagcctgctgctgtacctggccgtgagcctgatggaccccggctacgtgaacgtgcagccccagccccaggaggagctgaaggaggagcagaccgccatggtgccccccgccatccccctgagaagatgcagatactgcctggtgctgcagcccctgagagccagacactgcagagagtgcagaagatgcgtgagaagatacgaccaccactgcccctggatggagaactgcgtgggcgagagaaaccaccccctgttcgtggtgtacctggccctgcagctggtggtgctgctgtggggcctgtacctggcctggagcggcctgagattcttccagccctggggccagtggctgagaagcagcggcctgctgttcgccaccttcctgctgctgagcctgttcagcctggtggccagcctgctgctggtgagccacctgtacctggtggccagcaacaccaccacctgggagttcatcagcagccacagaatcgcctacctgagacagagacccagcaaccccttcgacagaggcctgaccagaaacctggcccacttcttctgcggctggcccagcggcagctgggagaccctgtgggccgaggaggaggaggagggcagcagccccgccgtgtag

SEQ ID NO: 225633 - DNA, 804 bp, Artificial Sequence
  derived and/or modified sequence
atggccccatgggctctgttgtcccctggagtgctcgtgcgcacagggcacacagtgctgacctgggggattactctagtgcttttcctgcatgatacagaactacgtcaatgggaggagcaaggtgagttgctactgcctcttacctttttactcctggtgcttggcagcctgctcttatatctggccgtatccctgatggacccaggttacgtgaatgtccaaccacagccacaggaggagctcaaggaggagcagaccgccatggtgccacccgctatccccctgcgaagatgcagatactgcctggtcctacagcccctgcgcgccaggcattgtcgggaatgtcgtagatgcgtgcgaaggtacgatcatcactgtccttggatggagaattgcgttggtgaaaggaatcacccattattcgtcgtgtacttggcactacagcttgtggtgctgctgtggggactgtatttggcgtggtctggtctgaggtttttccagccatgggggcagtggcttcgaagctcaggtctgctgtttgcaacattcctgttgctcagtctgtttagtcttgttgcctcactactgctggtatcacacctttacctggtggcttctaataccacaacttgggagttcatctcatctcacagaatcgcctacctgcggcagagacccagtaatccctttgacaggggcctgacacgcaacctcgctcactttttctgtggatggcctagtggttcctgggagactctgtgggccgaggaagaggaggaggggtcgagcccggccgtgtag

SEQ ID NO: 225634 - DNA, 648 bp, Artificial Sequence
  derived and/or modified sequence
atggctccctgggccctcctgtctccaggagtcttagtgcgtaccgggcacactgtgttaacctggggaatcacactggttttgttcttgcacgatacagaactgaggcagtgggaggagcagggtgaactgctactccctcttaccttcctgttactcgttctgggctcattgctgctgtacctcgccgttagccttatggatcctggatacgtgaacgtccagccgcagcctcaggaggaattgaaagaggaacagaccgcgatggttcctcccgccattccattacgacggtgccggtactgtttagtgcttcagcccttaagagctcggcactgcagggaatgcaggcggtgtgtgagacggtacgaccaccactgtccttggatggagaattgcgtcggtgaacggaaccaccctctttttgtggtctatctagccctgcagttggtggtactgctgtggggactgtacctggcatggagtgggctgagattcttccaaccgtggggacagtggctccgctcctctgggctgctgtttgcgacttttctcctactttctcacttcttttgtggatggccctcgggcagctgggaaactttgtgggctgaggaagaggaggaagggagctctccggctgtgtag

SEQ ID NO: 225635 - DNA, 846 bp, Artificial Sequence
  derived and/or modified sequence
atggcaccatgggctctgttatcccccggcgtcctcgtgcggactgggcacacggtcctgacttggggaatcaccctcgttcttttcctccatgacaccggtgagcccgatccagaaagaccccgcacgcatcctataccccagctgcgccagtgggaggagcaaggcgagttacttctccctttaaccttcctgttgttagtcctgggcagtctcctcctgtaccttgcggtatccttgatggatcctggttatgtcaacgtgcagcctcaaccccaggaagaacttaaggaggaacaaacagctatggtgcccccagccatccccttgcggaggtgcagatattgccttgtgctccagccactgcgggctaggcattgcagagagtgtcggcggtgtgttcgcaggtatgaccaccactgtccatggatggagaactgtgtcggggagagaaaccacccactgttcgttgtctacctggctctgcaactcgtggtgttgctttggggactgtaccttgcgtggagtggattgcgattttttcagccgtgggggcaatggttgagaagttccggcttgctcttcgcgactttcctcttgctatccctcttttcgctggttgcgagtctgctactggtgtcacacctctatctggtggcgtccaacacaacaacgtgggagttcatctcaagtcacagaattgcttacttgcgccagagaccctccaacccgttcgaccggggtctgactcgcaaccttgctcactttttctgcggctggccttcaggatcttgggaaactctctgggccgaagaagaggaggaggggagcagcccagctgtctag

SEQ ID NO: 225636 - DNA, 648 bp, Artificial Sequence
  derived and/or modified sequence
atggccccatgggcacttctgtcgcctggcgtactggtgagaaccggccacactgtcctgacctggggcattactctcgtcctttttctgcacgacacagagctgcgtcagtgggaagagcagggtgagcttctccttcctcttactttcttgctcctggtgcttggctcactgcttctgtacctcgccgtttctcttatggaccctggctacgtgaatgttcaaccgcagccacaggaagaactcaaagaggagcagacagccatggtaccaccggcgatccctctaagaagatgccgttactgtctcgtattgcagccacttcgggcgagacactgccgcgagtgccgacggtgtgtacggagatacgatcaccactgcccatggatggaaaattgtgttggggagcgcaaccatcccctctttgttgtttacctggccttgcagttagtggttcttctttggggcctatatctggcgtggtcaggtctccggttcttccagccctggggccagtggctgcggtctagcggactgctgtttgctacatttctcctactctctcatttcttctgcgggtggcctagcgggtcatgggaaaccctgtgggccgaggaggaggaggaaggaagctcacctgcagtgtag

SEQ ID NO: 225637 - DNA, 804 bp, Artificial Sequence
  derived and/or modified sequence
atggccccctgggccctgctgagccctggggtgctggtgaggacaggccacacagtgctgacctggggcatcaccctggtgctcttcctgcatgacacagagctgcggcagtgggaggagcagggcgagctgctgctgcccctgaccttcctgctgctggtgctgggcagcctgctgctgtacctggccgtgtccctgatggaccccggctacgtgaatgtgcagccccagccccaggaggagctgaaggaggagcagacagccatggtgcccccagccatccccctgcggcgctgccgctactgcctggtgctgcagcccctgcgggcccggcactgcagagaatgtagaagatgtgtgagaagatatgaccaccactgcccctggatggagaactgtgtgggggagaggaaccaccccctgtttgtggtgtacctggccctgcagctggtggtgctgctgtggggcctgtacctggcctggagcggcctgcgcttcttccagccctggggccagtggctgcggagcagcggcctgctgtttgccaccttcctgctgctgagcctcttcagcctggtggccagcctgctgctggtgagccacctgtacctggtggccagcaacaccaccacctgggagttcatcagcagccaccgcatcgcctacctgcggcagaggcccagcaacccctttgaccggggcctgaccaggaacctggcccacttcttctgtggctggcccagcggctcctgggagaccctgtgggccgaggaggaggaggagggcagcagccctgctgtgtag

SEQ ID NO: 225638 - DNA, 648 bp, Artificial Sequence
  derived and/or modified sequence
atggccccctgggccctgctgagccctggggtgctggtgaggacaggccacacagtgctgacctggggcatcaccctggtgctcttcctgcatgacacagagctgcggcagtgggaggagcagggcgagctgctgctgcccctgaccttcctgctgctggtgctgggcagcctgctgctgtacctggccgtgtccctgatggaccccggctacgtgaatgtgcagccccagccccaggaggagctgaaggaggagcagacagccatggtgcccccagccatccccctgcggcgctgccgctactgcctggtgctgcagcccctgcgggcccggcactgcagagaatgtagaagatgtgtgagaagatatgaccaccactgcccctggatggagaactgtgtgggggagaggaaccaccccctgtttgtggtgtacctggccctgcagctggtggtgctgctgtggggcctgtacctggcctggagcggcctgcgcttcttccagccctggggccagtggctgcggagcagcggcctgctgtttgccaccttcctgctgctgagccacttcttctgtggctggcccagcggctcctgggagaccctgtgggccgaggaggaggaggagggcagcagccctgctgtgtag

SEQ ID NO: 225639 - DNA, 846 bp, Artificial Sequence
  derived and/or modified sequence
atggccccctgggccctgctgagccctggggtgctggtgaggacaggccacacagtgctgacctggggcatcaccctggtgctcttcctgcatgacacaggagagccagaccctgagcggcccaggacccaccccatcccccagctgcggcagtgggaggagcagggcgagctgctgctgcccctgaccttcctgctgctggtgctgggcagcctgctgctgtacctggccgtgtccctgatggaccccggctacgtgaatgtgcagccccagccccaggaggagctgaaggaggagcagacagccatggtgcccccagccatccccctgcggcgctgccgctactgcctggtgctgcagcccctgcgggcccggcactgcagagaatgtagaagatgtgtgagaagatatgaccaccactgcccctggatggagaactgtgtgggggagaggaaccaccccctgtttgtggtgtacctggccctgcagctggtggtgctgctgtggggcctgtacctggcctggagcggcctgcgcttcttccagccctggggccagtggctgcggagcagcggcctgctgtttgccaccttcctgctgctgagcctcttcagcctggtggccagcctgctgctggtgagccacctgtacctggtggccagcaacaccaccacctgggagttcatcagcagccaccgcatcgcctacctgcggcagaggcccagcaacccctttgaccggggcctgaccaggaacctggcccacttcttctgtggctggcccagcggctcctgggagaccctgtgggccgaggaggaggaggagggcagcagccctgctgtgtag

SEQ ID NO: 225640 - DNA, 804 bp, Artificial Sequence
  derived and/or modified sequence
atggccccctgggccctgctgagccccggcgtgctggtgcggaccggccacaccgttctgacctggggcatcacgcttgtgcttttcctccatgatacggaactgcgtcagtgggaggagcagggtgagttattgctacccctgacctttctcctgctggtactgggttccctcttactgtacctcgcagttagcctcatggaccctggctacgtgaacgtacaacctcaaccccaggaagaactcaaggaagagcagaccgcaatggtgcctcccgccatccctctcaggcggtgtaggtactgcctggtgttacagcctctcagggcgagacactgtagagaatgcaggcgctgtgtgagaaggtatgaccaccactgcccctggatggaaaactgcgtgggggagcgcaaccatccccttttcgtagtctatctggccctccagcttgtggttttattgtggggcctgtacctcgcctggagcggactgcgcttctttcagccttgggggcagtggcttcgtagcagcgggctgctgtttgctaccttcctgctgctgtctctgttcagtttggtcgcatcccttctcctcgtttcgcacctgtatctcgttgcctcaaatacaaccacatgggagtttatcagtagtcatagaatcgcttatcttcgccagaggccatctaacccattcgatcgcggacttacacgtaatcttgcccactttttctgtggatggcccagcggatcctgggagactctgtgggctgaagaggaagaggagggtagttctcccgcggtttag

SEQ ID NO: 225641 - DNA, 648 bp, Artificial Sequence
  derived and/or modified sequence
atggccccctgggccctgctgagccccggcgtgctggtgcggaccggacatacagtccttacctgggggatcacccttgtgctgttcctgcacgacacggaactgcgccaatgggaagagcaaggggagttgctgctccccttaacctttctgttactggtgttagggtccctgctactgtacctagccgtctctctgatggaccccggatatgttaacgtccagccacagccccaggaagagctcaaagaagaacaaaccgccatggtacctcccgccatacctctgaggcggtgccgctattgcctggtgttgcagcctctgcgagctcgacactgcagagaatgtaggcggtgcgtgcgccgttatgatcaccactgcccttggatggaaaactgtgtgggcgaacgcaaccatccactctttgtagtgtacctggcacttcaactcgtggtactgctgtggggtctgtatctggcctggagtgggctgcggttttttcagccctgggggcaatggctgaggtcttccggactgcttttcgccaccttcctactgctctcgcactttttttgtggctggccaagtggttcctgggagaccctgtgggccgaggaagaggaagagggctcctcccccgcagtttag

SEQ ID NO: 225642 - DNA, 846 bp, Artificial Sequence
  derived and/or modified sequence
atggccccctgggccctgctgagccccggcgtgctggtgcggaccggacacactgtgctcacttggggcataactctggtcctatttctgcatgacaccggagagcccgatcctgagcgcccacgaacccaccctattccccaattgcgccagtgggaggagcagggcgaactgctgctgcccctgaccttcctgctgctggtgctgggctccctgcttctgtaccttgccgtgtctcttatggatcccgggtacgtgaatgtgcaaccccaacctcaggaggagctgaaggaagaacagacagccatggtgccgcccgctattcctctcaggaggtgtcgctattgtctggtcctccaacctctccgcgccagacactgtagagaatgtcgccggtgcgtaagacggtatgaccatcattgcccctggatggagaattgcgtaggcgagagaaaccatcctctgtttgtagtgtacctcgcgcttcagctggtggttctgctgtggggtctgtatcttgcctggtctgggctccgcttcttccaaccgtggggccagtggctccgcagttcgggtctcctgttcgctacgttcttgctgctcagcctctttagtttggtggcctctctcctactggtgagtcacttgtacctggtagctagcaataccacgacctgggaattcatttctagccacagaattgcatatcttcgccaacgacctagcaatccttttgatagaggacttactcgcaacctggcccacttcttttgtggttggccaagcggcagctgggagacactgtgggccgaagaagaggaagaaggctcctctccagccgtatag

SEQ ID NO: 225643 - DNA, 648 bp, Artificial Sequence
  derived and/or modified sequence
atggccccctgggccctgctgagccccggcgtgctggtgcggaccggccatactgtcctgacgtggggcatcactctggtcctgtttctgcacgatacagagcttaggcaatgggaagagcagggcgaactgcttttgcctctcacattcctgctcctcgtgctgggctccttgctgctctatttggccgtgagccttatggacccaggctacgtcaatgtgcagccacagccacaggaggagttaaaagaagagcagacagctatggtgccaccagctatcccgctacgaaggtgtagatattgcctggtgctccagcctctgagagctagacattgcagggaatgtaggcgctgtgtgaggcgttacgatcaccactgtccgtggatggagaactgcgttggggagaggaaccaccccctgttcgtcgtctacctggctctacagctggtggttctgctatggggtctctacttagcttggtctggacttagattcttccaaccatggggtcagtggctcaggtccagcggactgcttttcgctacgtttctgctactgtcacatttcttttgcggatggcctagcggatcttgggaaacattatgggctgaagaggaggaggagggctcttctcccgcagtctag

SEQ ID NO: 225644 - DNA, 804 bp, Artificial Sequence
  derived and/or modified sequence
atggctccgtgggccctactgagtcctggagtgctggtcagaacagggcacacagtgctgacgtgggggattaccttggtgctgttcctgcacgacacagaactgcggcagtgggaggagcaaggcgagttgctgcttccgctgactttcttgttgctggtactgggctctctgttgttgtatctcgccgtgagtctgatggacccaggctacgtgaacgttcagccccagcctcaggaggagttaaaggaagagcagacggctatggtgccccctgctatccccctccgacgatgccgctactgtctcgtcctgcagcccctgcgggcacggcactgccgggaatgtcgacgctgtgttcgtcgttacgaccaccattgtccctggatggagaactgtgtgggcgagagaaaccatcctttatttgtcgtgtacttggcactgcagcttgtagtgctcctgtgggggttatatctggcctggtctgggctccggttctttcaaccctggggtcaatggttaagaagtagcggtttgctattcgctacgtttctattactgtcattgttcagcctagtagccagtctgctgttggtcagccacctatacctggtggcttctaacactaccacctgggaattcatttcctcgcacaggatcgcctatttaagacagaggccaagtaaccctttcgaccggggtctgacccgaaacctcgctcatttcttctgcgggtggccctcaggttcttgggaaacgctatgggcagaggaggaggaagaaggaagctcaccagcagtgtag

SEQ ID NO: 225645 - DNA, 648 bp, Artificial Sequence
  derived and/or modified sequence
atggcaccctgggcgctgctgtcacctggtgtgctcgtgcggacagggcacaccgtattgacctggggaattactctggtacttttcctccacgacacagagctgcgccaatgggaggaacagggggagctgctccttcccctcaccttcctgttattggttcttggaagcctgctgctctacttggctgtttcattgatggatcctggctacgtgaacgttcaaccacagccgcaagaggagcttaaagaggagcaaactgcaatggtcccaccagccatccctctgcggaggtgcagatactgtctcgtgctccagcccctcagagcacgacattgcagggaatgcagaagatgcgtgcggcgttacgaccaccactgcccttggatggaaaattgcgtcggtgagcgcaaccatcctctctttgtggtgtatctggcactgcaactcgtggtgctgctttggggtctttatttggcctggagtggcctgcgtttctttcagccatggggccagtggctccgatcaagtgggttactatttgccaccttcctcctcctctcacacttcttctgtggctggcctagtggatcatgggagaccctgtgggcagaggaggaagaagaaggctcaagccccgctgtctag

SEQ ID NO: 225646 - DNA, 846 bp, Artificial Sequence
  derived and/or modified sequence
atggccccatgggctttactttcaccgggagtgttggtccggaccggacatactgtgctgacctgggggataacactggtccttttcctgcacgatactggtgaaccagatcccgagaggccgaggacacaccctatcccccagctacgacagtgggaggaacaaggagaattactactacctctgacttttctgttattagtcctggggagtctccttctgtatcttgcagtaagcctgatggacccgggatacgtgaacgtccagccacagccacaggaggagctgaaggaggaacagactgctatggtcccgcctgcaatccccttgcgacgatgtagatattgccttgtgttgcagccactaagagcgaggcactgcagagagtgccgcagatgcgtccgcaggtacgaccatcactgtccttggatggaaaactgtgtcggagaacgcaaccaccccctattcgtagtctacctggcactgcagcttgtcgtactcctgtggggactatatcttgcatggagtggcctcaggttcttccaaccttggggacagtggctccgtagcagtgggctgttgttcgctacatttctgttgctgtcactcttctccttggtggcctcccttttactcgtgtcacatctctacttggtggccagcaatactacgacatgggagttcatctcgagccacaggattgcctacctccgacaaagacccagcaatcccttcgatcggggactgacccggaatttagcccactttttttgtggctggccttcagggtcgtgggaaacgctttgggcagaagaggaagaagaaggaagctccccagctgtgtag

SEQ ID NO: 225647 - DNA, 648 bp, Artificial Sequence
  derived and/or modified sequence
atggctccttgggctttattaagcccaggcgttttagtcagaaccggccacacagtcctgacctggggaattactctggtcttgttcctgcacgacacggagttgcgacaatgggaagagcaaggcgagctgttgctcccactaacttttctgctgcttgtgctcggatccttattactgtatctggccgtctcactcatggatccagggtacgtgaacgttcagccccagcctcaggaggagctgaaagaggaacaaactgccatggtaccacccgctattcccttacggagatgtaggtattgtttagtgcttcagccactgcgggcacgccattgccgggagtgtaggaggtgcgttcgaaggtacgaccaccattgtccttggatggagaattgcgtgggtgagcgaaaccatccattatttgttgtctaccttgccctacagcttgttgtgctcctctggggactttatctggcttggtccggtctgaggttcttccagccgtggggacagtggttgcggagcagtggtttgctatttgcgactttcttgctactctcacacttcttttgtggctggccttccgggtcttgggagacactatgggccgaagaagaagaggaggggagcagccctgccgtatag

SEQ ID NO: 225648 - DNA, 1129 bp, Artificial Sequence
  derived and/or modified sequence
ccgggccgaggcgatggcgccctgggcgctcctcagccctggggtcctggtgcggaccgggcacaccgtgctgacctggggaatcacgctggtgctcttcctgcacgataccgagctgcggcaatgggaggagcagggggagctgctcctgcccctcaccttcctgctcctggtgctgggctccctgctgctctacctcgctgtgtcactcatggaccctggctacgtgaatgtgcagccccagcctcaggaggagctcaaagaggagcagacagccatggttcctccagccatccctcttcggcgctgcagatactgcctggtgctgcagcccctgagggctcggcactgccgtgagtgccgccgttgcgtccgccgctacgaccaccactgcccctggatggagaactgtgtgggagagcgcaaccacccactctttgtggtctacctggcgctgcagctggtggtgcttctgtggggcctgtacctggcatggtcaggcctccggttcttccagccctggggtcagtggttgcggtccagcgggctcctgttcgccaccttcctgctgctgtccctcttctcgttggtggccagcctgctcctcgtctcgcacctctacctggtggccagcaacaccaccacctgggaattcatctcctcacaccgcatcgcctatctccgccagcgccccagcaaccccttcgaccgaggcctgacccgcaacctggcccacttcttctgtggatggccctcagggtcctgggagaccctctgggctgaggaggaggaagagggcagcagcccagctgtttagggttgctggaggccgggctaccgtcttgtgcctgaaaaccacggggcctgtccccagctggggtgagcgctcagagggcctggggccctcactcctgcccacgcctcccagaccccagaacggagcttcaagtcagacagatccctgccttggtgggcagttctgccttccaaggaagaaggggaagaaaaggacctgtgggtggctcaggcccaagcagaccccgggctccaccccagccccgcccaggctgctgccagtgcacacttttacaaatttaatataaagcaagtccagtcttaaaaagacaaa

SEQ ID NO: 225649 - DNA, 677 bp, Artificial Sequence
  derived and/or modified sequence
tcttccgggtggggccccgggccgaggcgatggcgccctgggcgctcctcagccctggggtcctggtgcggaccgggcacaccgtgctgacctggggaatcacgctggtgctcttcctgcacgataccgagctgcggcaatgggaggagcagggggagctgctcctgcccctcaccttcctgctcctggtgctgggctccctgctgctctacctcgctgtgtcactcatggaccctggctacgtgaatgtgcagccccagcctcaggaggagctcaaagaggagcagacagccatggttcctccagccatccctcttcggcgctgcagatactgcctggtgctgcagcccctgagggctcggcactgccgtgagtgccgccgttgcgtccgccgctacgaccaccactgcccctggatggagaactgtgtgggagagcgcaaccacccactctttgtggtctacctggcgctgcagctggtggtgcttctgtggggcctgtacctggcatggtcaggcctccggttcttccagccctggggtcagtggttgcggtccagcgggctcctgttcgccaccttcctgctgctgtcccacttcttctgtggatggccctcagggtcctgggagaccctctgggctgaggaggaggaagagggcagcagcccagctgtttag

SEQ ID NO: 225650 - DNA, 1187 bp, Artificial Sequence
  derived and/or modified sequence
ttcttccgggtggggccccgggccgaggcgatggcgccctgggcgctcctcagccctggggtcctggtgcggaccgggcacaccgtgctgacctggggaatcacgctggtgctcttcctgcacgataccggtgagccggaccccgagcgaccccggacccacccgatcccgcagctgcggcaatgggaggagcagggggagctgctcctgcccctcaccttcctgctcctggtgctgggctccctgctgctctacctcgctgtgtcactcatggaccctggctacgtgaatgtgcagccccagcctcaggaggagctcaaagaggagcagacagccatggttcctccagccatccctcttcggcgctgcagatactgcctggtgctgcagcccctgagggctcggcactgccgtgagtgccgccgttgcgtccgccgctacgaccaccactgcccctggatggagaactgtgtgggagagcgcaaccacccactctttgtggtctacctggcgctgcagctggtggtgcttctgtggggcctgtacctggcatggtcaggcctccggttcttccagccctggggtcagtggttgcggtccagcgggctcctgttcgccaccttcctgctgctgtccctcttctcgttggtggccagcctgctcctcgtctcgcacctctacctggtggccagcaacaccaccacctgggaattcatctcctcacaccgcatcgcctatctccgccagcgccccagcaaccccttcgaccgaggcctgacccgcaacctggcccacttcttctgtggatggccctcagggtcctgggagaccctctgggctgaggaggaggaagagggcagcagcccagctgtttagggttgctggaggccgggctaccgtcttgtgcctgaaaaccacggggcctgtccccagctggggtgagcgctcagagggcctggggccctcactcctgcccacgcctcccagaccccagaacggagcttcaagtcagacagatccctgccttggtgggcagttctgccttccaaggaagaaggggaagaaaaggacctgtgggtggctcaggcccaagcagaccccgggctccaccccagccccgcccaggctgctgccagtgcacacttttacaaatttaatataaagcaagtccagtcttaaaaagacaa

SEQ ID NO: 225651 - DNA, 989 bp, Artificial Sequence
  derived and/or modified sequence
tcttccgggtggggccccgggccgaggcgatggcgccctgggcgctcctcagccctggggtcctggtgcggaccgggcacaccgtgctgacctggggaatcacgctggtgctcttcctgcacgataccgagctgcggcaatgggaggagcagggggagctgctcctgcccctcaccttcctgctcctggtgctgggctccctgctgctctacctcgctgtgtcactcatggaccctggctacgtgaatgtgcagccccagcctcaggaggagctcaaagaggagcagacagccatggttcctccagccatccctcttcggcgctgcagatactgcctggtgctgcagcccctgagggctcggcactgccgtgagtgccgccgttgcgtccgccgctacgaccaccactgcccctggatggagaactgtgtgggagagcgcaaccacccactctttgtggtctacctggcgctgcagctggtggtgcttctgtggggcctgtacctggcatggtcaggcctccggttcttccagccctggggtcagtggttgcggtccagcgggctcctgttcgccaccttcctgctgctgtcccacttcttctgtggatggccctcagggtcctgggagaccctctgggctgaggaggaggaagagggcagcagcccagctgtttagggttgctggaggccgggctaccgtcttgtgcctgaaaaccacggggcctgtccccagctggggtgagcgctcagagggcctggggccctcactcctgcccacgcctcccagaccccagaacggagcttcaagtcagacagatccctgccttggtgggcagttctgccttccaaggaagaaggggaagaaaaggacctgtgggtggctcaggcccaagcagaccccgggctccaccccagccccgcccaggctgctgccagtgcacacttttacaaatttaatataaagcaagtccagtcttaaaaagacaaa

SEQ ID NO: 225652 - protein, 310 aa, Artificial Sequence
  derived and/or modified sequence
MALRRPPRLRLCARLPDFFLLLLFRGCLIGAVNLKSSNRTPVVQEFESVELSCIITDSQTSDPRIEWKKIQDEQTTYVFFDNKIQGDLAGRAEILGKTSLKIWNVTRRDSALYRCEVVARNDRKEIDEIVIELTVQVKPVTPVCRVPKAVPVGKMATLHCQESEGHPRPHYSWYRNDVPLPTDSRANPRFRNSSFHLNSETGTLVFTAVHKDDSGQYYCIASNDAGSARCEEQEMEVYDLNIGGIIGGVLVVLAVLALITLGICCAYRRGYFINNKQDGESYKNPGKPDGVNYIRTDEEGDFRHKSSFVI

SEQ ID NO: 225653 - protein, 355 aa, Artificial Sequence
  derived and/or modified sequence
MVPARLGPAVAMVTGAGRRVLAGWAHARGDYKPRRAAAGPSATLDMALRRPPRLRLCARLPDFFLLLLFRGCLIGAVNLKSSNRTPVVQEFESVELSCIITDSQTSDPRIEWKKIQDEQTTYVFFDNKIQGDLAGRAEILGKTSLKIWNVTRRDSALYRCEVVARNDRKEIDEIVIELTVQVKPVTPVCRVPKAVPVGKMATLHCQESEGHPRPHYSWYRNDVPLPTDSRANPRFRNSSFHLNSETGTLVFTAVHKDDSGQYYCIASNDAGSARCEEQEMEVYDLNIGGIIGGVLVVLAVLALITLGICCAYRRGYFINNKQDGESYKNPGKPDGVNYIRTDEEGDFRHKSSFVI

SEQ ID NO: 225654 - DNA, 933 bp, Artificial Sequence
  derived and/or modified sequence
atggccctgcgtcggccccccaggctgcggttgtgcgcgaggctccctgacttctttctcctgctgctctttaggggctgcctgattggggcggtaaatttgaaatcctctaatagaactccggtggtgcaggagtttgagtctgtagagctgtcatgcattatcacagacagccagacctccgacccccgaatagagtggaaaaagatccaggatgagcagactacatacgtcttcttcgacaacaagatccagggtgatctggccggccgggctgagatcctaggtaagaccagcctgaaaatttggaacgtgacgcgccgcgattccgccctttacagatgtgaagttgtggcgcggaatgatcgcaaggagatcgacgagattgtcattgagttgactgtgcaagttaagccagtgaccccggtgtgtcgggtccccaaggccgtgccagtcggaaagatggcaaccttacattgtcaggagtctgagggtcacccgagaccgcattacagctggtatcgcaacgacgtgccactaccaaccgacagcagggccaatccacgtttccggaatagcagcttccacttgaactctgagactggtactctggtgtttaccgcagttcataaggacgactctggtcaatactattgcatcgcgtccaatgatgcagggtctgcccggtgtgaggagcaggagatggaggtatacgacttaaacataggggggatcataggtggcgtgctcgtcgtgctggctgttcttgcccttattacactcggcatctgttgtgcctacagaagaggttactttatcaataataaacaagacggcgaatcctacaagaacccagggaagccggatggcgtaaactatatcagaactgacgaagagggcgattttcgccacaaatcctcatttgtcatatag

SEQ ID NO: 225655 - DNA, 1068 bp, Artificial Sequence
  derived and/or modified sequence
atggtaccagcccgactggggcctgcggtggccatggtaaccggggcaggaaggcgtgttctggccgggtgggcccacgcccgtggcgactacaaaccccggagggcggctgcaggcccttctgccactctggacatggcactgaggcggcctccccgacttagactgtgcgccagactgcctgacttctttctgctgttgctgttcagggggtgtttaatcggcgccgtcaacctgaaatcttctaacaggactcctgtcgtccaggagttcgagtctgtcgagctgtcctgtattattactgatagtcaaacctcagatccccgcatcgaatggaagaagatccaggacgagcagacaacatatgtattctttgataacaaaattcagggggacttggccggacgggccgagattctcgggaaaacaagtctgaaaatttggaacgtcacacgaagagacagcgctctgtaccgatgtgaagttgtggctcgcaatgacaggaaggaaattgacgagattgtcatcgagctgaccgtacaggtgaaaccggttactccggtgtgtcgcgtgccaaaagcagttcccgttggaaagatggccaccctgcactgccaagagagcgaggggcatcctaggcctcattacagttggtatcgtaatgacgtcccgctccccaccgacagcagggccaacccccgatttaggaacagctctttccacttaaactctgaaactgggacgctggtctttacggccgtgcacaaggacgattctggccagtattactgcattgccagtaatgacgccgggagtgctcgatgtgaagagcaggagatggaagtgtacgatctgaacattgggggtatcatcggcggagtcctcgtggtcttggccgtattggccctgatcacacttgggatctgctgtgcctatcgtcgaggatactttattaacaacaagcaagacggcgaaagttacaaaaatcccggcaaacccgacggagtgaactatatcaggaccgatgaagagggcgatttccggcacaaaagtagttttgtgatctag

SEQ ID NO: 225656 - DNA, 3912 bp, Artificial Sequence
  derived and/or modified sequence
tagacctcagcttcctctgtcaccatggtgccggctcggctgggcccggcggtcgccatggtaactggggcgggtcgcagggtcctggcaggctgggcgcatgcgcgcggggactacaagccgcgccgcgctgccgctggcccctcagcaaccctcgacatggcgctgaggcggccaccgcgactccggctctgcgctcggctgcctgacttcttcctgctgctgcttttcaggggctgcctgataggggctgtaaatctcaaatccagcaatcgaaccccagtggtacaggaatttgaaagtgtggaactgtcttgcatcattacggattcgcagacaagtgaccccaggatcgagtggaagaaaattcaagatgaacaaaccacatatgtgttttttgacaacaaaattcagggagacttggcgggtcgtgcagaaatactggggaagacatccctgaagatctggaatgtgacacggagagactcagccctttatcgctgtgaggtcgttgctcgaaatgaccgcaaggaaattgatgagattgtgatcgagttaactgtgcaagtgaagccagtgacccctgtctgtagagtgccgaaggctgtaccagtaggcaagatggcaacactgcactgccaggagagtgagggccacccccggcctcactacagctggtatcgcaatgatgtaccactgcccacggattccagagccaatcccagatttcgcaattcttctttccacttaaactctgaaacaggcactttggtgttcactgctgttcacaaggacgactctgggcagtactactgcattgcttccaatgacgcaggctcagccaggtgtgaggagcaggagatggaagtctatgacctgaacattggcggaattattgggggggttctggttgtccttgctgtactggccctgatcacgttgggcatctgctgtgcatacagacgtggctacttcatcaacaataaacaggatggagaaagttacaagaacccagggaaaccagatggagttaactacatccgcactgacgaggagggcgacttcagacacaagtcatcgtttgtgatctgagacccgcggtgtggctgagagcgcacagagcgcacgtgcacatacctctgctagaaactcctgtcaaggcagcgagagctgatgcactcggacagagctagacactcattcagaagcttttcgttttggccaaagttgaccactactcttcttactctaacaagccacatgaatagaagaattttcctcaagatggacccggtaaatataaccacaaggaagcgaaactgggtgcgttcactgagttgggttcctaatctgtttctggcctgattcccgcatgagtattagggtgatcttaaagagtttgctcacgtaaacgcccgtgctgggccctgtgaagccagcatgttcaccactggtcgttcagcagccacgacagcaccatgtgagatggcgaggtggctggacagcaccagcagcgcatcccggcgggaacccagaaaaggcttcttacacagcagccttacttcatcggcccacagacaccaccgcagtttcttcttaaaggctctgctgatcggtgttgcagtgtccattgtggagaagctttttggatcagcattttgtaaaaacaaccaaaatcaggaaggtaaattggttgctggaagagggatcttgcctgaggaaccctgcttgtccaacagggtgtcaggatttaaggaaaaccttcgtcttaggctaagtctgaaatggtactgaaatatgcttttctatgggtcttgtttattttataaaattttacatctaaatttttgctaaggatgtattttgattattgaaaagaaaatttctatttaaactgtaaatatattgtcatacaatgttaaataacctatttttttaaaaaagttcaacttaaggtagaagttccaagctactagtgttaaattggaaaatatcaataattaagagtattttacccaaggaatcctctcatggaagtttactgtgatgttccttttctcacacaagttttagcctttttcacaagggaactcatactgtctacacatcagaccatagttgcttaggaaacctttaaaaattccagttaagcaatgttgaaatcagtttgcatctcttcaaaagaaacctctcaggttagctttgaactgcctcttcctgagatgactaggacagtctgtacccagaggccacccagaagccctcagatgtacatacacagatgccagtcagctcctggggttgcgccaggcgcccccgctctagctcactgttgcctcgctgtctgccaggaggccctgccatccttgggccctggcagtggctgtgtcccagtgagctttactcacgtggcccttgcttcatccagcacagctctcaggtgggcactgcagggacactggtgtcttccatgtagcgtcccagctttgggctcctgtaacagacctctttttggttatggatggctcacaaaatagggcccccaatgctattttttttttttaagtttgtttaattatttgttaagattgtctaaggccaaaggcaattgcgaaatcaagtctgtcaagtacaataacatttttaaaagaaaatggatcccactgttcctctttgccacagagaaagcacccagacgccacaggctctgtcgcatttcaaaacaaaccatgatggagtggcggccagtccagccttttaaagaacgtcaggtggagcagccaggtgaaaggcctggcggggaggaaagtgaaacgcctgaatcaaaagcagttttctaattttgactttaaatttttcatccgccggagacactgctcccatttgtggggggacattagcaacatcactcagaagcctgtgttcttcaagagcaggtgttctcagcctcacatgccctgccgtgctggactcaggactgaagtgctgtaaagcaaggagctgctgagaaggagcactccactgtgtgcctggagaatggctctcactactcaccttgtctttcagcttccagtgtcttgggttttttatactttgacagcttttttttaattgcatacatgagactgtgttgactttttttagttatgtgaaacactttgccgcaggccgcctggcagaggcaggaaatgctccagcagtggctcagtgctccctggtgtctgctgcatggcatcctggatgcttagcatgcaagttccctccatcattgccaccttggtagagagggatggctccccaccctcagcgttggggattcacgctccagcctccttcttggttgtcatagtgatagggtagccttattgccccctcttcttataccctaaaaccttctacactagtgccatgggaaccaggtctgaaaaagtagagagaagtgaaagtagagtctgggaagtagctgcctataactgagactagacggaaaaggaatactcgtgtattttaagatatgaatgtgactcaagactcgaggccgatacgaggctgtgattctgcctttggatggatgttgctgtacacagatgctacagacttgtactaacacaccgtaatttggcatttgtttaacctcatttataaaagcttcaaaaaaacccaaacattgcttcattctttgttatttgctcttacgttgggtttgtctcttcttcctagcatttcagtggttaggcatgcacactaaaaatgctatcaatcacccatccaccagggaagtcagtgctgggcaggaggtcagcctgtgtgctcaagagcagtgctgcgcctctccgccaccgagcccacctgtgttgcggttcccacttgggatggcagtgggcagatctcagtggcatcccatcccccaaa

SEQ ID NO: 225657 - DNA, 3652 bp, Artificial Sequence
  derived and/or modified sequence
tagacctcagcttcctctgtcaccatggtgccggctcggctgggcccggcggtcgccatggtaactggggcgggtcgcagggtcctggcaggctgggcgcatgcgcgcggggactacaagccgcgccgcgctgccgctggcccctcagcaaccctcgacatggcgctgaggcggccaccgcgactccggctctgcgctcggctgcctgacttcttcctgctgctgcttttcaggggctgcctgataggggctgtaaatctcaaatccagcaatcgaaccccagtggtacaggaatttgaaagtgtggaactgtcttgcatcattacggattcgcagacaagtgaccccaggatcgagtggaagaaaattcaagatgaacaaaccacatatgtgttttttgacaacaaaattcagggagacttggcgggtcgtgcagaaatactggggaagacatccctgaagatctggaatgtgacacggagagactcagccctttatcgctgtgaggtcgttgctcgaaatgaccgcaaggaaattgatgagattgtgatcgagttaactgtgcaagtgaagccagtgacccctgtctgtagagtgccgaaggctgtaccagtaggcaagatggcaacactgcactgccaggagagtgagggccacccccggcctcactacagctggtatcgcaatgatgtaccactgcccacggattccagagccaatcccagatttcgcaattcttctttccacttaaactctgaaacaggcactttggtgttcactgctgttcacaaggacgactctgggcagtactactgcattgcttccaatgacgcaggctcagccaggtgtgaggagcaggagatggaagtctatgacctgaacattggcggaattattgggggggttctggttgtccttgctgtactggccctgatcacgttgggcatctgctgtgcatacagacgtggctacttcatcaacaataaacaggatggagaaagttacaagaacccagggaaaccagatggagttaactacatccgcactgacgaggagggcgacttcagacacaagtcatcgtttgtgatctgagacccgcggtgtggctgagagcgcacagagcgcacgtgcacatacctctgctagaaactcctgtcaaggcagcgagagctgatgcactcggacagagctagacactcattcagaagcttttcgttttggccaaagttgaccactactcttcttactctaacaagccacatgaatagaagaattttcctcaagatggacccggtaaatataaccacaaggaagcgaaactgggtgcgttcactgagttgggttcctaatctgtttctggcctgattcccgcatgagtattagggtgatcttaaagagtttgctcacgtaaacgcccgtgctgggccctgtgaagccagcatgttcaccactggtcgttcagcagccacgacagcaccatgtgagatggcgaggtggctggacagcaccagcagcgcatcccggcgggaacccagaaaaggcttcttacacagcagccttacttcatcggcccacagacaccaccgcagtttcttcttaaaggctctgctgatcggtgttgcagtgtccattgtggagaagctttttggatcagcattttgtaaaaacaaccaaaatcaggaaggtaaattggttgctggaagagggatcttgcctgaggaaccctgcttgtccaacagggtgtcaggatttaaggaaaaccttcgtcttaggctaagtctgaaatggtactgaaatatgcttttctatgggtcttgtttattttataaaattttacatctaaatttttgctaaggatgtattttgattattgaaaagaaaatttctatttaaactgtaaatatattgtcatacaatgttaaataacctatttttttaaaaaagttcaacttaaggtagaagttccaagctactagtgttaaattggaaaatatcaataattaagagtattttacccaaggaatcctctcatggaagtttactgtgatgttccttttctcacacaagttttagcctttttcacaagggaactcatactgtctacacatcagaccatagttgcttaggaaacctttaaaaattccagttaagcaatgttgaaatcagtttgcatctcttcaaaagaaacctctcaggttagctttgaactgcctcttcctgagatgactaggacagtctgtacccagaggccacccagaagccctcagatgtacatacacagatgccagtcagctcctggggttgcgccaggcgcccccgctctagctcactgttgcctcgctgtctgccaggaggccctgccatccttgggccctggcagtggctgtgtcccagtgagctttactcacgtggcccttgcttcatccagcacagctctcaggtgggcactgcagggacactggtgtcttccatgtagcgtcccagctttgggctcctgtaacagacctctttttggttatggatggctcacaaaatagggcccccaatgctattttttttttttaagtttgtttaattatttgttaagattgtctaaggccaaaggcaattgcgaaatcaagtctgtcaagtacaataacatttttaaaagaaaatggatcccactgttcctctttgccacagagaaagcacccagacgccacaggctctgtcgcatttcaaaacaaaccatgatggagtggcggccagtccagccttttaaagaacgtcaggtggagcagccaggtgaaaggcctggcggggaggaaagtgaaacgcctgaatcaaaagcagttttctaattttgactttaaatttttcatccgccggagacactgctcccatttgtggggggacattagcaacatcactcagaagcctgtgttcttcaagagcaggtgttctcagcctcacatgccctgccgtgctggactcaggactgaagtgctgtaaagcaaggagctgctgagaaggagcactccactgtgtgcctggagaatggctctcactactcaccttgtctttcagcttccagtgtcttgggttttttatactttgacagcttttttttaattgcatacatgagactgtgttgactttttttagttatgtgaaacactttgccgcaggccgcctggcagaggcaggaaatgctccagcagtggctcagtgctccctggtgtctgctgcatggcatcctggatgcttagcatgcaagttccctccatcattgccaccttggtagagagggatggctccccaccctcagcgttggggattcacgctccagcctccttcttggttgtcatagtgatagggtagccttattgccccctcttcttataccctaaaaccttctacactagtgccatgggaaccaggtctgaaaaagtagagagaagtgaaagtagagtctgggaagtagctgcctataactgagactagacggaaaaggaatactcgtgtattttaagatatgaatgtgactcaagactcgaggccgatacgaggctgtgattctgcctttggatggatgttgctgtacacagatgctacagacttgtactaacacaccgtaatttggcatttgtttaacctcatttataaaagcttc

SEQ ID NO: 225658 - DNA, 933 bp, Artificial Sequence
  derived and/or modified sequence
atggccctgcggcggcccccccggctgcggctgtgtgcccggctgcctgacttcttcctgctgctgctcttccggggctgcctgattggagctgtgaacctgaagagcagcaacagaacacctgtggtgcaggagtttgagagcgtggagctgagctgcatcatcacagacagccagaccagtgaccccagaattgagtggaagaagatccaggatgagcagaccacctacgtgttctttgacaacaagatccagggcgacctggccggccgggcagagatcctgggcaagaccagcctgaagatctggaatgtgacccggcgggacagcgccctgtaccgctgtgaggtggtggccagaaatgacaggaaggagattgatgaaattgtgattgagctgactgtgcaggtgaagcctgtgacccctgtgtgccgggtgcccaaggctgtgcctgtgggcaagatggccaccctgcactgccaggagagcgagggccacccccggccccactacagctggtacagaaatgatgtgcccctgcccacagacagccgggccaacccccgcttcaggaacagcagcttccacctgaacagcgagaccggcaccctggtgttcaccgctgtgcacaaggatgacagcggccagtactactgcatcgccagcaatgatgctggcagcgcccgctgtgaggagcaggagatggaggtgtatgacctgaacatcggcggcatcatcggcggcgtgctggtggtgctggccgtgctggccctgatcaccctgggcatctgctgtgcctaccgccggggctacttcatcaacaacaagcaggatggagagagctacaagaaccctgggaagccagatggagtgaactacatcagaacagatgaggagggggacttccgccacaagagcagctttgtgatctag

SEQ ID NO: 225659 - DNA, 1068 bp, Artificial Sequence
  derived and/or modified sequence
atggtgcctgcccggctgggccctgctgtggccatggtgactggagctggccggcgggtgctggccggctgggcccacgcccggggggactacaagccccggcgggctgctgctggccccagcgccaccctggacatggccctgcggcggcccccccggctgcggctgtgtgcccggctgcctgacttcttcctgctgctgctcttccggggctgcctgattggagctgtgaacctgaagagcagcaacagaacacctgtggtgcaggagtttgaatctgtggagctgagctgcatcatcacagacagccagaccagtgacccccgcatcgagtggaagaagatccaggatgagcagaccacctacgtgttctttgacaacaagatccagggcgacctggccggccgggcagagatcctgggcaagaccagcctgaagatctggaatgtgacccggcgggacagcgccctgtaccgctgtgaggtggtggccagaaatgacaggaaggagattgatgagatcgtcatcgagctgactgtgcaggtgaagcctgtgacccctgtgtgccgggtgcccaaggctgtgcctgtgggcaagatggccaccctgcactgccaggagagcgagggccacccccggccccactacagctggtacagaaatgatgtgcccctgcccacagacagccgggccaacccccgcttcaggaacagcagcttccacctgaacagcgagaccggcaccctggtgttcaccgctgtgcacaaggatgattctggccagtactactgcatcgccagcaatgatgctggcagcgcccgctgtgaggagcaggagatggaggtgtatgacctgaacattggaggcatcattggaggagtgctggtggtgctggccgtgctggccctgatcaccctgggcatctgctgtgcctacagaagaggctacttcatcaacaacaagcaggatggagagagctacaagaaccctgggaagccagatggagtgaactacatcagaacagatgaggagggggacttccgccacaagagcagctttgtgatctag

SEQ ID NO: 225660 - DNA, 933 bp, Artificial Sequence
  derived and/or modified sequence
atggccctgcggcggcccccccggctgcggctgtgcgcccggctgccagattttttcctccttctacttttcaggggctgcttaatcggcgctgtcaatctcaaatcatcgaaccgcacgcccgtagttcaggaattcgaaagcgtggagcttagctgtataattaccgactctcaaacaagcgacccacgaattgagtggaaaaaaattcaggacgagcagaccacctacgtgttttttgataacaagattcagggcgacctggctgggagagccgaaatcctcggcaagacaagtctgaaaatatggaacgtgacgaggcgggactccgcgctttaccggtgtgaggtcgtggccagaaatgatagaaaggagatcgacgagatagtgatagagctaacggttcaggtgaaacccgtgactcctgtctgcagagtgccaaaggcagttcccgttgggaagatggccacattgcattgccaggagagcgaaggccacccaaggccacactactcgtggtaccgcaacgatgtgcccttacctacagatagtagagcaaacccaagatttcgtaactcctcttttcacctcaattctgaaactggtacactagtcttcactgccgttcacaaagacgactccgggcagtactattgtattgcctctaacgacgccggttctgctaggtgtgaagaacaagaaatggaagtctatgatcttaatattggcggaattatcggcggtgtccttgtggttctggccgtcctggccctaattacattagggatatgttgtgcctatcgcagaggttacttcatcaataacaaacaagatggtgaatcctacaagaatcccgggaagccagacggtgtgaactacatcagaaccgacgaggagggcgattttcgtcataagtcatcctttgttatctag

SEQ ID NO: 225661 - DNA, 1068 bp, Artificial Sequence
  derived and/or modified sequence
atggtgcccgcccggctgggccccgccgtggccatggtgaccggcgcaggccgccgggtgctcgccggctgggcccatgccagaggcgattataagccgcgtagagccgctgctggacccagcgctactctggatatggctcttagacgacctccgcggctgcggctgtgtgcgcggctgcccgacttttttctgcttctactgttccgaggatgtctcatcggagcggtcaacttgaagtccagcaaccggacgcccgtggtccaggagttcgagagcgtggagctgagttgcatcatcaccgactctcagactagtgacccgcgcatcgagtggaaaaagattcaggacgaacagactacctatgtgttcttcgataataagatccagggggatctggcagggagagctgaaatcctaggaaaaacatctttgaagatttggaacgtgacacggcgggattcagctctctatcggtgtgaagtggtagctcgtaacgatagaaaagagattgatgagatagttatcgagctgaccgtccaggtgaagcccgtaacaccagtgtgtagagtgcccaaggccgtgccggtggggaaaatggccacattacactgccaggagagcgagggccacccgagaccacattattcttggtataggaacgacgtccccctgcctacagattcacgtgctaaccctagattcagaaacagctccttccaccttaattcggaaaccggtaccttggtctttacagctgttcacaaggatgatagtggtcagtattattgcatcgcttccaatgacgccggtagcgcaaggtgcgaagagcaagaaatggaagtctatgatcttaacatcggcgggattatcggcggtgtgttagtggtgctggcggtgttagccttgattactttgggaatctgctgcgcctaccgccgcgggtattttatcaataacaaacaggatggggaaagttataaaaacccagggaagcctgacggggtcaactatatccgcaccgatgaagaaggcgacttccgccacaagagctcatttgtcatttag

SEQ ID NO: 225662 - DNA, 933 bp, Artificial Sequence
  derived and/or modified sequence
atggccctgcggcgtccacccaggcttagactttgcgccagattgcctgattttttcctgctgctgctgtttcggggatgtcttataggtgctgtgaatctcaagtcgtctaaccgtacccctgtggtccaggagttcgaatcggtagagctgtcatgcattatcactgacagccagacctctgacccacgtatcgaatggaaaaagatacaggacgagcagacgacctatgtgttttttgataataagatccagggggatctcgccggacgcgcagagatcttgggaaaaacctccctgaaaatctggaatgtgacaagacgcgacagcgctctctacagatgtgaggttgtggcgaggaacgaccgtaaggagatagatgagatcgtaattgaactgactgtccaagtgaagccggttaccccagtctgccgggtgcctaaggcggtcccggttgggaagatggccacgctgcactgccaagagtcggaggggcatcctcgccctcattatagctggtacaggaatgatgttcccctgcctacagacagtcgcgctaaccctcgattccggaattccagtttccacctcaactccgagactggcactctggtgttcaccgctgtccacaaggatgattctgggcagtattactgtattgcttcaaatgatgcgggtagtgctcgctgcgaggaacaggagatggaggtgtacgatttaaacatagggggtattattggcggagtcttggtcgtgcttgctgtgcttgctctgatcacgctaggcatctgttgcgcctatcgtcggggttacttcattaacaacaagcaggatggagagtcttataagaaccctggcaagcccgacggtgtaaactatatccgaactgatgaggaaggagactttaggcacaagagctcctttgttatttag

SEQ ID NO: 225663 - DNA, 1068 bp, Artificial Sequence
  derived and/or modified sequence
atggtccccgctcgcctcggccctgctgtcgccatggtgacaggcgctggcaggagggtcttggcgggatgggctcacgccaggggagattacaaaccaagaagagccgcagctggcccatctgcgaccctggacatggcccttcggcgtcccccacgactgaggttgtgcgccaggttacctgatttcttcctgctgctcctgtttagaggatgcctgattggcgcagtgaatctgaagagcagcaatagaacccccgtagtgcaggaattcgagtcggtggaacttagctgcattatcacagatagccaaacttctgaccctcgcattgagtggaagaagattcaggacgagcaaaccacctacgtctttttcgataacaagattcagggtgaccttgctggcagggccgagatcctgggcaagaccagtctcaagatttggaatgtcactcgacgagattcggctctgtaccggtgcgaagttgttgctcgaaatgatcgaaaggagatcgacgaaatagtcattgagctgactgttcaggtgaaacccgttacaccagtgtgccgggtgccaaaagctgtgcctgtgggaaaaatggccaccctacactgtcaagaaagcgagggacatccaaggccccactactcatggtatcggaacgacgttcccctccctaccgattccagagctaatccgcgtttcagaaactcatcctttcatctgaattccgaaaccgggaccttggtgtttactgccgttcataaagatgatagcggccagtactactgtatcgcctcaaatgacgcaggtagtgccagatgtgaagagcaggagatggaagtatacgatctgaatattgggggtattataggaggtgttttagtggtcctggcggtgttagcgcttatcacattggggatctgctgcgcgtaccgaagaggctatttcataaacaacaagcaggacggagagtcttacaagaatcccggtaagcctgatggcgtgaattatattcgaactgatgaggagggtgatttcaggcataagagctcttttgtgatttag

SEQ ID NO: 225664 - DNA, 933 bp, Artificial Sequence
  derived and/or modified sequence
atggccctgagaagaccccccagactgagactgtgcgccagactgcccgacttcttcctgctgctgctgttcagaggctgcctgatcggcgccgtgaacctgaagagcagcaacagaacccccgtggtgcaggagttcgagagcgtggagctgagctgcatcatcaccgacagccagaccagcgaccccagaatcgagtggaagaagatccaggacgagcagaccacctacgtgttcttcgacaacaagatccagggcgacctggccggcagagccgagatcctgggcaagaccagcctgaagatctggaacgtgaccagaagagacagcgccctgtacagatgcgaggtggtggccagaaacgacagaaaggagatcgacgagatcgtgatcgagctgaccgtgcaggtgaagcccgtgacccccgtgtgcagagtgcccaaggccgtgcccgtgggcaagatggccaccctgcactgccaggagagcgagggccaccccagaccccactacagctggtacagaaacgacgtgcccctgcccaccgacagcagagccaaccccagattcagaaacagcagcttccacctgaacagcgagaccggcaccctggtgttcaccgccgtgcacaaggacgacagcggccagtactactgcatcgccagcaacgacgccggcagcgccagatgcgaggagcaggagatggaggtgtacgacctgaacatcggcggcatcatcggcggcgtgctggtggtgctggccgtgctggccctgatcaccctgggcatctgctgcgcctacagaagaggctacttcatcaacaacaagcaggacggcgagagctacaagaaccccggcaagcccgacggcgtgaactacatcagaaccgacgaggagggcgacttcagacacaagagcagcttcgtgatctag

SEQ ID NO: 225665 - DNA, 1068 bp, Artificial Sequence
  derived and/or modified sequence
atggtgcccgccagactgggccccgccgtggccatggtgaccggcgccggcagaagagtgctggccggctgggcccacgccagaggcgactacaagcccagaagagccgccgccggccccagcgccaccctggacatggccctgagaagaccccccagactgagactgtgcgccagactgcccgacttcttcctgctgctgctgttcagaggctgcctgatcggcgccgtgaacctgaagagcagcaacagaacccccgtggtgcaggagttcgagagcgtggagctgagctgcatcatcaccgacagccagaccagcgaccccagaatcgagtggaagaagatccaggacgagcagaccacctacgtgttcttcgacaacaagatccagggcgacctggccggcagagccgagatcctgggcaagaccagcctgaagatctggaacgtgaccagaagagacagcgccctgtacagatgcgaggtggtggccagaaacgacagaaaggagatcgacgagatcgtgatcgagctgaccgtgcaggtgaagcccgtgacccccgtgtgcagagtgcccaaggccgtgcccgtgggcaagatggccaccctgcactgccaggagagcgagggccaccccagaccccactacagctggtacagaaacgacgtgcccctgcccaccgacagcagagccaaccccagattcagaaacagcagcttccacctgaacagcgagaccggcaccctggtgttcaccgccgtgcacaaggacgacagcggccagtactactgcatcgccagcaacgacgccggcagcgccagatgcgaggagcaggagatggaggtgtacgacctgaacatcggcggcatcatcggcggcgtgctggtggtgctggccgtgctggccctgatcaccctgggcatctgctgcgcctacagaagaggctacttcatcaacaacaagcaggacggcgagagctacaagaaccccggcaagcccgacggcgtgaactacatcagaaccgacgaggagggcgacttcagacacaagagcagcttcgtgatctag

SEQ ID NO: 225666 - protein, 520 aa, Artificial Sequence
  derived and/or modified sequence
MGPQRRLSPAGAALLWGFLLQLTAAQEAILHASGNGTTKDYCMLYNPYWTALPSTLENATSISLMNLTSTPLCNLSDIPPVGIKSKAVVVPWGSCHFLEKARIAQKGGAEAMLVVNNSVLFPPSGNRSEFPDVKILIAFISYKDFRDMNQTLGDNITVKMYSPSWPNFDYTMVVIFVIAVFTVALGGYWSGLVELENLKAVTTEDREMRKKKEEYLTFSPLTVVIFVVICCVMMVLLYFFYKWLVYVMIAIFCIASAMSLYNCLAALIHKIPYGQCTIACRGKNMEVRLIFLSGLCIAVAVVWAVFRNEDRWAWILQDILGIAFCLNLIKTLKLPNFKSCVILLGLLLLYDVFFVFITPFITKNGESIMVELAAGPFGNNEKLPVVIRVPKLIYFSVMSVCLMPVSILGFGDIIVPGLLIAYCRRFDVQTGSSYIYYVSSTVAYAIGMILTFVVLVLMKKGQPALLYLVPCTLITASVVAWRRKEMKKFWKGNSYQMMDHLDCATNEENPVISGEQIVQQ

SEQ ID NO: 225667 - DNA, 1563 bp, Artificial Sequence
  derived and/or modified sequence
atgggcccccagagaagactgagccccgccggcgccgccctgctgtggggcttcctgctgcagctgaccgccgcccaggaggccatcctgcacgccagcggcaacggcaccaccaaggactactgcatgctgtacaacccctactggaccgccctgcccagcaccctggagaacgccaccagcatcagcctgatgaacctgaccagcacccccctgtgcaacctgagcgacatcccccccgtgggcatcaagagcaaggccgtggtggtgccctggggcagctgccacttcctggagaaggccagaatcgcccagaagggcggcgccgaggccatgctggtggtgaacaacagcgtgctgttcccccccagcggcaacagaagcgagttccccgacgtgaagatcctgatcgccttcatcagctacaaggacttcagagacatgaaccagaccctgggcgacaacatcaccgtgaagatgtacagccccagctggcccaacttcgactacaccatggtggtgatcttcgtgatcgccgtgttcaccgtggccctgggcggctactggagcggcctggtggagctggagaacctgaaggccgtgaccaccgaggacagagagatgagaaagaagaaggaggagtacctgaccttcagccccctgaccgtggtgatcttcgtggtgatctgctgcgtgatgatggtgctgctgtacttcttctacaagtggctggtgtacgtgatgatcgccatcttctgcatcgccagcgccatgagcctgtacaactgcctggccgccctgatccacaagatcccctacggccagtgcaccatcgcctgcagaggcaagaacatggaggtgagactgatcttcctgagcggcctgtgcatcgccgtggccgtggtgtgggccgtgttcagaaacgaggacagatgggcctggatcctgcaggacatcctgggcatcgccttctgcctgaacctgatcaagaccctgaagctgcccaacttcaagagctgcgtgatcctgctgggcctgctgctgctgtacgacgtgttcttcgtgttcatcacccccttcatcaccaagaacggcgagagcatcatggtggagctggccgccggccccttcggcaacaacgagaagctgcccgtggtgatcagagtgcccaagctgatctacttcagcgtgatgagcgtgtgcctgatgcccgtgagcatcctgggcttcggcgacatcatcgtgcccggcctgctgatcgcctactgcagaagattcgacgtgcagaccggcagcagctacatctactacgtgagcagcaccgtggcctacgccatcggcatgatcctgaccttcgtggtgctggtgctgatgaagaagggccagcccgccctgctgtacctggtgccctgcaccctgatcaccgccagcgtggtggcctggagaagaaaggagatgaagaagttctggaagggcaacagctaccagatgatggaccacctggactgcgccaccaacgaggagaaccccgtgatcagcggcgagcagatcgtgcagcagtag

SEQ ID NO: 225668 - DNA, 1563 bp, Artificial Sequence
  derived and/or modified sequence
atgggaccacagcggcgcctcagccccgccggcgccgctctgctctgggggttcttgcttcagttgactgctgctcaagaggccatcctgcatgccagcgggaacgggaccaccaaggactactgtatgctctataacccgtactggactgccctaccatctacactcgagaacgccactagtatttctctgatgaatctcacctctacccccttgtgcaatctttcagacatcccaccagtcggcattaagagcaaggcggttgttgtaccttggggttcatgtcatttcctggaaaaggccagaattgcccagaaagggggagccgaggcaatgctcgtcgtgaataactccgtgttattcccgccatctggcaatagaagcgagtttcccgacgtcaagatcttgatagcattcatctcctataaagatttcagggacatgaaccagaccttaggtgacaacattacagtgaaaatgtacagccccagctggcctaactttgattatactatggtcgtgatttttgtgatcgccgttttcacagtcgctctcggcgggtactggtcaggcctggtggaattagaaaatctaaaggcagtgacaaccgaggatcgcgaaatgcggaagaagaaagaggagtacttgaccttttcgccgctcaccgtggtaatttttgtcgtaatctgttgcgtcatgatggtgctcctgtacttcttctataaatggctggtgtatgtaatgatagctattttttgtatcgcttctgccatgagcttgtacaactgcctcgctgcattaatacacaagatcccatacgggcagtgcactattgcctgccggggcaagaatatggaagtgagactcatctttttaagcggcctttgcatcgccgtggctgtggtgtgggcggtgtttcgaaatgaagaccgatgggcctggatccttcaggatattctgggcattgcattctgcttgaatcttattaagaccctgaagctacctaattttaagtcatgcgtgatcctcctgggcctactcctgttatacgatgttttctttgtgttcataactccatttattacaaagaatggtgagagtatcatggttgaactcgctgcaggaccatttggtaacaacgaaaagctgcccgtcgtgatcagggtgccaaaactgatctattttagtgtaatgtctgtgtgccttatgccagttagtatcctcgggtttggggatataattgttcccggcttacttatcgcctactgccgtcgtttcgatgttcagacaggatcctcttacatctattacgtctcctccactgtggcctacgccatcggtatgatcctcacgtttgtcgttctagtactaatgaagaaaggccagccggcactgctgtatttagttccctgcactctaattactgcatctgtggtcgcatggcgccgcaaagagatgaaaaagttttggaagggcaactcctaccagatgatggaccatttagactgcgcaaccaacgaagagaatccagttattagcggtgagcagatagtgcagcaatag

SEQ ID NO: 225669 - DNA, 1563 bp, Artificial Sequence
  derived and/or modified sequence
atgggcccccagaggcggctgagccctgctggggccgccctgctgtggggcttcctgctgcagctgacagctgcccaggaggccatcctgcacgccagcggaaatggcaccaccaaggactactgcatgctgtacaacccctactggacagccctgcccagcaccctggagaatgccaccagcatcagcctgatgaacctgaccagcacccccctgtgcaacctgagtgacatcccccctgtgggcatcaagagcaaggctgtggtggtgccctggggcagctgccacttcctggagaaggccagaattgcccagaagggcggcgctgaggccatgctggtggtgaacaacagcgtgctcttcccccccagcggcaacagaagtgagttcccagatgtgaagatcctgattgccttcatctcctacaaggacttccgggacatgaaccagaccctgggggacaacatcaccgtgaagatgtacagccccagctggcccaactttgactacaccatggtggtgatctttgtgattgctgtgttcaccgtggccctgggcggctactggagcggcctggtggagctggagaacctgaaggctgtgaccacagaggaccgggagatgaggaagaagaaggaggagtacctgaccttcagccccctgactgtggtgatctttgtggtgatctgctgcgtgatgatggtgctgctgtacttcttctacaagtggctggtgtatgtgatgattgccatcttctgcatcgccagcgccatgagcctgtacaactgcctggccgccctgatccacaagatcccctacggccagtgcaccatcgcctgccggggcaagaacatggaggtgcggctcatcttcctgagcggcctgtgcatcgctgtggccgtggtgtgggccgtgttcagaaatgaagatcgctgggcctggatcctgcaggacatcctgggcatcgccttctgcctgaacctgatcaagaccctgaagctgcccaacttcaagagctgtgtgatcctgctgggcctgctgctgctgtatgatgtgttctttgtgttcatcacccccttcatcaccaagaatggagagagcatcatggtggagctggccgccggcccctttggaaataatgagaagctgcctgtggtgatccgggtgcccaagctgatctacttctctgtgatgtctgtgtgcctgatgcctgtgtccatcctgggctttggagacatcatcgtgcccggcctgctgattgcctactgccgccgctttgatgtgcagacaggcagcagctacatctactacgtgagcagcacagtggcctatgccatcggcatgatcctgacctttgtggtgctggtgctgatgaagaagggccagcctgccctgctgtacctggtgccctgcaccctcatcacagcctctgtggtggcctggaggaggaaggagatgaagaagttctggaagggcaacagctaccagatgatggaccacctggactgtgccaccaatgaggagaaccctgtgatctctggagagcagatcgtgcagcagtag

SEQ ID NO: 225670 - DNA, 1563 bp, Artificial Sequence
  derived and/or modified sequence
atgggcccccagcggcggctgagccccgccggcgccgccctgctgtggggcttcctcctacagctgacagctgctcaggaggcgattttgcacgcatctggtaatgggaccactaaagattactgtatgctgtacaacccatattggaccgcactgcccagcacccttgagaatgctacaagcatttcactcatgaatcttactagcacaccgctatgtaacttgagcgacatccctcctgtaggaataaaatctaaggctgtggtcgttccatggggctcttgtcattttctcgaaaaggctcgtattgcacagaagggtggggcggaggccatgctggtagtaaacaactccgtgctgttccccccctcaggcaatcgttctgagtttcctgatgtgaaaattttgattgcatttatttcatataaagactttagagacatgaaccagacactgggagataacatcacagtaaaaatgtactcaccatcctggcccaattttgattatacgatggtcgtgatttttgtgattgccgtgttcaccgtcgcccttggcggctattggagtggcctagtggagctggagaatctcaaggcagtcacaacagaagacagggaaatgaggaagaaaaaggaagagtacttgaccttttcgcctctgactgtggtgatcttcgtggtaatttgttgcgtgatgatggtattgctctacttcttctacaaatggctagtgtacgttatgatcgccatcttttgtattgctagcgccatgagcctgtacaactgtttagcggccctaatccacaagataccatacggccagtgcaccattgcatgccgcgggaagaacatggaggtacgactgatcttcctgagtggcctgtgcatcgccgtcgccgtggtttgggccgtcttccggaacgaggaccgctgggcttggattctgcaggacatactgggcatagccttctgcctaaacctgattaaaacattgaaactgcccaattttaagtcctgcgtgattctcttaggcctcctcttgttgtatgatgtgttcttcgtatttattactccttttataacaaaaaatggcgaatcgattatggtagagctcgcagcaggacctttcggtaataatgagaagctgcccgtggttatccgggtgccaaaacttatctatttttctgttatgtccgtatgcctgatgcccgtctcaattctggggtttggagacataatcgttcccggcctgttgattgcctactgtaggagatttgatgtccagacgggtagttcctatatatactacgtgtcctccacagttgcttatgccatcgggatgatattgacgtttgtcgtgctggtcctgatgaagaaagggcaacccgctcttctgtatttggttccatgtactctgattaccgcctctgtggtcgcctggcgcagaaaggagatgaaaaaattctggaagggcaacagctaccagatgatggaccatctggactgcgctaccaatgaggagaatccagtcatttccggtgaacagatagtacaacagtag

SEQ ID NO: 225671 - DNA, 1563 bp, Artificial Sequence
  derived and/or modified sequence
atgggtcctcagcggagattatctcctgcgggagctgccctgctgtgggggtttctgctgcagctgacggccgctcaggaggctatcctgcacgcaagcgggaacgggactactaaggactattgcatgctatataacccttactggaccgcgctgccaagcacacttgaaaatgctacgtccatttctctgatgaacctgacgtcaacccctctttgtaacttgtctgacatcccacctgtcggcatcaagagtaaggcggtggtggtaccctgggggtcatgccatttcctagagaaggctcgcattgcccagaaaggcggagcagaagcaatgctggttgtgaacaacagcgtactgttcccaccctcaggcaaccgcagtgaattcccggatgttaagatcctcatcgcctttatttcttacaaggactttcgcgacatgaaccagactctgggcgataacattacggttaagatgtactcccccagctggcctaacttcgactacactatggtggtcatcttcgttattgccgtgttcacagtagcactggggggatattggagcggattggtggaattggaaaaccttaaggctgtaacaactgaggatcgggagatgagaaagaaaaaggaagagtacctcaccttttcccccctgaccgtggtgatcttcgtcgtaatctgttgtgttatgatggttcttctgtatttcttctataaatggttggtgtatgttatgattgcgatcttctgtatagcatccgcgatgagtctgtataattgcttggcagctctgatacacaagattccgtacggccagtgcaccatcgcttgcagaggcaagaacatggaggtaagacttatttttctctctggtctgtgcatcgccgtcgccgtggtctgggcagttttccggaatgaggaccggtgggcatggattttgcaggacatcttgggtattgctttttgcctcaatctcatcaagacacttaaactgccaaatttcaagagttgtgttattctacttggactcctcctactgtatgatgtatttttcgtgtttattactccctttattactaaaaacggagaaagcatcatggtcgaacttgcagctggcccttttggtaataatgagaagctacctgtggttatccgcgtcccaaaacttatctacttttctgtcatgtccgtatgtttaatgcccgtgagcattttaggcttcggcgacattatagtccctggactcctgatcgcttactgccgccgtttcgatgtccagacgggctcttcttatatctactatgtgtcatcgactgtcgcatatgccatcggaatgatcctgacttttgtcgtgctagtgctcatgaagaaagggcagccggctctgctgtatcttgtgccctgcacattgatcacagccagcgttgttgcctggcggagaaaagagatgaaaaaattctggaaaggaaactcctaccagatgatggatcacttggactgcgctaccaatgaggaaaacccggtgatctccggtgaacagatagtgcagcagtag

SEQ ID NO: 225672 - DNA, 2329 bp, Artificial Sequence
  derived and/or modified sequence
gtagcgccgggacgccgggacgcctggataccgggagagcgctgggactctccgagcccggcgcgggggtttccgcatcttacgggcggggccggaagaggaagtcgcgctgctgtggcggccgctgtagcagcggcggtccagtcgtagcccggccgcccgcgcctgtccggtccggtccggccacggaggcagcgcagcggcgggactccgagcctaccccgccgagtgagctgcgccgcaccgtgccgtcccacccggcacccaccagtccgatggggccgcagcggcggctgtcccctgccggggccgccctactctggggcttcctgctccagctgacagccgctcaggaagcaatcttgcatgcgtctggaaatggcacaaccaaggactactgcatgctttataacccttattggacagctcttccaagtaccctagaaaatgcaacttccattagtttgatgaatctgacttccacaccactatgcaacctttctgatattcctcctgttggcataaagagcaaagcagttgtggttccatggggaagctgccattttcttgaaaaagccagaattgcacagaaaggaggtgctgaagcaatgttagttgtcaataacagtgtcctatttcctccctcaggtaacagatctgaatttcctgatgtgaaaatactgattgcatttataagctacaaagactttagagatatgaaccagactctaggagataacattactgtgaaaatgtattctccatcgtggcctaactttgattatactatggtggttatttttgtaattgcggtgttcactgtggcattaggtggatactggagtggactagttgaattggaaaacttgaaagcagtgacaactgaagatagagaaatgaggaaaaagaaggaagaatatttaacttttagtcctcttacagttgtaatatttgtggtcatctgctgtgttatgatggtcttactttatttcttctacaaatggttggtttatgttatgatagcaattttctgcatagcatcagcaatgagtctgtacaactgtcttgctgcactaattcataagataccatatggacaatgcacgattgcatgtcgtggcaaaaacatggaagtgagacttatttttctctctggactgtgcatagcagtagctgttgtttgggctgtgtttcgaaatgaagacaggtgggcttggattttacaggatatcttggggattgctttctgtctgaatttaattaaaacactgaagttgcccaacttcaagtcatgtgtgatacttctaggccttctcctcctctatgatgtattttttgttttcataacaccattcatcacaaagaatggtgagagtatcatggttgaactcgcagctggaccttttggaaataatgaaaagttgccagtagtcatcagagtaccaaaactgatctatttctcagtaatgagtgtgtgcctcatgcctgtttcaatattgggttttggagacattattgtaccaggcctgttgattgcatactgtagaagatttgatgttcagactggttcttcttacatatactatgtttcgtctacagttgcctatgctattggcatgatacttacatttgttgttctggtgctgatgaaaaaggggcaacctgctctcctctatttagtaccttgcacacttattactgcctcagttgttgcctggagacgtaaggaaatgaaaaagttctggaaaggtaacagctatcagatgatggaccatttggattgtgcaacaaatgaagaaaaccctgtgatatctggtgaacagattgtccagcaataatattatgtggaactgctataatgtgtcattgattttctacaaatagacttcgactttttaaattgacttttgaattgacaatctgaaagagtcttcaatgatatgcttgcaaaaatatatttttatgagctggtactgacagttacatcataaataactaaaacgctttgcttttaatgttaaagttgtgccttcacattaaataaaacatatggtctgtgtagtttccgagatgtactatatacagtatatttttctaaaaaaaaatgccttgacccacccctatacttttttttaacgaaatctgtttctttcagctctgatggtagatacaagtagttactatttctgaatgggttttactgtaaagaattatgcaaattggccaggcgcggtggctcacgcctgtaatcccaacactttgggaggccaaggcgggcggatcacgaggtcaggagatcgagaccatcctggctaacacggtgaaaccc

SEQ ID NO: 225673 - protein, 270 aa, Artificial Sequence
  derived and/or modified sequence
MPRDNMASLIQRIARQACLTFRGSGGGRGASDRDAASGPEAPMQPGFPENLSKLKSLLTQLRAEDLNIAPRKATLQPLPPNLPPVTYMHIYETDGFSLGVFLLKSGTSIPLHDHPGMHGMLKVLYGTVRISCMDKLDAGGGQRPRALPPEQQFEPPLQPREREAVRPGVLRSRAEYTEASGPCILTPHRDNLHQIDAVEGPAAFLDILAPPYDPDDGRDCHYYRVLEPVRPKEASSSACDLPREVWLLETPQADDFWCEGEPYPGPKVFP

SEQ ID NO: 225674 - DNA, 813 bp, Artificial Sequence
  derived and/or modified sequence
atgcccagagacaacatggccagcctgatccagagaatcgccagacaggcctgcctgaccttcagaggcagcggcggcggcagaggcgccagcgacagagacgccgccagcggccccgaggcccccatgcagcccggcttccccgagaacctgagcaagctgaagagcctgctgacccagctgagagccgaggacctgaacatcgcccccagaaaggccaccctgcagcccctgccccccaacctgccccccgtgacctacatgcacatctacgagaccgacggcttcagcctgggcgtgttcctgctgaagagcggcaccagcatccccctgcacgaccaccccggcatgcacggcatgctgaaggtgctgtacggcaccgtgagaatcagctgcatggacaagctggacgccggcggcggccagagacccagagccctgccccccgagcagcagttcgagccccccctgcagcccagagagagagaggccgtgagacccggcgtgctgagaagcagagccgagtacaccgaggccagcggcccctgcatcctgaccccccacagagacaacctgcaccagatcgacgccgtggagggccccgccgccttcctggacatcctggcccccccctacgaccccgacgacggcagagactgccactactacagagtgctggagcccgtgagacccaaggaggccagcagcagcgcctgcgacctgcccagagaggtgtggctgctggagaccccccaggccgacgacttctggtgcgagggcgagccctaccccggccccaaggtgttcccctag

SEQ ID NO: 225675 - DNA, 3723 bp, Artificial Sequence
  derived and/or modified sequence
aatggagcgccgggcgtaaggcaaagcctggcaccgtctgcgcggccgctatctgctcccggagcgtgagtgcggggtgtggggcgtgcgcgtgcgcgctcagagggggctcaaggcgagcgcgccgggcagttgcgggcgcgtggctgctgaggttggcggcggtgccgcgcgcccgacgggccggtggttgcggggcctcccgcctcgacccgggctgggggcagccgtggcggccgccggggaccgcaaggggcggaggaaaggagggggccggtcccggcacgcagaggagcagccgaccatgccccgagacaacatggcctccttgatccaacggatcgcccgccaggcttgcctcaccttccggggcagcgggggcggccgcggcgcttccgatcgcgacgcggcttctggcccggaggcgccgatgcagccgggcttccccgagaacctgagcaagctgaagagcctcctgacccagctccgcgccgaggacttgaacatcgccccgcgcaaggccacactgcagccgctgccgcccaacctgccgccagtcacctacatgcacatctacgagacggacggcttcagcctgggcgtgttcctgctcaagagcggcacgtccatcccgctgcacgaccacccgggcatgcacggcatgctcaaggtgctgtacggcaccgtgcgcatcagctgcatggacaagctagacgcgggcggcgggcaacggccgcgggccttgccgcccgagcagcagttcgagccgccgctgcagccccgggagcgagaagccgtgcggccgggcgtgctgcgttcgcgggccgagtacaccgaggccagcggcccctgcatcctcacaccgcaccgggacaacctgcaccagatcgacgccgtggaagggcctgccgccttcctggacatcctggccccgccctacgacccggacgatggccgggactgccactattaccgggtgctggagccggtcaggcccaaggaggcctccagctcggcctgtgacctgcctcgagaggtgtggctcctggagaccccacaggccgatgacttctggtgcgagggagaaccctatccaggtcccaaggtcttcccttgaagccactggcgcccaggagcggtgggccgaagacgtgccctaccctaccacaagggctgtgtctctaccccctagcctgggcgttggatctactggaatgagcagcagccgcttcctcggcagccttgggaagcacgggcgactggacagcagccgccgggcacggttatgggggcggggtgggcggggaggctagattgtttcctggtactgtcactgccactggggctttgatttggaggaatggggcaggggactatctgaagcgcttccatcctaaagccataatgaaaatatcttcctctcttccccattctatacaaaatactaagtggttttcttgctcccactccctaccccttagttaaatagggtttattttccactcatgcccttatgcctttttttcttatagttttttaacttattgactgtgcatgacccagtggtttgaattgtttttagttcaagtcattggtaaaaactaggtttaaggagatgagctactgtttaaagtgagctggcctgcctaattaattccttgtgaaaactaaatgattttttcagtttggggatcattctcacaacataactatgcatgtagaggacaagatttattttctttcctccctttgcccagtagccacatctggtttactcaggcagcatctactaagaaattcagcacctgcatatctctgtgacatggtcacttagagcttatcttccctatgaatctccagatctgtgagtcgagcagatttcatgttgcagattcacctttaatgcaaagactgtattatcctcacatgactttttttcttgtcttactgtaccttaaaaggtgatagagtaattctgtattttctaacgggaagattcaaaggagctgaatgtgttatgcttccaaacaactgaatgtaaaacactcctagccagttgttgcattccctatatttatttacttccaatattttactgtaaaagtagggagaaatattatgttgatagttgtttcatattctctcaggaactttaatgttcccgactcgggtgattccagctgtgttgctggcagtgttgtctcaaccctctccctaaaatgactgagccctgggttcatctaatgtggttttccttaggaagagatagaaggcacagaagatcacagctagagaattgagaattaactatactactagccattttagggcaccaaaacttgggattaaacacttcctacttcccactcccaactcctgaaatgaagtcttgctatctgtgactagttttatttttgtgcttttaatagtccgagcagtcttaccttgtttacacatgtattgacaccatttgcttcaggccatggagcactgtttctccctttttactatttataggattccgttttttcacaagacttttaataaaaagaaattgtagaaataaacacattaaaatttgcccagctgtcgtctaagccctcttgattgacttgcccaagtggcaatagagttctaatatctataataaagggagatttgctattattagtggaatgttgaccccgtatgtagagaaacagtacgtgcctttgcctctttatgcacacagagacccagggtgagggagtatttgttcccagtttttaagatagtataaaaaagcaaatacttggtgagtgatttaaaaataaaaccaaaacaaaacacaaaaagatattccacaggacatgccactttattataaaacctgacacaggcatagtaccaagtatttcctgcattgttgctaaaattgttttattgtagctccacattctggtgtagtttaaaatgcctttgggggcagtttgaagcagttcttcatgccacttagtttgaaaataaaattctagatatgcaaatgattttcttagaaaacttcacaaaataaaagatcttgtttttttttccatagcacagtaatgaatgtggttatcaatcacatacttttttggattatattgtagcaaaaagttgattagcttaccaagattattaatagcaatgtatgtgttataatacaacttagtacattaaagctacgaaaactcatcctggctgtaggatagtaataaaggaagaattatgacttcattatgaaaaaaagaagttttaaagttttcaattacgagcaatttggaagaaaaaacctaaggtgcttttcaaaagagtaactgaaattgttgcaggccaaaacagcaatatgatatctcagatttagttcaataagaacagtgaaacttttggttcactaataaattctgagtaaattagtggtgaagacaaaatataacttgttttagtgagccactgaggaaagaatatgcttattacaaagacaaaatgtggtgcagaaactatcttgcacctgtgtgcataaactgttagtcgtgactgacttggtgtgttgctattgtgtttctatatactccgtccaatatagataatgttttaataacaactgtgggataaaagttatcttccccttggaaagactaatgagcacaatgatattaatcacttttatggtgaataataaatgcaataattgcctcatgggtg

SEQ ID NO: 225676 - DNA, 813 bp, Artificial Sequence
  derived and/or modified sequence
atgccaagagacaacatggctagcctgattcagcgtatcgcaagacaggcttgcctgaccttcagaggctccgggggaggcagaggggccagcgatcgggacgcagcttctggaccagaggccccaatgcagccagggttccctgagaacctgtctaagttgaaaagtctgctgacacagctgagagccgaagatttgaacattgctcctcgcaaagcaactctccagcctttaccccctaatcttcccccagtcacatacatgcacatttacgagaccgatggctttagtttaggcgtgttcttgctgaagagcgggacctcaatcccgctccacgatcatcccggaatgcacggcatgcttaaagtactttacggaaccgtgcgtatatcatgcatggacaaactcgacgcgggaggaggtcagcgtcctagagcactgccacctgagcagcagttcgaaccacctctacagcctcgagagagggaggcagtgcgccccggggttctgcgctccagagctgagtataccgaggcctcggggccttgcatcctaacaccacatagagacaacctgcaccagatagacgctgtggaggggcctgctgcgtttctggacatactggcccccccttatgaccctgacgacgggagagattgccattattatcgggtgttggaaccggtcaggccaaaggaggcgtcctcaagtgcttgcgatttgcctagagaggtgtggctactcgaaaccccacaggctgacgacttttggtgcgagggggagccctatccaggacctaaagtattcccttag

SEQ ID NO: 225677 - DNA, 813 bp, Artificial Sequence
  derived and/or modified sequence
atgccccgggacaacatggccagcctcatccagagaattgcccggcaggcctgcctgaccttccggggcagcggcggcggccgcggggccagtgacagagatgctgccagcggccctgaggcccccatgcagcccggcttccctgagaacctgagcaagctgaagagcctgctgacccagctgcgggcagaggacctgaacatcgcccccaggaaggccaccctgcagcccctgccccccaacctgccccctgtgacctacatgcacatctatgaaacagatggcttcagcctgggcgtcttcctgctgaagagcggcaccagcatccccctgcatgaccaccctggcatgcacggcatgctgaaggtgctgtatggaacagtgcgcatcagctgcatggacaagctggatgctgggggcggccagaggccccgggccctgcccccagagcagcagtttgagccccccctgcagccccgggagcgggaggccgtgcggcctggggtgctgcggagcagagctgagtacacagaggccagcggcccctgcatcctgaccccccaccgggacaacctgcaccagattgatgctgtggagggccctgctgccttcctggacatcctggccccaccctatgaccctgatgatggccgggactgccactactacagagtgctggagcctgtgcggcccaaggaggccagcagcagcgcctgtgacctgccccgggaggtgtggctgctggagaccccccaggctgatgacttctggtgtgagggggagccctacccaggccccaaggtgttcccctag

SEQ ID NO: 225678 - DNA, 813 bp, Artificial Sequence
  derived and/or modified sequence
atgccccgggacaacatggccagcctgatccagcggatcgcccggcaggcttgcctgacattccgaggatccggaggaggtcggggcgctagcgaccgcgatgccgcctcaggacctgaagctcccatgcagcccggcttcccggagaacctttccaaattgaagagcttgctcactcagttacgggcagaagatctaaatattgcgcctagaaaggctactctgcagcctctgcctcccaatctgccacccgttacctacatgcacatctacgagaccgatggtttttcattgggcgttttcctgttgaaatcggggactagcattcctttacacgaccatcctgggatgcacggcatgctgaaggtgctgtatggaacagttagaatttcttgcatggacaagctcgatgctggcggcgggcagcgtccgagggcactgccaccagaacagcagtttgaaccccctctccagcctagggagcgggaggctgtgagacccggagttctgcggtctcgcgccgaatacaccgaggcatccggaccctgcattctgacccctcacagggacaacctgcatcagatcgatgctgtcgagggcccagcagcatttctggacattcttgccccgccttacgacccagatgatggacgggactgccactactatcgcgttctcgagcctgttcggcccaaagaagcgagttcatctgcttgcgatctgccacgggaagtgtggctgcttgaaacccctcaggcggatgacttctggtgcgagggagaaccctaccccggaccaaaggtgtttccctag

SEQ ID NO: 225679 - DNA, 813 bp, Artificial Sequence
  derived and/or modified sequence
atgccccgagacaatatggccagcctgatccagagaatcgcgagacaagcttgtttgaccttccgtgggtcagggggtggacggggagctagcgaccgggacgccgcatcaggacctgaggccccaatgcagcccggattccctgagaacttatcaaagctgaaatccttattgacccagctccgagcggaagacttgaatattgctcccaggaaggcaacacttcagccgctccctccaaacctcccccctgtcacatacatgcatatctacgagaccgacgggttttccctcggagtgttcctgctgaaatcgggcacctccattccactccacgatcaccctggtatgcatggaatgctgaaggtactatacggcacggtgcgcatttcgtgcatggataagcttgacgccggaggaggccagaggccgagagcccttcctcctgagcaacagtttgagcccccactacagccgcgtgagcgggaggcagtgcgacctggggtgcttagatcccgagctgagtataccgaggcctcagggccttgtattttgacaccccaccgtgacaatctgcaccagatcgatgccgtggaggggccagcagcatttctggatatcctcgctccaccgtacgatcccgacgacggcagggactgtcattactatagagtgctcgagcccgtcagacccaaggaggcttcaagttccgcttgtgacctcccgagagaggtctggcttctggagactccacaagctgacgacttttggtgtgagggcgaaccttatcctggccctaaagtgttcccttag

SEQ ID NO: 225680 - protein, 580 aa, Artificial Sequence
  derived and/or modified sequence
MHLSAVFNALLVSVLAAVLWKHVRLREHAATLEEELALSRQATEPAPALRIDYPKALQILMEGGTHMVCTGRTHTDRICRFKWLCYSNEAEEFIFFHGNTSVMLPNLGSRRFQPALLDLSTVEDHNTQYFNFVELPAAALRFMPKPVFVPDVALIANRFNPDNLMHVFHDDLLPLFYTLRQFPGLAHEARLFFMEGWGEGAHFDLYKLLSPKQPLLRAQLKTLGRLLCFSHAFVGLSKITTWYQYGFVQPQGPKANILVSGNEIRQFARFMTEKLNVSHTGVPLGEEYILVFSRTQNRLILNEAELLLALAQEFQMKTVTVSLEDHTFADVVRLVSNASMLVSMHGAQLVTTLFLPRGATVVELFPYAVNPDHYTPYKTLAMLPGMDLQYVAWRNMMPENTVTHPERPWDQGGITHLDRAEQARILQSREVPRHLCCRNPEWLFRIYQDTKVDIPSLIQTIRRVVKGRPGPRKQKWTVGLYPGKVREARCQASVHGASEARLTVSWQIPWNLKYLKVREVKYEVWLQEQGENTYVPYILALQNHTFTENIKPFTTYLVWVRCIFNKILLGPFADVLVCNT

SEQ ID NO: 225681 - DNA, 1743 bp, Artificial Sequence
  derived and/or modified sequence
atgcatctgtcggccgtgttcaacgctctcctggtgtccgtgctggccgctgtgctgtggaagcacgtgcggcttcgggagcacgccgcaaccctggaggaggagcttgctttgagccggcaggccacagaaccggctccggcactccggattgactaccctaaggcattgcaaattctcatggaaggcggtacccacatggtgtgcacgggcaggactcataccgaccgcatctgtaggttcaaatggctctgttacagcaacgaagccgaagagttcattttctttcacggaaatacaagcgtaatgttacctaatcttggaagtaggaggtttcagcccgcactccttgacctgtcaacagttgaggaccacaacacccagtactttaacttcgtcgagctcccggcagccgctcttagattcatgcccaaaccagtgttcgtgccagacgtggcccttattgcaaatagattcaaccctgataatctgatgcacgtgttccacgacgacttgcttccactgttctacaccctaaggcagttccccggactcgcacacgaggcgagactctttttcatggaaggatggggagaaggggctcattttgacctttataagctcctttcacctaaacagcccctgctgcgcgcacagttgaagaccctcgggaggctgttgtgcttctcacatgccttcgtgggactttccaagattaccacctggtaccaatacgggttcgtccagccgcagggacccaaggcgaacattctagtctccgggaacgagatccggcagttcgcaagattcatgaccgagaagttgaatgtgagtcatacaggagtgcctctgggcgaggagtacatactagtctttagccgaacacagaaccggctcatcctcaatgaggcagagctcctgctcgccttggcccaggaatttcagatgaagactgttactgtgagtttggaagaccacacctttgccgatgttgtcaggctggtaagcaacgcatccatgttggtatccatgcatggcgctcagctggtgacgacgcttttcctgcctcggggagccactgttgtggaactgttcccttacgctgtgaatccggatcactacaccccctataaaactctggctatgctacccggtatggacctacagtacgtggcgtggaggaacatgatgcctgagaacactgtaacacatcctgaaaggccttgggatcagggcggaattacccatctggacagagccgaacaggcacgcatcctgcagagtcgtgaagtgccgagacatctatgttgccggaaccccgagtggctctttcgcatctaccaggatacaaaggttgatattccgagcctgattcagaccattaggagagttgtcaaaggacgcccagggcctaggaagcagaaatggactgtagggctgtatccgggtaaggtgcgggaggcacggtgtcaggcttctgtgcacggcgctagtgaggcccgtctgaccgtttcctggcagataccatggaatctcaagtatctcaaagtgcgagaagtgaaatatgaagtctggctccaggagcagggagaaaatacctacgtgccttatattctggccctgcaaaaccatacattcacggaaaatatcaagcccttcactacgtacctcgtgtgggtgaggtgtatttttaataagattctgctcggtcccttcgccgatgtcctagtgtgcaacacctag

SEQ ID NO: 225682 - DNA, 1743 bp, Artificial Sequence
  derived and/or modified sequence
atgcatctcagcgccgtcttcaacgcgctgctggtgtcggtgctggcagcggtcctgtggaaacacgtgagactgcgtgagcacgcggcaaccctcgaggaggaactggcgctgtcccggcaggcaaccgaacccgcaccagcccttagaatcgactaccctaaggcactccagatcctgatggagggaggcacccacatggtgtgcactggtagaacgcataccgaccgtatctgtcggtttaagtggctgtgctactccaatgaggcggaggagtttatcttttttcatggcaacacaagtgtcatgctgccaaatttaggctcacgacggttccaaccggctctgctggatctgtctaccgtggaggaccataatactcaatacttcaacttcgtggagttgcctgctgctgcactcaggtttatgcccaagcctgtgtttgtgcctgatgtggccttaatcgccaaccgcttcaaccctgacaatttaatgcacgtgttccatgatgacctgctgccacttttttatactctcagacaatttcctgggttagctcatgaagctcgcttgttcttcatggagggctggggggaaggagctcactttgatctatataagttactatcccctaagcaaccattactccgggctcagttaaaaactcttggtagactcctgtgtttctcccacgctttcgtgggattgtctaaaattacgacctggtatcagtatgggttcgtgcagccccaggggcctaaggctaacattctggtttcaggcaacgagatcagacagtttgcacgctttatgacagaaaagttgaatgtttcccacacaggggtacctctgggggaggaatacatcctggtctttagtcgtacccagaacaggctgatactgaacgaagcagagttgctgctggctttggcccaggagttccagatgaaaactgtaacagtttcactcgaggaccacacctttgccgacgtggtaagactcgtgagcaatgccagtatgctcgtgagtatgcacggggctcagctcgtgacgacgctgtttctcccacggggtgctacagtggtggagctgttcccgtacgcggtgaacccagatcattacacaccgtacaaaacgctcgccatgctacctggaatggatcttcagtatgtcgcctggcgaaacatgatgcctgaaaacactgtgacacaccccgagaggccctgggaccagggaggcatcacccacctggatcgtgcggagcaggcacgtattctccaatcaagggaggtgcccagacacctgtgctgtcgaaaccccgaatggctctttagaatataccaggacaccaaagtcgatattccttcgttgatccaaacaatccgccgtgtggtaaagggcagacccggacctagaaagcagaaatggaccgtgggcctttaccctggcaaagtcagagaagccagatgtcaggccagcgtgcacggtgctagcgaagccagattaactgtctcatggcagatcccctggaacctcaagtacctgaaagtgagagaggttaagtacgaggtgtggctgcaggagcagggagaaaatacctacgttccttacattttagctctccaaaatcacacttttacagaaaatattaagccattcactacatacctggtgtgggttagatgtatttttaacaagatccttttaggacccttcgcagacgtgctcgtttgtaatacttag

SEQ ID NO: 225683 - DNA, 1743 bp, Artificial Sequence
  derived and/or modified sequence
atgcatctcagtgcagtgttcaacgcactgctcgttagcgtacttgcagccgtgctgtggaagcatgtgaggctgcgggagcacgcggccacactagaggaggaactcgcactgtcaaggcaggccacggagcctgcaccggccttgagaatcgattatcctaaagcccttcaaattctaatggaagggggcacacatatggtttgtacagggcggacccataccgacaggatctgtcgattcaagtggctgtgctattcaaatgaagcagaggaattcatctttttccacggaaatacttctgtcatgctgcccaacttgggatcccgaagattccagccagctcttctggacctgtcaacagtcgaggatcataatacacaatactttaattttgttgaactgcctgctgctgcacttcgcttcatgcccaaaccggtgttcgtacccgacgtcgccctaattgcaaatcggttcaatccagataacctcatgcatgtttttcatgacgatttattaccgctcttttacacgctgagacaatttccaggtctggcccatgaggccagattgtttttcatggagggttggggcgagggtgcccatttcgacctgtataagcttcttagccccaaacaaccgctgctcagagcccagttaaagacactcggtagacttctatgctttagtcatgcttttgtgggccttagcaagataactacctggtaccaatacggcttcgtgcagccccaggggcctaaggccaacattctagtttctggaaatgagataaggcagttcgcacggtttatgaccgaaaagctgaacgtctcccacactggggtgccattgggggaggaatatattttggttttcagccggacacagaacagactgatactcaatgaagcagagctactgcttgcacttgcacaggaatttcagatgaaaacagtaactgtctcacttgaagaccacactttcgccgatgtcgttaggctggtatctaatgcatcaatgttagttagcatgcatggcgcacagctcgtgactacgctcttcctgcccaggggggcaacagttgttgaactctttccttacgcagtcaaccccgaccactatacaccgtataagaccttagctatgttacccggtatggatctccagtacgtagcttggagaaacatgatgccagagaatactgtaacacatcctgaacggccgtgggaccagggcgggattactcatctcgatagggccgaacaagcaaggatactccagtcacgagaagtgcccaggcatttgtgctgccgcaaccccgagtggctgtttcgcatataccaagatacaaaagttgatataccttctctgattcagacgatccgaagagtggtcaagggcagaccgggccctaggaagcagaaatggactgttggtctgtatcccgggaaagtgagagaggccagatgtcaggcatccgtgcatggcgccagtgaagcgcggctgacagtaagttggcagattccatggaacctcaaatacttgaaggtcagagaggtgaaatatgaggtctggctgcaagagcagggggagaacacctatgtcccatatatcttggcacttcagaaccacactttcacagagaacattaagccgttcaccacctacctcgtctgggttcgctgtatcttcaacaagatcttacttggaccatttgcagacgtcctagtgtgcaatacatag

SEQ ID NO: 225684 - DNA, 1743 bp, Artificial Sequence
  derived and/or modified sequence
atgcacctcagcgctgtgtttaatgcactcctagtctctgtgctggccgccgttctgtggaagcacgttcgactgcgcgagcacgccgccacactggaggaagagctcgctctgagtcgccaggccaccgagcccgctcccgcgttaagaatagactacccaaaggctctgcagattttgatggaaggcggaacccacatggtgtgcacaggtcggacccacacggataggatttgcaggttcaaatggctgtgctactctaatgaggccgaggagtttatattctttcatggcaacacgtcagtaatgcttcctaatcttggaagccgccggttccagcctgccttgctggacttgtccaccgtggaagaccacaatacacaatatttcaacttcgtcgaactgcccgccgccgctttacgatttatgcctaaacccgtgtttgtgccagatgttgccctgattgccaacagattcaatcctgacaacttgatgcatgttttccacgacgacctcctgcccctgttctacactctaaggcagttccccggcctcgcacatgaagcccggctcttcttcatggagggctggggggaaggtgcccacttcgacctgtataaattgctaagtcctaagcagcctctgctgcgcgcccagctgaaaactctgggacgcctcctatgtttcagccatgcttttgtcgggctgtctaaaattaccacgtggtaccaatatggcttcgttcagcctcagggccctaaagcaaacattctcgtctcaggcaatgaaattcggcagttcgcaaggtttatgacagaaaagctaaatgtgtcgcacacgggcgtgccactcggcgaagaatacatcctagttttttcacgcacccaaaatagattaatcctgaatgaggccgagttgcttctggctctagcccaagagtttcaaatgaaaaccgtgacagtctctctggaggaccacaccttcgctgatgtggtgcgcctggtctccaatgcaagcatgctagtctccatgcacggggcgcagctcgtaacgactcttttcctccccaggggagccactgtggtggaactgttcccgtacgccgtcaatcctgaccattacaccccttacaagactctcgcaatgctgcctggcatggatctgcagtacgtcgcctggcggaatatgatgcctgagaacacagttacccaccctgagaggccgtgggatcagggtggaatcacacacttagacagagctgaacaggcacgcatcttacaatctagggaggtccccaggcatctttgttgccgcaaccctgagtggttatttaggatttaccaggacaccaaagttgacattcctagtttgattcagaccatacgccgggtggtgaaagggaggcctggccctaggaagcaaaagtggaccgtcgggctttaccccggaaaagttagggaggcgcgctgtcaggcaagcgtgcacggcgcctccgaagccagactcacagtgtcgtggcaaatcccatggaatctgaaatacttgaaagtgcgcgaagttaagtacgaggtgtggctgcaggagcagggcgagaacacctatgtgccctacattctggcactgcaaaaccacacttttacagaaaacatcaagccctttacgacctatctagtttgggtccgatgcatcttcaataagattctcctcggtccattcgccgatgtccttgtctgtaatacttag

SEQ ID NO: 225685 - DNA, 2531 bp, Artificial Sequence
  derived and/or modified sequence
aagctggcgctgggggcggcggcggggtgggaaagcggcgccgccgtggggcctcctggacgcgtcggcggaggtggcttcgtcccgcggagtccaggcttcagctcctggcttctcttctttcctcctagagatcagatgtcggaactccagctgagggcatgtcttactgggcacgcaggtgtcctctcttgagaagaactgtccataccatggtggtggtaaggctttcaccagttctcaggatgcccatagggatgggtgaagcctgcctggcctgtggtgcttcccagtggccgtcatctcattagggccccacagtggcattaggatgcacctctcggcggtgttcaacgccctcctggtgtcggtgctggcagcggtcctgtggaagcatgtgcggctgcgtgagcatgcagccacactggaggaggagctggccctcagccgacaggccacagagccagccccagcactgaggatcgactacccgaaggcactgcagatcctgatggagggcggcacacacatggtgtgcacgggccgcacgcacacagaccgcatctgccgcttcaagtggctctgctactccaacgaggctgaggagttcatcttcttccatggcaacacctctgtcatgctgcccaacctgggctcccggcgcttccagccagccctgctcgacctatccaccgtggaggaccacaacactcagtacttcaacttcgtggagctgcctgctgctgccctgcgcttcatgcccaagccggtgttcgtgccagacgtggccctcatcgccaaccgcttcaaccccgacaacctcatgcacgtctttcatgacgacctgctgccactcttctacaccctgcggcagtttcccggcctggcccacgaggcacggctcttcttcatggagggctggggcgagggtgcacacttcgacctctacaagctgctcagccccaagcagcctctcctgcgggcacagctgaagaccctgggccggctgctgtgcttctcccatgcttttgtgggcctctccaagatcactacctggtaccagtatggctttgtgcagccccagggcccgaaggccaacatcctcgtctcaggcaatgagatccggcagtttgcacggttcatgacagaaaagctgaacgtgagccacacaggagtccccctaggcgaggagtacattctggtctttagccgaacccagaacagactcattctgaatgaggcagagctgctgctggcactggcccaggagttccagatgaagacagtgacagtgtccctggaggaccacacctttgctgatgtcgtgcggctggtcagcaatgcctccatgctggtcagcatgcatggggcccagctggtcaccaccctcttcctgccccgtggggcaactgtggtagagctcttcccatatgctgtcaatcccgaccactacactccctataagacgctggccatgctgcctggcatggacctccagtatgtagcctggcggaacatgatgccagagaacacagtcacacaccctgagcggccctgggatcaggggggcatcacccatctggaccgggctgagcaagcccgtatcctgcaaagccgtgaggtcccacggcatctctgttgccggaaccccgagtggctcttccgaatctaccaggacaccaaggtggacatcccgtccctcattcaaaccatacggcgcgtggtgaagggccggccaggaccacggaagcagaagtggacagtcggcctatatccaggcaaggtgcgggaggcacggtgccaggcgtcagtgcatggcgcctccgaggcccgcctcactgtctcctggcagatcccatggaaccttaaatacctgaaggtgagggaggtgaagtacgaggtgtggctgcaggagcagggggagaacacctacgtgccttacatcctggctctgcagaaccacaccttcactgagaacatcaagcccttcaccacctacctggtgtgggtccgctgcatcttcaacaagatcctcctgggaccctttgcagatgtgctggtgtgcaacacgtagcgagcaggccacagcctggcctcgggaaggtggctcctgcagttcagcgtccctgggcccattaatcccactgtggagacttctgggaactatttattgagcaggcctgtgcctccacatcatcttgttgtctctggggtgtggtgtcacagcactcctctttgccctagagataagggacctgacttccccttctcccatcctgaacatttgtacccctggagaagttccttagcagggaggaggaagaggagaggaggaagcaaagaatcacaaggaacctctggctaggtgatcctgatgtttcctactgagtttttctggtatccagatttctggaaaccgagtaatcatgtactgtttgattgggtggttcatctgcttccatcccagtgaaatttacctgtagcccagtgaagggtgtgtttggaacattcattaaatgattctaagcatc

SEQ ID NO: 225686 - DNA, 1743 bp, Artificial Sequence
  derived and/or modified sequence
atgcatctaagcgcagttttcaatgccttgcttgtgtcggtccttgccgcagtgctttggaaacacgttcggctcagggaacatgctgcaacactggaggaggagctggccctatctagacaagccacggaacctgcccctgcactccggattgactatcccaaagctttacaaatcctaatggagggcggtacacacatggtatgtaccgggagaacccatactgatcgtatttgtcggttcaaatggctgtgctactcaaacgaagcagaagagttcatttttttccatggaaacacttcagtgatgctgcctaatctgggctctcggagattccaaccagccctactcgacctctctactgtagaagaccacaacacacagtactttaacttcgtagaactgcccgccgccgccttaaggtttatgcccaaacccgtatttgttcctgacgtcgcactgatcgccaaccgatttaaccccgacaatctgatgcatgtctttcatgacgacctcctgcccctattttatacactcaggcagttcccaggcctggcacacgaggcaagactgttttttatggagggctggggcgaaggtgctcatttcgatctctacaagctcctaagtcccaagcagcccctcctgagggcccaactcaaaacgctcggcaggctcctgtgtttctcacacgccttcgtgggtctatctaaaatcaccacttggtatcagtacgggtttgtgcagccccaagggcctaaagcgaacattctggtgtctggtaatgaaattcggcagttcgctcgattcatgacagaaaaacttaacgtcagccacaccggcgtgccactgggcgaggaatatattttagtgttctcacgaactcaaaatcgccttattctcaatgaagcagagctactgcttgcacttgcacaggaatttcagatgaaaacagtaactgtctcacttgaagaccacactttcgccgatgtcgttaggctggtatctaatgcatcaatgttagttagcatgcatggcgcacagctcgtgactacgctcttcctgcccaggggggcaacagttgttgaactctttccttacgcagtcaaccccgaccactatacaccgtataagaccttagctatgttacccggtatggatctccagtacgtagcttggagaaacatgatgccagagaatactgtaacacatcctgaacggccgtgggaccagggcgggattactcatctcgatagggccgaacaagcaaggatactccagtcacgagaagtgcccaggcatttgtgctgccgcaaccccgagtggctgtttcgcatataccaagatacaaaagttgatataccttctctgattcagacgatccgaagagtggtcaagggcagaccgggccctaggaagcagaaatggactgttggtctgtatcccgggaaagtgagagaggccagatgtcaggcatccgtgcatggcgccagtgaagcgagactgacagtcagctggcagatcccctggaacctgaaatacctcaaagtcagagaagtaaaatatgaagtctggctccaagaacagggtgagaacacttatgtaccgtacatcctcgctcttcaaaatcatacttttaccgagaacatcaaacccttcaccacctatctcgtgtgggtgagatgcatcttcaataaaatactcctgggtcctttcgccgacgtcctggtgtgcaacacgtag

SEQ ID NO: 225687 - DNA, 1743 bp, Artificial Sequence
  derived and/or modified sequence
atgcatctatctgccgtgtttaatgccctgctcgttagtgtcctcgctgccgtgttatggaaacatgtccgcttgagggaacatgctgccaccctggaggaggaactcgcactctcccgacaagcgactgagcccgctcctgcactgcgtatcgattatcccaaagcactccaaatcttgatggagggcggcacacacatggtttgtacaggaaggacacatacagaccgtatctgccgttttaaatggctctgctactcaaatgaggcagaggaattcattttttttcatgggaacacttctgtgatgttgcccaacttaggctcaagaagattccagccagccctgctcgacctctccaccgtcgaagatcataacacccagtatttcaatttcgtcgagctgcccgccgccgccttgaggttcatgccaaagccggtcttcgttccagatgtggccctcatagcaaatagattcaatcccgataacttgatgcatgtcttccacgacgacctccttccgctgttctatactctccgccagtttcccggacttgctcacgaagccaggctgttctttatggaagggtggggtgaaggagcgcactttgacctgtacaaacttctttcccccaaacagccgcttcttcgggctcagttaaagacactgggacggttgctgtgcttctcacacgctttcgtgggactatctaagattaccacctggtatcaatatggattcgtgcagcctcaggggcccaaagctaacatcttggtttccggaaacgagatcagacagttcgccagatttatgaccgaaaaactcaatgtgtcccatacaggcgttccactgggcgaagagtacatcctggtgttctcccggacacagaatagactgattctcaacgaagccgaactgctactagctctcgctcaggagttccagatgaaaacagttacagtatccttggaagatcataccttcgccgacgtggtcagactcgtgtctaatgcgagcatgttggttagtatgcatggcgcacaattggtcactactctgtttctgccacgcggagcaaccgttgtggagctgtttccatacgcggtaaatccggatcattacaccccttataaaaccctcgcaatgctgcccggaatggatcttcaatatgtggcctggaggaatatgatgcccgagaatactgtaacacaccccgaacgaccttgggatcaggggggtattacacatttggaccgagcagagcaggcaagaatcctacagtcgagggaggtccctaggcatttgtgttgcagaaacccagaatggcttttcagaatttatcaggacaccaaagttgacatcccaagcctgatccagaccatcagacgagtggtgaagggtcgtcctggtcctaggaaacagaagtggactgtgggcttatatcccggaaaagttagagaagcacgatgtcaggcatctgtgcatggcgcatctgaggccagactgaccgtatcttggcaaattccttggaacctgaaatacctgaaagttcgcgaagttaagtacgaggtttggctgcaggaacagggagagaacacatacgtcccctatattttggcgctgcagaaccatacatttaccgagaacattaagccctttactacctatctcgtttgggtccggtgtatttttaacaaaatcctgctggggcccttcgctgacgtcctggtgtgcaatacttag

SEQ ID NO: 225688 - DNA, 1743 bp, Artificial Sequence
  derived and/or modified sequence
atgcacctgagcgccgtgttcaacgccctgctggtgagcgtgctggccgccgtgctgtggaagcacgtgagactgagagagcacgccgccaccctggaggaggagctggccctgagcagacaggccaccgagcccgcccccgccctgagaatcgactaccccaaggccctgcagatcctgatggagggcggcacccacatggtgtgcaccggcagaacccacaccgacagaatctgcagattcaagtggctgtgctacagcaacgaggccgaggagttcatcttcttccacggcaacaccagcgtgatgctgcccaacctgggcagcagaagattccagcccgccctgctggacctgagcaccgtggaggaccacaacacccagtacttcaacttcgtggagctgcccgccgccgccctgagattcatgcccaagcccgtgttcgtgcccgacgtggccctgatcgccaacagattcaaccccgacaacctgatgcacgtgttccacgacgacctgctgcccctgttctacaccctgagacagttccccggcctggcccacgaggccagactgttcttcatggagggctggggcgagggcgcccacttcgacctgtacaagctgctgagccccaagcagcccctgctgagagcccagctgaagaccctgggcagactgctgtgcttcagccacgccttcgtgggcctgagcaagatcaccacctggtaccagtacggcttcgtgcagccccagggccccaaggccaacatcctggtgagcggcaacgagatcagacagttcgccagattcatgaccgagaagctgaacgtgagccacaccggcgtgcccctgggcgaggagtacatcctggtgttcagcagaacccagaacagactgatcctgaacgaggccgagctgctgctggccctggcccaggagttccagatgaagaccgtgaccgtgagcctggaggaccacaccttcgccgacgtggtgagactggtgagcaacgccagcatgctggtgagcatgcacggcgcccagctggtgaccaccctgttcctgcccagaggcgccaccgtggtggagctgttcccctacgccgtgaaccccgaccactacaccccctacaagaccctggccatgctgcccggcatggacctgcagtacgtggcctggagaaacatgatgcccgagaacaccgtgacccaccccgagagaccctgggaccagggcggcatcacccacctggacagagccgagcaggccagaatcctgcagagcagagaggtgcccagacacctgtgctgcagaaaccccgagtggctgttcagaatctaccaggacaccaaggtggacatccccagcctgatccagaccatcagaagagtggtgaagggcagacccggccccagaaagcagaagtggaccgtgggcctgtaccccggcaaggtgagagaggccagatgccaggccagcgtgcacggcgccagcgaggccagactgaccgtgagctggcagatcccctggaacctgaagtacctgaaggtgagagaggtgaagtacgaggtgtggctgcaggagcagggcgagaacacctacgtgccctacatcctggccctgcagaaccacaccttcaccgagaacatcaagcccttcaccacctacctggtgtgggtgagatgcatcttcaacaagatcctgctgggccccttcgccgacgtgctggtgtgcaacacctag

SEQ ID NO: 225689 - DNA, 1743 bp, Artificial Sequence
  derived and/or modified sequence
atgcacctttcggcggtcttcaacgcactattagtatccgtcctggcagccgtcctgtggaaacatgtcagattaagggagcacgccgccaccctggaggaggaactggccctgtctagacaggccacagagcctgcgcccgctctgaggattgactaccccaaggcactgcagatcttgatggagggcggaacacacatggtatgtacggggcggactcatacagatcgtatttgcaggtttaagtggctatgctatagcaatgaggcagaagaattcatcttctttcacggtaatacgtccgtgatgctgcccaatctggggagcaggcggttccaacctgctctgctggatctgtccacggtggaggatcataacacgcagtactttaatttcgttgagctgccagccgctgccctcagatttatgcccaagccggtcttcgtgcccgacgtggccctgattgcaaaccggttcaacccagacaacctgatgcacgtgttccacgacgacctgctcccacttttttacactcttaggcagtttcctggtctggcccatgaggccaggctcttctttatggaggggtggggtgagggagcccattttgatctgtacaaattgttatctccgaagcagcctttattgcgggcacagcttaaaacacttggaaggcttttgtgttttagccacgcttttgtggggcttagtaagatcactacttggtaccagtatggcttcgtgcagccccagggccctaaagcaaatatactggtctccggcaatgaaatcaggcagtttgcccgttttatgacagagaagctgaatgtgagccacactggtgtgcctctgggagaggaatatatccttgtgttcagtaggacccagaatagactgatacttaacgaggctgagctactcctggctcttgctcaagagttccagatgaaaaccgtgaccgtgtccctggaggaccacacatttgccgatgtggtacgacttgtctctaacgcctctatgctggttagcatgcacggtgcccagcttgtgacaactttgttcctcccccggggggctacagtcgtggaactatttccgtacgctgtgaatcccgaccattacacaccatataaaaccctggccatgctgccaggcatggacctccagtacgtcgcctggaggaatatgatgcccgagaatactgtgacccaccccgaacgaccttgggaccagggtggcatcactcatctggaccgggctgaacaggcgcgcatcctgcagtcacgagaggtgcctcgtcacctgtgctgtaggaatccagaatggctgttccggatatatcaggacaccaaagtggacattccatcgctgatccagacaatccggcgggtggtcaaaggacgcccaggtccccgaaaacagaagtggacagtagggctgtatccaggcaaggtgagagaagcgagatgccaggctagcgtacacggagcctccgaggcaaggctcacggtctcctggcagattccttggaatttaaagtatctgaaggtccgcgaagtgaagtacgaagtctggttgcaggagcagggtgagaacacctacgtgccttatattttggccctgcagaatcataccttcactgagaacatcaagccatttacgacatacctggtatgggtccggtgtatttttaataaaatactgctgggaccgttcgccgacgtgctcgtctgcaacacctag

SEQ ID NO: 225690 - DNA, 2544 bp, Artificial Sequence
  derived and/or modified sequence
caggctccgcgccgggctcgcccgccgggcaggcgcacggcggacacctgcgagcctggaggtggcggtcgctgcgaacccggcggcgcggccaaacctgtgctggctgcctgggccttctgggcctcctgggccagaagctggcgctgggggcggcggcggggtgggaaagcggcgccgccgtggggcctcctggacgcgtcggcggaggtggcttcgtcccgcggagtccaggcttcaggctttcaccagttctcaggatgcccatagggatgggtgaagcctgcctggcctgtggtgcttcccagtggccgtcatctcattagggccccacagtggcattaggatgcacctctcggcggtgttcaacgccctcctggtgtcggtgctggcagcggtcctgtggaagcatgtgcggctgcgtgagcatgcagccacactggaggaggagctggccctcagccgacaggccacagagccagccccagcactgaggatcgactacccgaaggcactgcagatcctgatggagggcggcacacacatggtgtgcacgggccgcacgcacacagaccgcatctgccgcttcaagtggctctgctactccaacgaggctgaggagttcatcttcttccatggcaacacctctgtcatgctgcccaacctgggctcccggcgcttccagccagccctgctcgacctatccaccgtggaggaccacaacactcagtacttcaacttcgtggagctgcctgctgctgccctgcgcttcatgcccaagccggtgttcgtgccagacgtggccctcatcgccaaccgcttcaaccccgacaacctcatgcacgtctttcatgacgacctgctgccactcttctacaccctgcggcagtttcccggcctggcccacgaggcacggctcttcttcatggagggctggggcgagggtgcacacttcgacctctacaagctgctcagccccaagcagcctctcctgcgggcacagctgaagaccctgggccggctgctgtgcttctcccatgcttttgtgggcctctccaagatcactacctggtaccagtatggctttgtgcagccccagggcccgaaggccaacatcctcgtctcaggcaatgagatccggcagtttgcacggttcatgacagaaaagctgaacgtgagccacacaggagtccccctaggcgaggagtacattctggtctttagccgaacccagaacagactcattctgaatgaggcagagctgctgctggcactggcccaggagttccagatgaagacagtgacagtgtccctggaggaccacacctttgctgatgtcgtgcggctggtcagcaatgcctccatgctggtcagcatgcatggggcccagctggtcaccaccctcttcctgccccgtggggcaactgtggtagagctcttcccatatgctgtcaatcccgaccactacactccctataagacgctggccatgctgcctggcatggacctccagtatgtagcctggcggaacatgatgccagagaacacagtcacacaccctgagcggccctgggatcaggggggcatcacccatctggaccgggctgagcaagcccgtatcctgcaaagccgtgaggtcccacggcatctctgttgccggaaccccgagtggctcttccgaatctaccaggacaccaaggtggacatcccgtccctcattcaaaccatacggcgcgtggtgaagggccggccaggaccacggaagcagaagtggacagtcggcctatatccaggcaaggtgcgggaggcacggtgccaggcgtcagtgcatggcgcctccgaggcccgcctcactgtctcctggcagatcccatggaaccttaaatacctgaaggtgagggaggtgaagtacgaggtgtggctgcaggagcagggggagaacacctacgtgccttacatcctggctctgcagaaccacaccttcactgagaacatcaagcccttcaccacctacctggtgtgggtccgctgcatcttcaacaagatcctcctgggaccctttgcagatgtgctggtgtgcaacacgtagcgagcaggccacagcctggcctcgggaaggtggctcctgcagttcagcgtccctgggcccattaatcccactgtggagacttctgggaactatttattgagcaggcctgtgcctccacatcatcttgttgtctctggggtgtggtgtcacagcactcctctttgccctagagataagggacctgacttccccttctcccatcctgaacatttgtacccctggagaagttccttagcagggaggaggaagaggagaggaggaagcaaagaatcacaaggaacctctggctaggtgatcctgatgtttcctactgagtttttctggtatccagatttctggaaaccgagtaatcatgtactgtttgattgggtggttcatctgcttccatcccagtgaaatttacctgtagcccagtgaagggtgtgtttggaacattcattaaatgattctaagca

SEQ ID NO: 225691 - DNA, 1743 bp, Artificial Sequence
  derived and/or modified sequence
atgcatctgtccgccgtgttcaacgccctattggtgtctgttttggctgctgtcctatggaaacacgtacggttgcgtgagcacgccgcgaccttggaagaagagctagcactctcacgtcaagcgaccgaacctgcaccagcattaagaatcgattacccaaaggccctgcagatactgatggaaggaggcacgcacatggtttgcactggaaggactcatacagaccggatctgccggtttaaatggttgtgctactccaacgaggccgaggaattcattttcttccatgggaacacatccgtgatgttgccaaatcttggctccagacggttccagcccgccttgcttgatttgtcaactgtggaagatcacaatactcagtactttaatttcgtggaactgccggcagccgcgctgcggtttatgcccaaacccgttttcgtgccagatgtggcactgatcgcaaacagatttaatcccgataacctgatgcatgtgtttcacgacgacctgctgcctctcttctacacactgcgtcaattccccgggctggcacatgaggctagactttttttcatggagggatggggcgaaggcgctcattttgacctgtataagttactttctccaaaacaacctctcctgcgcgcccaactgaaaactctcgggcggctcctctgcttcagtcatgcttttgtgggcctaagcaagatcaccacgtggtatcagtacggctttgtgcaacctcagggccccaaggccaatatcttggtgtcaggtaacgaaatacgccagtttgccagattcatgacagagaaacttaacgtttcccatacgggagttccacttggggaagagtacatcttagtcttttcgaggacccagaacagactgattctgaacgaagcagaactcttgttggctctcgctcaagagtttcagatgaagaccgtgactgtatcattagaagaccatacatttgccgatgtggttaggcttgtttctaacgccagtatgttagtcagtatgcatggagcccagttagtaactaccctgtttctccctcgcggcgccaccgtcgtcgagctgtttccttatgctgtgaatcccgaccactacactccatataaaacgctggccatgctccccggcatggacctacagtacgtggcctggaggaacatgatgccagaaaataccgtaactcatccggagagaccttgggatcaaggcgggatcactcacttagatagggccgaacaagctaggattctacagtccagggaggtgccacggcacctttgttgtagaaatcccgagtggctgtttcgcatttaccaagataccaaagttgatataccctctctaatccagacaatccgtcgcgttgtgaaaggaaggcccggcccacgtaagcaaaagtggactgtcggactgtacccaggcaaagtgcgcgaggcacgttgtcaggcctctgtccatggagcatccgaggctcgcctgaccgtgtcatggcagatcccttggaatctaaagtatttgaaagtaagggaggtaaaatacgaggtttggttgcaagaacaaggggagaacacctatgtaccgtatatcctcgctctccagaatcacactttcaccgagaacattaagccgttcaccacttacctggtttgggtgagatgcattttcaacaaaatcctgctcggacccttcgctgacgtcctggtgtgcaacacctag

SEQ ID NO: 225692 - DNA, 1743 bp, Artificial Sequence
  derived and/or modified sequence
atgcacctgtctgctgtgttcaatgccctgctggtgtctgtgctggccgctgtgctgtggaagcacgtgcggctgcgggagcacgccgccaccctggaggaggagctggccctgagccggcaggccacagagcccgccccagccctgagaattgactaccccaaggccctgcagatcctgatggagggcggcacccacatggtgtgcaccggccgcacccacacagaccgcatctgccgcttcaagtggctgtgctacagcaatgaggccgaggagttcatcttcttccacggcaacacctctgtgatgctgcccaacctgggcagccgccgcttccagcctgccctgctggacctgagcacagtggaggaccacaacacccagtacttcaactttgtggagctgcctgctgctgccctgcgcttcatgcccaagcctgtgtttgtgcctgatgtggccctgattgccaaccgcttcaacccagacaacctgatgcacgtgttccatgatgacctgctgcccctcttctacaccctgcggcagtttcctggcctggcccacgaggcccggctcttcttcatggagggctggggcgagggcgcccactttgacctgtacaagctgctgagccccaagcagcccctgctgcgggcccagctgaagaccctgggccgcctgctgtgcttcagccacgcctttgtgggcctgagcaagatcaccacctggtaccagtatggctttgtgcagccccagggccccaaggccaacatcctggtgtctggaaatgagatccggcagtttgcccgcttcatgacagagaagctgaatgtgagccacactggagtgcccctgggggaggagtacatcctggtgttcagcaggacccagaacagactcatcctgaatgaggccgagctgctgctggccctggcccaggagttccagatgaagacagtgacagtgtccctggaggaccacacctttgctgatgtggtgcggctggtgtccaatgcctccatgctggtgtccatgcatggagcccagctggtgaccaccctcttcctgcccaggggggccaccgtggtggagctgttcccctatgctgtgaacccagaccactacaccccctacaagaccctggccatgctgcccggcatggacctgcagtatgtggcctggaggaacatgatgccagaaaatacagtgacccaccctgagcggccctgggaccagggcggcatcacccacctggacagagctgagcaggcccgcatcctgcagagccgggaggtgcccaggcacctgtgctgcaggaaccctgagtggctgttccgcatctaccaggacaccaaggtggacatccccagcctcatccagaccatccggcgggtggtgaagggccggcccggccccaggaagcagaagtggacagtgggcctgtacccaggcaaggtgcgggaggcccgctgccaggcctctgtgcatggagccagcgaggcccggctgactgtgtcctggcagatcccctggaacctgaagtacctgaaggtgcgggaggtgaagtatgaggtgtggctgcaggagcagggcgagaacacctacgtgccctacatcctggccctgcagaaccacaccttcacagagaacatcaagcccttcaccacctacctggtgtgggtgcgctgcatcttcaacaagatcctgctgggcccctttgctgatgtgctggtgtgcaacacctag

SEQ ID NO: 225693 - DNA, 1743 bp, Artificial Sequence
  derived and/or modified sequence
atgcacctgagcgccgtgttcaacgccctgctggtgagcgtgctggctgcagtcctgtggaaacatgtccgactgcgcgaacacgccgccacactggaggaggagctggcactgagcaggcaagcaacagaacccgccccagcacttcgcattgattaccctaaagcgctgcagatcctcatggagggcggaacccatatggtgtgtactggccgcacacacactgacaggatttgccgttttaagtggctttgttattctaatgaggccgaagagtttatttttttccacggcaatactagcgtgatgttaccaaacttgggatcccgtagattccagcccgctctgttggatctgtccacagtcgaggatcataacacccaatacttcaactttgtcgagctgcctgccgcggcccttcgatttatgcccaagcccgtgttcgtgccagacgtggcactcatcgcaaataggtttaatcccgataatcttatgcacgtatttcacgatgacctgttgcccctcttttatacactgcgacagttccccggactcgctcacgaagcccgccttttcttcatggaaggatggggtgagggggcacacttcgacttatataaattgctgtcaccaaagcagccgctgttgagggctcagctgaagacgctcgggcgcttactgtgcttttcccatgcgtttgtcgggctgtctaaaatcacgacttggtaccagtatgggtttgttcaaccccagggaccaaaagctaacattttggtgagcgggaacgaaataagacagttcgcccggtttatgacggagaagctgaacgtaagtcataccggtgtgcctctgggggaggagtatattttagtgttctcgcggacacagaacagattaattctgaacgaggctgaactgctgctcgctctggctcaggagtttcagatgaaaacggtcaccgtgtctctggaggaccatacgttcgctgatgttgttcgtctagtttctaatgctagcatgctggtctccatgcatggcgcacaactggtcactactctcttcttgccacggggggcgactgtggtggagctgtttccatatgccgttaatcctgaccactacaccccttacaagactctcgctatgttgcccgggatggatttgcagtacgttgcctggaggaacatgatgcccgagaacacagtgacacacccagaaagaccatgggatcagggaggtataacccatctggatagggccgaacaagccaggattttacagagtagggaggtgcctcgccacctctgttgtcggaatccagagtggctctttcggatctatcaagataccaaagtcgacatcccttctcttatccagaccatccgccgggttgtgaagggacggcctggccctagaaagcagaagtggaccgtcgggctttatcctggaaaagtccgggaagctcgctgccaggccagcgttcatggggcatctgaagcccgcctgactgtctcgtggcagattccttggaatctgaagtacctgaaagttagagaagtcaaatatgaggtgtggttacaggagcagggagaaaacacctatgtgccctatattctcgcgttgcagaatcacacatttactgagaacatcaaaccattcacaacctacctcgtttgggttaggtgtattttcaataagattctccttggcccatttgccgacgtgctcgtatgtaacacatag

SEQ ID NO: 225694 - DNA, 1743 bp, Artificial Sequence
  derived and/or modified sequence
atgcacctgagcgccgtgttcaacgccctgctggtgagcgtgctggccgcggtgctgtggaagcacgtcagactccgcgagcacgccgcaacactggaggaggaactcgcgctgtctagacaagcgacagagcccgctcctgcactcagaattgattaccctaaggcactccaaattttgatggaaggtgggacacatatggtgtgcacaggtaggactcataccgaccgcatatgccgattcaagtggctttgctattccaatgaagcagaggagtttatcttcttccacggcaacacctcagttatgcttccaaacctggggtctcgcaggttccagcccgccctgctcgatctgagcaccgtggaagatcataatacgcagtattttaattttgtggaactgcctgcagctgctctgcggttcatgccaaaacccgtattcgtcccggatgtcgcactgatcgctaacagatttaatcccgacaatctgatgcatgtctttcacgatgatcttctgccattattttacactttaaggcagtttccagggctcgcccatgaagccaggttattcttcatggaaggatggggggagggggctcatttcgatctgtataaactgcttagtccaaaacagccactactgcgggctcaactgaaaactttgggaaggctcttgtgcttctcacatgctttcgttggcctctctaagatcacaacctggtatcaatatggattcgttcagcctcagggcccaaaggccaacattctagtgagcgggaatgagatacgacagttcgctaggtttatgacagagaagttgaacgtttcgcatacaggcgtaccactgggggaggagtatatcttggtgttttcacggacgcagaatcggttgattctgaacgaagccgaactgctgctagcgttggcccaggaattccagatgaagaccgtgactgtatcgttagaagatcatacgtttgcagacgtcgtgaggctcgtgtctaatgccagcatgctcgtgagtatgcatggtgcgcagttagtgacaaccctcttcttgccaagaggtgcaacggtggttgaacttttcccatacgccgtcaatccagaccactatacaccctacaagaccttggcaatgctgcccggcatggacctccagtatgtcgcctggcgaaatatgatgccagaaaacaccgtaacccacccggaacggccctgggatcaagggggaatcacccatctggacagggcagaacaagcccggatcctgcaatcaagggaagtccctcggcacctatgttgccgaaatcccgaatggctgtttagaatctatcaagatactaaggtagacatcccgtccctgatccagaccataagaagggtcgttaaaggacgcccaggacccagaaaacaaaagtggacagttggcctgtatcctgggaaggtgagagaagcacggtgccaggcctccgtacacggcgctagcgaggcccggcttacagtctcatggcagattccctggaatctcaagtacctgaaagtacgtgaggtgaaatatgaggtttggctgcaagaacagggggagaacacatacgttccctacattttggcgctccagaaccacacctttaccgaaaacattaaaccatttaccacctacctggtgtgggttcgatgtatcttcaataagattctgctgggtccgtttgctgacgtcctggtgtgtaacacctag

SEQ ID NO: 225695 - RNA, 1743 nt, Artificial Sequence
  derived and/or modified sequence
augcaucucagugcaguguucaacgcacugcucguuagcguacuugcagccgugcuguggaagcaugugaggcugcgggagcacgcggccacacuagaggaggaacucgcacugucaaggcaggccacggagccugcaccggccuugagaaucgauuauccuaaagcccuucaaauucuaauggaagggggcacacauaugguuuguacagggcggacccauaccgacaggaucugucgauucaaguggcugugcuauucaaaugaagcagaggaauucaucuuuuuccacggaaauacuucugucaugcugcccaacuugggaucccgaagauuccagccagcucuucuggaccugucaacagucgaggaucauaauacacaauacuuuaauuuuguugaacugccugcugcugcacuucgcuucaugcccaaaccgguguucguacccgacgucgcccuaauugcaaaucgguucaauccagauaaccucaugcauguuuuucaugacgauuuauuaccgcucuuuuacacgcugagacaauuuccaggucuggcccaugaggccagauuguuuuucauggaggguuggggcgagggugcccauuucgaccuguauaagcuucuuagccccaaacaaccgcugcucagagcccaguuaaagacacucgguagacuucuaugcuuuagucaugcuuuugugggccuuagcaagauaacuaccugguaccaauacggcuucgugcagccccaggggccuaaggccaacauucuaguuucuggaaaugagauaaggcaguucgcacgguuuaugaccgaaaagcugaacgucucccacacuggggugccauugggggaggaauauauuuugguuuucagccggacacagaacagacugauacucaaugaagcagagcuacugcuugcacuugcacaggaauuucagaugaaaacaguaacugucucacuugaagaccacacuuucgccgaugucguuaggcugguaucuaaugcaucaauguuaguuagcaugcauggcgcacagcucgugacuacgcucuuccugcccaggggggcaacaguuguugaacucuuuccuuacgcagucaaccccgaccacuauacaccguauaagaccuuagcuauguuacccgguauggaucuccaguacguagcuuggagaaacaugaugccagagaauacuguaacacauccugaacggccgugggaccagggcgggauuacucaucucgauagggccgaacaagcaaggauacuccagucacgagaagugcccaggcauuugugcugccgcaaccccgaguggcuguuucgcauauaccaagauacaaaaguugauauaccuucucugauucagacgauccgaagaguggucaagggcagaccgggcccuaggaagcagaaauggacuguuggucuguaucccgggaaagugagagaggccagaugucaggcauccgugcauggcgccagugaagcgcggcugacaguaaguuggcagauuccauggaaccucaaauacuugaaggucagagaggugaaauaugaggucuggcugcaagagcagggggagaacaccuaugucccauauaucuuggcacuucagaaccacacuuucacagagaacauuaagccguucaccaccuaccucgucuggguucgcuguaucuucaacaagaucuuacuuggaccauuugcagacguccuagugugcaauacauag

SEQ ID NO: 225696 - RNA, 1743 nt, Artificial Sequence
  derived and/or modified sequence
augcaccucagcgcuguguuuaaugcacuccuagucucugugcuggccgccguucuguggaagcacguucgacugcgcgagcacgccgccacacuggaggaagagcucgcucugagucgccaggccaccgagcccgcucccgcguuaagaauagacuacccaaaggcucugcagauuuugauggaaggcggaacccacauggugugcacaggucggacccacacggauaggauuugcagguucaaauggcugugcuacucuaaugaggccgaggaguuuauauucuuucauggcaacacgucaguaaugcuuccuaaucuuggaagccgccgguuccagccugccuugcuggacuuguccaccguggaagaccacaauacacaauauuucaacuucgucgaacugcccgccgccgcuuuacgauuuaugccuaaacccguguuugugccagauguugcccugauugccaacagauucaauccugacaacuugaugcauguuuuccacgacgaccuccugccccuguucuacacucuaaggcaguuccccggccucgcacaugaagcccggcucuucuucauggagggcuggggggaaggugcccacuucgaccuguauaaauugcuaaguccuaagcagccucugcugcgcgcccagcugaaaacucugggacgccuccuauguuucagccaugcuuuugucgggcugucuaaaauuaccacgugguaccaauauggcuucguucagccucagggcccuaaagcaaacauucucgucucaggcaaugaaauucggcaguucgcaagguuuaugacagaaaagcuaaaugugucgcacacgggcgugccacucggcgaagaauacauccuaguuuuuucacgcacccaaaauagauuaauccugaaugaggccgaguugcuucuggcucuagcccaagaguuucaaaugaaaaccgugacagucucucuggaggaccacaccuucgcugauguggugcgccuggucuccaaugcaagcaugcuagucuccaugcacggggcgcagcucguaacgacucuuuuccuccccaggggagccacugugguggaacuguucccguacgccgucaauccugaccauuacaccccuuacaagacucucgcaaugcugccuggcauggaucugcaguacgucgccuggcggaauaugaugccugagaacacaguuacccacccugagaggccgugggaucaggguggaaucacacacuuagacagagcugaacaggcacgcaucuuacaaucuagggagguccccaggcaucuuuguugccgcaacccugagugguuauuuaggauuuaccaggacaccaaaguugacauuccuaguuugauucagaccauacgccggguggugaaagggaggccuggcccuaggaagcaaaaguggaccgucgggcuuuaccccggaaaaguuagggaggcgcgcugucaggcaagcgugcacggcgccuccgaagccagacucacagugucguggcaaaucccauggaaucugaaauacuugaaagugcgcgaaguuaaguacgagguguggcugcaggagcagggcgagaacaccuaugugcccuacauucuggcacugcaaaaccacacuuuuacagaaaacaucaagcccuuuacgaccuaucuaguuuggguccgaugcaucuucaauaagauucuccucgguccauucgccgauguccuugucuguaauacuuag

SEQ ID NO: 225697 - RNA, 1743 nt, Artificial Sequence
  derived and/or modified sequence
augcaucuaagcgcaguuuucaaugccuugcuugugucgguccuugccgcagugcuuuggaaacacguucggcucagggaacaugcugcaacacuggaggaggagcuggcccuaucuagacaagccacggaaccugccccugcacuccggauugacuaucccaaagcuuuacaaauccuaauggagggcgguacacacaugguauguaccgggagaacccauacugaucguauuugucgguucaaauggcugugcuacucaaacgaagcagaagaguucauuuuuuuccauggaaacacuucagugaugcugccuaaucugggcucucggagauuccaaccagcccuacucgaccucucuacuguagaagaccacaacacacaguacuuuaacuucguagaacugcccgccgccgccuuaagguuuaugcccaaacccguauuuguuccugacgucgcacugaucgccaaccgauuuaaccccgacaaucugaugcaugucuuucaugacgaccuccugccccuauuuuauacacucaggcaguucccaggccuggcacacgaggcaagacuguuuuuuauggagggcuggggcgaaggugcucauuucgaucucuacaagcuccuaagucccaagcagccccuccugagggcccaacucaaaacgcucggcaggcuccuguguuucucacacgccuucgugggucuaucuaaaaucaccacuugguaucaguacggguuugugcagccccaagggccuaaagcgaacauucuggugucugguaaugaaauucggcaguucgcucgauucaugacagaaaaacuuaacgucagccacaccggcgugccacugggcgaggaauauauuuuaguguucucacgaacucaaaaucgccuuauucucaaugaagcagagcuacugcuugcacuugcacaggaauuucagaugaaaacaguaacugucucacuugaagaccacacuuucgccgaugucguuaggcugguaucuaaugcaucaauguuaguuagcaugcauggcgcacagcucgugacuacgcucuuccugcccaggggggcaacaguuguugaacucuuuccuuacgcagucaaccccgaccacuauacaccguauaagaccuuagcuauguuacccgguauggaucuccaguacguagcuuggagaaacaugaugccagagaauacuguaacacauccugaacggccgugggaccagggcgggauuacucaucucgauagggccgaacaagcaaggauacuccagucacgagaagugcccaggcauuugugcugccgcaaccccgaguggcuguuucgcauauaccaagauacaaaaguugauauaccuucucugauucagacgauccgaagaguggucaagggcagaccgggcccuaggaagcagaaauggacuguuggucuguaucccgggaaagugagagaggccagaugucaggcauccgugcauggcgccagugaagcgagacugacagucagcuggcagauccccuggaaccugaaauaccucaaagucagagaaguaaaauaugaagucuggcuccaagaacagggugagaacacuuauguaccguacauccucgcucuucaaaaucauacuuuuaccgagaacaucaaacccuucaccaccuaucucgugugggugagaugcaucuucaauaaaauacuccuggguccuuucgccgacguccuggugugcaacacguag

SEQ ID NO: 225698 - RNA, 1743 nt, Artificial Sequence
  derived and/or modified sequence
augcaucuaucugccguguuuaaugcccugcucguuaguguccucgcugccguguuauggaaacauguccgcuugagggaacaugcugccacccuggaggaggaacucgcacucucccgacaagcgacugagcccgcuccugcacugcguaucgauuaucccaaagcacuccaaaucuugauggagggcggcacacacaugguuuguacaggaaggacacauacagaccguaucugccguuuuaaauggcucugcuacucaaaugaggcagaggaauucauuuuuuuucaugggaacacuucugugauguugcccaacuuaggcucaagaagauuccagccagcccugcucgaccucuccaccgucgaagaucauaacacccaguauuucaauuucgucgagcugcccgccgccgccuugagguucaugccaaagccggucuucguuccagauguggcccucauagcaaauagauucaaucccgauaacuugaugcaugucuuccacgacgaccuccuuccgcuguucuauacucuccgccaguuucccggacuugcucacgaagccaggcuguucuuuauggaaggguggggugaaggagcgcacuuugaccuguacaaacuucuuucccccaaacagccgcuucuucgggcucaguuaaagacacugggacgguugcugugcuucucacacgcuuucgugggacuaucuaagauuaccaccugguaucaauauggauucgugcagccucaggggcccaaagcuaacaucuugguuuccggaaacgagaucagacaguucgccagauuuaugaccgaaaaacucaaugugucccauacaggcguuccacugggcgaagaguacauccugguguucucccggacacagaauagacugauucucaacgaagccgaacugcuacuagcucucgcucaggaguuccagaugaaaacaguuacaguauccuuggaagaucauaccuucgccgacguggucagacucgugucuaaugcgagcauguugguuaguaugcauggcgcacaauuggucacuacucuguuucugccacgcggagcaaccguuguggagcuguuuccauacgcgguaaauccggaucauuacaccccuuauaaaacccucgcaaugcugcccggaauggaucuucaauauguggccuggaggaauaugaugcccgagaauacuguaacacaccccgaacgaccuugggaucagggggguauuacacauuuggaccgagcagagcaggcaagaauccuacagucgagggaggucccuaggcauuuguguugcagaaacccagaauggcuuuucagaauuuaucaggacaccaaaguugacaucccaagccugauccagaccaucagacgaguggugaagggucguccugguccuaggaaacagaaguggacugugggcuuauaucccggaaaaguuagagaagcacgaugucaggcaucugugcauggcgcaucugaggccagacugaccguaucuuggcaaauuccuuggaaccugaaauaccugaaaguucgcgaaguuaaguacgagguuuggcugcaggaacagggagagaacacauacguccccuauauuuuggcgcugcagaaccauacauuuaccgagaacauuaagcccuuuacuaccuaucucguuuggguccgguguauuuuuaacaaaauccugcuggggcccuucgcugacguccuggugugcaauacuuag

SEQ ID NO: 225699 - protein, 1094 aa, Artificial Sequence
  derived and/or modified sequence
MSYEVTSGCHWTCQVPESCDNGLHCAGPLGHLHRRCQRTSAHLLVFTEHAEMRRFKRKHLTAIDCQHLARSHLAVTQPFGQRWTNRDPNHGLYPKPRTKRGSRGQGSQRCIPEFFLAGKQPCTNDMAKSNSVGQDSCQDSEGDMIFPAESSCALPQEGSAGPGSPGSAPPSRKRSWSSEEESNQATGTSRWDGVSKKAPRHHLSVPCTRPREARQEAEDSTSRLSAESGETDQDAGDVGPDPIPDSYYGLLGTLPCQEALSHICSLPSEVLRHVFAFLPVEDLYWNLSLVCHLWREIISDPLFIPWKKLYHRYLMNEEQAVSKVDGILSNCGIEKESDLCVLNLIRYTATTKCSPSVDPERVLWSLRDHPLLPEAEACVRQHLPDLYAAAGGVNIWALVAAVVLLSSSVNDIQRLLFCLRRPSSTVTMPDVTETLYCIAVLLYAMREKGINISNRIHYNIFYCLYLQENSCTQATKVKEEPSVWPGKKTIQLTHEQQLILNHKMEPLQVVKIMAFAGTGKTSTLVKYAEKWSQSRFLYVTFNKSIAKQAERVFPSNVICKTFHSMAYGHIGRKYQSKKKLNLFKLTPFMVNSVLAEGKGGFIRAKLVCKTLENFFASADEELTIDHVPIWCKNSQGQRVMVEQSEKLNGVLEASRLWDNMRKLGECTEEAHQMTHDGYLKLWQLSKPSLASFDAIFVDEAQDCTPAIMNIVLSQPCGKIFVGDPHQQIYTFRGAVNALFTVPHTHVFYLTQSFRFGVEIAYVGATILDVCKRVRKKTLVGGNHQSGIRGDAKGQVALLSRTNANVFDEAVRVTEGEFPSRIHLIGGIKSFGLDRIIDIWILLQPEEERRKQNLVIKDKFIRRWVHKEGFSGFKRYVTAAEDKELEAKIAVVEKYNIRIPELVQRIEKCHIEDLDFAEYILGTVHKAKGLEFDTVHVLDDFVKVPCARHNLPQLPHFRVESFSEDEWNLLYVAVTRAKKRLIMTKSLENILTLAGEYFLQAELTSNVLKTGVVRCCVGQCNNAIPVDTVLTMKKLPITYSNRKENKGGYLCHSCAEQRIGPLAFLTASPEQVRAMERTVENIVLPRHEALLFLVF

SEQ ID NO: 225700 - DNA, 3702 bp, Artificial Sequence
  derived and/or modified sequence
ctgctttcaaggtgtctagatacagagtgaagaatgtcacagtaggaagtgcactggactaggggagtcaggagacccgggttcttgtgttggcaccatcactcatgagctacgaggtgacttcaggctgccattggacctgtcaagtgcctgagtcatgtgataatgggctacattgcgcagggcccctgggccatctccacaggagatgccagaggacgagtgcccacttgctggtcttcacagagcacgctgaaatgagacggtttaagcggaagcatcttactgccattgactgccagcatttggctcggagtcacttggctgtgacccagcccttcggtcaaagatggacaaacagagatccgaaccatggtctctatcctaaaccgagaacaaaaagagggagtaggggtcagggaagtcaaagatgcatccctgagttcttcctagcaggcaagcagccgtgcaccaatgacatggccaaaagcaattctgttggccaggacagctgtcaggactctgagggtgacatgatctttcctgcagagagcagctgtgcactgcctcaggaaggcagtgcagggccgggctcaccagggtctgccccgccctccaggaagcggtcttggtcctctgaggaagagagtaaccaggctaccgggaccagccggtgggatggagtttctaagaaagctccacggcaccatttgtctgtgccatgcacaaggcctagggaggccaggcaagaagcagaggacagtacgtctcggctctctgcggagtctggtgaaaccgaccaagatgctggggacgtgggtcctgatcccattcctgactcatactatgggcttcttgggaccttgccctgccaggaagcactgagccacatttgcagcctgcctagtgaggtcctgaggcacgtgtttgccttcctcccggtggaagacctctattggaacctgagcttggtgtgccacttgtggagggagatcatcagtgacccgctgttcattccttggaagaagctgtaccatcgatacctgatgaatgaagagcaagctgtcagcaaagtggacggcatcctgtctaactgtggcatagaaaaggagtcagacctgtgtgtgctgaacctcatacgatacacagccaccactaagtgctctccgagtgtggatcccgagagggtgctgtggagtctgagggaccaccccctcctccccgaggctgaggcgtgtgtgcggcaacacctccccgacctctacgctgctgccgggggtgtcaacatctgggccctggtggcggctgtggtgctcctctccagcagtgtgaatgacatccagcgactgctcttctgcctccggagacccagctccacggtgaccatgccagatgtcaccgagaccctgtactgcatagccgtgcttctctacgccatgagggagaaggggattaacatcagcaataggattcactacaacattttctattgcctatatcttcaggagaattcctgcactcaggccacaaaagttaaagaggagccatctgtctggccaggcaagaaaaccatccaacttacacatgaacaacagctgattctgaatcacaagatggaacctctccaggtggtgaaaattatggcctttgccggcactgggaagacctcaacgctggtcaagtatgcagagaagtggtctcagagcaggtttctgtatgtgacattcaacaagagcatcgcaaagcaggccgaacgcgtcttccccagcaacgtcatctgcaaaaccttccactccatggcctacgggcacatagggcggaagtaccagtcaaagaagaagttgaatctcttcaagttaacacccttcatggtcaactccgtccttgctgaagggaagggtggattcataagagccaagcttgtgtgtaagactctagaaaacttctttgcctcggctgacgaagagctgaccattgatcacgtgcctatttggtgtaagaacagccaaggacagagagtcatggttgagcagagtgaaaaactgaatggtgtccttgaagcgagccgcctctgggataacatgcggaagctgggggagtgcacagaagaggcgcaccagatgactcatgacggctacttgaaactctggcagctgagcaagccttcgctggcctcttttgacgccatctttgtggatgaggcccaggactgcacaccagctatcatgaacatagttctgtctcagccatgtgggaaaatctttgtaggggacccgcaccagcagatctataccttccggggtgcggtcaacgccctgttcacagtgccccacacccacgtcttctatctcacgcagagttttcggtttggtgtggaaatagcttatgtgggagctactatcttggatgtttgcaagagagtcaggaaaaagactttggttggaggaaaccatcagagtggcattagaggtgacgcaaaggggcaagtggccttgttgtcccggaccaacgccaacgtgtttgatgaggccgtacgggtgacggaaggggaattcccttcaaggatacatttgattggggggattaaatcatttggattggacagaatcattgatatttggatccttcttcagccagaggaagaacggaggaaacaaaacctcgtcattaaagacaaatttatcagaagatgggtgcacaaagaaggctttagtggcttcaagaggtatgtgaccgctgccgaggacaaggagcttgaagccaagatcgcagttgttgaaaagtataacatcaggattccagagctggtgcaaaggatagaaaaatgccatatagaagatttggactttgcagagtacattctgggcactgtgcacaaagccaaaggcctggagtttgacactgtgcatgttttggatgattttgtgaaagtgccttgtgcccggcataacctgccccagcttccgcacttcagagttgagtcattttctgaggatgaatggaatttactgtatgttgcagtaactcgagccaagaagcgtctcatcatgaccaaatcattggaaaacattttgactttggctggggagtacttcttgcaagcagagctgacaagcaacgtcttaaaaacaggcgtggtgcgctgctgcgtgggacagtgcaacaatgccatccctgttgacaccgtccttaccatgaagaagctgcccatcacctatagcaacaggaaggaaaacaaggggggctacctctgccactcctgtgcggagcagcgcatcgggcccctggcgttcctgacagcctccccggagcaggtgcgcgccatggagcgcactgtggagaacatcgtactgccccggcatgaggccctgctcttcctcgtcttctgaggacaaggcgcacgttctccgcagtgcagagcagcttgccgaggaccccgcgtgaagaaagccagcgaggggggcttctgctccctgagactctgggttcacccacagcactttctgaggaagaggacaccagcccaagctggacctgccatttctccactccctacagacagccagtctccacttgcctcccctctggatgtatctggtcagggaagtgggggatgttcttttgataaaaaaaaaaaaaaaaatttatgtatttaaacttttattacaagatttcaattaaacaggcaccatagcactggca

SEQ ID NO: 225701 - DNA, 3285 bp, Artificial Sequence
  derived and/or modified sequence
atgtcctacgaagttacgagcgggtgccactggacttgccaggtccccgaaagctgtgataacggtctgcattgcgctgggcccctgggacacctgcatcgccgctgccagcgtacatctgctcacctgctcgtgttcaccgaacacgcggaaatgaggaggttcaagagaaagcacttaaccgccattgactgccagcatcttgctcggagccacttggccgtgacccaaccgtttggccagaggtggacaaatcgggatcctaatcatggcctctacccgaaaccccgcacaaagagggggagtcgggggcaaggctcccagcgctgcatccccgaattctttctggccgggaagcaaccctgtacaaacgatatggcaaagtctaattccgtgggccaggactcgtgccaagactccgaaggagacatgatctttccagccgaatccagctgcgccctccctcaggagggttcagcaggacctgggtcgccagggtccgctccaccctccaggaaaaggagctggagcagtgaggaggagtcaaaccaggccactggtactagccgctgggacggggtgtcgaagaaggctccccggcaccacttatcagtgccctgcacacgtccacgggaggctcgccaggaagcagaggattctacctcccgcctctccgcggaaagcggggagacagaccaggatgcgggtgacgtcgggcccgaccccattccggatagttactacggactgctcggtacactgccgtgtcaagaagccctgtcccatatctgcagtctgcccagcgaagtcctgcgacacgtatttgcctttttgcccgtcgaggacttgtactggaacctctccctggtgtgccacctctggagagagattatctcggacccgctctttataccatggaaaaagctgtatcatagatatcttatgaacgaggaacaggccgtttccaaagtagacggtatcctctcaaactgtggaatcgagaaggagtctgacttgtgcgttctgaatttgatcaggtacaccgccactaccaagtgtagcccctctgtcgatcccgaacgggtcctgtggagcctcagggatcaccccctgctacctgaggctgaggcttgcgtgcggcagcatctgccagacctctatgcagctgctggaggtgtgaatatatgggctcttgtggcagccgttgtgctccttagctcctctgtgaacgacatccaacgcctgttgttctgtttgaggcggccaagctctacagttactatgccagacgtcaccgaaacactgtactgcattgccgtactactgtacgccatgcgggagaaagggatcaacatcagcaacaggattcactataacattttctattgcttgtatctgcaagaaaattcctgtacacaggcaaccaaggtcaaggaagagcctagcgtgtggccaggaaagaagaccattcagcttacacatgagcagcagctgatcctgaatcataaaatggaaccactgcaggtggtcaaaattatggccttcgctgggaccggcaagacctcaacgctggtgaagtacgccgagaaatggtctcaaagtcggttcctctatgtgaccttcaacaaatcaatagccaagcaagccgagagagtcttccctagcaatgtgatttgcaagacatttcactcaatggcctatgggcatattggtcggaaataccagagcaagaaaaagcttaacctgttcaaactgactccttttatggtcaacagtgtgcttgctgaggggaaggggggttttattagggcgaaattggtctgtaagacccttgagaatttcttcgcctccgctgacgaggaactcactattgaccacgtgcccatatggtgcaagaactctcagggccagagggtgatggtagaacagagcgaaaaattgaatggcgtcctggaggcttcacgtctgtgggataatatgcgaaaactcggggaatgtacagaagaggctcaccaaatgacccacgacggctatctcaagctgtggcagctctccaagccaagtctggcctctttcgatgccatattcgtggatgaagcccaggattgcacgccagcgatcatgaacattgttctgagccagccctgcggtaagatctttgtgggggacccacaccagcagatctatacattccggggagctgtcaacgctctgtttaccgttccccatacccacgtgttttaccttactcagtcgtttcgcttcggtgtggagatcgcctacgtgggcgccactatcctggatgtctgtaagagagtgcgcaaaaagaccctagtgggcggtaatcatcagtcaggcattagaggggacgctaagggccaagtagctcttctcagcagaaccaatgcaaacgtatttgacgaagctgtgcgcgtcaccgagggagaattcccgagtaggatacaccttattggggggatcaaaagttttggtctcgacagaattatcgatatctggattctgctgcagcctgaggaagagcggcgcaagcagaatctggtcattaaagacaaatttattcgacggtgggtgcacaaggaagggttctccggctttaagcgttatgtaacagccgccgaagataaggagctcgaggctaagatcgccgttgtggaaaaatacaatatccgcattcctgagctggtgcagaggatcgagaaatgccacatcgaggacctggactttgccgagtacatactcgggacagtgcataaggcaaaaggcttagagttcgacactgtgcacgtcctagatgattttgtaaaagttccttgcgcccggcataatttgccgcaactgccccattttagagttgaatcgttctctgaggatgaatggaaccttttgtatgtggcggtgacacgggcgaagaagaggttaattatgaccaaaagccttgaaaatatactcactcttgccggagaatacttcctccaggctgagcttaccagcaacgtactgaaaactggggtcgtacggtgctgcgttggacaatgtaataatgcaattcccgttgatactgtgttgaccatgaagaagctgccaattacctattccaaccgcaaggaaaacaaaggtgggtatttgtgccattcatgtgctgaacagcggatcggccccttagctttcctgaccgccagtcccgagcaagtccgcgctatggaacgtaccgtggagaatatagtattgccaagacatgaggccttgctcttccttgttttttag

SEQ ID NO: 225702 - DNA, 3285 bp, Artificial Sequence
  derived and/or modified sequence
atgtcctatgaggtgaccagcggctgccactggacctgccaggtgcctgagagctgtgacaatggcctgcactgtgccggccccctgggccacctgcaccggcgctgccagaggaccagcgcccacctgctggtgttcacagaacatgctgagatgaggcgcttcaagaggaagcacctgacagccatcgactgccagcacctggcccggagccacctggccgtgacccagcccttcggccagcgctggaccaacagagaccccaaccacggcctgtaccccaagcccaggaccaagaggggcagccggggccagggcagccagcgctgcatccctgagttcttcctggccggcaagcagccctgcaccaatgacatggccaagagcaacagcgtgggccaggacagctgccaggacagcgagggggacatgatcttccctgctgagagcagctgtgccctgccccaggagggcagcgctggccctggcagccctggcagcgccccacccagcaggaagaggtcctggagcagcgaggaggagagcaaccaggccaccggcaccagccgctgggatggagtgtccaagaaggcccccaggcaccacctgtctgtgccctgcacccggccccgggaggcccggcaggaggccgaggacagcaccagccggctgtctgctgagagcggggagacagaccaggatgctggagatgtgggccctgaccccatcccagacagctactacggcctgctgggcaccctgccctgccaggaggccctgagccacatctgcagcctgcccagcgaggtgctgcggcacgtgtttgccttcctgcctgtggaggacctgtactggaacctgagcctggtgtgccacctgtggagggagatcatcagtgaccccctcttcatcccctggaagaagctgtaccaccgctacctgatgaatgaggagcaggccgtgtccaaggtggatggcatcctgagcaactgtggcatcgagaaggagagtgacctgtgtgtgctgaacctgatccgctacacagccaccaccaagtgcagccccagcgtggaccctgagcgggtgctgtggagcctgcgggaccaccccctgctgcctgaggccgaggcctgtgtgcggcagcacctgcctgacctgtatgctgctgctgggggcgtgaacatctgggccctggtggccgctgtggtgctgctgagcagctctgtgaatgacatccagaggctgctcttctgcctgcggcggcccagcagcacagtgaccatgccagatgtgacagagaccctgtactgcatcgctgtgctgctgtatgccatgagggagaagggcatcaacatcagcaaccgcatccactacaacatcttctactgcctgtacctgcaggagaacagctgcacccaggccaccaaggtgaaggaggagcccagcgtgtggccaggcaagaagaccatccagctgacccatgagcagcagctgatcctgaaccacaagatggagcccctgcaggtggtgaagatcatggcctttgctggcaccgggaagaccagcaccctggtgaagtatgcagagaagtggagccagagccgcttcctgtatgtgaccttcaacaagagcatcgccaagcaggccgagagggtcttccccagcaatgtcatctgcaagaccttccacagcatggcctacggccacatcggcaggaagtaccagagcaagaagaagctgaacctcttcaagctgacccccttcatggtgaacagcgtgctggccgagggcaagggcggcttcatccgggccaagctggtgtgcaagaccctggagaacttctttgccagcgcagatgaggagctgaccatcgaccacgtgcccatctggtgcaagaacagccagggccagagggtgatggtggagcagagcgagaagctgaatggagtgctggaggccagccggctgtgggacaacatgaggaagctgggagaatgtacagaggaggcccaccagatgacccatgatggctacctgaagctgtggcagctgagcaagcccagcctggccagctttgatgccatctttgtggatgaggcccaggactgcaccccagccatcatgaacatcgtgctgagccagccctgtgggaagatctttgtgggggacccccaccagcagatctacaccttcagaggagctgtgaatgccctcttcaccgtgccccacacccacgtgttctacctgacccagagcttccgctttggagtggagatcgcctacgtgggcgccaccatcctggatgtgtgcaagagggtgaggaagaagaccctggtgggcggcaaccaccagagcggcatcagaggagatgccaagggccaggtggccctgctgagcaggaccaatgccaacgtgtttgatgaagctgtgcgggtgacagaaggagagttccccagccgcatccacctgattggaggcatcaagagctttggcctggaccgcatcatcgacatctggatcctgctgcagcctgaggaggagaggaggaagcagaacctggtgatcaaggacaagttcatccgccgctgggtgcacaaggagggcttcagcggcttcaagagatatgtgacagctgctgaggacaaggagctggaggccaagattgctgtggtggagaagtacaacatccgcatccctgagctggtgcagagaattgagaagtgccacatcgaggacctggactttgctgagtacatcctgggcaccgtgcacaaggccaagggcctggagtttgacacagtgcacgtgctggatgactttgtgaaggtgccctgtgcccggcacaacctgccccagctgccccacttccgggtggagagcttctctgaagatgagtggaacctgctgtatgtggccgtgacccgggccaagaagaggctcatcatgaccaagagcctggagaacatcctgaccctggccggggagtacttcctgcaggccgagctgaccagcaatgtgctgaagacaggagtggtgcgctgctgcgtgggccagtgcaacaatgccatccctgtggacacagtgctgaccatgaagaagctgcccatcacctacagcaacagaaaagaaaataaaggaggctacctgtgccacagctgtgccgagcagagaattggccccctggccttcctgacagccagccctgagcaggtgcgggccatggagaggacagtggagaacatcgtgctgcccaggcatgaggccctgctcttcctggtgttctag

SEQ ID NO: 225703 - DNA, 3285 bp, Artificial Sequence
  derived and/or modified sequence
atgagctacgaggtgaccagcggctgccactggacctgccaggtgcctgaatcttgtgataacggcctacattgtgctgggcctctgggtcatttacacaggcgctgtcagagaacctctgctcatttacttgtatttactgaacatgcagagatgaggaggtttaaacgaaagcacctgacagctatcgactgccagcacctcgcgcggagccacctggctgtgacacaaccattcgggcagagatggaccaatcgcgaccccaaccacgggctctacccgaagccccgcaccaagcgtggctcccggggccaaggctcacagcggtgtatccccgagttctttttggcaggcaaacagccatgcaccaacgacatggcaaaaagtaacagtgtgggccaggatagctgtcaagattccgaaggcgatatgatctttccagccgagagctcatgcgctctaccccaggagggcagtgccgggcccggctctccaggatccgctccaccatcccgtaaacgatcgtggtcctccgaagaagagtccaaccaggccactggtacaagtcgatgggatggcgtgtccaaaaaagctcccagacaccatttgagcgtgccatgtacacgcccacgagaagcacggcaggaagccgaagattctacctcccgtctttccgccgagtccggcgagaccgatcaggatgctggggacgtgggcccagacccgattcccgacagttactatggtctgctgggtactttaccgtgtcaggaagccctgagtcatatctgctccctaccttctgaggtgctccggcacgtattcgcattcctgccagttgaagatctgtactggaacctctctcttgtgtgtcacctttggcgagaaatcatttccgaccctctgttcatcccctggaagaagctatatcataggtatctgatgaatgaagaacaggctgtctcgaaggttgacggcatacttagtaactgtggcatcgagaaagaatccgatttgtgcgtcttgaatttgatacggtatacggcaaccaccaagtgctcccctagcgttgatccagagagggtactttggtccctacgcgatcacccattgctccctgaagcagaggcatgcgtacgccagcacctgccggatctgtatgcagctgcaggcggagttaatatatgggcgttggtagcggctgtggtcttgctgtcatcctccgttaacgatatacaacgcctacttttttgcctgagaaggccaagtagcaccgtgacgatgccagatgtgactgaaaccctgtactgtatcgcagtgctactgtacgctatgcgcgaaaaaggcattaacatctccaataggatccattataatattttctactgtctgtatcttcaagaaaatagttgtactcaagccacaaaagtgaaagaagaaccttccgtgtggccgggtaaaaaaactatccaactcacccatgagcagcagctgattctgaaccacaaaatggagccgctccaggtcgttaaaataatggcgtttgccggtactggtaagacctccacactggtcaagtatgcggagaaatggtcccaatcgcgcttcctgtacgttacctttaataaaagcatcgcaaaacaggccgagcgagtctttcctagcaacgtgatctgtaaaaccttccatagtatggcatatgggcacatcggcagaaagtaccagtctaagaaaaaattaaacttgttcaagctcacgcctttcatggtgaattctgtccttgcagaaggaaaaggaggtttcatcagagccaaactggtctgtaagactttggagaatttctttgcatctgctgacgaggagctcactatcgatcatgtgcctatttggtgtaagaacagtcagggacagcgggtcatggttgaacagtcggaaaaactgaatggagttctcgaagcatctaggttgtgggacaacatgcggaagttgggtgaatgcaccgaggaagctcatcagatgactcatgatggttatctgaaactttggcagctgagtaaaccctccttggcctcctttgatgctatcttcgtagatgaggcacaggactgcacccctgccataatgaatatcgtcctgagtcagccttgcggcaaaattttcgtcggggacccccaccagcaaatctacacctttcggggcgccgtgaatgccttgttcacagtcccacatacacatgtgttctacttgacccagtcatttcgcttcggggtcgaaattgcatacgttggggctaccatcctagatgtgtgtaagagagtgcgaaaaaagaccctcgttggggggaatcaccagtccggcattcggggagacgccaagggccaggtggctctcctgagcagaaccaatgctaatgtgttcgacgaggccgttcgagtaaccgagggggagttccctagtcgtatccacttgattgggggcatcaaaagctttggattggacaggatcatcgacatctggattttgttgcaacctgaggaagagcggagaaagcagaacctggtgatcaaagataagttcattagaagatgggtccataaagagggctttagtggattcaaaagatacgtcacggccgctgaggacaaggagctcgaagctaaaattgcggtggtcgaaaaatacaacatccgtattcccgaactcgttcagaggattgagaagtgtcacattgaggacttggatttcgccgaatacatcctgggaaccgtacataaggcgaaggggcttgagtttgatacggtgcacgtcctggacgacttcgtcaaggtcccttgcgcaagacacaatttgccacagctgccccacttccgggtcgagagttttagtgaggatgagtggaatctgctctatgtggccgtcaccagggccaagaaacggcttattatgaccaagtcattggaaaacattttaactctcgccggtgagtattttctgcaggccgagcttacctcaaatgtgctgaagacaggggtggtcagatgctgcgttggccaatgcaacaacgctatacctgttgacaccgtactgactatgaaaaaactgcctatcacctattcgaacagaaaagagaataaagggggctatctgtgccactcctgcgccgagcagagaatcggacctttagctttcctgacagcttcgccagagcaggtcagagccatggaacggactgttgagaacattgttctgccacggcacgaagcgttactttttctcgtgttctag

SEQ ID NO: 225704 - DNA, 3285 bp, Artificial Sequence
  derived and/or modified sequence
atgagctacgaagttacgagcggatgtcattggacttgccaggtgccagagtcttgtgacaatggcttgcattgtgccggacccctggggcacctccacagaaggtgccaacgtacaagcgctcacctgctcgtgtttacagaacatgcggaaatgagacgcttcaagcgaaagcacctgactgccattgattgccagcatttggcacggagccatctggccgttacacagccatttggtcaacgctggaccaatcgtgatcctaatcacggtctgtatcctaaaccaagaacaaaacgtggttccaggggccagggcagccagagatgtattcctgaattctttctcgccggaaagcagccatgcactaatgacatggccaagtcaaattctgtaggccaggatagctgtcaggattccgaaggcgatatgatatttccggcagaatcatcttgtgccctgcctcaggagggctctgctggacccggttcacccggatcagctcccccatcccggaagagaagctggagttccgaggaggaatccaatcaggctaccggaacttccaggtgggacggggtctccaagaaggcccctagacaccatctatcagttccctgcaccagacccagagaggcgagacaagaagcagaggattcaacatctaggctgagcgccgagtccggagaaactgaccaggacgccggagacgtgggcccagacccgatccccgattcttattacggcctcctaggtacactaccctgccaagaagccttgtcccacatttgttcgctgccaagcgaggttctgcgccatgttttcgcctttctcccagtcgaagatctttactggaatctcagcctcgtgtgccacctatggagggagattattagcgatccactatttataccgtggaagaagttataccatcggtatctgatgaacgaggagcaggcggtatcaaaggtcgacgggatcctgagtaattgcgggatagaaaaggaatccgatctgtgcgtactgaatctgatccgttacacggctacaactaaatgttcgccaagtgttgatcctgaacgcgtcttatggagtcttcgtgaccacccgctgctccctgaagccgaagcatgcgtgcgacagcacctcccagatctctatgctgcagctggtggcgtgaacatttgggcattagtagccgctgttgtgctgctgtcttcttctgttaatgatatacagaggttgctgttttgtctacgcagacccagttccacggtaaccatgcccgacgtgactgagaccctctattgcattgccgtgttactgtacgccatgagagaaaagggaattaatatctcaaatcggattcactacaacattttttactgcttgtacctgcaggagaattcctgcacccaagccactaaggttaaagaagaaccttcggtgtggccaggcaagaagacgattcaactcacacacgaacagcagctgatcctgaaccacaagatggaaccactccaggtggtgaaaattatggccttcgccggtactgggaaaacatccacgctggtcaagtatgcagaaaaatggtcccagagcaggttcctgtacgtgacattcaacaagagcatagctaaacaggctgagcgagtgttcccctcaaatgtcatttgcaaaacctttcattcaatggcttacggacatatcggtcgaaaataccagagcaaaaagaaattgaacttattcaagctgacacctttcatggtgaacagtgtcctcgcggaaggaaagggcggatttattcgtgctaagcttgtttgcaagacactggaaaattttttcgctagtgccgacgaagaattgactatcgatcatgtcccgatctggtgtaaaaatagccagggacagagggtgatggtcgagcagtccgaaaagctcaatggagttctggaggctagccggctttgggacaacatgcggaagttgggcgaatgcaccgaagaagctcaccagatgactcacgacgggtacttaaaattatggcagctctcaaaaccctctttggccagctttgatgctatcttcgtagatgaggctcaagattgcaccccagctatcatgaatatcgtgctgagtcagccctgtggtaaaatttttgtgggcgatcctcatcagcagatctacacattccgaggagcagtgaatgcccttttcaccgttccacatacacatgtcttttacctcacccagtcattccgatttggcgtggagatcgcctatgtcggggctacaattctggacgtgtgtaaaagagtgagaaaaaaaaccctggtcggagggaatcaccaatccgggattaggggtgacgcaaaggggcaagtggcattgttgtccagaacaaatgccaatgtttttgatgaggctgtgagggtgactgagggagaatttccatcacgcatccatctgatagggggaatcaaaagctttgggcttgaccgcatcatagacatctggatcttgttgcaacccgaggaggagcgccgaaagcagaatctggtgatcaaggacaaattcattcggaggtgggtccataaagaaggattttcaggctttaaacgttacgtgacagcagcagaagacaaggaactcgaggccaaaatcgctgtcgtggagaagtacaacatacgaattccagaactagtgcagcgtattgagaagtgtcacatcgaagatcttgattttgccgagtatatattaggcactgtgcacaaggccaagggcttagagttcgacaccgtgcatgtgcttgacgatttcgttaaggtgccatgtgcgagacataacctgcctcagcttccgcacttcagagtcgaatcatttagcgaagatgagtggaatttactgtacgtggctgtaacccgtgcaaagaagcgattgatcatgaccaagtccttggagaacatactgacactggctggcgagtatttcctgcaggccgaactgaccagcaatgttttaaaaactggagtcgtaagatgttgcgtcgggcagtgtaacaatgccatcccagtggacactgtgttgacaatgaaaaagctgcctataacctacagcaacaggaaggagaacaagggaggttacctgtgtcacagctgtgctgaacaaaggataggccctctggccttcctgacagcatcacctgagcaagtcagggcaatggaaagaaccgtagagaatattgtgctgccccgacacgaggctcttctgtttttggtgttctag

SEQ ID NO: 225705 - DNA, 3285 bp, Artificial Sequence
  derived and/or modified sequence
atgagctacgaggtgaccagcggctgccactggacctgccaggtgcccgagagctgcgacaacggcctgcactgcgccggccccctgggccacctgcacagaagatgccagagaaccagcgcccacctgctggtgttcaccgagcacgccgagatgagaagattcaagagaaagcacctgaccgccatcgactgccagcacctggccagaagccacctggccgtgacccagcccttcggccagagatggaccaacagagaccccaaccacggcctgtaccccaagcccagaaccaagagaggcagcagaggccagggcagccagagatgcatccccgagttcttcctggccggcaagcagccctgcaccaacgacatggccaagagcaacagcgtgggccaggacagctgccaggacagcgagggcgacatgatcttccccgccgagagcagctgcgccctgccccaggagggcagcgccggccccggcagccccggcagcgccccccccagcagaaagagaagctggagcagcgaggaggagagcaaccaggccaccggcaccagcagatgggacggcgtgagcaagaaggcccccagacaccacctgagcgtgccctgcaccagacccagagaggccagacaggaggccgaggacagcaccagcagactgagcgccgagagcggcgagaccgaccaggacgccggcgacgtgggccccgaccccatccccgacagctactacggcctgctgggcaccctgccctgccaggaggccctgagccacatctgcagcctgcccagcgaggtgctgagacacgtgttcgccttcctgcccgtggaggacctgtactggaacctgagcctggtgtgccacctgtggagagagatcatcagcgaccccctgttcatcccctggaagaagctgtaccacagatacctgatgaacgaggagcaggccgtgagcaaggtggacggcatcctgagcaactgcggcatcgagaaggagagcgacctgtgcgtgctgaacctgatcagatacaccgccaccaccaagtgcagccccagcgtggaccccgagagagtgctgtggagcctgagagaccaccccctgctgcccgaggccgaggcctgcgtgagacagcacctgcccgacctgtacgccgccgccggcggcgtgaacatctgggccctggtggccgccgtggtgctgctgagcagcagcgtgaacgacatccagagactgctgttctgcctgagaagacccagcagcaccgtgaccatgcccgacgtgaccgagaccctgtactgcatcgccgtgctgctgtacgccatgagagagaagggcatcaacatcagcaacagaatccactacaacatcttctactgcctgtacctgcaggagaacagctgcacccaggccaccaaggtgaaggaggagcccagcgtgtggcccggcaagaagaccatccagctgacccacgagcagcagctgatcctgaaccacaagatggagcccctgcaggtggtgaagatcatggccttcgccggcaccggcaagaccagcaccctggtgaagtacgccgagaagtggagccagagcagattcctgtacgtgaccttcaacaagagcatcgccaagcaggccgagagagtgttccccagcaacgtgatctgcaagaccttccacagcatggcctacggccacatcggcagaaagtaccagagcaagaagaagctgaacctgttcaagctgacccccttcatggtgaacagcgtgctggccgagggcaagggcggcttcatcagagccaagctggtgtgcaagaccctggagaacttcttcgccagcgccgacgaggagctgaccatcgaccacgtgcccatctggtgcaagaacagccagggccagagagtgatggtggagcagagcgagaagctgaacggcgtgctggaggccagcagactgtgggacaacatgagaaagctgggcgagtgcaccgaggaggcccaccagatgacccacgacggctacctgaagctgtggcagctgagcaagcccagcctggccagcttcgacgccatcttcgtggacgaggcccaggactgcacccccgccatcatgaacatcgtgctgagccagccctgcggcaagatcttcgtgggcgacccccaccagcagatctacaccttcagaggcgccgtgaacgccctgttcaccgtgccccacacccacgtgttctacctgacccagagcttcagattcggcgtggagatcgcctacgtgggcgccaccatcctggacgtgtgcaagagagtgagaaagaagaccctggtgggcggcaaccaccagagcggcatcagaggcgacgccaagggccaggtggccctgctgagcagaaccaacgccaacgtgttcgacgaggccgtgagagtgaccgagggcgagttccccagcagaatccacctgatcggcggcatcaagagcttcggcctggacagaatcatcgacatctggatcctgctgcagcccgaggaggagagaagaaagcagaacctggtgatcaaggacaagttcatcagaagatgggtgcacaaggagggcttcagcggcttcaagagatacgtgaccgccgccgaggacaaggagctggaggccaagatcgccgtggtggagaagtacaacatcagaatccccgagctggtgcagagaatcgagaagtgccacatcgaggacctggacttcgccgagtacatcctgggcaccgtgcacaaggccaagggcctggagttcgacaccgtgcacgtgctggacgacttcgtgaaggtgccctgcgccagacacaacctgccccagctgccccacttcagagtggagagcttcagcgaggacgagtggaacctgctgtacgtggccgtgaccagagccaagaagagactgatcatgaccaagagcctggagaacatcctgaccctggccggcgagtacttcctgcaggccgagctgaccagcaacgtgctgaagaccggcgtggtgagatgctgcgtgggccagtgcaacaacgccatccccgtggacaccgtgctgaccatgaagaagctgcccatcacctacagcaacagaaaggagaacaagggcggctacctgtgccacagctgcgccgagcagagaatcggccccctggccttcctgaccgccagccccgagcaggtgagagccatggagagaaccgtggagaacatcgtgctgcccagacacgaggccctgctgttcctggtgttctag

SEQ ID NO: 225706 - protein, 620 aa, Artificial Sequence
  derived and/or modified sequence
MQVSKRMLAGGVRSMPSPLLACWQPILLLVLGSVLSGSATGCPPRCECSAQDRAVLCHRKRFVAVPEGIPTETRLLDLGKNRIKTLNQDEFASFPHLEELELNENIVSAVEPGAFNNLFNLRTLGLRSNRLKLIPLGVFTGLSNLTKLDISENKIVILLDYMFQDLYNLKSLEVGDNDLVYISHRAFSGLNSLEQLTLEKCNLTSIPTEALSHLHGLIVLRLRHLNINAIRDYSFKRLYRLKVLEISHWPYLDTMTPNCLYGLNLTSLSITHCNLTAVPYLAVRHLVYLRFLNLSYNPISTIEGSMLHELLRLQEIQLVGGQLAVVEPYAFRGLNYLRVLNVSGNQLTTLEESVFHSVGNLETLILDSNPLACDCRLLWVFRRRWRLNFNRQQPTCATPEFVQGKEFKDFPDVLLPNYFTCRRARIRDRKAQQVFVDEGHTVQFVCRADGDPPPAILWLSPRKHLVSAKSNGRLTVFPDGTLEVRYAQVQDNGTYLCIAANAGGNDSMPAHLHVRSYSPDWPHQPNKTFAFISNQPGEGEANSTRATVPFPFDIKTLIIATTMGFISFLGVVLFCLVLLFLWSRGKGNTKHNIEIEYVPRKSDAGISSADAPRKFNMKMI

SEQ ID NO: 225707 - protein, 614 aa, Artificial Sequence
  derived and/or modified sequence
MLAGGVRSMPSPLLACWQPILLLVLGSVLSGSATGCPPRCECSAQDRAVLCHRKRFVAVPEGIPTETRLLDLGKNRIKTLNQDEFASFPHLEELELNENIVSAVEPGAFNNLFNLRTLGLRSNRLKLIPLGVFTGLSNLTKLDISENKIVILLDYMFQDLYNLKSLEVGDNDLVYISHRAFSGLNSLEQLTLEKCNLTSIPTEALSHLHGLIVLRLRHLNINAIRDYSFKRLYRLKVLEISHWPYLDTMTPNCLYGLNLTSLSITHCNLTAVPYLAVRHLVYLRFLNLSYNPISTIEGSMLHELLRLQEIQLVGGQLAVVEPYAFRGLNYLRVLNVSGNQLTTLEESVFHSVGNLETLILDSNPLACDCRLLWVFRRRWRLNFNRQQPTCATPEFVQGKEFKDFPDVLLPNYFTCRRARIRDRKAQQVFVDEGHTVQFVCRADGDPPPAILWLSPRKHLVSAKSNGRLTVFPDGTLEVRYAQVQDNGTYLCIAANAGGNDSMPAHLHVRSYSPDWPHQPNKTFAFISNQPGEGEANSTRATVPFPFDIKTLIIATTMGFISFLGVVLFCLVLLFLWSRGKGNTKHNIEIEYVPRKSDAGISSADAPRKFNMKMI

SEQ ID NO: 225708 - DNA, 1863 bp, Artificial Sequence
  derived and/or modified sequence
atgcaggtgagcaaaagaatgctcgccgggggggtgcggagcatgccctcacctctgttggcttgctggcagcccatcctgttactagttctcggaagcgttcttagcggcagtgccactgggtgccccccccgctgcgagtgttccgcacaggacagggccgtcttatgtcacagaaaaaggtttgtggctgtgccagagggcatccctaccgagactaggctcctcgacttaggtaagaacaggatcaagacgctgaaccaagacgagtttgcttccttccctcatttagaagagctcgaactgaatgagaacatcgtgtcagccgtcgaacctggggcattcaacaacctctttaacctgaggaccttgggactccggtccaaccgtctgaagctgatacccctaggggtgtttacagggctaagcaatttaactaaactggacatctccgaaaacaagatcgtcatcttactagactacatgttccaagatttatacaacttgaaatctctggaggtgggagataatgacctggtatacattagccaccgcgccttttcaggcctgaattccctcgagcagctgaccttagagaaatgcaatctgacgtccatccctaccgaggctctcagccacttgcacggattaatcgtgttgagactccgccatcttaacatcaacgcaatcagggactactcatttaaaaggctgtataggctgaaggtcctagagattagtcactggccatatctcgacaccatgacccccaactgcctttatgggctgaatctaactagtctgagcattacccattgcaatctgacagccgtcccttaccttgccgttagacatctagtgtatttgagattcttaaatctatcctacaatccaatatccaccatcgagggaagtatgttacatgagttgcttcggcttcaggaaattcagctggtaggcggacagcttgcggttgttgagccttatgcttttaggggcttaaattatcttcgggttttgaatgtcagtgggaaccagctcacaaccctagaggaatccgtcttccacagtgtgggcaaccttgagaccttaatcctggactcaaacccattagcgtgtgactgccgtctgttgtgggtgttcaggaggagatggagattgaacttcaaccgtcagcagcccacatgtgccactccagagttcgtgcaaggcaaggaatttaaagatttccctgacgtgcttctgccaaactacttcacctgccgccgcgcacggattcgggatcgcaaggcccagcaggtgttcgtcgatgaagggcatacagtgcagttcgtctgcagggctgacggagatccccccccggctattctttggttgagccctcgaaaacacctggtcagtgctaaatccaatgggcgacttactgtgttccctgacggcacactagaagttcgctacgcccaggtgcaagataacggcacctatctgtgcatcgcagccaatgctgggggtaacgatagtatgcccgcccatctccacgttaggtcctactctcccgactggccacatcagccaaataagacattcgcctttattagcaaccagccaggtgaaggtgaggcaaatagcacccgcgccacggtgcccttcccattcgatattaaaactttgatcatcgcaaccacaatggggttcatcagttttctcggcgtggttcttttctgcttagttctgttattcctgtggtcacggggaaaggggaatacaaagcataatatcgagatcgagtatgtgcctcgtaagtccgacgccggcatcagctccgcagacgcaccacggaaattcaacatgaaaatgatatag

SEQ ID NO: 225709 - DNA, 1863 bp, Artificial Sequence
  derived and/or modified sequence
atgcaggtgtccaagaggatgctggccggcggcgtgcgctccatgcccagccccctgctggcctgctggcagcccatcctgctgctggtgctgggctctgtgctgagcggcagcgccaccggctgccccccaagatgtgaatgttctgcccaggacagagctgtgctgtgccacaggaagagatttgtggccgtgcctgagggcatccccacagagacccggctgctggacctgggcaagaaccgcatcaagaccctgaaccaggatgaatttgccagcttcccccacctggaggagctggagctgaatgaaaacatcgtgtctgctgtggagcccggggccttcaacaacctcttcaacctgcggaccctgggcctgcggagcaaccggctgaagctgatccccctgggcgtcttcaccggcctgagcaacctgaccaagctggacatcagcgagaacaagatcgtcatcctgctggactacatgttccaggacctgtacaacctgaagagcctggaggtgggggacaatgacctggtgtacatcagccaccgggccttcagcggcctgaacagcctggagcagctgaccctggagaagtgcaacctgaccagcatccccacagaggccctgagccacctgcacggcctcatcgtgctgcggctgcggcacctgaacatcaatgccatccgggactacagcttcaagaggctgtaccgcctgaaggtgctggagatcagccactggccctacctggacaccatgacccccaactgcctgtatggcctgaacctgaccagcctgagcatcacccactgcaacctgacagctgtgccctacctggccgtgcgccacctggtgtacctgcgcttcctgaacctgagctacaaccccatcagcaccatcgagggctccatgctgcacgagctgctgcggctgcaggagatccagctggtgggcggccagctggccgtggtggagccctatgccttccggggcctgaactacctgcgggtgctgaatgtgtctggcaaccagctgaccaccctggaggagagcgtcttccacagcgtgggcaacctggagaccctcatcctggacagcaaccccctggcctgtgactgccgcctgctgtgggtgttcagaagacgctggaggctgaacttcaaccggcagcagcccacctgtgccaccccagagtttgtgcagggcaaggagttcaaggacttcccagatgtgctgctgcccaactacttcacctgccggcgggcccgcatccgggacaggaaggcccagcaggtgtttgtggatgagggccacacagtgcagtttgtgtgcagagcagatggagaccccccaccagccatcctgtggctgagccccaggaagcacctggtgtctgccaagagcaatggccgcctgactgtgtttcctgatggcaccctggaggtgcgctatgcccaggtgcaggacaatggcacctacctgtgcatcgccgccaatgctggaggaaatgacagcatgcctgcccacctgcacgtgcgcagctacagcccagactggccccaccagcccaacaagacctttgccttcatcagcaaccagcccggggagggggaggccaacagcacccgggccaccgtgcccttcccctttgacatcaagaccctcatcatcgccaccaccatgggcttcatctccttcctgggcgtggtgctcttctgcctggtgctgctcttcctgtggagccggggcaagggcaacaccaagcacaacattgaaattgaatatgtgcccaggaagagtgatgctggcatcagcagcgcagatgcccccaggaagttcaacatgaagatgatctag

SEQ ID NO: 225710 - DNA, 3055 bp, Artificial Sequence
  derived and/or modified sequence
gcgcggggcggacagacggacagccagccccgcgagggcgcgcggactgccgggcggaggtgtcggaggaggaggaaacggaggagggggctgggcaggggctggggcctggtcgggccggctggagagacatgcgattggtgaccgagccgagcggaccgaaggcgcgcccgagatgcaggtgagcaagaggatgctggcggggggcgtgaggagcatgcccagccccctcctggcctgctggcagcccatcctcctgctggtgctgggctcagtgctgtcaggctcggccacgggctgcccgccccgctgcgagtgctccgcccaggaccgcgctgtgctgtgccaccgcaagcgctttgtggcagtccccgagggcatccccaccgagacgcgcctgctggacctaggcaagaaccgcatcaaaacgctcaaccaggacgagttcgccagcttcccgcacctggaggagctggagctcaacgagaacatcgtgagcgccgtggagcccggcgccttcaacaacctcttcaacctccggacgctgggtctccgcagcaaccgcctgaagctcatcccgctaggcgtcttcactggcctcagcaacctgaccaagctggacatcagcgagaacaagatcgttatcctactggactacatgtttcaggacctgtacaacctcaagtcactggaggttggcgacaatgacctcgtctacatctctcaccgcgccttcagcggcctcaacagcctggagcagctgacgctggagaaatgcaacctgacctccatccccaccgaggcgctgtcccacctgcacggcctcatcgtcctgaggctccggcacctcaacatcaatgccatccgggactactccttcaagaggctgtaccgactcaaggtcttggagatctcccactggccctacttggacaccatgacacccaactgcctctacggcctcaacctgacgtccctgtccatcacacactgcaatctgaccgctgtgccctacctggccgtccgccacctagtctatctccgcttcctcaacctctcctacaaccccatcagcaccattgagggctccatgttgcatgagctgctccggctgcaggagatccagctggtgggcgggcagctggccgtggtggagccctatgccttccgcggcctcaactacctgcgcgtgctcaatgtctctggcaaccagctgaccacactggaggaatcagtcttccactcggtgggcaacctggagacactcatcctggactccaacccgctggcctgcgactgtcggctcctgtgggtgttccggcgccgctggcggctcaacttcaaccggcagcagcccacgtgcgccacgcccgagtttgtccagggcaaggagttcaaggacttccctgatgtgctactgcccaactacttcacctgccgccgcgcccgcatccgggaccgcaaggcccagcaggtgtttgtggacgagggccacacggtgcagtttgtgtgccgggccgatggcgacccgccgcccgccatcctctggctctcaccccgaaagcacctggtctcagccaagagcaatgggcggctcacagtcttccctgatggcacgctggaggtgcgctacgcccaggtacaggacaacggcacgtacctgtgcatcgcggccaacgcgggcggcaacgactccatgcccgcccacctgcatgtgcgcagctactcgcccgactggccccatcagcccaacaagaccttcgctttcatctccaaccagccgggcgagggagaggccaacagcacccgcgccactgtgcctttccccttcgacatcaagaccctcatcatcgccaccaccatgggcttcatctctttcctgggcgtcgtcctcttctgcctggtgctgctgtttctctggagccggggcaagggcaacacaaagcacaacatcgagatcgagtatgtgccccgaaagtcggacgcaggcatcagctccgccgacgcgccccgcaagttcaacatgaagatgatatgaggccggggcggggggcagggacccccgggcggccgggcaggggaaggggcctggccgccacctgctcactctccagtccttcccacctcctccctacccttctacacacgttctctttctccctcccgcctccgtcccctgctgccccccgccagccctcaccacctgccctccttctaccaggacctcagaagcccagacctggggaccccacctacacaggggcattgacagactggagttgaaagccgacgaaccgacacgcggcagagtcaataattcaataaaaaagttacgaactttctctgtaacttgggtttcaataattatggatttttatgaaaacttgaaataataaaaagagaaaaaaactatttcctatagctagtcggaatgcaaacttttgacgtcctgattgctccagggccctcttccaactcagtttcttgtttttctcttcctcctcctcctcttcttcctcctttctcttctcttccccagtggggagggatcactcaggaaaacaggaaaggaggttccagccccacccacctgcccaccccgccccaggcaccatcaggagcaggctagggggcaggcctgggcccagctccgggctggctttttgcagggcgcaggtggaggggacaggtctgccgatgggggtgggagcctgtctgctgggctgccaggcggcaccactgcaaggggtgggagcctggcttgggtgtggctgagactctggacagaggctggggtcctcctgggggacagcacagtcagtggagagagccaggggctggaggtggggcccaccccagcctctggtcccagctctgctgctcacttgctgtgtggcctcaagcaggtcactggcctctctgggcctcagtctccacatctgtacaaatgggaacattaccccctgccctgcctacctcacagggctgttgtgaggaattgatgagatgatgtatgtgaaacactttgtaacctgtaaagcgctgtgcacacgtg

SEQ ID NO: 225711 - DNA, 552 bp, Artificial Sequence
  derived and/or modified sequence
attattagctccatctaagagacaggaagacggagattccaagaggctcagggacttgcccggggtcacctggctgaccagtggccttgtcaggcctccacccagggatcttatgaccatgacctggctaccttgagtctgtggggctacacagccttcagcctgcatctccagggctctgactctatccagctcctggaccagctcccaagtctactcctgaccccagcctgggccaaggggacttctcaagctttgggacccagcaggacacagcagcagtcaggtgcatgctgggaccgcgacggacaggctgccgcaccccaggcccccagaggccagtctgtttgcctcccaacgccatctgacccaggtgagcaagaggatgctggcggggggcgtgaggagcatgcccagccccctcctggcctgctggcagcccatcctcctgctggtgctgggctcagtgctgtcaggctcggccacgggctgcccgccccgctgcgagtgctccgcccaggaccgcgctgtgctgtgccaccgcaagcgctt

SEQ ID NO: 225712 - DNA, 2677 bp, Artificial Sequence
  derived and/or modified sequence
agaggataattccccattatacagagatatttagcctaatagaagccgacagatcattcagggcagtaatgtactccggcttcaagcgtgtagtttcctcagcctgaactcccagattaaaggctccttgcccagcccgccctgtgccggtgcctgtgaccttgactgcaatgatgggggatcttatgaccatgacctggctaccttgagtctgtggggctacacagccttcagcctgcatctccagggctctgactctatccagctcctggaccagctcccaagtctactcctgaccccagcctgggccaaggggacttctcaagctttgggacccagcaggacacagcagcagtcaggtgcatgctgggaccgcgacggacaggctgccgcaccccaggcccccagaggccagtctgtttgcctcccaacgccatctgacccaggtgagcaagaggatgctggcggggggcgtgaggagcatgcccagccccctcctggcctgctggcagcccatcctcctgctggtgctgggctcagtgctgtcaggctcggccacgggctgcccgccccgctgcgagtgctccgcccaggaccgcgctgtgctgtgccaccgcaagcgctttgtggcagtccccgagggcatccccaccgagacgcgcctgctggacctaggcaagaaccgcatcaaaacgctcaaccaggacgagttcgccagcttcccgcacctggaggagctggagctcaacgagaacatcgtgagcgccgtggagcccggcgccttcaacaacctcttcaacctccggacgctgggtctccgcagcaaccgcctgaagctcatcccgctaggcgtcttcactggcctcagcaacctgaccaagctggacatcagcgagaacaagatcgttatcctactggactacatgtttcaggacctgtacaacctcaagtcactggaggttggcgacaatgacctcgtctacatctctcaccgcgccttcagcggcctcaacagcctggagcagctgacgctggagaaatgcaacctgacctccatccccaccgaggcgctgtcccacctgcacggcctcatcgtcctgaggctccggcacctcaacatcaatgccatccgggactactccttcaagaggctgtaccgactcaaggtcttggagatctcccactggccctacttggacaccatgacacccaactgcctctacggcctcaacctgacgtccctgtccatcacacactgcaatctgaccgctgtgccctacctggccgtccgccacctagtctatctccgcttcctcaacctctcctacaaccccatcagcaccattgagggctccatgttgcatgagctgctccggctgcaggagatccagctggtgggcgggcagctggccgtggtggagccctatgccttccgcggcctcaactacctgcgcgtgctcaatgtctctggcaaccagctgaccacactggaggaatcagtcttccactcggtgggcaacctggagacactcatcctggactccaacccgctggcctgcgactgtcggctcctgtgggtgttccggcgccgctggcggctcaacttcaaccggcagcagcccacgtgcgccacgcccgagtttgtccagggcaaggagttcaaggacttccctgatgtgctactgcccaactacttcacctgccgccgcgcccgcatccgggaccgcaaggcccagcaggtgtttgtggacgagggccacacggtgcagtttgtgtgccgggccgatggcgacccgccgcccgccatcctctggctctcaccccgaaagcacctggtctcagccaagagcaatgggcggctcacagtcttccctgatggcacgctggaggtgcgctacgcccaggtacaggacaacggcacgtacctgtgcatcgcggccaacgcgggcggcaacgactccatgcccgcccacctgcatgtgcgcagctactcgcccgactggccccatcagcccaacaagaccttcgctttcatctccaaccagccgggcgagggagaggccaacagcacccgcgccactgtgcctttccccttcgacatcaagaccctcatcatcgccaccaccatgggcttcatctctttcctgggcgtcgtcctcttctgcctggtgctgctgtttctctggagccggggcaagggcaacacaaagcacaacatcgagatcgagtatgtgccccgaaagtcggacgcaggcatcagctccgccgacgcgccccgcaagttcaacatgaagatgatatgaggccggggcggggggcagggacccccgggcggccgggcaggggaaggggcctggccgccacctgctcactctccagtccttcccacctcctccctacccttctacacacgttctctttctccctcccgcctccgtcccctgctgccccccgccagccctcaccacctgccctccttctaccaggacctcagaagcccagacctggggaccccacctacacaggggcattgacagactggagttgaaagccgacgaaccgacacgcggcagagtcaataattcaataaaaaagttacgaactttctctgtaacttgggtttcaataattatggatttttatgaaaacttgaaataataaaaagagaaaaaaacta

SEQ ID NO: 225713 - DNA, 1863 bp, Artificial Sequence
  derived and/or modified sequence
atgcaggtgagcaagcggatgctggccggcggcgtgcggagcatgccatcccctctgttggcttgctggcaacccattctgcttctggtcctggggtcggtactctcaggtagcgccacagggtgtcctcccaggtgcgaatgcagcgctcaggatagggccgtgttatgccatcgaaagagattcgttgccgtccctgagggaatccccacagagaccaggctcttggacctagggaagaatcggattaagaccctcaatcaggatgagttcgcttcttttccacacctggaagagctcgagctaaacgagaatattgtttcagctgtcgagcccggtgccttcaacaatttgttcaatcttcgaaccttaggcttaagaagcaaccggctgaagcttataccccttggtgtctttacaggattaagcaacctcaccaagttagatatctctgagaataagattgtgattctcttggattatatgttccaggacctgtataacttgaagagcctggaagtgggggataacgatctcgtttatatctcccatagagcattctcggggctgaacagtctagagcagctgactcttgagaaatgtaacctgacctctattccaaccgaagctctgtcacacctccatggcttgatcgtacttaggttacggcacctgaacatcaatgctatcagagattattcgtttaagcgcctgtaccgcctgaaagtcctggagatttctcactggccttatttagataccatgacgcctaattgcctatatggactgaaccttacgtccctgagtatcacacactgtaatttgactgcggtcccctacctagctgtccggcatctggtctacttacgctttttaaacctgagttataacccaattagtactatcgaggggtccatgctccacgaactgctgcgcctgcaagaaattcaacttgtgggcggccagctcgcggtggtggagccctatgccttcagaggactcaattacctgagagttctgaatgtgtctggaaatcagctcacaacactggaggaaagtgtcttccattcagtcggcaatttggaaactctgatactagactcaaatccactggcctgcgactgccgactgttgtgggtgtttagaagacggtggcggttaaacttcaacagacaacagcccacatgcgcaacccccgagtttgtgcagggcaaagaatttaaagacttcccagacgtcttgctgcctaattactttacgtgtcggagggcccgcatccgggataggaaggctcaacaggtgttcgttgacgaaggacatactgtgcagttcgtgtgcagggcagatggagatcccccccccgcaatcctttggctcagcccacgaaagcacctcgtgtctgccaagagcaacggcagacttacagtttttcctgacggaacactggaagtccggtacgctcaggtccaggataacggtacttacctctgcatagccgcgaatgcaggcggcaacgattccatgcccgctcacctgcacgtgagaagctacagtccagactggccacaccagcccaacaaaacatttgctttcatcagtaaccagccaggggaaggcgaagccaactccacccgcgcaacagtccctttccccttcgatataaaaactctaatcattgccacgacaatgggctttatctcatttcttggcgttgtgctcttctgtctggtgctgctgtttttatggtcccggggcaagggtaacacaaaacacaatatagaaattgaatatgtgccaagaaagagcgacgcaggaatctcttctgctgatgcacctaggaagtttaacatgaaaatgatttag

SEQ ID NO: 225714 - DNA, 1863 bp, Artificial Sequence
  derived and/or modified sequence
atgcaggtaagcaagaggatgttggcagggggagtgaggtccatgccatcacctctgctggcctgctggcagcccatcctgctcctggtgctgggctccgtcctctcgggtagcgctaccgggtgtcctcctagatgcgagtgttctgcccaagaccgcgcagtgctgtgccaccgcaaaaggttcgtggccgtgccagaaggcatccccacagagactcgccttttggacttaggtaaaaatagaatcaaaactctgaatcaggacgaattcgcatcctttccacacctggaggaattggaacttaatgagaatatcgtgtccgctgtagagcctggggctttcaataacctgtttaatctaagaacactcggcctgcgctccaacagactgaaactgatcccgttgggggtctttactggactgtctaacttgaccaagcttgacattagcgagaataaaatagtcatccttctggactacatgtttcaggatctgtataacctcaaatctctggaggtgggcgataacgatctggtgtacatcagccaccgagccttcagcggtctcaatagccttgagcaactcacactggagaaatgcaacttaacgtctatacccacagaggccctgagccatctacatggtctcatcgtcctgcgtctgcgccacctgaacatcaacgccattcgcgactacagctttaaaagactttatcgcctgaaggtcttggagatttcacactggccctacctggacactatgactccaaattgcctctatggactaaacttgacctcgctgtccattactcactgcaacctcaccgccgtgccctacttggccgtccgccacttggtttacctgaggttcttaaatctatcctacaaccctatttccacaatagagggctcaatgctgcacgagctcctcaggttgcaggagatccagctggtcggtggccaattggcagtggtggagccctacgcatttaggggacttaattacttgagggtactgaacgtatccggaaatcagctgacaacattggaggagtccgtcttccactcagtcggcaacctggagactcttatcttagattcaaaccctctggcctgtgactgcaggctgctgtgggtcttccgcaggaggtggcgtctgaactttaaccgtcaacagcccacatgcgctacccccgaattcgtacaagggaaggagtttaaagactttcctgacgtgctcctgccaaattacttcacatgccgtagggcacgcattcgcgatcggaaggcccaacaggtgtttgtggatgagggtcacacggtgcagtttgtgtgccgggctgatggtgacccccctccagctatcttgtggttaagtcctaggaaacacttggtgtccgctaaaagtaacgggaggttgactgtcttccccgatggtacgcttgaagtgcgctatgcgcaggtccaggataacggtacatatttgtgtatagcggctaatgccggaggcaacgacagtatgcccgctcacttgcatgtgcggagttacagtccggattggccgcatcagccaaataaaacattcgcttttatctctaatcagcccggtgagggtgaggctaatagcaccagggccacagtcccatttcctttcgatattaagactctcatcattgctaccacgatggggttcatctcctttctcggagtcgtgctcttttgtcttgttctcctcttcctgtggagccggggaaaggggaatacaaaacataacatcgagatcgagtatgtgccacgcaagagtgacgcagggatttcttcagccgatgcacctcgcaaattcaatatgaaaatgatttag

SEQ ID NO: 225715 - DNA, 1863 bp, Artificial Sequence
  derived and/or modified sequence
atgcaggtgagcaagagaatgctggccggcggcgtgagaagcatgcccagccccctgctggcctgctggcagcccatcctgctgctggtgctgggcagcgtgctgagcggcagcgccaccggctgcccccccagatgcgagtgcagcgcccaggacagagccgtgctgtgccacagaaagagattcgtggccgtgcccgagggcatccccaccgagaccagactgctggacctgggcaagaacagaatcaagaccctgaaccaggacgagttcgccagcttcccccacctggaggagctggagctgaacgagaacatcgtgagcgccgtggagcccggcgccttcaacaacctgttcaacctgagaaccctgggcctgagaagcaacagactgaagctgatccccctgggcgtgttcaccggcctgagcaacctgaccaagctggacatcagcgagaacaagatcgtgatcctgctggactacatgttccaggacctgtacaacctgaagagcctggaggtgggcgacaacgacctggtgtacatcagccacagagccttcagcggcctgaacagcctggagcagctgaccctggagaagtgcaacctgaccagcatccccaccgaggccctgagccacctgcacggcctgatcgtgctgagactgagacacctgaacatcaacgccatcagagactacagcttcaagagactgtacagactgaaggtgctggagatcagccactggccctacctggacaccatgacccccaactgcctgtacggcctgaacctgaccagcctgagcatcacccactgcaacctgaccgccgtgccctacctggccgtgagacacctggtgtacctgagattcctgaacctgagctacaaccccatcagcaccatcgagggcagcatgctgcacgagctgctgagactgcaggagatccagctggtgggcggccagctggccgtggtggagccctacgccttcagaggcctgaactacctgagagtgctgaacgtgagcggcaaccagctgaccaccctggaggagagcgtgttccacagcgtgggcaacctggagaccctgatcctggacagcaaccccctggcctgcgactgcagactgctgtgggtgttcagaagaagatggagactgaacttcaacagacagcagcccacctgcgccacccccgagttcgtgcagggcaaggagttcaaggacttccccgacgtgctgctgcccaactacttcacctgcagaagagccagaatcagagacagaaaggcccagcaggtgttcgtggacgagggccacaccgtgcagttcgtgtgcagagccgacggcgaccccccccccgccatcctgtggctgagccccagaaagcacctggtgagcgccaagagcaacggcagactgaccgtgttccccgacggcaccctggaggtgagatacgcccaggtgcaggacaacggcacctacctgtgcatcgccgccaacgccggcggcaacgacagcatgcccgcccacctgcacgtgagaagctacagccccgactggccccaccagcccaacaagaccttcgccttcatcagcaaccagcccggcgagggcgaggccaacagcaccagagccaccgtgcccttccccttcgacatcaagaccctgatcatcgccaccaccatgggcttcatcagcttcctgggcgtggtgctgttctgcctggtgctgctgttcctgtggagcagaggcaagggcaacaccaagcacaacatcgagatcgagtacgtgcccagaaagagcgacgccggcatcagcagcgccgacgcccccagaaagttcaacatgaagatgatctag

SEQ ID NO: 225716 - protein, 260 aa, Artificial Sequence
  derived and/or modified sequence
MVWPALWELYRELGLFQGPALGLRNHLGRKLRRRKKKKAKRTTNWKIITDRPGFHDESAIYPVGYCSTRIYASMKCPDQKCLYTCQIKDGGVQPQFEIVPEDDPQNAIVSSSADACHAELLRTISTTMGKLMPNLLPAGADFFGFSHPAIHNLIQSCPGARKCINYQWVKFDVCKPGDGQLPEGLPENDAAMSFEAFQRQIFDEDQNDPLLPGSLDLPELQPAAFVSSYQPMYLTHEPLVDTHLQHLKSPSQGSPIQSSD

SEQ ID NO: 225717 - protein, 411 aa, Artificial Sequence
  derived and/or modified sequence
MSLLDGLASSPRAPLQSSKARMKKLPKKSQNEKYRLKYLRLRKAAKATVFENAAICDEIARLEEKFLKAKEERRYLLKKLLQLQALTEGEVQAAAPSHSSSLPLTYGVASSVGTIQGAGPISGPSTGAEEPFGKKTKKEKKEKGKENNKLEVLKKTCKKKKMAGGARKLVQPIALDPSGRPVFPIGLGGLTVYSLGEIITDRPGFHDESAIYPVGYCSTRIYASMKCPDQKCLYTCQIKDGGVQPQFEIVPEDDPQNAIVSSSADACHAELLRTISTTMGKLMPNLLPAGADFFGFSHPAIHNLIQSCPGARKCINYQWVKFDVCKPGDGQLPEGLPENDAAMSFEAFQRQIFDEDQNDPLLPGSLDLPELQPAAFVSSYQPMYLTHEPLVDTHLQHLKSPSQGSPIQSSD

SEQ ID NO: 225718 - DNA, 1236 bp, Artificial Sequence
  derived and/or modified sequence
atgagcctgctggacggcctggccagcagccccagagcccccctgcagagcagcaaggccagaatgaagaagctgcccaagaagagccagaacgagaagtacagactgaagtacctgagactgagaaaggccgccaaggccaccgtgttcgagaacgccgccatctgcgacgagatcgccagactggaggagaagttcctgaaggccaaggaggagagaagatacctgctgaagaagctgctgcagctgcaggccctgaccgagggcgaggtgcaggccgccgcccccagccacagcagcagcctgcccctgacctacggcgtggccagcagcgtgggcaccatccagggcgccggccccatcagcggccccagcaccggcgccgaggagcccttcggcaagaagaccaagaaggagaagaaggagaagggcaaggagaacaacaagctggaggtgctgaagaagacctgcaagaagaagaagatggccggcggcgccagaaagctggtgcagcccatcgccctggaccccagcggcagacccgtgttccccatcggcctgggcggcctgaccgtgtacagcctgggcgagatcatcaccgacagacccggcttccacgacgagagcgccatctaccccgtgggctactgcagcaccagaatctacgccagcatgaagtgccccgaccagaagtgcctgtacacctgccagatcaaggacggcggcgtgcagccccagttcgagatcgtgcccgaggacgacccccagaacgccatcgtgagcagcagcgccgacgcctgccacgccgagctgctgagaaccatcagcaccaccatgggcaagctgatgcccaacctgctgcccgccggcgccgacttcttcggcttcagccaccccgccatccacaacctgatccagagctgccccggcgccagaaagtgcatcaactaccagtgggtgaagttcgacgtgtgcaagcccggcgacggccagctgcccgagggcctgcccgagaacgacgccgccatgagcttcgaggccttccagagacagatcttcgacgaggaccagaacgaccccctgctgcccggcagcctggacctgcccgagctgcagcccgccgccttcgtgagcagctaccagcccatgtacctgacccacgagcccctggtggacacccacctgcagcacctgaagagccccagccagggcagccccatccagagcagcgactag

SEQ ID NO: 225719 - DNA, 1236 bp, Artificial Sequence
  derived and/or modified sequence
atgtccctcctcgacgggcttgcaagttctcctagagctcccctgcagtcctccaaagcacggatgaagaagctccctaaaaagagtcagaacgagaagtacagattaaagtatctccgactgcggaaagcagccaaggccactgtttttgaaaacgcggccatctgtgacgaaattgcacgccttgaggaaaaattcctgaaagctaaggaggagcgtaggtacctgctaaagaagctgctgcagctacaggcactaactgaaggggaagtgcaggccgctgctccctcccatagctcaagtctgcctctaacgtacggggtcgcttcttcagtcggcactatccagggggcgggacctatcagcggacccagtacgggggcggaggagcctttcggtaaaaagacaaagaaggaaaaaaaggaaaaagggaaggaaaataataaattagaggtgctcaagaagacgtgcaagaaaaagaaaatggcggggggggctcggaagctggtgcaacctatagccttagatccaagtggccgacccgtgttccctatcgggctgggaggattgactgtgtacagcctcggagagatcatcaccgatcgacccggcttccatgacgaaagcgctatctacccggtaggatattgctccacgcgcatctatgcttctatgaagtgccccgatcagaagtgcctctatacatgccagatcaaggatggaggtgttcaaccccagttcgaaatcgtccctgaagacgatccccagaacgccatcgtgtcttctagcgctgacgcttgtcacgctgaattgctccggacaatcagtaccactatgggaaaactcatgccgaacctccttcctgctggggccgactttttcgggttttcccaccctgccatccacaacctgatccaatcctgtcccggcgcacgtaagtgtattaattaccagtgggtaaaatttgacgtttgtaaaccaggagacgggcagcttcccgagggactcccagagaatgatgccgcaatgagcttcgaggctttccagaggcagatctttgacgaggatcaaaacgaccccctcttgcctgggtccctggacctgcccgaactgcagccggccgcctttgtgagctcttaccaacctatgtatctaacgcatgaaccactggttgacacccacctccaacatctgaagtccccatcgcagggatctcccatccagtcttcagattag

SEQ ID NO: 225720 - DNA, 1236 bp, Artificial Sequence
  derived and/or modified sequence
atgagcctgctggatggcctggccagcagcccccgggcccccctgcagagcagcaaggccaggatgaagaagctgcccaagaagagccagaatgagaagtaccgcctgaagtacctgcggctgaggaaggccgccaaggccaccgtgtttgaaaatgctgccatctgtgatgaaattgcccggctggaggagaagttcctgaaggccaaggaggagcggcgctacctgctgaagaagctgctgcagctgcaggccctgacagaaggagaggtgcaggccgccgcccccagccacagcagcagcctgcccctgacctacggcgtggccagctctgtgggcaccatccagggcgccggccccatcagcggccccagcactggagctgaggagccctttgggaagaagaccaagaaggagaagaaggagaagggcaaggagaacaacaagctggaggtgctgaagaagacctgcaagaagaagaagatggccggcggggccaggaagctggtgcagcccatcgccctggaccccagcggccggcctgtgttccccatcggcctgggcggcctgactgtgtacagcctgggggagatcatcacagacaggcctggcttccatgatgaaagtgccatctaccctgtgggctactgcagcacccgcatctatgcctccatgaagtgcccagaccagaagtgcctgtacacctgccagatcaaggatggcggcgtgcagccccagtttgaaattgtgcctgaagatgacccccagaatgccatcgtgagcagcagcgcagatgcctgccacgccgagctgctgcggaccatcagcaccaccatgggcaagctgatgcccaacctgctgcctgctggagctgacttcttcggcttcagccacccagccatccacaacctgatccagagctgccctggggccaggaagtgcatcaactaccagtgggtgaagtttgatgtgtgcaagccaggagatggccagctgcctgagggcctgcctgaaaatgatgctgccatgagctttgaggccttccagaggcagatctttgatgaggaccagaatgaccccctgctgcccggcagcctggacctgcctgagctgcagcctgctgcctttgtgtcctcctaccagcccatgtacctgacccatgagcccctggtggacacccacctgcagcacctgaagagccccagccagggcagccccatccagagcagtgactag

SEQ ID NO: 225721 - DNA, 1236 bp, Artificial Sequence
  derived and/or modified sequence
atgagcctgctggacggcctggccagcagcccccgggcccccctgcagtcttctaaggcacggatgaaaaaactcccaaagaagagtcagaacgagaaataccggctcaaataccttaggctgcgcaaagccgcgaaggccacagtgtttgagaacgctgctatttgtgatgaaattgctagattagaggaaaaattcctgaaggctaaagaggaacgaaggtatttactcaaaaagctgctgcaattgcaggcattgacagaaggcgaggtccaggctgccgcacccagccattcttcctccctgcccctgacttatggagttgctagcagcgtgggaaccattcagggggcaggacctatcagcggcccttctaccggggccgaagagccttttgggaaaaagaccaaaaaggagaagaaagagaagggaaaggaaaacaacaagcttgaggtgctgaaaaaaacctgcaagaagaagaagatggctggaggtgcaaggaagttggttcaaccaattgcacttgacccctcaggccgcccagtattccctatcgggcttggaggcttgaccgtctacagcttgggagaaatcatcacagacagacccggtttccacgacgagtcagcaatataccccgtgggctactgctccaccagaatttacgcatcaatgaaatgtcctgatcagaagtgcctgtacacctgccagataaaggatggaggggtccagcctcagtttgagatcgtgccagaggacgatccacagaacgccatagtgtcatcatctgccgatgcttgccatgctgagcttttgaggaccattagcacgactatgggtaagctgatgccaaatctgcttcctgcaggggcggactttttcggattcagtcatcctgccattcacaacttaatccagagttgcccgggggcccgaaagtgcatcaattaccaatgggttaaattcgacgtctgcaaacccggagatgggcaactccccgaaggactgcctgagaatgatgccgccatgtccttcgaggcttttcagcgccagatttttgacgaagaccagaacgaccctctacttcctggcagtttagatctccccgaactccaacccgcagcatttgtgtcctcctatcagcccatgtaccttacccatgagcctctcgtcgacacccacttgcagcacctgaagagcccaagccaagggagccccattcagagctctgattag

SEQ ID NO: 225722 - DNA, 1236 bp, Artificial Sequence
  derived and/or modified sequence
atgagtctcctggacggcctggcttctagtccacgagcccctctgcaaagtagcaaagccagaatgaaaaaactgccgaagaagtcacaaaatgagaaatatcggttaaagtatctccgtctgcggaaggcggctaaagcgaccgtattcgagaatgctgccatttgtgatgaaatcgcacgcctagaagagaaatttttgaaggccaaggaggagcgccgatatctcctgaagaaactgctgcagctgcaggccctaacggaaggcgaggttcaagcagctgctccatcccactcctcctccctgccgctaacttacggggtggcatcgagtgtgggcactattcagggagccggacccatctccggaccttctactggcgcagaagagcctttcggcaaaaagactaagaaagaaaaaaaggagaagggcaaggagaacaacaaattggaggtgctgaagaagacttgcaaaaagaaaaaaatggccggaggcgctcggaagttagtgcaaccaatcgccctggatccatctggcaggcctgtttttccaataggactcggagggctgaccgtgtattcactgggcgagataattaccgaccgcccaggatttcatgatgaatcagctatttaccctgtcgggtactgtagcactaggatctacgccagtatgaagtgcccggaccaaaaatgcctctacacatgtcagataaaagacggaggtgtccaaccccagttcgagatcgtacccgaagatgacccacagaatgccatagtctctagctctgcggatgcgtgtcatgctgaactactccgtaccatcagcacaactatgggtaagctgatgcctaacctgctcccagcgggagcggatttctttggcttttcacaccctgctatccacaatctcatacaatcctgccctggggctcgtaagtgtattaactatcagtgggttaaatttgacgtctgcaaaccgggagacggtcaacttccagaggggttgcccgaaaacgatgcggcaatgtccttcgaggccttccagcgacagatcttcgatgaagaccagaacgaccctctgttaccagggtcacttgatctgccagagctccagcccgcagctttcgtttccagctaccagccgatgtaccttacacatgagcccctagtggatacacacctgcaacatttgaagtcaccctcccaaggttctcccatccaaagttccgactag

SEQ ID NO: 225723 - DNA, 4004 bp, Artificial Sequence
  derived and/or modified sequence
cggaagtgctgggaggcgccgggagcccgttcggttgcgggtgtctctggccctgcggtcagccctgggaacgtcccggagagctagattcctagaggcccgattccgctagcccggaacagacaaagccagcgctcccgcccgctccccgacttaggatccgatgccggcagcgtcctggggcccccgtagcggggctggaccatgagcctgctggacggcctcgcttcctcgccgcgggctccgctgcagtccagcaaggccaggatgaaaaagctcccgaagaagagccagaatgagaagtaccggctgaagtacctgcggctgcgcaaagcggccaaggccacggtgtttgaaaatgctgctatttgtgatgaaattgctcgtcttgaggaaaaatttcttaaagcaaaagaagaaagaaggtacttgctaaagaagctcctccagcttcaggctctaactgaaggggaagtacaggctgcagctccttcccacagttccagtttgcccctgacttatggtgtggccagctctgtgggaactatacagggagctgggcctatttcagggcccagcactggggctgaggaaccatttgggaagaaaactaagaaggagaaaaaagaaaaaggcaaagagaacaacaaactggaagttctgaagaaaacatgcaagaaaaagaaaatggcgggaggtgctcgcaagctggttcagcccattgccctggatccctcaggacggcctgtgttccccatcggactagggggtctaacagtatatagcctgggggagatcatcaccgaccgacctggctttcatgatgagagtgccatctaccccgtgggctattgcagtactcgaatatatgccagcatgaagtgcccagaccagaagtgtctatatacctgtcagatcaaggatggtggtgtgcagcctcagtttgaaattgttcctgaagatgacccccagaatgccattgtcagctcttctgcagatgcttgtcatgcagaactgctcaggactataagcactactatggggaaactaatgcctaacctgcttccagctggagctgacttttttggattttctcatccagccatccacaacctgatccagagctgtccaggagctcgaaaatgcatcaattaccagtgggtgaaatttgatgtgtgcaaacctggagatgggcagctacctgaggggctgccggagaatgatgcagctatgagctttgaagcctttcagagacagatctttgatgaagatcagaatgatccccttctgccaggatccttggacctcccagagcttcagcctgcagcctttgtgtcttcttaccagcccatgtacctgacacatgaacccttggtagatactcacctgcagcacttgaagtctccatcacagggtagcccaattcagtcttcagattgaacaagaagggatcagatgccacatcgtttttgtcgtgattaatttaacttaaactaaaattttgggtatatgaaagaaggcagcaattcagaagtaaagaagatactaacgtatttcatcatggaaggtcctgtggtgatggttttccctgggaaaaccttcagctgctttatttttagtaataaatttctcttgtcaattctgtttactttcatcttgtaatcgggatgtaatcttttttgcttagctctgcctgaggtaaagtaaacttcagcctcttataaacaagagtgatagagagctgcaggctgctacaacaaataccatagacaggttggtttataaataacatgaatttatttctcacagttctggatgctgggaagtccaagttcaaggagcgcagattcaatgtctggtgagggcccacttcctagttcttagacagctgtcttcctgcagtgtcctcacgtggtagaagaggaaggcagctctccggggtcccttttataagatcactaagccggttcatgagaggtctgctctcatgacctaatcacctcccaaaggccccacctcccaataccatcacattaggggttaggatttaacatgaattttggggacatataaacattaagtctgtagtagcagcagctgactaacgagggagatagggagattctgacaaacttctactcttgattgtgatcctaattcaaggaatatcaagtcccagcccctgcaacccaggctgctgcttaattttcatgtcagtatcatcaaaatccaatgttctgcttaaactcaagatggaaagtccagtccaaggtacactgttcatctttttcttcacattttgcacatccttcaaggggatctttaacctctttaacctttgtattgcacctcagataatgtgctttttagctcagtacactgaaaccatatgataacacaaattcacatataattgggggttagtcccatactctataacagacttagtcctgtcttttcattagccatgtaataatataactccatgttccatgcaactggatttttggaccctgttaatagcattaaggtagaggtttactctatcacctaacacctcaacactacctgtgggatgccttagttacccagcagcaggttaccaagggctgtctggaaagggagggacaaaaggacccagaagtagaagaatggggatggagtggtgagaattgaatggttaatgcactgccattcataattgccaattgaggacaacacaaatgggattggtactttatagtaataaatctgaccagcagagggagggatcaggcagcagtgtttagagcacaccacactggccactgtaaactgagaagctaagttaactggtattttatgattttgagtatagtctttttataagttgtatacactttacaatgtaaaagaaacaaactttgtataatagcaaatcgggaaggggactgcttaaaatgttaatgcagtgtttttctttttttctctgcataaatggcttgagcatactggcatttacacagaaatgatatatgctgcttttatcatataacaaatattttcccactattacagcctgagtaatacccgtattaaaagagcctcattttagaaagacatttaaaatttttggaacataccacatgtagaaaggttgaactggtttttcagctataatgcatatacaactatagtgtgtacgtataccacatatacatatacttgtatgaagatatgtgtaaaatgtttttactatggatcatggatttaagaaacttgaaaagctgggcacggtggctcacgcctgtaatcccagcactttgggaggctgaggcgggtggatcaagaggtcaggagatcgagaccatcctggctaagtcggtctctaataaaaatacaaaaaattagccaggcgtggtggcacgcgcctgtagtcccagctactcgggaggctgaggcaggaagaatcgcttgaacccgggaggcagaggttgcagtgagccgagaccgcgccactgcactccagcctgggcaacagagcaaaactccaactcaaaaacaaaaacaaaaacaccttgaaaaacactgccttagtatacttaaactatcttttcatctatcagattgttaaggattttttttaaatttgacaacatccagtgtcaatgagggtgagggcaaaaaaaggactaccttggtgagaatgtaagttgtttaatcctttgggagggttaagctgtagatatctaaattttaaatatatatttatcctcttccatgttaagaaccctaagaaataactggacgagtgtggtatgatgtttgcatgtgatattcattacagtattattttaatagtagaaaattgttaaaaatctatatgtccattaataggaaattggttaaataaaatgaggcttccacaaactgaaacactctaaatctatattctattatttacataagaaaattattttggtaaagtaagtaagtcaaaaacacagattacaaaataatatgta

SEQ ID NO: 225724 - protein, 392 aa, Artificial Sequence
  derived and/or modified sequence
MEKDKVKIHGILSNTHRQAARVNLSFDFPFYGHFLREITVATGGFIYTGEVVHRMLTATQYIAPLMANFDPSVSRNSTVRYFDNGTALVVQWDHVHLQDNYNLGSFTFQATLLMDGRIIFGYKEIPVLVTQISSTNHPVKVGLSDAFVVVHRIQQIPNVRRRTIYEYHRVELQMSKITNISAVEMTPLPTCLQFNRCGPCVSSQIGFNCSWCSKLQRCSSGFDRHRQDWVDSGCPEESKEKMCENTEPVETSSRTTTTVGATTTQFRVLTTTRRAVTSQFPTSLPTEDDTKIALHLKDNGASTDDSAAEKKGGTLHAGLIIGILILVLIVATAILVTVYMYHHPTSAASIFFIERRPSRWPAMKFRRGSGHPAYAEVEPVGEKEGFIVSEQC

SEQ ID NO: 225725 - protein, 529 aa, Artificial Sequence
  derived and/or modified sequence
MARFPKADLAAAGVMLLCHFFTDQFQFADGKPGDQILDWQYGVTQAFPHTEEEVEVDSHAYSHRWKRNLDFLKAVDTNRASVGQDSPEPRSFTDLLLDDGQDNNTQIEEDTDHNYYISRIYGPSDSASRDLWVNIDQMEKDKVKIHGILSNTHRQAARVNLSFDFPFYGHFLREITVATGGFIYTGEVVHRMLTATQYIAPLMANFDPSVSRNSTVRYFDNGTALVVQWDHVHLQDNYNLGSFTFQATLLMDGRIIFGYKEIPVLVTQISSTNHPVKVGLSDAFVVVHRIQQIPNVRRRTIYEYHRVELQMSKITNISAVEMTPLPTCLQFNRCGPCVSSQIGFNCSWCSKLQRCSSGFDRHRQDWVDSGCPEESKEKMCENTEPVETSSRTTTTVGATTTQFRVLTTTRRAVTSQFPTSLPTEDDTKIALHLKDNGASTDDSAAEKKGGTLHAGLIIGILILVLIVATAILVTVYMYHHPTSAASIFFIERRPSRWPAMKFRRGSGHPAYAEVEPVGEKEGFIVSEQC

SEQ ID NO: 225726 - protein, 515 aa, Artificial Sequence
  derived and/or modified sequence
MLLCHFFTDQFQFADGKPGDQILDWQYGVTQAFPHTEEEVEVDSHAYSHRWKRNLDFLKAVDTNRASVGQDSPEPRSFTDLLLDDGQDNNTQIEEDTDHNYYISRIYGPSDSASRDLWVNIDQMEKDKVKIHGILSNTHRQAARVNLSFDFPFYGHFLREITVATGGFIYTGEVVHRMLTATQYIAPLMANFDPSVSRNSTVRYFDNGTALVVQWDHVHLQDNYNLGSFTFQATLLMDGRIIFGYKEIPVLVTQISSTNHPVKVGLSDAFVVVHRIQQIPNVRRRTIYEYHRVELQMSKITNISAVEMTPLPTCLQFNRCGPCVSSQIGFNCSWCSKLQRCSSGFDRHRQDWVDSGCPEESKEKMCENTEPVETSSRTTTTVGATTTQFRVLTTTRRAVTSQFPTSLPTEDDTKIALHLKDNGASTDDSAAEKKGGTLHAGLIIGILILVLIVATAILVTVYMYHHPTSAASIFFIERRPSRWPAMKFRRGSGHPAYAEVEPVGEKEGFIVSEQC

SEQ ID NO: 225727 - DNA, 1179 bp, Artificial Sequence
  derived and/or modified sequence
atggaaaaagacaaagttaagatccacggcatcctttccaatacccaccggcaagccgcgcgcgtcaacctctcttttgatttccctttctatgggcacttcctgagggagatcacagtggccactggggggttcatctatactggtgaggtggtccaccggatgctgacggccacccaatatattgcacccctgatggctaactttgatccctcggtgtcccggaattcaacggtcaggtactttgataacggaactgccctggtggttcaatgggatcacgtgcacctccaagataattacaatctcggatcattcaccttccaagctaccctcctgatggacggaagaatcatttttgggtataaggaaattcctgtgctcgtcactcagatctcttctaccaatcaccccgtcaaggtcggcttgtccgacgcttttgtggtcgtgcaccgaatccagcagatacccaacgtgcggcgacgaaccatctacgaatatcatcgggtcgagcttcagatgtcaaagatcacaaacatctccgctgtggaaatgacgccactccctacctgtctccagttcaaccggtgtggcccgtgtgtcagttcccagatcggattcaactgttcctggtgttcaaagttgcagagatgtagttctggatttgaccggcaccgccaggattgggttgacagcggctgtcctgaagagagtaaggaaaaaatgtgtgaaaacacggagcctgtggaaacatccagcaggactacaaccaccgtaggggccacaacaacacagttcagggtgttgactaccactcgacgggcggtgacctcccagtttcctacctctctccctactgaagatgacactaagatcgccctacatttaaaggacaatggcgcaagcacagacgactctgccgccgagaagaaaggcggtactctacatgccggactgatcattgggatcctgatcctcgtgttgatcgtagcgaccgcaattctcgttacagtctatatgtatcaccaccccaccagcgccgctagtattttcttcattgagagacggccaagccggtggcccgcgatgaagttcagacgcgggagtgggcatcccgcctatgccgaggtcgaaccagtgggtgagaaggaaggattcattgtatcagagcagtgctag

SEQ ID NO: 225728 - DNA, 1590 bp, Artificial Sequence
  derived and/or modified sequence
atggcacgtttccccaaggcagacctcgctgcagccggtgtgatgttactgtgccactttttcaccgaccagtttcaattcgcggatggaaagcccggcgaccagatattggactggcaatatggcgtaacccaggccttcccacacaccgaggaagaggtggaagtggattcccacgcctattcccaccgttggaaaagaaatttagatttccttaaagctgtagacacaaacagggcaagcgtgggacaagattctccagaacctcgttccttcactgatctactcctcgatgatggacaagacaacaatacacagattgaggaggacaccgatcataactactacatatcccggatctatggaccaagcgattcagcaagcagagacctctgggtgaatattgatcagatggagaaagataaggtgaagatccacggcatcctttcaaacacacacaggcaggcagctagggtgaatctgtcttttgatttcccattctacggacactttttgagggagatcaccgttgctactgggggattcatttatacgggtgaagtggttcaccggatgttaacagccacacagtatattgcgcctcttatggcaaacttcgacccttctgttagtagaaatagtactgtgcggtacttcgacaatggaacagcgctcgttgttcagtgggatcacgtgcacctccaggataactataatctggggtcgttcacgttccaggcgactctgctgatggacggacgcatcatctttggatataaggagattcccgtgctggtcacccagatctcctccaccaatcacccagttaaagtgggactgtcagacgctttcgtggtggtgcatcggattcagcagatcccgaacgttagacgacgtacaatctatgaatatcacagagtcgagctccagatgtcaaagattacgaatataagcgccgtggagatgacgcctctccccacatgtctacagtttaatagatgcggcccttgtgtctcctcccagataggcttcaactgctcctggtgttccaaactgcaacgctgcagcagtggattcgacaggcatcgacaggactgggtcgactcggggtgtccggaggagtccaaagagaagatgtgcgagaatactgagccagttgagacttctagcaggaccacaaccacagtgggtgccaccaccactcagtttcgcgtgctgaccactacacgacgggcagtcacctctcagttccctacctcactccctaccgaagacgacacaaagatcgcgttgcatctaaaggataacggagcctcgactgacgactcggcggccgaaaagaagggcggtactttgcatgccggccttattattggaatactcatcctggtactgattgttgcgacagccattctggtcaccgtgtacatgtatcaccatcctacgtcggcggccagcatttttttcattgagaggcgcccatctaggtggcctgccatgaagttcaggcgcggatcaggtcatcccgcgtatgccgaggttgaaccagtcggggaaaaggaaggctttatcgtgtcagagcagtgttag

SEQ ID NO: 225729 - DNA, 1548 bp, Artificial Sequence
  derived and/or modified sequence
atgttgctctgccatttttttacggatcagttccagttcgccgatggcaaaccgggtgatcagatactcgactggcaatacggggtgacccaagcttttcctcataccgaagaagaggtagaagttgactcccacgcctattcacacagatggaagcggaatcttgatttcctgaaggcagttgatactaaccgcgcctcagtggggcaggattcccctgagccacgcagtttcacggacttgttactggacgacgggcaagataataacacccagatcgaagaggatacagaccacaactattatatctcccggatctacggtccgagtgactcagccagcagggacctgtgggtaaatatcgatcagatggagaaagacaaagtgaagatacacggcattctctccaacactcaccggcaggccgccagagttaatttgtctttcgacttcccattctatgggcactttctgcgcgagattaccgtcgcaacgggcggattcatatataccggagaagtagtacaccgaatgctgacagccacacagtacatcgctccactcatggccaacttcgatccctccgtgtcgcgcaactcaactgtgagatacttcgataacgggaccgctctcgtggtccagtgggatcacgtgcatctgcaggataactataatctgggatctttcaccttccaggcaaccctcctcatggatggaagaatcatattcggatataaggaaatcccagtcctggttacccaaatttcaagtacaaaccatccagtgaaggtggggctgagcgatgctttcgtggtggttcaccgtattcaacagattcctaacgtgcggcgcaggacaatctacgagtaccacagggtagaactgcagatgtccaaaattacgaacatctcagccgtggagatgactccgctcccaacctgtctgcagttcaatcgctgtggaccctgcgtgtcttcccagattggcttcaactgcagctggtgttctaagcttcaacgatgttcatcgggtttcgaccgccaccgccaggactgggtggattcagggtgcccagaggaaagtaaggagaagatgtgtgaaaatacggaaccagtggagacgagttctaggaccaccacaacggtgggggctacaacaacgcagtttagagttctgactaccacaagacgggcagtgacaagccagtttcctacctctcttcctacagaggatgatacgaaaatagcacttcacctcaaagacaacggggcttccaccgatgactctgccgctgagaaaaaaggaggcactctgcacgctggcctgattatcggaatcctcattctggtgctcattgtggcgactgcgatcctcgtcacagtctatatgtatcatcatccaacaagcgcggcttccatcttttttattgagcgcagacctagcagatggcccgccatgaaatttcgtcggggcagcggccaccccgcatacgccgaagtcgagcctgtgggtgagaaggagggatttatcgtcagcgagcagtgttag

SEQ ID NO: 225730 - DNA, 1179 bp, Artificial Sequence
  derived and/or modified sequence
atggagaaggacaaggtgaagatccacggcatcctgagcaacacccaccggcaggccgcccgggtgaacctgagctttgacttccccttctacggccacttcctgcgggagatcaccgtggccaccggcggcttcatctacaccggggaggtggtgcacaggatgctgacagccacccagtacatcgcccccctgatggccaactttgaccccagcgtgtccaggaacagcacagtgcgctactttgacaatggaacagccctggtggtgcagtgggaccacgtgcacctgcaggacaactacaacctgggcagcttcaccttccaggccaccctgctgatggatggccgcatcatcttcggctacaaggagatccctgtgctggtgacccagatcagcagcaccaaccaccctgtgaaggtgggcctgagtgatgcctttgtggtggtgcaccgcatccagcagatccccaacgtgagaagaaggaccatctatgagtaccaccgggtggagctgcagatgagcaagatcaccaacatctctgctgtggagatgacccccctgcccacctgcctgcagttcaacagatgtggcccctgtgtgagcagccagatcggcttcaactgctcctggtgcagcaagctgcagcgctgcagcagcggctttgacagacaccggcaggactgggtggacagcggctgcccagaggagagcaaggagaagatgtgtgagaacacagagcctgtggagaccagcagcaggaccaccaccaccgtgggcgccaccaccacccagttccgggtgctgaccaccaccaggagagctgtgaccagccagttccccaccagcctgcccacagaagatgacaccaagatcgccctgcacctgaaggacaatggagccagcacagatgacagcgctgctgagaagaagggcggcaccctgcatgctggcctcatcatcggcatcctgatcctggtgctgattgtggccacagccatcctggtgacagtgtacatgtaccaccaccccaccagcgctgccagcatcttcttcattgaaagaagacccagccgctggccagccatgaagttccggcggggcagcggccacccagcctatgcagaggtggagcctgtgggggagaaggagggcttcatcgtgtctgagcagtgctag

SEQ ID NO: 225731 - DNA, 1590 bp, Artificial Sequence
  derived and/or modified sequence
atggcccgcttccccaaggctgacctggccgccgccggcgtgatgctgctgtgccacttcttcacagaccagttccagtttgctgatggcaagccaggggaccagatcctggactggcagtatggagtgacccaggccttcccccacacagaggaggaggtggaggtggacagccacgcctacagccaccgctggaagaggaacctggacttcctgaaggctgtggacaccaacagagcctctgtgggccaggacagccctgagcccaggagcttcacagacctgctgctggatgatggccaggacaacaacacccagatcgaggaggacacagaccacaactactacatcagccgcatctacggccccagcgacagcgccagccgggacctgtgggtgaacatcgaccagatggagaaggacaaggtgaagatccacggcatcctgagcaacacccaccggcaggccgcccgggtgaacctgagctttgacttccccttctacggccacttcctgcgggagatcaccgtggccactggaggcttcatctacacaggagaggtggtgcacaggatgctgacagccacccagtacatcgcccccctgatggccaactttgaccccagcgtgtccaggaacagcacagtgcgctactttgacaatggaacagccctggtggtgcagtgggaccacgtgcacctgcaggacaactacaacctgggcagcttcaccttccaggccaccctgctgatggatggccgcatcatcttcggctacaaggagatccctgtgctggtgacccagatcagcagcaccaaccaccctgtgaaggtgggcctgagtgatgcctttgtggtggtgcaccgcatccagcagatccccaacgtgagaagaaggaccatctatgagtaccaccgggtggagctgcagatgagcaagatcaccaacatctctgctgtggagatgacccccctgcccacctgcctgcagttcaacagatgtggcccctgtgtgagcagccagatcggcttcaactgctcctggtgcagcaagctgcagcgctgcagcagcggctttgacagacaccggcaggactgggtggacagcggctgcccagaggagagcaaggagaagatgtgtgaaaatacagagcctgtggagaccagcagcaggaccaccaccaccgtgggcgccaccaccacccagttccgggtgctgaccaccacccggcgggctgtgaccagccagttccccaccagcctgcccacagaagatgacaccaagatcgccctgcacctgaaggacaacggggccagcacagatgattctgctgctgagaagaagggcggcaccctgcacgccggcctcatcatcggcatcctgatcctggtgctgattgtggccacagccatcctggtgacagtgtacatgtaccaccaccccaccagcgctgccagcatcttcttcatcgagcggcggcccagccgctggccagccatgaagttcagaagaggcagcggccacccagcctatgcagaggtggagcctgtgggggagaaggagggcttcatcgtgtctgagcagtgctag

SEQ ID NO: 225732 - DNA, 1548 bp, Artificial Sequence
  derived and/or modified sequence
atgctgctgtgccacttcttcacagaccagttccagtttgctgatggcaagccaggggaccagatcctggactggcagtatggagtgacccaggccttcccccacacagaggaggaggtggaggtggacagccacgcctacagccaccgctggaagaggaacctggacttcctgaaggctgtggacaccaacagagcctctgtgggccaggacagccctgagcccaggagcttcacagacctgctgctggatgatggccaggacaacaacacccagatcgaggaggacacagaccacaactactacatcagccgcatctacggccccagcgacagcgccagccgggacctgtgggtgaacatcgaccagatggagaaggacaaggtgaagatccacggcatcctgagcaacacccaccggcaggccgcccgggtgaacctgagctttgacttccccttctacggccacttcctgcgggagatcaccgtggccactggaggcttcatctacacaggagaggtggtgcacaggatgctgacagccacccagtacatcgcccccctgatggccaactttgaccccagcgtgtccaggaacagcacagtgcgctactttgacaatggaacagccctggtggtgcagtgggaccacgtgcacctgcaggacaactacaacctgggcagcttcaccttccaggccaccctgctgatggatggccgcatcatcttcggctacaaggagatccctgtgctggtgacccagatcagcagcaccaaccaccctgtgaaggtgggcctgagtgatgcctttgtggtggtgcaccgcatccagcagatccccaacgtgagaagaaggaccatctatgagtaccaccgggtggagctgcagatgagcaagatcaccaacatctctgctgtggagatgacccccctgcccacctgcctgcagttcaacagatgtggcccctgtgtgagcagccagatcggcttcaactgctcctggtgcagcaagctgcagcgctgcagcagcggctttgacagacaccggcaggactgggtggacagcggctgcccagaggagagcaaggagaagatgtgtgaaaatacagagcctgtggagaccagcagcaggaccaccaccaccgtgggcgccaccaccacccagttccgggtgctgaccaccacccggcgggctgtgaccagccagttccccaccagcctgcccacagaagatgacaccaagatcgccctgcacctgaaggacaacggggccagcacagatgattctgctgctgagaagaagggcggcaccctgcacgccggcctcatcatcggcatcctgatcctggtgctgattgtggccacagccatcctggtgacagtgtacatgtaccaccaccccaccagcgctgccagcatcttcttcatcgagcggcggcccagccgctggccagccatgaagttcagaagaggcagcggccacccagcctatgcagaggtggagcctgtgggggagaaggagggcttcatcgtgtctgagcagtgctag

SEQ ID NO: 225733 - DNA, 1179 bp, Artificial Sequence
  derived and/or modified sequence
atggagaaggacaaggtgaagatccacggcatcctgagcaacacccacaggcaagccgcaagggtcaatctaagcttcgatttccctttctacgggcattttctgcgggagattacggttgccactggcggctttatttatacaggcgaggtggtgcaccggatgctcacagctactcagtacattgctccactgatggcaaacttcgatccttccgtgtccaggaactccactgtgcggtatttcgataatggcaccgccttagtggtccaatgggatcacgttcatctccaggataactacaatctgggaagtttcacgttccaagcaacactgctgatggacgggaggattatcttcggatacaaggagatacccgtattagttactcagatatctagcactaaccaccccgtcaaagtggggctgagcgacgcgttcgtggtcgtgcaccgtatccagcagatcccgaacgttcggagacgtacaatctatgagtatcatagggtcgaacttcagatgagcaagatcacaaacatcagcgctgttgagatgacccctttgccaacatgtctccagtttaatagatgcggcccgtgcgtgtcttctcagatcggcttcaactgcagctggtgtagtaagttgcagcggtgttcgagcggctttgacagacacagacaggattgggtggactcaggatgtcctgaggagtccaaggaaaaaatgtgcgaaaatactgaacctgtggaaacatcctctaggactaccacaaccgtgggagctaccactacacagttcagagtgctgacaaccacccgcagggctgttacctcccagtttccaacaagcctgccgacagaagatgacacgaaaatagctctgcatctaaaggacaatggagcatccaccgatgactcagccgccgagaaaaaaggggggactctacacgctggactgatcatcggcatattgattctcgttctcatcgttgctacagccatcctggtcacagtgtacatgtaccaccatcccacgtctgctgctagcattttcttcatcgagagaaggccctcccgctggcctgccatgaaatttcgacgaggcagcgggcatcctgcctatgccgaagttgagcctgtgggcgagaaggaaggcttcattgtgtcagaacagtgttag

SEQ ID NO: 225734 - DNA, 1590 bp, Artificial Sequence
  derived and/or modified sequence
atggcccggttccccaaggccgacctggccgccgccggcgtgatgttgctatgccacttttttactgatcaattccaattcgcggacggtaagcctggcgaccaaattctagattggcagtacggcgtgactcaggcttttccacataccgaggaggaagttgaagtagactcccacgcgtactctcacaggtggaagcgcaacttggacttcctcaaagccgtcgatacaaacagggcgagcgtcgggcaggactccccggaaccaagatcattcaccgatttgctgctggatgatggacaggataacaacacccagatagaagaggacacggaccacaattattatattagccgcatatacggtcctagcgatagcgcctcccgcgacctgtgggtgaacatagatcagatggaaaaggataaggtcaaaatccacggaattctttctaacacccatagacaggcggcccgagtgaacctctcattcgattttccattttatggccattttcttagagagataacagttgcgacaggggggtttatctatacgggcgaagttgtgcaccggatgctgaccgcgacacagtacattgcacctctgatggctaattttgacccatctgtatccaggaacagcacagtgcgctactttgacaacggcacagctctagttgtccagtgggaccacgtgcacctccaagataactacaatctgggcagttttacattccaggctacactgctgatggacggcagaataatattcggctataaggagattccagtactggttacccagatttcaagcaccaatcaccctgtcaaagtgggactctctgatgcctttgttgtggtgcatcgcattcaacagatccccaatgtgcgcagaagaaccatctatgagtatcatagagtcgagctgcagatgtcaaagattacaaatattagtgctgtcgaaatgaccccactgccaacttgcctgcaattcaataggtgtgggccttgtgtgagtagccagatcggctttaattgcagctggtgctctaagctccagcggtgttcaagcggattcgaccgccatcggcaggattgggtcgattcaggatgccctgaggagagtaaggaaaaaatgtgcgagaacaccgaacccgtggagacttcatcacggaccacaaccaccgtgggcgcaactaccactcagttccgggtcctgacaaccacacgacgcgcggtgacctcacagtttcccacaagtttgcctactgaggacgacacaaagatcgccctgcacctaaaagataatggagcgtcaacggatgacagcgccgctgagaagaagggtggcaccctgcatgctggcttgatcattggaattctgattctggtgctcatcgtcgccacagccattttagtgaccgtatacatgtaccaccaccctacaagcgccgccagcatcttcttcattgaaaggaggccatcaagatggccagcgatgaagtttagaaggggctccggacacccagcctacgccgaagttgagccagtcggggaaaaagaaggtttcattgtgagtgagcaatgctag

SEQ ID NO: 225735 - DNA, 1548 bp, Artificial Sequence
  derived and/or modified sequence
atgctgctgtgccacttcttcaccgaccagttccagttcgccgacggcaagccgggtgaccagatcctggactggcagtatggggtaactcaggcctttcctcatacagaagaggaagtcgaagtcgacagccatgcctacagtcaccgctggaaaagaaatcttgatttcctgaaagcagtcgacacaaatcgcgcctcagtcggtcaggactctcccgagccacgtagcttcaccgacctcctgcttgacgatggacaagataacaacacccaaatcgaagaggataccgaccacaactactatatcagccgtatctatggcccatccgacagtgcatcacgagacctatgggtgaacattgaccagatggagaaggataaggtgaagatacacggtattttaagcaatacccataggcaggcagccagagtcaatctttccttcgatttcccattctatggacatttcttacgggaaatcaccgtggctactggcggctttatatatactggcgaggtggtgcatcgcatgctgactgccacacagtatatcgcacctctgatggctaatttcgatccatccgttagccggaatagcacagtccgttacttcgacaatggcactgccctggtggtccagtgggatcatgtgcatctacaggataactacaatctgggctcatttacatttcaggccaccctgctgatggatggccgcatcatctttgggtacaaagaaatcccagttctagtgacgcaaatttcgtccactaatcatcccgtcaaggttgggctttcggatgccttcgtcgtagtacatcggattcaacaaatcccgaacgttcggaggcggaccatctatgaataccacagagtggagcttcagatgtccaaaatcacaaacatttctgcagtggagatgactcctctccctacgtgtctgcagttcaaccggtgcggtccctgtgtcagcagccagattggtttcaactgctcttggtgctcaaaactccagagatgctcgtctgggttcgaccgccaccgacaagactgggtggacagtggttgccctgaggagtccaaagaaaagatgtgcgagaataccgaacctgtggagacatccagcaggacaacgacaaccgtgggcgccaccaccacgcaattccgcgtccttactaccactcgccgggccgtaacgtcccagtttccaacatctctgccaactgaagacgatactaaaatagccctccacttaaaagataatggcgcatcaaccgacgattcagccgcagagaagaagggaggaactctacacgcggggcttatcatcgggatcctgatcctggtgcttatcgttgcgaccgctatcttagttaccgtgtatatgtaccaccaccccacaagcgccgcaagcatatttttcatcgaacgtcgacccagtcgatggcctgccatgaagtttaggaggggtagtggccaccctgcctacgcggaagtggaacctgtgggcgaaaaggaggggtttatagtgtctgagcagtgttag

SEQ ID NO: 225736 - DNA, 3068 bp, Artificial Sequence
  derived and/or modified sequence
ggcgacggcagcgcctcctccgccaccaaactcctggggctccgcgggggcttggggccacctcctcctgagcccggaggaaccctctcccgataggttccagcgtgactccctcccactccacccttttcctttcttcttcctcttttttttttttttttttaaacacatttttttcctggcttcggacctcagactgctgcagccctaaccttcccagggctcagctctttggagctgcccattcctccggctgcgagaaaggacgcgcgccctgcgtcgggcgaagaaaagaagcaaaacttgtcgggagggtttcgtcatcaacctccttcccgcaaacctaaacctcctgccggggccatccctagacagaggaaagttcctgcagagccgaccagccctagtggatctggggcaggcagcggcgctggctgtggaattagatctgttttgaacccagtggagcgcatcgctggggctcggaagtcaccgtccgcgggcaccgggttggcgctgcccgagtggaaccgacagtttgcgagcctcggctgcaagtggcctctcctccccgcggttgttgttcagtgtcgggtgagggctgcgagtgtggcaagttgcaaagagagcctcagaggtccgaagagcgctgcgctcctactcgcgttcgcttcttcctcttctcggttccctactgtgaaatcgcagcgacatttacaaaggcctccgggtcctaccgagaccgatccgcagcgtttggcccggtcgtgcctattgcatcgggagcccccgagcaccggcgaaggactggcgggtggggtagggaggtggcggcggcggcatggcgaggttcccgaaggccgacctggccgctgcaggagttatgttactttgccacttcttcacggaccagtttcagttcgccgatgggaaacccggagaccaaatccttgattggcagtatggagttactcaggccttccctcacacagaggaggaggtggaagttgattcacacgcgtacagccacaggtggaaaagaaacttggactttctcaaggcggtagacacgaaccgagcaagcgtcggccaagactctcctgagcccagaagcttcacagacctgctgctggatgatgggcaggacaataacactcagatcgagttttggcaggtctgatttaagaaaaactgaaggtgtattttcacatagtatgtcagtggtagacttcgtaattagactaaatcgtgtatatttttgcaggaggatacagaccacaattactatatatctcgaatatatggtccatctgattctgccagccgggatttatgggtgaacatagaccaaatggaaaaagataaagtgaagattcatggaatattgtccaatactcatcggcaagctgcaagagtgaatctgtccttcgattttccattttatggccacttcctacgtgaaatcactgtggcaaccgggggtttcatatacactggagaagtcgtacatcgaatgctaacagccacacagtacatagcacctttaatggcaaatttcgatcccagtgtatccagaaattcaactgtcagatattttgataatggcacagcacttgtggtccagtgggaccatgtacatctccaggataattataacctgggaagcttcacattccaggcaaccctgctcatggatggacgaatcatctttggatacaaagaaattcctgtcttggtcacacagataagttcaaccaatcatccagtgaaagtcggactgtccgatgcatttgtcgttgtccacaggatccaacaaattcccaatgttcgaagaagaacaatttatgaataccaccgagtagagctacaaatgtcaaaaattaccaacatttcggctgtggagatgaccccattacccacatgcctccagtttaacagatgtggcccctgtgtatcttctcagattggcttcaactgcagttggtgtagtaaacttcaaagatgttccagtggatttgatcgtcatcggcaggactgggtggacagtggatgccctgaagagtcaaaagagaagatgtgtgagaatacagaaccagtggaaacttcttctcgaaccaccacaaccgtaggagcgacaaccacccagttcagggtcctaactaccaccagaagagcagtgacttctcagtttcccaccagcctccctacagaagatgataccaagatagcactacatctaaaagataatggagcttctacagatgacagtgcagctgagaagaaagggggaaccctccacgctggcctcatcattggaatcctcatcctggtcctcattgtagccacagccattcttgtgacagtctatatgtatcaccacccaacatcagcagccagcatcttctttattgagagacgcccaagcagatggcctgcgatgaagtttagaagaggctctggacatcctgcctatgctgaagttgaaccagttggagagaaagaaggctttattgtatcagagcagtgctaaaatttctaggacagaacaacaccagtactggtttacaggtgttaagactaaaattttgcctatacctttaagacaaacaaacaaacacacacacaaacaagctctaagctgctgtagcctgaagaagacaagatttctggacaagctcagcccaggaaacaaagggtaaacaaaaaactaaaacttatacaagataccatttacactgaacatagaattccctagtggaatgtcatctatagttcactcggaacatctcccgtggacttatctgaagtatgacaagattataatgcttttggcttaggtgcagggttgcaaagggatcagaaaaaaaaaatcataataaagctttagttcatgagggatcgacacctttggttcaaatgttctctgatgtctcaaagataactgttttccaaagcctgaaccctttcactcaaaagagcaatgatgaatgtctcaagattgctaagaaaaacagcccatgcaagagtgagaacaaacacaaaataagagattttctacattttcaaaa

SEQ ID NO: 225737 - DNA, 2969 bp, Artificial Sequence
  derived and/or modified sequence
ggcgacggcagcgcctcctccgccaccaaactcctggggctccgcgggggcttggggccacctcctcctgagcccggaggaaccctctcccgataggttccagcgtgactccctcccactccacccttttcctttcttcttcctcttttttttttttttttttaaacacatttttttcctggcttcggacctcagactgctgcagccctaaccttcccagggctcagctctttggagctgcccattcctccggctgcgagaaaggacgcgcgccctgcgtcgggcgaagaaaagaagcaaaacttgtcgggagggtttcgtcatcaacctccttcccgcaaacctaaacctcctgccggggccatccctagacagaggaaagttcctgcagagccgaccagccctagtggatctggggcaggcagcggcgctggctgtggaattagatctgttttgaacccagtggagcgcatcgctggggctcggaagtcaccgtccgcgggcaccgggttggcgctgcccgagtggaaccgacagtttgcgagcctcggctgcaagtggcctctcctccccgcggttgttgttcagtgtcgggtgagggctgcgagtgtggcaagttgcaaagagagcctcagaggtccgaagagcgctgcgctcctactcgcgttcgcttcttcctcttctcggttccctactgtgaaatcgcagcgacatttacaaaggcctccgggtcctaccgagaccgatccgcagcgtttggcccggtcgtgcctattgcatcgggagcccccgagcaccggcgaaggactggcgggtggggtagggaggtggcggcggcggcatggcgaggttcccgaaggccgacctggccgctgcaggagttatgttactttgccacttcttcacggaccagtttcagttcgccgatgggaaacccggagaccaaatccttgattggcagtatggagttactcaggccttccctcacacagaggaggaggtggaagttgattcacacgcgtacagccacaggtggaaaagaaacttggactttctcaaggcggtagacacgaaccgagcaagcgtcggccaagactctcctgagcccagaagcttcacagacctgctgctggatgatgggcaggacaataacactcagatcgaggaggatacagaccacaattactatatatctcgaatatatggtccatctgattctgccagccgggatttatgggtgaacatagaccaaatggaaaaagataaagtgaagattcatggaatattgtccaatactcatcggcaagctgcaagagtgaatctgtccttcgattttccattttatggccacttcctacgtgaaatcactgtggcaaccgggggtttcatatacactggagaagtcgtacatcgaatgctaacagccacacagtacatagcacctttaatggcaaatttcgatcccagtgtatccagaaattcaactgtcagatattttgataatggcacagcacttgtggtccagtgggaccatgtacatctccaggataattataacctgggaagcttcacattccaggcaaccctgctcatggatggacgaatcatctttggatacaaagaaattcctgtcttggtcacacagataagttcaaccaatcatccagtgaaagtcggactgtccgatgcatttgtcgttgtccacaggatccaacaaattcccaatgttcgaagaagaacaatttatgaataccaccgagtagagctacaaatgtcaaaaattaccaacatttcggctgtggagatgaccccattacccacatgcctccagtttaacagatgtggcccctgtgtatcttctcagattggcttcaactgcagttggtgtagtaaacttcaaagatgttccagtggatttgatcgtcatcggcaggactgggtggacagtggatgccctgaagagtcaaaagagaagatgtgtgagaatacagaaccagtggaaacttcttctcgaaccaccacaaccgtaggagcgacaaccacccagttcagggtcctaactaccaccagaagagcagtgacttctcagtttcccaccagcctccctacagaagatgataccaagatagcactacatctaaaagataatggagcttctacagatgacagtgcagctgagaagaaagggggaaccctccacgctggcctcatcattggaatcctcatcctggtcctcattgtagccacagccattcttgtgacagtctatatgtatcaccacccaacatcagcagccagcatcttctttattgagagacgcccaagcagatggcctgcgatgaagtttagaagaggctctggacatcctgcctatgctgaagttgaaccagttggagagaaagaaggctttattgtatcagagcagtgctaaaatttctaggacagaacaacaccagtactggtttacaggtgttaagactaaaattttgcctatacctttaagacaaacaaacaaacacacacacaaacaagctctaagctgctgtagcctgaagaagacaagatttctggacaagctcagcccaggaaacaaagggtaaacaaaaaactaaaacttatacaagataccatttacactgaacatagaattccctagtggaatgtcatctatagttcactcggaacatctcccgtggacttatctgaagtatgacaagattataatgcttttggcttaggtgcagggttgcaaagggatcagaaaaaaaaaatcataataaagctttagttcatgagggatcgacacctttggttcaaatgttctctgatgtctcaaagataactgttttccaaagcctgaaccctttcactcaaaagagcaatgatgaatgtctcaagattgctaagaaaaacagcccatgcaagagtgagaacaaacacaaaataagagattttctacattttcaaaa

SEQ ID NO: 225738 - DNA, 2230 bp, Artificial Sequence
  derived and/or modified sequence
gctgcagccctaaccttcccagggctcagctctttggagctgcccattcctccggctgcgagaaaggacgcgcgccctgcgtcgggcgaagaaaagaagcaaaacttgtcgggagggtttcgtcatcaacctccttcccgcaaacctaaacctcctgccggggccatccctagacagaggaaagttcctgcagagccgaccagccctagtggatctggggcaggcagcggcgctggctgtggaattagatctgttttgaacccagtggagcgcatcgctggggctcggaagtcaccgtccgcgggcaccgggttggcgctgcccgagtggaaccgacagtttgcgagcctcggctgcaagtggcctctcctccccgcggttgttgttcagtgtcgggtgagggctgcgagtgtggcaagttgcaaagagagcctcagaggtccgaagagcgctgcgctcctactcgcgttcgcttcttcctcttctcggttccctactgtgaaatcgcagcgacatttacaaaggcctccgggtcctaccgagaccgatccgctgcaggagttatgttactttgccacttcttcacggaccagtttcagttcgccgatgggaaacccggagaccaaatccttgattggcagtatggagttactcaggccttccctcacacagaggaggaggtggaagttgattcacacgcgtacagccacaggtggaaaagaaacttggactttctcaaggcggtagacacgaaccgagcaagcgtcggccaagactctcctgagcccagaagcttcacagacctgctgctggatgatgggcaggacaataacactcagatcgaggaggatacagaccacaattactatatatctcgaatatatggtccatctgattctgccagccgggatttatgggtgaacatagaccaaatggaaaaagataaagtgaagattcatggaatattgtccaatactcatcggcaagctgcaagagtgaatctgtccttcgattttccattttatggccacttcctacgtgaaatcactgtggcaaccgggggtttcatatacactggagaagtcgtacatcgaatgctaacagccacacagtacatagcacctttaatggcaaatttcgatcccagtgtatccagaaattcaactgtcagatattttgataatggcacagcacttgtggtccagtgggaccatgtacatctccaggataattataacctgggaagcttcacattccaggcaaccctgctcatggatggacgaatcatctttggatacaaagaaattcctgtcttggtcacacagataagttcaaccaatcatccagtgaaagtcggactgtccgatgcatttgtcgttgtccacaggatccaacaaattcccaatgttcgaagaagaacaatttatgaataccaccgagtagagctacaaatgtcaaaaattaccaacatttcggctgtggagatgaccccattacccacatgcctccagtttaacagatgtggcccctgtgtatcttctcagattggcttcaactgcagttggtgtagtaaacttcaaagatgttccagtggatttgatcgtcatcggcaggactgggtggacagtggatgccctgaagagtcaaaagagaagatgtgtgagaatacagaaccagtggaaacttcttctcgaaccaccacaaccgtaggagcgacaaccacccagttcagggtcctaactaccaccagaagagcagtgacttctcagtttcccaccagcctccctacagaagatgataccaagatagcactacatctaaaagataatggagcttctacagatgacagtgcagctgagaagaaagggggaaccctccacgctggcctcatcattggaatcctcatcctggtcctcattgtagccacagccattcttgtgacagtctatatgtatcaccacccaacatcagcagccagcatcttctttattgagagacgcccaagcagatggcctgcgatgaagtttagaagaggctctggacatcctgcctatgctgaagttgaaccagttggagagaaagaaggctttattgtatcagagcagtgctaaaatttctaggacagaacaacaccagtactggtttacaggtgttaagactaaaattttgcctatacctttaagacaaacaaacaaacacacacacaaacaagctctaagctgctgtagcc

SEQ ID NO: 225739 - DNA, 1179 bp, Artificial Sequence
  derived and/or modified sequence
atggagaaagacaaggtcaagatccacgggattctgtcaaacactcaccgacaggccgctcgggtcaatctgagttttgactttcctttttacggccattttctgagagagattacggtggcgaccggcggttttatttacactggcgaagtggtgcacagaatgctgacggctactcagtacatagcccctctgatggctaattttgaccctagcgtaagtagaaatagtaccgtgagatattttgataacggtacggccctggttgttcagtgggatcacgtacacctccaggacaattacaatttgggcagttttacctttcaagctacactactaatggacgggaggataattttcggatataaagaaatccccgttctggtaactcagatctctagtacgaatcatcctgtgaaagtgggactgtcagatgctttcgttgtcgtgcaccggattcagcagattccgaacgtcaggaggaggaccatttatgaatatcatcgggtcgagctgcagatgagtaagatcacgaacatctccgctgtcgagatgactcctttacctacctgtctccagttcaatcggtgcggcccatgcgtttctagccagatcgggtttaattgctcctggtgcagtaagttacagcggtgttccagtgggtttgacaggcaccggcaagactgggtggactcaggctgccccgaggagtcgaaggagaagatgtgtgagaacaccgaacctgtggaaacgagcagcagaacgaccaccactgtgggcgcaacaacaactcagttcagagtgctcacgacaaccaggagagccgtcaccagtcagtttccgaccagtctccccacggaggacgatacaaagatcgcgctgcatcttaaggacaacggagcttctaccgacgactccgcagccgaaaaaaaggggggtacactccatgcaggccttatcattggcattctgatcctggtactgatagtggcaaccgcgatcttggtgacagtgtacatgtaccatcatcctacaagtgccgcatccatcttctttattgagcgacgcccaagtcggtggcccgcaatgaagttccgacgcggatccggccacccagcgtatgccgaagtggaaccagttggcgaaaaagaaggattcatcgtgagcgagcaatgctag

SEQ ID NO: 225740 - DNA, 1590 bp, Artificial Sequence
  derived and/or modified sequence
atggccagatttcccaaggctgacttagctgctgccggagtcatgcttctctgccactttttcacagatcagttccagtttgctgacgggaagccaggcgaccagatcctcgactggcaatacggcgtaacgcaagcatttccccatacagaagaggaagttgaggttgattcacacgcgtactctcatcggtggaagcgcaatctggacttcttgaaggccgtggatacaaaccgagcttccgtagggcaggacagccccgagcctcggtcattcaccgatctcctcttggatgatggccaagataacaatacccagattgaggaggacaccgaccataactattatatatcccgaatttacggccctagcgactctgctagcagagacctttgggttaatatcgaccagatggagaaggacaaagttaagattcatggtatcctgtcaaacacccaccgacaggccgcaagagtgaatttgtccttcgacttccccttttacgggcattttctgcgtgagatcacagtggcaaccggaggctttatatataccggagaggtcgtgcaccggatgctgacagctacccagtatatcgcaccactcatggcaaacttcgatcctagtgtttcccgaaattccacagtgcggtatttcgacaatgggacagcccttgtggtccaatgggatcatgtgcacttgcaggacaactacaacctggggagtttcacatttcaggccaccttactcatggacggccgtatcatttttgggtacaaggaaatccctgtgttggtgacccagattagctcaaccaaccacccagtcaaggtcggcctctctgacgctttcgtggtggtacacagaatccaacagataccgaacgttcgtaggcgcacaatttatgagtatcatcgcgtggaactgcagatgagcaagattaccaatatttctgctgtggagatgacccctcttcctacctgtttgcagtttaacaggtgtggcccttgtgttagctcacagataggcttcaattgcagctggtgtagtaaattgcagcggtgtagctctgggtttgatagacaccgccaagactgggtggatagcggttgccctgaggagtcaaaagagaaaatgtgcgaaaataccgagcctgtggagaccagtagtcgcacaaccaccactgtgggcgctacgaccactcaattccgtgttctgacgacgaccaggagagctgttacaagtcaatttcccacttccctgccgacagaagacgacacaaaaatcgctctgcacctgaaggacaatggtgcgtcaacagatgatagcgctgccgaaaagaagggcggtacactgcacgccggattgataatcggcatcctcattctcgtgctcatcgtagccaccgctatcctcgtaacagtgtacatgtatcaccatccaaccagcgccgcatctatcttcttcatcgaaaggaggccatctcggtggcccgcaatgaagttcagacggggatcaggacatccggcttacgccgaagtggagcctgtcggtgagaaggagggctttatcgtctccgagcagtgttag

SEQ ID NO: 225741 - DNA, 1548 bp, Artificial Sequence
  derived and/or modified sequence
atgctgttgtgtcacttcttcacagatcaattccagttcgcagatggtaaaccaggtgaccagatcctcgactggcagtatggcgtcacccaggcctttccacacaccgaggaggaggtcgaggtagactcccacgcttattcccatagatggaagagaaacctcgattttctgaaggcggtggacaccaatagagctagtgttggacaggacagtccagagcccagaagttttactgatctcctgctcgacgacgggcaggacaacaatacacagatcgaagaagacaccgatcataactattatatatcacgaatatacgggccaagcgactcagcttcccgggacctgtgggtaaacatcgaccagatggaaaaagataaagtaaagatacacggcatccttagcaatacacaccgccaggccgcacgggtgaacctgtcctttgactttccattttacggccactttttgagggagataaccgtcgccacagggggatttatctacacaggcgaagtggtccacagaatgctgactgctacacagtacattgcgcctctgatggccaattttgatccatcagtgagtcggaactccaccgtccgctactttgacaacggtacagccctggtggtgcagtgggaccacgtccacttacaggataactacaacctaggttccttcacatttcaggccacactgcttatggatggtagaatcatcttcggctataaggagatccccgtactcgtcacccagataagtagtacaaaccacccggtcaaggttggcctgagtgatgcctttgtcgttgttcatcggatccagcagatcccaaacgtccggaggcgaacaatttacgaataccatagggtggagctgcagatgagcaagatcaccaatatatccgctgtcgagatgacacccttgccgacgtgtctgcagtttaaccgatgcgggccttgtgtatcaagccagattgggtttaattgcagctggtgttctaagctgcagcgatgttccagcggttttgaccgtcacaggcaggactgggtggactccggctgccccgaggaatccaaggagaaaatgtgcgagaacacagaacctgtcgagaccagctcgagaaccaccacaacggttggcgctactacaacacagttcagagtactcactaccacccggagagctgtaaccagccaatttcctacatccctccccacagaggacgacacgaagatcgcgttgcatcttaaggataacggagcctcgacagacgactccgcagctgaaaagaagggtggcactctgcatgccggactgatcattgggatattaatcctggtccttatcgtggccacggcaattctggtgacagtttatatgtaccaccaccccacgagtgctgccagcatctttttcatcgagcgtagacctagtagatggccagccatgaagttccgcagaggctccggccatcctgcctatgcggaagttgagccagttggcgaaaaagagggctttattgtttccgaacagtgttag

SEQ ID NO: 225742 - DNA, 1179 bp, Artificial Sequence
  derived and/or modified sequence
atggagaaggacaaggtgaagatccacggcatcctgagcaacacccacagacaggccgccagagtgaacctgagcttcgacttccccttctacggccacttcctgagagagatcaccgtggccaccggcggcttcatctacaccggcgaggtggtgcacagaatgctgaccgccacccagtacatcgcccccctgatggccaacttcgaccccagcgtgagcagaaacagcaccgtgagatacttcgacaacggcaccgccctggtggtgcagtgggaccacgtgcacctgcaggacaactacaacctgggcagcttcaccttccaggccaccctgctgatggacggcagaatcatcttcggctacaaggagatccccgtgctggtgacccagatcagcagcaccaaccaccccgtgaaggtgggcctgagcgacgccttcgtggtggtgcacagaatccagcagatccccaacgtgagaagaagaaccatctacgagtaccacagagtggagctgcagatgagcaagatcaccaacatcagcgccgtggagatgacccccctgcccacctgcctgcagttcaacagatgcggcccctgcgtgagcagccagatcggcttcaactgcagctggtgcagcaagctgcagagatgcagcagcggcttcgacagacacagacaggactgggtggacagcggctgccccgaggagagcaaggagaagatgtgcgagaacaccgagcccgtggagaccagcagcagaaccaccaccaccgtgggcgccaccaccacccagttcagagtgctgaccaccaccagaagagccgtgaccagccagttccccaccagcctgcccaccgaggacgacaccaagatcgccctgcacctgaaggacaacggcgccagcaccgacgacagcgccgccgagaagaagggcggcaccctgcacgccggcctgatcatcggcatcctgatcctggtgctgatcgtggccaccgccatcctggtgaccgtgtacatgtaccaccaccccaccagcgccgccagcatcttcttcatcgagagaagacccagcagatggcccgccatgaagttcagaagaggcagcggccaccccgcctacgccgaggtggagcccgtgggcgagaaggagggcttcatcgtgagcgagcagtgctag

SEQ ID NO: 225743 - DNA, 1590 bp, Artificial Sequence
  derived and/or modified sequence
atggccagattccccaaggccgacctggccgccgccggcgtgatgctgctgtgccacttcttcaccgaccagttccagttcgccgacggcaagcccggcgaccagatcctggactggcagtacggcgtgacccaggccttcccccacaccgaggaggaggtggaggtggacagccacgcctacagccacagatggaagagaaacctggacttcctgaaggccgtggacaccaacagagccagcgtgggccaggacagccccgagcccagaagcttcaccgacctgctgctggacgacggccaggacaacaacacccagatcgaggaggacaccgaccacaactactacatcagcagaatctacggccccagcgacagcgccagcagagacctgtgggtgaacatcgaccagatggagaaggacaaggtgaagatccacggcatcctgagcaacacccacagacaggccgccagagtgaacctgagcttcgacttccccttctacggccacttcctgagagagatcaccgtggccaccggcggcttcatctacaccggcgaggtggtgcacagaatgctgaccgccacccagtacatcgcccccctgatggccaacttcgaccccagcgtgagcagaaacagcaccgtgagatacttcgacaacggcaccgccctggtggtgcagtgggaccacgtgcacctgcaggacaactacaacctgggcagcttcaccttccaggccaccctgctgatggacggcagaatcatcttcggctacaaggagatccccgtgctggtgacccagatcagcagcaccaaccaccccgtgaaggtgggcctgagcgacgccttcgtggtggtgcacagaatccagcagatccccaacgtgagaagaagaaccatctacgagtaccacagagtggagctgcagatgagcaagatcaccaacatcagcgccgtggagatgacccccctgcccacctgcctgcagttcaacagatgcggcccctgcgtgagcagccagatcggcttcaactgcagctggtgcagcaagctgcagagatgcagcagcggcttcgacagacacagacaggactgggtggacagcggctgccccgaggagagcaaggagaagatgtgcgagaacaccgagcccgtggagaccagcagcagaaccaccaccaccgtgggcgccaccaccacccagttcagagtgctgaccaccaccagaagagccgtgaccagccagttccccaccagcctgcccaccgaggacgacaccaagatcgccctgcacctgaaggacaacggcgccagcaccgacgacagcgccgccgagaagaagggcggcaccctgcacgccggcctgatcatcggcatcctgatcctggtgctgatcgtggccaccgccatcctggtgaccgtgtacatgtaccaccaccccaccagcgccgccagcatcttcttcatcgagagaagacccagcagatggcccgccatgaagttcagaagaggcagcggccaccccgcctacgccgaggtggagcccgtgggcgagaaggagggcttcatcgtgagcgagcagtgctag

SEQ ID NO: 225744 - DNA, 1548 bp, Artificial Sequence
  derived and/or modified sequence
atgctgctgtgccacttcttcaccgaccagttccagttcgccgacggcaagcccggcgaccagatcctggactggcagtacggcgtgacccaggccttcccccacaccgaggaggaggtggaggtggacagccacgcctacagccacagatggaagagaaacctggacttcctgaaggccgtggacaccaacagagccagcgtgggccaggacagccccgagcccagaagcttcaccgacctgctgctggacgacggccaggacaacaacacccagatcgaggaggacaccgaccacaactactacatcagcagaatctacggccccagcgacagcgccagcagagacctgtgggtgaacatcgaccagatggagaaggacaaggtgaagatccacggcatcctgagcaacacccacagacaggccgccagagtgaacctgagcttcgacttccccttctacggccacttcctgagagagatcaccgtggccaccggcggcttcatctacaccggcgaggtggtgcacagaatgctgaccgccacccagtacatcgcccccctgatggccaacttcgaccccagcgtgagcagaaacagcaccgtgagatacttcgacaacggcaccgccctggtggtgcagtgggaccacgtgcacctgcaggacaactacaacctgggcagcttcaccttccaggccaccctgctgatggacggcagaatcatcttcggctacaaggagatccccgtgctggtgacccagatcagcagcaccaaccaccccgtgaaggtgggcctgagcgacgccttcgtggtggtgcacagaatccagcagatccccaacgtgagaagaagaaccatctacgagtaccacagagtggagctgcagatgagcaagatcaccaacatcagcgccgtggagatgacccccctgcccacctgcctgcagttcaacagatgcggcccctgcgtgagcagccagatcggcttcaactgcagctggtgcagcaagctgcagagatgcagcagcggcttcgacagacacagacaggactgggtggacagcggctgccccgaggagagcaaggagaagatgtgcgagaacaccgagcccgtggagaccagcagcagaaccaccaccaccgtgggcgccaccaccacccagttcagagtgctgaccaccaccagaagagccgtgaccagccagttccccaccagcctgcccaccgaggacgacaccaagatcgccctgcacctgaaggacaacggcgccagcaccgacgacagcgccgccgagaagaagggcggcaccctgcacgccggcctgatcatcggcatcctgatcctggtgctgatcgtggccaccgccatcctggtgaccgtgtacatgtaccaccaccccaccagcgccgccagcatcttcttcatcgagagaagacccagcagatggcccgccatgaagttcagaagaggcagcggccaccccgcctacgccgaggtggagcccgtgggcgagaaggagggcttcatcgtgagcgagcagtgctag

SEQ ID NO: 225745 - protein, 783 aa, Artificial Sequence
  derived and/or modified sequence
MLLGFRRGRRSHFKHIIHGLLPAASVAPKAAVPRTPPPRSPNPSPERPRSALAAAILATTLTGRTVAIPQPRQRSRSESDVSSVEQDSFIEPYATTSQLRPRPNWQSEMGRRSSLPSFETLDYGDEEDIETQLSSSGKELGDVSAREDRGGHSDDLYAVPHRNQVPLLHEVNSEDDENISHQDGFPGSPPAPQRTQQKDGKHPVLNLKDEKPPLCEKPPPSPDITGRARQRYTEITREKFEALKEENMDLNNMNQSLTLELNTMKQAMKELQLKLKGMEKEKRKLKEAEKASSQEVAAPELLYLRKQAQELVDENDGLKMTVHRLNVELSRYQTKFRHLSKEESLNIEGLPSKGPIPPWLLDIKYLSPLLLAYEDMMKEKDELNATLKEEMRMFRMRVQEVVKENEELHQELNKSSAVTSEEWRQLQTQAKLVLEENKLLLEQLEIQQRKAKDSHQERLQEVSKLTKQLMLLEAKTHGQEKELAENREQLEILRAKCQELKTHSDGKIAVEVHKSIVNELKSQLQKEEEKERAEMEELMEKLTVLQAQKKSLLLEKNSLTEQNKALEAELERAQKINRKSQKKIEVLKKQVEKAMGNEMSAHQYLANLVGLAENITQERDSLMCLAKCLESEKDGVLNKVIKSNIRLGKLEEKVKGYKKQAALKLGDISHRLLEQQEDFAGKTAQYRQEMRHLHQVLKDKQEVLDQALQQNREMEGELEVIWESTFRENRRIRELLQDTLTRTGVQDNPRALVAPSLNGVSQADLLDGCDVCSYDLKSHAPTC

SEQ ID NO: 225746 - DNA, 2352 bp, Artificial Sequence
  derived and/or modified sequence
atgcttttagggttccgacggggtagaagaagccacttcaagcacatcatacacggactgcttccggccgctagcgtggctcccaaagctgcagtcccacgcacacccccccctcgcagccccaatcctagtccggagcggccacggtccgctctggcagctgccattctggccactacacttacaggtagaactgtggcaattccgcagccacgacaacggtctcggtccgaatctgacgtttcttccgtagaacaagacagcttcatagagccatacgcaacaacatcacagctgcgtcccaggccaaactggcagagtgagatgggacgaaggagctctctgccttcctttgaaactcttgattacggagacgaagaggatattgaaacccaactgagtagcagcggtaaggagcttggcgacgtgtccgctcgcgaggacagagggggacactcggatgatctgtacgctgtcccacacaggaaccaggttccacttctgcatgaagtcaactctgaggatgatgagaacatctctcatcaggatgggttcccggggtctcctccagccccccagagaacccaacagaaggacggtaaacaccccgtgctgaacctcaaagatgaaaaaccacctctgtgcgagaagcccccccccagccccgatatcacaggaagggctcgacaaagatataccgaaatcaccagagagaaattcgaggctctcaaagaagagaacatggatctgaataatatgaaccagagcctgactttagaattgaacaccatgaagcaggcaatgaaagagcttcagctgaagttgaaggggatggagaaagaaaagcgtaagctaaaggaggccgagaaggcctcatcacaggaggtagcagcccctgaactgctgtacctgagaaaacaggcgcaggaactggtggatgagaatgacggactaaagatgacagttcaccggctgaatgtggagcttagccgctatcagactaagttcaggcacctatccaaggaggaaagcctcaatattgaagggctgccgagcaagggccctattcctccttggttgcttgatataaagtatcttagcccattgctgttagcctatgaagacatgatgaaggaaaaggatgagctcaatgccacattgaaagaggaaatgcgaatgtttaggatgagagtccaagaggtcgtgaaagaaaacgaagaactgcaccaagagctaaacaagagcagcgccgtgaccagtgaggagtggaggcaacttcagacccaagccaagctcgttcttgaggagaataaactcctgctggaacagctcgagattcagcagagaaaggcaaaggacagccaccaagagagactgcaggaagtgtccaagctgacaaaacagttgatgctgttagaagcaaaaacgcacgggcaggagaaagagctggcggagaatcgggaacagctggagatcctcagggccaagtgtcaagaactgaaaacacacagcgacggcaagatcgccgtggaggtgcataaatctattgtgaatgagttaaagagccagctgcaaaaagaagaagagaaagagagggccgaaatggaagagcttatggagaagctgacagtgttgcaagcacagaagaagagtctgctcctggaaaagaatagcctgaccgaacagaacaaagccctcgaggccgagttggaaagggcccagaaaatcaaccggaaaagccagaaaaagattgaggttctcaaaaaacaggtcgaaaaagcaatgggcaacgagatgagtgcacaccagtacttagccaaccttgtcgggcttgcagagaacattacacaggaaagagattctctcatgtgccttgctaagtgtctggagtccgagaaggacggcgtgctgaacaaagtgattaagtccaatatccgattagggaagctcgaggagaaggtgaaggggtataagaagcaggccgcattaaagctgggcgacatctctcacaggctgctggaacaacaggaggatttcgctggcaagacagcacagtaccgccaggagatgcggcatttacaccaggttctcaaggacaagcaagaggtccttgaccaggcccttcagcagaaccgcgagatggagggcgaacttgaggtaatttgggagtctaccttccgcgagaataggagaataagagagctgctgcaggataccctcaccagaacaggggtccaggataatccacgggctctggtggcacccagtctgaatggggtcagccaggcagatttgctggacgggtgcgatgtctgtagttacgacttaaagagccacgcacccacttgttag

SEQ ID NO: 225747 - DNA, 2352 bp, Artificial Sequence
  derived and/or modified sequence
atgctgctgggcttccggcggggcagaagaagccacttcaagcacatcatccacggcctgctgcctgctgcctctgtggcccccaaggctgctgtgcccaggaccccaccacccaggagccccaaccccagccctgagcggcccaggtctgccctggccgccgccatcctggccaccaccctgaccggccgcacagtggccatcccccagccccggcagaggagccgctctgagagtgatgtgtcctctgtggagcaggacagcttcatcgagccctatgccaccaccagccagctgcggccccggcccaactggcagagcgagatgggcagaagaagcagcctgcccagctttgagaccctggactatggagatgaagaagatattgagacccagctgagcagcagcggcaaggagctgggagatgtgtctgccagagaagatcggggcggccacagtgatgacctgtatgctgtgccccacaggaaccaggtgcccctgctgcacgaggtgaacagtgaagatgatgagaacatcagccaccaggacggcttccctggcagccccccagccccccagaggacccagcagaaggatggcaagcaccctgtgctgaacctgaaggatgagaagccacccctgtgtgagaagcccccacccagcccagacatcaccggccgggcccggcagcgctacacagagatcacccgggagaagtttgaggccctgaaggaggagaacatggacctgaacaacatgaaccagagcctgaccctggagctgaacaccatgaagcaggccatgaaggagctgcagctgaagctgaagggcatggagaaggagaagaggaagctgaaggaggccgagaaggccagcagccaggaggtggccgcccctgagctgctgtacctgaggaagcaggcccaggagctggtggatgaaaatgatggcctgaagatgacagtgcaccggctgaatgtggagctgagccgctaccagaccaagttccgccacctgagcaaggaggagagcctgaacatcgagggcctgcccagcaagggccccatccccccctggctgctggacatcaagtacctgagccccctgctgctggcctatgaggacatgatgaaggagaaggatgagctgaatgccaccctgaaggaggagatgaggatgttcaggatgagggtgcaggaggtggtgaaggaaaatgaggagctgcaccaggagctgaacaagagcagcgctgtgaccagcgaggagtggaggcagctgcagacccaggccaagctggtgctggaggagaacaagctgctgctggagcagctggagatccagcagaggaaggccaaggacagccaccaggagcggctgcaggaggtgtccaagctgaccaagcagctgatgctgctggaggccaagacccacggccaggagaaggagctggctgaaaatcgggagcagctggagatcctgcgggccaagtgccaggagctgaagacccacagtgatggcaagattgctgtggaggtgcacaagagcatcgtgaatgagctgaagagccagctgcagaaggaggaggagaaggagagagctgagatggaggagctgatggagaagctgactgtgctgcaggcccagaagaagagcctgctgctggagaagaacagcctgacagagcagaacaaggccctggaggccgagctggagcgggcccagaagatcaacaggaagagccagaagaagattgaggtgctgaagaagcaggtggagaaggccatgggaaatgagatgtctgcccaccagtacctggccaacctggtgggcctggccgagaacatcacccaggagcgggacagcctgatgtgcctggccaagtgcctggagagcgagaaggatggagtgctgaacaaggtgatcaagagcaacatccggctgggcaagctggaggagaaggtgaagggctacaagaagcaggccgccctgaagctgggggacatcagccaccggctgctggagcagcaggaggactttgctgggaagacagcccagtaccggcaggagatgaggcacctgcaccaggtgctgaaggacaagcaggaggtgctggaccaggccctgcagcagaaccgggagatggagggggagctggaggtgatctgggagagcaccttccgggagaacagacgcatccgggagctgctgcaggacaccctgaccaggactggagtgcaggacaacccccgggccctggtggcccccagcctgaatggagtgtcccaggccgacctgctggatggctgtgatgtgtgcagctatgacctgaagagccacgcccccacctgctag

SEQ ID NO: 225748 - DNA, 2352 bp, Artificial Sequence
  derived and/or modified sequence
atgctgctgggcttccggcggggccggcggagccacttcaagcacatcattcatgggttactccctgctgcctctgtggcccccaaagccgccgtcccccgcacccctcctcctcgctcgcctaacccatcacccgaacgccctcgatcagcccttgctgcggccatccttgctaccaccctgacaggaaggactgtcgccattccccaaccacgccagaggagcaggtctgagtctgatgtttcctctgttgaacaggattcgttcatagaaccttatgctactactagccagctgcggcctaggcccaattggcagtcagagatgggacggcgatcatcccttccgtctttcgaaactcttgactatggggatgaagaagatattgagacccaactgagtagcagtgggaaagaactcggggacgtcagtgcccgggaagacagaggcgggcactctgatgatctctatgccgtccctcacaggaaccaggtgcctctattacacgaggtgaattccgaggatgacgagaatataagccatcaggatgggttccctggatcaccgcccgccccacaaagaacccagcagaaagacgggaagcaccccgtgcttaacctaaaggatgaaaagccacccttgtgcgagaagccccctccttctcccgacatcacagggcgagcccgacaaaggtatactgagatcacacgcgagaaattcgaggcactgaaggaagaaaacatggacctgaataacatgaaccaatcattaacccttgagctgaatacaatgaagcaggcgatgaaggagctgcagctgaagctgaaaggaatggagaaggagaagagaaagctgaaagaggccgagaaagcctccagccaggaggtagcagcccccgaattactttacttacgcaagcaggcccaggagctcgtagacgaaaatgacggcctgaagatgaccgtgcatagactcaacgtggaactcagtcggtaccaaactaagttccgccacctttctaaagaagagagtctaaacatcgaggggctcccttcaaaaggtcccatacctccctggttgctggacatcaagtaccttagccctcttctgttggcttacgaggacatgatgaaggaaaaagacgagctgaacgctacgctcaaggaagaaatgcggatgtttaggatgcgggtccaagaggtcgtcaaagagaatgaagagcttcaccaggaactgaacaagtcatccgccgtcaccagcgaagagtggaggcagctgcagactcaagccaagttagtcctggaggagaacaaactactcttggagcaactggagattcaacagagaaaggctaaggatagtcaccaggagaggctgcaggaagtgagtaaactcacaaagcagttgatgttactcgaagctaagacccacggccaggaaaaagagcttgctgagaatcgcgagcaattggagatcctccgagcaaagtgccaggagctaaagacccactctgatggtaagatcgcagtggaagttcacaaatcaatcgtaaatgaactaaagtctcagctccagaaggaagaagaaaaagaacgggcagaaatggaggagctgatggaaaagctcacggttctgcaggcacagaaaaagagtctgctgctggaaaagaattccctgaccgagcagaacaaggcacttgaagctgaacttgagagagctcagaagatcaaccggaaatcccagaagaagatcgaagtgctcaagaaacaggtagaaaaggcaatgggcaacgaaatgagtgcccatcagtacctggcgaacctcgtgggcctcgccgaaaatatcacccaggagcgggacagtcttatgtgcctagccaagtgccttgagtctgaaaaggatggtgtgctgaataaagtgattaagtctaatattagactgggcaaactggaggagaaggtaaagggatataagaagcaggcggctttaaaactgggcgacatctcccacaggttactggagcagcaggaagattttgctgggaagactgcacagtatcgtcaggagatgaggcatctacatcaggtgcttaaggataaacaggaggtcttggatcaggcactccaacagaatagggagatggaaggggagctagaagttatttgggaaagtacgttccgagaaaatagacgaattagagaattgctgcaggatactttaactcgcaccggagtccaggataaccctcgagcacttgtagcgcctagcctgaacggcgtgtctcaggcggatctgctggacggctgcgacgtctgctcctacgacctcaaatcccatgctcccacttgctag

SEQ ID NO: 225749 - DNA, 2352 bp, Artificial Sequence
  derived and/or modified sequence
atgctgctggggtttcggcgtggcaggagatcgcacttcaagcacattattcatggacttttgcccgctgcttctgtcgcacctaaggcagccgtacctcggacccccccacctcgcagtccgaacccctctcctgagagacccaggagcgcactcgctgctgctatcctggctaccactctgactggtagaaccgtggcaatcccacaaccccgacagcgtagccgctccgagtcggatgtgtcctctgtggagcaggattcgtttatcgagccttacgccaccacttcccagttacgtccgaggccgaattggcagagcgaaatggggagaaggtcctcccttccatctttcgaaactttagactatggcgatgaagaggacattgagactcaactgagctcatccggcaaggaactgggcgacgtgtccgctcgggaggaccgcggaggacacagcgatgacctgtacgcggttccccacagaaaccaggtccccctgttgcacgaagtgaactcagaggatgatgagaacatatcgcatcaagatggattccctgggagtccacctgctccacagaggacccagcagaaagatgggaaacacccggtcctgaacctcaaggatgaaaaacccccactgtgcgagaagccgccaccttccccagatattacaggacgcgctaggcagagatacaccgagattactcgcgaaaaatttgaggccttgaaagaagagaacatggatctgaacaatatgaaccagtctctgacgctcgagcttaatactatgaagcaggcgatgaaagagcttcagttaaagcttaaaggaatggaaaaggagaagagaaaactcaaggaagccgaaaaggcaagtagccaggaagtagctgctcccgaattgctgtacctgaggaagcaggctcaggagcttgttgatgaaaatgacggcctgaaaatgactgtccaccggttaaatgtcgagttgtcccggtaccagacgaaatttaggcacctatctaaggaggaatctctcaacatagagggccttcctagcaaaggcccaattccaccttggcttctggatattaagtacctgtctcctcttcttttggcctatgaagatatgatgaaggagaaggatgagctgaacgcaaccctgaaggaagagatgagaatgttccgaatgcgcgtgcaggaggtggtgaaggagaacgaagaattacatcaagaactcaataagtcatccgcggtgaccagtgaagaatggcggcagctacagacgcaggccaaattggtacttgaagagaataaacttctgctggaacagctagagatacagcaacggaaagccaaagatagccatcaagagcgacttcaggaagtgagtaagctgaccaagcaactcatgctgctggaagcaaaaactcacggccaggagaaggagctggctgagaatcgcgagcaacttgagatcctccgtgctaagtgtcaggagctaaagacgcactctgacgggaagatcgcagtggaagtacataagtccattgtgaatgagttgaaatcccagttgcagaaagaagaggaaaaagagcgggctgaaatggaggagctgatggagaaactgaccgttttgcaggcccagaagaagagcctccttctggaaaagaacagcttgaccgagcagaacaaagcacttgaagccgagttggagagagctcagaagatcaatcggaagagccagaagaagatcgaggtcttgaagaagcaagtcgaaaaagctatgggcaacgagatgtctgcgcaccagtacttagcaaacctcgtagggctggctgaaaacatcacgcaagagcgcgactctttgatgtgcctcgccaaatgtctggaaagtgagaaagatggggtgctgaataaagtgatcaagagcaacatcagacttggaaagttggaagagaaagtgaagggctataagaagcaggctgctctgaagctgggcgatattagccaccggctgctggagcagcaagaggactttgctgggaagaccgcccaatataggcaggagatgcgccatctgcaccaggtgcttaaagacaagcaggaagtactagaccaggcgctccaacagaatcgggaaatggagggagaactcgaagtgatttgggaaagtactttccgcgaaaacaggcgaatacgagagttactacaggatacccttacccgaacgggcgtacaggacaacccacgcgcactcgtggctccgtccctgaatggcgtgagccaggcagatctgctggacggatgcgatgtctgttcatatgatctcaagtcccacgctccaacatgctag

SEQ ID NO: 225750 - DNA, 2601 bp, Artificial Sequence
  derived and/or modified sequence
cctgcggcgggctttagggagtggtccctggctgtggatagatctgctgatgagtccaggccccggtccattctcctcgcgctgcaaggatgctcctgggatttcggagaggccgcaggagtcatttcaaacacatcatccatggccttttacctgcagccagcgttgctccgaaggcagctgtgccacgcacacctcctccccgcagccccaacccatctccagagagaccaagatctgctctggcagcagccattctggcgacaacattgactgggcggacggttgctattcctcagcctcgccagaggtcccggtctgagagtgatgtgagcagtgttgaacaggacagcttcatcgagccctatgccaccacctcacagctgaggcctcggccaaattggcagagtgagatgggaagaagatcttctttgccatcctttgaaacactggactatggggacgaagaggacattgaaactcagctgtcatccagcggcaaggaattgggggatgtcagtgcccgggaggacagaggaggccacagtgatgacctgtacgctgtgccacacagaaatcaggtgccattgttacatgaggtgaacagtgaagacgatgaaaatatttctcatcaagatgggtttccaggctcccctcctgcaccacagcggacacaacaaaaagatggtaaacaccctgttctgaatttaaaggatgaaaaacctccattatgtgagaaacctccaccctccccagatataactggtagagcacgtcaaagatatacagaaataaccagagaaaagtttgaggcattaaaagaagaaaatatggacctaaacaatatgaatcaaagccttacccttgaactaaacacaatgaaacaagcaatgaaagaactacagttaaaacttaagggaatggaaaaagagaagagaaagctcaaagaggctgagaaggcgtcgtcacaggaagttgctgcacctgaattactttatctgcgaaaacaagctcaagaactggtggatgaaaatgatggattgaaaatgactgtccatcgtttgaatgtagaactcagtcgatatcagacaaaattcaggcatttgtccaaggaagagagcttaaatattgaaggcctcccatccaagggccctataccaccctggttgttggatataaagtacctgtcaccattgttgctggcttatgaagatatgatgaaagagaaggacgagctcaatgccaccctcaaggaggaaatgagaatgtttaggatgcgagtccaagaagtggtgaaagaaaatgaagaattgcaccaagagttaaataagagtagtgctgttaccagtgaggaatggcgtcagcttcagactcaagcaaaactggttttagaggaaaacaagttgttgctggagcagttggagattcagcaaaggaaagccaaggacagccaccaggagcgcctccaagaagtttctaagctgactaaacaactaatgctcctggaggcaaaaacccacggccaggaaaaggagctggcggagaacagggaacagctggagattttacgtgccaaatgccaagaactcaaaacacactcggatggcaaaatcgcagtggaagttcataaatcaattgtgaatgaattaaaaagccaattacagaaggaagaagagaaagaaagggctgagatggaggagttgatggagaagctgacagtcctgcaagcgcagaagaagagcctgctgttagagaagaacagtttgacagagcaaaacaaagcactggaagccgaacttgaacgagcacagaaaatcaataggaaatctcaaaagaaaattgaggtcctcaaaaagcaggtggaaaaagccatggggaacgaaatgtctgctcatcagtacctggcaaaccttgttggcctggcagaaaacataacccaggaacgtgacagtcttatgtgtttggcaaaatgtttagaaagtgagaaggatggagtgcttaataaagtcataaaaagcaacattcgcctgggaaagttagaggaaaaagtcaagggctacaagaagcaggcagcactgaagctgggggacatcagtcaccgtctgctggagcagcaggaggacttcgccggcaagacagcccagtaccggcaggagatgcggcacctgcaccaggtgctgaaggacaagcaggaggtgctggaccaggcgctgcagcagaacagagaaatggaaggtgaacttgaagttatttgggaatctaccttcagggaaaaccgaagaatccgagaacttctccaggacacactcacgaggacaggcgtgcaggacaaccccagagctctggttgcccccagcctcaatggcgtctctcaggcagacctgctggacggctgcgatgtctgctcctatgacctgaagtctcatgcccccacctgctagaatctgcgggagcccgtggtgtagcctcctctggcctgaaaggtctgcctcacacaggccttccctgcagggcagcccatggtggcagccggaggtgcgtaagcccactgaacgctgcagggcagggaagaaataaatggtctcatagtttaatccattg

SEQ ID NO: 225751 - DNA, 2352 bp, Artificial Sequence
  derived and/or modified sequence
atgctgctgggcttcagaagaggcagaagaagccacttcaagcacatcatccacggcctgctgcccgccgccagcgtggcccccaaggccgccgtgcccagaacccccccccccagaagccccaaccccagccccgagagacccagaagcgccctggccgccgccatcctggccaccaccctgaccggcagaaccgtggccatcccccagcccagacagagaagcagaagcgagagcgacgtgagcagcgtggagcaggacagcttcatcgagccctacgccaccaccagccagctgagacccagacccaactggcagagcgagatgggcagaagaagcagcctgcccagcttcgagaccctggactacggcgacgaggaggacatcgagacccagctgagcagcagcggcaaggagctgggcgacgtgagcgccagagaggacagaggcggccacagcgacgacctgtacgccgtgccccacagaaaccaggtgcccctgctgcacgaggtgaacagcgaggacgacgagaacatcagccaccaggacggcttccccggcagcccccccgccccccagagaacccagcagaaggacggcaagcaccccgtgctgaacctgaaggacgagaagccccccctgtgcgagaagcccccccccagccccgacatcaccggcagagccagacagagatacaccgagatcaccagagagaagttcgaggccctgaaggaggagaacatggacctgaacaacatgaaccagagcctgaccctggagctgaacaccatgaagcaggccatgaaggagctgcagctgaagctgaagggcatggagaaggagaagagaaagctgaaggaggccgagaaggccagcagccaggaggtggccgcccccgagctgctgtacctgagaaagcaggcccaggagctggtggacgagaacgacggcctgaagatgaccgtgcacagactgaacgtggagctgagcagataccagaccaagttcagacacctgagcaaggaggagagcctgaacatcgagggcctgcccagcaagggccccatccccccctggctgctggacatcaagtacctgagccccctgctgctggcctacgaggacatgatgaaggagaaggacgagctgaacgccaccctgaaggaggagatgagaatgttcagaatgagagtgcaggaggtggtgaaggagaacgaggagctgcaccaggagctgaacaagagcagcgccgtgaccagcgaggagtggagacagctgcagacccaggccaagctggtgctggaggagaacaagctgctgctggagcagctggagatccagcagagaaaggccaaggacagccaccaggagagactgcaggaggtgagcaagctgaccaagcagctgatgctgctggaggccaagacccacggccaggagaaggagctggccgagaacagagagcagctggagatcctgagagccaagtgccaggagctgaagacccacagcgacggcaagatcgccgtggaggtgcacaagagcatcgtgaacgagctgaagagccagctgcagaaggaggaggagaaggagagagccgagatggaggagctgatggagaagctgaccgtgctgcaggcccagaagaagagcctgctgctggagaagaacagcctgaccgagcagaacaaggccctggaggccgagctggagagagcccagaagatcaacagaaagagccagaagaagatcgaggtgctgaagaagcaggtggagaaggccatgggcaacgagatgagcgcccaccagtacctggccaacctggtgggcctggccgagaacatcacccaggagagagacagcctgatgtgcctggccaagtgcctggagagcgagaaggacggcgtgctgaacaaggtgatcaagagcaacatcagactgggcaagctggaggagaaggtgaagggctacaagaagcaggccgccctgaagctgggcgacatcagccacagactgctggagcagcaggaggacttcgccggcaagaccgcccagtacagacaggagatgagacacctgcaccaggtgctgaaggacaagcaggaggtgctggaccaggccctgcagcagaacagagagatggagggcgagctggaggtgatctgggagagcaccttcagagagaacagaagaatcagagagctgctgcaggacaccctgaccagaaccggcgtgcaggacaaccccagagccctggtggcccccagcctgaacggcgtgagccaggccgacctgctggacggctgcgacgtgtgcagctacgacctgaagagccacgcccccacctgctag

SEQ ID NO: 225752 - protein, 742 aa, Artificial Sequence
  derived and/or modified sequence
MRNYDSGPPPSTVINQNETFANIIFKPTVVQQARIAQNGILGDFIIRYDVNREQSIGDIQVLNGYFVHYFAPKDLPPLPKNVVFVLDSSASMVGTKLRQTKDALFTILHDLRPQDRFSIIGFSNRIKVWKDHLISVTPDSIRDGKVYIHHMSPTGGTDINGALQRAIRLLNKYVAHSGIGDRSVSLIVFLTDGKPTVGETHTLKILNNTREAARGQVCIFTIGIGNDVDFRLLEKLSLENCGLTRRVHEEEDAGSQLIGFYDEIRTPLLSDIRIDYPPSSVVQATKTLFPNYFNGSEIIIAGKLVDRKLDHLHVEVTASNSKKFIILKTDVPVRPQKAGKDVTGSPRPGGDGEGDTNHIERLWSYLTTKELLSSWLQSDDEPEKERLRQRAQALAVSYRFLTPFTSMKLRGPVPRMDGLEEAHGMSAAMGPEPVVQSVRGAGTQPGPLLKKPYQPRIKISKTSVDGDPHFVVDFPLSRLTVCFNIDGQPGDILRLVSDHRDSGVTVNGELIGAPAPPNGHKKQRTYLRTITILINKPERSYLEITPSRVILDGGDRLVLPCNQSVVVGSWGLEVSVSANANVTVTIQGSIAFVILIHLYKKPAPFQRHHLGFYIANSEGLSSNCHGLLGQFLNQDARLTEDPAGPSQNLTHPLLLQVGEGPEAVLTVKGHQVPVVWKQRKIYNGEEQIDCWFARNNAAKLIDGEYKDYLAFHPFDTGMDTWPGNVQGALKLAALKMQVHEGQ

SEQ ID NO: 225753 - DNA, 2229 bp, Artificial Sequence
  derived and/or modified sequence
atgaggaattatgactccggaccccccccatcgactgtgataaatcaaaatgagacgttcgccaacataatctttaagccaactgtggtacagcaggccagaatcgcacagaatggcattttaggtgacttcatcattagatatgacgtgaaccgagagcagtctatcggcgacatccaggtacttaacggatactttgtgcactactttgcacctaaagacctgcccccgttacccaagaacgtagtgttcgtgctcgacagtagcgcttcaatggtggggacaaagttgcggcaaactaaagatgcattgttcaccattttgcatgatctgaggcctcaggacagattcagcatcatagggttcagtaacaggataaaagtctggaaggatcacctgatctctgtcacacccgacagcattagggacggcaaggtttacatccatcacatgagcccgacaggaggtactgatatcaacggtgctctacagcgtgcaattagactgctcaataagtacgtcgcgcatagcggaatcggcgaccgctccgttagcctgattgtgttccttacagacggaaaacctactgtgggcgagacccacacactgaaaattttaaacaacacaagggaggctgcccgagggcaagtatgtatcttcaccatcggcatcggaaacgatgtggactttcggttgctggaaaagctgtccctcgagaactgtggtctcaccagacgggtccacgaggaagaagacgctggctcgcagctcataggattctatgatgaaatccgcacccctctactgagtgatattcgcatagactaccctccctctagcgtcgtccaagccaccaagacactatttcctaactattttaatggaagtgagatcatcattgctggtaagttagtggacagaaagctcgaccacctgcatgtggaagtgaccgcctcaaactcaaaaaagttcatcatccttaagaccgatgtgcctgtgcgtccgcagaaagcaggcaaagacgttacgggatccccccggcccgggggcgacggggagggtgataccaatcatattgaacggttatggagctacctcaccaccaaggagttactgtcctcctggctgcaatccgatgatgaacccgagaaggaaagactaaggcagagagcccaggccctggcggtctcttaccggtttttgaccccattcacctccatgaaactgagggggccggtcccaaggatggacggacttgaggaagcacatggcatgtcagcagccatgggcccggagccagtggttcaatctgtacgcggcgcagggactcaacctggccctctgctgaagaagccatatcagcccagaatcaagatcagcaagacttcagtggacggtgacccgcatttcgtagtggacttcccattgagccgcctgacagtttgcttcaatattgatggacagccaggcgacatccttcggctggttagtgatcatcgggactccggcgtgacagtcaatggggagctgattggagcgccggctccacctaatggtcataagaaacagcggacgtacctgcggactatcacaatactgataaataaacccgagcgttcttacctcgaaatcacaccgagcagggtaatcctcgatgggggggatcggctcgtactgccctgtaatcagtccgtggttgtgggcagctggggtctggaagtttccgtcagtgcgaacgcaaatgttacagtgacaatccaagggagtattgcatttgttatccttattcatctctataaaaagcccgcacctttccagcgacaccacctggggttctacattgcaaactcagagggtctgagctccaattgtcacggacttctgggacagttcctgaaccaggacgcccgccttacggaggatcctgcaggaccaagccagaaccttacccaccctctcctgctgcaggtgggggaggggcccgaggccgtcctcacggttaaggggcaccaggtgccagtagtgtggaagcagcggaaaatatataacggcgaagagcagattgactgttggttcgcccgcaataacgcggccaagcttatagacggggagtacaaggattatttagcattccatccctttgacactggcatggacacatggcctggtaacgtgcagggagccctgaaactggccgccctgaaaatgcaggtccatgaaggccagtag

SEQ ID NO: 225754 - DNA, 2917 bp, Artificial Sequence
  derived and/or modified sequence
cgccttgtagacgtgttcgctttgcgtttgccttctgcgtgattgtaagtttcccgaggcttccccagccatgcggaactatgattctgggcctcccccatctactgtcattaaccaaaatgaaacatttgccaacataatttttaaacctactgtagtacaacaagccaggattgcccagaatggaattttgggagactttatcattagatatgacgtcaatagagaacagagcattggggacatccaggttctaaatggctattttgtgcactactttgctcctaaagaccttcctcctttacccaagaatgtggtattcgtgcttgacagcagtgcttctatggtgggaaccaaactccggcagaccaaggatgccctcttcacaattctccatgacctccgaccccaggaccgtttcagtatcattggattttccaaccggatcaaagtatggaaggaccacttgatatcagtcactccagacagcatcagggatgggaaagtgtacattcaccatatgtcacccactggaggcacagacatcaacggggccctgcagagggccatcaggctcctcaacaagtacgtggcccacagtggcattggagaccggagcgtgtccctcatcgtcttcctgacggatgggaagcccacggtcggggagacgcacaccctcaagatcctcaacaacacccgagaggccgcccgaggccaagtctgcatcttcaccattggcatcggcaacgacgtggacttcaggctgctggagaaactgtcgctggagaactgtggcctcacacggcgcgtgcacgaggaggaggacgcaggctcgcagctcatcgggttctacgatgaaatcaggaccccgctcctctctgacatccgcatcgattatccccccagctcagtggtgcaggccaccaagaccctgttccccaactacttcaacggctcggagatcatcattgcggggaagctggtggacaggaagctggatcacctgcacgtggaggtcaccgccagcaacagtaagaaattcatcatcctgaagacagatgtgcctgtgcggcctcagaaggcagggaaagatgtcacaggaagccccaggcctggaggcgatggagagggggacaccaaccacatcgagcgtctctggagctacctcaccacaaaggagctgctgagctcctggctgcaaagtgacgatgaaccggagaaggagcggctgcggcagcgggcccaggccctggctgtgagctaccgcttcctcactcccttcacctccatgaagctgagggggccggtcccacgcatggatggcctggaggaggcccacggcatgtcggctgccatgggacccgaaccggtggtgcagagcgtgcgaggagctggcacgcagccaggacctttgctcaagaagccataccagccaagaattaaaatctctaaaacatcagtggatggtgatccccactttgttgtggatttccccctgagcagactcaccgtgtgcttcaacattgatgggcagcccggggacatcctcaggctggtctctgatcacagggactctggtgtcacagtgaacggagagttaattggggcacccgcccctccaaatggccacaagaaacagcgcacttacttgcgcactatcaccatcctcatcaacaagccagagagatcttatctcgagatcacaccgagcagagtcatcttggatggtggggacagactggtgctcccctgcaaccagagtgtggtggtggggagctgggggctggaggtgtccgtgtctgccaacgccaatgtcaccgtcaccatccagggctccatagcctttgtcatcctcatccacctctacaaaaagccggcgcccttccagcgacaccacctgggtttctacattgccaacagcgagggcctttccagcaactgccacggactgctgggtcagttcctgaatcaggatgccagactcacagaagaccctgcagggcccagccagaacctcactcaccctctgctccttcaggtgggagaggggcctgaggccgtcctaacagtgaaaggccaccaagtcccagtggtctggaagcaaaggaagatttacaacggggaagagcagatagactgctggtttgccaggaacaatgccgccaaactgattgacggggagtacaaggattacctggcattccatccatttgacacagggatggacacttggccggggaatgtccagggagctctgaagctggcagccttaaagatgcaagtgcatgaaggacagtgatgtggggaggccgtggggcagctcttttcatggcttgtacacgcctcagctcctggcaattagctggactccatgacccacccctggtgcagcatagatccgacgtctgtctgggcgaagggtaggggtgggtaggggcgggaagcctgagtgcaaatgtcatttccctctactgcctcttcctgcctctccccaccctgcccacatccacagaggggagagaagggtcatagctaaatgcaacaaagtctgtatcttgtcccaacctgcttttctgttctgttagcatatcataaagtaagcctttctggtgaaggaaggttgctatgaaactttttttcttggtggaaatggacaagtttaggcactctgctttttgccttacactaatgcttagaaagctgtcttttcagtggtgttgcagcccccagatgtgtggccaacctctgctgcaaaggaatctcttgctgagtccaggccaccaatcaggcaaatagcccatacatttgatcgttgtaaaccatgaagtcttttcttgcaagacgtttttcttctgctgtggtatcttgcccttaaaaattagttttcattaaaaagaaatttgattgaaaatagaaa

SEQ ID NO: 225755 - DNA, 2229 bp, Artificial Sequence
  derived and/or modified sequence
atgaggaactatgacagcggccccccacccagcaccgtcatcaaccagaatgagacctttgccaacatcatcttcaagcccaccgtggtgcagcaggccagaattgcccagaatggcatcctgggggacttcatcatccgctatgatgtgaaccgggagcagagcatcggggacatccaggtgctgaatggctactttgtgcactactttgcccccaaggacctgccccccctgcccaagaatgtggtgtttgtgctggacagcagcgcctccatggtgggcaccaagctgcggcagaccaaggatgccctcttcaccatcctgcatgacctgcggccccaggaccgcttcagcatcatcggcttcagcaaccgcatcaaggtgtggaaggaccacctgatctctgtgaccccagacagcatcagagatggcaaggtgtacatccaccacatgagccccaccggcggcacagacatcaacggggccctgcagagggccatccggctgctgaacaagtatgtggcccacagcggcattggagacagatctgtgtccctgattgtgttcctgacagatggcaagcccaccgtgggggagacccacaccctgaagatcctgaacaacacccgggaggccgcccggggccaggtgtgcatcttcaccatcggcattggaaatgatgtggacttccggctgctggagaagctgagcctggagaactgtggcctgaccaggagagtgcatgaggaggaggatgctggcagccagctgattggcttctatgatgagatccgcacccccctgctgagtgacatcagaattgactacccacccagctctgtggtgcaggccaccaagaccctcttccccaactacttcaacggcagcgagatcatcatcgccggcaagctggtggacaggaagctggaccacctgcacgtggaggtgacagccagcaacagcaagaagttcatcatcctgaagacagatgtgcctgtgcggccccagaaggccggcaaggatgtgacaggcagccccaggcctggaggagatggagagggggacaccaaccacatcgagcggctgtggagctacctgaccaccaaggagctgctgagctcctggctgcagagtgatgatgagcctgagaaggagcggctgcggcagagggcccaggccctggccgtgtcctaccgcttcctgacccccttcacctccatgaagctgcggggccctgtgcccaggatggatggcctggaggaggcccacggcatgtctgctgccatgggccctgagcctgtggtgcagagcgtgagaggagctggcacccagcccggccccctgctgaagaagccctaccagccccgcatcaagatcagcaagacctctgtggatggagacccccactttgtggtggacttccccctgagccggctgactgtgtgcttcaacattgatggccagcccggggacatcctgcggctggtgtctgaccaccgggacagcggcgtgacagtgaatggagagctgattggagccccagccccacccaacggccacaagaagcagaggacctacctgcggaccatcaccatcctgatcaacaagccagagaggagctacctggagatcacccccagcagggtcatcctggatggaggagaccggctggtgctgccctgcaaccagagcgtggtggtgggctcctggggcctggaggtgtctgtgtctgccaatgccaacgtgacagtgaccatccagggcagcatcgccttcgtcatcctgatccacctgtacaagaagccagcccccttccagaggcaccacctgggcttctacatcgccaacagcgagggcctgagcagcaactgccacggcctgctgggccagttcctgaaccaggatgcccggctgacagaggaccctgctggccccagccagaacctgacccaccccctgctgctgcaggtgggggagggccctgaggccgtgctgactgtgaagggccaccaggtgcctgtggtgtggaagcagaggaagatctacaatggagaggagcagattgactgctggtttgccaggaacaatgctgccaagctgattgatggagagtacaaggactacctggccttccacccctttgacaccggcatggacacctggccaggaaatgtgcagggcgccctgaagctggccgccctgaagatgcaggtgcatgagggccagtag

SEQ ID NO: 225756 - DNA, 2229 bp, Artificial Sequence
  derived and/or modified sequence
atgcggaactacgacagcggccccccccccagcaccgtgatcaaccagaacgagacctttgccaatatcatcttcaagccaaccgtcgtgcaacaagcacggattgcccagaatgggattcttggtgactttatcattcgctatgacgtaaaccgagaacagagcatcggtgatatccaggttttaaacggctattttgtccactattttgcgcccaaggacttaccgcccctccccaaaaatgtggttttcgtgctcgacagttccgctagcatggtaggaaccaagctccgacagaccaaggatgcactattcaccatcctgcacgacttgcgtcctcaggaccggttttccattatcggatttagtaaccgcataaaagtttggaaagaccacctgatatccgtaaccccagatagcatccgggacgggaaagtgtatatccaccatatgtctccaactggcgggacagacattaacggtgcgctacagcgcgctatccgcttgttgaataagtatgttgcgcactcaggaattggggacaggtccgtctcactcattgtttttctgacagacggtaagccaacggtcggagagactcacactttgaaaatcctgaacaacacaagggaggccgcgcggggacaggtgtgcatattcaccatcgggattggcaatgacgttgacttccgcctcttggagaagttatctttggagaattgtggccttacgcgacgcgtccacgaagaggaggacgccggaagccaactgataggcttttacgatgaaataaggactcctctgctatcagatattcgaatcgattatccgcccagcagcgtagtacaggcaacaaaaaccctgtttcctaattacttcaacggctcagagatcatcatagccggcaaactggtggaccgcaagctggaccatctccacgtggaggtgaccgcctccaatagcaagaaatttatcattttgaagaccgatgtgccagtccggccacagaaggcgggaaaggacgtgacagggagtcccaggcctggtggcgacggtgaaggtgacaccaatcacatcgaacgactgtggagctacttgacaaccaaagaattgctcagcagctggctacaatctgacgatgaaccagagaaggaacggttgcgtcagagagcccaggccttagcagtgtcctatcgattcctgactcctttcacatccatgaaattgcgcggtccagtcccacgaatggatggtcttgaagaagcccacggcatgagcgcagccatggggcccgaacctgtagtccagtctgttagaggcgccggaacccagcctggaccactgctgaaaaagccgtaccagccgcgaatcaaaatctccaaaaccagcgtcgacggtgacccacattttgtggtggattttccactctcacgcctgactgtctgttttaatattgatggccagccaggagatatcctgcgcttagtgagtgaccatcgcgattccggtgtgacagttaacggagagcttattggcgccccagccccaccaaacggacataagaagcaaagaacctacctgcggactatcaccatactgataaataagcccgagcggagctatctcgagataaccccctcccgagtgatcttggatggaggagaccgcctcgtattaccgtgcaaccaaagcgtggtggtggggtcttgggggctggaggtctccgtgtctgccaacgctaatgtgacagtgactattcagggctccattgctttcgtgatcctcatccacctttacaagaaaccagctccctttcaacgccaccacctggggttttacatcgcgaactccgagggtctgtcatcaaattgtcatggccttctgggccagttcctgaaccaggacgcccgtcttacagaggatcctgccggcccttctcaaaacctgacacatcccctgcttctccaggtaggggaaggccctgaggctgtcctgacagtgaaaggacatcaggtgccagtggtgtggaagcaaaggaagatctataacggagaagaacagatcgattgttggtttgctagaaataacgccgcaaagctcatcgatggcgagtacaaagattatctagcttttcacccattcgatacgggcatggacacctggcccggaaatgtgcagggcgctctcaagctggctgctctcaaaatgcaagtgcatgaaggccagtag

SEQ ID NO: 225757 - DNA, 2229 bp, Artificial Sequence
  derived and/or modified sequence
atgcgcaattatgactccggtccgcctccttctaccgtgatcaatcagaacgaaacattcgcgaatatcatcttcaagcctaccgtagtacagcaagccagaattgcacaaaacggaatactgggcgacttcatcatacggtacgacgtgaatcgtgagcaatcgattggagatatccaggtgttgaatggctacttcgtccactatttcgctcctaaggatttgccccctctgcctaagaacgtggtttttgtgcttgactcatcagcatccatggtgggaactaagttgcggcagacaaaagacgccctgttcaccattcttcacgaccttaggccacaggacagattctcaataattggattcagcaaccggataaaagtctggaaagatcatctcatctccgtgactcccgactccatccgcgacggcaaagtatacatacatcacatgtctcccacagggggaaccgacataaacggagcactccagcgggcaattaggctgttaaataagtacgttgcccactccggaatcggcgaccgctccgtttcgctaatcgtgttcctgactgacggcaaaccaacagtgggcgaaacgcacactctcaaaatactcaataataccagagaagcagcacggggacaggtatgtatttttaccattggcattggcaacgatgttgatttcaggctgctggaaaagctgtcattagagaactgcggcctgaccagaagggtgcatgaggaggaggatgctgggagccagctcatcggcttctatgatgagattcgcaccccactgctgtccgacatccgtatcgactatcctccgtcatctgttgttcaagccacaaagacgcttttcccaaattattttaacggatctgaaattatcatcgctggcaaactcgttgatcgaaagctggatcacctgcatgttgaagtaacagcctccaattcaaagaaattcattatactaaaaaccgatgtgcccgttcggcctcagaaagctggaaaagatgttacaggctcacccaggcctggaggtgacggagagggggacactaatcatatcgagagactgtggtcgtaccttactactaaagagttgctgagtagctggcttcagagcgacgatgaacccgaaaaggaacgcctgcgccagcgcgctcaggcactagctgtaagctaccggttcctgacccctttcacctcaatgaaactgagaggcccagtgccacgtatggacgggctcgaagaagcccatggcatgagtgccgctatggggccagaacctgtcgtccagtcagtccgtggggctggtacccaaccaggccctctcctgaaaaagccttaccagcctcgcataaagatttccaagactagcgtggacggggatcctcacttcgttgtggacttcccactctcacgcctgacggtctgctttaatatcgacggacagcctggagacatcctgagactggtgtctgaccatcgggactcaggggtgaccgtgaacggagagcttatcggcgcaccagcaccccctaacggacacaaaaagcaacgtacatacttgcgaacaataaccatcctgattaataagccagaaagatcttacctcgagattacaccaagcagggtcatactggatggcggtgaccggctcgtattaccctgcaaccagtctgtggtggtcggatcatggggcctggaggtttctgtttccgctaatgctaacgtgacagttacgattcaggggagcattgccttcgtcatcctgatccacttatacaaaaaacctgcaccattccagagacaccacctcgggttctatattgctaatagcgaaggcctgagcagtaattgccacggactccttggacaattcttaaaccaagatgcaagactcactgaggacccagctggcccaagccagaaccttacccatccactactactccaggtgggagaagggcctgaggccgtactgaccgtcaagggtcaccaggtgcccgttgtctggaaacagaggaagatctataacggggaggagcagattgattgctggttcgcaagaaacaacgcggcaaagctcatagacggggagtacaaggattacctggctttccatcctttcgatacgggaatggacacgtggcccggaaacgtgcaaggggcactgaagctagctgcgctcaagatgcaggtgcacgagggtcagtag

SEQ ID NO: 225758 - DNA, 2229 bp, Artificial Sequence
  derived and/or modified sequence
atgagaaactacgacagcggccccccccccagcaccgtgatcaaccagaacgagaccttcgccaacatcatcttcaagcccaccgtggtgcagcaggccagaatcgcccagaacggcatcctgggcgacttcatcatcagatacgacgtgaacagagagcagagcatcggcgacatccaggtgctgaacggctacttcgtgcactacttcgcccccaaggacctgccccccctgcccaagaacgtggtgttcgtgctggacagcagcgccagcatggtgggcaccaagctgagacagaccaaggacgccctgttcaccatcctgcacgacctgagaccccaggacagattcagcatcatcggcttcagcaacagaatcaaggtgtggaaggaccacctgatcagcgtgacccccgacagcatcagagacggcaaggtgtacatccaccacatgagccccaccggcggcaccgacatcaacggcgccctgcagagagccatcagactgctgaacaagtacgtggcccacagcggcatcggcgacagaagcgtgagcctgatcgtgttcctgaccgacggcaagcccaccgtgggcgagacccacaccctgaagatcctgaacaacaccagagaggccgccagaggccaggtgtgcatcttcaccatcggcatcggcaacgacgtggacttcagactgctggagaagctgagcctggagaactgcggcctgaccagaagagtgcacgaggaggaggacgccggcagccagctgatcggcttctacgacgagatcagaacccccctgctgagcgacatcagaatcgactacccccccagcagcgtggtgcaggccaccaagaccctgttccccaactacttcaacggcagcgagatcatcatcgccggcaagctggtggacagaaagctggaccacctgcacgtggaggtgaccgccagcaacagcaagaagttcatcatcctgaagaccgacgtgcccgtgagaccccagaaggccggcaaggacgtgaccggcagccccagacccggcggcgacggcgagggcgacaccaaccacatcgagagactgtggagctacctgaccaccaaggagctgctgagcagctggctgcagagcgacgacgagcccgagaaggagagactgagacagagagcccaggccctggccgtgagctacagattcctgacccccttcaccagcatgaagctgagaggccccgtgcccagaatggacggcctggaggaggcccacggcatgagcgccgccatgggccccgagcccgtggtgcagagcgtgagaggcgccggcacccagcccggccccctgctgaagaagccctaccagcccagaatcaagatcagcaagaccagcgtggacggcgacccccacttcgtggtggacttccccctgagcagactgaccgtgtgcttcaacatcgacggccagcccggcgacatcctgagactggtgagcgaccacagagacagcggcgtgaccgtgaacggcgagctgatcggcgcccccgccccccccaacggccacaagaagcagagaacctacctgagaaccatcaccatcctgatcaacaagcccgagagaagctacctggagatcacccccagcagagtgatcctggacggcggcgacagactggtgctgccctgcaaccagagcgtggtggtgggcagctggggcctggaggtgagcgtgagcgccaacgccaacgtgaccgtgaccatccagggcagcatcgccttcgtgatcctgatccacctgtacaagaagcccgcccccttccagagacaccacctgggcttctacatcgccaacagcgagggcctgagcagcaactgccacggcctgctgggccagttcctgaaccaggacgccagactgaccgaggaccccgccggccccagccagaacctgacccaccccctgctgctgcaggtgggcgagggccccgaggccgtgctgaccgtgaagggccaccaggtgcccgtggtgtggaagcagagaaagatctacaacggcgaggagcagatcgactgctggttcgccagaaacaacgccgccaagctgatcgacggcgagtacaaggactacctggccttccaccccttcgacaccggcatggacacctggcccggcaacgtgcagggcgccctgaagctggccgccctgaagatgcaggtgcacgagggccagtag

SEQ ID NO: 225759 - protein, 138 aa, Artificial Sequence
  derived and/or modified sequence
MAELQQLRVQEAVESMVKSLERENIRKMQGLMFRCSASCCEDSQASMKQVHQCIERCHVPLAQAQALVTSELEKFQDRLARCTMHCNDKAKDSIDAGSKELQVKQQLDSCVTKCVDDHMHLIPTMTKKMKEALLSIGK

SEQ ID NO: 225760 - DNA, 417 bp, Artificial Sequence
  derived and/or modified sequence
atggccgaactgcagcagttgagggttcaggaagcagtcgagtcaatggtcaagtcgctcgaaagagagaacattcggaagatgcagggactgatgttcaggtgcagtgcttcctgctgtgaggatagccaggcatccatgaaacaggttcatcagtgtattgagaggtgccatgtgcctcttgctcaggcacaagctctggtgacttctgagctggaaaagtttcaggataggctcgcaaggtgtacgatgcactgtaatgacaaagctaaagatagcatagatgcaggatccaaggaactgcaagttaagcagcagctggactcatgtgtaaccaaatgcgttgatgatcatatgcatctgatcccaacaatgactaaaaaaatgaaagaggcccttctatccattggaaaatag

SEQ ID NO: 225761 - DNA, 1810 bp, Artificial Sequence
  derived and/or modified sequence
gggcggtgagggggcgggcccgtacgccgattccatatgggcgccggcgcggagcgccgcggggcagcgcggggtcgccatggctgagctgcagcagctccgggtgcaggaggcggtggagtccatggtgaagagtctggaaagagagaacatccggaagatgcagggtctcatgttccggtgcagcgccagctgttgtgaggacagccaggcctccatgaagcaggtgcaccagtgcatcgagcgctgccatgtgcctctggctcaagcccaggctttggtcaccagtgagctggagaagttccaggaccgcctggcccggtgcaccatgcattgcaacgacaaagccaaagattcaatagatgctgggagtaaggagcttcaggtgaagcagcagctggacagttgtgtgaccaagtgtgtggatgaccacatgcacctcatcccaactatgaccaagaagatgaaggaggctctcttatcaattggaaaataaaagtatttgccagtggccatcagggctgagggcaagaatatattttttataaggaattgggaattttagtcttttaagcaaagtttacgaatgaagaaatgaaggatggccacaagcgtaaggcatatgtcacttgcctctggacactggttattttatgtttcagtccctaaaaaatgaaatggaaaaaagtggtgctaaatcgagtcagagatattacaggagagttttagagcttattatttcctgtggccagtgcttgtcctggcagtaaggctttcccctgtaacaagccagagccctccaaggtaccagactcttcttactacacaggtactaacaggctggcaggttagagttggtggagtctgaggagagatattttctctttgttgccaacatcctgtttaccaaaagtgtcaccccaccatcttccataagctgtgaaacaaaatcaatgaggtcactaacttagaagggaaagaaagttttctgggtctttgttttcttgatttggggtaatttatacaagggcatacaagttgattttaagatgtggaactgggaggtagactagtttggataagaactttgaaatgttccttgtggatccccatttctggtcatcaagatgtggatgtacatttcttaaaattattacatgctgcatctttcagcctggagactgtgcagaaacatgagaggtgatgacacactaattatgggaagcagaattactggctgatggcccctgaggctgtgtgtaacaaaatgacaggacaatcttgcagtaacactttccccttgaagagaagggggttttgattgtgatatatactagtatctaggaatgaacagtaaaagaggagcagttggctacttgattacaacagagtaaatgaagtactggatttgggaaaacctggttttattagaacatatggaatgaaagcctacacctagcattgcctacttagccccctgaattaacagagcccaattgagacaaacccctggcaacaggaaattcaagggagaaaaagtaagcaacttgggctaggatgagctgactcccttagagcaaaggagagacagcccccattaccaaataccatttttgcctggggcttgtgcagctggcagtgttcctgccccagcatggcaccttattgttttgatagcaacttcgttgaattttcaccaacttattacttgaaattataatatagcctgtccgtttgctgtttccaggctgtgatatattttcctagtggtttgactttaaaaataaataaggtttaattttctccccac

SEQ ID NO: 225762 - DNA, 417 bp, Artificial Sequence
  derived and/or modified sequence
atggccgagctgcagcagctgcgggtgcaggaggccgtggagagcatggtgaagagcctggagcgggagaacatcaggaagatgcagggcctgatgttccgctgcagcgccagctgctgtgaggacagccaggcctccatgaagcaggtgcaccagtgcatcgagcgctgccacgtgcccctggcccaggcccaggccctggtgaccagcgagctggagaagttccaggaccggctggcccgctgcaccatgcactgcaatgacaaggccaaggacagcattgatgctggcagcaaggagctgcaggtgaagcagcagctggacagctgtgtgaccaagtgtgtggatgaccacatgcacctgatccccaccatgaccaagaagatgaaggaggccctgctgagcatcggcaagtag

SEQ ID NO: 225763 - DNA, 417 bp, Artificial Sequence
  derived and/or modified sequence
atggccgagctgcagcagctgcgggtgcaggaggccgtggagagcatggtgaagtctctggaacgcgaaaatatcaggaaaatgcagggcctcatgtttcgttgttcggcctcatgctgcgaagatagccaggcatctatgaagcaggtccaccaatgcatcgaaaggtgccacgttccccttgcacaggctcaggccctggtgacatctgaactggaaaagtttcaggatcgccttgctcgctgtacaatgcattgtaatgataaagctaaggattccatcgacgcggggagtaaagagctgcaggtgaaacagcaattggactcatgtgtcactaagtgcgtcgacgaccacatgcatttaatcccaaccatgacgaagaagatgaaggaggcccttctgtctatcggaaagtag

SEQ ID NO: 225764 - DNA, 417 bp, Artificial Sequence
  derived and/or modified sequence
atggccgagctccagcagttacgggtgcaggaggcagtggaaagtatggttaagagtctagaacgggagaacataagaaaaatgcagggcttaatgtttagatgctcggccagttgttgtgaggactcgcaggcctcaatgaagcaggtgcaccagtgcatagagcggtgccatgtcccgctcgcccaagcccaggccctggtgacttccgagcttgagaaatttcaggacagacttgctagatgcacaatgcattgcaacgacaaagctaaggactccattgatgccggtagcaaagagttacaggtcaagcagcagctcgatagttgcgttacgaagtgtgtggatgatcacatgcacctgatacccaccatgactaagaagatgaaagaagcactgctgtctatcggcaagtag

SEQ ID NO: 225765 - DNA, 417 bp, Artificial Sequence
  derived and/or modified sequence
atggcggaactgcagcaactgagggtccaggaggccgtggaatccatggttaagagtttagaacgcgagaatatcagaaagatgcaggggctcatgttccggtgcagcgctagttgttgtgaggacagccaagccagcatgaagcaggtgcaccagtgtattgagcgatgccacgtgccacttgcccaggcccaggccctagtgacttcagagctcgaaaaatttcaagatcgattggctagatgcactatgcactgcaatgacaaagctaaggacagtatcgacgcaggttctaaagagctccaagtgaagcagcagctggactcttgtgtcactaagtgtgtcgatgaccatatgcatcttatcccaacaatgacaaagaaaatgaaggaggcccttttgtccatcggaaaatag

SEQ ID NO: 225766 - DNA, 417 bp, Artificial Sequence
  derived and/or modified sequence
atggcggaactgcagcaactgagggtccaggaggccgtggaatccatggttaagagtttagaacgcgagaatatcagaaagatgcaggggctcatgttccggtgcagcgctagttgttgtgaggacagccaagccagcatgaagcaggtgcaccagtgtattgagcgatgccacgtgccacttgcccaggcccaggccctagtgacttcagagctcgaaaaatttcaagatcgattggctagatgcactatgcactgcaatgacaaagctaaggacagtatcgacgcaggttctaaagagctccaggtgaaacaacagctcgattcttgtgtgactaagtgtgtagatgatcacatgcatctgattccaaccatgactaaaaaaatgaaagaggcactcctatctattggaaagtag

SEQ ID NO: 225767 - DNA, 417 bp, Artificial Sequence
  derived and/or modified sequence
atggccgagctgcagcagctgagagtgcaggaggccgtggagagcatggtgaagagcctggagagagagaacatcagaaagatgcagggcctgatgttcagatgcagcgccagctgctgcgaggacagccaggccagcatgaagcaggtgcaccagtgcatcgagagatgccacgtgcccctggcccaggcccaggccctggtgaccagcgagctggagaagttccaggacagactggccagatgcaccatgcactgcaacgacaaggccaaggacagcatcgacgccggcagcaaggagctgcaggtgaagcagcagctggacagctgcgtgaccaagtgcgtggacgaccacatgcacctgatccccaccatgaccaagaagatgaaggaggccctgctgagcatcggcaagtag

SEQ ID NO: 225768 - RNA, 417 nt, Artificial Sequence
  derived and/or modified sequence
auggcggaacugcagcaacugaggguccaggaggccguggaauccaugguuaagaguuuagaacgcgagaauaucagaaagaugcaggggcucauguuccggugcagcgcuaguuguugugaggacagccaagccagcaugaagcaggugcaccaguguauugagcgaugccacgugccacuugcccaggcccaggcccuagugacuucagagcucgaaaaauuucaagaucgauuggcuagaugcacuaugcacugcaaugacaaagcuaaggacaguaucgacgcagguucuaaagagcuccaagugaagcagcagcuggacucuugugucacuaagugugucgaugaccauaugcaucuuaucccaacaaugacaaagaaaaugaaggaggcccuuuuguccaucggaaaauag

SEQ ID NO: 225769 - RNA, 417 nt, Artificial Sequence
  derived and/or modified sequence
auggcggaacugcagcaacugaggguccaggaggccguggaauccaugguuaagaguuuagaacgcgagaauaucagaaagaugcaggggcucauguuccggugcagcgcuaguuguugugaggacagccaagccagcaugaagcaggugcaccaguguauugagcgaugccacgugccacuugcccaggcccaggcccuagugacuucagagcucgaaaaauuucaagaucgauuggcuagaugcacuaugcacugcaaugacaaagcuaaggacaguaucgacgcagguucuaaagagcuccaggugaaacaacagcucgauucuugugugacuaaguguguagaugaucacaugcaucugauuccaaccaugacuaaaaaaaugaaagaggcacuccuaucuauuggaaaguag

SEQ ID NO: 225770 - protein, 720 aa, Artificial Sequence
  derived and/or modified sequence
MDIQLDPARDDLPLMANTSHILVKHYVLDLDVDFESQVIEGTIVLFLEDGNRFKKQNSSIEEACQSESNKACKFGMPEPCHIPVTNARTFSSEMEYNDFAICSKGEKDTSDKDGNHDNQEHASGISSSKYCCDTGNHGSEDFLLVLDCCDLSVLKVEEVDVAAVPGLEKFTRSPELTVVSEEFRNQIVRELVTLPANRWREQLDYYARCSQAPGCGELLFDTDTWSLQIRKTGAQTATDFPHAIRIWYKTKPEGRSVTWTSDQSGRPCVYTVGSPINNRALFPCQEPPVAMSTWQATVRAAASFVVLMSGENSAKPTQLWEECSSWYYYVTMPMPASTFTIAVGCWTEMKMETWSSNDLATERPFSPSEANFRHVGVCSHMEYPCRFQNASATTQEIIPHRVFAPVCLTGACQETLLRLIPPCLSAAHSVLGAHPFSRLDVLIVPANFPSLGMARPSKDKTGHTSDSGASVIKHGLNPEKIFMQVHYLKGYFLLRFLAKRLGDETYFSFLRKFVHTFHGQLILSQDFLQMLLENIPEEKRLELSVENIYQDWLESSGIPKPLQRERRAGAECGLARQVRAEVTKWIGVNRRPRKRKRREKEEVFEKLLPDQLVLLLEHLLEQKTLSPRTLQSLQRTYHLQDQDAEVRHRWCELIVKHKFTKAYKSVERFLQEDQAMGVYLYGELMVSEDARQQQLARRCFERTKEQMDRSSAQVVAEMLF

SEQ ID NO: 225771 - protein, 183 aa, Artificial Sequence
  derived and/or modified sequence
ADPGRAQGAGSGAAAASSPAAGEPLQRERRAGAECGLARQVRAEVTKWIGVNRRPRKRKRREKEEVFEKLLPDQLVLLLEHLLEQKTLSPRTLQSLQRTYHLQDQDAEVRHRWCELIVKHKFTKAYKSVERFLQEDQAMGVYLYGELMVSEDARQQQLARRCFERTKEQMDRSSAQVVAEMLF

SEQ ID NO: 225772 - protein, 508 aa, Artificial Sequence
  derived and/or modified sequence
VVSEEFRNQIVRELVTLPANRWREQLDYYARCSQAPGCGELLFDTDTWSLQIRKTGAQTATDFPHAIRIWYKTKPEGRSVTWTSDQSGRPCVYTVGSPINNRALFPCQEPPVAMSTWQATVRAAASFVVLMSGENSAKPTQLWEECSSWYYYVTMPMPASTFTIAVGCWTEMKMETWSSNDLATERPFSPSEANFRHVGVCSHMEYPCRFQNASATTQEIIPHRVFAPVCLTGACQETLLRLIPPCLSAAHSVLGAHPFSRLDVLIVPANFPSLGMARPSKDKTGHTSDSGASVIKHGLNPEKIFMQVHYLKGYFLLRFLAKRLGDETYFSFLRKFVHTFHGQLILSQDFLQMLLENIPEEKRLELSVENIYQDWLESSGIPKPLQRERRAGAECGLARQVRAEVTKWIGVNRRPRKRKRREKEEVFEKLLPDQLVLLLEHLLEQKTLSPRTLQSLQRTYHLQDQDAEVRHRWCELIVKHKFTKAYKSVERFLQEDQVGVIFQQMGIL

SEQ ID NO: 225773 - protein, 181 aa, Artificial Sequence
  derived and/or modified sequence
MRMRRPLAGGGKSWGIAHFYKPLQRERRAGAECGLARQVRAEVTKWIGVNRRPRKRKRREKEEVFEKLLPDQLVLLLEHLLEQKTLSPRTLQSLQRTYHLQDQDAEVRHRWCELIVKHKFTKAYKSVERFLQEDQAMGVYLYGELMVSEDARQQQLARRCFERTKEQMDRSSAQVVAEMLF

SEQ ID NO: 225774 - protein, 140 aa, Artificial Sequence
  derived and/or modified sequence
SSKYCCDTGNHGSEDFLLVLDCCDLSVLKVEEVDVAAVPGLEKFTRSPELTVVSEEFRNQIVRELVTLPANRWREQLDYYARCSQAPGCGELLFDTDTWSLQIRKTGAQTATDFPHAIRIWYKTKPEGRSVTWTSDQSGR

SEQ ID NO: 225775 - protein, 160 aa, Artificial Sequence
  derived and/or modified sequence
MRMRRPLAGGGKSWGIAHFYKVTKWIGVNRRPRKRKRREKEEVFEKLLPDQLVLLLEHLLEQKTLSPRTLQSLQRTYHLQDQDAEVRHRWCELIVKHKFTKAYKSVERFLQEDQAMGVYLYGELMVSEDARQQQLARRCFERTKEQMDRSSAQVVAEMLF

SEQ ID NO: 225776 - protein, 184 aa, Artificial Sequence
  derived and/or modified sequence
  misc_feature (1)..(1): Xaa can be any naturally occurring amino acid
XADPGRAQGAGSGAAAASSPAAGEPLQRERRAGAECGLARQVRAEVTKWIGVNRRPRKRKRREKEEVFEKLLPDQLVLLLEHLLEQKTLSPRTLQSLQRTYHLQDQDAEVRHRWCELIVKHKFTKAYKSVERFLQEDQAMGVYLYGELMVSEDARQQQLARRCFERTKEQMDRSSAQVVAEMLF

SEQ ID NO: 225777 - protein, 145 aa, Artificial Sequence
  derived and/or modified sequence
  misc_feature (1)..(1): Xaa can be any naturally occurring amino acid
XDETYFSFLRKFVHTFHGQLILSQDFLQMLLENIPEEKRLELSVENIYQDWLESSGIPKPLQRERRAGAECGLARQVRAEVTKWIGVNRRPRKRKRREKEEVFEKTLNWSHLRNRERRRKKWITFKTLGGILFTVKQMRNLFAQV

SEQ ID NO: 225778 - DNA, 2163 bp, Artificial Sequence
  derived and/or modified sequence
atggacatccagctggaccccgccagagacgacctgcccctgatggccaacaccagccacatcctggtgaagcactacgtgctggacctggacgtggacttcgagagccaggtgatcgagggcaccatcgtgctgttcctggaggacggcaacagattcaagaagcagaacagcagcatcgaggaggcctgccagagcgagagcaacaaggcctgcaagttcggcatgcccgagccctgccacatccccgtgaccaacgccagaaccttcagcagcgagatggagtacaacgacttcgccatctgcagcaagggcgagaaggacaccagcgacaaggacggcaaccacgacaaccaggagcacgccagcggcatcagcagcagcaagtactgctgcgacaccggcaaccacggcagcgaggacttcctgctggtgctggactgctgcgacctgagcgtgctgaaggtggaggaggtggacgtggccgccgtgcccggcctggagaagttcaccagaagccccgagctgaccgtggtgagcgaggagttcagaaaccagatcgtgagagagctggtgaccctgcccgccaacagatggagagagcagctggactactacgccagatgcagccaggcccccggctgcggcgagctgctgttcgacaccgacacctggagcctgcagatcagaaagaccggcgcccagaccgccaccgacttcccccacgccatcagaatctggtacaagaccaagcccgagggcagaagcgtgacctggaccagcgaccagagcggcagaccctgcgtgtacaccgtgggcagccccatcaacaacagagccctgttcccctgccaggagccccccgtggccatgagcacctggcaggccaccgtgagagccgccgccagcttcgtggtgctgatgagcggcgagaacagcgccaagcccacccagctgtgggaggagtgcagcagctggtactactacgtgaccatgcccatgcccgccagcaccttcaccatcgccgtgggctgctggaccgagatgaagatggagacctggagcagcaacgacctggccaccgagagacccttcagccccagcgaggccaacttcagacacgtgggcgtgtgcagccacatggagtacccctgcagattccagaacgccagcgccaccacccaggagatcatcccccacagagtgttcgcccccgtgtgcctgaccggcgcctgccaggagaccctgctgagactgatccccccctgcctgagcgccgcccacagcgtgctgggcgcccaccccttcagcagactggacgtgctgatcgtgcccgccaacttccccagcctgggcatggccagacccagcaaggacaagaccggccacaccagcgacagcggcgccagcgtgatcaagcacggcctgaaccccgagaagatcttcatgcaggtgcactacctgaagggctacttcctgctgagattcctggccaagagactgggcgacgagacctacttcagcttcctgagaaagttcgtgcacaccttccacggccagctgatcctgagccaggacttcctgcagatgctgctggagaacatccccgaggagaagagactggagctgagcgtggagaacatctaccaggactggctggagagcagcggcatccccaagcccctgcagagagagagaagagccggcgccgagtgcggcctggccagacaggtgagagccgaggtgaccaagtggatcggcgtgaacagaagacccagaaagagaaagagaagagagaaggaggaggtgttcgagaagctgctgcccgaccagctggtgctgctgctggagcacctgctggagcagaagaccctgagccccagaaccctgcagagcctgcagagaacctaccacctgcaggaccaggacgccgaggtgagacacagatggtgcgagctgatcgtgaagcacaagttcaccaaggcctacaagagcgtggagagattcctgcaggaggaccaggccatgggcgtgtacctgtacggcgagctgatggtgagcgaggacgccagacagcagcagctggccagaagatgcttcgagagaaccaaggagcagatggacagaagcagcgcccaggtggtggccgagatgctgttctag

SEQ ID NO: 225779 - DNA, 552 bp, Artificial Sequence
  derived and/or modified sequence
gccgaccccggcagagcccagggcgccggcagcggcgccgccgccgccagcagccccgccgccggcgagcccctgcagagagagagaagagccggcgccgagtgcggcctggccagacaggtgagagccgaggtgaccaagtggatcggcgtgaacagaagacccagaaagagaaagagaagagagaaggaggaggtgttcgagaagctgctgcccgaccagctggtgctgctgctggagcacctgctggagcagaagaccctgagccccagaaccctgcagagcctgcagagaacctaccacctgcaggaccaggacgccgaggtgagacacagatggtgcgagctgatcgtgaagcacaagttcaccaaggcctacaagagcgtggagagattcctgcaggaggaccaggccatgggcgtgtacctgtacggcgagctgatggtgagcgaggacgccagacagcagcagctggccagaagatgcttcgagagaaccaaggagcagatggacagaagcagcgcccaggtggtggccgagatgctgttctag

SEQ ID NO: 225780 - DNA, 546 bp, Artificial Sequence
  derived and/or modified sequence
atgagaatgagaagacccctggccggcggcggcaagagctggggcatcgcccacttctacaagcccctgcagagagagagaagagccggcgccgagtgcggcctggccagacaggtgagagccgaggtgaccaagtggatcggcgtgaacagaagacccagaaagagaaagagaagagagaaggaggaggtgttcgagaagctgctgcccgaccagctggtgctgctgctggagcacctgctggagcagaagaccctgagccccagaaccctgcagagcctgcagagaacctaccacctgcaggaccaggacgccgaggtgagacacagatggtgcgagctgatcgtgaagcacaagttcaccaaggcctacaagagcgtggagagattcctgcaggaggaccaggccatgggcgtgtacctgtacggcgagctgatggtgagcgaggacgccagacagcagcagctggccagaagatgcttcgagagaaccaaggagcagatggacagaagcagcgcccaggtggtggccgagatgctgttctag

SEQ ID NO: 225781 - DNA, 483 bp, Artificial Sequence
  derived and/or modified sequence
atgagaatgagaagacccctggccggcggcggcaagagctggggcatcgcccacttctacaaggtgaccaagtggatcggcgtgaacagaagacccagaaagagaaagagaagagagaaggaggaggtgttcgagaagctgctgcccgaccagctggtgctgctgctggagcacctgctggagcagaagaccctgagccccagaaccctgcagagcctgcagagaacctaccacctgcaggaccaggacgccgaggtgagacacagatggtgcgagctgatcgtgaagcacaagttcaccaaggcctacaagagcgtggagagattcctgcaggaggaccaggccatgggcgtgtacctgtacggcgagctgatggtgagcgaggacgccagacagcagcagctggccagaagatgcttcgagagaaccaaggagcagatggacagaagcagcgcccaggtggtggccgagatgctgttctag

SEQ ID NO: 225782 - DNA, 555 bp, Artificial Sequence
  derived and/or modified sequence
tgagccgaccccggcagagcccagggcgccggcagcggcgccgccgccgccagcagccccgccgccggcgagcccctgcagagagagagaagagccggcgccgagtgcggcctggccagacaggtgagagccgaggtgaccaagtggatcggcgtgaacagaagacccagaaagagaaagagaagagagaaggaggaggtgttcgagaagctgctgcccgaccagctggtgctgctgctggagcacctgctggagcagaagaccctgagccccagaaccctgcagagcctgcagagaacctaccacctgcaggaccaggacgccgaggtgagacacagatggtgcgagctgatcgtgaagcacaagttcaccaaggcctacaagagcgtggagagattcctgcaggaggaccaggccatgggcgtgtacctgtacggcgagctgatggtgagcgaggacgccagacagcagcagctggccagaagatgcttcgagagaaccaaggagcagatggacagaagcagcgcccaggtggtggccgagatgctgttctag

SEQ ID NO: 225783 - DNA, 2820 bp, Artificial Sequence
  derived and/or modified sequence
gtctgcggaagtggtgacccgtgggacgcggctgagacaggagactgaaaggaaccataatttgtgacatcagttgttttctttgataagcagctatttatgattctggaagattaaggcagataggaaaccccatctgagattttaataaatccctcaaacaataaaccacatcatggacatacagctggaccctgccagagatgacctgcctctcatggccaacaccagccacatacttgtgaagcactatgtactggatttggatgtggattttgaaagtcaagtcattgaggggaccatagtgcttttcctcgaggatggaaacagattcaagaaacagaatagctctattgaggaagcctgccaatcagaatcaaacaaagcctgcaaatttgggatgcctgaaccctgccatattcccgtgacaaatgcaaggaccttctcatctgaaatggaatataatgattttgcaatctgtagtaaaggtgaaaaagatacttctgataaagatggtaaccatgacaaccaggaacatgcttctgggatttctagctcaaagtactgctgtgacacagggaatcatgggagtgaggattttttgctagtgttggactgctgtgatttatctgtgttaaaagtcgaggaggtggatgttgctgctgtgccaggtctggaaaaatttacaaggtctcctgagctcacggttgtttctgaggagttcaggaatcagattgtacgtgaacttgtgactttgcctgcaaatcgttggagggagcagttagactattacgctcgctgcagccaggctcctggctgtggggaactcctctttgacactgacacttggagcttgcagataaggaagacaggggctcagacagctactgactttcctcatgctatcaggatatggtacaaaactaaacctgaagggcgatcggttacatggacctcagaccagagtggcaggccatgtgtttatactgtgggatctcccataaacaacagggccctttttccatgccaggagccacccgttgccatgtcaacatggcaggctacagttcgagcagctgcatcttttgttgttttaatgagtggggaaaattctgccaaaccaacgcagctttgggaagagtgctcaagctggtattactatgtaactatgccaatgccagcctccaccttcacaattgcagtgggatgctggacagaaatgaagatggagacatggtcatcaaatgatttggcaacagagagacccttctcaccttctgaggccaacttcaggcatgttggtgtttgcagtcacatggaatacccctgccgcttccagaatgcttctgccaccacccaggagatcattcctcatcgggtctttgcccctgtgtgcctcacgggtgcctgccaagagacccttctgcggctgatccctccttgcctctcagcagcacattctgttctgggagcacacccgttctctcggctggatgttctcatcgtccctgccaactttccaagtctggggatggccagacccagtaaagacaaaactggccacacaagtgactcgggagcatctgttatcaagcatggacttaatccggagaagatcttcatgcaggtgcattatttaaagggctacttccttcttcggtttcttgccaaaagacttggagatgaaacctatttttcatttttaagaaaatttgtgcacacatttcatggacagctgattctttcccaggatttccttcaaatgctactggagaacattccagaagaaaaaaggcttgagctgtctgttgaaaacatctaccaagactggcttgagagttccggaataccaaagccgctgcagagggagcgtcgcgccggggcggagtgcgggcttgcgcggcaagtgcgcgccgaggtcacgaaatggattggagtgaaccggagaccccgaaaacggaagcgcagggagaaggaagaggtgtttgaaaagcttcttccagaccagctggtcttgcttctggagcatctcttggagcagaagactctgagcccccgaactctgcaaagcctccagaggacataccacctccaggatcaggatgcagaggttcgccatcggtggtgtgaactcattgttaagcacaagttcacgaaagcctacaaaagtgtggagaggttccttcaggaggatcaggccatgggtgtgtacctctacggggagctgatggtgagtgaggacgccagacagcagcagctcgcccgtaggtgcttcgagcggaccaaggagcagatggataggtcctcagcccaggtggtggccgaaatgttattttaacgaggaaagaccacagcaagattctttcattcgtctcctcctagcctgggggaccaggctcgaactgaccctggacatcaaaggagggattatgtggctgctaaagccatcggcccacagccctgttcacatcttggtgcttctctttcccagaggctggtcccagccaggcacacacaaaaggcagattctcgtaaacgcagcctccctccctggaggctgcctcctgccctggatctggagtggagctgctctgagattttgagttcttctgcagagatgattaaatatatccaagagacattggaaaacctgctgaacattttacattggtctgctcagcacatggctggatgcggatatttctataattccagaaagtcacacagctcctctgtatgagaccagtgggcgccatttaaaagaacaggatgagaatctaagatatattattaataaatgtaatggattttttttttgta

SEQ ID NO: 225784 - DNA, 1033 bp, Artificial Sequence
  derived and/or modified sequence
gcggaccccgggcgggcgcagggcgcgggctccggcgccgccgctgcgtcctccccggccgcgggcgagccgctgcagagggagcgtcgcgccggggcggagtgcgggcttgcgcggcaagtgcgcgccgaggtcacgaaatggattggagtgaaccggagaccccgaaaacggaagcgcagggagaaggaagaggtgtttgaaaagcttcttccagaccagctggtcttgcttctggagcatctcttggagcagaagactctgagcccccgaactctgcaaagcctccagaggacataccacctccaggatcaggatgcagaggttcgccatcggtggtgtgaactcattgttaagcacaagttcacgaaagcctacaaaagtgtggagaggttccttcaggaggatcaggccatgggtgtgtacctctacggggagctgatggtgagtgaggacgccagacagcagcagctcgcccgtaggtgcttcgagcggaccaaggagcagatggataggtcctcagcccaggtggtggccgaaatgttattttaacgaggaaagaccacagcaagattctttcattcgtctcctcctagcctgggggaccaggctcgaactgaccctggacatcaaaggagggattatgtggctgctaaagccatcggcccacagccctgttcacatcttggtgcttctctttcccagaggctggtcccagccaggcacacacaaaaggcagattctcgtaaacgcagcctccctccctggaggctgcctcctgccctggatctggagtggagctgctctgagattttgagttcttctgcagagatgattaaatatatccaagagacattggaaaacctgctgaacattttacattggtctgctcagcacatggctggatgcggatatttctataattccagaaagtcacacagctcctctgtatgagaccagtgggcgccatttaaaagaacaggatgagaatctaagatatattattaataaatgtaatggattttttttttgt

SEQ ID NO: 225785 - DNA, 867 bp, Artificial Sequence
  derived and/or modified sequence
aaagggatggtcaagacccagcaagcaacaggacaacccgactctccgccccggcccgccctcaccggcaggcgggttccagcaactgctgatgcggatgagaaggcctttggcgggtggaggaaaatcttggggtatcgcacatttttataaaccgctgcagagggagcgtcgcgccggggcggagtgcgggcttgcgcggcaagtgcgcgccgaggtcacgaaatggattggagtgaaccggagaccccgaaaacggaagcgcagggagaaggaagaggtgtttgaaaagcttcttccagaccagctggtcttgcttctggagcatctcttggagcagaagactctgagcccccgaactctgcaaagcctccagaggacataccacctccaggatcaggatgcagaggttcgccatcggtggtgtgaactcattgttaagcacaagttcacgaaagcctacaaaagtgtggagaggttccttcaggaggatcaggccatgggtgtgtacctctacggggagctgatggtgagtgaggacgccagacagcagcagctcgcccgtaggtgcttcgagcggaccaaggagcagatggataggtcctcagcccaggtggtggccgaaatgttattttaacgaggtgattctctccctttcctttctgtcatttagttctaaccagatactccttttaggagccaactaaatcagtaagccgaatagttagccaagactacccgcagcatcaatagtcggctccctggcccagggcctggagagtaactggccaagtgggtgctgggctggtatgggagccccgggtccctggagcaccttgcctggctgtggcagtcaccgggaagcag

SEQ ID NO: 225786 - DNA, 1436 bp, Artificial Sequence
  derived and/or modified sequence
atgcggatgagaaggcctttggcgggtggaggaaaatcttggggtatcgcacatttttataaagtcacgaaatggattggagtgaaccggagaccccgaaaacggaagcgcagggagaaggaagaggtgtttgaaaagcttcttccagaccagctggtcttgcttctggagcatctcttggagcagaagactctgagcccccgaactctgcaaagcctccagaggacataccacctccaggatcaggatgcagaggttcgccatcggtggtgtgaactcattgttaagcacaagttcacgaaagcctacaaaagtgtggagaggttccttcaggaggatcaggccatgggtgtgtacctctacggggagctgatggtgagtgaggacgccagacagcagcagctcgcccgtaggtgcttcgagcggaccaaggagcagatggataggtcctcagcccaggtggtggccgaaatgttattttaacgaggtgattctctccctttcctttctgtcatttagttctaaccagatactccttttaggagccaactaaatcagtaagccgaatagttagccaagactacccgcagcatcaatagtcggctccctggcccagggcctggagagtaactggccaagtgggtgctgggctggtatgggagccccgggtccctggagcaccttgcctggctgtggcagtcaccgggaagcagaggctgtccacctggaggcacagcggcactccttggcactattttggccacttcaggttttataatctgttgaaacaaaaattgtgggggaacatcttgagtaggtttagagatggaatgggaagcctggcagaagcgctggtccagtcttcagggtcacggctgatacaggagtttaagcggccgtgtgactccaaagcctagcttctgcaagcagatgttttcttctagccatgtgtgaattggaggttccttgggctgtccacgcctggtcatcggctggcaggaggctctccaggcacacgcagcacacacagcacatgcaccacacgtagcacacacactgcatgcagcacacacacaccagaggacgcaccacacagagcacgcacagcacacaccacacagcgcacgcaccacacagagcacacgcggcacacacagcacacacagcgcacgcaccacgcagagcacacacggcacatgcagcatacacaccaaacagcgcacgcaccacacagagcacacgcggcacacgcagcacacacaccacacagagcacctggagcacccacagcacacacaccacgcagagtacacgcggcacacacaccacacacagcgcatgcacaacacagagcacacacagcacatgcaccacacgtagcgcgcacactgcatgcagcacacacaccacacacagcgcgtgcaccacacagagca

SEQ ID NO: 225787 - DNA, 873 bp, Artificial Sequence
  derived and/or modified sequence
tgcggaccccgggcgggcgcagggcgcgggctccggcgccgccgctgcgtcctccccggccgcgggcgagccgctgcagagggagcgtcgcgccggggcggagtgcgggcttgcgcggcaagtgcgcgccgaggtcacgaaatggattggagtgaaccggagaccccgaaaacggaagcgcagggagaaggaagaggtgtttgaaaagcttcttccagaccagctggtcttgcttctggagcatctcttggagcagaagactctgagcccccgaactctgcaaagcctccagaggacataccacctccaggatcaggatgcagaggttcgccatcggtggtgtgaactcattgttaagcacaagttcacgaaagcctacaaaagtgtggagaggttccttcaggaggatcaggccatgggtgtgtacctctacggggagctgatggtgagtgaggacgccagacagcagcagctcgcccgtaggtgcttcgagcggaccaaggagcagatggataggtcctcagcccaggtggtggccgaaatgttattttaacgaggtgattctctccctttcctttctgtcatttagttctaaccagatactccttttaggagccaactaaatcagtaagccgaatagttagccaagactacccgcagcatcaatagtcggctccctggcccagggcctggagagtaactggccaagtgggtgctgggctggtatgggagccccgggtccctggagcaccttgcctggctgtggcagtcaccgggaagcagaggctgtccacctggaggcacagcggcactccttggcactattttggccacttcaggttttataatctgttgaaacaaaaattgtggggg

SEQ ID NO: 225788 - DNA, 2163 bp, Artificial Sequence
  derived and/or modified sequence
atggacattcagctggatcccgctcgagacgatctgcccttaatggccaatacgagccacatcctcgtcaagcattatgttctagatctggatgtcgacttcgagtctcaagtgattgaagggactatcgtgctcttcctggaagacggcaaccgatttaaaaagcagaactctagtattgaagaggcatgtcaatcggaatccaacaaagcttgcaagttcggcatgcccgaaccctgccatatccctgtgaccaacgcccgcaccttttcaagtgagatggagtataatgactttgccatctgttctaagggcgagaaagacaccagcgacaaggacggcaatcacgataaccaggaacatgcctcaggtatatccagctctaagtattgttgtgatacagggaatcatggctcagaggactttcttctggtcctggactgctgcgatctgagtgtattgaaggtggaggaggtggacgtggccgccgtgccaggcttggaaaagttcacgagaagcccagaactaacagtggtgtcagaggagttcagaaaccagatcgtcagggagctcgtgaccctgcccgcaaacagatggagagagcagttggactattatgcccgatgctcccaagctcccggctgcggcgagctactgttcgacactgatacatggtctctccaaattaggaagacaggggctcagacagcgaccgacttccctcatgccatcaggatctggtataaaaccaagccagaagggcgatcagtgacctggacttccgaccagagcggtaggccctgcgtctataccgtgggcagtccaataaacaatcgagccctattcccgtgtcaagaaccaccagtcgcaatgtccacctggcaagccaccgtgagagcggccgcaagctttgtcgtgttgatgtccggggagaacagcgccaaacctacacagctatgggaggagtgctccagctggtactactatgtgactatgcccatgcctgccagcaccttcaccatcgccgtgggatgttggactgagatgaagatggagacctggagctctaatgatcttgccactgaacgccccttctcgccatcggaggccaactttcgacacgtcggcgtgtgctcacatatggaatacccatgtcgcttccaaaatgcgtccgccaccactcaggagatcattcctcaccgagtatttgcacccgtctgtctcacaggagcttgccaggagaccctgctgaggttaatccccccatgtttatcagctgcccactctgtgctcggggctcatcccttttcccggctcgatgttctgattgttcctgctaatttccccagtctcgggatggcgagaccttccaaagataaaaccggtcacacatccgacagcggcgcctcagtcattaagcatgggctcaatcccgaaaagatcttcatgcaagtgcattacctaaaagggtatttccttctgagatttctggctaagcgcttgggcgacgaaacgtatttttcatttctccgcaagtttgtgcacacattccatggacaactgatcctgagccaagactttctgcagatgctgttggagaatatcccagaggaaaagaggcttgagttgtccgtcgaaaacatctatcaggactggctggagagttccggaatccccaagcccctgcaaagggaaagacgagctggagccgaatgcggtctggcccggcaggtgcgagccgaggtgaccaaatggataggggtcaatagacgtccacgtaaaaggaagcgtcgcgagaaggaagaggtattcgagaaactgttgcccgatcagctcgttctccttctggagcacctgctggagcagaagacactaagcccgaggacgctgcagtccctacagcgaacttaccacttacaggaccaggacgcggaggtgagacaccgctggtgtgagctgattgtgaaacataaatttaccaaagcttacaagtctgtggaacgctttctgcaggaggaccaggccatgggagtctacttgtacggagaattgatggtttcggaggacgcccgtcagcagcagttggctagacgatgtttcgagcggactaaggagcagatggaccgctcttccgcacaggttgtggccgagatgcttttttag

SEQ ID NO: 225789 - DNA, 552 bp, Artificial Sequence
  derived and/or modified sequence
gccgacccaggccgggctcaaggcgccggttctggggctgccgccgcttcttcccccgccgccggcgaacccctgcagagagaaagaagggccggcgctgaatgtggtctcgccaggcaggtcagggcagaagtcacaaagtggattggtgtgaatcgcagacctcgaaaacgcaagagacgcgaaaaggaagaggtgttcgaaaaactactccctgatcagctagtgttgctacttgagcacctgctggaacagaaaacgttgagccctcgcaccttgcaatccctgcagagaacataccacctgcaagatcaggatgctgaggtccggcatagatggtgcgagctcatcgtgaaacataagtttacaaaagcctacaagtcagtggaaagattcctccaggaggaccaggcaatgggagtgtacctctatggcgaactcatggtaagtgaggatgcccgccagcagcaactagctagaaggtgttttgaacgcacaaaggaacagatggaccggtcatctgcacaagtggtcgctgaaatgctgttttag

SEQ ID NO: 225790 - DNA, 546 bp, Artificial Sequence
  derived and/or modified sequence
atgaggatgcggcggcctctggccggaggaggtaaatcttgggggattgctcacttctacaagcctctgcagcgggagaggcgggctggcgccgagtgcggactcgctcggcaagtccgggccgaggttacaaagtggataggagtgaacaggagaccaaggaagagaaaacgtcgcgaaaaagaagaagtttttgagaaactgctccctgatcaactggtgcttcttctggaacatctgctcgagcaaaaaaccctcagtcctaggactcttcagtccctccagaggacataccacttacaggatcaggatgccgaggttcggcacagatggtgcgagctaattgttaagcacaaattcactaaagcgtacaaatctgttgaacgcttcctccaggaggatcaagcgatgggggtttacttgtatggtgagctcatggttagtgaagatgcgagacagcagcagctcgcgcgccgatgcttcgaaagaacgaaggaacagatggatcgaagctcggctcaggttgtagctgagatgttgttctag

SEQ ID NO: 225791 - DNA, 483 bp, Artificial Sequence
  derived and/or modified sequence
atgaggatgcgcaggccactcgccggcggggggaagtcgtggggaattgcccatttttataaggtaacgaagtggattggagtgaaccgacgtccacgaaaacgcaagaggcgggagaaggaggaagtgttcgaaaaactgttaccggatcagctcgtgctgcttctggagcacctgctggagcagaaaactctgtcccccaggacgctccagagcctccaacggacctaccatttgcaggaccaggatgccgaggtgagacacagatggtgtgagctgatcgttaagcacaagttcaccaaggcttacaagagtgttgaaaggttcttacaggaagaccaggctatgggcgtgtatctttacggcgaattaatggtcagtgaagatgctaggcagcaacaactggcacgccgctgctttgagagaacgaaagaacagatggacaggagtagtgcccaggtcgtggccgagatgctgttttag

SEQ ID NO: 225792 - DNA, 555 bp, Artificial Sequence
  derived and/or modified sequence
taggccgatccagggcgagcgcagggcgcagggtctggggccgctgcagcgtctagtccagctgccggtgagccactgcaacgggaacgccgcgcaggggccgagtgcggattagcgagacaggtaagagccgaggtgaccaaatggatcggtgttaataggaggccaaggaagagaaaacgccgcgaaaaggaagaggtgtttgaaaagctgctgcctgaccagttggtgctgctgctggagcatctcttggaacaaaagacattatctccccggacactgcagagtttgcagcgcacgtaccacctgcaggaccaggacgccgaggtgagacatcggtggtgcgagttgatcgtgaaacataagtttacaaaggcatataagagcgtggagcgctttctgcaggaggaccaagccatgggtgtctatttgtatggagagctgatggtttcggaggacgccagacagcaacagctggctaggcgttgttttgagcgaaccaaagaacagatggatcgatccagcgcccaggtggtcgctgagatgttattttag

SEQ ID NO: 225793 - DNA, 2163 bp, Artificial Sequence
  derived and/or modified sequence
atggacatccagctggaccctgccagagatgacctgcccctgatggccaacaccagccacatcctggtgaagcactacgtgctggacctggatgtggactttgagagccaggtgattgagggcaccatcgtgctcttcctggaggatggcaaccgcttcaagaagcagaacagcagcattgaggaggcctgccagagcgagagcaacaaggcctgcaagtttggcatgcctgagccctgccacatccctgtgaccaatgcccggaccttcagcagcgagatggagtacaatgactttgccatctgcagcaagggggagaaggacaccagtgacaaggatggcaaccacgacaaccaggagcacgccagcggcatcagcagcagcaagtactgctgtgacaccggcaaccacggcagcgaggacttcctgctggtgctggactgctgtgacctgtctgtgctgaaggtggaggaggtggatgtggccgctgtgcccggcctggagaagttcaccaggagccctgagctgactgtggtgtctgaggagttcaggaaccagatcgtgcgggagctggtgaccctgcctgccaaccgctggagggagcagctggactactatgcccgctgcagccaggcccctggctgtggggagctgctgtttgacacagacacctggagcctgcagatcaggaagacaggagcccagacagccacagacttcccccacgccatccgcatctggtacaagaccaagccagagggccgctctgtgacctggaccagtgaccagagcggccggccctgtgtgtacacagtgggcagccccatcaacaacagagccctcttcccctgccaggagccccctgtggccatgagcacctggcaggccaccgtgcgggctgctgccagctttgtggtgctgatgtctggagaaaattctgccaagcccacccagctgtgggaggagtgcagctcctggtactactacgtgaccatgcccatgcctgccagcaccttcaccatcgctgtgggctgctggacagagatgaagatggagacctggagcagcaatgacctggccacagagcggcccttcagccccagcgaggccaacttccgccacgtgggcgtgtgcagccacatggagtacccctgccgcttccagaatgccagcgccaccacccaggagatcatcccccaccgggtgtttgcccctgtgtgcctgactggagcctgccaggagaccctgctgcggctcatccccccctgcctgtctgctgcccacagcgtgctgggcgcccaccccttcagccggctggatgtgctgattgtgcctgccaacttccccagcctgggcatggcccggcccagcaaggacaagacaggccacaccagtgacagcggggccagcgtcatcaagcacggcctgaaccctgagaagatcttcatgcaggtgcactacctgaagggctacttcctgctgcgcttcctggccaagaggctgggagatgagacctacttctccttcctgaggaagtttgtgcacaccttccacggccagctgatcctgagccaggacttcctgcagatgctgctggagaacatccctgaggagaagaggctggagctgtctgtggagaacatctaccaggactggctggagagcagcggcatccccaagcccctgcagcgggagcggcgggccggggctgaatgtggcctggcccggcaggtgcgggcagaggtgaccaagtggattggagtgaacagaagacccaggaagaggaagagaagagagaaggaggaggtgtttgagaagctgctgcctgaccagctggtgctgctgctggagcacctgctggagcagaagaccctgagccccaggaccctgcagagcctgcagaggacctaccacctgcaggaccaggatgctgaggtgcgccaccgctggtgtgagctgattgtgaagcacaagttcaccaaggcctacaagtctgtggagcgcttcctgcaggaggaccaggccatgggcgtgtacctgtatggagagctgatggtgtctgaagatgcccggcagcagcagctggcccggcgctgctttgagaggaccaaggagcagatggacaggagcagcgcccaggtggtggccgagatgctgttctag

SEQ ID NO: 225794 - DNA, 552 bp, Artificial Sequence
  derived and/or modified sequence
gctgaccccggccgggcccagggcgccggcagcggggctgctgctgccagcagccctgctgctggggagcccctgcagcgggagaggagagctggagcagaatgtggcctggcccggcaggtgcgggcagaggtgaccaagtggattggagtgaacagaagacccaggaagaggaagaggcgggagaaggaggaggtgtttgagaagctgctgcctgaccagctggtgctgctgctggagcacctgctggagcagaagaccctgagccccaggaccctgcagagcctgcagaggacctaccacctgcaggaccaggatgctgaggtgcgccaccgctggtgtgagctgattgtgaagcacaagttcaccaaggcctacaagtctgtggagcgcttcctgcaggaggaccaggccatgggcgtgtacctgtatggagagctgatggtgtctgaagatgcccggcagcagcagctggcccggcgctgctttgagaggaccaaggagcagatggacaggagcagcgcccaggtggtggccgagatgctgttctag

SEQ ID NO: 225795 - DNA, 546 bp, Artificial Sequence
  derived and/or modified sequence
atgaggatgaggcggcccctggccggcggcggcaagtcctggggcatcgcccacttctacaagcccctgcagcgggagaggagagctggagcagaatgtggcctggcccggcaggtgcgggcagaggtgaccaagtggattggagtgaacagaagacccaggaagaggaagaggcgggagaaggaggaggtgtttgagaagctgctgcctgaccagctggtgctgctgctggagcacctgctggagcagaagaccctgagccccaggaccctgcagagcctgcagaggacctaccacctgcaggaccaggatgctgaggtgcgccaccgctggtgtgagctgattgtgaagcacaagttcaccaaggcctacaagtctgtggagcgcttcctgcaggaggaccaggccatgggcgtgtacctgtatggagagctgatggtgtctgaagatgcccggcagcagcagctggcccggcgctgctttgagaggaccaaggagcagatggacaggagcagcgcccaggtggtggccgagatgctgttctag

SEQ ID NO: 225796 - DNA, 483 bp, Artificial Sequence
  derived and/or modified sequence
atgaggatgaggcggcccctggccggcggcggcaagtcctggggcatcgcccacttctacaaggtgaccaagtggattggagtgaacagaagacccaggaagaggaagagaagagagaaggaggaggtgtttgagaagctgctgcctgaccagctggtgctgctgctggagcacctgctggagcagaagaccctgagccccaggaccctgcagagcctgcagaggacctaccacctgcaggaccaggatgctgaggtgcgccaccgctggtgtgagctgattgtgaagcacaagttcaccaaggcctacaagtctgtggagcgcttcctgcaggaggaccaggccatgggcgtgtacctgtatggagagctgatggtgtctgaagatgcccggcagcagcagctggcccggcgctgctttgagaggaccaaggagcagatggacaggagcagcgcccaggtggtggccgagatgctgttctag

SEQ ID NO: 225797 - DNA, 555 bp, Artificial Sequence
  derived and/or modified sequence
tgagctgaccccggccgggcccagggcgccggcagcggggctgctgctgccagcagccctgctgctggggagcccctgcagcgggagcggcgggccggggctgaatgtggcctggcccggcaggtgcgggcagaggtgaccaagtggattggagtgaacagaagacccaggaagaggaagagaagagagaaggaggaggtgtttgagaagctgctgcctgaccagctggtgctgctgctggagcacctgctggagcagaagaccctgagccccaggaccctgcagagcctgcagaggacctaccacctgcaggaccaggatgctgaggtgcgccaccgctggtgtgagctgattgtgaagcacaagttcaccaaggcctacaagtctgtggagcgcttcctgcaggaggaccaggccatgggcgtgtacctgtatggagagctgatggtgtctgaagatgcccggcagcagcagctggcccggcgctgctttgagaggaccaaggagcagatggacaggagcagcgcccaggtggtggccgagatgctgttctag

SEQ ID NO: 225798 - DNA, 2163 bp, Artificial Sequence
  derived and/or modified sequence
atggacatccagctggaccccgcccgggacgacctgcccctgatggcgaatacctcacacatactagttaaacactacgtgctagatctcgacgtggactttgaatcacaggtgattgaagggactatagtgttgtttctcgaagatggcaaccgttttaagaagcagaatagctccatcgaagaggcttgccagagcgaaagcaacaaggcctgcaaatttggcatgcctgagccctgtcacatccccgtcacaaatgcccgcacctttagcagcgaaatggaatacaacgacttcgccatttgctctaagggcgagaaggacacctccgataaagatgggaaccacgacaaccaggagcatgcgtcgggtatctcctcaagcaagtattgctgtgatacaggtaatcatggctcagaagacttccttcttgtcctggactgttgcgacctcagtgtgcttaaagtcgaggaggtagacgttgcagcagtgccaggactggaaaagttcactagatcacccgaactcaccgtggtgtccgaggaattcagaaatcagatagtccgggagctggtgacattgccagccaatcgatggagggagcaattggactattacgcgagatgctcacaggcacctgggtgtggggagcttctgttcgatacagatacctggtccttacaaattagaaagaccggagcccaaaccgcaacggactttccccatgcaattaggatctggtataagaccaagccggaaggtcggtctgttacgtggacgtcagaccagagtggccggccgtgtgtctataccgtgggatcgcccatcaacaacagggccctgttcccctgccaggagccccctgtggctatgtcaacctggcaggctactgtacgagcagccgcttctttcgttgtgctgatgtcgggggagaacagtgctaaaccgacccaactttgggaggagtgttcttcatggtactattacgtaactatgccaatgcctgcctctacattcactattgcagtaggctgttggactgagatgaagatggagacatggagctccaacgatcttgctacagaacggcctttcagcccatcggaggccaattttcggcatgtcggggtgtgttcacatatggaatacccgtgcaggttccagaatgcatccgctacaactcaggagattatcccgcaccgtgtgtttgctcctgtatgtctgacaggagcatgtcaggaaacgctgctaagactgatacctccgtgtctgtccgccgctcactcagtcctcggcgctcatccattcagtcgccttgatgtgctcattgtgccagcaaattttccgagtcttgggatggctcggcccagcaaggataagacaggccataccagcgactctggagcatccgttattaagcacggactgaaccccgagaaaatatttatgcaggttcactacctcaaggggtattttctgttgaggttcctggctaagaggctcggggatgagacctatttcagttttctaaggaaattcgtgcacaccttccatgggcagctaattctgagtcaggactttctgcagatgttgctcgaaaatatacctgaagagaagaggttagagctgtctgtggaaaatatttaccaagactggctggagtcatctggaattcctaaacccctgcagagggagaggcgggccggggcagaatgcgggttagcccgtcaggtgagggcggaagttactaagtggattggcgtcaatcgtcgaccccgaaaacgaaaacgacgagagaaagaagaagtgtttgagaaactcttacctgatcagcttgtgcttctgctcgagcacttgttggagcagaaaaccctgagtccgagaaccctgcaatctctgcagcgaacttaccacctacaagatcaggacgccgaagttagacatagatggtgtgaactgattgtcaaacataaatttacaaaggcttataaatccgttgagcgattcctacaagaagatcaggccatgggagtgtacctgtatggggaattgatggtcagcgaagatgctagacagcaacagttggccagacgatgttttgagaggaccaaggagcagatggacagaagctctgcacaggtcgttgcggagatgctgttttag

SEQ ID NO: 225799 - DNA, 552 bp, Artificial Sequence
  derived and/or modified sequence
gccgaccccggccgggcccagggcgccggcagcggcgccgccgccgccagcagccccgccgcaggcgagccactccagcgcgaaagaagggccggtgccgagtgtgggctggccagacaagttcgggccgaggtgactaagtggataggcgtgaatcgacgacctcgcaagaggaaacggagagaaaaagaggaagtgttcgaaaagttactgccggatcagttggtcctgttgttggagcatttactcgagcaaaaaacgctgtcacctagaacactccagtcactgcagcggacataccatctgcaggaccaggatgcagaggtacgccaccggtggtgtgagctgattgtgaagcataagtttaccaaagcctacaagagcgtggagcgctttctccaagaggatcaagctatgggagtgtacctgtacggagagttgatggtcagcgaggacgccagacaacaacaacttgcaagaaggtgcttcgagcgaaccaaggagcagatggacagaagctcagcgcaggttgtagcagaaatgctgttttag

SEQ ID NO: 225800 - DNA, 546 bp, Artificial Sequence
  derived and/or modified sequence
atgcggatgcggcggcccctggccggcggcggcaagagctggggcatcgcacatttctataagcccctgcagcgggaacgccgcgctggcgcggagtgcggtctcgcaaggcaggtcagggctgaggtgactaagtggatcggggtcaacagaagaccgcggaagcgcaagaggcgggagaaggaggaagtattcgaaaaactactgcccgatcagttggttttgctcttggagcatttgctcgagcagaaaactttaagtccccggacactgcagagtctgcaaagaacgtaccacctacaagatcaggatgctgaggtcaggcatcgatggtgtgaattgatagtgaaacacaaattcacaaaggcctataagtccgttgagcgattccttcaagaggatcaagctatgggcgtatacctatacggggaactgatggtgtccgaggacgctcgtcaacagcagctcgcccgcagatgttttgagagaactaaggagcagatggatcggtcctctgcacaggtagttgccgagatgctgttttag

SEQ ID NO: 225801 - DNA, 483 bp, Artificial Sequence
  derived and/or modified sequence
atgcggatgcggcggcccctggccggcggcggcaagagctggggcattgcccacttttataaagtgacgaaatggatcggtgtgaataggaggcctcgcaaaagaaagcggcgcgagaaagaagaggtcttcgaaaagctactgcctgatcaactggttctattactggaacatttattggagcagaagaccctttctccccggaccctccagagcttgcagagaacctaccatcttcaggatcaagacgctgaggtgagacatcgatggtgtgagctgattgtgaagcataagtttaccaaggcatataaatccgttgagcgctttctccaggaagaccaagcaatgggggtgtatctctatggagaactgatggtgagcgaggatgcccgccaacagcaacttgccagaagatgctttgagcgaactaaggagcaaatggatcggtcatccgcccaagtcgtggcagagatgctgttctag

SEQ ID NO: 225802 - DNA, 555 bp, Artificial Sequence
  derived and/or modified sequence
tgagccgaccccggccgggcccagggcgccggcagcggcgccgccgctgcgtctagccctgccgccggcgagccattgcaaagggaaagaagggcaggcgcagagtgtggtctcgcccggcaggtgagagcagaggtcacaaagtggattggagtgaaccggaggcctcgcaaacggaaacggagggaaaaggaggaggtcttcgaaaagctcctaccagaccaactagtgctgctattagagcatctgttggaacaaaagaccttgtccccacggacactgcaatctttgcagaggacttatcatcttcaggaccaggatgctgaagtacggcataggtggtgtgagcttattgtcaaacataagttcactaaagcatacaagtccgtggagcgcttcctgcaggaggaccaggccatgggggtgtatctatacggggagctcatggtgtccgaagatgccagacagcagcagctagcgcgcagatgttttgaacgcaccaaagaacagatggaccgcagtagtgcccaggtggtggctgaaatgctgttctag

SEQ ID NO: 225803 - DNA, 2163 bp, Artificial Sequence
  derived and/or modified sequence
atggacatacagctggatccagctagagacgatcttcctctgatggccaatacatcccatatcctggttaaacactatgtcctcgacctcgacgtagatttcgaatctcaggtgatcgaaggtaccatcgtgttgttcctggaggacggaaaccgattcaaaaaacagaacagtagcattgaggaagcctgccagagcgaatctaataaagcatgcaaattcggaatgcctgaaccttgtcatatacccgttacaaacgcacggaccttctcaagcgaaatggagtacaatgattttgccatttgcagtaaaggggaaaaggatacctccgacaaagatggcaaccatgataaccaggagcacgcttccggaatttcatcttccaagtattgttgtgacactggaaaccacggctccgaggactttctcctagtgctggactgttgtgatttatcagtactgaaagtggaagaggtggatgtggcggctgttcccggacttgaaaagtttacgcgatcccctgaactcaccgtcgtgagcgaggaattccgcaaccagatcgtccgagagcttgtaacactgcctgctaataggtggcgggagcaattagactactacgccagatgttctcaggcaccagggtgtggagagttactctttgatactgacacctggtccctccaaattaggaagacaggggctcagacggctaccgatttccctcatgctatccggatctggtataaaactaagcccgagggccgatctgtgacctggaccagtgatcagtcaggacgcccttgtgtgtatacagtgggatcgccaattaacaatcgggctctgttcccctgccaagaaccaccagtggcgatgagcacttggcaggcaaccgtgagggcagctgccagtttcgtagtgttgatgagtggcgaaaactctgccaaacccacacagctttgggaggagtgttcatcatggtactattatgtgaccatgccgatgccagcctctacgtttaccatcgcggtgggctgttggaccgagatgaagatggagacctggtcttctaacgacctggccactgagcggccattctcgcctagtgaagctaattttcggcacgtaggcgtctgctcccatatggaatatccatgtagatttcaaaacgccagcgctactacacaagagatcatcccccacagagtgttcgctcccgtgtgtcttaccggcgcatgtcaggagactcttcttcgactcattccaccttgcctgtccgcggctcacagcgtgctaggtgcccatcccttttctaggttggacgtattgatcgtgcctgcaaactttcccagcctgggtatggcccgtccttctaaggacaagacaggccatactagcgattcaggcgcttctgtgatcaaacacgggttgaatcctgaaaagatctttatgcaggtccactatctgaagggctattttctattgagattcctggcaaaacggctcggggatgaaacttacttttcattcctgcgcaagtttgtgcacaccttccatggacaactgatattatctcaggactttctgcagatgctgctggaaaacatcccagaagagaagcgattggagctgtcagttgaaaacatatatcaggactggttggagtcctccggcatcccaaagccactacagcgggagcgcagggcgggtgccgaatgcggccttgcccgacaggtacgggctgaagtcactaaatggatcggggtgaaccgacgacccaggaaaagaaagcgcagggagaaggaggaagttttcgaaaagctgctgcctgaccaactggttctgctgcttgagcacctccttgaacagaaaacactctcccctagaacactacagtctttacaaagaacttatcatttgcaggatcaggacgctgaagtgcgtcataggtggtgtgagctcatagttaagcacaaattcaccaaggcctacaaaagcgtggagaggtttctacaggaagaccaagccatgggcgtctacctgtatggcgagctgatggtttccgaggacgctcggcagcagcagttggcaagaagatgtttcgagcgcaccaaggaacaaatggatcgatcatctgcgcaggtggtagccgaaatgctattttag

SEQ ID NO: 225804 - DNA, 552 bp, Artificial Sequence
  derived and/or modified sequence
gccgatcccggacgcgctcagggagccggttccggggcagccgcagccagttcccccgctgccggagaaccgctccagcgggagcggagagccggagcagaatgcggcctggccagacaggtgagggccgaagtcaccaagtggatcggcgtaaatcgacgccctcgcaaacggaaaagaagagaaaaggaggaggtatttgagaagctgctgccagatcagctggtcttattactggagcacctcctggaacagaaaactctttcacctcgcacactccagtctctgcaacggacgtaccacctccaggatcaggatgccgaggtgcgccaccggtggtgcgagttaatagtcaagcacaaattcaccaaggcgtacaagtcggtcgagagatttctccaggaggaccaggccatgggtgtctatctgtacggtgagctgatggtgagcgaagatgctaggcagcagcagttggctaggcgctgctttgaacgaacaaaggaacaaatggaccgtagttccgctcaggtcgtcgctgagatgctgttctag

SEQ ID NO: 225805 - DNA, 546 bp, Artificial Sequence
  derived and/or modified sequence
atgagaatgagacgccctctggccggtggtgggaaatcctgggggatcgcccacttctataaaccgctccagcgcgagcgcagagcaggtgctgagtgtggactcgctcggcaggtgcgtgcagaggtcactaaatggataggcgtcaaccggaggccacggaagagaaaacgtcgagagaaggaggaagttttcgagaagctcctacccgaccagttggtcctgctgctggagcacctgctggagcagaagaccctgtctccaaggaccctgcaaagcttgcagcgcacatatcatctccaggatcaggacgcagaggtcagacacaggtggtgcgagttaatcgtgaaacataaatttaccaaggcctataagagtgtagagcgcttcctgcaggaagatcaggcaatgggggtctacctttatggagagttgatggttagcgaggacgccagacaacagcaactggccagacgatgtttcgagcgaacaaaggaacagatggaccgatcttctgcacaggttgtggccgaaatgcttttctag

SEQ ID NO: 225806 - DNA, 483 bp, Artificial Sequence
  derived and/or modified sequence
atgcgtatgaggagaccccttgccggtggaggcaagagttggggcattgcccatttttacaaagtgactaagtggatcggagtcaaccgtcggccacgaaagaggaagcggagagagaaagaagaagtcttcgagaagcttctgcctgaccaactggtcctgctgcttgaacatctgctggagcagaagactctgtctccgcgtacattgcagagcctgcaaaggacttaccacctccaggatcaggatgcagaagtcaggcacaggtggtgcgaacttatcgtaaaacacaagtttactaaagcttacaaatctgtggagcgctttctccaagaagatcaagccatgggtgtgtatttgtacggtgagcttatggtgtccgaggacgcacggcagcaacaactcgcgaggcggtgcttcgaaaggaccaaggagcaaatggatagatccagcgcccaagtggtggccgaaatgctgttctag

SEQ ID NO: 225807 - DNA, 555 bp, Artificial Sequence
  derived and/or modified sequence
taggctgacccaggacgtgctcagggtgccggttccggagccgcagctgcctcctctcccgctgccggagagccactgcagcgtgaacgacgcgctggagcagagtgtgggctggcacgccaggtgcgagctgaggtcacgaaatggattggggtgaaccgccgacccaggaagcggaaacgacgcgagaaggaagaggtgtttgagaagctgctaccagaccaactcgttttgctgctagagcacctgttggaacagaagaccctgtctcctaggacactgcaatccttacaacgcacgtaccatctgcaggaccaggacgctgaagttcgacatagatggtgtgaattaatcgtcaaacacaagtttaccaaggcctataaaagcgtcgagaggtttctccaagaagatcaggcaatgggggtgtatctttacggggaactgatggtatccgaggacgcaagacaacagcaactcgccaggcggtgctttgagcgcaccaaggaacagatggatcgtagctctgcccaagtggtggccgagatgcttttctag

SEQ ID NO: 225808 - protein, 550 aa, Artificial Sequence
  derived and/or modified sequence
MPLQGSVSFKDVTVDFTQEEWQQLDPAQKALYRDVMLENYCHFVSVGFHMAKPDMIRKLEQGEELWTQRIFPSYSYLEEDGKTEDVLVKFKEYQDRHSRPLIFINHKKLIKERSNIYGKTFTLGKNRISKTILCEYKPDGKVLKNISELVIRNISPIKEKFGDSTGWEKSLLNTKHEKIHPAVNLHKQTERVLSGKQELIQHQKVQAPEQPFDHNECEKSFLMKGMLFTHTRAHRGERTFEYNKDGIAFIEKSSLSVHPSNLMEKKPSAYNKYGKFLCRKPVFIMPQRPQTEEKPFHCPYCGNNFRRKSYLIEHQRIHTGEKPYVCNQCGKAFRQKTALTLHEKTHIEGKPFICIDCGKSFRQKATLTRHHKTHTGEKAYECPQCGSAFRKKSYLIDHQRTHTGEKPYQCNECGKAFIQKTTLTVHQRTHTGEKPYICNECGKSFCQKTTLTLHQRIHTGEKPYICNECGKSFRQKAILTVHHRIHTGEKSNGCPQCGKAFSRKSNLIRHQKTHTGEKPYECKQCGKFFSCKSNLIVHQKTHKVETTGIQ

SEQ ID NO: 225809 - DNA, 2830 bp, Artificial Sequence
  derived and/or modified sequence
gactcaccctgggccgggggtgaggcttggactgtttctttttccaaaagaggagctcaaaagagaaagttcatctagaaatctcaaagccatgtctcaggatgaactagagtatgcccttacagggatcagtgtcattcaaggatgtgactgtggacttcacccaggaggagtggcagcaactagaccctgctcagaaggcgctttacagggatgtgatgttggaaaactattgccacttcgtatctgtggggtttcacatggctaagcctgatatgatccgcaagttggaacaaggagaagagctatggacacagagaatttttccaagttacagctacctagaagaagatgggaaaactgaagatgtcttagtgaagttcaaagaataccaagacaggcattctagacccctcatattcatcaaccacaaaaaactaattaaggagagaagtaatatttatggtaaaacatttactctaggcaagaaccgtatttcaaaaacaatactatgtgaatataaacctgatggaaaagttttgaaaaatatttcagaactagtcattagaaatataagccccataaaagagaagtttggtgacagtactggatgggagaaatcactcctcaataccaagcatgagaaaattcatcctgcagtgaatctccataaacaaacagaaagagttctcagtggtaaacaggagcttattcagcatcagaaggttcaagctccagagcaaccatttgaccataatgaatgtgaaaaatccttcctgatgaaaggaatgctatttacacatactagagctcacagaggagaaagaacctttgaatacaataaagatggaattgccttcatagaaaagtcaagcctcagtgtccatccaagtaatcttatggaaaagaagccctctgcctacaacaaatatgggaaattcctctgcagaaagcctgtttttattatgcctcagagacctcaaacagaagagaaaccctttcactgtccttactgtgggaataactttagaaggaagtcatacctcattgaacatcagcgaattcacacaggtgaaaaaccttatgtttgcaatcaatgtggaaaggccttccgtcagaagacagccctcacccttcatgagaaaacacatatagaggggaaaccctttatttgtatcgattgtgggaagtccttccgccagaaggccaccctcactagacatcacaaaacacatacgggggagaaagcctatgaatgtcctcagtgtggaagtgcctttaggaagaagtcatacctcattgatcaccagagaactcacacaggagagaaaccgtatcagtgtaatgagtgtgggaaggcatttatccagaagacaaccctcactgttcatcagagaactcacacaggagagaaaccctatatttgcaatgaatgtgggaagtccttctgccaaaagacaaccctcactctccaccagagaattcacacgggggaaaaaccctatatttgtaatgaatgtgggaagtccttccgccagaaggcaatcctcactgttcatcacagaatacatacaggagaaaaatccaatgggtgtcctcagtgtgggaaagccttcagtaggaaatcaaacctcattcgccatcagaaaactcacacaggcgagaaaccatatgaatgtaaacagtgtgggaagttcttcagttgtaagtcaaacctcattgtccatcagaaaactcacaaggtagaaaccacgggaattcagtaagtaatgtggctttttttgtaaaaaaatgttaagtcatagtaaaccctgtagatgatgttgcttgcaagcgtaatatccaacagtttaaggtactataccacatggtaacctactgtttgccagcctgtaaaacacacacacacacacacacacacacacaaatattattagacaaattagatgacaaaaatcattaagaagtccaaactttttttttattactagcttcagcagacaaaaacttcctctgtcaaggtgttataaacatttaaaatcacattttccatttccatacatatctttttgttcatcagtaataactagttggccaactgactgtggtccatggactacacagtgagtagaggttctttaaaagaaggaggtatgaactgtatttctcattgcaaatacaaaataaaaattagttgttacctcctcacagttgaccatgattctgacttctaacattacaaattagtttttactattataaacctttctataaattggattatatatcatgtattctttcatatacagcttattaccttcatcatgtccgtgagtctaatcattagtacgtgtggcagaagtttatttatttttatccagtatagaattcaattatatgattatatcacaatttatccattctgctgttgatggacttttacattgtttacagcttagggtcataataaatcatgcttctgagaacatacttgtcttggtgtacatacatgtatttctcttgtgtatatacttaggagtggaatcgctgggtcttagagcatgtgtgtattcagtcagatactggcagacaattcagaactttcaccacatgagataattgacactgaagggaaacagctataaattttatcaatatggtgctggttcaaaccagagaattcatgctgcagggaaactcaatcaatgttattgtgaaaactgggaatgtgaatgtaatatatgtagaaaaacatttagccacagcccaaatcttccaggcaaatgtaataaacgtgacattgccgttagccaaaaaaaaaaaaaaaaaa

SEQ ID NO: 225810 - DNA, 1653 bp, Artificial Sequence
  derived and/or modified sequence
atgcccctgcagggcagcgtgagcttcaaggacgtgaccgtggacttcacccaggaggagtggcagcagctggaccccgcccagaaggccctgtacagagacgtgatgctggagaactactgccacttcgtgagcgtgggcttccacatggccaagcccgacatgatcagaaagctggagcagggcgaggagctgtggacccagagaatcttccccagctacagctacctggaggaggacggcaagaccgaggacgtgctggtgaagttcaaggagtaccaggacagacacagcagacccctgatcttcatcaaccacaagaagctgatcaaggagagaagcaacatctacggcaagaccttcaccctgggcaagaacagaatcagcaagaccatcctgtgcgagtacaagcccgacggcaaggtgctgaagaacatcagcgagctggtgatcagaaacatcagccccatcaaggagaagttcggcgacagcaccggctgggagaagagcctgctgaacaccaagcacgagaagatccaccccgccgtgaacctgcacaagcagaccgagagagtgctgagcggcaagcaggagctgatccagcaccagaaggtgcaggcccccgagcagcccttcgaccacaacgagtgcgagaagagcttcctgatgaagggcatgctgttcacccacaccagagcccacagaggcgagagaaccttcgagtacaacaaggacggcatcgccttcatcgagaagagcagcctgagcgtgcaccccagcaacctgatggagaagaagcccagcgcctacaacaagtacggcaagttcctgtgcagaaagcccgtgttcatcatgccccagagaccccagaccgaggagaagcccttccactgcccctactgcggcaacaacttcagaagaaagagctacctgatcgagcaccagagaatccacaccggcgagaagccctacgtgtgcaaccagtgcggcaaggccttcagacagaagaccgccctgaccctgcacgagaagacccacatcgagggcaagcccttcatctgcatcgactgcggcaagagcttcagacagaaggccaccctgaccagacaccacaagacccacaccggcgagaaggcctacgagtgcccccagtgcggcagcgccttcagaaagaagagctacctgatcgaccaccagagaacccacaccggcgagaagccctaccagtgcaacgagtgcggcaaggccttcatccagaagaccaccctgaccgtgcaccagagaacccacaccggcgagaagccctacatctgcaacgagtgcggcaagagcttctgccagaagaccaccctgaccctgcaccagagaatccacaccggcgagaagccctacatctgcaacgagtgcggcaagagcttcagacagaaggccatcctgaccgtgcaccacagaatccacaccggcgagaagagcaacggctgcccccagtgcggcaaggccttcagcagaaagagcaacctgatcagacaccagaagacccacaccggcgagaagccctacgagtgcaagcagtgcggcaagttcttcagctgcaagagcaacctgatcgtgcaccagaagacccacaaggtggagaccaccggcatccagtag

SEQ ID NO: 225811 - DNA, 1653 bp, Artificial Sequence
  derived and/or modified sequence
atgcctcttcaggggtccgtcagcttcaaggacgtgacagttgacttcacacaggaagaatggcagcagctggatcccgcgcagaaggcgctgtaccgcgatgtgatgctcgaaaactattgtcacttcgtgagcgtgggatttcatatggccaaacccgatatgataaggaagctcgagcaaggcgaggagctttggacccagcgcattttcccaagttacagttatctcgaggaagacgggaaaacagaagatgtgctggtgaaatttaaagagtatcaggaccgtcattcaagaccattaatcttcatcaatcacaagaagctgattaaggagcgcagtaatatctatgggaagacttttactttgggtaagaatcgtatttcgaagactatcctatgcgagtataagcccgacgggaaagtactcaaaaacatcagcgagttagtaattaggaacattagtccaataaaggaaaaatttggagattcgactggttgggagaagagcctcctgaacacaaagcacgaaaagatccacccggcagtgaacctgcacaaacaaaccgaaagggtcctcagcggaaaacaggagttgatacagcaccagaaggtgcaggctccggaacagccatttgaccataatgaatgcgagaaaagttttctgatgaaagggatgctgttcacacacacccgggcccataggggtgagaggactttcgagtacaacaaggacggaatcgcctttatagaaaaaagttctttatccgtgcacccatcaaatctcatggaaaagaaaccatcagcctacaataagtacggcaagtttctgtgcagaaagcccgttttcatcatgccccagagaccacagaccgaggaaaaacctttccattgtccctactgtggtaataatttcagacgcaagtcctacttaatagaacatcagagaatacacactggggaaaaaccttacgtatgcaatcagtgtggaaaagcatttcgtcagaagactgccctaaccctgcatgagaagacgcatatcgagggaaaacctttcatttgtatcgactgcggcaagtccttccgtcagaaagcaaccctgacacggcaccacaaaactcacacgggtgaaaaggcatacgagtgcccccagtgcgggtctgcattccggaaaaaaagctacctgattgatcatcagcgcacccacactggtgaaaaaccttatcagtgtaacgagtgtggcaaggcctttatccagaagactactttgaccgtccatcagcggacacacacaggggaaaagccttacatctgtaacgagtgtggcaaaagtttctgccaaaagacgacactgactttgcaccagcgaattcacactggtgagaagccatacatctgtaacgagtgtggaaaaagcttccggcagaaggccatccttacagtgcaccataggatccacaccggcgaaaagtcgaatggctgtccgcagtgtggaaaagctttcagtcgcaagtccaatttaatccggcatcaaaaaacccatacaggagagaagccctatgaatgtaaacagtgtggaaagttcttcagttgtaagagtaacttgatagtacatcagaagacccacaaagtggagaccactgggattcagtag

SEQ ID NO: 225812 - DNA, 1653 bp, Artificial Sequence
  derived and/or modified sequence
atgcccctgcagggctctgtgtccttcaaggatgtgacagtggacttcacccaggaggagtggcagcagctggaccctgcccagaaggccctgtacagagatgtgatgctggagaactactgccactttgtgtctgtgggcttccacatggccaagccagacatgatcaggaagctggagcagggcgaggagctgtggacccagaggatcttccccagctacagctacctggaggaggatggcaagacagaagatgtgctggtgaagttcaaggagtaccaggacagacacagccggcccctcatcttcatcaaccacaagaagctgatcaaggagaggagcaacatctacggcaagaccttcaccctgggcaagaaccgcatcagcaagaccatcctgtgtgagtacaagccagatggcaaggtgctgaagaacatcagcgagctggtgatccggaacatcagccccatcaaggagaagtttggagacagcacaggctgggagaagagcctgctgaacaccaagcatgagaagatccaccctgctgtgaacctgcacaagcagacagagcgggtgctgagcggcaagcaggagctgatccagcaccagaaggtgcaggcccctgagcagccctttgaccacaatgaatgtgagaagagcttcctgatgaagggcatgctgttcacccacacccgggcccacagaggagagaggacctttgagtacaacaaggatggcatcgccttcatcgagaagagcagcctgtctgtgcaccccagcaacctgatggagaagaagcccagcgcctacaacaagtatggcaagttcctgtgcaggaagcctgtgttcatcatgccccagaggccccagacagaggagaagcccttccactgcccctactgcggcaacaacttccggaggaagagctacctgattgagcaccagaggatccacactggagagaagccctacgtgtgcaaccagtgtgggaaggccttccggcagaagacagccctgaccctgcacgagaagacccacatcgagggcaagcccttcatctgcatcgactgtgggaagagcttccggcagaaggccaccctgaccaggcaccacaagacccacactggagagaaggcctatgaatgtccccagtgtggcagcgccttcaggaagaagagctacctgattgaccaccagaggacccacactggagagaagccctaccagtgcaatgaatgtgggaaggccttcatccagaagaccaccctgactgtgcaccagaggacccacactggagagaagccctacatctgcaatgaatgtgggaagagcttctgccagaagaccaccctgaccctgcaccagaggatccacactggagagaagccctacatctgcaatgaatgtgggaagagcttccggcagaaggccatcctgactgtgcaccaccgcatccacactggagagaagagcaatggctgcccccagtgtgggaaggccttcagcaggaagagcaacctgatccgccaccagaagacccacactggagagaagccctatgagtgcaagcagtgtgggaagttcttcagctgcaagagcaacctgattgtgcaccagaagacccacaaggtggagaccaccggcatccagtag

SEQ ID NO: 225813 - DNA, 1653 bp, Artificial Sequence
  derived and/or modified sequence
atgcccctgcagggcagcgtgagcttcaaggacgtgaccgtggacttcacccaggaggaatggcaacagctggatccagcccagaaggccttgtatcgtgatgttatgcttgaaaactactgccacttcgtaagcgtgggctttcacatggccaaacctgatatgattcgtaagctggagcagggggaagaactttggacacaaagaatttttccttcctacagctatctagaggaggatggaaaaacagaggatgttttggtgaaattcaaggagtatcaagataggcactcccggcctttaatcttcattaatcacaaaaaactcataaaggagcggagcaacatctacggaaaaacgttcacactcggcaagaaccgcattagcaagacgatcctctgcgagtacaagcctgacggaaaggtgcttaagaatatcagcgaattagtaataagaaatatttccccaattaaggaaaaattcggagattcaactggctgggagaagtccctgcttaacaccaagcacgaaaaaattcaccccgcagtgaacttacataaacaaacggagcgggtgctctccggcaaacaggagctgatccagcaccagaaggtgcaggcaccagaacagccttttgatcacaatgagtgtgagaagtcctttctgatgaaaggtatgctgttcacccacacacgcgcccaccggggggagcggaccttcgagtataacaaggatggcatagcattcatcgagaagtcctcgctctctgtacatccaagcaatctgatggagaagaaaccatctgcctataacaagtacgggaaattcctctgccgcaaacctgtatttatcatgccccagcgcccacagacagaagagaagccctttcactgcccgtattgtgggaacaacttcagaaggaagtcttatcttatagaacaccaacgcattcatactggagaaaaaccttatgtgtgtaaccaatgtggtaaagctttcaggcaaaaaacagctcttacactgcatgaaaagactcacattgaggggaaaccttttatttgtatcgactgcgggaagtcatttagacaaaaagcgactctcactagacatcacaaaactcacaccggcgaaaaggcttacgagtgtcctcaatgtgggtccgccttcaggaaaaagtcgtacttgatcgatcatcagcggactcatacaggggaaaaaccctatcagtgtaatgaatgcggcaaagcctttatccagaaaactacactgaccgtgcatcagcggacccatacaggcgagaaaccttatatctgcaacgagtgtggtaaatctttttgtcaaaagaccaccttaacactacaccaacggatccacactggcgagaagccctatatttgcaatgagtgcggaaaaagctttagacaaaaagcaattctgacagtccatcaccgcattcataccggggagaaatccaatggttgtccacaatgcggaaaagcattcagccgtaagtcaaacttaatccggcaccaaaagacccatactggtgagaaaccttacgagtgcaagcagtgcgggaaatttttcagctgtaagtctaacctcatcgtacatcaaaaaactcacaaagtcgagacaaccggaatacaatag

SEQ ID NO: 225814 - DNA, 1653 bp, Artificial Sequence
  derived and/or modified sequence
atgccactgcagggctccgtgtcttttaaggatgtgaccgtcgatttcactcaggaggagtggcagcaactggatcccgcacaaaaagcactctacagagacgtgatgctggagaattattgtcattttgtgagtgtggggtttcacatggccaaaccagatatgattcgaaagcttgaacagggtgaagagctatggactcagcggattttcccgtcctatagctatttagaagaagatggaaaaaccgaggatgtccttgttaagtttaaagagtaccaggacaggcattctcgcccattgatctttatcaatcataaaaaactcatcaaggaacggagtaatatctacggtaagacgttcacactgggcaagaaccggatctctaaaacaatcctatgtgaatataaacccgatggaaaggtcctgaaaaatatcagcgaactcgtcatcagaaacatttctccaattaaggaaaagttcggcgattctacaggatgggagaaatccctgttaaatacaaagcatgagaagattcaccctgccgttaacctccataagcagacggagagggtgttgagcggcaaacaggaactcatacaacatcagaaggtacaggctcctgaacagccttttgatcacaacgagtgcgaaaaaagcttccttatgaaggggatgctgtttacacacacacgcgcacacaggggggaacgcacttttgaatataataaagacgggatcgcctttatagagaagtccagcttgtcagtccacccctccaacctgatggagaaaaagccaagcgcttacaataaatacggtaagttcctgtgtcgaaagcccgtgtttattatgccccagaggccacaaacagaggagaaaccatttcattgcccatattgcggcaataactttaggcgaaagagttacctaattgaacaccaacggatccatactggcgagaaaccctacgtgtgcaaccagtgtggaaaagcattccgacagaagacagcgctcaccttgcatgagaaaactcacatcgaagggaaaccattcatttgtatcgattgcgggaagtctttccggcagaaggctacactcacaagacaccacaagacacatacaggtgaaaaggcttacgagtgtcctcagtgtggctccgctttcagaaagaaatcttacttaatagatcaccaacggacccacacaggggagaaaccctatcagtgtaacgaatgtggcaaggcctttatccagaaaaccaccctcactgttcaccaacgaacacacacaggtgagaaaccttatatctgcaatgagtgcggaaagtcattctgccagaaaacaacactcaccctgcaccagaggattcacacgggtgagaagccgtacatctgtaatgagtgtggtaagtcctttagacaaaaagccatcttgactgtgcaccaccgcatccacacaggagaaaagtcaaacgggtgtccccagtgtgggaaggccttctctaggaaaagcaaccttatccggcaccagaaaacccacactggcgagaaaccttacgagtgtaagcaatgcggcaagttctttagctgtaagtctaatttgatcgtccatcagaagacccataaggtggagacgaccggaattcagtag

SEQ ID NO: 225815 - DNA, 2813 bp, Artificial Sequence
  derived and/or modified sequence
gactcaccctgggccgggggtgaggcttggactgtttctttttccaaaagaggagctcaaaagagaaagttcatctagaaatctcaaagccatgtctcaggatgaactagagtatgcccttacagggatcagtgtcattcaaggatgtgactgtggacttcacccaggaggagtggcagcaactagaccctgctcagaaggcgctttacagggatgtgatgttggaaaactattgccacttcgtatctgtggggtttcacatggctaagcctgatatgatccgcaagttggaacaaggagaagagctatggacacagagaatttttccaagttacagctacctagaagaagatgggaaaactgaagatgtcttagtgaagttcaaagaataccaagacaggcattctagacccctcatattcatcaaccacaaaaaactaattaaggagagaagtaatatttatggtaaaacatttactctaggcaagaaccgtatttcaaaaacaatactatgtgaatataaacctgatggaaaagttttgaaaaatatttcagaactagtcattagaaatataagccccataaaagagaagtttggtgacagtactggatgggagaaatcactcctcaataccaagcatgagaaaattcatcctgcagtgaatctccataaacaaacagaaagagttctcagtggtaaacaggagcttattcagcatcagaaggttcaagctccagagcaaccatttgaccataatgaatgtgaaaaatccttcctgatgaaaggaatgctatttacacatactagagctcacagaggagaaagaacctttgaatacaataaagatggaattgccttcatagaaaagtcaagcctcagtgtccatccaagtaatcttatggaaaagaagccctctgcctacaacaaatatgggaaattcctctgcagaaagcctgtttttattatgcctcagagacctcaaacagaagagaaaccctttcactgtccttactgtgggaataactttagaaggaagtcatacctcattgaacatcagcgaattcacacaggtgaaaaaccttatgtttgcaatcaatgtggaaaggccttccgtcagaagacagccctcacccttcatgagaaaacacatatagaggggaaaccctttatttgtatcgattgtgggaagtccttccgccagaaggccaccctcactagacatcacaaaacacatacgggggagaaagcctatgaatgtcctcagtgtggaagtgcctttaggaagaagtcatacctcattgatcaccagagaactcacacaggagagaaaccgtatcagtgtaatgagtgtgggaaggcatttatccagaagacaaccctcactgttcatcagagaactcacacaggagagaaaccctatatttgcaatgaatgtgggaagtccttctgccaaaagacaaccctcactctccaccagagaattcacacgggggaaaaaccctatatttgtaatgaatgtgggaagtccttccgccagaaggcaatcctcactgttcatcacagaatacatacaggagaaaaatccaatgggtgtcctcagtgtgggaaagccttcagtaggaaatcaaacctcattcgccatcagaaaactcacacaggcgagaaaccatatgaatgtaaacagtgtgggaagttcttcagttgtaagtcaaacctcattgtccatcagaaaactcacaaggtagaaaccacgggaattcagtaagtaatgtggctttttttgtaaaaaaatgttaagtcatagtaaaccctgtagatgatgttgcttgcaagcgtaatatccaacagtttaaggtactataccacatggtaacctactgtttgccagcctgtaaaacacacacacacacacacacacacacacaaatattattagacaaattagatgacaaaaatcattaagaagtccaaactttttttttattactagcttcagcagacaaaaacttcctctgtcaaggtgttataaacatttaaaatcacattttccatttccatacatatctttttgttcatcagtaataactagttggccaactgactgtggtccatggactacacagtgagtagaggttctttaaaagaaggaggtatgaactgtatttctcattgcaaatacaaaataaaaattagttgttacctcctcacagttgaccatgattctgacttctaacattacaaattagtttttactattataaacctttctataaattggattatatatcatgtattctttcatatacagcttattaccttcatcatgtccgtgagtctaatcattagtacgtgtggcagaagtttatttatttttatccagtatagaattcaattatatgattatatcacaatttatccattctgctgttgatggacttttacattgtttacagcttagggtcataataaatcatgcttctgagaacatacttgtcttggtgtacatacatgtatttctcttgtgtatatacttaggagtggaatcgctgggtcttagagcatgtgtgtattcagtcagatactggcagacaattcagaactttcaccacatgagataattgacactgaagggaaacagctataaattttatcaatatggtgctggttcaaaccagagaattcatgctgcagggaaactcaatcaatgttattgtgaaaactgggaatgtgaatgtaatatatgtagaaaaacatttagccacagcccaaatcttccaggcaaatgtaataaacgtgacattgccgttagcca

SEQ ID NO: 225816 - protein, 331 aa, Artificial Sequence
  derived and/or modified sequence
MRPALAVGLVFAGCCSNVIFLELLARKHPGCGNIVTFAQFLFIAVEGFLFEADLGRKPPAIPIRYYAIMVTMFFTVSVVNNYALNLNIAMPLHMIFRSGSLIANMILGIIILKKRYSIFKYTSIALVSVGIFICTFMSAKQVTSQSSLSENDGFQAFVWWLLGIGALTFALLMSARMGIFQETLYKRFGKHSKEALFYNHALPLPGFVFLASDIYDHAVLFNKSELYEIPVIGVTLPIMWFYLLMNIITQYVCIRGVFILTTECASLTVTLVVTLRKFVSLIFSILYFQNPFTLWHWLGTLFVFIGTLMYTEVWNNLGTTKSEPQKDSKKN

SEQ ID NO: 225817 - DNA, 996 bp, Artificial Sequence
  derived and/or modified sequence
atgcgccccgcgctggcagtgggcctagtttttgctggctgctgttcaaatgtgatattcctggaactcttagctagaaaacatccaggatgcggaaacatagtcacctttgctcagttcttgtttatcgccgtggaggggttcctattcgaagctgacttgggtcggaagcctcccgcgatccctatcaggtactacgccattatggtcaccatgttcttcaccgtttcagttgtgaataactacgctctcaatctgaatatcgccatgcctctgcacatgatttttagaagcggaagtctcatcgccaatatgattctgggcattataattttaaaaaaaaggtattccatatttaagtacacaagcatcgctctggttagcgtgggcattttcatatgcacgtttatgtctgccaagcaggtcactagccaaagctccctgagcgagaatgatggcttccaggcattcgtgtggtggctgcttggtatcggcgcactgacttttgccctactgatgagcgcaagaatgggaattttccaagagacattgtataaacggttcgggaagcactctaaggaggccctgttctacaaccatgccctgcctctgccgggcttcgtgtttttggcctccgacatctatgaccacgccgtcttgtttaacaaaagtgagctctacgagattcctgtgattggagtcacactacctattatgtggttttaccttctcatgaatattatcactcaatacgtatgcatccgaggagtgttcatcctgacaactgagtgtgcctcacttacagtgaccttggttgtgactttgcgcaagttcgtgagcctgattttctcaattctttatttccaaaatccctttaccttatggcattggctgggcacactgttcgtgtttatcgggacgctgatgtacaccgaagtgtggaacaacctaggcaccactaaatcagagccacagaaagactcaaagaagaactag

SEQ ID NO: 225818 - DNA, 996 bp, Artificial Sequence
  derived and/or modified sequence
atgaggcctgccctggccgtgggcctggtgtttgctggctgctgcagcaatgtcatcttcctggagctgctggccaggaagcaccctggctgcggcaacatcgtgacctttgcccagttcctgttcatcgctgtggagggcttcctgtttgaggccgacctgggcaggaagcccccagccatccccatccgctactatgccatcatggtgaccatgttcttcaccgtgtctgtggtgaacaactatgccctgaacctgaacatcgccatgcccctgcacatgatcttccgcagcggcagcctcatcgccaacatgatcctgggcatcatcatcctgaagaagcgctacagcatcttcaagtacaccagcatcgccctggtgtctgtgggcatcttcatctgcaccttcatgtctgccaagcaggtgaccagccagagcagcctgtctgaaaatgatggcttccaggcctttgtgtggtggctgctgggcatcggggccctgacctttgccctgctgatgtctgccaggatgggcatcttccaggagaccctgtacaagagatttgggaagcacagcaaggaggccctcttctacaaccacgccctgcccctgcccggctttgtgttcctggccagtgacatctatgaccatgctgtgctcttcaacaagtctgagctgtatgagatccctgtgattggagtgaccctgcccatcatgtggttctacctgctgatgaacatcatcacccagtatgtgtgcatccggggcgtcttcatcctgaccacagaatgtgccagcctgactgtgaccctggtggtgaccctgaggaagtttgtgtccctcatcttcagcatcctgtacttccagaaccccttcaccctgtggcactggctgggcaccctgtttgtgttcatcggcaccctgatgtacacagaggtgtggaacaacctgggcaccaccaagtctgagccccagaaggacagcaagaagaactag

SEQ ID NO: 225819 - DNA, 996 bp, Artificial Sequence
  derived and/or modified sequence
atgcggcccgccctggccgtgggcctggtgttcgccggctgctgctccaatgtgatcttcctggagctcctggcaagaaaacaccccgggtgtggaaatattgttacctttgcccagttcctctttatcgctgttgagggattcctgttcgaagctgacctgggtagaaaaccaccagccatccccattcggtactacgcgattatggtgacaatgttttttaccgtgtctgtcgtgaataattatgcacttaaccttaatattgcgatgcccttgcacatgatctttaggagtgggtcccttatcgctaatatgatattgggaatcatcattctcaaaaagcggtactctatcttcaagtacacttcaattgctttggtgtccgtagggatattcatatgcactttcatgagcgcgaagcaggttacatctcagagctccctgagcgaaaacgacgggtttcaggcattcgtgtggtggttgttaggcatcggtgccctcacttttgccctgctgatgagcgctcgcatgggtatttttcaggagacgctgtataaaagattcggcaaacactctaaagaagcccttttctataatcatgcgttgcctttgccagggtttgtgttcttagcttccgatatttacgaccatgctgtgttgttcaacaaaagcgagttgtacgagatccccgtgattggtgtgaccctgcctatcatgtggttctatctgctcatgaatattattactcaatacgtgtgtattcggggtgtgttcatcctgacaaccgagtgcgccagtcttaccgttactcttgtagtaaccctgagaaaatttgtgagcttgatttttagcatattatacttccagaatccctttaccctgtggcactggctgggtacactgtttgtgtttattgggacgctgatgtacacagaagtatggaataatctggggaccacaaaatccgagccgcagaaggactctaagaaaaactag

SEQ ID NO: 225820 - DNA, 996 bp, Artificial Sequence
  derived and/or modified sequence
atgcgcccagcactggcggttggcctggtcttcgctggttgctgtagtaacgttatttttctcgagctgctcgccaggaaacacccgggatgtggaaatattgttacatttgcacaattcctgtttattgccgtggaagggttcctctttgaggctgaccttggccgaaagcctcctgctatccctattcgctactacgcgatcatggtgactatgttttttacagtttccgtggtcaacaactacgctcttaatctcaacattgcgatgcctttgcacatgatcttccgttctggctcactcattgctaacatgattctcggaatcatcattctcaagaaaagatactctatctttaaatatacttccattgccctggtgtcggttggcatattcatctgtacattcatgtcagccaagcaggtaacatctcagagctcactttctgagaatgacggctttcaggccttcgtttggtggctgctgggtattggtgcactgaccttcgcactgctgatgtcagcccgaatgggcatctttcaggaaacactctataagcgatttgggaagcacagtaaggaagccctgttctataatcatgcgctgccactgccgggatttgtttttctggcgtcggacatatatgaccatgccgtgctcttcaataagtccgagctgtacgagatccccgttatcggagtcactttgcctattatgtggttttatctcttgatgaacataattacacaatacgtttgtatcagaggggttttcattttgactaccgaatgtgcctcgctgaccgtgaccttggtcgtcaccctccgaaagtttgtgtccctgatctttagcatcttgtacttccaaaatccctttaccctgtggcattggctgggtacattgttcgtcttcattgggaccttgatgtatactgaggtgtggaacaacttgggcactactaaaagtgagccccagaaggacagcaagaaaaactag

SEQ ID NO: 225821 - DNA, 6797 bp, Artificial Sequence
  derived and/or modified sequence
cggaagcgggaacgtcgcatcctgaggtaaaggtgcacggcatcctgggacatgtagtctggccggggctcggacgccccctcggatgaatgggaccgaagctgactgcgaactacagcttcttggcagcgtcggtgttggccgcgggagaaggggagaccgcggcggcccccagtgagagcggctttccaggacggtgcgatgtgctgcgcagcgaagaggcaggaggccggcttcctggggtagcggtacaggcgggcgcttactctgtgcgcttgcttccccaaccctgcaccggccatgcgcccggccttggcggtgggcctggtgttcgcaggctgctgcagtaacgtgatcttcctagagctcctggcccggaagcatccaggatgtgggaacattgtgacatttgcacaatttttatttattgctgtggaaggcttcctctttgaagctgatttgggaaggaagccaccagctatcccaataaggtactatgccataatggtgaccatgttcttcaccgtgagcgtggtgaacaactatgccctgaatctcaacattgccatgcccctgcatatgatatttagatccggttctctaattgccaacatgattctaggaattatcattttgaagaaaagatacagtatattcaaatatacctccattgccctggtgtctgtggggatatttatttgcacttttatgtcagcaaagcaggtgacttcccagtccagcttgagtgagaatgatggattccaggcatttgtgtggtggttactaggtattggggcattgacttttgctcttctgatgtcagcaaggatggggatattccaagagactctctacaaacgatttgggaaacactccaaggaggctttgttttataatcacgcccttccacttccgggtttcgtcttcttggcttctgatatttatgaccatgcagttctattcaataagtctgagttatatgaaattcccgtcatcggagtgaccctgcccatcatgtggttctacctcctcatgaacatcatcactcagtacgtgtgcatccggggtgtgtttatcctcaccacagaatgcgcctccctcaccgtcacgctcgtcgtgaccctacgcaaatttgtgagcctcatcttttccatcttgtacttccagaaccccttcaccctgtggcactggctgggcaccttgtttgtcttcattgggaccttaatgtacacagaggtgtggaacaacctagggaccacaaaaagtgagcctcagaaggacagcaagaagaactgaggcctgtctggagtacgtagaccagtgtcgtcgtgagggtgggaccctgtgaaggtctgaccaccgtttcgcttttgttaatgccgagctacccgcagtgctgagccagccgtgcaaaaggaaatcttcaggaggggacttctcacgttgctcagactgacacatgtagactaaatagaaacccctcagccctaaaatagaaaaaagaacagttctggactattgaacagcccattcatttatttctgttttgtttaccgacatattcagtattattcttgttttctgaattctgagtctcctgaacaaaaggcttactatccatggtcttggaaaagattgtcccttctcttgctgttgtaatgcatctctgctacagcagtcattgtcatcctgtgaccttatcccttttgtctcccatcaccttttccttcttcagcagcacctcacagtcagtcagacgctgcaggcaccactatcaccaggagtggccaagtaaaccgagacaccagtaacagcagggctggacttcctccagcgttttgggaaggaaagagatgttcccctgagctgattcccagtgacagtgcagcaagactagtgggactcctctttcccacattttgcttttttttttttctatgcaaaagtcagatgcttctatccattgctttctgtgattagggcggccctgcagcatatctcacagcagacacagtgttcataacaaagaaaggttgtgccgggcacggtggctcacacctgtaatcccagccctttgggaggctgaggtgggtgtatcacttgaggtcaggagttcaagaccaatctggccaacatggtgaaaccccatctctactaaaaatacgaaaattagctgggtgtgatggcgcatgcctgtaatcccagctacttgggaggctgaggcaggagaatcacttgaacccgggagatgaaggttgcagtgagctgaggtcgtgctactgcactcccgcctgggtgacagagtgagactctatctcaaaaaaaaaaaaaaaaaagaaaggttgttatggactggacacccctgaagcccattgcctaggccacagtggtgacggcaggatggccctgctcagcaccgcaagagccatggctgtccctgttggcccagccgggcactcacagggcagaagggtgggtctcaagtgggaggataaggcttcaccaccaggagattcccctctgcccgatgactctgttaagagtcacgacccatcaagggaatgcatagatggagatatatagtgtgtgatgtgtaaatcaggtcaaacctcaacgacaattgaaagttgttattgtcctatgaggtatcttagcattctcgatgggtattgaggatggttggatgtgctttattgtgtgtggaaacatgcctctctttgctaatcatttcagaggtccagttttcctttcactggacaatcttgaataggaggaacgctgttgctgtaatatgcgtagcttctgtgtgctcttgtgtagtctgtgtgtgatcaaagggcacggaagtggctgcactttcacatcccttttctttacttagctggaaccttacataccagtacatgctcctctgtaagcagctgaactcaccggccacttctctgtttgcctatagacaaagactgtgtgtgtgtgtgtgtatgtatgtgtgtgtgtgtggtgcacacattgtgttcttaaactgagacgtggctctgcaggtctcctgggctcattccatggtgtggtatgtttattccactgtccagagctattctctgatggatttgagcaacagcagtggagataaatgtcctagagtcaccaggtcgcttggagaagtcatttaagctgcctcgggtttttgttacttaaaatgtggatattatttctccacctaaatcactgagtttacagagtaataatgtgttgctctggacattgacagctttctagagccagtaatgggctcttctgaaggatgctgaattagaagtgaacctattcataggatcaaaagccacttgctttgaaatatgtagagttcctcagaattgacggtgctagaaatatccaagtgttaaataaccttttaaaagcaacaaaagctacttttttcttaccacttaatagaagaacctgtccctagaggcgacttcattgctatggatctggagtctctgaactcttaataggatgcagcctcacatacataatgtcacccattttatgttgatgaaaacattacaagttttcttcattgggtatgtgttgatgttcacagacagtacttgggcccattaggttttcgcgtctggtcttagagcatgtgtattcatctcagcgtgaatacctcagccagtcttatgaataggaggctatgtatgggcagggaatagattagattagaacactcgcacaagatgaccacatatagaagcagaaagccccaaattccctgggaactgttttttctctagtagctgaatataaggaaatatgtctaatggacaccagttaatactttttaaaactactctttaaaaaaaaaatacgttccccttggttaactgattttttaatccagggtggacattttttcaacctttattaaaaagacaaataaactattttgtagaagatcagactcctacttaactggaagagaaatgtctattaaatgtctctcctctttctctgggtcaagaccatgtaattttatgcttcagagatgaagatactgtttgtttacaaagagtttagtttttaagacatccaaaactctatgctagagcaaaaatcaaatagcaaaggacactagccagaaaatacagtgtgtgtgtgtgcacctgtgtgcctgctgaacaacttgacagtgtaacagataaggtaactgaagatggtggatatttgaattgtattagcttaatgtctacatatctttggccaaaactctattgtcatattagaaacatgttatctttttcatgtttattagtaatttatttttgattctttgttttctttttcgtccaactaaaacaactgtaatgtacttgatacatttatatcaagttctaaagtatttagacaaatccaaatactttgtttttagttttttcctcctttccatcctgttaaccacagtgaaacgctgcagtattttgatttggtcagtgctacggaggaagaccatgaaagctgaattggtctgtgccacccagagtaaacctcttctcttcttctggaaagatggcgtgatgtttttcaaggattctaataaatatcccgcagtcatctcctgagcagctttcctctgtttcacttcagaactccttcccccactttcttcactccagtttcttcacttgcagcgttttctgctaagaaagacttatcatcttgtatctgtttatgcctctcttctttggggcccctggatgtttttgtggatttttacagagtatttatatctgcacagcgtgtattttgttatacattcttacaagcattgatattggggggtacattcataatagtgagaatatctggcagaatgtgtgaatgccatatctgtagatgacgatgaatgtgaagggttaatgtagaaatgtttgtttattctgttacagctcaaaatggaggctgagaatctctaccaccattcccttctctatttgagaatctctaccaccattcccttctctatttgggaaacaatactctcttattttgctatttttaccttcccattaactggcttcactcaacagtgccagatacctatggagaggggaagtaaaacaccttaggtcaggaataataaaccaatgagttagctcagggccggtggacatgttcactggtggaccagttggcattgacctaaacggacagagaaatgcacatggaggagaactacgttgaaatcaagatcctatgtctgttgtattttctctttgcctggagtaaatagcattataagtcattccacccttattagataaccaaagcatattggtctcaatagctttctcctgaaaaatgtgattgaatcttacctgtagcagttcactcttaaggttgaaagaactgtcaatatagataaaatccattccttattattattgattggtgtgacatttgaaaatgtgtctaaacaatatttgtaagtaaaagaaccagtcataagcctcaaatgtgttcagtgtgtaccaagctggaatgggagactggcccctcttggctttaaagtagcatgttgtctttttctagcagcttcttcctagtagacattccagggatgggaggggccagggatcatgtcttactcatttctgtatcgccagcccctggcatagtgtctggcttatgttatgtgaataaatgaatgcttgccaagatctcttcttccctcaagtttctggaaaacctgagggttcgtgatacctgttcccactcctcatcagcgggttggcaagaaagcaaataaggggaaacatttttaacattccaagcaagagaaggaagaacgactattgggaggaggtacaccagagattgctcagtgtgcagcctgctacctcacttttggctctggattgcctggtggtagaagggaagagtattatgtagttagcaccttacatatttgatgctcaggaagaaagtgcaagaagatccctaatagaacattaaagattcttaaaagtttttgaagtaggctgcttggggtgaccagccccacccttacatctccatagttggtacagttagcttgtagcagctgaagctgatgcctggagatcactgtctgttggtctgatctcagtatcatactgagacacctcccctgagccttacctacttaaattggtaaccgtcctaccaaaatttgtcaattttaatcaagtgaggcaagttgcaagggagccagagatacgtgaaaaaagaaaagcagaaatactgatactttctaagaaagaagttgtaataatttctttggcacattgacttactgatatcttttgaaatgcatagatgactcttgtgaaccaaagagagcagtagtggttattccccggcgcaataaaaatgcctttgtgtatcacttgcgattgccagtcatttctgtgccagttgctttcattccagagaatggcctcattctccaaaaaaagatgatgattttagaagtaggatttcctaacaaattatgtggtggggagggacggcggggattttattcatcccgtctgagctcttcatacagtattaccattaggttttaagaacaaagatgggggaggagggagtagaaagctgagagtacgtagaacagctacaagacattagtgggtattcagattttgagctgtgtaaatatcaaacatcggcttccagccttaagagttatttgagcagagagttaaggaggaatgggagattttgtgaataaaatgttttgccaaactgaa

SEQ ID NO: 225822 - DNA, 996 bp, Artificial Sequence
  derived and/or modified sequence
atgagacccgccctggccgtgggcctggtgttcgccggctgctgcagcaacgtgatcttcctggagctgctggccagaaagcaccccggctgcggcaacatcgtgaccttcgcccagttcctgttcatcgccgtggagggcttcctgttcgaggccgacctgggcagaaagccccccgccatccccatcagatactacgccatcatggtgaccatgttcttcaccgtgagcgtggtgaacaactacgccctgaacctgaacatcgccatgcccctgcacatgatcttcagaagcggcagcctgatcgccaacatgatcctgggcatcatcatcctgaagaagagatacagcatcttcaagtacaccagcatcgccctggtgagcgtgggcatcttcatctgcaccttcatgagcgccaagcaggtgaccagccagagcagcctgagcgagaacgacggcttccaggccttcgtgtggtggctgctgggcatcggcgccctgaccttcgccctgctgatgagcgccagaatgggcatcttccaggagaccctgtacaagagattcggcaagcacagcaaggaggccctgttctacaaccacgccctgcccctgcccggcttcgtgttcctggccagcgacatctacgaccacgccgtgctgttcaacaagagcgagctgtacgagatccccgtgatcggcgtgaccctgcccatcatgtggttctacctgctgatgaacatcatcacccagtacgtgtgcatcagaggcgtgttcatcctgaccaccgagtgcgccagcctgaccgtgaccctggtggtgaccctgagaaagttcgtgagcctgatcttcagcatcctgtacttccagaaccccttcaccctgtggcactggctgggcaccctgttcgtgttcatcggcaccctgatgtacaccgaggtgtggaacaacctgggcaccaccaagagcgagccccagaaggacagcaagaagaactag

SEQ ID NO: 225823 - protein, 686 aa, Artificial Sequence
  derived and/or modified sequence
MGEFKVHRVRFFNYVPSGIRCVAYNNQSNRLAVSRTDGTVEIYNLSANYFQEKFFPGHESRATEALCWAEGQRLFSAGLNGEIMEYDLQALNIKYAMDAFGGPIWSMAASPSGSQLLVGCEDGSVKLFQITPDKIQFERNFDRQKSRILSLSWHPSGTHIAAGSIDYISVFDVKSGSAVHKMIVDRQYMGVSKRKCIVWGVAFLSDGTIISVDSAGKVQFWDSATGTLVKSHLIANADVQSIAVADQEDSFVVGTAEGTVFHFQLVPVTSNSSEKQWVRTKPFQHHTHDVRTVAHSPTALISGGTDTHLVFRPLMEKVEVKNYDAALRKITFPHRCLISCSKKRQLLLFQFAHHLELWRLGSTVATGKNGDTLPLSKNADHLLHLKTKGPENIICSCISPCGSWIAYSTVSRFFLYRLNYEHDNISLKRVSKMPAFLRSALQILFSEDSTKLFVASNQGALHIVQLSGGSFKHLHAFQPQSGTVEAMCLLAVSPDGNWLAASGTSAGVHVYNVKQLKLHCTVPAYNFPVTAMAIAPNTNNLVIAHSDQQVFEYSIPDKQYTDWSRTVQKQGFHHLWLQRDTPITHISFHPKRPMHILLHDAYMFCIIDKSLPLPNDKTLLYNPFPPTNESDVIRRRTAHAFKISKIYKPLLFMDLLDERTLVAVERPLDDIIAQLPPPIKKKKFGT

SEQ ID NO: 225824 - protein, 571 aa, Artificial Sequence
  derived and/or modified sequence
MGEFKVHRVRFFNYVPSGIRCVAYNNQSNRLAVSRTDGTVEIYNLSANYFQEKFFPGHESRATEALCWAEGQRLFSAGLNGEIMEYDLQALNIKYAMDAFGGPIWSMAASPSGSQLLVGCEDGSVKLFQITPDKIQFERNFDRQKSRILSLSWHPSGTHIAAGSIDYISVFDVKSGSAVHKMIVDRQYMGVSKRKCIVWGVAFLSDGTIISVDSAGKVQFWDSATGTLVKSHLIANADVQSIAVADQEDSFVVGTAEGTVFHFQLVPVTSNSSEKQWVRTKPFQHHTHDVRTVAHSPTALISGGTDTHLVFRPLMEKVEVKNYDAALRKITFPHRCLISCSKKRQLLLFQFAHHLELWRLGSTVATGTVEAMCLLAVSPDGNWLAASGTSAGVHVYNVKQLKLHCTVPAYNFPVTAMAIAPNTNNLVIAHSDQQVFEYSIPDKQYTDWSRTVQKQGFHHLWLQRDTPITHISFHPKRPMHILLHDAYMFCIIDKSLPLPNDKTLLYNPFPPTNESDVIRRRTAHAFKISKIYKPLLFMDLLDERTLVAVERPLDDIIAQLPPPIKKKKFGT

SEQ ID NO: 225825 - DNA, 2061 bp, Artificial Sequence
  derived and/or modified sequence
atgggagaattcaaagtgcacagggtcagattttttaactacgtcccgagtggtatccgatgcgtggcctataacaatcagagcaaccggctcgccgtctcccgtaccgacggtaccgttgaaatttacaacctgtccgcgaattattttcaggagaagtttttccctgggcatgaaagtagagcaaccgaggcactatgctgggctgaggggcagaggcttttcagcgctgggttaaacggcgaaattatggagtatgacctgcaggccctgaatatcaagtatgctatggacgcgttcggcggaccaatttggtctatggccgccagtccgtcagggagccagctattggtgggctgtgaggatgggtcagtaaaactgttccaaattacaccagataaaattcagttcgagaggaactttgatcgccagaaatccaggattctgagcctatcctggcatcctagcggcacgcatattgcggcaggaagcatcgattacattagcgtttttgacgtgaaaagcggatccgccgttcataaaatgatcgttgatagacagtacatgggagtctcaaagcggaaatgcattgtatggggtgtcgctttcttgtctgacggcacaataatttccgtggactccgccgggaaagtccagttttgggattcagccaccggaaccctggtcaagtcccacctaatagcgaacgctgacgtccagtccatcgctgtcgcagaccaggaggatagttttgtggtgggcacagcggaagggaccgtcttccatttccaactcgtgccagtcacgagcaatagctccgaaaagcaatgggtgcggactaaaccattccagcaccacacacatgatgtcagaacagtggcacattctccaaccgccttaatctctgggggcaccgacacacacctcgtgttcaggccacttatggaaaaagtggaagtgaagaattacgacgctgccctccgaaagatcacatttcctcatagatgcctcatatcttgtagcaaaaaacgccagctgcttctcttccagttcgctcaccaccttgaactctggcggttaggctcaaccgtcgccacaggcaagaatggtgacactttgcctctgagcaaaaatgccgaccaccttttgcacctcaagacaaagggccccgagaacattatctgctcctgcatcagcccatgtggatcttggatcgcttactctactgtctcgcgtttttttttgtaccggctgaactacgagcacgacaacatcagcctcaaaagggtctctaagatgcccgcctttctgagatcggccctgcagatattgttttccgaagatagcacaaagctcttcgttgcatccaaccagggcgcgctccacattgttcaactctcaggcggaagcttcaagcatttacatgcatttcagcctcaaagcggcaccgttgaggccatgtgtctcctggccgtgtctccagatgggaattggctggccgcctcaggcacttccgcaggggtacacgtgtacaatgtaaagcagcttaagctccattgtacggtgccggcctacaacttccctgtgaccgcaatggcaatcgctcctaacaccaataacctcgtgatagcccacagcgatcaacaggtgttcgaatatagcatacctgataaacagtatacagactggagccgaaccgtgcagaagcaggggtttcatcacctgtggctgcagagggacacccccattacacatatctcgttccaccctaaaagaccgatgcacatcctgctacacgatgcatacatgttctgtattatcgacaaatccctgcctctgcccaatgataagaccctcttgtacaacccctttccgccaaccaatgaatcagacgtgattaggaggagaaccgcccatgcttttaaaatcagcaagatctataagcccctgctgtttatggacctgctggatgaaaggacactggtggcggtcgaacgtccgctggacgacatcatcgcccagctacctcctccaattaagaagaagaagttcggcacttag

SEQ ID NO: 225826 - DNA, 1716 bp, Artificial Sequence
  derived and/or modified sequence
atgggagagtttaaggtccacagggtccgctttttcaactatgtaccctctggcatacgttgcgtggcttataacaaccaaagtaataggcttgctgtgagtagaacagatgggaccgtggagatttataacctctctgccaactacttccaagagaagttcttccccggccacgagtctcgagcaactgaagccctctgctgggccgaagggcaacggttgtttagtgctggactgaacggcgagattatggaatacgacctgcaggccctaaacatcaaatatgcaatggacgctttcggcggaccaatatggtcaatggccgcgtccccttcgggaagccaactactggttggctgtgaggacgggtccgtgaagttgttccaaataaccccagacaagattcagtttgagcggaatttcgatagacagaaaagtagaatactgagtctctcctggcaccctagtggtactcacattgcagccggaagtatagactacattagcgtgttcgatgtgaagagcggcagcgccgtgcataaaatgatcgttgatcggcagtacatgggtgtgtcaaaacgtaagtgcattgtgtggggcgtcgccttcctgtcggatggaactatcattagtgtggattccgctggaaaggttcagttctgggatagcgccaccggtacactggttaaaagtcacctgattgcgaatgctgatgtgcagagcatagccgtggcagatcaggaagattcctttgttgtgggcactgccgagggcaccgtgttccattttcagctagtgcccgtgacgtctaatagctctgagaagcaatgggtgcgcacaaaaccgttccagcatcacactcatgatgtgcggactgtggcacatagccctaccgccctcatatctggcggaactgacacacacttggtgtttaggcctctgatggaaaaagtcgaagtgaaaaactacgatgccgcactgcgcaaaataacattcccacacaggtgcctcattagttgtagcaaaaagcgccagctgctactattccagtttgctcaccacctggaactctggcgtctggggtcaactgtcgccaccgggactgtggaagctatgtgcctgctagcagtttctcctgacggtaactggttagccgcatccggtacatccgcaggggtccatgtttataatgtgaaacaactgaaattacactgcacagtaccggcatataattttcctgtcacagcaatggctattgcgcccaatacaaataacctagtcattgcacactcggaccagcaggtttttgagtatagcatccctgataagcagtacacggactggagtcgaaccgttcagaagcagggcttccatcacctgtggctgcagcgcgatacgccaatcacacacatttccttccaccccaagaggcccatgcatatcctgttacatgacgcatacatgttctgcattatcgataaatcactccccctgcccaacgacaaaacacttctttataatcctttcccccctacgaacgagtccgacgttatccggaggagaaccgcacacgcctttaaaataagtaagatctataaacccttgttatttatggaccttctggacgagcgcacactggtcgctgtcgaaaggcctttagacgatataatcgcgcagctgcctccccccatcaagaaaaagaagtttggcacttag

SEQ ID NO: 225827 - DNA, 2061 bp, Artificial Sequence
  derived and/or modified sequence
atgggagagttcaaggtgcaccgggtgcgcttcttcaactacgtgcccagcggcatccgctgtgtggcctacaacaaccagagcaaccggctggccgtgtccaggacagatggcaccgtggagatctacaacctgagcgccaactacttccaggagaagttcttccctggccacgagagccgggccacagaggccctgtgctgggccgagggccagaggctcttctctgctggcctgaatggagagatcatggagtatgacctgcaggccctgaacatcaagtatgccatggatgccttcggcggccccatctggagcatggccgccagccccagcggcagccagctgctggtgggctgtgaagatggctctgtgaagctgttccagatcaccccagacaagatccagtttgaaagaaactttgaccggcagaagagccgcatcctgagcctgtcctggcaccccagcggcacccacatcgccgccggcagcattgactacatctctgtgtttgatgtgaagagcggcagcgctgtgcacaagatgattgtggaccggcagtacatgggcgtgtccaagaggaaatgtattgtgtggggcgtggccttcctgagtgatggcaccatcatctctgtggacagcgctgggaaggtgcagttctgggacagcgccaccggcaccctggtgaagagccacctgattgccaatgctgatgtgcagagcattgctgtggccgaccaggaggacagctttgtggtgggcacagctgagggcaccgtcttccacttccagctggtgcctgtgaccagcaacagcagcgagaagcagtgggtgaggaccaagcccttccagcaccacacccatgatgtgaggacagtggcccacagccccacagccctgatcagcggcggcacagacacccacctggtgttccggcccctgatggagaaggtggaggtgaagaactatgatgctgccctgaggaagatcaccttcccccaccgctgcctgatcagctgcagcaagaagaggcagctgctgctcttccagtttgcccaccacctggagctgtggaggctgggcagcacagtggccaccgggaagaatggagacaccctgcccctgagcaagaatgctgaccacctgctgcacctgaagaccaagggccctgagaacatcatctgcagctgcatcagcccctgtggctcctggatcgcctacagcacagtgagccgcttcttcctgtaccgcctgaactatgaacatgacaacatcagcctgaagagggtgtccaagatgcctgccttcctgcggagcgccctgcagatcctcttcagcgaggacagcaccaagctgtttgtggccagcaaccagggcgccctgcacatcgtgcagctgagcggcggcagcttcaagcacctgcacgccttccagccccagagcggcaccgtggaggccatgtgcctgctggccgtgtccccagatggcaactggctggccgccagcggcaccagcgctggggtgcacgtgtacaacgtgaagcagctgaagctgcactgcaccgtgcctgcctacaacttccctgtgacagccatggccatcgcccccaacaccaacaacctggtgattgcccacagcgaccagcaggtgtttgagtacagcatcccagacaagcagtacacagactggagcaggacagtgcagaagcagggcttccaccacctgtggctgcagagggacacccccatcacccacatctccttccaccccaagaggcccatgcacatcctgctgcatgatgcctacatgttctgcatcatcgacaagagcctgcccctgcccaatgacaagaccctgctgtacaaccccttcccccccaccaatgaaagtgatgtgatcagaagaagaacagcccacgccttcaagatcagcaagatctacaagcccctgctcttcatggacctgctggatgagaggaccctggtggccgtggagcggcccctggatgacatcatcgcccagctgcccccacccatcaagaagaagaagtttggcacctag

SEQ ID NO: 225828 - DNA, 1716 bp, Artificial Sequence
  derived and/or modified sequence
atgggagagttcaaggtgcaccgggtgcgcttcttcaactacgtgcccagcggcatccgctgtgtggcctacaacaaccagagcaaccggctggccgtgtccaggacagatggcaccgtggagatctacaacctgagcgccaactacttccaggagaagttcttccctggccacgagagccgggccacagaggccctgtgctgggccgagggccagaggctcttctctgctggcctgaatggagagatcatggagtatgacctgcaggccctgaacatcaagtatgccatggatgccttcggcggccccatctggagcatggccgccagccccagcggcagccagctgctggtgggctgtgaagatggctctgtgaagctgttccagatcaccccagacaagatccagtttgaaagaaactttgaccggcagaagagccgcatcctgagcctgtcctggcaccccagcggcacccacatcgccgccggcagcattgactacatctctgtgtttgatgtgaagagcggcagcgctgtgcacaagatgattgtggaccggcagtacatgggcgtgtccaagaggaaatgtattgtgtggggcgtggccttcctgagtgatggcaccatcatctctgtggacagcgctgggaaggtgcagttctgggacagcgccaccggcaccctggtgaagagccacctgattgccaatgctgatgtgcagagcattgctgtggccgaccaggaggacagctttgtggtgggcacagctgagggcaccgtcttccacttccagctggtgcctgtgaccagcaacagcagcgagaagcagtgggtgaggaccaagcccttccagcaccacacccatgatgtgaggacagtggcccacagccccacagccctgatcagcggcggcacagacacccacctggtgttccggcccctgatggagaaggtggaggtgaagaactatgatgctgccctgaggaagatcaccttcccccaccgctgcctgatcagctgcagcaagaagaggcagctgctgctcttccagtttgcccaccacctggagctgtggaggctgggcagcacagtggccaccggcaccgtggaggccatgtgcctgctggccgtgtccccagatggcaactggctggccgccagcggcaccagcgctggggtgcacgtgtacaacgtgaagcagctgaagctgcactgcaccgtgcctgcctacaacttccctgtgacagccatggccatcgcccccaacaccaacaacctggtgattgcccacagcgaccagcaggtgtttgagtacagcatcccagacaagcagtacacagactggagcaggacagtgcagaagcagggcttccaccacctgtggctgcagagggacacccccatcacccacatctccttccaccccaagaggcccatgcacatcctgctgcatgatgcctacatgttctgcatcatcgacaagagcctgcccctgcccaatgacaagaccctgctgtacaaccccttcccccccaccaatgaaagtgatgtgatcagaagaagaacagcccacgccttcaagatcagcaagatctacaagcccctgctcttcatggacctgctggatgagaggaccctggtggccgtggagcggcccctggatgacatcatcgcccagctgcccccacccatcaagaagaagaagtttggcacctag

SEQ ID NO: 225829 - DNA, 2061 bp, Artificial Sequence
  derived and/or modified sequence
atgggcgagttcaaggtgcaccgggtgcggttcttcaactacgtgccgtctggaatccggtgtgttgcctacaataaccagagtaatagattggcggtgagcaggactgacggcacagtggaaatttacaatttgtccgccaactatttccaggaaaagttttttcctggacatgagagccgggctacggaggcactatgttgggccgaagggcagcgattgttttcagcagggctgaacggtgagattatggagtatgatcttcaggccctaaacatcaaatacgcaatggacgcctttggagggcccatctggtctatggctgcttctccgtccggctctcagttgttagtggggtgcgaagacggctccgttaaactttttcagataacacccgacaaaatccagtttgaaaggaactttgaccgccagaaatcccggattctgtcacttagctggcaccctagcgggactcacattgccgccgggagcattgattatatatcagtcttcgatgttaagagtgggtcggccgtgcataaaatgattgtcgaccgacagtacatgggcgtgtccaagaggaagtgcattgtgtggggcgtggcattcttgagtgacgggactattataagcgtcgactccgcggggaaggttcagttttgggacagtgctacgggtaccctggttaaatcacacctgattgccaatgctgacgtgcagagcatcgcagttgcagatcaggaggactcatttgtggttggtactgccgaagggaccgtgttccactttcaactggtgccagtgacaagcaattcaagcgagaaacagtgggtccgcacaaagcccttccaacatcacacacacgatgttcgaactgtggcacattcccctactgcactaatatcaggcggcactgacactcacctggtgttcaggccgttgatggaaaaagtggaggtgaagaactatgatgctgctcttcgaaagataacctttccccatcgttgcctcatttcctgtagtaaaaagcggcagctgctcctgtttcaattcgcacaccatctggaattatggagactcggtagtacggtggcaacaggcaaaaatggcgacactctgcctttatcgaagaatgcggatcacttgctacacctgaaaaccaaagggcctgagaacattatctgttcctgcatctccccttgtggatcctggattgcttacagcactgtcagtcggttcttcctctaccgcctgaactacgagcatgacaatattagtcttaaaagagtttcaaagatgcctgcattcctgaggtcagccctccagatccttttcagtgaggattctacgaagctgtttgtggcttctaatcagggggccctccacattgttcagctgtcaggcggatcctttaagcacctgcacgctttccaaccccagagtgggacggttgaggctatgtgcctgctggccgtcagtcccgacgggaactggctcgctgcctccggcacatctgctggggtgcacgtgtataacgtcaaacaactgaaactgcactgtacggtgccagcgtataattttcctgtcactgcaatggcaattgcccctaacaccaataacctggttatcgctcatagcgaccagcaggttttcgagtacagtatccctgacaagcagtatacagactggtctcggactgtccagaagcagggtttccaccatctgtggctccaaagggatactccaattacacatattagtttccatcctaagcggcctatgcacattctcttgcatgatgcttatatgttctgcatcatcgataagagcctgcctctgcctaatgacaagactctactttataacccttttcctcccaccaatgagagcgacgttattcgaaggcggaccgcccacgcattcaaaatttccaaaatctataaaccactgctgttcatggacctgctggatgaaaggaccctcgtagccgtggaacgacctctcgacgacatcattgcacaattgcctccgcctatcaagaagaagaagttcggtacatag

SEQ ID NO: 225830 - DNA, 1716 bp, Artificial Sequence
  derived and/or modified sequence
atgggcgagttcaaggtgcaccgggtgcggttcttcaactacgtgccttccggcatccggtgcgtggcatataacaatcaatctaacagactcgctgtttccagaacggacgggactgttgagatatataatctatcagccaactactttcaggaaaaattttttcccggacatgagtcccgcgcgacagaggcactgtgttgggccgaaggacagagattgtttagtgctggcctcaatggagagatcatggagtacgatctgcaggccttgaatattaaatatgcaatggacgccttcggcgggccgatttggagtatggctgcatcacctagtggatcccagttactcgtcgggtgtgaagacggctctgtgaaattgttccagatcacccccgataagattcaattcgaacgtaacttcgacagacagaagagtcgaattctgtctctgtcatggcatccaagtggcacgcacatcgcagcgggcagcatagactacatttctgtgtttgatgtgaagtcaggctccgcagtgcacaaaatgattgtggaccggcaatatatgggggtctccaagcggaagtgcatcgtctggggagtggctttcctgtccgacggaaccatcataagcgtagactccgccgggaaagtacaattttgggactctgctacaggaacactcgtgaaaagccatctaattgctaatgcagatgttcagagtatcgccgtggccgaccaggaggatagcttcgtggtcgggactgccgaggggacggtgtttcactttcagctagtgcccgtgactagcaatagctctgaaaagcaatgggtaaggaccaagcctttccaacaccatacacatgatgttcgcacagtggcacactcgccaaccgccctgatatcgggcggtactgacactcatctggtcttcaggccattgatggagaaagttgaggttaaaaactacgacgcagcactgcgcaagattacttttcctcatcggtgcctgatttcttgttctaagaaaaggcagttgctgttgtttcagtttgctcatcatctggagctttggaggctcggtagtaccgtggccacaggaaccgtggaggcaatgtgtcttttagcagtgtcaccggatggaaactggctggctgcttccggaaccagtgctggtgtacatgtgtacaacgtgaagcagctgaagctccattgtacagtacctgcgtacaactttccagttacggccatggcgatcgctcccaacactaataacttggtgattgcccattcagatcagcaggtgtttgaatattccattcccgataaacaatatacagactggtcgagaaccgtccaaaaacagggcttccaccacctctggttgcagagggacacccctataacccacatttctttccaccccaagcggcccatgcatatcctcctacacgacgcttacatgttctgcatcatagacaaatccctgcctttacctaacgacaagacacttctttataaccctttccccccaaccaacgagtctgatgttatcagaagaagaaccgcacacgcctttaaaatatccaaaatttacaaacctctgctttttatggacctgttggatgaaagaaccctggtcgccgtcgagcgcccacttgacgatatcatcgcccagcttcccccaccgattaaaaagaagaagttcggcacctag

SEQ ID NO: 225831 - DNA, 2061 bp, Artificial Sequence
  derived and/or modified sequence
atgggagagttcaaggttcacagagtgcgcttcttcaattacgtgcctagcgggatccggtgtgttgcctataacaaccagtctaatcgtttagccgtgtctcgcacggacggtaccgtcgagatatataatctgagcgcgaattacttccaggagaaattttttcccggtcacgagtcacgcgctacggaagctctgtgctgggccgagggacagcgccttttttcggccggtctaaacggggaaatcatggagtacgatctccaggccttgaacattaaatatgcgatggatgcattcggaggccctatttggtcgatggccgcaagtccctctggcagtcagctccttgttggctgcgaggatggctctgtgaagctgttccaaattactcccgacaaaatccagttcgagcgcaacttcgatagacaaaagagtcgaatcctgtccctgagttggcatcccagtggcacacatattgccgcaggtagtatagattacatcagtgtctttgatgtgaaaagcggttccgccgtgcacaaaatgattgtagatcgccagtatatgggcgttagcaagcgcaaatgcatagtgtggggcgtcgccttcttgtccgatggtaccataattagcgtggattccgccggtaaggtgcaattttgggatagcgccactgggactttagtgaagagccacctgatcgccaacgccgacgtgcagagcatcgctgtggccgaccaggaggatagcttcgtggtcggtaccgccgagggcacggtgtttcactttcaactggtacccgtgaccagtaactcttctgaaaagcagtgggtccggacgaagccgtttcaacaccacacccatgatgtcagaacggtggctcatagccccacagccctgatctccggcggaaccgacacccatctggtgttccgcccattgatggaaaaggtggaggtgaagaactacgacgcagctctgcgaaagatcactttcccgcaccgctgcctgattagttgcagcaaaaagaggcaactgcttctgtttcaattcgcccaccacctggagctatggaggctcgggagcaccgttgctaccggcaagaacggcgatactctgccactgtcaaagaatgccgaccatctgttgcatttaaaaaccaaaggtccagagaacatcatctgctcctgcatttcaccgtgtggcagttggatcgcgtatagcacagtctcccggttcttcctgtatcgcctgaactacgagcatgataatataagtctgaagcgggtttcgaagatgccagcctttctgcgctcagccctgcagatactattttctgaagatagtaccaagttattcgttgcctcgaaccagggcgctttacacattgtgcaactgagcggaggctcctttaaacatctccatgcatttcagccccagtcaggtacagtggaggccatgtgtttattggccgtgtctcctgacgggaactggctggcggcttccggcactagcgcaggcgtgcatgtgtataacgttaagcaattgaaactccactgtactgtgcctgcttataactttcctgtgacggctatggcgatagccccaaacactaacaacttagtaattgcgcactctgatcaacaggtgttcgagtactcgattcccgacaagcagtacactgattggtctcggacggtgcagaaacaaggctttcatcacttgtggctacagagggacaccccaattacgcatatcagcttccatcccaaaaggcccatgcatatactactgcacgacgcttatatgttctgcataattgacaaatcactgcctttaccaaatgataaaacactcctgtacaaccctttccctcccaccaacgaatccgatgttatccgtaggagaacagcgcacgcatttaagatatcaaaaatctacaaacccttgctcttcatggatctcctggacgaaaggacactagtggcagttgagaggccgctggatgacattattgctcagctgcctccgccaatcaaaaagaaaaaattcggaacctag

SEQ ID NO: 225832 - DNA, 1716 bp, Artificial Sequence
  derived and/or modified sequence
atgggtgaatttaaagtccaccgggtcagattcttcaattacgtgcctagcggaataaggtgcgtagcttacaataatcagtcgaacaggttggctgtatcaagaacggacgggacggtcgaaatatacaatctgagcgcaaactacttccaggagaaattttttcctggccacgagtccagggccacagaggcactgtgttgggccgaaggccagcgactatttagcgcgggactgaatggcgaaattatggagtacgacctgcaggccctgaacattaagtacgctatggacgccttcgggggacctatctggtcaatggccgcatcaccaagcggttcacaattgctcgtgggctgcgaggacgggtccgtgaagttgttccaaattaccccagacaagatccagtttgagaggaatttcgacaggcagaagagccgcatacttagtttaagttggcaccctagtggaactcatatcgccgcaggctcaatagactatattagcgtgttcgacgtaaaatccggcagcgccgtccacaagatgattgttgatcggcaatatatgggggtgtccaaaaggaagtgtattgtgtggggcgtggctttcctgtccgatggtactataatttccgtagactcagccggtaaagtacagttttgggattccgccaccggtactctcgtcaagtcccacttaattgccaacgctgacgtgcagtcaattgctgtggccgatcaagaggacagcttcgttgtcggaacggcagaagggacagtttttcatttccagttggtccctgtgactagtaatagttctgaaaaacagtgggtgcggaccaagccattccagcaccacacgcatgacgttcggacggtggcccactcacctacggcgctgatttccggagggactgatacgcacctcgttttccggcctttaatggagaaggttgaagtaaaaaattacgacgctgccttacggaagattacattcccccatcggtgcctgatttcctgctcaaagaaacgccaactgctgctcttccagtttgcccaccatttagagctgtggcggctcgggtcaactgtagccaccggaaccgttgaggccatgtgcctgttagccgtcagtccagacggaaattggctggcagccagcgggacatcggccggtgtgcatgtatataacgtgaaacagctgaagctccattgcaccgtcccagcttataactttccagtgacagcaatggccatcgccccaaacaccaacaatctggtaatcgctcactctgatcaacaggtatttgagtactccatcccagacaagcaatacactgattggtcccgcaccgtccagaagcaaggttttcaccatctttggctgcaaagggacacccccattacacacatctctttccatcctaagcggccaatgcatattctgctacacgacgcctacatgttttgcataatcgataaatctctgcccttgcctaacgataagacactactgtataaccccttcccaccaacgaatgaatccgatgtgatccggagacggaccgcccatgctttcaaaatttcaaaaatttacaagcctttgctgttcatggacttgctggatgagcggaccctcgtggccgtcgagaggccattagatgacatcattgcccaactcccacctccgatcaagaagaagaagtttggcacttag

SEQ ID NO: 225833 - DNA, 2322 bp, Artificial Sequence
  derived and/or modified sequence
gcggccaacgggcgacaaccgaacctcccgccgccgtcgccgccgccgcgagcactgcctgcgcacttccgactatgcgccaggagcacttccggggcagagcctgagagcgcgcgcgcacgtggggccggggcggagagaggcgagcaccgggaaggggagcgtggggccgctggaatgggtgaatttaaggtccatcgagtacgtttctttaattatgttccatcaggaatccgctgtgtggcttacaataaccagtcaaacagattggctgtttcacgaacagatggcactgtggaaatttataacttgtcagcaaactactttcaggagaaatttttcccaggtcatgagtctcgggctacagaagctttgtgctgggcagaaggacagcgactctttagtgctgggctcaatggcgagattatggagtatgatttacaggcgttaaacatcaagtatgctatggatgcctttggaggacctatttggagcatggctgccagccccagtggctctcaacttttggttggttgtgaagatggatctgtgaaactatttcaaattaccccagacaaaatccagtttgaaagaaattttgatcggcagaaaagtcgcatcctgagtctcagctggcatccctctggtacccacattgcagctggttccatagactacattagtgtgtttgatgtcaaatcaggcagcgctgttcataagatgattgtggacaggcagtatatgggcgtgtctaagcggaagtgcatcgtgtggggtgtcgccttcttgtccgatggcactatcataagtgtggactctgctgggaaggtgcagttctgggactcagccactgggacgcttgtgaagagccatctcatcgctaatgctgacgtgcagtccattgctgtagctgaccaagaagacagtttcgtggtgggcacagccgagggaacagtcttccattttcagctggtccctgtgacatctaacagcagtgagaagcagtgggtgcggacaaaaccgttccagcatcacactcatgacgtgcgcactgtggcccacagcccaacagcgctgatatctggaggcactgacacccacttagtctttcgtcctctcatggagaaggtggaagtaaagaattacgatgccgctctccgaaaaatcacctttccccaccgatgtctcatctcctgttctaaaaagaggcagcttctcctcttccagtttgctcatcacttagaactttggcgactgggatccacagttgcaacaggcaagaatggggatactcttccactctctaaaaatgcagatcatttactgcacctaaagacaaagggtcctgagaacattatctgtagctgtatctccccatgtggaagttggatagcctattctacagtttctcggttttttctctatcggctgaattatgaacatgacaacataagcctcaaaagggtttccaaaatgccagcattccttcgctctgcccttcagattttgttttctgaagattcaacaaagctctttgtagcatcaaatcaaggagctctgcatattgttcagctgtcaggaggaagcttcaagcacctgcatgctttccagcctcagtcaggaacagtggaggccatgtgtcttttggcagtcagtccagatgggaattggctagctgcatcaggtaccagtgctggagtccatgtctacaacgtaaaacagctaaagcttcactgcacggtgcctgcttacaatttcccagtgactgctatggctattgcccccaataccaacaaccttgtcatcgctcattcggaccagcaggtatttgagtacagcatcccagacaaacagtatacagattggagccggactgtccagaagcagggctttcaccacctttggctccaaagggatactcctatcacacacatcagttttcatcccaagagaccgatgcacatccttctccatgatgcctacatgttctgcatcattgacaagtcattgccccttccaaatgacaaaaccttactctacaatccatttcctcccacgaatgaatcagatgtcatccggaggcgcacagctcatgcttttaaaatttctaagatatataagcctctactcttcatggatcttttggatgaaagaacactcgtggcagtagaacggcctctggatgacatcattgctcagctcccaccacccattaaaaagaagaaatttggaacctaaaacagggcactgtctgtgtccttccttgaactgtctaccctgttgcttttcacaaatcatggtaataaaacaagttattcttga

SEQ ID NO: 225834 - DNA, 1861 bp, Artificial Sequence
  derived and/or modified sequence
gcgcacgtggggccggggcggagagaggcgagcaccgggaaggggagcgtggggccgctggaatgggtgaatttaaggtccatcgagtacgtttctttaattatgttccatcaggaatccgctgtgtggcttacaataaccagtcaaacagattggctgtttcacgaacagatggcactgtggaaatttataacttgtcagcaaactactttcaggagaaatttttcccaggtcatgagtctcgggctacagaagctttgtgctgggcagaaggacagcgactctttagtgctgggctcaatggcgagattatggagtatgatttacaggcgttaaacatcaagtatgctatggatgcctttggaggacctatttggagcatggctgccagccccagtggctctcaacttttggttggttgtgaagatggatctgtgaaactatttcaaattaccccagacaaaatccagtttgaaagaaattttgatcggcagaaaagtcgcatcctgagtctcagctggcatccctctggtacccacattgcagctggttccatagactacattagtgtgtttgatgtcaaatcaggcagcgctgttcataagatgattgtggacaggcagtatatgggcgtgtctaagcggaagtgcatcgtgtggggtgtcgccttcttgtccgatggcactatcataagtgtggactctgctgggaaggtgcagttctgggactcagccactgggacgcttgtgaagagccatctcatcgctaatgctgacgtgcagtccattgctgtagctgaccaagaagacagtttcgtggtgggcacagccgagggaacagtcttccattttcagctggtccctgtgacatctaacagcagtgagaagcagtgggtgcggacaaaaccgttccagcatcacactcatgacgtgcgcactgtggcccacagcccaacagcgctgatatctggaggcactgacacccacttagtctttcgtcctctcatggagaaggtggaagtaaagaattacgatgccgctctccgaaaaatcacctttccccaccgatgtctcatctcctgttctaaaaagaggcagcttctcctcttccagtttgctcatcacttagaactttggcgactgggatccacagttgcaacaggaacagtggaggccatgtgtcttttggcagtcagtccagatgggaattggctagctgcatcaggtaccagtgctggagtccatgtctacaacgtaaaacagctaaagcttcactgcacggtgcctgcttacaatttcccagtgactgctatggctattgcccccaataccaacaaccttgtcatcgctcattcggaccagcaggtatttgagtacagcatcccagacaaacagtatacagattggagccggactgtccagaagcagggctttcaccacctttggctccaaagggatactcctatcacacacatcagttttcatcccaagagaccgatgcacatccttctccatgatgcctacatgttctgcatcattgacaagtcattgccccttccaaatgacaaaaccttactctacaatccatttcctcccacgaatgaatcagatgtcatccggaggcgcacagctcatgcttttaaaatttctaagatatataagcctctactcttcatggatcttttggatgaaagaacactcgtggcagtagaacggcctctggatgacatcattgctcagctcccaccacccattaaaaagaagaaatttggaacctaaaacagggcactgtctgtgtccttccttgaactgtctaccctgttgcttttcacaaatcatggtaataaaacaagttattcttg

SEQ ID NO: 225835 - DNA, 2061 bp, Artificial Sequence
  derived and/or modified sequence
atgggcgagttcaaggtgcacagagtgagattcttcaactacgtgcccagcggcatcagatgcgtggcctacaacaaccagagcaacagactggccgtgagcagaaccgacggcaccgtggagatctacaacctgagcgccaactacttccaggagaagttcttccccggccacgagagcagagccaccgaggccctgtgctgggccgagggccagagactgttcagcgccggcctgaacggcgagatcatggagtacgacctgcaggccctgaacatcaagtacgccatggacgccttcggcggccccatctggagcatggccgccagccccagcggcagccagctgctggtgggctgcgaggacggcagcgtgaagctgttccagatcacccccgacaagatccagttcgagagaaacttcgacagacagaagagcagaatcctgagcctgagctggcaccccagcggcacccacatcgccgccggcagcatcgactacatcagcgtgttcgacgtgaagagcggcagcgccgtgcacaagatgatcgtggacagacagtacatgggcgtgagcaagagaaagtgcatcgtgtggggcgtggccttcctgagcgacggcaccatcatcagcgtggacagcgccggcaaggtgcagttctgggacagcgccaccggcaccctggtgaagagccacctgatcgccaacgccgacgtgcagagcatcgccgtggccgaccaggaggacagcttcgtggtgggcaccgccgagggcaccgtgttccacttccagctggtgcccgtgaccagcaacagcagcgagaagcagtgggtgagaaccaagcccttccagcaccacacccacgacgtgagaaccgtggcccacagccccaccgccctgatcagcggcggcaccgacacccacctggtgttcagacccctgatggagaaggtggaggtgaagaactacgacgccgccctgagaaagatcaccttcccccacagatgcctgatcagctgcagcaagaagagacagctgctgctgttccagttcgcccaccacctggagctgtggagactgggcagcaccgtggccaccggcaagaacggcgacaccctgcccctgagcaagaacgccgaccacctgctgcacctgaagaccaagggccccgagaacatcatctgcagctgcatcagcccctgcggcagctggatcgcctacagcaccgtgagcagattcttcctgtacagactgaactacgagcacgacaacatcagcctgaagagagtgagcaagatgcccgccttcctgagaagcgccctgcagatcctgttcagcgaggacagcaccaagctgttcgtggccagcaaccagggcgccctgcacatcgtgcagctgagcggcggcagcttcaagcacctgcacgccttccagccccagagcggcaccgtggaggccatgtgcctgctggccgtgagccccgacggcaactggctggccgccagcggcaccagcgccggcgtgcacgtgtacaacgtgaagcagctgaagctgcactgcaccgtgcccgcctacaacttccccgtgaccgccatggccatcgcccccaacaccaacaacctggtgatcgcccacagcgaccagcaggtgttcgagtacagcatccccgacaagcagtacaccgactggagcagaaccgtgcagaagcagggcttccaccacctgtggctgcagagagacacccccatcacccacatcagcttccaccccaagagacccatgcacatcctgctgcacgacgcctacatgttctgcatcatcgacaagagcctgcccctgcccaacgacaagaccctgctgtacaaccccttcccccccaccaacgagagcgacgtgatcagaagaagaaccgcccacgccttcaagatcagcaagatctacaagcccctgctgttcatggacctgctggacgagagaaccctggtggccgtggagagacccctggacgacatcatcgcccagctgcccccccccatcaagaagaagaagttcggcacctag

SEQ ID NO: 225836 - DNA, 1716 bp, Artificial Sequence
  derived and/or modified sequence
atgggcgagttcaaggtgcacagagtgagattcttcaactacgtgcccagcggcatcagatgcgtggcctacaacaaccagagcaacagactggccgtgagcagaaccgacggcaccgtggagatctacaacctgagcgccaactacttccaggagaagttcttccccggccacgagagcagagccaccgaggccctgtgctgggccgagggccagagactgttcagcgccggcctgaacggcgagatcatggagtacgacctgcaggccctgaacatcaagtacgccatggacgccttcggcggccccatctggagcatggccgccagccccagcggcagccagctgctggtgggctgcgaggacggcagcgtgaagctgttccagatcacccccgacaagatccagttcgagagaaacttcgacagacagaagagcagaatcctgagcctgagctggcaccccagcggcacccacatcgccgccggcagcatcgactacatcagcgtgttcgacgtgaagagcggcagcgccgtgcacaagatgatcgtggacagacagtacatgggcgtgagcaagagaaagtgcatcgtgtggggcgtggccttcctgagcgacggcaccatcatcagcgtggacagcgccggcaaggtgcagttctgggacagcgccaccggcaccctggtgaagagccacctgatcgccaacgccgacgtgcagagcatcgccgtggccgaccaggaggacagcttcgtggtgggcaccgccgagggcaccgtgttccacttccagctggtgcccgtgaccagcaacagcagcgagaagcagtgggtgagaaccaagcccttccagcaccacacccacgacgtgagaaccgtggcccacagccccaccgccctgatcagcggcggcaccgacacccacctggtgttcagacccctgatggagaaggtggaggtgaagaactacgacgccgccctgagaaagatcaccttcccccacagatgcctgatcagctgcagcaagaagagacagctgctgctgttccagttcgcccaccacctggagctgtggagactgggcagcaccgtggccaccggcaccgtggaggccatgtgcctgctggccgtgagccccgacggcaactggctggccgccagcggcaccagcgccggcgtgcacgtgtacaacgtgaagcagctgaagctgcactgcaccgtgcccgcctacaacttccccgtgaccgccatggccatcgcccccaacaccaacaacctggtgatcgcccacagcgaccagcaggtgttcgagtacagcatccccgacaagcagtacaccgactggagcagaaccgtgcagaagcagggcttccaccacctgtggctgcagagagacacccccatcacccacatcagcttccaccccaagagacccatgcacatcctgctgcacgacgcctacatgttctgcatcatcgacaagagcctgcccctgcccaacgacaagaccctgctgtacaaccccttcccccccaccaacgagagcgacgtgatcagaagaagaaccgcccacgccttcaagatcagcaagatctacaagcccctgctgttcatggacctgctggacgagagaaccctggtggccgtggagagacccctggacgacatcatcgcccagctgcccccccccatcaagaagaagaagttcggcacctag

SEQ ID NO: 225837 - protein, 713 aa, Artificial Sequence
  derived and/or modified sequence
MEPGTGGSRKRLGPRAGFRFWPPFFPRRSQAGSSKFPTPLGPENSGNPTLLSSAQPETRVSYWTKLLSQLLAPLPGLLQKVLIWSQLFGGMFPTRWLDFAGVYSALRALKGREKPAAPTAQKSLSSLQLDSSDPSVTSPLDWLEEGIHWQYSPPDLKLELKAKGSALDPAAQAFLLEQQLWGVELLPSSLQSRLYSNRELGSSPSGPLNIQRIDNFSVVSYLLNPSYLDCFPRLEVSYQNSDGNSEVVGFQTLTPESSCLREDHCHPQPLSAELIPASWQGCPPLSTEGLPEIHHLRMKRLEFLQQANKGQDLPTPDQDNGYHSLEEEHSLLRMDPKHCRDNPTQFVPAAGDIPGNTQESTEEKIELLTTEVPLALEEESPSEGCPSSEIPMEKEPGEGRISVVDYSYLEGDLPISARPACSNKLIDYILGGASSDLETSSDPEGEDWDEEAEDDGFDSDSSLSDSDLEQDPEGLHLWNSFCSVDPYNPQNFTATIQTAARIVPEEPSDSEKDLSGKSDLENSSQSGSLPETPEHSSGEEDDWESSADEAESLKLWNSFCNSDDPYNPLNFKAPFQTSGENEKGCRDSKTPSESIVAISECHTLLSCKVQLLGSQESECPDSVQRDVLSGGRHTHVKRKKVTFLEEVTEYYISGDEDRKGPWEEFARDGCRFQKRIQETEDAIGYCLTFEHRERMFNRLQGTCFKGLNVLKQC

SEQ ID NO: 225838 - protein, 623 aa, Artificial Sequence [sequence omitted]

SEQ ID NO: 225839 - DNA, 2142 bp, Artificial Sequence
  derived and/or modified sequence
atggagcccggaaccggaggctctcgcaaacgtctgggcccccgagctggcttcagattttggcccccgttcttcccgaggcgatcccaagctggatcctctaagtttccaacccctctcggaccagaaaatagcggcaatccgaccttactctcatcagcacagcctgagaccagggtcagctactggacgaaactcctatctcagctgttggctcccttgcctggcctgctacaaaaggtgttgatctggagccaattattcgggggtatgttccccacgcgatggctggatttcgccggtgtgtactcagctctcagagcgctgaaaggaagagaaaagccggccgcgcctacggcccagaagtcattgagtagtttgcagttggactcctcagatccaagtgtgacttcacctctggattggctggaagaaggaattcattggcagtactcccctccggacctcaagcttgagctgaaggccaaggggtcagccctggaccccgccgcccaggcgttcctcctggagcaacagttatggggggtcgagttattacccagtagcctgcaatccaggctctactcaaaccgggagctaggaagttctcccagcggcccacttaatattcagagaatcgataattttagtgttgtgtcatacctgcttaacccgtcctacctggactgtttccctcgactggaggtgagctatcagaattctgacggaaatagcgaagttgtcggcttccagaccctgaccccagaaagctcctgcctcagagaagaccattgtcatccccaacccctgtccgctgaactgatcccagctagctggcagggctgccccccactgtctaccgaagggttgcccgaaatccaccacttgcgcatgaagcgcttggaattcctgcagcaggccaacaaggggcaggacttgcctacaccggatcaagataacggctaccatagcctcgaagaggaacattccctgttgcgcatggaccccaaacactgtcgggataatcccacccagtttgtacccgctgccggcgacattcccggaaatactcaggagagtactgaagaaaagattgagctcctgacgacagaggtccccttagccttggaggaggagagcccttcggaagggtgcccttcatcagagatccctatggaaaaggagcctggagaaggccgcatatcagttgttgactacagctacctggagggggatctgccgatttcggcacgtcctgcttgctccaataaattaatcgactacatactgggaggtgctagtagcgatttagagacatcaagcgaccctgagggggaagattgggacgaagaagcggaggatgatggatttgactccgacagctccctttcagatagcgaccttgagcaggaccccgagggcctccatttatggaattctttctgctccgtcgacccatataatccacaaaactttaccgctaccattcaaaccgccgcaaggatcgttcccgaggaaccttctgactccgaaaaggacctcagcggcaaatctgatttggagaattcaagtcagtccggatcactgccagaaactcccgaacactcctcaggagaagaagatgattgggagagctccgcggatgaagccgaaagcctcaagctttggaactcattttgcaactccgacgatccctataatcctctcaattttaaggctccgttccagaccagtggagagaacgaaaagggatgccgcgactccaagaccccgagtgagagcattgtggccatatcagagtgtcatactttattatcttgcaaggtacagttattaggttcccaggaatcagagtgtcctgatagtgtccagcgggatgtgctgtctgggggtcggcacacccacgtgaaacgaaaaaaggtgacgttcctcgaagaagtgactgagtattatatatccggggacgaggacagaaaggggccttgggaagaatttgctagggatggatgtaggtttcagaagcgcatacaggagacagaagatgcaatcgggtattgcctgaccttcgagcaccgcgagcgaatgtttaaccgattacaggggacatgtttcaaggggctcaacgttcttaagcagtgctag

SEQ ID NO: 225840 - DNA, 1872 bp, Artificial Sequence
  derived and/or modified sequence
atgttccccaccagatggctggactttgctggagtgtactctgcactgcgcgccctcaaaggccgcgagaaaccagctgctccaactgcccagaagagtctgtcaagccttcagctcgacagcagcgacccctctgttacaagcccactcgattggctcgaagagggaattcactggcaatacagtcctccagacctgaagctcgaactgaaagctaaggggtctgcccttgaccccgctgcccaggcttttctgctcgagcagcagctgtggggggtcgagctgctcccttcatccttacaatctaggctttactcaaaccgcgaactcggtagctctcctagtggaccactcaacatacagagaattgacaactttagtgtagtgtcatatttactgaacccgtcctacctggattgttttccaagactggaagtaagctaccaaaactccgacggaaacagcgaggtcgttggtttccagaccctgactccagagagctcatgcctcagggaggaccattgccatccacaaccccttagcgccgaactcattccggcttcctggcaggggtgtccacctctatccacagaggggctccccgagatccaccatcttcgcatgaagagactggagttccttcagcaggcgaataagggccaagacttgcctacccccgaccaggataacggctatcattctctagaggaggaacattccctgctgcgcatggacccaaaacattgccgcgataacccaacccagtttgtcccagctgcaggtgacattcctggtaatacgcaggagtctacagaagagaaaatagaattacttacaaccgaggtccctctggccctcgaagaagagtctccttccgagggttgtcccagcagtgaaattcctatggaaaaggaacccggtgaaggaagaatatctgtggtggactactcatacctggaaggagacctccccatctctgctcgtcccgcctgctcgaataagctaatcgattatattttggggggagcttctagtgacctagaaacatcgagcgacccggagggagaagactgggatgaggaggccgaagatgatggtttcgacagtgattccagtctgtctgactctgatttagaacaggatcctgaaggcctgcacctgtggaattcattttgtagcgtcgacccttataatccacagaactttacagccactatacagacagccgcccgtatagtgccagaggagccaagtgacagtgagaaagacctgtccggaaagtccgatctggagaattcttctcaatcaggctcactgcctgagactcctgagcattcttccggagaagaagacgactgggaaagctctgctgacgaggccgagtcactgaagttatggaattccttctgtaactccgatgacccctacaatcccctcaattttaaagccccgtttcagaccagcggcgagaacgagaagggatgcagggatagtaagaccccctccgagtcaatcgtggctatctccgagtgccacactttattgtcatgtaaggtgcaattgctcggctcccaggaatccgaatgtcctgacagcgttcagcgcgacgtgctttcaggcggaaggcatacgcacgtgaagcgcaaaaaagtgacgttcctcgaagaagttactgaatactacatctcaggtgacgaagaccgaaaaggaccatgggaggaatttgcccgggatggctgtaggttccagaagcgtatccaggagaccgaagatgcaatcggttattgtcttacattcgaacacagagagcgtatgtttaacagactgcaagggacttgtttcaaaggcctaaacgtgctgaaacagtgttag

SEQ ID NO: 225841 - DNA, 2142 bp, Artificial Sequence
  derived and/or modified sequence
atggagcccggcactggaggcagcaggaagaggctgggcccccgggccggcttccgcttctggccacccttcttccccaggaggagccaggccggcagcagcaagttccccacccccctgggcccagaaaattctggcaaccccaccctgctgagcagcgcccagcctgagaccagggtgtcctactggaccaagctgctgagccagctgctggcccccctgcccggcctgctgcagaaggtgctgatctggagccagctgtttggaggcatgttccccacccgctggctggactttgctggggtgtacagcgccctgcgggccctgaagggccgggagaagccagctgcccccacagcccagaagagcctgagcagcctgcagctggacagcagtgaccccagcgtgaccagccccctggactggctggaggagggcatccactggcagtacagccccccagacctgaagctggagctgaaggccaagggcagcgccctggaccctgctgcccaggccttcctgctggagcagcagctgtggggcgtggagctgctgcccagcagcctgcagagccggctgtacagcaaccgggagctgggcagcagccccagcggccccctgaacatccagagaattgacaacttctctgtggtgtcctacctgctgaaccccagctacctggactgcttcccccggctggaggtgtcctaccagaacagtgatggcaacagcgaggtggtgggcttccagaccctgaccccagagagcagctgcctgcgggaggaccactgccacccccagcccctgtctgctgagctgatcccagcctcctggcagggctgcccccccctgagcacagagggcctgcctgagatccaccacctgaggatgaagaggctggagttcctgcagcaggccaacaagggccaggacctgcccaccccagaccaggacaatggctaccacagcctggaggaggagcacagcctgctgaggatggaccccaagcactgccgggacaaccccacccagtttgtgcctgctgctggggacatccctggcaacacccaggagagcacagaggagaagattgagctgctgaccacagaggtgcccctggccctggaggaggagagccccagcgagggctgccccagcagcgagatccccatggagaaggagcccggggagggccgcatctctgtggtggactacagctacctggagggggacctgcccatcagcgcccggcctgcctgcagcaacaagctgattgactacatcctgggcggggccagcagtgacctggagaccagcagtgaccctgagggggaggactgggatgaggaggctgaagatgatggctttgacagcgacagcagcctgagtgacagcgacctggagcaggaccctgagggcctgcacctgtggaacagcttctgcagcgtggacccctacaacccccagaacttcaccgccaccatccagacagctgcccgcatcgtgcctgaggagcccagcgacagcgagaaggacctgagcggcaagagtgacctggagaacagcagccagagcggcagcctgcctgagaccccagagcacagcagtggagaggaggatgactgggagagcagcgcagatgaggccgagagcctgaagctgtggaacagcttctgcaacagtgatgacccctacaaccccctgaacttcaaggcccccttccagaccagcggggagaatgagaagggctgccgggacagcaagacccccagcgagagcatcgtggccatcagcgagtgccacaccctgctgagctgcaaggtgcagctgctgggcagccaggagagcgagtgcccagacagcgtgcagagagatgtgctgagcggcggccgccacacccacgtgaagaggaagaaggtgaccttcctggaggaggtgacagagtactacatctctggagatgaggacaggaagggcccctgggaggagtttgccagagatggctgccgcttccagaagaggatccaggagacagaagatgccatcggctactgcctgacctttgagcaccgggagaggatgttcaaccggctgcagggcacctgcttcaagggcctgaatgtgctgaagcagtgctag

SEQ ID NO: 225842 - DNA, 1872 bp, Artificial Sequence
  derived and/or modified sequence
atgttccccacccgctggctggactttgctggggtgtacagcgccctgcgggccctgaagggccgggagaagccagctgcccccacagcccagaagagcctgagcagcctgcagctggacagcagtgaccccagcgtgaccagccccctggactggctggaggagggcatccactggcagtacagccccccagacctgaagctggagctgaaggccaagggcagcgccctggaccctgctgcccaggccttcctgctggagcagcagctgtggggcgtggagctgctgcccagcagcctgcagagccggctgtacagcaaccgggagctgggcagcagccccagcggccccctgaacatccagagaattgacaacttctctgtggtgtcctacctgctgaaccccagctacctggactgcttcccccggctggaggtgtcctaccagaacagtgatggcaacagcgaggtggtgggcttccagaccctgaccccagagagcagctgcctgcgggaggaccactgccacccccagcccctgtctgctgagctgatcccagcctcctggcagggctgcccccccctgagcacagagggcctgcctgagatccaccacctgaggatgaagaggctggagttcctgcagcaggccaacaagggccaggacctgcccaccccagaccaggacaatggctaccacagcctggaggaggagcacagcctgctgaggatggaccccaagcactgccgggacaaccccacccagtttgtgcctgctgctggggacatccctggcaacacccaggagagcacagaggagaagattgagctgctgaccacagaggtgcccctggccctggaggaggagagccccagcgagggctgccccagcagcgagatccccatggagaaggagcccggggagggccgcatctctgtggtggactacagctacctggagggggacctgcccatcagcgcccggcctgcctgcagcaacaagctgattgactacatcctgggcggggccagcagtgacctggagaccagcagtgaccctgagggggaggactgggatgaggaggctgaagatgatggctttgacagcgacagcagcctgagtgacagcgacctggagcaggaccctgagggcctgcacctgtggaacagcttctgcagcgtggacccctacaacccccagaacttcaccgccaccatccagacagctgcccgcatcgtgcctgaggagcccagcgacagcgagaaggacctgagcggcaagagtgacctggagaacagcagccagagcggcagcctgcctgagaccccagagcacagcagtggagaggaggatgactgggagagcagcgcagatgaggccgagagcctgaagctgtggaacagcttctgcaacagtgatgacccctacaaccccctgaacttcaaggcccccttccagaccagcggggagaatgagaagggctgccgggacagcaagacccccagcgagagcatcgtggccatcagcgagtgccacaccctgctgagctgcaaggtgcagctgctgggcagccaggagagcgagtgcccagacagcgtgcagagagatgtgctgagcggcggccgccacacccacgtgaagaggaagaaggtgaccttcctggaggaggtgacagagtactacatctctggagatgaggacaggaagggcccctgggaggagtttgccagagatggctgccgcttccagaagaggatccaggagacagaagatgccatcggctactgcctgacctttgagcaccgggagaggatgttcaaccggctgcagggcacctgcttcaagggcctgaatgtgctgaagcagtgctag

SEQ ID NO: 225843 - DNA, 2142 bp, Artificial Sequence
  derived and/or modified sequence
atggagcccggcaccggcggcagccggaagcggctgggcccccgggcaggattccggttctggcctcccttcttccctaggcgctcacaggctggaagctccaagttcccaacccccctcgggcctgaaaattcagggaaccccacgctcctgtcgagcgcccaaccagagacgcgggtcagctattggacaaaactgttatcccagcttctggctccacttccaggcctgctacaaaaagtacttatttggtcccagctgttcgggggaatgtttccgactcggtggctggactttgctggggtctactctgctctcagggctttaaaagggagggagaagccagcggcccccaccgctcagaagagtctgagctcactgcagctggattcatccgacccttcagtgacgtccccactggactggctggaggagggcatccactggcagtactctccacctgatctgaagctcgaactgaaagccaaggggtccgctcttgatccagcggcacaggccttcctgttggagcagcagttgtggggggtcgaattactccccagtagcctccagagcagactgtactcaaatcgggagttgggttccagcccgagcggcccactcaatattcaaagaattgataactttagcgttgtctcttacttgctaaatccctcatacctggactgtttcccacggctagaggtctcttatcagaattcagacggtaactctgaggtggtagggttccagaccctgaccccagagtcatcgtgtctgcgggaggaccactgccatcctcaacccctgagcgctgaacttatcccggcctcctggcaagggtgcccgcctctgtccaccgaaggactccctgaaatccaccatctcagaatgaagcgcctggagttcctccagcaggctaacaaaggccaggatctccccacacctgatcaggacaatggataccattcacttgaagaggagcatagcttgctgcgcatggacccaaaacactgtagggataacccgacccagtttgtgcccgcagcgggagatattcctgggaatactcaggagtctactgaagaaaagatcgagttgctgacgactgaggtgcccctcgccttggaagaagaatctcctagcgagggctgtcccagctctgaaattccaatggagaaggaaccgggtgaggggcgcatctcagtggttgattattcctatctggagggggacctgccaatctctgcgcggcctgcctgctcaaataaactgatagattatattctcggcggagcttccagcgacctggaaaccagcagcgatcccgaaggcgaggactgggatgaggaagctgaagacgacggattcgattctgattcatctctgagcgattccgacctggagcaggaccccgaaggactgcacctctggaactccttctgcagcgtagatccttacaatccacaaaactttacagccaccatccaaacggcagcacgaattgtgccagaagaacctagcgactccgagaaggacctctccggcaaaagcgatctggagaattcatcccaatccggttcattaccagagacccccgagcactcctctggggaagaagatgactgggagtctagcgcggatgaagcagaaagtctgaagctgtggaatagtttctgcaacagtgacgatccctacaacccactcaactttaaagcaccattccagacctctggtgaaaatgaaaagggttgcagggacagcaaaactccttccgagtccatagttgccattagcgaatgccacacactgctaagttgtaaagtccagctgttggggagtcaggagagcgagtgccccgatagtgttcagagggatgtgctatccggtggcagacacacacatgtcaagaggaagaaagtgaccttcttggaggaggtcacagaatactatataagtggggacgaggaccgcaaagggccatgggaggagtttgcacgtgacggttgtaggttccagaaaagaatacaagagacagaagacgccataggctactgcttgacctttgagcaccgcgaacgaatgtttaataggctgcaaggaacttgcttcaaaggtcttaacgtgcttaaacaatgctag

SEQ ID NO: 225844 - DNA, 1872 bp, Artificial Sequence
  derived and/or modified sequence
atgttccccacccggtggctggacttcgccggcgtgtacagcgccctgcgcgccctgaaaggccgcgagaagccggccgcaccaaccgctcagaagtccttgtcatctttgcaattggacagctcggatccctctgtaacaagtcccctcgactggctggaagagggtatacattggcagtacagcccgcccgatctgaagctggagctaaaagctaaaggttccgcgttggatccagctgcccaggccttcttgcttgagcaacagctttggggcgtcgagctactgccatcgtcacttcagagcaggttatactcgaacagagagcttggatcttcgccatcaggacccctgaacatccagagaatcgataactttagcgtcgtgtcctacttactgaatccctcctatctggactgcttccctaggcttgaagttagctatcaaaactccgacggtaactccgaggtagtgggctttcaaaccctgacgcccgaaagcagctgccttagggaggatcattgtcaccctcagcccctgagcgccgagctcatcccagccagctggcagggctgccctcccttgagcaccgaagggctgccggagatacatcacctgcgaatgaagcgcctggaattcctgcaacaagcaaacaagggacaagacctgcccactcccgaccaggataacggctaccatagccttgaagaggagcactcactgctgcgaatggatcctaaacattgcagagacaaccctactcagttcgtgcccgccgctggagatatcccaggcaatacccaggaaagtacggaggagaaaatcgaactgctgacaactgaagtccccctggccctggaggaagagtctccctcggaaggctgtcccagcagcgagatacccatggagaaggaacctggagaagggagaataagtgtggttgactattcttacctggagggtgatcttccaatcagcgctagacccgcctgttctaataagttgattgattacattcttgggggagcaagtagtgacctggaaacatccagtgatcccgaaggcgaagattgggatgaagaggcagaggatgacgggttcgacagcgacagcagcctgagtgatagcgatttagaacaggaccctgagggcttgcatctatggaactccttctgctccgttgacccttacaatccccagaacttcactgcaacgatacagaccgcagcccgtatcgttcccgaagagccttcagattcagaaaaggatctgagtggtaagtccgacctggaaaattcatcgcagtccggcagcttacccgagaccccggaacacagcagcggggaggaagacgactgggagagctctgctgacgaggccgagtccctcaagctgtggaattctttctgtaacagcgacgacccttataatcccctcaactttaaggcgcctttccagacctctggagagaacgagaaaggatgtagagattctaagacacctagcgagagcatcgtggcaatctcagagtgtcacacactgcttagctgtaaggtgcagctgctggggtcccaggagtccgagtgccctgatagtgtgcagcgcgatgtactgagcggaggacgccatacacatgtcaaacggaagaaggtgacatttttggaggaagttactgagtattacattagtggggatgaagataggaaaggtccttgggaggagttcgcgagggatggctgtcgctttcagaaacgtatccaggagactgaagatgccattggatattgcctgacctttgaacatagagaaaggatgtttaatcgcttgcaaggcacctgcttcaaggggttgaatgtacttaagcagtgctag

SEQ ID NO: 225845 - DNA, 2142 bp, Artificial Sequence
  derived and/or modified sequence
atggagcccggaacaggagggagtcgcaagagactcggccctagggccggtttccggttttggcctcctttcttccccagaaggagtcaggcaggttcgtctaaatttccgactcctttaggccctgagaacagcggtaatcctacccttctgtccagcgcccagccagagaccagagtcagctactggaccaagctgctgtcccagctgctggccccactgccagggcttctacaaaaagtactgatatggtcccagctgtttgggggaatgttcccaaccaggtggctggatttcgccggagtgtattctgccctccgggcactcaagggacgggagaaacccgcagcacctaccgctcagaaatccctctcatccctgcagctggatagtagcgacccatccgtaacctcacctctcgactggctggaggagggaatccattggcagtattctccccctgaccttaagctagagctaaaagccaagggaagcgccctcgacccagcggctcaagcttttttgctggaacagcaactatggggggttgaactactgccctcctctctgcaatctagactctattcaaacagagagctgggatccagtccaagcggccctctcaatattcagcgcatagataactttagcgtcgtgtcatacctgcttaatcccagctacctcgactgcttccccaggctggaggttagttaccagaattccgacgggaatagcgaggtggttgggttccagactttgactcccgagagtagttgcctgcgcgaagaccattgtcatcctcaacctctcagcgcagaactcataccagcaagctggcaaggctgccccccactctcaaccgagggccttccagaaatccatcacctgagaatgaagagattggagttcctacagcaggcaaataaggggcaggacttgcctacccccgatcaagacaatggttatcattcactggaagaggagcacagtctgcttaggatggaccctaagcattgtcgcgataacccaacacagtttgtacccgctgccggagacataccgggaaatactcaagagagcacagaagagaaaatcgagctgctaactaccgaagtgcccctcgcactggaagaagaatccccttcagagggatgcccaagcagtgagatacccatggagaaggagcctggagagggccgtatcagtgtggtagattacagttacctcgagggggatcttcccattagcgctagacccgcatgtagtaataagctaattgattacattcttggaggtgccagcagcgatctagaaacgtcttctgacccagagggtgaagattgggacgaagaagccgaggacgatggctttgattctgactcatctctcagcgacagtgacctggagcaggatcctgaaggcctacatctttggaattccttctgttccgtggatccttacaaccctcagaatttcaccgcaactatccaaaccgccgctcggatcgtcccggaggaaccaagtgacagcgaaaaggatctgtccggaaagagcgacctggaaaattcctctcagtctgggtccctgccggagactcctgaacactcatccggtgaggaggacgactgggagtcgtcagccgacgaggcggagtccctgaagctgtggaattctttttgcaatagcgacgatccatataaccctctgaactttaaggccccatttcagaccagcggcgagaatgagaaaggctgccgtgattccaaaaccccctccgaatccatcgttgctattagtgaatgccatactttgctctcctgcaaagtgcagttgctaggatcccaggaatccgagtgccccgacagtgtccagcgggacgtactgagcggcggtagacacacccacgtcaaacgcaaaaaggtaacttttctggaggaggtgacagagtattacatctctggcgacgaagacagaaaggggccatgggaggagtttgcaagagacggctgtaggttccaaaagcggattcaggagaccgaggatgccatcggctactgtcttacattcgagcacagagaaagaatgttcaaccgacttcaagggacttgctttaaggggcttaatgtgttgaaacagtgctag

SEQ ID NO: 225846 - DNA, 1872 bp, Artificial Sequence
  derived and/or modified sequence
atgttccctactcgatggctagatttcgccggagtgtactctgcccttagggcactcaaggggcgagaaaagcctgctgccccaactgcccagaagtctctttcctctctgcaactggattctagcgacccttcagtgacttcaccgctcgattggctggaggaaggcattcactggcagtattctcctcccgatctgaaactcgagctaaaggcgaagggatccgccctggaccctgcagcacaggcatttctcttagaacagcagttgtggggtgtggagctgctcccaagttcgttacaatctaggctgtatagcaatcgggagctcgggagttctccttcgggtcccctgaacattcagaggatagataatttttcagtggtgtcttatttgttgaacccgagctatctggactgttttccaaggttggaagtctcatatcagaattcggatggtaacagcgaagttgttggctttcaaacactgacccctgaaagtagctgtctgagggaggatcactgccatccccagcctttatcggcagaactaatcccagcttcttggcagggatgtcctccactgtccactgagggactgcctgaaattcaccatctccgcatgaagcgcctcgagtttctccagcaagccaataaaggacaggacctgcccacacctgaccaggataatggctatcacagcctcgaggaagagcattccctcttaagaatggatccaaagcactgccgagataaccccacacagttcgtccctgccgctggcgacataccaggaaacacccaagagagtaccgaggagaagatagaactcctcacaacagaagtacccctggctttagaggaagagtcccctagtgagggatgtccctcttccgagatcccaatggagaaagagcctggcgaggggcgaatctcagtagtcgattactcatacttagagggcgatcttccaatttctgcacgccctgcatgcagcaataaattgatagattatattctggggggagccagctcggacttggagacatcatcagatccagagggtgaagactgggacgaagaggctgaagatgacggcttcgatagtgattcttcgctgagcgatagtgaccttgagcaggatccagagggactgcatctgtggaactcattttgcagcgtcgatccgtacaacccacaaaactttaccgctacaattcagaccgcagcacgtattgttcccgaagagccctctgattccgagaaagacctgagtggaaaatcagatctggagaactcctcacagagcggctctctcccagagacccccgaacatagtagcggtgaggaggatgactgggagtcatcagccgatgaggccgaatctctcaaactttggaattcattttgtaatagcgacgacccttacaatcccctgaacttcaaggctcccttccagactagcggagagaatgaaaaaggatgccgggactcgaagacgccatccgagtccattgtggctatttccgagtgccacacactattgtcatgcaaggtgcagttgttaggaagccaagaatcagaatgccctgactctgtgcagcgcgacgtgctgagcgggggaagacatacccacgttaaaagaaagaaggtgactttcctagaagaagtgaccgaatattatatcagtggcgacgaggacagaaaagggccttgggaggagttcgccagagatggctgccgctttcagaaacgcatacaggaaaccgaagatgcaatcggctattgcctaaccttcgaacacagagagcgcatgttcaatcgcctccagggtacctgttttaagggcctgaatgtccttaagcagtgttag

SEQ ID NO: 225847 - DNA, 5227 bp, Artificial Sequence
  derived and/or modified sequence
agccggcctacccagtccttccggtatcgcgttgctcaggggcttttcaaccctctgtcagtcggaaaaccatcgccgaggccgtggggggactcctatccatggtgttgaagcgtcgagccgactagggaacctccttccccgccaggatggaagtcgcatcagtcgccgcctattgcgcgggctgttcttccctgtgttctgccgcccgctgccgcattcgctgccctctgtggcttttctgctggctcgaagatcggcctggagcagcgacgccaccgctgggcaaggccgagactctgtaggcttcctccgaatcccgtcgacctccagccgctgagcgccgcggccctacctgagagactgtcaagaaaaaggagatggagccggggacaggcggatcgcggaaacggcttggccctcgggcgggcttccggttctggccaccctttttccctcggcgatcgcaagcaggctcttctaagttcccgacgcctcttggcccggaaaactccgggaaccccacactgctttcctctgcccagcccgagactcgggtcagttactggacgaaactgctctcccagctccttgcgccgctccccggattgcttcagaaggtgctaatttggagccaacttttcggtggaatgtttccgaccagatggctagattttgctggagtctacagcgccctgagagccctgaagggacgggagaaaccagccgcccccacagcgcagaaatctttgagttcgctgcagctcgactcctcagacccctcggtcaccagtccccttgattggctagaggaggggatccactggcaatactcgcccccagacctaaaattggagcttaaggccaagggaagtgctttggaccctgcagcacaggcttttctcttagagcagcagctgtggggagtggagctgttgcccagtagccttcaatcccgtctgtactctaaccgggaacttggctcttcgccctctgggcctctaaacattcaacgcatagacaatttcagtgtggtatcctatttgctgaacccttcctacctggactgctttcctaggctagaagtcagctatcagaacagtgatggaaatagcgaggtagtcggcttccagacactaaccccagagagcagctgcctgagagaggaccattgtcatccccagccgctgagtgcagaactcattccggcctcgtggcagggatgtccacctctttctacggaaggcctaccagaaattcaccatcttcgcatgaaacggctggaattccttcaacaggctaacaaggggcaagatttacccacccctgaccaggataatggctaccacagcctggaggaggaacacagccttctccggatggatccaaaacactgcagagataacccaacacagtttgttcctgctgctggagacattcctggaaacacccaggaatccactgaagaaaaaatagaattattaactacagaggttccacttgctttggaagaagagagcccttctgagggctgtccatctagtgagatacctatggaaaaggagcctggagagggccgaataagtgtagttgattactcatacctagaaggtgaccttcccatttctgccagaccagcttgtagtaacaaactgatagattatattttgggaggtgcatccagtgacctggaaacaagttctgatccagaaggtgaggattgggatgaggaagctgaggatgatggttttgatagtgatagctcactgtcagactcagaccttgaacaagaccctgaagggcttcacctttggaactctttctgcagtgtagatccttataatccccagaactttacagcaacaattcagactgctgccagaattgttcctgaagagccttctgattcagagaaggatttgtctggcaagtctgatctagagaattcctcccagtctggaagccttcctgagacccctgagcatagttctggggaggaagatgactgggaatctagtgcagatgaagcagagagtctcaaactgtggaactcattctgtaattctgatgacccctacaaccctttaaattttaaggctccttttcaaacatcaggggaaaatgagaaaggctgtcgtgactcaaagaccccatctgagtccattgtggccatttctgagtgtcacaccttactttcttgtaaggtgcagctgttggggagccaagaaagtgaatgtccagactcggtacagcgtgacgttctttctggaggaagacacacacatgtcaaaagaaaaaaggtaaccttccttgaagaagttactgagtattatataagtggtgatgaggatcgcaaaggaccatgggaagaatttgcaagggatggatgcaggttccagaaacgaattcaagaaacagaagatgctattggatattgcttgacatttgaacacagagaaagaatgtttaatagactccagggaacatgcttcaaaggacttaatgttctcaagcaatgttgagttggcagcctgtagtcctagctagcatacactacctcttacctgagaggtgtcttttaaaaacaaatcttggcagctgtcctttgacatttttttttttagaggaaatgtaacttggatctagtttaatttttttttttgcaacatatcccactcagaaacattcaggtttgaagccagccctgataatgaaggatgaactagtgtgatttctaatcctcccttttttgatttagttggatgtgcttttaaatgtcctttgcctgcatgaggtggaaaggggacctttttgagttgtcattttgcactttcaaaacttattttcttggaaaacaatatttatagggcttaaagcccattttcatttctaatctaaattatgtgtgcctatctgaaaactttgggctctttcttgtttctttcccaaaattcagaagttaatgggcttttatgtttttctatattttttttatttcaatgatttggcctgtctatgttaggctaaaaaataaccttgtgtatgctaccaacttaaagtgcattattttgtgtcacttttttttttcttgtaaaaatgacttggattgaaaatatgtggtagcctttttatttctacattaagttctacctaggatatttccaaggactgccacaaaacccatatgtgcagtactttactactttgggaaagctgcatctttctaccacattttaacatctaatatatttaatttctttgaagagggttctgtgtacgttattgtagttcccagtttaatatagttctttgtatctcttaacaggttgaagttattgcaaaacactctggaaagtaataattacatcataatcatttattttttaaacttaaaagcctagaaatttcctagaaagaaaataggagacatctcagagcaatttggttttggtgtatatgttctcaacagaaaaccagtgttaatgaatatcatgcctcagcactgtcacttttaaaacctgtcaggatcccactgtaaaattggaaatgggcagttctgaattttcacgtttgaaatgtaaaatataaacttcagtcaatatccaggtttattgtgtcctactatttaataatgagagaagtaatggcaaggcctttactttcaggaaaggatagaagtatagattaatgactggaaagttttaatatatttagcccaaaggttactttgaattgaagtctttgcattgactgtttgtgtttggtttatttgtttagctttacaaggtacacataagttaggttgaggggttgttaacccttccgtggtctgctttcattccgtgtgcttcctgtcacaggtaatggaaaacataagtagaataggtgacctcttagttttgaacttatttaagtgtggggatgaatttttcatcagaagtgcttacagggttactacctcagtttacaatctacctggtcattattttatttctatccagttctaagaactgcctccactgtttatatattcataattaaacacattgagaatgcaacactataaaagctggtcaaatttttgcagagcccttattctgtgtgttttttgtttttttcttttttttttgagacagagtctcgttcggtcccccagcttggagtgcagtggcgcgatctcggctcactgcaacctccgcctcctgggttcacgcgattctcctgcctcagcctcccgagtagctgggattacaggcacacaccaccacgcccggctaattttttgtgtctttttagtagagacggggtttcgctatgttggccagactggtcttgaactgctgacctcgtgatccgcccgcctcggcctctcaaagtgctgggattctgtgtgttttgtgcacctccactttaggtaatcatagggagcacatttacaggatggtctaataacatgaaaacaggctagtttcaagcaacagcaatgtcggttggaaagcaggcgtcatttgccttgaaaaaagccttttgacaacatacaggcattcttttaaaaccaggctgaaacattttatttccgagacttaacgttgtgtttcctgtttcttaaacctagcacctctgtgtatttgaaaataatgagacatctttcattggattttggaaaattgttccccatgggattctaacctcactaccaaatgagtgaaagcttgattaagagttcttccatatactagcctccttggaagaagtgatcagaaggtgataagaaggacagaaaggactattttaaagttggactgaaggagaaaaaagcaaaattcttgtttcatcccaattctagttagaacaaagttaaacccccgtaatcttaaagagaaaatctttggaggttttaattaaacattttatacatttaaagtcttgttaatggtgctttaagtgtcaatgtagcatgtaaaaggctttgtacagacaggtaaaagttccatttctgagtgatgaaatgtaacacttcttcatctttaacttgaaatcaaaactatcagattttatttttgtataatttaaggaaggtaaagttaggggactagaagactctaaattggcttctacagatcaataatttaaatgtaactagttgggattttatagttaaaattatatttgtgtatataacataactaatctgtaaattgtaataaatatatttgcaattattaaa

SEQ ID NO: 225848 - DNA, 2245 bp, Artificial Sequence
  derived and/or modified sequence
attttgggcttcgcttccaccgcaccagccggcctacccagtccttccggtatcgcgttgctcaggggcttttcaaccctctgtcagtcggaaaaccatcgccgaggccgtggggggactcctatccatggtgttgaagcgtcgagccgactagggaacctccttccccgctccttgcgccgctccccggattgcttcagaaggtgctaatttggagccaacttttcggtggaatgtttccgaccagatggctagattttgctggagtctacagcgccctgagagccctgaagggacgggagaaaccagccgcccccacagcgcagaaatctttgagttcgctgcagctcgactcctcagacccctcggtcaccagtccccttgattggctagaggaggggatccactggcaatactcgcccccagacctaaaattggagcttaaggccaagggaagtgctttggaccctgcagcacaggcttttctcttagagcagcagctgtggggagtggagctgttgcccagtagccttcaatcccgtctgtactctaaccgggaacttggctcttcgccctctgggcctctaaacattcaacgcatagacaatttcagtgtggtatcctatttgctgaacccttcctacctggactgctttcctaggctagaagtcagctatcagaacagtgatggaaatagcgaggtagtcggcttccagacactaaccccagagagcagctgcctgagagaggaccattgtcatccccagccgctgagtgcagaactcattccggcctcgtggcagggatgtccacctctttctacggaaggcctaccagaaattcaccatcttcgcatgaaacggctggaattccttcaacaggctaacaaggggcaagatttacccacccctgaccaggataatggctaccacagcctggaggaggaacacagccttctccggatggatccaaaacactgcagagataacccaacacagtttgttcctgctgctggagacattcctggaaacacccaggaatccactgaagaaaaaatagaattattaactacagaggttccacttgctttggaagaagagagcccttctgagggctgtccatctagtgagatacctatggaaaaggagcctggagagggccgaataagtgtagttgattactcatacctagaaggtgaccttcccatttctgccagaccagcttgtagtaacaaactgatagattatattttgggaggtgcatccagtgacctggaaacaagttctgatccagaaggtgaggattgggatgaggaagctgaggatgatggttttgatagtgatagctcactgtcagactcagaccttgaacaagaccctgaagggcttcacctttggaactctttctgcagtgtagatccttataatccccagaactttacagcaacaattcagactgctgccagaattgttcctgaagagccttctgattcagagaaggatttgtctggcaagtctgatctagagaattcctcccagtctggaagccttcctgagacccctgagcatagttctggggaggaagatgactgggaatctagtgcagatgaagcagagagtctcaaactgtggaactcattctgtaattctgatgacccctacaaccctttaaattttaaggctccttttcaaacatcaggggaaaatgagaaaggctgtcgtgactcaaagaccccatctgagtccattgtggccatttctgagtgtcacaccttactttcttgtaaggtgcagctgttggggagccaagaaagtgaatgtccagactcggtacagcgtgacgttctttctggaggaagacacacacatgtcaaaagaaaaaaggtaaccttccttgaagaagttactgagtattatataagtggtgatgaggatcgcaaaggaccatgggaagaatttgcaagggatggatgcaggttccagaaacgaattcaagaaacagaagatgctattggatattgcttgacatttgaacacagagaaagaatgtttaatagactccagggaacatgcttcaaaggacttaatgttctcaagcaatgttgagttggcagcctgtagtcctagctagcatacactacctcttacctgagaggtgtcttttaaaaacaaatcttggcagctgtcctttgacatttttttttttagaggaaatgtaacttggatctagtttaattttttttttt

SEQ ID NO: 225849 - DNA, 2142 bp, Artificial Sequence
  derived and/or modified sequence
atggagcccggcaccggcggcagcagaaagagactgggccccagagccggcttcagattctggccccccttcttccccagaagaagccaggccggcagcagcaagttccccacccccctgggccccgagaacagcggcaaccccaccctgctgagcagcgcccagcccgagaccagagtgagctactggaccaagctgctgagccagctgctggcccccctgcccggcctgctgcagaaggtgctgatctggagccagctgttcggcggcatgttccccaccagatggctggacttcgccggcgtgtacagcgccctgagagccctgaagggcagagagaagcccgccgcccccaccgcccagaagagcctgagcagcctgcagctggacagcagcgaccccagcgtgaccagccccctggactggctggaggagggcatccactggcagtacagcccccccgacctgaagctggagctgaaggccaagggcagcgccctggaccccgccgcccaggccttcctgctggagcagcagctgtggggcgtggagctgctgcccagcagcctgcagagcagactgtacagcaacagagagctgggcagcagccccagcggccccctgaacatccagagaatcgacaacttcagcgtggtgagctacctgctgaaccccagctacctggactgcttccccagactggaggtgagctaccagaacagcgacggcaacagcgaggtggtgggcttccagaccctgacccccgagagcagctgcctgagagaggaccactgccacccccagcccctgagcgccgagctgatccccgccagctggcagggctgcccccccctgagcaccgagggcctgcccgagatccaccacctgagaatgaagagactggagttcctgcagcaggccaacaagggccaggacctgcccacccccgaccaggacaacggctaccacagcctggaggaggagcacagcctgctgagaatggaccccaagcactgcagagacaaccccacccagttcgtgcccgccgccggcgacatccccggcaacacccaggagagcaccgaggagaagatcgagctgctgaccaccgaggtgcccctggccctggaggaggagagccccagcgagggctgccccagcagcgagatccccatggagaaggagcccggcgagggcagaatcagcgtggtggactacagctacctggagggcgacctgcccatcagcgccagacccgcctgcagcaacaagctgatcgactacatcctgggcggcgccagcagcgacctggagaccagcagcgaccccgagggcgaggactgggacgaggaggccgaggacgacggcttcgacagcgacagcagcctgagcgacagcgacctggagcaggaccccgagggcctgcacctgtggaacagcttctgcagcgtggacccctacaacccccagaacttcaccgccaccatccagaccgccgccagaatcgtgcccgaggagcccagcgacagcgagaaggacctgagcggcaagagcgacctggagaacagcagccagagcggcagcctgcccgagacccccgagcacagcagcggcgaggaggacgactgggagagcagcgccgacgaggccgagagcctgaagctgtggaacagcttctgcaacagcgacgacccctacaaccccctgaacttcaaggcccccttccagaccagcggcgagaacgagaagggctgcagagacagcaagacccccagcgagagcatcgtggccatcagcgagtgccacaccctgctgagctgcaaggtgcagctgctgggcagccaggagagcgagtgccccgacagcgtgcagagagacgtgctgagcggcggcagacacacccacgtgaagagaaagaaggtgaccttcctggaggaggtgaccgagtactacatcagcggcgacgaggacagaaagggcccctgggaggagttcgccagagacggctgcagattccagaagagaatccaggagaccgaggacgccatcggctactgcctgaccttcgagcacagagagagaatgttcaacagactgcagggcacctgcttcaagggcctgaacgtgctgaagcagtgctag

SEQ ID NO: 225850 - DNA, 1872 bp, Artificial Sequence
  derived and/or modified sequence
atgttccccaccagatggctggacttcgccggcgtgtacagcgccctgagagccctgaagggcagagagaagcccgccgcccccaccgcccagaagagcctgagcagcctgcagctggacagcagcgaccccagcgtgaccagccccctggactggctggaggagggcatccactggcagtacagcccccccgacctgaagctggagctgaaggccaagggcagcgccctggaccccgccgcccaggccttcctgctggagcagcagctgtggggcgtggagctgctgcccagcagcctgcagagcagactgtacagcaacagagagctgggcagcagccccagcggccccctgaacatccagagaatcgacaacttcagcgtggtgagctacctgctgaaccccagctacctggactgcttccccagactggaggtgagctaccagaacagcgacggcaacagcgaggtggtgggcttccagaccctgacccccgagagcagctgcctgagagaggaccactgccacccccagcccctgagcgccgagctgatccccgccagctggcagggctgcccccccctgagcaccgagggcctgcccgagatccaccacctgagaatgaagagactggagttcctgcagcaggccaacaagggccaggacctgcccacccccgaccaggacaacggctaccacagcctggaggaggagcacagcctgctgagaatggaccccaagcactgcagagacaaccccacccagttcgtgcccgccgccggcgacatccccggcaacacccaggagagcaccgaggagaagatcgagctgctgaccaccgaggtgcccctggccctggaggaggagagccccagcgagggctgccccagcagcgagatccccatggagaaggagcccggcgagggcagaatcagcgtggtggactacagctacctggagggcgacctgcccatcagcgccagacccgcctgcagcaacaagctgatcgactacatcctgggcggcgccagcagcgacctggagaccagcagcgaccccgagggcgaggactgggacgaggaggccgaggacgacggcttcgacagcgacagcagcctgagcgacagcgacctggagcaggaccccgagggcctgcacctgtggaacagcttctgcagcgtggacccctacaacccccagaacttcaccgccaccatccagaccgccgccagaatcgtgcccgaggagcccagcgacagcgagaaggacctgagcggcaagagcgacctggagaacagcagccagagcggcagcctgcccgagacccccgagcacagcagcggcgaggaggacgactgggagagcagcgccgacgaggccgagagcctgaagctgtggaacagcttctgcaacagcgacgacccctacaaccccctgaacttcaaggcccccttccagaccagcggcgagaacgagaagggctgcagagacagcaagacccccagcgagagcatcgtggccatcagcgagtgccacaccctgctgagctgcaaggtgcagctgctgggcagccaggagagcgagtgccccgacagcgtgcagagagacgtgctgagcggcggcagacacacccacgtgaagagaaagaaggtgaccttcctggaggaggtgaccgagtactacatcagcggcgacgaggacagaaagggcccctgggaggagttcgccagagacggctgcagattccagaagagaatccaggagaccgaggacgccatcggctactgcctgaccttcgagcacagagagagaatgttcaacagactgcagggcacctgcttcaagggcctgaacgtgctgaagcagtgctag

SEQ ID NO: 225851 - protein, 473 aa, Artificial Sequence
  derived and/or modified sequence
MAQLEGYYFSAALSCTFLVSCLLFSAFSRALREPYMDEIFHLPQAQRYCEGHFSLSQWDPMITTLPGLYLVSIGVIKPAIWIFGWSEHVVCSIGMLRFVNLLFSVGNFYLLYLLFCKVQPRNKAASSIQRVLSTLTLAVFPTLYFFNFLYYTEAGSMFFTLFAYLMCLYGNHKTSAFLGFCGFMFRQTNIIWAVFCAGNVIAQKLTEAWKTELQKKEDRLPPIKGPFAEFRKILQFLLAYSMSFKNLSMLLLLTWPYILLGFLFCAFVVVNGGIVIGDRSSHEACLHFPQLFYFFSFTLFFSFPHLLSPSKIKTFLSLVWKRRILFFVVTLVSVFLVWKFTYAHKYLLADNRHYTFYVWKRVFQRYETVKYLLVPAYIFAGWSIADSLKSKSIFWNLMFFICLFTVIVPQKLLEFRYFILPYVIYRLNIPLPPTSRLICELSCYAVVNFITFFIFLNKTFQWPNSQDIQRFMW

SEQ ID NO: 225852 - DNA, 1422 bp, Artificial Sequence
  derived and/or modified sequence
atggcacagcttgagggttactacttctctgcggcattatcttgcacgtttcttgtatcctgcctccttttctccgccttcagcagagcccttagggaaccatatatggacgagatttttcatcttcctcaggcccagcgctactgcgaaggccacttcagtttatctcagtgggacccgatgattacaactctgcctggactctatttggtgtctattggtgtgattaagcccgcaatctggatttttggatggagtgaacacgttgtttgttcaatcgggatgttgcgttttgttaatctgctgttttccgtcggtaatttttacctactatacctcctcttttgcaaagtgcaaccaaggaacaaggccgcgtcatcaatccaaagggtcttaagcactctcacgctggctgtgttcccaacactgtatttttttaacttcttatattataccgaggccggttctatgttttttacattgttcgcttatttgatgtgtctctacggaaaccacaagaccagtgccttcttgggattctgcggtttcatgtttagacaaaccaatatcatctgggcagtgttttgtgccggaaatgttatcgcacaaaaactaactgaggcctggaagaccgaactacaaaagaaggaggacagacttccccctataaagggtcccttcgcggagtttagaaagatccttcagttcctgcttgcctactcaatgtcatttaagaacctgtcaatgctgctgctccttacctggccttacatccttctgggctttttattttgcgctttcgttgttgtgaatggaggaatagtaatcggggaccgtagctcacacgaggcctgcctccactttccacagctcttctatttcttttcctttaccttatttttctcatttccccatttgctgtctccaagtaaaataaagacttttctcagtctcgtgtggaagcggcgcatactattttttgtcgttaccctggtgagcgttttcttggtttggaagttcacttacgcccacaagtacctcctggccgacaataggcactatacattttatgtttggaagcgggtcttccaacgctacgagacagtcaagtaccttctggtgcccgcctatatctttgccgggtggtccatcgccgattcactgaagagcaaaagtatattctggaatctcatgttttttatctgcttgttcacagtcattgttccacagaagttactcgagtttcgatacttcattctgccttatgtcatatatcgcctgaacatcccactgccccccaccagtagactgatttgtgagctgagctgttatgccgtggttaacttcatcaccttcttcatcttcttgaacaaaaccttccagtggcctaacagccaggatattcagagattcatgtggtag

SEQ ID NO: 225853 - DNA, 1422 bp, Artificial Sequence
  derived and/or modified sequence
atggcccagctggagggctactacttctctgctgccctgagctgcaccttcctggtgtcctgcctgctcttcagcgccttcagccgggccctgcgggagccctacatggatgagatcttccacctgccccaggcccagcgctactgtgagggccacttcagcctgagccagtgggaccccatgatcaccaccctgcccggcctgtacctggtgtccattggagtcatcaagccagccatctggatcttcggctggagcgagcacgtggtgtgcagcatcggcatgctgcgctttgtgaacctgctcttctctgtgggcaacttctacctgctgtacctgctcttctgcaaggtgcagcccaggaacaaggccgccagcagcatccagagggtgctgagcaccctgaccctggccgtgttccccaccctgtacttcttcaacttcctgtactacacagaggccggctccatgttcttcaccctgtttgcctacctgatgtgcctgtatggcaaccacaagaccagcgccttcctgggcttctgtggcttcatgttccggcagaccaacatcatctgggccgtgttctgtgctggaaatgtgattgcccagaagctgacagaggcctggaagacagagctgcagaagaaggaggaccggctgccccccatcaagggcccctttgctgagttcaggaagatcctgcagttcctgctggcctacagcatgtccttcaagaacctgtccatgctgctgctgctgacctggccctacatcctgctgggcttcctgttctgtgcctttgtggtggtgaatggaggcatcgtcatcggggacaggagcagccatgaggcctgcctgcacttcccccagctgttctacttcttctccttcaccctcttcttctccttcccccacctgctgagccccagcaagatcaagaccttcctgagcctggtgtggaagaggcgcatcctcttctttgtggtgaccctggtgtctgtgttcctggtgtggaagttcacctacgcccacaagtacctgctggccgacaacagacactacaccttctacgtgtggaagagggtcttccagagatatgagaccgtgaagtacctgctggtgcctgcctacatctttgctggctggagcattgctgacagcctgaagagcaagagcatcttctggaacctgatgttcttcatctgcctcttcaccgtgattgtgccccagaagctgctggagttccgctacttcatcctgccctacgtgatctaccgcctgaacatccccctgccccccaccagccgcctcatctgtgagctgagctgctatgctgtggtgaacttcatcaccttcttcatcttcctgaacaagaccttccagtggcccaacagccaggacatccagcgcttcatgtggtag

SEQ ID NO: 225854 - DNA, 1422 bp, Artificial Sequence
  derived and/or modified sequence
atggcccagctggagggctactacttcagcgccgccctgagctgcacctttctggtttcatgtctcctatttagcgctttttccagggctctgagagaaccttacatggatgagattttccacctcccgcaggctcagagatattgtgaaggacactttagcttgtcacagtgggacccgatgatcactacactgcctggtctttatctcgttagcataggagtgatcaagccagcgatctggattttcggctggtccgagcatgtcgtgtgcagcatcggcatgctgcgcttcgtcaacctgcttttctccgtgggaaatttctatcttctctatctgctgttctgtaaggtacagcctcgcaataaggccgctagttccatccagcgcgtgctttccacccttacactcgccgtattcccaaccttgtacttcttcaactttttatattacactgaagcgggttctatgttttttactctgtttgcttatctaatgtgcctctacggaaaccacaagacgagtgcctttttgggtttttgtgggtttatgttccggcagaccaacattatatgggcagtattctgcgccggtaacgttattgcccagaagctgacagaagcttggaagacagagttgcagaagaaggaagatagactaccccccatcaaaggacctttcgccgagtttcgaaaaattttacagttcctgctagcttacagcatgagttttaaaaacctgtctatgctgcttctcttaacatggccgtatatactcttaggtttcttattttgtgctttcgtggtagtcaacggcggcatcgtgataggcgaccggagctcacatgaggcttgtttgcattttccccagctattctatttcttcagtttcacgttgtttttcagctttccccacctgctgtctccctccaaaattaagactttccttagtcttgtgtggaagagacgaatcctattcttcgtcgtgacgctggtttctgtattccttgtgtggaaatttacctacgcacataagtatctgcttgccgacaatcgacactacaccttctatgtgtggaaacgcgtgttccagcgctacgaaacagtgaagtacctgctcgtccccgcgtacatcttcgccggttggagcatcgccgactccctgaagagcaagtccatcttttggaacttgatgtttttcatctgtctgttcaccgtgatcgtgccacagaagctcctcgagttcaggtatttcatattgccctacgtgatatatcgtctgaatattcctctgcctcctacttctcggctaatatgcgaactgagctgttacgccgtagttaactttatcacattttttatatttctcaataagacattccaatggccaaacagtcaggacatacagagattcatgtggtag

SEQ ID NO: 225855 - DNA, 1422 bp, Artificial Sequence
  derived and/or modified sequence
atggctcagctcgaaggttattattttagtgcggctttatcttgcacattcctggtgtcgtgtctgttattttccgcctttagtcgtgcgttgcgcgagccatacatggacgagatctttcacctgccccaagctcagaggtactgtgaggggcactttagcctctctcaatgggaccctatgatcactaccttacccggtctctatttggtaagcatcggtgtaattaagcctgccatctggattttcggatggagtgaacacgtggtctgtagcattggcatgctacgctttgtgaacctccttttttccgtaggcaatttctatctgctctatctacttttctgcaaggtgcagccacggaacaaagctgctagctccatccagagagtgctgtccaccctgacactcgcagtcttccccactttgtatttttttaactttctgtactacaccgaggcgggttccatgttcttcacgttatttgcttatctcatgtgcctctatggcaaccataaaacctcagcgttcttgggtttctgcggctttatgttccgacagactaatattatctgggctgtcttttgtgcgggaaatgtgatcgcccagaagctgaccgaggcctggaaaacagaactacaaaaaaaggaggacagactaccccctatcaagggtccatttgccgaattccgcaaaattctgcagttcctcctcgcctatagtatgagctttaagaacctgtctatgcttctgctgttgacttggccgtacatccttctcggattccttttctgtgcctttgtggtcgtgaacggcggaatcgtcatcggcgatagatcttcacacgaggcgtgcctgcactttccacagcttttttattttttctcattcactctattcttcagcttcccacacttgttgtcacctagcaagattaagacttttctctctcttgtatggaagagacgcatcctgttcttcgttgtcaccctggtgagcgtatttctggtgtggaagttcacatacgctcacaaatacctgctcgcagacaatcgtcattacaccttttatgtgtggaagagggtgttccagaggtatgagaccgtgaagtacctgctggtgcctgcctatatttttgcgggatggagtatcgctgactcgctgaagagtaaatcgatcttttggaatttgatgttcttcatctgtctgttcaccgtgatcgtaccccagaaattgctagagttccggtatttcatactcccatacgtgatatatcggctgaatattcccttgcctcctacctcgagactaatatgcgaactgtcatgttacgctgtagtgaatttcatcactttttttatttttctgaacaagacatttcagtggcccaattctcaggacattcaaagatttatgtggtag

SEQ ID NO: 225856 - DNA, 2393 bp, Artificial Sequence
  derived and/or modified sequence
ctaagcagcaagccacgcacctcccgcgctggcgaaatccgagacccgccccttccggaagttttgacactttgtgcgccccgggcaatgcgattgagagggtaatcatccggtccgttatctaaacccgtcactccgggaaacagcgacccgatctttccggatccgcgctctcccagcatcctttgccttccggtatgtggccccgtctggctagtcccgcctagcgcgcccatttcgagcccaagtttccagctcgggtttccaggctcagaattttccaggagtaggttcttgggcagtggctgtgggagctggaatggcgcagctggaaggttactatttctcggccgccttgagctgtacctttttagtatcctgcctcctcttctccgccttcagccgggcgttgcgagagccctacatggacgagatcttccacctgcctcaggcgcagcgctactgtgagggccatttctccctttcccagtgggatcccatgattactacattacctggcttgtacctggtgtcaattggagtgatcaaacctgccatttggatctttggatggtctgaacatgttgtctgctccattgggatgctcagatttgttaatcttctcttcagtgttggcaacttctatttactatatttgcttttctgcaaggtacaacccagaaacaaggctgcctcaagtatccagagagtcttgtcaacattaacactagcagtatttccaacactttatttttttaacttcctttattatacagaagcaggatctatgttttttactctttttgcgtatttgatgtgtctttatggaaatcataaaacttcagccttccttggattttgtggcttcatgtttcggcaaacaaatatcatctgggctgtcttctgtgcaggaaatgtcattgcacaaaagttaacggaggcttggaaaactgagctacaaaagaaggaagacagacttccacctattaaaggaccatttgcagaattcagaaaaattcttcagtttcttttggcttattccatgtcctttaaaaacttgagtatgcttttgcttctgacttggccctacatccttctgggatttctgttttgtgcttttgtagtagttaatggtggaattgttattggcgatcggagtagtcatgaagcctgtcttcattttcctcaactattctactttttttcatttactctctttttttcctttcctcatctcctgtctcctagcaaaattaagacttttctttccttagtttggaaacgtagaattctgttttttgtggttaccttagtctctgtgtttttagtttggaaattcacttatgctcataaatacttgctagcagacaatagacattatactttctatgtgtggaaaagagtttttcaaagatatgaaactgtaaaatatttgttagttccagcctatatatttgctggttggagtatagctgactcattgaaatcaaagtcaattttttggaatttaatgtttttcatatgcttgttcactgttatagttcctcagaaactgctggaatttcgttacttcattttaccttatgtcatttataggcttaacatacctctgcctcccacatccagactcatttgtgaactgagctgctatgcagttgttaatttcataacttttttcatctttctgaacaagacttttcagtggccaaatagtcaggacattcaaaggtttatgtggtaatatcagtgatatttcgaactgtgaaaatggacttaataattagaccatttctacaaagaacaactgaataggtggaaaacatggaatttcttttaggtgcagtggtggtcttcaaattacattagttttttttatatatattttaaacatatgtaagaaattaagtggcaaagaactgagaaagcttaagacctgcttcaaaagcctgaaaaatggaaaaataaaattgttttcagatatctcatatcactctcataatgttggccccttaaaaagcttgggaatgttttgtatgtacaagtttattaaaactgggtatgcttcatattactggaatgaatttattctcttcagagagaaatattaggttagtgcaaaagtaattgtggtttttgccattgaaagtaatggcaaaaccacaattacttttttaccaacctaataacaatgtattagcaaatatttacaaatggtcaggtgatattcttgattgaaaagttgcttaacatttcagtaatataattttaattctaagtcaaaatacaaatgcatagatagtaaatgataaagtagagactcatatatgcctgtctagacatcaaattgttggttattgtttacaatctagaaatgatgaagctctttcactaat

SEQ ID NO: 225857 - DNA, 1422 bp, Artificial Sequence
  derived and/or modified sequence
atggcccagctggagggctactacttcagcgccgccctgagctgcaccttcctggtgagctgcctgctgttcagcgccttcagcagagccctgagagagccctacatggacgagatcttccacctgccccaggcccagagatactgcgagggccacttcagcctgagccagtgggaccccatgatcaccaccctgcccggcctgtacctggtgagcatcggcgtgatcaagcccgccatctggatcttcggctggagcgagcacgtggtgtgcagcatcggcatgctgagattcgtgaacctgctgttcagcgtgggcaacttctacctgctgtacctgctgttctgcaaggtgcagcccagaaacaaggccgccagcagcatccagagagtgctgagcaccctgaccctggccgtgttccccaccctgtacttcttcaacttcctgtactacaccgaggccggcagcatgttcttcaccctgttcgcctacctgatgtgcctgtacggcaaccacaagaccagcgccttcctgggcttctgcggcttcatgttcagacagaccaacatcatctgggccgtgttctgcgccggcaacgtgatcgcccagaagctgaccgaggcctggaagaccgagctgcagaagaaggaggacagactgccccccatcaagggccccttcgccgagttcagaaagatcctgcagttcctgctggcctacagcatgagcttcaagaacctgagcatgctgctgctgctgacctggccctacatcctgctgggcttcctgttctgcgccttcgtggtggtgaacggcggcatcgtgatcggcgacagaagcagccacgaggcctgcctgcacttcccccagctgttctacttcttcagcttcaccctgttcttcagcttcccccacctgctgagccccagcaagatcaagaccttcctgagcctggtgtggaagagaagaatcctgttcttcgtggtgaccctggtgagcgtgttcctggtgtggaagttcacctacgcccacaagtacctgctggccgacaacagacactacaccttctacgtgtggaagagagtgttccagagatacgagaccgtgaagtacctgctggtgcccgcctacatcttcgccggctggagcatcgccgacagcctgaagagcaagagcatcttctggaacctgatgttcttcatctgcctgttcaccgtgatcgtgccccagaagctgctggagttcagatacttcatcctgccctacgtgatctacagactgaacatccccctgccccccaccagcagactgatctgcgagctgagctgctacgccgtggtgaacttcatcaccttcttcatcttcctgaacaagaccttccagtggcccaacagccaggacatccagagattcatgtggtag

SEQ ID NO: 225858 - protein, 478 aa, Artificial Sequence
  derived and/or modified sequence
MGSRWSSEEERQPLLGPGLGPGLGASWRSREAAAAALPAAVPGPGRVYGRRWLVLLLFSLLAFVQGLVWNTWGPIQNSARQAYGFSSWDIALLVLWGPIGFLPCFAFMWLLDKRGLRITVLLTSFLMVLGTGLRCIPISDLILKRRLIHGGQMLNGLAGPTVMNAAPFLSTTWFSADERATATAIASMLSYLGGACAFLVGPLVVPAPNGTSPLLAAESSRAHIKDRIEAVLYAEFGVVCLIFSATLAYFPPRPPLPPSVAAASQRLSYRRSVCRLLSNFRFLMIALAYAIPLGVFAGWSGVLDLILTPAHVSQVDAGWIGFWSIVGGCVVGIAMARFADFIRGMLKLILLLLFSGATLSSTWFTLTCLNSITHLPLTTVTLYASCILLGVFLNSSVPIFFELFVETVYPVPEGITCGVVTFLSNMFMGVLLFFLTFYHTELSWFNWCLPGSCLLSLLLILCFRESYDRLYLDVVVSV

SEQ ID NO: 225859 - DNA, 1437 bp, Artificial Sequence
  derived and/or modified sequence
atgggttctaggtggtctagtgaagaggaacgccagcccctattgggccccggcctggggcccggcttaggggctagctggcgtagtcgagaagcggcagcagctgcactgcccgccgctgtccccggccccggtagagtctatggccgccgctggctggttctgttgcttttttctctcctggccttcgtccagggcctcgtctggaacacatggggacctatccagaacagcgccaggcaagcctacggcttcagtagctgggacattgcattgttagtgctctggggaccgatcggcttcctcccctgcttcgcgtttatgtggcttctcgacaagcgtggattgcgcattaccgttctgctgacctcctttctgatggtgttggggaccggcctccgttgcattcctataagcgacctaatcctgaagaggagactgattcatggcggccagatgctcaacgggctcgccgggccaacagtaatgaacgctgcaccttttctttcgacaacctggttttcagccgacgagcgcgccactgcaaccgctatcgcatccatgctcagttacctcgggggcgcctgcgcctttctggtggggccactggtggtgcctgcccctaatggtaccagccccttgctggctgccgagtccagccgggctcacatcaaagacagaatcgaggctgtcctgtatgccgagtttggcgttgtctgcctgatcttctccgctactttggcttatttccctcccagaccccccctgccaccttccgtagctgcagcttcgcaacgtcttagctatcgtcgatccgtgtgtagacttctctccaatttccggtttttaatgatcgccctcgcgtatgccatccccctcggagtgtttgccggctggtccggtgtgctcgacctgatcctgacacctgcacacgttagtcaagtggacgccggatggatcgggttttggtcaatagttggcggctgcgtggtgggcatcgccatggctcggtttgccgacttcataagagggatgttaaagctgatcctgctccttttattttccggggccacactatcttctacctggttcaccctcacctgtcttaactcaataacgcatttgccactgactacagttaccttatacgcctcttgcattcttctcggagtctttttgaattcctctgtcccaatttttttcgagttgttcgtagaaactgtatatcctgtgccagagggaattacttgcggggtggtgacctttctgagcaatatgtttatgggtgtgctcctgttcttcctgaccttttatcacaccgagctctcttggttcaactggtgcctgcctggatcctgtctgcttagccttctcctgatcctctgcttccgcgagtcttatgacagactgtacctcgacgtggtggtttccgtgtag

SEQ ID NO: 225860 - DNA, 1437 bp, Artificial Sequence
  derived and/or modified sequence
atgggcagccgctggagcagcgaggaggagcggcagcccctgctgggccctggcctgggccctggcctgggcgcctcctggaggagccgggaggccgctgctgctgccctgcctgctgctgtgcccggccctggccgggtgtatggccgccgctggctggtgctgctgctcttcagcctgctggcctttgtgcagggcctggtgtggaacacctggggccccatccagaacagcgcccggcaggcctacggcttcagctcctgggacatcgccctgctggtgctgtggggccccatcggcttcctgccctgctttgccttcatgtggctgctggacaagaggggcctgcgcatcaccgtgctgctgaccagcttcctgatggtgctgggcaccggcctgcgctgcatccccatcagtgacctgatcctgaagagaagactcatccatggaggccagatgctgaatggcctggccggccccaccgtgatgaatgctgcccccttcctgagcaccacctggttcagcgcagatgagcgggccacagccacagccatcgcctccatgctgagctacctgggcggggcctgtgccttcctggtgggccccctggtggtgcctgccccaaatggcaccagccccctgctggccgctgagagcagccgggcccacatcaaggaccgcatcgaggccgtgctgtatgcagagtttggagtggtgtgcctgatcttcagcgccaccctggcctacttccccccccggccccccctgcccccatctgtggccgccgccagccagaggctgagctaccgccgctctgtgtgccgcctgctgagcaacttccgcttcctgatgattgccctggcctatgccatccccctgggcgtgtttgctggctggagcggcgtgctggacctgatcctgaccccagcccacgtgtcccaggtggatgctggctggattggcttctggagcatcgtgggcggctgtgtggtgggcatcgccatggccaggtttgctgacttcatccggggcatgctgaagctgatcctgctgctgctcttcagcggggccaccctgagcagcacctggttcaccctgacctgcctgaacagcatcacccacctgcccctgaccaccgtgaccctgtatgccagctgcatcctgctgggcgtcttcctgaacagctctgtgcccatcttctttgagctgtttgtggagaccgtgtaccctgtgcctgagggcatcacctgtggggtggtgaccttcctgagcaacatgttcatgggcgtgctgctcttcttcctgaccttctaccacacagagctgtcctggttcaactggtgcctgcccggcagctgcctgctgagcctgctgctgatcctgtgcttccgggagagctatgaccggctgtacctggatgtggtggtgtctgtgtag

SEQ ID NO: 225861 - DNA, 1437 bp, Artificial Sequence
  derived and/or modified sequence
atgggcagccggtggagcagcgaggaggagcggcagcccctgctgggaccagggcttgggcccggactaggagccagctggaggagcagagaagcagcggcagctgcactgcccgccgccgtccccggcccaggccgggtttatgggagacggtggctggtcctgctcctatttagtctgctggcgttcgtgcaggggctggtctggaacacgtggggccccatacagaactctgcccggcaggcttatgggttttctagctgggatattgcgctactggttctgtggggacctatcggattcctgccgtgctttgctttcatgtggttgctggacaaacgggggcttcggatcacagtcctgcttacttccttcctgatggtcctgggaaccggtctgcggtgtattcctatctctgacttaatcttgaaacgaaggctgatacacggtggtcagatgctcaacggactagctggccctaccgtgatgaacgcggctcccttcctgtcaacaacctggttttcagcagatgagcgagccaccgccacagcaatagcttctatgttgtcctacctggggggcgcgtgtgccttcctggtgggccctctcgtagtgccagccccaaacgggaccagccccctcctggcggcagaaagttcaagagctcatatcaaagatcggatagaagccgtcctctatgctgaatttggtgtcgtgtgcttgatctttagtgctacactagcatatttccccccaagacctcctttacccccaagcgtagccgctgcaagtcagcggctaagctaccggaggagtgtctgtaggctactcagcaacttcagattcctcatgatcgccctagcctacgccatcccccttggggtgttcgcaggttggtctggcgtgctggatctgatactgaccccagcgcatgtctctcaggtggacgctggttggataggcttctggagcatcgtgggcggatgtgtcgtcgggatcgccatggccagattcgctgacttcatacgcggcatgcttaagctgattctcctgttactgttctccggagcgacgctgtccagcacttggtttacccttacctgtctaaacagcattacccacctgcctctgaccaccgtaacgctctatgccagctgtatcctgctcggagtgttcctgaattcttcagtgcctatcttctttgagctcttcgttgagactgtctaccctgtaccggaaggcattacctgcggcgtggtcactttcctctcaaatatgttcatgggcgtgctgttattcttccttacattttatcatacagagctgtcctggttcaactggtgtctgcctggttcatgcctcctgagtttactcctgattctctgcttcagggagtcttacgaccgcctgtatctcgacgtcgttgttagcgtctag

SEQ ID NO: 225862 - DNA, 1437 bp, Artificial Sequence
  derived and/or modified sequence
atgggatcgaggtggagttccgaggaggaacgacagccattgctgggccctggcctcggcccagggctcggagcttcatggaggtcaagagaggccgcagccgcagctttgcctgcggcagtgcctggacctggtcgcgtttatgggagacgctggctcgtcttgttgctgttctcgttgctggcctttgtccaagggctggtgtggaatacttggggccctatccagaatagcgcaagacaggcctacggcttttcttcttgggatattgcactgcttgtgctgtgggggccaatcggattcctcccatgctttgccttcatgtggctgctcgataagagagggctgcggattaccgtgctgctgacctcgtttctgatggttctgggaacaggtttgcgctgcattccgatttctgatctgatactgaagcgacgcctgatacatgggggacaaatgctaaatggattagcaggtccaactgtcatgaatgccgctccgttcttatcaactacatggttttctgccgatgaacgtgcgaccgccactgctatcgccagtatgctctcttatctgggaggggcttgtgcctttctcgtgggccctttggtagtccccgctcctaacggcacgtcccctcttctcgccgctgaatcatctagagcccacatcaaggacaggatagaagcagtactatacgctgagttcggcgttgtgtgtctgatcttttctgcaactttggcttactttccacccaggcctcctctgccaccgtcggtggctgcagcaagtcagcggctgtcttatcgtagatctgtgtgccggctgctgtctaacttccggttccttatgatagccctagcctatgccatccccttgggagtgttcgccggttggagcggtgttctggatctgatcttaacccctgcccacgtgagccaggtcgatgccggatggattggattttggagtatcgttgggggttgcgtcgtggggattgcaatggcaaggttcgcggatttcatcagaggcatgttaaagctgatcctccttcttctctttagcggtgccacgttgtcttcaacttggtttacccttacatgcttgaacagtattacccacctgccattgacaaccgtgacattgtacgcctcttgcattctgctgggcgtgttcctgaatagcagcgtccctattttctttgagttgttcgtggagaccgtgtaccctgtccctgagggaatcacatgcggcgtagttacattcttgagtaacatgttcatgggcgtgctccttttttttctgactttttaccacactgagctatcttggttcaactggtgcttgccaggctcttgccttcttagtctattacttatactgtgtttcagggaaagctatgaccgattgtatctcgacgtggtcgtatccgtctag

SEQ ID NO: 225863 - DNA, 1437 bp, Artificial Sequence
  derived and/or modified sequence
atgggcagcagatggagcagcgaggaggagagacagcccctgctgggccccggcctgggccccggcctgggcgccagctggagaagcagagaggccgccgccgccgccctgcccgccgccgtgcccggccccggcagagtgtacggcagaagatggctggtgctgctgctgttcagcctgctggccttcgtgcagggcctggtgtggaacacctggggccccatccagaacagcgccagacaggcctacggcttcagcagctgggacatcgccctgctggtgctgtggggccccatcggcttcctgccctgcttcgccttcatgtggctgctggacaagagaggcctgagaatcaccgtgctgctgaccagcttcctgatggtgctgggcaccggcctgagatgcatccccatcagcgacctgatcctgaagagaagactgatccacggcggccagatgctgaacggcctggccggccccaccgtgatgaacgccgcccccttcctgagcaccacctggttcagcgccgacgagagagccaccgccaccgccatcgccagcatgctgagctacctgggcggcgcctgcgccttcctggtgggccccctggtggtgcccgcccccaacggcaccagccccctgctggccgccgagagcagcagagcccacatcaaggacagaatcgaggccgtgctgtacgccgagttcggcgtggtgtgcctgatcttcagcgccaccctggcctacttcccccccagaccccccctgccccccagcgtggccgccgccagccagagactgagctacagaagaagcgtgtgcagactgctgagcaacttcagattcctgatgatcgccctggcctacgccatccccctgggcgtgttcgccggctggagcggcgtgctggacctgatcctgacccccgcccacgtgagccaggtggacgccggctggatcggcttctggagcatcgtgggcggctgcgtggtgggcatcgccatggccagattcgccgacttcatcagaggcatgctgaagctgatcctgctgctgctgttcagcggcgccaccctgagcagcacctggttcaccctgacctgcctgaacagcatcacccacctgcccctgaccaccgtgaccctgtacgccagctgcatcctgctgggcgtgttcctgaacagcagcgtgcccatcttcttcgagctgttcgtggagaccgtgtaccccgtgcccgagggcatcacctgcggcgtggtgaccttcctgagcaacatgttcatgggcgtgctgctgttcttcctgaccttctaccacaccgagctgagctggttcaactggtgcctgcccggcagctgcctgctgagcctgctgctgatcctgtgcttcagagagagctacgacagactgtacctggacgtggtggtgagcgtgtag

SEQ ID NO: 225864 - DNA, 3596 bp, Artificial Sequence
  derived and/or modified sequence
tttaacttggacacttcctccaaacaccccagggttccttgcccaacctcctcgaatacagcctctctgggagtttccctctccccgactcagccgcgctggtccctgccttttcagcgctacctgccctccgtctgggacctggctcctttcctctcgccggtgtttcctcgccacccgcggaggggagggcggaccccagcctccttgccgcctgccccgcctccccgcctccccgccggcccggctcgggccgcgcaggcgcaccaggcgcggtccggaggccgagggcgaccacagcagcctccgcctcctgctgctcaggactattctgcgctgggctagtcggcggtgacccggactgcgcccggcagtggcttcgcgggcgacgcgtcgccatgggctctcgctggagcagcgaagaggagaggcagccgctgctggggcccgggctcgggcctgggctgggggcctcctggagaagccgggaggcggcggcggcggcgctgcccgcggcggtcccgggtcccgggcgggtatacgggcgccgctggctggtgctgctgctcttctcgctgctggcgttcgttcagggcctggtctggaacacctggggtcccatccagaactcggcgcgccaggcctacggcttctccagctgggacatcgcgctgctcgtgctgtgggggcccatcggcttcctgccctgcttcgcgttcatgtggctcctggacaagagaggtctccggataactgtgctcctgacatccttccttatggttttgggaactggtctaagatgcatacctatatcagacttaatccttaaaagaagattaattcatggaggacagatgttaaatggattggcaggtccaactgtaatgaatgcagcaccatttctctctacgacgtggttttctgcagatgaaagggccacagccacagctattgcatcaatgctcagttatcttgggggagcatgtgcatttttagttggaccacttgttgttccagctcccaatgggacatcacctcttcttgctgcagagagcagcagggcgcatattaaagatcgcatagaggctgtgttatatgcagaatttggagttgtctgcttaatattttctgcaacactagcttatttcccaccccgacctcctcttcctcccagtgttgctgcagctagccagcggctgagttatcggagaagcgtttgtagattattaagcaattttcgatttttgatgattgctttagcatatgccataccacttggtgtatttgctggctggtctggagttctggacttaattttaacaccagcgcatgtcagccaagtagatgctggctggattggattttggtccatagttggaggctgtgttgttggaatagctatggcaaggtttgcagattttatcaggggtatgctgaaactaattcttctcctcctgttttcgggagctacactgtcatccacgtggttcaccctgacctgtttgaacagcatcacacacctacctttaaccacagtgacattgtatgcctcctgtattctcctgggagtgttcttgaatagcagcgtgcctatattttttgagctttttgtggaaactgtctacccagttccagaaggaattacttgtggagttgtcacttttttaagtaatatgtttatgggagtacttttattttttctcacattttatcatacagagttgtcttggttcaactggtgccttcccgggtcgtgtttgctcagtctcctcctcattctgtgcttcagggaatcctatgacagactctatcttgatgtggttgtctccgtttaatagcacagacttgaaggagtttaaaaggaggctggaaatcaatactgcacactgcacatttgctcagaattgcacatctaacaggaaaagagggagaagaaagaaacttcattcagaggttttgttaggttacagattatcacattaatttaattactactaggtaataataatgggagacttgagtgataataggggattttaaaactctacagatggcatacctgtgcctgcttctggggttggaagtgtgacttcttacacataaagcactacctaagtaattctctctctgttttgtgccagtgctaaactactgattacttgtaattatgaaaagaaataaagggtgtctatcatatgaagataacgccttccctaagtcacatatcagaataggaagatatgccactaacttctaaagaagttcaaaccctgtatccaattttaatgataaaatagccaagaggtatatcgatgatggaaattagccacatgtacactacattttttctaataaagccatttcttatatgactccttattttaatcaggtcagaagcccttggccatctttactatggtgatcaggtgctttccagtgacttctgagcataggcactgtgtctccatctcaacttatccttgtttctgtgaaatacaatttcatctactaggcccttaaataattatgtgagggtgtctaaatgtttaatatgattacattaaatattgtatgaaaaaatgtaattccattaggatctagcactttgttacaagtgaaatgacaagtcacatggacatactgtgtcttctgcctgtatatggtggcatgagatgtaatgtccagagccaacaattatttaccagggttagattttattcagtgacccttgtttaaaaataataatttatcacattgaaactttcagctctgtcgaatgatttctgaattacatcctgtgtttcagcttaggttgtaaaatactccgttctctgtggagtcagcatatttgagagggcagcgttttgccagtacctatcttctttctacagaagatagctttttaagaaataagagttccacattgagtggctgtcagacacagatttcactgtgacgtaaaatacactgcagtgagaatatggtatcaccactattcatatttacatcattcccctcacacagaaaaaccaacccttttcccaaaaagtcaagaatactgctatacctttattattctcagcttcctccagcccttcttgtttttcctcacttgaaattgaaccttcattgtcagctaagtatatatacttttgtgttttcctggacagagtgcaagtggctcttatcagccaaggtggtgaaggttcaggaaagctgggcagcactgggccctgctcctctctgcacctgtgtgcgccatgacacacccacatgcagattcccaagtctgtctcccctcccccttagcaagtacaaggctgtgcattaactcacctcggtcctagaggagtatcctagtactgcttggcaacttctaagaccctaacttgtgaaactagggaagtaagaaaccgttcaaatttaacatctgtcttcagtcatctttaaatcgtctctctttataaacactctgctcacttagcagaaggactgaaggaactaaggaacttgctaaagagaagaagaaaacaaaagctagacttagttccagttaattctgttattcttctgaaataaaaatgaaataaaaggaa

SEQ ID NO: 225865 - protein, 561 aa, Artificial Sequence
  derived and/or modified sequence
MMQGEAHPSASLIDRTIKMRKETEARKVVLAWGLLNVSMAGMIYTEMTGKLISSYYNVTYWPLWYIELALASLFSLNALFDFWRYFKYTVAPTSLVVSPGQQTLLGLKTAVVQTTPPHDLAATQIPPAPPSPSIQGQSVLSYSPSRSPSTSPKFTTSCMTGYSPQLQGLSSGGSGSYSPGVTYSPVSGYNKLASFSPSPPSPYPTTVGPVESSGLRSRYRSSPTVYNSPTDKEDYMTDLRTLDTFLRSEEEKQHRVKLGSPDSTSPSSSPTFWNYSRSMGDYAQTLKKFQYQLACRSQAPCANKDEADLSSKQAAEEVWARVAMNRQLLDHMDSWTAKFRNWINETILVPLVQEIESVSTQMRRMGCPELQIGEASITSLKQAALVKAPLIPTLNTIVQYLDLTPNQEYLFERIKELSQGGCMSSFRWNRGGDFKGRKWDTDLPTDSAIIMHVFCTYLDSRLPPHPKYPDGKTFTSQHFVQTPNKPDVTNENVFCIYQSAINPPHYELIYQRHVYNLPKGRNNMFHTLLMFLYIIKTKESGMLGRVNLGLSGVNILWIFGE

SEQ ID NO: 225866 - protein, 203 aa, Artificial Sequence
  derived and/or modified sequence
MMQGEAHPSASLIDRTIKMRKETEARKVVLAWGLLNVSMAGMIYTEMTGKLISSYYNVTYWPLWYIELALASLFSLNALFDFWRYFKYTVAPTSLVVSPGQQTLLGLKTAVVQTTPPHDLAATQIPPAPPSPSIQGQSVLSYSPSRSPSTSPKFTTSCMTGYSPQLQGLSSGGSGSYSPGVTYSPVSGYNKVMTLFSCLVTLF

SEQ ID NO: 225867 - DNA, 1686 bp, Artificial Sequence
  derived and/or modified sequence
atgatgcagggcgaggcccaccccagcgccagcctgatcgacagaaccatcaagatgagaaaggagaccgaggccagaaaggtggtgctggcctggggcctgctgaacgtgagcatggccggcatgatctacaccgagatgaccggcaagctgatcagcagctactacaacgtgacctactggcccctgtggtacatcgagctggccctggccagcctgttcagcctgaacgccctgttcgacttctggagatacttcaagtacaccgtggcccccaccagcctggtggtgagccccggccagcagaccctgctgggcctgaagaccgccgtggtgcagaccacccccccccacgacctggccgccacccagatcccccccgccccccccagccccagcatccagggccagagcgtgctgagctacagccccagcagaagccccagcaccagccccaagttcaccaccagctgcatgaccggctacagcccccagctgcagggcctgagcagcggcggcagcggcagctacagccccggcgtgacctacagccccgtgagcggctacaacaagctggccagcttcagccccagcccccccagcccctaccccaccaccgtgggccccgtggagagcagcggcctgagaagcagatacagaagcagccccaccgtgtacaacagccccaccgacaaggaggactacatgaccgacctgagaaccctggacaccttcctgagaagcgaggaggagaagcagcacagagtgaagctgggcagccccgacagcaccagccccagcagcagccccaccttctggaactacagcagaagcatgggcgactacgcccagaccctgaagaagttccagtaccagctggcctgcagaagccaggccccctgcgccaacaaggacgaggccgacctgagcagcaagcaggccgccgaggaggtgtgggccagagtggccatgaacagacagctgctggaccacatggacagctggaccgccaagttcagaaactggatcaacgagaccatcctggtgcccctggtgcaggagatcgagagcgtgagcacccagatgagaagaatgggctgccccgagctgcagatcggcgaggccagcatcaccagcctgaagcaggccgccctggtgaaggcccccctgatccccaccctgaacaccatcgtgcagtacctggacctgacccccaaccaggagtacctgttcgagagaatcaaggagctgagccagggcggctgcatgagcagcttcagatggaacagaggcggcgacttcaagggcagaaagtgggacaccgacctgcccaccgacagcgccatcatcatgcacgtgttctgcacctacctggacagcagactgcccccccaccccaagtaccccgacggcaagaccttcaccagccagcacttcgtgcagacccccaacaagcccgacgtgaccaacgagaacgtgttctgcatctaccagagcgccatcaaccccccccactacgagctgatctaccagagacacgtgtacaacctgcccaagggcagaaacaacatgttccacaccctgctgatgttcctgtacatcatcaagaccaaggagagcggcatgctgggcagagtgaacctgggcctgagcggcgtgaacatcctgtggatcttcggcgagtag

SEQ ID NO: 225868 - DNA, 1683 bp, Artificial Sequence
  derived and/or modified sequence
atgcagggcgaggcccaccccagcgccagcctgatcgacagaaccatcaagatgagaaaggagaccgaggccagaaaggtggtgctggcctggggcctgctgaacgtgagcatggccggcatgatctacaccgagatgaccggcaagctgatcagcagctactacaacgtgacctactggcccctgtggtacatcgagctggccctggccagcctgttcagcctgaacgccctgttcgacttctggagatacttcaagtacaccgtggcccccaccagcctggtggtgagccccggccagcagaccctgctgggcctgaagaccgccgtggtgcagaccacccccccccacgacctggccgccacccagatcccccccgccccccccagccccagcatccagggccagagcgtgctgagctacagccccagcagaagccccagcaccagccccaagttcaccaccagctgcatgaccggctacagcccccagctgcagggcctgagcagcggcggcagcggcagctacagccccggcgtgacctacagccccgtgagcggctacaacaagctggccagcttcagccccagcccccccagcccctaccccaccaccgtgggccccgtggagagcagcggcctgagaagcagatacagaagcagccccaccgtgtacaacagccccaccgacaaggaggactacatgaccgacctgagaaccctggacaccttcctgagaagcgaggaggagaagcagcacagagtgaagctgggcagccccgacagcaccagccccagcagcagccccaccttctggaactacagcagaagcatgggcgactacgcccagaccctgaagaagttccagtaccagctggcctgcagaagccaggccccctgcgccaacaaggacgaggccgacctgagcagcaagcaggccgccgaggaggtgtgggccagagtggccatgaacagacagctgctggaccacatggacagctggaccgccaagttcagaaactggatcaacgagaccatcctggtgcccctggtgcaggagatcgagagcgtgagcacccagatgagaagaatgggctgccccgagctgcagatcggcgaggccagcatcaccagcctgaagcaggccgccctggtgaaggcccccctgatccccaccctgaacaccatcgtgcagtacctggacctgacccccaaccaggagtacctgttcgagagaatcaaggagctgagccagggcggctgcatgagcagcttcagatggaacagaggcggcgacttcaagggcagaaagtgggacaccgacctgcccaccgacagcgccatcatcatgcacgtgttctgcacctacctggacagcagactgcccccccaccccaagtaccccgacggcaagaccttcaccagccagcacttcgtgcagacccccaacaagcccgacgtgaccaacgagaacgtgttctgcatctaccagagcgccatcaaccccccccactacgagctgatctaccagagacacgtgtacaacctgcccaagggcagaaacaacatgttccacaccctgctgatgttcctgtacatcatcaagaccaaggagagcggcatgctgggcagagtgaacctgggcctgagcggcgtgaacatcctgtggatcttcggcgagtag

SEQ ID NO: 225869 - DNA, 1686 bp, Artificial Sequence
  derived and/or modified sequence
atgatgcaaggggaagcccatccaagcgccagtctgatcgacaggactattaaaatgagaaaagaaaccgaggcgaggaaggtggttttggcatggggtctgctgaacgtgtctatggccggcatgatctatacagagatgacaggcaagctgataagctcttattataacgtgacgtattggccactttggtatattgagctagccctggcctctctgttcagcctgaacgctctcttcgatttttggaggtatttcaaatataccgttgcccccacttctctggtggtctcccccggtcagcagactttgctcgggctgaagacagccgtcgttcagactactccgccccatgatctagctgccacacagatcccacccgcaccgccgtcaccctctatccaaggacagagcgtgctgagctactctcccagccgctccccgagtacctctcccaaatttacaacttcttgcatgacgggctacagtccgcagttacaaggtctctcaagtggaggttcaggttcatactctccgggagtgacatattcaccagttagcggctacaataaattagcgtccttcagtccttctcccccctcaccctatcccaccacagttggccccgttgaatcatcggggctcaggagccggtatcggagtagccccacagtgtacaattcaccaacagataaggaagattatatgaccgatctgcggacattagacacgtttctgcggagtgaagaggagaagcaacaccgcgtgaaactgggatcacctgattctacttcccctagttcatctcccacattttggaactattccaggtcaatgggggattatgcgcagacattgaagaagttccagtaccagctcgcatgtcgatctcaggcaccatgcgcgaataaggatgaggccgatttgtcttcaaagcaggccgccgaagaggtctgggctcgcgttgccatgaacagacaactgctggatcatatggactcctggaccgcgaaatttaggaattggattaacgagacaatccttgtcccactggttcaagagatagaatccgtttcgacacagatgcgccggatgggctgcccagaactgcaaatcggagaagcctccatcacatccctgaaacaggctgcgttggtaaaagcccccttgatacctaccctgaacaccatcgtccagtatttagacctcacacccaaccaggaatatctgttcgagaggatcaaggagttgtctcagggcggctgtatgtcgtcttttagatggaatcgtgggggggacttcaaaggccgcaagtgggacaccgatcttcccacagacagtgcaatcattatgcatgtattttgtacgtatttggatagccgcttaccaccgcacccaaagtacccagatggaaaaacctttacatcgcagcactttgtgcagaccccgaataagccggatgtgacgaacgaaaatgtgttttgcatatatcagtcggcaatcaaccctccgcattatgagctcatttaccagcggcatgtctacaacttacccaagggccgcaacaacatgttccacacgctcctcatgtttctttatattatcaaaactaaagagtccggaatgctcggtcgcgtgaatctcggcctgtctggggtgaacatcctgtggatattcggcgaatag

SEQ ID NO: 225870 - DNA, 1683 bp, Artificial Sequence
  derived and/or modified sequence
atgcaaggcgaggctcatccttccgccagtctaatcgatagaaccattaaaatgagaaaggaaacggaggcgcgcaaggtcgtcctggcctgggggctacttaacgtgtctatggccggtatgatctatacggagatgaccgggaagctcatcagctcctactataatgtaacatactggcccctgtggtatatcgagctggctctggcatcactgttctctctgaatgccctctttgacttttggagatactttaaatatacagtggcccccacatcattggtggtaagcccaggacaacagacccttctgggacttaaaacagctgtggtgcaaactacacccccacacgatctggccgcgacccaaattcctcccgcacccccatcacctagcattcaaggacagtccgttctgagctactccccctccaggtccccttcaacttccccaaaatttacaactagttgcatgacagggtatagtccgcagttgcagggcctttcctcgggaggcagcggctcatattcccctggggtcacctattcccctgtgtcaggctacaataaactagctagctttagcccctcccctcctagcccctaccccaccaccgtaggaccggtggaaagttcaggcctgaggtccagatatcgtagcagtcctaccgtctataatagcccgaccgacaaggaggattatatgactgatttgagaaccctcgacaccttcttgaggagtgaagaagagaaacagcatagggtgaaactaggctcccccgactctacctcaccttcctcctcccccacgttctggaattattccagatccatgggtgattacgctcagaccctgaagaagttccagtaccaacttgcctgcaggagccaggctccatgcgcaaacaaagatgaggctgacctctcatctaagcaggctgccgaagaggtctgggcccgagtggcaatgaataggcagctgctggaccatatggatagttggacggccaagttcaggaattggattaacgagactattttggtcccactggtgcaggagattgaaagcgtgtctacccagatgcggaggatgggctgcccagaactgcagattggcgaggccagcatcacgtctctcaaacaagccgcactggtgaaagcacccctgattcctactctgaacaccatcgtccagtacttggatctcacaccaaaccaggagtatctcttcgaacgcattaaagagttgtcccaggggggttgtatgtcatcctttaggtggaaccggggaggcgattttaaagggcggaagtgggatacggacctgcctaccgattccgctattatcatgcacgtgttttgtacgtacttggatagccgactacctccccatcctaagtaccccgatggcaaaacctttacgagtcaacacttcgttcaaacccctaataagccagatgtaactaatgaaaatgtcttctgcatttatcagagtgctattaaccccccacactatgaactcatttaccagcggcatgtgtataacctgccgaaaggccgtaataacatgtttcacaccttgttgatgttcctgtacattataaagacaaaggagagtggcatgctgggacgggttaacctcgggctgtctggggttaatattctgtggatctttggggagtag

SEQ ID NO: 225871 - DNA, 1686 bp, Artificial Sequence
  derived and/or modified sequence
atgatgcagggcgaggcccaccccagcgccagcctgattgacaggaccatcaagatgaggaaggagacagaggccaggaaggtggtgctggcctggggcctgctgaatgtgtccatggccggcatgatctacacagagatgaccgggaagctgatcagcagctactacaacgtgacctactggcccctgtggtacatcgagctggccctggccagcctcttcagcctgaatgccctgtttgacttctggagatacttcaagtacacagtggcccccaccagcctggtggtgtccccaggccagcagaccctgctgggcctgaagacagctgtggtgcagaccaccccacctcatgacctggccgccacccagatccccccagccccacccagccccagcatccagggccagagcgtgctgagctacagccccagccgcagccccagcaccagccccaagttcaccaccagctgcatgacaggctacagcccccagctgcagggcctgagcagcggcggcagcggcagctacagccctggggtgacctacagccctgtgtctggctacaacaagctggccagcttcagccccagcccccccagcccctaccccaccaccgtgggccctgtggagagcagcggcctgcggagccgctaccgcagcagccccaccgtgtacaacagccccacagacaaggaggactacatgacagacctgcggaccctggacaccttcctgcggtctgaggaggagaagcagcaccgggtgaagctgggcagcccagacagcaccagccccagcagcagccccaccttctggaactacagccgctccatgggagactatgcccagaccctgaagaagttccagtaccagctggcctgccgcagccaggccccctgtgccaacaaggatgaagctgacctgagcagcaagcaggccgctgaggaggtgtgggcccgggtggccatgaaccggcagctgctggaccacatggacagctggacagccaagttcaggaactggatcaatgagaccatcctggtgcccctggtgcaggagattgaatctgtgtccacccagatgaggaggatgggctgcccagagctgcagatcggggaggccagcatcaccagcctgaagcaggccgccctggtgaaggcccccctcatccccaccctgaacaccatcgtgcagtacctggacctgacccccaaccaggagtacctgtttgagcgcatcaaggagctgagccagggcggctgcatgagcagcttccgctggaacagaggaggagacttcaagggcaggaagtgggacacagacctgcccacagattctgccatcatcatgcacgtgttctgcacctacctggacagccggctgcccccccaccccaagtacccagatggcaagaccttcaccagccagcactttgtgcagacccccaacaagccagatgtgaccaatgaaaatgtgttctgcatctaccagagcgccatcaaccccccccactatgagctgatctaccagagacatgtgtacaacctgcccaagggcaggaacaacatgttccacaccctgctgatgttcctgtacatcatcaagaccaaggagagcggcatgctgggccgggtgaacctgggcctgtctggagtgaacatcctgtggatctttggagagtag

SEQ ID NO: 225872 - DNA, 1683 bp, Artificial Sequence
  derived and/or modified sequence
atgcagggcgaggcccaccccagcgccagcctgattgacaggaccatcaagatgaggaaggagacagaggccaggaaggtggtgctggcctggggcctgctgaatgtgtccatggccggcatgatctacacagagatgaccgggaagctgatcagcagctactacaacgtgacctactggcccctgtggtacatcgagctggccctggccagcctcttcagcctgaatgccctgtttgacttctggagatacttcaagtacacagtggcccccaccagcctggtggtgtccccaggccagcagaccctgctgggcctgaagacagctgtggtgcagaccaccccacctcatgacctggccgccacccagatccccccagccccacccagccccagcatccagggccagagcgtgctgagctacagccccagccgcagccccagcaccagccccaagttcaccaccagctgcatgacaggctacagcccccagctgcagggcctgagcagcggcggcagcggcagctacagccctggggtgacctacagccctgtgtctggctacaacaagctggccagcttcagccccagcccccccagcccctaccccaccaccgtgggccctgtggagagcagcggcctgcggagccgctaccgcagcagccccaccgtgtacaacagccccacagacaaggaggactacatgacagacctgcggaccctggacaccttcctgcggtctgaggaggagaagcagcaccgggtgaagctgggcagcccagacagcaccagccccagcagcagccccaccttctggaactacagccgctccatgggagactatgcccagaccctgaagaagttccagtaccagctggcctgccgcagccaggccccctgtgccaacaaggatgaggccgacctgagcagcaagcaggccgctgaggaggtgtgggcccgggtggccatgaaccggcagctgctggaccacatggacagctggacagccaagttcaggaactggatcaatgagaccatcctggtgcccctggtgcaggagattgagagcgtgtccacccagatgaggaggatgggctgcccagagctgcagattggagaggccagcatcaccagcctgaagcaggccgccctggtgaaggcccccctcatccccaccctgaacaccatcgtgcagtacctggacctgacccccaaccaggagtacctgtttgagcgcatcaaggagctgagccagggcggctgcatgagcagcttccgctggaacagaggaggagacttcaagggcaggaagtgggacacagacctgcccacagacagcgccatcatcatgcacgtgttctgcacctacctggacagccggctgcccccccaccccaagtacccagatggcaagaccttcaccagccagcactttgtgcagacccccaacaagccagatgtgaccaatgaaaatgtgttctgcatctaccagagcgccatcaaccccccccactatgagctgatctaccagagacatgtgtacaacctgcccaagggcaggaacaacatgttccacaccctgctgatgttcctgtacatcatcaagaccaaggagagcggcatgctgggccgggtgaacctgggcctgagcggcgtgaacatcctgtggatctttggagagtag

SEQ ID NO: 225873 - DNA, 1686 bp, Artificial Sequence
  derived and/or modified sequence
atgatgcagggcgaggcccaccccagcgccagcctgatcgaccggacgattaagatgcggaaagaaacggaagccagaaaagtcgttctcgcttgggggctgctgaatgtgtccatggctggtatgatctacacggagatgacaggcaaattaatttcttcttactacaacgtgacctactggccgctttggtacatcgagctggctcttgcttcgctgttcagtctgaacgccctgttcgacttttggagatactttaagtacactgtcgctcccacatcactggtggtgtcacctggccagcagactctcctcggcctgaaaacagcggtcgtgcaaaccaccccgccacacgatcttgctgccacccagatccccccagctccaccctcgccatctatccagggacagtctgttctgagctacagcccatccagaagccctagcacttccccaaagttcaccacctcttgcatgaccggctactctccacaactgcagggactgtcatccgggggatctggcagttatagccctggcgtcacatactcccccgtgtcagggtacaataaattggccagtttctctccatctccaccctccccgtaccctacaacagtaggaccagtggagagctccggcctccggagtaggtatcgttctagtcctactgtctacaattctcctactgataaggaggactacatgacagacctgaggactcttgatacttttctacggagtgaggaagagaaacagcacagggtaaagcttgggagccctgacagtaccagcccgagttcctcaccaaccttttggaattatagtcgaagtatgggcgactatgcccaaactcttaagaagttccagtaccaacttgcgtgtcgaagccaggccccatgtgctaacaaagacgaggccgacctgtcttcaaaacaggccgccgaggaagtttgggcccgggttgccatgaaccgacagttactggatcacatggacagttggacagccaagttccggaactggatcaatgaaacaattctcgtgcctttggttcaggaaattgaatctgtctctactcagatgagaagaatgggctgccctgagctccagatcggcgaggcctcaataaccagcctcaagcaggccgctctggtcaaagcgccactgattcccactcttaatactattgtgcagtacttggacctgaccccaaaccaggaatatcttttcgagagaatcaaagaattatcccagggcggatgtatgagctcctttcggtggaaccgcggaggcgattttaaggggcggaagtgggacactgacctacctaccgattcggctattattatgcacgtattttgcacatatttggattcaagacttcccccccacccaaagtaccccgacgggaaaacatttacatcacagcacttcgtgcagaccccgaacaaacctgatgttactaatgagaacgtgttttgtatttatcagtctgctattaatcccccccattacgaactgatttatcagcggcacgtatataacctaccaaagggccgcaataatatgttccataccctgctaatgtttctgtatatcatcaagacaaaagagagtggaatgcttgggcgggtaaacctcgggctgagtggtgtgaacatcctgtggatatttggcgagtag

SEQ ID NO: 225874 - DNA, 1683 bp, Artificial Sequence
  derived and/or modified sequence
atgcagggcgaggcccaccccagcgccagcctgatcgaccggaccattaagatgcgaaaggagaccgaggcgcggaaagttgtgctggcttggggtctcttaaatgtgtccatggcaggtatgatctataccgaaatgaccggaaagttgataagcagctactataatgtcacttattggcccctgtggtatattgagctagctctggcatcactgttctctcttaacgcactgttcgacttctggcgatattttaagtacaccgtcgcacccacaagcctggtggtatctccaggccagcagactctcctgggattgaaaactgccgtagttcagaccactcctccccacgatctggccgctacgcaaatccccccagcaccaccatccccaagcatccaaggccagtctgtgctaagttactccccctctagatctccatccacctcccccaaattcaccacaagctgcatgactggctacagcccgcagctccagggtctgagttccggcggatctgggtcgtactccccaggggtgacttacagccccgtctccgggtataacaaactggcctccttttcaccatccccgccatccccgtaccccacgaccgtcggacctgtcgagagttccggactgagatccagatatagaagctctcccactgtttataatagcccgaccgacaaggaggattacatgaccgatcttaggacgctggatactttcctgagaagtgaggaggagaaacaacacagggtcaaattgggctcaccggactcgacctctccgtcttccagtcccacattttggaattactcccggagcatgggtgattacgcccaaacactgaaaaaatttcagtaccagctggcctgtagatctcaggcgccctgtgccaataaagacgaagccgatctgtcaagtaagcaggcggcggaagaagtatgggcaagagtcgccatgaatcgccagctgctcgatcatatggatagttggaccgctaaatttaggaattggatcaacgagaccattctggtaccactggttcaagaaattgagagcgtgtcaacacagatgcgccggatggggtgccccgagctccagatcggggaagccagcatcactagtcttaagcaggctgcgctcgtgaaagccccacttatccctactctgaatacgattgtgcagtatttagatttaacaccgaaccaggaataccttttcgaaagaatcaaggagctctctcagggaggctgcatgtcatcattcagatggaatagggggggagatttcaaaggccgtaaatgggacaccgacctgccgacagactccgcaataatcatgcatgtgttttgtacctatctcgattctagacttcctcctcatcccaagtaccccgacggcaaaacattcacatcccaacactttgttcagaccccgaataaacctgatgtgaccaacgagaacgtattctgtatttaccagtctgcaatcaatccaccccactatgaattgatctatcagaggcatgtctataatctgcctaaggggaggaacaatatgtttcacactcttctgatgttcctgtacataatcaaaaccaaggagtccgggatgctagggcgggtgaatctcggcctgtccggagtgaacatcctgtggatctttggagaatag

SEQ ID NO: 225875 - DNA, 1686 bp, Artificial Sequence
  derived and/or modified sequence
atgatgcaaggtgaggcccatcccagcgccagtctaatagacaggaccatcaaaatgagaaaagaaactgaagctagaaaggtggtgctagcatggggcctgcttaatgtatcgatggctggcatgatttacacggagatgaccggaaagctgatctctagttactataatgtaacttattggcctctctggtacatcgaacttgctctagcatccttattctcactcaacgccttatttgatttctggcgctattttaagtacactgttgcgccaacttccctggtggtgtcgcccggacaacagacgttgctgggccttaaaactgcagtggtgcaaacaacacccccacacgatctcgcggcaacccagatacctcccgctccccctagcccaagcatacagggacagagtgtgctcagttattctcccagtagaagtccatcaacttctcctaaatttactaccagctgtatgaccggatattccccccagctacagggactaagctccgggggtagcggaagttactcaccgggtgtaacctactcgcccgtgtctggttacaataagctggctagcttcagtccgtccccaccatctccgtaccctaccacagtcggcccagtggagtctagcgggttgcggtctaggtatcgctcctcccccaccgtctataactctcctaccgacaaagaggactatatgactgacctgcggactctcgacactttccttcgtagcgaggaagaaaaacagcatagagtaaagctgggctcccctgactccactagtcctagcagtagcccgacgttctggaattatagtaggtctatgggggactatgcccagacactgaaaaaattccaataccagctcgcatgtcgctcacaggcaccctgcgcaaataaagacgaggctgacttaagttcaaagcaggcagcagaggaggtgtgggccagagtcgctatgaatcggcaacttttggaccacatggattcttggaccgccaagttcagaaactggatcaacgaaactatcctcgttccactggtccaggaaattgaatcagttagcacccagatgaggcgaatgggttgccccgagctccagatcggcgaggcaagtattactagcttgaaacaggccgctctcgtaaaagctccgttgatcccgactctcaacacgatcgtgcagtatttagacctgactccaaatcaagagtacctgttcgagagaatcaaggaacttagtcagggtgggtgcatgagtagtttccgctggaaccgcggaggtgacttcaaaggcaggaagtgggatacagatttgccgaccgatagtgccatcattatgcacgtattctgtacatatctggacagcagacttcctcctcatccgaaataccccgatggaaaaacctttacatcccagcactttgtccaaacccccaataaacccgatgtcaccaacgaaaatgttttctgcatttaccaaagtgccattaatccacctcattacgagctaatctaccaacggcatgtgtacaacctgcccaaaggacggaacaacatgttccataccctgttaatgtttctgtacatcattaaaacaaaggaatcgggaatgctgggcagggtaaatctggggctgtctggtgttaacatcctatggatttttggagagtag

SEQ ID NO: 225876 - DNA, 1683 bp, Artificial Sequence
  derived and/or modified sequence
atgcaaggagaggctcacccctccgcatcattgattgacagaaccattaagatgcgcaaggaaacagaagccaggaaagtggtcctagcgtgggggttgcttaatgtcagcatggccggaatgatttacacagagatgaccggtaagctgatttcatcctattataatgtcacatactggcctctgtggtatattgaactggccttggcaagcctgtttagtctgaatgcactgtttgacttctggaggtatttcaaatacaccgttgccccaacatcactcgtggtttcacccggtcagcagacgctgttgggccttaagacagccgtggtacagaccacaccccctcacgatttggctgctactcaaattcctcccgctccccctagcccatctatccagggccagtcagtgctctcctattctccatctaggtcaccaagcacctcacctaagttcaccacatcctgcatgacagggtacagtcctcagctgcagggcctgtcgagcgggggatccggttcctactcccctggcgtaacatactcgcctgtttccggctataacaaactcgcgagcttttctccaagccctccgagcccttaccccaccactgtggggcctgttgagtcatcaggactgcggtcgcgataccgctccagcccaacagtctacaattcacccacagataaagaggattacatgactgatctccggacccttgacaccttcctgaggagcgaggaggaaaaacagcaccgggtgaaattgggatcacccgactctactagcccatcttcgtcccccacattttggaattacagcagatccatgggagactacgctcagaccctcaagaagtttcaataccaactggcttgtcgttcacaggcaccttgtgctaataaggacgaagccgacttgtcttccaagcaagcggcagaggaggtctgggcgagggtcgccatgaatcggcagctgctagatcatatggattcttggacagccaaattcaggaattggataaacgagaccattcttgtgccgctcgtgcaggaaatagaatcagtgtccacgcagatgaggcgcatggggtgcccggaattacaaattggcgaagcttccattacctctttaaagcaggccgctctagtcaaggcccctctgattcctacactcaacacaatcgtccagtatctcgacctcaccccaaatcaggagtatttgtttgagagaatcaaggaactgtcacaaggagggtgcatgagctcattcagatggaaccgcggtggcgattttaaagggaggaagtgggataccgacctgccaacagacagtgccatcatcatgcacgtgttttgcacctatctagactctagactgccacctcacccgaaataccctgacggtaaaacgttcacaagccagcattttgtccagacccccaataagccagatgtcacaaacgagaacgtcttctgcatttatcagtccgcaatcaaccctccacattatgagttgatttaccagcggcatgtttacaacctgccaaagggtagaaacaacatgttccacacgttactcatgtttctgtacataattaagaccaaggagtcgggtatgctggggcgagtaaacctggggctctctggagtgaacatcttgtggatcttcggggaatag

SEQ ID NO: 225877 - DNA, 3545 bp, Artificial Sequence
  derived and/or modified sequence
gagaagagactacctagttcttccggtaactttagagccgcttgccggtggcctcccgcttgagcttggctttgcgcatgcccagagagagtggcgcgagcctgcgttttccggccagaggacatgatgcagggggaggcacaccctagtgcttcccttattgacagaaccatcaagatgagaaaagaaacagaggctaggaaagtggtcttagcctggggactcctaaatgtatctatggctggaatgatatatactgaaatgactggaaaattgattagttcatactacaatgtgacatactggcccctctggtatattgagcttgcccttgcatctctcttcagccttaatgccttatttgatttttggagatatttcaaatatactgtggcaccaacaagtctggttgttagtcctggacagcaaacacttttagggttgaaaacagctgttgtacagactacgcctccacatgatctggcagcaacccaaatccctcccgctccaccttccccttcaattcagggtcagagtgtgttgagttatagcccttctcgttcgcccagtaccagtcccaagttcaccaccagctgtatgactggttacagccctcagctgcaaggtctgtcctcaggtggcagtggttcttatagccctggagtgacctactcgcccgtcagtggttataataagttggcgagctttagcccctctcctccttctccgtaccctaccactgttggaccagtggagagcagtggattgagatctcgctaccgttcttcacctaccgtctacaactcacctactgacaaagaagactacatgaccgacctacgaactttggatacttttctcagaagtgaagaggagaaacagcatagggttaagctggggagcccagattctacctctccttccagcagtcctactttctggaactatagtcgttctatgggggattatgcacaaactttaaagaagtttcagtatcagcttgcctgtaggtctcaggccccatgtgctaacaaagatgaagccgatctcagctctaaacaagccgcagaagaggtctgggcaagagtggctatgaatagacaacttcttgatcatatggattcatggacagctaaatttagaaattggatcaatgagacaatattagtgccacttgttcaagagattgagtctgtcagcacacagatgagacgaatgggttgtccagagctacagataggagaggctagtattactagcttgaaacaagctgccctggttaaagcgcctctcattccgactttgaacacaatcgttcagtatctagaccttactccaaatcaggaatacttgtttgaaaggatcaaagaactatctcagggaggttgtatgagctcatttcgatggaacagaggtggcgacttcaaaggacgaaagtgggatacagacctgcccaccgattctgctatcatcatgcatgtattttgcacctaccttgattccagattacctccacatccgaagtatcccgacggaaaaacttttacttctcagcactttgttcagacaccaaataaaccagatgttacaaatgagaatgttttttgcatttatcagagtgctatcaaccctccccattatgagctcatctaccagcgtcatgtatacaacctgccaaagggcagaaataatatgtttcatacattgttgatgtttctctacatcataaagaccaaagagtcaggaatgcttgggagagttaatcttggtctatctggtgtgaatatattgtggatctttggcgagtagcaagtcatatatttaattctgacatttagactatttcactgaaccagaagtcgaaactaaacatctctgagccactgactcttctgaaataaaatacacatgggtgtatgttacagactctttagatttaacagaaaatgtagctgttatgaaatgtaattgtaaaaatatgtcccgtatcttctatatcgagacattgcctttaattttatatcgcttttcagaaatttcagttgactacaaaactgcaacccttcggatttttattgactcaaaatagtgccattccccttaatgaaatagattttgagtctttttttcattgtaacccccaaatgagaatcatctacctgattcttgtaccaaaaaaaaatttttttcagtcttttttttttttagagagggtctctgtcaacgcagactggagtgcagtggcacgatcttagctcactacaacttctgcctcccaggctcaagcaattctcctgcctcagcctcctgagtagctgggattacaggcatgcaccaccacgcccagctaatttttgtatttttagtagagacagggtttcaccatgttggccaggctggtcccgaactcctgacctcaggtgatccacccacctcggcctcccaaagtgctgggattataggtgcgagccactgcgcccagcctcagttattttatttaacagtgtaagtacttagaaagtaagaaaattgctgatttagtttttttttttttttttttaatgtttccccagcattctgcaagttaggccaaagcccacattcaaagaaatgagattaactcttaagtaatgtattaagtttatgtatattttaaaatattattaaaggaggtttgaaagtattgacatttaaaaagtcaacacttagattaaatttagctggtagttttaatttgggttttagttaagagtgtgaggacatcaggaaaactgtttactactttggttttagcagctcagttttactattccataatgtgttatttttaaagttctctttttaagatcacagtgatatcctatcttcaaattttttaaatatgttcaaaatatctggagggtgagaagttaccaagtttgtatgttttgtttgactcaccatctttattttctgtatatgtagtagctggcaattgcatatattttcttgattaacatattagagactgcttccatcatcttatgtaaacctggaaacagctgaaactagtcttttctgaagaaccgtgtatcagtgttagatgtgcatcccgttttgtcattccctcagactttgaatacagtcattactctctggaagagaaatgtaagtatattttttgttatctgcagtatggtttaacatgtattaataatacacatatgcagactcactaaagtatccccagtaattagtaaattccaaatttaagtcagtacagttctgtatttgtaaattctgtctttcaaaaagttgttcgtgtttttaaaagttgatgtccaaaggaaaggagcttcttttaagtacttttggtgtatgttgaatatttatttgctatgatattctagaagaaaatatcaaacatgttaaatataagaacatgttaaaatttaaatttgctatttcaaaagttactgaagatgtcttggaataacaattgtcatgctgttaaactagttgcatatacttcattaaaagcaccatggagaaacattttaacaatg

SEQ ID NO: 225878 - protein, 878 aa, Artificial Sequence
  derived and/or modified sequence
MDPTAGSKKEPGGGAATEEGVNRIAVPKPPSIEEFSIVKPISRGAFGKVYLGQKGGKLYAVKVVKKADMINKNMTHQVQAERDALALSKSPFIVHLYYSLQSANNVYLVMEYLIGGDVKSLLHIYGYFDEEMAVKYISEVALALDYLHRHGIIHRDLKPDNMLISNEGHIKLTDFGLSKVTLNRDINMMDILTTPSMAKPRQDYSRTPGQVLSLISSLGFNTPIAEKNQDPANILSACLSETSQLSQGLVCPMSVDQKDTTPYSSKLLKSCLETVASNPGMPVKCLTSNLLQSRKRLATSSASSQSHTFISSVESECHSSPKWEKDCQESDEALGPTMMSWNAVEKLCAKSANAIETKGFNKKDLELALSPIHNSSALPTTGRSCVNLAKKCFSGEVSWEAVELDVNNINMDTDTSQLGFHQSNQWAVDSGGISEEHLGKRSLKRNFELVDSSPCKKIIQNKKTCVEYKHNEMTNCYTNQNTGLTVEVQDLKLSVHKSQQNDCANKENIVNSFTDKQQTPEKLPIPMIAKNLMCELDEDCEKNSKRDYLSSSFLCSDDDRASKNISMNSDSSFPGISIMESPLESQPLDSDRSIKESSFEESNIEDPLIVTPDCQEKTSPKGVENPAVQESNQKMLGPPLEVLKTLASKRNAVAFRSFNSHINASNNSEPSRMNMTSLDAMDISCAYSGSYPMAITPTQKRRSCMPHQTPNQIKSGTPYRTPKSVRRGVAPVDDGRILGTPDYLAPELLLGRAHGPAVDWWALGVCLFEFLTGIPPFNDETPQQVFQNILKRDIPWPEGEEKLSDNAQSAVEILLTIDDTKRAGMKELKRHPLFSDVDWENLQHQTMPFIPQPDDETDTSYFEARNTAQHLTVSGFSL

SEQ ID NO: 225879 - DNA, 2637 bp, Artificial Sequence
  derived and/or modified sequence
atggaccccaccgccggctcaaagaaggaaccaggggggggagcggccactgaggaaggtgtcaatcgaatagcggtaccaaaacccccatctattgaggagttcagcatcgtgaaacctatatcccggggggccttcgggaaagtgtatctgggccagaaaggaggcaagctgtacgctgtgaaggtggttaaaaaggcagacatgataaacaagaatatgactcaccaggtacaggctgaaagggacgctttagcgctgtccaagtctccctttatcgtgcatctctactactccctgcagtcagcaaataacgtatatctggtgatggagtatcttatcggtggggacgtcaagtcacttctgcacatctacggatatttcgatgaggagatggccgtcaagtacataagtgaggttgctctggcactggattacctgcacaggcatggcatcatccatagagatctgaaacccgataacatgctaatctcaaacgaagggcatatcaaattgacagattttgggctgtccaaggtgaccctgaatcgcgacataaacatgatggatatccttaccaccccctcaatggctaaacctagacaggattatagcaggacccccggccaggttctgagtcttatctcaagcctgggctttaatacaccgattgccgaaaaaaaccaggatccggcgaatattctgtccgcttgcttgagtgaaacctcacagctgtcccaaggcctggtgtgtcctatgtctgtcgaccagaaggacacaactccctatagtagcaaactgctgaagtcatgcctcgaaaccgtggcaagtaatcctgggatgcccgtgaagtgtctaacttctaacctgcttcagagtcgaaagcgcctggcaacatcaagcgcgtcttcgcagtcccacaccttcatcagttccgtcgaatccgagtgtcactcttcaccaaaatgggaaaaagattgccaagagtccgatgaggccctaggaccaaccatgatgtcttggaacgcagtggagaagctgtgtgctaagagtgccaacgcaattgagaccaaaggttttaacaagaaggacctggaactggcattgtcccccattcacaatagctcagccttgcccactaccggccgcagttgcgtcaacctggctaagaagtgcttcagcggggaggtgagctgggaagccgttgagctggacgtgaacaatataaacatggatacggatacctcacaattgggttttcaccagtccaatcagtgggccgtggatagtggaggcataagtgaggagcacctggggaaacgaagtctgaaaaggaacttcgagctcgtggacagcagtccctgcaagaagataatacagaataagaagacttgcgtagagtacaaacacaacgaaatgactaactgctacacgaaccaaaacaccggattgactgtcgaggtacaggaccttaaactcagcgtgcacaagagccagcagaatgactgtgccaacaaagagaacatcgtgaactccttcacggataagcaacaaactcccgagaagttgcctatccctatgattgccaaaaacctgatgtgcgagctagacgaggattgtgagaagaacagtaaaagggattacctatcctcatcgtttctttgttctgacgatgacagagccagtaaaaatattagcatgaatagcgattcttcttttccgggcatcagtattatggagtcccccctagaaagccagccactcgactctgaccgcagtattaaggagtctagtttcgaagaatctaatattgaggaccctctgatcgtgacgccggattgtcaggagaagacgtctccaaagggggttgagaatccagctgtgcaggagtctaaccagaaaatgttgggcccacccctggaggtgctgaagacacttgcatccaagaggaatgccgttgcctttcggagctttaatagccatatcaatgcctctaataatagcgagcccagtcgtatgaatatgacctcgctcgatgcaatggacatctcctgcgcctactctggttcctatccaatggccatcaccccgacccaaaaaaggcgctcttgcatgcctcaccagactccaaaccaaataaaatccgggacaccttatcgaacccccaagtcggtccgaagaggggtggcacctgtcgatgatgggcggatcctgggaacaccagactacctagccccggagttgcttctcggtcgcgcacatggccctgctgtggactggtgggcacttggtgtatgtctgttcgaattcctgacagggatccccccctttaacgacgagacgccacagcaagtgttccagaacatcctgaaaagagatatcccatggcctgagggagaagagaagctgagcgacaatgcgcagagcgcggtggaaatcctgctaaccatcgacgacacgaaacgagcaggcatgaaggagctcaaaagacaccctctctttagtgacgtggattgggaaaacctccagcatcagactatgcctttcatacctcagccagatgacgaaacagatacctcttacttcgaggctagaaacacagcacaacacttgacagtgagcggcttctccctgtag

SEQ ID NO: 225880 - DNA, 2637 bp, Artificial Sequence
  derived and/or modified sequence
atggaccccacagctggcagcaagaaggagcccggcggcggggccgccacagaggagggcgtgaacagaattgctgtgcccaagcccccatccattgaggagttcagcatcgtgaagcccatcagcagaggagccttcggcaaggtgtacctgggccagaagggcggcaagctgtatgctgtgaaggtggtgaagaaggctgacatgatcaacaagaacatgacccaccaggtgcaggccgagagagatgccctggccctgagcaagagccccttcatcgtgcacctgtactacagcctgcagagcgccaacaacgtgtacctggtgatggagtacctgattggaggagatgtgaagagcctgctgcacatctacggctactttgatgaggagatggctgtgaagtacatcagcgaggtggccctggccctggactacctgcaccgccacggcatcatccaccgggacctgaagccagacaacatgctgatcagcaatgaaggccacatcaagctgacagactttggcctgagcaaggtgaccctgaacagagacatcaacatgatggacatcctgaccacccccagcatggccaagccccggcaggactacagcaggaccccaggccaggtgctgagcctcatcagcagcctgggcttcaacacccccatcgccgagaagaaccaggaccctgccaacatcctgagcgcctgcctgtctgagaccagccagctgagccagggcctggtgtgccccatgtctgtggaccagaaggacaccaccccctacagcagcaagctgctgaagagctgcctggagaccgtggccagcaaccctggcatgcctgtgaagtgcctgaccagcaacctgctgcagagcaggaagaggctggccaccagcagcgccagcagccagagccacaccttcatcagctctgtggagagcgagtgccacagcagccccaagtgggagaaggactgccaggagagtgatgaggccctgggccccaccatgatgtcctggaatgctgtggagaagctgtgtgccaagagcgccaatgccatcgagaccaagggcttcaacaagaaggacctggagctggccctgagccccatccacaacagcagcgccctgcccaccaccggccgcagctgtgtgaacctggccaagaagtgcttcagcggggaggtgtcctgggaggccgtggagctggatgtgaacaacatcaacatggacacagacaccagccagctgggcttccaccagagcaaccagtgggccgtggacagcggcggcatcagcgaggagcacctgggcaagaggagcctgaagaggaactttgagctggtggacagcagcccctgcaagaagatcatccagaacaagaagacctgtgtggagtacaagcacaatgagatgaccaactgctacaccaaccagaacacaggcctgactgtggaggtgcaggacctgaagctgtctgtgcacaagagccagcagaatgactgtgccaacaaggaaaatattgtgaacagcttcacagacaagcagcagaccccagagaagctgcccatccccatgattgccaagaacctgatgtgtgagctggatgaggactgtgagaagaacagcaagagggactacctgagcagcagcttcctgtgcagtgatgatgaccgggccagcaagaacatctccatgaacagcgacagcagcttccctggcatcagcatcatggagagccccctggagagccagcccctggacagcgacaggagcatcaaggagagcagctttgaggagagcaacatcgaggaccccctgattgtgaccccagactgccaggagaagaccagccccaagggcgtggagaacccagctgtgcaggagagcaaccagaagatgctgggcccccccctggaggtgctgaagaccctggccagcaagagaaatgctgtggccttccgctccttcaacagccacatcaatgccagcaacaacagcgagcccagcaggatgaacatgaccagcctggatgccatggacatcagctgtgcctacagcggcagctaccccatggccatcacccccacccagaagagaagaagctgcatgccccaccagacccccaaccagatcaagagcggcaccccctaccgcacccccaagtctgtgcggcggggcgtggcccctgtggatgatggccgcatcctgggcaccccagactacctggcccctgagctgctgctgggccgggcccacggccctgctgtggactggtgggccctgggcgtgtgcctgtttgagttcctgaccggcatcccccccttcaatgatgagaccccccagcaggtgttccagaacatcctgaagagggacatcccctggccagagggggaggagaagctgagtgacaatgcccagagcgctgtggagatcctgctgaccattgatgacaccaagagagctggcatgaaggagctgaagaggcaccccctcttcagtgatgtggactgggagaacctgcagcaccagaccatgcccttcatcccccagccagatgatgaaacagacaccagctactttgaggccaggaacacagcccagcacctgactgtgtctggcttcagcctgtag

SEQ ID NO: 225881 - DNA, 3623 bp, Artificial Sequence
  derived and/or modified sequence
ttttcctcacactaaatcgaaaactctccctgttggtcctgatctgtttcagtcaggcaaattacatcctgggaaaacgtcagatgacaggggaggccactcgcttcctgctcatccagtttcgacactttctgtgctttcattagcttccagacctcagccctggccctcgctttactgtacagtcagaactggtttctacgcctcgcgagggtgggaggtcgtgtatgggaggaggaccgcttcccaccagcctcgttgggaagccaggagaaatctcttcaaatcctgcgattcagagtcaagtcccagtcgtcctttttctggtcggcccagaactgtttgtgcctcctccctcatgaggaatgatgtcagtggggccgcggtcgccgcccacgaagagtgtaaggctgcgaagtcggggctttcccgacgccccctccgtccgcgtctgcgtaggggaggtgacgagggcggggcgcggcggcggggtgacgtcacggccgcgcgcggcgtgggcggagcctcactttgaacccagttggcgggagtggctgctcgcggaggggcagtgtctgcggggccgctgtatgctgtccagcgatggatcccaccgcgggaagcaagaaggagcctggaggaggcgcggcgactgaggagggcgtgaataggatcgcagtgccaaaaccgccctccattgaggaattcagcatagtgaagcccattagccggggcgccttcgggaaagtgtatctggggcagaaaggcggcaaattgtatgcagtaaaggttgttaaaaaagcagacatgatcaacaaaaatatgactcatcaggtccaagctgagagagatgcactggcactaagcaaaagcccattcattgtccatttgtattattcactgcagtctgcaaacaatgtctacttggtaatggaatatcttattgggggagatgtcaagtctctcctacatatatatggttattttgatgaagagatggctgtgaaatatatttctgaagtagcactggctctagactaccttcacagacatggaatcatccacagggacttgaaaccggacaatatgcttatttctaatgagggtcatattaaactgacggattttggcctttcaaaagttactttgaatagagatattaatatgatggatatccttacaacaccatcaatggcaaaacctagacaagattattcaagaaccccaggacaagtgttatcgcttatcagctcgttgggatttaacacaccaattgcagaaaaaaatcaagaccctgcaaacatcctttcagcctgtctgtctgaaacatcacagctttctcaaggactcgtatgccctatgtctgtagatcaaaaggacactacgccttattctagcaaattactaaaatcatgtcttgaaacagttgcctccaacccaggaatgcctgtgaagtgtctaacttctaatttactccagtctaggaaaaggctggccacatccagtgccagtagtcaatcccacaccttcatatccagtgtggaatcagaatgccacagcagtcccaaatgggaaaaagattgccaggaaagtgatgaagcattgggcccaacaatgatgagttggaatgcagttgaaaagttatgcgcaaaatctgcaaatgccattgagacgaaaggtttcaataaaaaggatctggagttagctctttctcccattcataacagcagtgcccttcccaccactggacgctcttgtgtaaaccttgctaaaaaatgcttctctggggaagtttcttgggaagcagtagaactggatgtaaataatataaatatggacactgacacaagtcagttaggtttccatcagtcaaatcagtgggctgtggattctggtgggatatctgaagagcaccttgggaaaagaagtttaaaaagaaattttgagttggttgactccagtccttgtaaaaaaattatacagaataaaaaaacttgtgtagagtataagcataacgaaatgacaaattgttatacaaatcaaaatacaggcttaacagttgaagtgcaggaccttaagctatcagtgcacaaaagtcaacaaaatgactgtgctaataaggagaacattgtcaattcttttactgataaacaacaaacaccagaaaaattacctataccaatgatagcaaaaaaccttatgtgtgaactcgatgaagactgtgaaaagaatagtaagagggactacttaagttctagttttctatgttctgatgatgatagagcttctaaaaatatttctatgaactctgattcatcttttcctggaatttctataatggaaagtccattagaaagtcagcccttagattcagatagaagcatcaaagaatcctcttttgaagaatcaaatattgaagatccacttattgtaacaccagattgccaagaaaagacctcaccaaaaggtgtcgagaaccctgctgtacaagagagtaaccaaaaaatgttaggtcctcctttggaggtgctgaaaacgttagcctctaaaagaaatgctgttgcttttcgaagttttaacagtcatattaatgcatccaataactcagaaccatccagaatgaacatgacttctttagatgcaatggatatttcgtgtgcctacagtggttcatatcccatggctataacccctactcaaaaaagaagatcctgtatgccacatcagaccccaaatcagatcaagtcgggaactccataccgaactccgaagagtgtgagaagaggggtggcccccgttgatgatgggcgaattctaggaaccccagactaccttgcacctgagctgttactaggcagggcccatggtcctgcggtagactggtgggcacttggagtttgcttgtttgaatttctaacaggaattccccctttcaatgatgaaacaccacaacaagtattccagaatattctgaaaagagatatcccttggccagaaggtgaagaaaagttatctgataatgctcaaagtgcagtagaaatacttttaaccattgatgatacaaagagagctggaatgaaagagctaaaacgtcatcctctcttcagtgatgtggactgggaaaatctgcagcatcagactatgcctttcatcccccagccagatgatgaaacagatacctcctattttgaagccaggaatactgctcagcacctgactgtatctggatttagtctgtagcacaaaaattttccttttagtctagccttgtgttatagaatgaacttgcataattatatactccttaatactagattgatctaagggggaaagatcattatttaacctagttcaatgtgcttttaatgtacgttacagctttcacagagttaaaaggctgaaaggaatatagtcagtaatttatcttaacctcaaaactgtatataaatcttcaaagcttttttcatttatttattttgtttattgcactttatgaaaactgaagcatcaataaaattagaggacactattgagagtgagccactagcttgattttctttctcctctgatttcagttcactgttcagtttagcattaaaataataaaataatcatacagttcc

SEQ ID NO: 225882 - DNA, 2637 bp, Artificial Sequence
  derived and/or modified sequence
atggaccccaccgccggcagcaagaaggagcccggcggcggcgccgctacagaggagggtgtaaaccgaatcgccgtgcccaagccaccctccatcgaagagtttagcattgtgaagcctatcagccgaggcgctttcggaaaagtgtacctcggtcagaagggtgggaagctctacgccgtcaaagtggtcaaaaaagccgatatgataaacaagaatatgacccaccaggtgcaggctgagcgcgacgctttggcattaagtaagagtcctttcatagtccacctttattacagtctgcagtctgcaaacaacgtttatctggtcatggaatatctgatcgggggcgacgtgaagtccctcctgcatatctatggatactttgacgaagaaatggcggtgaaatacataagcgaggtcgcgcttgctctggattatctacatcgccacggcatcatccatcgggacttgaagccagacaacatgttgattagtaatgagggacacatcaagttgaccgacttcggcctgagtaaggtcacacttaacagagacattaacatgatggatatccttaccactccatcgatggcaaagccgaggcaggattatagccggaccccgggccaagtgcttagcttgatttcatccttgggctttaatacgcctattgctgaaaagaatcaggatcctgccaacattctgagcgcctgccttagcgaaactagccaattaagccagggactggtgtgtccaatgagcgttgatcagaaggacaccacaccatatagtagtaaacttctaaaatcttgtcttgaaacggttgcgtctaaccccgggatgcccgtgaagtgcttgacctcaaatctcctccagtctagaaagaggcttgctacgtcttccgcctcttcacaatctcacacatttatctcaagcgttgaaagcgaatgccacagctcccctaagtgggaaaaagattgccaggagagcgatgaggccctgggaccaacaatgatgtcatggaacgctgtggagaaactttgcgcgaaaagcgccaacgcaattgaaacaaagggctttaataagaaggatctcgagctggctctttcacctatccataattcgagcgccctccccactacagggagatcctgtgtgaacctggcaaagaagtgcttcagtggggaggtgtcgtgggaagcagttgagctcgacgttaataatatcaatatggataccgataccagccagctgggctttcatcagtcgaaccagtgggcagtggactctgggggtatcagtgaagagcacctgggcaaaagaagcctgaaaaggaatttcgagctggtggattccagtccctgcaagaaaattatccagaataagaagacatgtgtcgaatataaacataacgaaatgaccaattgctataccaatcaaaatacgggattgactgtcgaggtgcaggatttaaaactgtcagtgcacaagagtcagcaaaatgactgtgctaacaaggaaaacatcgtaaactcgtttactgataagcaacaaacgccggagaaactgcccatccccatgattgccaagaatctgatgtgcgaactcgacgaggactgcgaaaaaaattcaaagagagattacctatcaagttcttttctgtgctctgatgacgatcgcgcctccaaaaacattagcatgaatagcgattctagctttcccggaatatcaatcatggagtccccccttgagagtcagcccctcgactctgacaggagcatcaaagaatctagttttgaagaaagtaacatcgaagaccccttgatcgtaacccctgattgtcaggagaaaacgtctccaaagggtgtcgaaaatccagctgttcaagaatctaaccagaagatgctaggtccacccttggaagtcctcaagacattagctagcaaaagaaacgccgtcgctttcagatccttcaacagccacattaatgctagtaacaattccgaaccatcgcggatgaatatgacctcactcgatgccatggatatctcctgcgcatattccggaagttaccccatggctataaccccgactcagaagcggcgctcttgcatgccccaccaaacacctaatcagattaagtcgggaaccccatatagaactccgaaatcagtccgccgcggcgtggcccccgttgacgacggaagaatcttgggtacccccgattaccttgcaccagagctgctgctggggagggctcatggaccagccgtcgactggtgggcactcggggtatgtttgttcgaatttttaacgggcattccaccctttaatgatgaaacaccccagcaggtgtttcagaacatcttaaaacgggacattccgtggcctgaaggtgaagagaagctgagtgacaatgcccagtcagccgtcgaaatccttctgaccatcgatgacactaaaagggccggaatgaaggagttgaaacggcaccctctcttctctgatgttgattgggaaaacctccagcatcagaccatgcctttcattcctcagccagatgatgaaactgacactagttactttgaggcccgcaataccgcccagcacctgactgtgtctggcttctccctgtag

SEQ ID NO: 225883 - DNA, 2637 bp, Artificial Sequence
  derived and/or modified sequence
atggatcccacagctggatctaagaaggaacccggaggtggggcagccacagaagagggagtgaacagaattgctgtgccaaagcctccatccattgaggagttcagtatcgttaagcccatcagccggggtgccttcggtaaagtttatctcggacagaaaggcggaaagctgtatgcagtgaaggtcgtaaagaaagcggacatgattaataagaacatgactcatcaggtccaagcagagagggacgccctggctctgtctaaaagccccttcatagtgcacctttattatagtctgcagtcagccaataacgtgtatttggtgatggagtatctcattggcggagatgtgaagtctctgcttcacatatatggctacttcgacgaagaaatggcagtgaagtacatcagcgaggtcgcccttgccctggactatcttcatcgtcacgggattatccaccgcgatctgaagcccgacaacatgctgattagtaacgagggccatattaagttaactgacttcggtctctcaaaggtcacattgaaccgggatatcaatatgatggacatcctcaccaccccttctatggccaaacctcgccaagattacagtcgcacccccggacaggtgctcagtctgatttctagcttggggtttaataccccaatcgccgaaaagaatcaagatcctgctaatatcctgagcgcttgtttgtcggaaacatcacagctctcacagggtctggtgtgcccaatgtctgtagatcagaaagataccacgccctactctagtaagctgctcaagtcgtgcctcgagacagtggcctcgaacccagggatgcccgtgaaatgtcttacctctaacctcctgcaaagccgcaaacggcttgccacctccagcgcgtcatctcagtctcacacattcatcagctctgtggaaagcgagtgtcactccagccccaagtgggagaaggattgccaggaatccgatgaagccttgggcccaacgatgatgagctggaacgctgttgagaagctgtgtgcaaagtctgccaacgccatcgagactaaggggtttaacaaaaaggacttggagctcgccctcagtcccattcacaattcctctgccctaccaaccactgggcgatcctgcgtcaaccttgctaaaaagtgcttcagcggagaagtatcctgggaagccgtcgagcttgacgttaataacatcaatatggatacagacaccagtcagctgggcttccatcagtcaaatcagtgggccgtcgactcagggggaatctctgaagaacacctggggaaacgctccctgaagaggaactttgagcttgtggactcatccccgtgtaaaaagattatccaaaataaaaaaacctgtgtcgaatataaacacaacgaaatgacgaattgctataccaatcagaacactggactaacagtggaagtacaggacctgaagctgtccgtgcacaaatcccagcagaacgattgtgccaacaaggaaaatattgtaaattcatttacagacaagcagcagacacctgaaaagcttccaattcccatgatcgccaagaatctgatgtgcgaattagatgaagattgtgagaagaacagtaagagagattacctctcatcgtcttttctgtgctcagacgacgatcgcgctagcaaaaatatctctatgaacagcgattcttctttccccggaatatcaatcatggagtcgcctttggaatcccagcctcttgactctgatcggagcatcaaggagagcagctttgaggagagtaatatcgaggatcccttgatagttaccccagattgccaggaaaagaccagtccaaaaggcgtcgagaatccagccgtgcaggaaagcaaccagaagatgctaggacctcccctggaggtattaaagacactcgcgtccaagaggaatgctgtggcgtttcgaagcttcaacagccacattaatgcaagtaacaacagtgaaccgagtagaatgaatatgacttccctggacgcgatggatatctcgtgtgcctattcgggtagctaccctatggctattactccaacacaaaaacgtcgaagttgtatgccccaccagaccccgaatcaaatcaaatccgggactccatatcgaacaccaaaatctgtgaggcggggtgtggcacctgtcgatgacggtaggatcctggggaccccggactacctggcccctgagctgttattgggtcgggctcatggacctgcggtggattggtgggcactgggcgtgtgcctcttcgagtttctcaccggcatcccaccctttaatgacgaaaccccgcagcaagtgttccagaacatccttaaacgcgatatcccttggccggagggcgaggagaagctgtcagacaacgctcagagcgcagttgagattctgctgaccatcgatgacacaaaaagagcgggaatgaaagaattgaagagacatccactgtttagcgacgtggattgggagaacctgcagcaccagacaatgcctttcattccgcagccagatgatgaaaccgacactagctattttgaggcacggaacactgctcaacatctgaccgttagcggtttctccctctag

SEQ ID NO: 225884 - DNA, 2637 bp, Artificial Sequence
  derived and/or modified sequence
atggaccccaccgccggcagcaagaaggagcccggcggcggcgccgccaccgaggagggcgtgaacagaatcgccgtgcccaagccccccagcatcgaggagttcagcatcgtgaagcccatcagcagaggcgccttcggcaaggtgtacctgggccagaagggcggcaagctgtacgccgtgaaggtggtgaagaaggccgacatgatcaacaagaacatgacccaccaggtgcaggccgagagagacgccctggccctgagcaagagccccttcatcgtgcacctgtactacagcctgcagagcgccaacaacgtgtacctggtgatggagtacctgatcggcggcgacgtgaagagcctgctgcacatctacggctacttcgacgaggagatggccgtgaagtacatcagcgaggtggccctggccctggactacctgcacagacacggcatcatccacagagacctgaagcccgacaacatgctgatcagcaacgagggccacatcaagctgaccgacttcggcctgagcaaggtgaccctgaacagagacatcaacatgatggacatcctgaccacccccagcatggccaagcccagacaggactacagcagaacccccggccaggtgctgagcctgatcagcagcctgggcttcaacacccccatcgccgagaagaaccaggaccccgccaacatcctgagcgcctgcctgagcgagaccagccagctgagccagggcctggtgtgccccatgagcgtggaccagaaggacaccaccccctacagcagcaagctgctgaagagctgcctggagaccgtggccagcaaccccggcatgcccgtgaagtgcctgaccagcaacctgctgcagagcagaaagagactggccaccagcagcgccagcagccagagccacaccttcatcagcagcgtggagagcgagtgccacagcagccccaagtgggagaaggactgccaggagagcgacgaggccctgggccccaccatgatgagctggaacgccgtggagaagctgtgcgccaagagcgccaacgccatcgagaccaagggcttcaacaagaaggacctggagctggccctgagccccatccacaacagcagcgccctgcccaccaccggcagaagctgcgtgaacctggccaagaagtgcttcagcggcgaggtgagctgggaggccgtggagctggacgtgaacaacatcaacatggacaccgacaccagccagctgggcttccaccagagcaaccagtgggccgtggacagcggcggcatcagcgaggagcacctgggcaagagaagcctgaagagaaacttcgagctggtggacagcagcccctgcaagaagatcatccagaacaagaagacctgcgtggagtacaagcacaacgagatgaccaactgctacaccaaccagaacaccggcctgaccgtggaggtgcaggacctgaagctgagcgtgcacaagagccagcagaacgactgcgccaacaaggagaacatcgtgaacagcttcaccgacaagcagcagacccccgagaagctgcccatccccatgatcgccaagaacctgatgtgcgagctggacgaggactgcgagaagaacagcaagagagactacctgagcagcagcttcctgtgcagcgacgacgacagagccagcaagaacatcagcatgaacagcgacagcagcttccccggcatcagcatcatggagagccccctggagagccagcccctggacagcgacagaagcatcaaggagagcagcttcgaggagagcaacatcgaggaccccctgatcgtgacccccgactgccaggagaagaccagccccaagggcgtggagaaccccgccgtgcaggagagcaaccagaagatgctgggcccccccctggaggtgctgaagaccctggccagcaagagaaacgccgtggccttcagaagcttcaacagccacatcaacgccagcaacaacagcgagcccagcagaatgaacatgaccagcctggacgccatggacatcagctgcgcctacagcggcagctaccccatggccatcacccccacccagaagagaagaagctgcatgccccaccagacccccaaccagatcaagagcggcaccccctacagaacccccaagagcgtgagaagaggcgtggcccccgtggacgacggcagaatcctgggcacccccgactacctggcccccgagctgctgctgggcagagcccacggccccgccgtggactggtgggccctgggcgtgtgcctgttcgagttcctgaccggcatcccccccttcaacgacgagaccccccagcaggtgttccagaacatcctgaagagagacatcccctggcccgagggcgaggagaagctgagcgacaacgcccagagcgccgtggagatcctgctgaccatcgacgacaccaagagagccggcatgaaggagctgaagagacaccccctgttcagcgacgtggactgggagaacctgcagcaccagaccatgcccttcatcccccagcccgacgacgagaccgacaccagctacttcgaggccagaaacaccgcccagcacctgaccgtgagcggcttcagcctgtag

SEQ ID NO: 225885 - protein, 269 aa, Artificial Sequence
  derived and/or modified sequence
MKTPVELAVSGMQTLGLQHRCRGGYRVKARTSYVDETLFGSPAGTRPTPPDFDPPWVEKANRTRGVGKEASKALGAKGSCETTPSRGSTPTLTPRKKNKYRPISHTPSYCDESLFGSRSEGASFGAPRMAKGDAAKLRALLWTPPPTPRGSHSPRPREAPLRAIHPAGPSKTEPGPAADSQKLSMGGLHSSRPLKRGLSHSLTHLNVPSTGHPATSAPHTNGPQDLRPSTSGVTFRSPLVTSRARSVSISVPSTPRRGGATQKPKPPWK

SEQ ID NO: 225886 - DNA, 810 bp, Artificial Sequence
  derived and/or modified sequence
atgaagacccccgtggagctggccgtgagcggcatgcagaccctgggcctgcagcacagatgcagaggcggctacagagtgaaggccagaaccagctacgtggacgagaccctgttcggcagccccgccggcaccagacccaccccccccgacttcgaccccccctgggtggagaaggccaacagaaccagaggcgtgggcaaggaggccagcaaggccctgggcgccaagggcagctgcgagaccacccccagcagaggcagcacccccaccctgacccccagaaagaagaacaagtacagacccatcagccacacccccagctactgcgacgagagcctgttcggcagcagaagcgagggcgccagcttcggcgcccccagaatggccaagggcgacgccgccaagctgagagccctgctgtggacccccccccccacccccagaggcagccacagccccagacccagagaggcccccctgagagccatccaccccgccggccccagcaagaccgagcccggccccgccgccgacagccagaagctgagcatgggcggcctgcacagcagcagacccctgaagagaggcctgagccacagcctgacccacctgaacgtgcccagcaccggccaccccgccaccagcgccccccacaccaacggcccccaggacctgagacccagcaccagcggcgtgaccttcagaagccccctggtgaccagcagagccagaagcgtgagcatcagcgtgcccagcacccccagaagaggcggcgccacccagaagcccaagcccccctggaagtag

SEQ ID NO: 225887 - DNA, 540 bp, Artificial Sequence
  derived and/or modified sequence
atgaagactccggtggaactagcagtttctgggatgcagactctggggcttcagcaccgttgtagaggtggatacagggtgaaagcacgcacctcctacgtagatgagacactgtttggcagccccgccggaaccaggcccactccccctgacttcgatcccccctgggtggaaaaggccaacagaactcggggcgtaggaaaggaagcgagcaaagccttgggggccaagggatcctgtgaaacaacgccttccaggggcagcacacccacactgacgccacgaaaaaagaataaataccggcctatctcccatacaccttcatattgtgatgagagcctttttggatctcggtccgaaggggcttcctttggagccccccgtatggctaagggggacgccgccaaacttagagccctcctgtggacccctcccccaactccacgtggctcgcattcccccagacctagggaggcccctcctccagtcccacctactcagatgggcttgagaatttccgggctgccaaggcaggggtag

SEQ ID NO: 225888 - DNA, 810 bp, Artificial Sequence
  derived and/or modified sequence
atgaagaccccagtcgaactggccgtctcgggcatgcagacactggggctgcagcacagatgccgagggggctaccgagtcaaggcacggacaagctatgtggacgagacactctttggctccccagccggcaccaggccaaccccccctgattttgaccccccctgggtggagaaagccaatcggactcggggcgtagggaaagaggcaagcaaggccctaggcgctaaaggatcatgcgagactaccccaagtcgcggcagcacacctaccctgactcctcgaaaaaaaaacaagtaccggcctatctcacacaccccttcctactgcgatgaatccctttttggctcgcgaagtgaaggcgcgtctttcggggctcccaggatggctaagggcgacgcagccaagttgcgggccctattgtggacccctcctcctaccccacggggcagccatagtccgcggccccgtgaagcacccctgcgcgcgatccaccctgccggcccctctaagactgagcccggcccagccgcggattctcagaagctcagtatggggggactccatagtagccgcccgctgaaacgcgggctgtcccattctcttacgcacctgaatgtccccagtactggacatccagctactagtgcccctcacacaaacggtccacaggatctgcgcccttccacctctggagtcacctttaggtctcctctggtgacaagtagagcccgttctgtgtctatcagcgtgccttcaactcctcgaagaggcggcgcaacccagaagccgaagcccccatggaagtag

SEQ ID NO: 225889 - DNA, 810 bp, Artificial Sequence
  derived and/or modified sequence
atgaaaactcctgttgagctggccgtttctggtatgcaaacactgggacttcaacataggtgtcgcggaggttatagggttaaagctcgcacttcgtacgtggatgaaacattgttcgggtcacccgcgggcaccagacccacccctcccgactttgatcctccatgggttgagaaggcaaatcggactagaggagttggcaaggaagctagcaaagccctgggcgccaagggatcatgcgaaacaacgccttccagagggtctacacccacattaaccccgaggaagaagaacaagtacagacctatctcccacacaccatcttattgcgatgagtctctatttggtagtcgctccgaaggcgcctcattcggcgctcccagaatggcaaagggggatgcagcaaagctgcgcgccctgttgtggacacccccccctaccccccgtggaagccacagccccagacctcgtgaggcccccctcagagctattcaccccgctggaccctcaaaaacagaacccggacctgccgcggactcccagaagctctccatgggaggtttacatagttcacggccgctgaaacggggcctgtctcatagcttaacccacctcaacgtgccgagcacgggccacccagccacttctgccccacacactaatggtccgcaagatctgcgaccctcaaccagtggggtcaccttccgcagccccttagttacttcacgcgcacgatcggtcagcatctccgtccccagcaccccccgcaggggaggcgccactcagaaaccaaaacctccttggaagtag

SEQ ID NO: 225890 - DNA, 810 bp, Artificial Sequence
  derived and/or modified sequence
atgaaaacccctgtcgagctcgcggtctcagggatgcaaacactcggactccagcaccgatgtcgaggggggtaccgtgtgaaggctcgcacctcctatgtagatgaaactctctttggtagtcccgccggcaccaggccgacacctcctgattttgacccgccctgggtcgaaaaagcaaatagaacacggggcgtggggaaggaggctagtaaggcactgggcgccaaaggatcatgcgaaacaactccaagtcgcggatcaacaccaactctcactcctcgtaagaaaaataagtacagacctatatcacacacaccctcatattgcgacgaatctctcttcggcagcagatcagagggggccagcttcggagcccccaggatggcgaaaggtgacgctgccaaactcagagcattgctgtggacacccccccctacccccaggggttcgcactcacccaggccccgagaggcaccgctgagagctattcaccccgctgggccttcaaaaaccgagccaggccccgctgcggatagccagaaactgagtatgggcggcctgcatagttcacggcccctgaagcgtggccttagccatagtctgactcatctgaatgtgccgtctacaggacacccggccacatccgcgccacatactaatgggccccaggaccttagacctagtacctcgggagtaacttttcgaagccctctggtcacgtctcgcgctaggagtgtgtcgatcagcgtgcctagtacaccgcgaaggggaggagctacacagaaacctaagccaccctggaaatag

SEQ ID NO: 225891 - DNA, 540 bp, Artificial Sequence
  derived and/or modified sequence
atgaagacccctgtggagctggccgtgtctggcatgcagaccctgggcctgcagcaccgctgccggggcggctacagagtgaaggcccggaccagctatgtggatgagaccctgtttggcagccctgctggcacccggcccaccccaccagactttgaccccccctgggtggagaaggccaacagaacccggggcgtgggcaaggaggccagcaaggccctgggcgccaagggcagctgtgagaccacccccagccggggcagcacccccaccctgacccccaggaagaagaacaagtaccggcccatcagccacacccccagctactgtgatgagagcctgtttggcagccgctctgagggcgccagctttggagcccccaggatggccaagggagatgctgccaagctgcgggccctgctgtggaccccaccacccaccccccggggcagccacagcccccggccccgggaggcccctcctcctgtgccccccacccagatgggcctgcgcatcagcggcctgccccggcagggctag

SEQ ID NO: 225892 - DNA, 810 bp, Artificial Sequence
  derived and/or modified sequence
atgaagacccctgtggagctggccgtgtctggcatgcagaccctgggcctgcagcaccgctgccggggcggctacagagtgaaggcccggaccagctatgtggatgagaccctgtttggcagccctgctggcacccggcccaccccaccagactttgaccccccctgggtggagaaggccaacagaacccggggcgtgggcaaggaggccagcaaggccctgggcgccaagggcagctgtgagaccacccccagccggggcagcacccccaccctgacccccaggaagaagaacaagtaccggcccatcagccacacccccagctactgtgatgagagcctgtttggcagccgctctgagggcgccagctttggagcccccaggatggccaagggagatgctgccaagctgcgggccctgctgtggaccccaccacccaccccccggggcagccacagcccccggccccgggaggcccccctgcgggccatccaccctgctggccccagcaagacagagcccggccctgctgctgacagccagaagctgtccatgggcggcctgcacagcagccggcccctgaagaggggcctgagccacagcctgacccacctgaatgtgcccagcacaggccacccagccaccagcgccccccacaccaacggcccccaggacctgcggcccagcaccagcggcgtgaccttccgcagccccctggtgaccagccgggcccggtctgtgtccatctctgtgcccagcaccccccggcggggcggggccacccagaagcccaagccaccctggaagtag

SEQ ID NO: 225893 - DNA, 540 bp, Artificial Sequence
  derived and/or modified sequence
atgaagacccccgtggagctggccgtgagcggcatgcagaccctggggttacaacacaggtgtcgaggggggtaccgggtgaaagcgaggacatcctatgtcgatgaaacactattcgggagccccgccggaactagaccaacaccgcctgattttgatcctccatgggtcgaaaaagccaatcgcacccggggtgtggggaaagaggcatccaaggcactgggggcgaagggatcttgtgagaccaccccttcccgtggaagcaccccgaccttgactcctagaaagaagaacaagtatagacctatctcgcacacaccttcctactgcgacgagtccttatttggatcgaggtcagagggcgctagctttggggcccctaggatggccaaaggagatgccgctaagctaagagctcttctgtggacccccccccccaccccgagaggctctcatagccccaggccgagagaggccccaccccctgttccccccacacagatggggcttcgaatttccggcctgccacggcaggggtag

SEQ ID NO: 225894 - DNA, 810 bp, Artificial Sequence
  derived and/or modified sequence
atgaagacccccgtggagctggccgtgagcggcatgcagaccctggggttacaacataggtgccgtgggggatacagggtgaaagctcgaaccagttatgtcgatgagacactattcggctcccccgcggggacccgtccaacaccccccgactttgatcccccttgggtggaaaaggcaaatcgcacccgtggagtgggtaaggaggcttctaaggctctgggcgctaagggcagctgcgagaccacaccttccagaggttccacacccactctgacccctcggaagaagaataagtaccgcccgatcagccatacaccttcatactgcgatgaaagcctatttgggtcacgcagcgagggtgcatcctttggagccccccgcatggcgaaaggtgacgcagcaaaacttagggctctcctctggacccctccccctacccccagaggttcccatagcccgagaccccgtgaggctcccttacgagctatccaccccgctggcccgagcaaaactgagcccggaccagccgcagattcacagaaattatccatgggcggattgcattccagccgtccccttaaaagaggtctctcccattcactcactcacctgaacgtgccttctactggtcaccctgcaacatctgccccgcacaccaacggtccacaggacttacgcccatctacgtcaggcgtaaccttccgttctccccttgtgaccagcagagcacgctccgtcagcatctctgttccctctacgccacggaggggcggagctacgcaaaaaccaaagccaccatggaaatag

SEQ ID NO: 225895 - DNA, 810 bp, Artificial Sequence
  derived and/or modified sequence
atgaagacccccgtggagctggccgtgagcggcatgcagaccctggggctccagcatcggtgtcggggcgggtacagggtgaaggcccgtacttcctacgtggacgagaccctgtttgggtcacctgccgggacgcggccaactccgccggacttcgacccaccatgggtggaaaaagcaaaccggaccagaggtgttggcaaagaggcaagcaaagccctgggagcaaaaggtagctgcgagaccacaccctcccgcggcagcacacccaccttaacccctaggaagaaaaacaagtacagaccgatcagtcacacgccatcctactgtgacgagagtctgtttggcagccgaagcgagggagcaagtttcggtgccccaagaatggccaagggggatgccgcaaaactgcgtgcgttactgtggacaccaccccccaccccgcgtggcagtcactcccctagaccgagagaagcccccctcagagccatacacccagctggcccttcaaagaccgagcctgggccagctgcagactcacaaaaactgagtatgggaggcctgcactcaagccgccctctgaagagaggcttgagccatagcctcacccatctgaatgtaccctcaaccggccatccggcgactagcgctccccatacaaacgggccacaagacctgagaccttcgaccagcggggtgacctttcgctctcctctggtgacaagccgagccaggtctgtctccatcagcgtgccctccacacccagaagaggcggcgctacgcagaaacctaaaccaccatggaaatag

SEQ ID NO: 225896 - DNA, 810 bp, Artificial Sequence
  derived and/or modified sequence
atgaagacccccgtggagctggccgtgagcggcatgcagaccctggggctgcaacacaggtgtcgaggagggtatagagtcaaggccagaacaagttacgtggacgagacactgtttggctccccagctggtactcggcctacccctcccgacttcgacccaccctgggtggaaaaagctaataggacaaggggcgttggaaaggaggcatctaaagccctcggggctaagggttcatgcgagacgaccccaagtcggggcagcacgcctacattgacacctagaaaaaagaataagtataggcctatctcacatacgccatcctattgtgacgaaagtctattcggctcgaggagtgagggcgcatcgttcggagccccacggatggccaaaggggatgcagcgaaactgcgggcactcctctggacccctccacctacgccacggggttcccacagtccccgcccacgagaggcacctctgcgcgctatccaccctgcgggtccgagcaagacagagcctggccccgccgcggattcccagaagctgagcatggggggactgcactcttctagacccttgaagagaggccttagccactctctgacccacttaaatgtgccttccactggtcatccagccacctcggcaccccacacaaacggcccccaggatctgcggccctccacctctggtgtgacatttcggtctcccctcgtgactagtcgggcacgaagcgtctccatttctgtgccgagtactcccagacgaggcggcgccacgcaaaagccaaaacctccctggaagtag

SEQ ID NO: 225897 - DNA, 540 bp, Artificial Sequence
  derived and/or modified sequence
atgaaaacacccgtggaactcgccgtctccggaatgcaaacactgggtctgcagcaccgttgccggggaggatacagggtgaaagcccgaacgtcatacgttgatgagacgctgtttgggagcccagccggaacacgcccaacacccccagactttgaccccccttgggtcgaaaaagccaatcggacccgaggggtggggaaggaagctagtaaggctttgggagccaaaggctcttgtgagaccacgccctctaggggctcaacacccacgctgactccccgaaaaaagaacaagtacaggcccatttcacatacgccatcctattgcgacgaaagccttttcggcagtaggagtgagggggctagtttcggcgctcccagaatggccaagggggatgcggcaaaactcagggccctgttgtggacccccccaccaactcccaggggttcgcactcaccacgtccacgagaggcaccgccacctgtaccacccactcagatgggtctgagaatcagcgggcttcctcgccaaggttag

SEQ ID NO: 225898 - DNA, 810 bp, Artificial Sequence
  derived and/or modified sequence
atgaaaacacctgtcgagttagccgttagcggcatgcagacactcggcctgcagcaccgctgcaggggcggataccgcgtgaaagccaggacttcttacgtggacgagacactgtttggtagccctgcagggacgagacccacaccaccagacttcgacccgccatgggttgagaaggccaacagaacccgaggagtcggtaaagaggcgagcaaggccttgggcgcaaaggggtcctgcgagacaacaccgagtcggggtagcacccctaccctgacaccaaggaagaaaaataaatacagacctatttcacatactccaagttactgtgacgaaagtctgttcggcagccggtctgagggagcttcattcggcgctccacgaatggctaaaggcgatgccgcaaaactccgggcactcctgtggactccgcctcctaccccccgtggctctcattccccgcgaccacgggaagcaccattgcgcgcaatccatccggcaggtccaagcaaaacagaaccgggaccggctgccgactcccagaagctttctatgggtggactgcacagcagtcggccactcaagcgtggcctctcgcattcactcacccatctaaacgtgccttctactgggcaccccgctacctccgcgccacacactaacggccctcaggatctccgaccctccactagcggggttacgtttagatctccgctggtgacctctcgggcacggtcggtgtcgatctcggtgccatctacccccaggcggggtggagccacccaaaagcctaaacctccctggaagtag

SEQ ID NO: 225899 - DNA, 810 bp, Artificial Sequence
  derived and/or modified sequence
atgaagacgccggtggagctggccgtgtctgggatgcaaaccctggggctccagcatcggtgccgcggtggttaccgcgtgaaggcacgaactagctacgtggacgaaactttgttcgggtctccagccggaactcggcctacaccccctgatttcgaccctccctgggtggagaaggctaatcggacaaggggtgtagggaaggaggcctccaaagccctgggtgccaaaggctcatgcgagactacgccttctcggggttctaccccaacattgaccccaagaaaaaagaacaaataccggcctatttctcatacaccttcctactgcgatgagtctctgtttggaagcaggtcagaaggagcctcatttggagcgccacggatggccaagggagacgcagccaagctccgcgctctgctctggacacccccacctacccctaggggatcccactcccctcgaccccgtgaagcccctctgcgggcaattcacccagctggtccctcaaagacagaacccggacctgctgcagacagccagaaattatctatgggtggactgcatagcagtcggcctctcaagagaggtttgtcccactctttgacacacttaaatgttcccagcaccggccatcccgcaacttctgcccctcatacaaacgggcctcaagatctaaggcccagcacaagtggtgtgactttcaggtctcctttggtgacatctcgagctaggagtgtgtctatcagtgtaccaagtactccgaggcgtggaggagcgacccagaaaccgaagcccccttggaagtag

SEQ ID NO: 225900 - DNA, 810 bp, Artificial Sequence
  derived and/or modified sequence
atgaaaacgccagtggagctggccgtttctggaatgcagaccctgggtctgcagcacaggtgtagggggggatatagagtgaaggcgcgaacgagctacgtagatgagaccttatttgggagcccagcaggcaccagaccaactcctcccgatttcgacccaccctgggtggagaaggcgaacaggacaagaggagtaggcaaagaagccagcaaggcactgggcgctaagggttcgtgcgaaacaactcctagccggggatcaaccccaaccctaacccccagaaaaaagaacaaatatagacctatatcccacaccccatcttactgcgacgaatctttgttcgggagcaggtctgagggcgctagctttggcgctccgcgtatggccaagggtgatgcagctaaactacgagctctcctctggacaccccctcccaccccacgtggaagtcattcacctcgtcccagagaggctcccttgcgcgctattcatccggcaggcccttccaaaaccgagccgggacctgcggcagatagtcagaagctcagcatgggcggattacactcgtcacggccactgaaaagaggcctctctcattctctcactcacctgaatgtgcccagtaccggacaccctgctacctcagccccacatacaaatggcccacaggatttgcgtccctccacctctggggtgacttttcgctcgccgctggttacttcacgtgccaggtccgtctctattagtgtgccctcaaccccccgtcgagggggtgcaactcagaaacctaagccaccctggaaatag

SEQ ID NO: 225901 - DNA, 540 bp, Artificial Sequence
  derived and/or modified sequence
atgaagacccccgtggagctggccgtgagcggcatgcagaccctgggcctgcagcacagatgcagaggcggctacagagtgaaggccagaaccagctacgtggacgagaccctgttcggcagccccgccggcaccagacccaccccccccgacttcgaccccccctgggtggagaaggccaacagaaccagaggcgtgggcaaggaggccagcaaggccctgggcgccaagggcagctgcgagaccacccccagcagaggcagcacccccaccctgacccccagaaagaagaacaagtacagacccatcagccacacccccagctactgcgacgagagcctgttcggcagcagaagcgagggcgccagcttcggcgcccccagaatggccaagggcgacgccgccaagctgagagccctgctgtggacccccccccccacccccagaggcagccacagccccagacccagagaggcccccccccccgtgccccccacccagatgggcctgagaatcagcggcctgcccagacagggctag

SEQ ID NO: 225902 - protein, 296 aa, Artificial Sequence
  derived and/or modified sequence
MIAERLARLRQENKPKLVPSQAEIEARLAALKDERQGSIPSTQEMEARLAALQGRVLPSQTPQPAHHTPDTRTQAQQTQDLLTQLAAEVAIDESWKGGGPAASLQNDLNQGGPGSTNSKRQANWSLEEEKSRLLAEAALELREENTRQERILALAKRLAMLRGQDPERVTLQDYRLPDSDDDEDEETAIQRVLQQLTEEASLDEASGFNIPAEQASRPWTQPRGAEPEAQDVDPRPEAEEEELPWCCICNEDATLRCAGCDGDLFCARCFREGHDAFELKEHQTSAYSPPRAGQEH

SEQ ID NO: 225903 - protein, 461 aa, Artificial Sequence
  derived and/or modified sequence
MPAVAEALGQEGPPDLSRSAFLATVLTSLSAAFSSMPSSAYSLPFSRSLELDYHTSSCFRGTMVKADCPVPITDLPDSSGKLQYGCKNCGRAFCSGCLSFSAAVPRTGNTQQKVCKQCHEVLTRGSSANASKWSPPQNYKKRVAALEAKQKPSTSQSQGLTRQDQMIAERLARLRQENKPKLVPSQAEIEARLAALKDERQGSIPSTQEMEARLAALQGRVLPSQTPQPAHHTPDTRTQAQQTQDLLTQLAAEVAIDESWKGGGPAASLQNDLNQGGPGSTNSKRQANWSLEEEKSRLLAEAALELREENTRQERILALAKRLAMLRGQDPERVTLQDYRLPDSDDDEDEETAIQRVLQQLTEEASLDEASGFNIPAEQASRPWTQPRGAEPEAQDVDPRPEAEEEELPWCCICNEDATLRCAGCDGDLFCARCFREGHDAFELKEHQTSAYSPPRAGQEH

SEQ ID NO: 225904 - DNA, 1386 bp, Artificial Sequence
  derived and/or modified sequence
atgcccgccgtggccgaggccctgggccaggagggcccccccgacctgagcagaagcgccttcctggccaccgtgctgaccagcctgagcgccgccttcagcagcatgcccagcagcgcctacagcctgcccttcagcagaagcctggagctggactaccacaccagcagctgcttcagaggcaccatggtgaaggccgactgccccgtgcccatcaccgacctgcccgacagcagcggcaagctgcagtacggctgcaagaactgcggcagagccttctgcagcggctgcctgagcttcagcgccgccgtgcccagaaccggcaacacccagcagaaggtgtgcaagcagtgccacgaggtgctgaccagaggcagcagcgccaacgccagcaagtggagccccccccagaactacaagaagagagtggccgccctggaggccaagcagaagcccagcaccagccagagccagggcctgaccagacaggaccagatgatcgccgagagactggccagactgagacaggagaacaagcccaagctggtgcccagccaggccgagatcgaggccagactggccgccctgaaggacgagagacagggcagcatccccagcacccaggagatggaggccagactggccgccctgcagggcagagtgctgcccagccagaccccccagcccgcccaccacacccccgacaccagaacccaggcccagcagacccaggacctgctgacccagctggccgccgaggtggccatcgacgagagctggaagggcggcggccccgccgccagcctgcagaacgacctgaaccagggcggccccggcagcaccaacagcaagagacaggccaactggagcctggaggaggagaagagcagactgctggccgaggccgccctggagctgagagaggagaacaccagacaggagagaatcctggccctggccaagagactggccatgctgagaggccaggaccccgagagagtgaccctgcaggactacagactgcccgacagcgacgacgacgaggacgaggagaccgccatccagagagtgctgcagcagctgaccgaggaggccagcctggacgaggccagcggcttcaacatccccgccgagcaggccagcagaccctggacccagcccagaggcgccgagcccgaggcccaggacgtggaccccagacccgaggccgaggaggaggagctgccctggtgctgcatctgcaacgaggacgccaccctgagatgcgccggctgcgacggcgacctgttctgcgccagatgcttcagagagggccacgacgccttcgagctgaaggagcaccagaccagcgcctacagcccccccagagccggccaggagcactag

SEQ ID NO: 225905 - DNA, 1386 bp, Artificial Sequence
  derived and/or modified sequence
atgcctgctgtggccgaggctctcggccaggagggcccacctgacctctccagatctgctttcctcgccacagtcttgacctcactcagcgctgccttttcttccatgccgagcagcgcgtactctctacctttctctcgatcattagagctcgactaccacactagtagctgctttcgaggcactatggttaaagctgattgtcccgtgcccatcacggaccttcccgatagttctgggaagttgcagtacggatgcaaaaattgcgggcgcgccttttgctctggctgtctcagcttctctgccgccgtgccccgcacggggaacacccaacaaaaggtgtgtaaacagtgtcacgaagtgctgacccgggggtcttctgctaatgctagtaagtggtcccccccacaaaactataaaaaaagagtggctgcactggaagccaagcagaagccatcgacgagccagagtcagggtctgactcggcaggaccaaatgatcgccgagagactggcaaggctgagacaggaaaataagcctaagcttgtccctagtcaggccgaaattgaagcacggttagctgcgcttaaagacgaacggcagggatcaatcccctctacccaggagatggaggcacgcctcgccgctctccaggggcgagtgctgccatcccagacaccccaacccgcgcatcacactcccgatacccgcactcaggctcagcagacccaagacctgctgacgcagctggctgccgaggtggcaatagatgagtcttggaaggggggagggccagccgcttcactccagaacgacctgaaccagggcggccctgggagtacgaactccaagcggcaggcaaattggtctctggaagaagagaagtctcggttgctggctgaagctgcactcgagttacgggaagaaaataccaggcaggagcgaatactggccctcgccaaacgcctcgccatgctgaggggacaggatcccgagagagtcactctccaggactacagacttcccgacagcgatgatgatgaggacgaagaaaccgctattcagcgggtgcttcagcaactaaccgaggaagcatctctagacgaggcatccgggttcaatataccagcagagcaagccagtagaccctggacgcagccccgaggagcagagcctgaggctcaggacgtggatccacgaccggaagctgaggaggaagagttgccctggtgttgcatttgtaacgaggatgctacacttcggtgtgcaggctgcgacggcgaccttttctgcgcccggtgctttcgcgaagggcatgatgccttcgaacttaaagagcaccaaacctctgcttactcaccccctcgtgctggacaagaacactag

SEQ ID NO: 225906 - DNA, 1386 bp, Artificial Sequence
  derived and/or modified sequence
atgcctgctgtggccgaggccctgggccaggagggccccccagacctgagccgcagcgccttcctggccaccgtgctgaccagcctgtctgctgccttcagctccatgcccagcagcgcctacagcctgcccttcagccgcagcctggagctggactaccacaccagcagctgcttccggggcaccatggtgaaggctgactgccctgtgcccatcacagacctgcctgacagcagcggcaagctgcagtatggctgcaagaactgtggccgggccttctgcagcggctgcctgtccttctctgctgctgtgcccaggactggaaacacccagcagaaggtgtgcaagcagtgccacgaggtgctgacccggggcagcagcgccaatgccagcaagtggagccccccccagaactacaagaagagggtggccgccctggaggccaagcagaagcccagcaccagccagagccagggcctgacccggcaggaccagatgattgctgagcggctggcccggctgcggcaggagaacaagcccaagctggtgcccagccaggccgagattgaggcccggctggccgccctgaaggatgagcggcagggcagcatccccagcacccaggagatggaggcccggctggccgccctgcagggccgggtgctgcccagccagaccccccagcctgcccaccacaccccagacaccaggacccaggcccagcagacccaggacctgctgacccagctggccgctgaggtggccattgatgagagctggaagggcggcggccctgctgccagcctgcagaatgacctgaaccagggcggccctggcagcaccaacagcaagaggcaggccaactggagcctggaggaggagaagagccggctgctggccgaggccgccctggagctgcgggaggagaacacccggcaggagcgcatcctggccctggccaagaggctggccatgctgcggggccaggaccctgagcgggtgaccctgcaggactaccgcctgcctgacagtgatgatgatgaagatgaggagacagccatccagagggtgctgcagcagctgacagaggaggccagcctggatgaggccagcggcttcaacatcccagctgagcaggccagccggccctggacccagcccagaggagctgagcctgaggcccaggatgtggaccccaggcctgaggccgaggaggaggagctgccctggtgctgcatctgcaatgaagatgccaccctgcgctgtgccggctgtgatggagacctcttctgtgcccgctgcttccgggagggccatgatgcctttgagctgaaggagcaccagaccagcgcctacagcccccccagggctggccaggagcactag

SEQ ID NO: 225907 - DNA, 1386 bp, Artificial Sequence
  derived and/or modified sequence
atgcccgccgtggccgaggccctgggccaggagggcccccccgacctgtctcgctctgctttcctggccactgtactgacatcactttccgccgccttctcctcaatgccttccagcgcttatagtttacccttctctagatccctcgagctggactatcacacctcttcatgctttaggggtacaatggtgaaagcggattgtcctgttcccataaccgatctccctgactcttcaggaaaacttcagtacggatgtaagaattgcggcagggctttttgctctggctgcctgagctttagcgcggccgtacctcgaaccggaaatactcaacaaaaggtctgcaaacaatgccacgaggtcctcacaaggggctctagtgcgaacgcttctaaatggagcccgcctcagaactacaagaagagagtcgcagcactggaagctaaacagaaaccctctacctcacagtcccaggggctcactcgccaggaccagatgattgccgagcgcttggctaggctgaggcaggagaacaaacctaagctggtgccaagccaggctgagatcgaagcccgacttgccgccttgaaggatgagcggcaggggtccattccgtctactcaggagatggaggcacggctggctgctcttcagggaagagttctgccctctcagacaccacagccagcccatcacaccccagatactcgcacgcaggcccaacagacccaggacctgctcacccagttagctgctgaggttgctatagatgaatcgtggaaaggcggcggaccagctgcttcattgcagaatgacctgaatcaaggcggccctgggagcaccaacagcaagcgccaggccaactggtctctagaggaagaaaaaagccggttactcgctgaggcggctttggaactacgagaggagaatactaggcaagagcggatcctggccctggccaaaagattggcaatgttgcgtggccaagaccccgagagagtgactcttcaggactaccggctgccagatagcgacgacgatgaggatgaggagaccgctatccagagggttctacagcagctgactgaagaggccagtcttgacgaagcttctggattcaacatccctgcagagcaagcctcgaggccctggacacagcctaggggcgcggagcctgaggcccaggacgtggaccccagacccgaagcggaggaggaagaactcccatggtgctgcatctgcaatgaagatgccacactgaggtgtgctggctgcgacggtgacctgttttgcgcccgttgctttcgggaaggacatgatgcatttgagcttaaagaacaccagaccagcgcctactcccccccccgcgcggggcaagaacactag

SEQ ID NO: 225908 - DNA, 1386 bp, Artificial Sequence
  derived and/or modified sequence
atgccagccgtcgctgaggcgttaggacaggagggtcccccagacttaagcagaagtgcctttctagccactgtcttgaccagtcttagtgctgcctttagctctatgccctcatccgcatattcactccctttctccaggtcactggagttagattaccataccagctcttgtttcagggggacgatggtgaaggccgactgtccggtgcccattacggacctccccgatagttcaggcaaactgcagtacggctgcaaaaactgtggcagagcgttttgctcagggtgtcttagtttcagcgcagcagtcccccgaaccggtaatacccagcaaaaggtgtgcaagcaatgccacgaagtcctcactaggggttctagcgccaacgccagtaagtggtctccaccccagaactacaaaaagcgggtagcagcattggaggcaaaacaaaagccctctacgtctcagagtcagggtcttaccaggcaagatcagatgatagccgagcgactcgcgagactgagacaagagaacaagcccaagctggtgccgagtcaggctgaaattgaggctcgtctggctgctttaaaagatgagcggcagggcagtatcccctctacacaagaaatggaagctcgcttggcggcacttcaaggtcgagtcttaccttctcagacacctcagccggctcatcacacacccgacaccaggactcaggcccagcagacacaggacttgcttacacaacttgccgcagaggtggctattgacgagtcttggaagggtggcggtccggctgcctccctgcaaaacgatctcaaccaagggggaccaggcagcaccaatagcaaaagacaagcaaattggagcttggaagaggaaaagagcaggctcctggccgaagctgctctcgaactccgagaggaaaatacacgtcaggaaagaatcctagccctggccaagcggctggcaatgttgaggggtcaggatcccgagcgggtgaccctgcaagactaccgcctgcctgattcagacgacgacgaggacgaggaaactgccatacagcgggttctgcagcaacttaccgaagaggctagcctggatgaggcaagtgggttcaatatacctgcagaacaggcatccagaccatggactcagccccgtggcgcagagccggaagctcaggacgtggatccacggccagaagctgaggaagaagagctaccttggtgttgcatttgcaatgaggacgcaacccttaggtgtgccggatgcgacggcgacttgttttgtgcaaggtgcttcagagaggggcatgatgcctttgagctgaaggagcaccagacctcagcctatagcccaccaagagcgggtcaagaacattag

SEQ ID NO: 225909 - DNA, 2059 bp, Artificial Sequence
  derived and/or modified sequence
gttccttgctgcctcgccccgcggcctctaggagacaggggccacggggagagcacagccacccggcgcgaagagccctctgtaccccgcttcctcttgaggccctcggaccgtccaggaaatgtctgggagcccgcctgcggagggcatagcgccgaccctcgctccccgcccaggacccgaatgaacctggagagcggatgccagcagtggccgaggcgctaggacaggaaggaccgccagacctctcaagatcagccttcctcgccaccgttctcacctctttgtccgctgccttctcctcaatgcctagcagcgcgtacaggtccatctgtaagagctccttggtcactgccatggttccggcctgacggattcgtactacaactcccaagagtctaagcgcgcgtgaggactgcaggctccgagcggcgcctagccctctgggaattgtgttctgggtcaggcttgactgactctgagggaggccggcagtcgtgaatgaactacgactcccagcagcccccgttgccgccgctgccgtacgctggctgcaggagagcgtccggattccctgctctagtacggctgtaagaattgtggcagggccttctgttcaggctgcctaagcttcagtgcagcagtgcctcggactgggaacacccaacagaaagtctgcaagcaatgccatgaggtcctgaccagagggtcttctgccaatgcctccaagtggtcaccacctcagaactataagaagcgtgtggcagccttggaagccaagcaaaagcccagcacttcccagagccagggactgacacgacaagaccagatgattgctgagcgcctagcacgactccgccaggagaacaagcccaagttagtcccctcacaggcagagatagaggcacggctggctgccctaaaggatgaacgtcagggttccatcccttccacccaggaaatggaggcacgacttgcagcgttgcagggcagagttctaccttctcaaaccccccagccggcacatcacacaccggacaccaggacccaagcccagcagacacaggatctgctaacgcagctggcagctgaggtggctatcgatgaaagctggaaaggaggaggcccagctgcctctctccagaatgatctcaaccagggtggcccagggagcactaattccaagaggcaggccaactggtccttggaggaggagaagagcagactgctggctgaggcagcacttgagttgcgggaggagaacacgaggcaggaacggattctggccctggccaagcgactagccatgctgcggggacaggaccccgagagagtgaccctccaggactatcgcctcccagacagtgatgacgacgaggatgaggagacagccatccaaagagtcctgcagcagctcactgaagaagcttccctggatgaggcaagtggctttaacatccctgcagagcaggcttctcgaccctggacgcaaccccgcggggcagagcctgaggcccaggatgtggaccccaggcctgaggctgaggaagaggagctcccctggtgctgcatctgcaatgaggatgccaccctacgctgcgctggctgcgatggggacctcttctgtgcccgctgcttccgagagggccatgatgcctttgagcttaaagagcaccagacatctgcctactctcctccacgtgcaggccaagagcactgaagacaccctggtcctcccggaagggcagtcccacaggcagcggcacccatttctgggcccagccacaggacgtccgatgggagagcttgtctggctctactgatgatggataggccccttcctgagccttggtgtccctggaatgaggaaagattctccattcgagagaatgactgggagggaagaagtcggggccctcctattagaagcccagactggaagtgagaggcatgatggggagagaccagactgaatctacgggtgagccctgtaacctggctctagggcacaggcccctcccctggcacttagtgggtctaataaagtatgttgattcat

SEQ ID NO: 225910 - DNA, 1784 bp, Artificial Sequence
  derived and/or modified sequence
ggcatagcgccgaccctcgctccccgcccaggacccgaatgaacctggagagcggatgccagcagtggccgaggcgctaggacaggaaggaccgccagacctctcaagatcagccttcctcgccaccgttctcacctctttgtccgctgccttctcctcaatgcctagcagcgcgtacagcctgcccttctccaggtcgctggagttagattaccacacttcctcctgcttccggggcaccatggtgaaggctgactgtcctgtccctatcacagacctgccagattcctctggtaaactgcagtacggctgtaagaattgtggcagggccttctgttcaggctgcctaagcttcagtgcagcagtgcctcggactgggaacacccaacagaaagtctgcaagcaatgccatgaggtcctgaccagagggtcttctgccaatgcctccaagtggtcaccacctcagaactataagaagcgtgtggcagccttggaagccaagcaaaagcccagcacttcccagagccagggactgacacgacaagaccagatgattgctgagcgcctagcacgactccgccaggagaacaagcccaagttagtcccctcacaggcagagatagaggcacggctggctgccctaaaggatgaacgtcagggttccatcccttccacccaggaaatggaggcacgacttgcagcgttgcagggcagagttctaccttctcaaaccccccagccggcacatcacacaccggacaccaggacccaagcccagcagacacaggatctgctaacgcagctggcagctgaggtggctatcgatgaaagctggaaaggaggaggcccagctgcctctctccagaatgatctcaaccagggtggcccagggagcactaattccaagaggcaggccaactggtccttggaggaggagaagagcagactgctggctgaggcagcacttgagttgcgggaggagaacacgaggcaggaacggattctggccctggccaagcgactagccatgctgcggggacaggaccccgagagagtgaccctccaggactatcgcctcccagacagtgatgacgacgaggatgaggagacagccatccaaagagtcctgcagcagctcactgaagaagcttccctggatgaggcaagtggctttaacatccctgcagagcaggcttctcgaccctggacgcaaccccgcggggcagagcctgaggcccaggatgtggaccccaggcctgaggctgaggaagaggagctcccctggtgctgcatctgcaatgaggatgccaccctacgctgcgctggctgcgatggggacctcttctgtgcccgctgcttccgagagggccatgatgcctttgagcttaaagagcaccagacatctgcctactctcctccacgtgcaggccaagagcactgaagacaccctggtcctcccggaagggcagtcccacaggcagcggcacccatttctgggcccagccacaggacgtccgatgggagagcttgtctggctctactgatgatggataggccccttcctgagccttggtgtccctggaatgaggaaagattctccattcgagagaatgactgggagggaagaagtcggggccctcctattagaagcccagactggaagtgagaggcatgatggggagagaccagactgaatctacgggtgagccctgtaacctggctctagggcacaggcccctcccctggcacttagtgggtctaataaagtatgttgattcattggg

SEQ ID NO: 225911 - protein, 711 aa, Artificial Sequence
  derived and/or modified sequence
MMADAKYVLCRWEKRLWPAKVLARTATSTKNKRRKEYFLAVQILSLEEKIKVKSTEVEILEKSQIEAIASSLASQNEVPAAPLEELAYRRSLRVALDVLSEGSIWSQESSAGTGRADRSLRGKPMEHVSSPCDSNSSSLPRGDVLGSSRPHRRRPCVQQSLSSSFTCEKDPECKVDHKKGLRKSENPRGPLVLPAGGGAQDESGSRIHHKNWTLASKRGGNSAQKASLCLNGSSLSEDDTERDMGSKGGSWAAPSLPSGVREDDPCANAEGHDPGLPLGSLTAPPAPEPSACSEPGECPAKKRPRLDGSQRPPAVQLEPMAAGAAPSPGPGPGPRESVTPRSTARLGPPPSHASADATRCLPCPDSQKLEKECQSSEESMGSNSMRSILEEDEEDEEPPRVLLYHEPRSFEVGMLVWHKHKKYPFWPAVVKSVRQRDKKASVLYIEGHMNPKMKGFTVSLKSLKHFDCKEKQTLLNQAREDFNQDIGWCVSLITDYRVRLGCGSFAGSFLEYYAADISYPVRKSIQQDVLGTKLPQLSKGSPEEPVVGCPLGQRQPCRKMLPDRSRAARDRANQKLVEYIVKAKGAESHLRAILKSRKPSRWLQTFLSSSQYVTCVETYLEDEGQLDLVVKYLQGVYQEVGAKVLQRTNGDRIRFILDVLLPEAIICAISAVDEVDYKTAEEKYIKGPSLSYREKEIFDNQLLEERNRRRR

SEQ ID NO: 225912 - protein, 74 aa, Artificial Sequence
  derived and/or modified sequence
GGGGGGHIGVRPGSTLCQIIATCHMSVNDGGCYVLCRWEKRLWPAKVLARTATSTKNKRRKEYFLAVQILSLEE

SEQ ID NO: 225913 - DNA, 2136 bp, Artificial Sequence
  derived and/or modified sequence
atgatggcggacgctaagtacgtgctgtgccgctgggagaagcgtctatggccagctaaggtgctcgccagaacagctacttcgaccaaaaacaaacgtcgcaaagaatattttcttgctgtgcagatactttcattagaagagaaaatcaaagtgaagagtacagaagttgaaattctggagaagtctcagattgaggccattgcaagcagcttagcctctcagaacgaggtcccagcggctcccctggaggaactggcgtaccgcaggtccctgcgcgtggctcttgacgttctgagcgagggatccatctggagtcaggagagctccgcagggaccggcagggcagaccgttccctcaggggaaaacccatggaacacgtgtcgagtccatgtgattccaatagttcatctctcccgcgcggggatgtcctgggcagtagtcgtcctcacaggcgccggccctgtgtgcaacaatcgctttctagctctttcacatgcgaaaaggaccccgagtgcaaggtcgatcacaaaaagggattaaggaagagtgagaatccgcgcggacccctcgttctgcccgcaggaggtggagcacaggatgagtccggctctagaatccatcacaaaaattggactctggccagtaagcggggaggcaatagcgcccagaaagctagtctgtgcctgaacggaagcagtctcagtgaggacgacacagagcgggacatgggatcaaagggcgggtcttgggcagccccaagcctaccgtctggtgttcgtgaagacgatccatgtgccaatgcagagggccacgatcccggcctcccactcggtagcctgactgccccacctgcccctgaacctagcgcctgctctgaacctggcgaatgccccgcgaagaagaggcctaggctggatggcagtcagagacctccggcagtccaattggagcccatggctgccggcgctgccccaagtcctggacctggtcctgggcctcgcgagtctgttaccccccgcagtaccgccagacttgggccacctcctagtcacgcctcagccgatgcaacaaggtgcctgccctgccccgattctcagaaactggagaaagagtgtcagtcctcggaggagtccatgggctctaattccatgcgatcaatactggaggaggacgaggaggacgaagagcctcctagggtgctgctctatcacgagcctaggagttttgaggtaggaatgctggtatggcacaaacataagaaatatccattttggcccgctgtagtgaaatccgtacgccagcgtgataaaaaggcctcagtattatatatagagggacatatgaatcccaagatgaaaggcttcactgtcagtctgaagtcactgaaacacttcgactgcaaagagaagcagaccctgctcaatcaggcccgggaggacttcaaccaggacatcggatggtgtgtgtcccttattaccgattacagagtgcgcctggggtgcggctcgtttgcgggtagcttcctagagtattacgcggctgatatttcttatcccgtgcgcaaatctatccaacaagatgtattggggacgaaattgcctcagctgtcaaagggcagccccgaggaacccgttgtgggctgccctctcggtcaaaggcaaccatgtaggaaaatgctgccagatcgtagccgggccgccagagatcgcgctaatcagaagctggtagaatatattgtgaaagcaaagggggccgaatcccaccttcgcgcgatcctcaaaagccgcaagcctagtcggtggctgcagaccttcctgtcatcatcgcagtacgtgacttgcgttgagacatatttagaagatgaaggccagctggacctcgtggtaaaatacctgcagggagtgtaccaggaggttggcgccaaagtgctgcagaggactaatggggatcgaatccgatttatcctggatgtgcttctaccggaagccatcatctgcgccatctctgccgtagacgaggtcgattacaaaacagctgaggagaaatacattaaaggcccatcactgtcctaccgagaaaaagagatttttgataaccagctgcttgaggaaaggaacaggagaaggcgctag

SEQ ID NO: 225914 - DNA, 4092 bp, Artificial Sequence
  derived and/or modified sequence
cggcgggtgcggcggcggcggcccgcgctccgcaggacacattggcgtgagacctgggagtacgttgtgccaaatcattgccacttgccacatgagtgtaaatgatggcggatgccaagtatgtcctctgccgatgggaaaagcgattatggcctgcgaaggttttggcccgaaccgcgacttcaacaaaaaataagagaagaaaggaatattttctagctgtgcaaatcctctctctagaggaaaaaattaaggtgaaaagcactgaagttgagatcctagagaagtctcaaattgaagccattgcttcctcgttagcctcacagaatgaggttcctgcggcacccctggaagaactggcctacagacggtcgcttcgcgtggctctggacgttctgagcgagggctcgatttggagtcaagaaagctctgcagggacaggtagagctgaccggtctctgcgagggaagcccatggagcatgtctcctcgccctgtgattcgaactcctcatctcttccccgcggagacgtgttgggcagttccagacctcacaggaggaggccatgtgtgcaacaaagcctgtcaagttcgttcacttgtgaaaaggaccccgagtgcaaagtggaccacaagaaggggctcaggaaaagtgaaaacccaagaggcccgttggtcctcccagctggaggtggtgcccaagatgagagtgggtccagaatccaccacaaaaattggactcttgcaagtaagaggggaggaaactcagcgcagaaggctagcttgtgcctgaatggatcttccctttcagaggacgacacggagagagacatggggagcaaaggaggcagctgggcagccccgtccttgccctccggggtcagggaggacgatccctgtgccaacgctgagggacacgaccccggtctgccgttgggcagcctcactgcgcccccagcccctgagccctcggcctgctcagagcctggagaatgccctgcgaaaaagaggccgcgcctggatggcagccaaaggccgcctgccgtgcagctggagcccatggcagcaggggccgcaccatcccccgggccggggccagggcccagagagtctgtgaccccgcgcagcaccgccaggctgggcccgcctccctcccacgcctctgcggatgcaaccagatgtcttccttgcccggattcccagaagctggagaaagagtgccagtcttccgaagagtccatggggtctaattccatgcgttctatcctggaggaagacgaggaagacgaggagccaccaagagtccttttataccacgaaccacgttcgtttgaagtaggaatgctagtctggcataaacataaaaaataccccttctggccagcagtggtcaaaagcgtcaggcagagagataagaaagcaagtgtgctatacatcgaaggacacatgaacccgaaaatgaaaggtttcacagtgtctcttaaaagtttaaagcactttgattgtaaagagaaacagacgcttctgaatcaagccagggaggacttcaaccaggacatcggctggtgtgtctccctcatcaccgactacagggtccggttaggctgcgggtcttttgctggctctttcctggaatattacgcggctgatataagctatcctgtccgaaaatccatccagcaggacgtcttggggaccaagcttcctcaactgagcaaggggagccccgaggagcccgtggtggggtgccccctggggcagaggcagccctgccggaaaatgctccccgaccgctcgcgggccgcccgggaccgggccaaccagaagctggtggagtacattgtgaaggccaagggcgcggagagccacctgcgggccatcctaaagagcaggaagccatctcgctggctgcagaccttcctgagctccagccagtacgtgacctgtgtggagacctacctggaggatgaggggcagctggacctggtggtgaagtacctgcagggcgtctaccaggaggtgggggccaaggtgctccagcgcaccaacggcgaccggatccggttcattctggacgtgcttctgcccgaggccatcatctgtgcgatctctgcggtggacgaggtggactacaagacggctgaggagaagtacatcaaggggccttcgctgagctaccgggaaaaagaaatatttgacaaccagctccttgaagagcggaaccggcgccgtcggtgagggagcagccggctgtgctgtcagcggggcctggcggtggaagcgcctccagtgtgcatgagcgtgtctgaagatggggggctcagggggcacgtttgcgtttggacctgtctgtgcgttctcctgcgtggcagtcctgatttccatgcttctggagaatccatttcgttaacactgaaagccagttctcttttcctggcagtttttttcattttatttttggcattttttacaagataccgttcgggaaaggcttttgaaaggacggaagcgtattcactgtgcgccagtactcctggctgtgctgtggtttctcccgacgtgcacatcgatctcgtatgtgtggcatctgatattaaacgggaggttttaagaagcgtctgccgtgatcatggagcttcggaagcgggaatggttcttccgggtttgctgttttgtctgtttcccccttgtgtggtttccgcctgcgacagttccagaatttgctctcccactcagtgtgctctgcagctgtgaggaaacagccttcgttagaggcgggagcagagacgagccgctgctctgtgtcgtgtttgctgtggccgcagggagaggagcaggacacgcacctttccaggggcctctgtgtcccgcactgtgtgtgagtggaccgcagcgcgcagccacatgccctggctgccatgggccagaccgcctccacctcccccgcccgcctggcctgtcctgagtgcatttccctgcactgtgtcgtcactgcacagccagtcaccgcggtctcagtcatcggcgcggatggctatgctggggtcccagggtggccgcagcagtcagggtcactgtgggagccctggggtggagtgacaaaccgcattgtcctgtgcccgccatggcagaagcgcagcctttgtatggaggcccaaccgcgctcccgtctggagaagcggcttccggggtgtggctgccgggtcggctctggtccacagcacggtgccggggctgcaggttgttgagggctgtgactccgtggggctcagccaggctccagcagggtcagacgtgctgttaagagcaaagccacagacgatgacttgtccattctcagtggatgctccaggctgtgcctacacagcagtgctggtgacatgtccagggttccagggcccggtggcctgggagctgctttctccccactggctgggctgcatctggccctggctggaggccttgctttgaggggctgtgaccctcttcccccaggccctccccagccgacgacagccaccggagaggagatcggaacacgattgtctcagatgcagggcgctgtgcgggacgaagccgcaaggactctcgtatcgggcccttgggactcgggaggtgccagaggcggcggctgctctggacctcggtgttcactgacctttgtttcacttgcctctgctcgactccgagagcaggaaacccggccgtggcctggcagctccgcctcccatgcccgcacgctggggtctgtcttgtctggagcagtggggcacaccccggaggaggcgggggtcagggctgtcggccttggccccctgctggtcgctgtttcggggactcggggcggccagtaccaccgcctgaggcggggctcagcagcgttgcatgtacgggcctcgtactgcctcatggaaaatcctccggagccgccctccattgtgggttcctgagagtaggacacattgccatggttttgtgggaatcacgcgcccctgatggaacttttctgctgttgtgaagtacttttatccatttgcttctctgctgaccttgccaagttgttcgaggtggaattaaacacctcccagacctc

SEQ ID NO: 225915 - DNA, 2136 bp, Artificial Sequence
  derived and/or modified sequence
atgatggctgatgccaagtatgtgctgtgccgctgggagaagaggctgtggccagccaaggtgctggccaggacagccaccagcaccaagaacaagaggaggaaggagtacttcctggccgtgcagatcctgagcctggaggagaagatcaaggtgaagagcacagaggtggagatcctggagaagagccagatcgaggccatcgccagcagcctggccagccagaatgaggtgcctgctgcccccctggaggagctggcctacagaagaagcctgcgggtggccctggatgtgctgtctgagggcagcatctggagccaggagagcagcgctggcaccggccgggctgacaggagcctgcggggcaagcccatggagcacgtgagcagcccctgtgacagcaacagcagcagcctgcccagaggagatgtgctgggcagcagccggccccacagaagaagaccctgtgtgcagcagagcctgagcagcagcttcacctgtgagaaggaccctgagtgcaaggtggaccacaagaagggcctgaggaagtctgagaacccccggggccccctggtgctgcctgctgggggcggggcccaggatgaaagtggcagccgcatccaccacaagaactggaccctggccagcaagagaggaggcaacagcgcccagaaggccagcctgtgcctgaatggcagcagcctgtctgaagatgacacagagcgggacatgggcagcaaaggaggctcctgggccgcccccagcctgcccagcggcgtgcgggaggatgacccctgtgccaatgctgagggccatgaccccggcctgcccctgggcagcctgacagcccccccagcccctgagcccagcgcctgcagcgagcctggagaatgtcctgccaagaagaggccccggctggatggcagccagaggcccccagctgtgcagctggagcccatggccgccggggccgcccccagccctggccctggccctggcccccgggagagcgtgacccccaggagcacagcccggctgggccccccacccagccacgccagcgcagatgccacccgctgcctgccctgcccagacagccagaagctggagaaggagtgccagagcagcgaggagagcatgggcagcaacagcatgaggagcatcctggaggaggatgaggaggatgaggagcccccccgggtgctgctgtaccacgagcccaggagctttgaggtgggcatgctggtgtggcacaagcacaagaagtaccccttctggccagctgtggtgaagtctgtgcggcagagggacaagaaggcctctgtgctgtacatcgagggccacatgaaccccaagatgaagggcttcaccgtgtccctgaagagcctgaagcactttgactgcaaggagaagcagaccctgctgaaccaggcccgggaggacttcaaccaggacatcggctggtgtgtgtccctcatcacagactacagagtgcggctgggctgcggcagctttgctggcagcttcctggagtactatgctgctgacatctcctaccctgtgaggaagagcatccagcaggatgtgctgggcaccaagctgccccagctgagcaagggcagccctgaggagcctgtggtgggctgccccctgggccagaggcagccctgcaggaagatgctgcctgacaggagcagagctgcccgggaccgggccaaccagaagctggtggagtacatcgtgaaggccaagggagctgagagccacctgcgggccatcctgaagagcaggaagcccagccgctggctgcagaccttcctgagcagcagccagtatgtgacctgtgtggagacctacctggaggatgagggccagctggacctggtggtgaagtacctgcagggcgtgtaccaggaggtgggcgccaaggtgctgcagaggaccaatggagaccgcatccgcttcatcctggatgtgctgctgcctgaggccatcatctgtgccatctctgctgtggatgaggtggactacaagacagctgaggagaagtacatcaagggccccagcctgagctaccgggagaaggagatctttgacaaccagctgctggaggagaggaacagaagaagaagatag

SEQ ID NO: 225916 - DNA, 2136 bp, Artificial Sequence
  derived and/or modified sequence
atgatggccgacgccaagtacgtgctgtgccggtgggagaagcggttatggccggcaaaggtcctggctagaaccgctacatccacaaaaaataaacgtaggaaggagtactttctcgcagttcagattctctccttggaggagaaaatcaaagtgaagagtacagaggttgagatcctggaaaaaagccagatcgaggccatcgcctctagcctggcatctcagaatgaggtgccagctgctcctctagaggaattggcttataggaggagtctaagggtcgccctagacgttctctccgaaggctctatctggtcacaggagagctctgctggaacagggagggcggaccgatccctcagaggcaagcccatggaacatgtaagcagtccatgcgactccaacagctcgtccctcccgagaggagacgtgttgggctcttctcggccccatagacggcgtccttgcgttcaacagtcactttcctcttcgttcacatgcgagaaagaccccgagtgcaaagtcgaccacaaaaagggattacgtaagtccgagaaccctcggggacccctggtcctccccgccgggggaggcgcccaggatgagtcaggatcccggatccaccacaagaattggaccttggccagtaaacgcggtggcaactctgcccagaaagcaagcttatgcctaaacggatctagcttgagcgaggatgacaccgagagggacatgggttccaagggcggctcttgggcagccccaagtctacctagcggcgtgcgcgaggacgatccctgtgccaatgccgaagggcacgatcctgggctgccactgggttctctgaccgctccccctgcccccgaaccttcagcatgttcggagccgggtgagtgcccagctaagaagaggccacgacttgacggtagccagcgcccgcccgcagtgcagttggaacctatggctgcgggtgctgcgccatcacccggccccggacctgggccaagagaatccgtcactcctcggtcaactgctcggctgggccctccaccgtctcacgcctcggcagacgctacgcgctgcctgccgtgtcccgattcacagaagctggagaaagagtgtcagtcaagcgaggaaagcatggggtccaactcgatgaggagtattcttgaagaagacgaagaagacgaggagccgccgagggtgctcctgtatcacgaaccacgctccttcgaagtcggaatgctcgtgtggcacaaacacaagaaatatccattctggcccgccgttgttaagtctgtcaggcagagagataagaaagctagtgtgttgtatatagagggccacatgaaccccaagatgaaagggttcactgttagtttgaaatctctgaaacactttgattgtaaggaaaagcaaaccttattaaatcaggcacgagaagacttcaatcaggacattgggtggtgcgtgtccctgattaccgattatcgcgtcaggctcggctgcgggtcgttcgccggcagttttctggaatactacgctgccgatatatcatatcctgtccggaagagcatccagcaggatgtgttgggcaccaaacttccccagctctcaaaaggctcgccagaggagcctgtcgtgggctgtcctctaggtcaaagacagccttgtcgaaagatgttgccagacaggtccagagcagctagggatagagcaaaccagaaactcgtcgagtacatcgtgaaagccaaaggtgctgagtcacacctcagagccatactgaagagtcgtaagccctccaggtggctgcagaccttcctcagctctagtcaatacgtgacctgcgtggaaacatatctggaggatgagggccagcttgatctcgtcgtcaagtacctgcagggtgtataccaagaagtgggcgcgaaggtcttgcagaggacaaatggagatcgtataagatttattttggatgtcctcctacctgaggccatcatctgtgctatctcagccgtcgacgaagtggactacaagacagctgaagaaaaatacatcaaagggccttccctgtcatacagggagaaggagatatttgacaaccaattgcttgaggagagaaacaggagacggagatag

SEQ ID NO: 225917 - DNA, 2136 bp, Artificial Sequence
  derived and/or modified sequence
atgatggcagacgcgaaatacgtcttatgcaggtgggaaaaaagattatggcccgctaaggttctcgcccgaacagcaacctctacgaaaaataagcgccgaaaagagtatttcctggccgttcagatactgtccctggaggaaaagatcaaagttaagtccaccgaggtggagattctggaaaaatcacagattgaagctatcgcaagcagtctggctagtcagaacgaagtaccggctgcacccctcgaggagttggcctatcgtcggtcactacgggtggctcttgacgttctctctgagggcagcatctggagccaggagagttctgcagggacaggacgagcggatcgatctttgaggggcaaaccgatggaacacgtttccagtccatgtgactcaaacagctcatccctcccccgaggtgacgtgctgggcagctcccgaccacatcgcaggagaccttgcgtgcagcaaagcttgtcctcctcttttacctgcgaaaaggatccggaatgtaaagtcgatcacaaaaaagggctgagaaagtctgagaatcccaggggcccactggtgttgcctgctggcggaggagcccaggatgaatcagggtctcgcattcaccataaaaactggactctggcttcaaaaagaggcggtaattctgcacagaaggccagcctgtgccttaacggttccagcctctctgaagacgataccgagagagacatggggtccaaaggagggtcctgggccgctccgtcccttccaagtggagtgcgggaggacgatccctgcgccaacgcagaagggcacgatcctggactgcccctcggctccctgacggctcctcccgctcctgagccaagcgcatgcagcgaacctggggagtgtccagctaaaaagcggcctagacttgacggatcccagcggccacccgcagtgcagctggagcccatggccgcaggcgctgccccttctccagggccaggacccggtccacgtgagagtgtaaccccaagatctacagcgagactcggcccaccaccctcacacgcctcagccgatgccacccggtgtttgccctgcccggactctcaaaagctcgagaaggaatgccaatccagcgaggaaagcatgggctccaactcgatgcgctccatactggaagaggacgaggaggatgaagaaccccctcgcgtgctattgtaccacgagccacggtccttcgaggtaggtatgttggtatggcacaagcacaagaaatacccattctggcctgccgtggtaaaatctgtcaggcagagggataaaaaagccagcgttctgtatattgagggccatatgaaccctaagatgaaagggtttacagtatctcttaagtcactgaagcacttcgactgcaaggaaaaacagaccctgttgaatcaagccagggaggacttcaatcaggatattggatggtgcgtttcactcatcactgactaccgcgtgcgcctaggttgcggctcttttgcagggtcgtttctggagtactatgctgcggacatctcgtaccccgtccggaaatctatccaacaggacgtcctcggcactaagctgcctcagctgtcaaaggggtcacctgaggagcctgttgtcggctgtcccctcggacaaaggcagccatgtcggaaaatgctaccagatagatcaagggctgcacgggacagggcaaaccagaaactggtcgaatatatagtcaaagccaagggtgctgaatcacacctgagggcaatcctgaagagcagaaaaccctcccgatggcttcagactttcctttcatcttcccaatatgtgacatgtgtggagacctatctggaagacgagggtcagctggacttggtggttaagtatcttcaaggggtataccaggaagttggggcaaaggtcctccagcgtaccaacggggatcggattaggttcatccttgacgtcctgctgcccgaggctataatctgcgcaatttccgccgtggatgaggtggactacaagaccgctgaggagaagtatatcaagggaccatcattgtcatatagggaaaaggagatcttcgataaccaactgctggaggaacgcaaccgacgaagacgatag

SEQ ID NO: 225918 - DNA, 2136 bp, Artificial Sequence
  derived and/or modified sequence
atgatggccgacgccaagtacgtgctgtgcagatgggagaagagactgtggcccgccaaggtgctggccagaaccgccaccagcaccaagaacaagagaagaaaggagtacttcctggccgtgcagatcctgagcctggaggagaagatcaaggtgaagagcaccgaggtggagatcctggagaagagccagatcgaggccatcgccagcagcctggccagccagaacgaggtgcccgccgcccccctggaggagctggcctacagaagaagcctgagagtggccctggacgtgctgagcgagggcagcatctggagccaggagagcagcgccggcaccggcagagccgacagaagcctgagaggcaagcccatggagcacgtgagcagcccctgcgacagcaacagcagcagcctgcccagaggcgacgtgctgggcagcagcagaccccacagaagaagaccctgcgtgcagcagagcctgagcagcagcttcacctgcgagaaggaccccgagtgcaaggtggaccacaagaagggcctgagaaagagcgagaaccccagaggccccctggtgctgcccgccggcggcggcgcccaggacgagagcggcagcagaatccaccacaagaactggaccctggccagcaagagaggcggcaacagcgcccagaaggccagcctgtgcctgaacggcagcagcctgagcgaggacgacaccgagagagacatgggcagcaagggcggcagctgggccgcccccagcctgcccagcggcgtgagagaggacgacccctgcgccaacgccgagggccacgaccccggcctgcccctgggcagcctgaccgccccccccgcccccgagcccagcgcctgcagcgagcccggcgagtgccccgccaagaagagacccagactggacggcagccagagaccccccgccgtgcagctggagcccatggccgccggcgccgcccccagccccggccccggccccggccccagagagagcgtgacccccagaagcaccgccagactgggccccccccccagccacgccagcgccgacgccaccagatgcctgccctgccccgacagccagaagctggagaaggagtgccagagcagcgaggagagcatgggcagcaacagcatgagaagcatcctggaggaggacgaggaggacgaggagccccccagagtgctgctgtaccacgagcccagaagcttcgaggtgggcatgctggtgtggcacaagcacaagaagtaccccttctggcccgccgtggtgaagagcgtgagacagagagacaagaaggccagcgtgctgtacatcgagggccacatgaaccccaagatgaagggcttcaccgtgagcctgaagagcctgaagcacttcgactgcaaggagaagcagaccctgctgaaccaggccagagaggacttcaaccaggacatcggctggtgcgtgagcctgatcaccgactacagagtgagactgggctgcggcagcttcgccggcagcttcctggagtactacgccgccgacatcagctaccccgtgagaaagagcatccagcaggacgtgctgggcaccaagctgccccagctgagcaagggcagccccgaggagcccgtggtgggctgccccctgggccagagacagccctgcagaaagatgctgcccgacagaagcagagccgccagagacagagccaaccagaagctggtggagtacatcgtgaaggccaagggcgccgagagccacctgagagccatcctgaagagcagaaagcccagcagatggctgcagaccttcctgagcagcagccagtacgtgacctgcgtggagacctacctggaggacgagggccagctggacctggtggtgaagtacctgcagggcgtgtaccaggaggtgggcgccaaggtgctgcagagaaccaacggcgacagaatcagattcatcctggacgtgctgctgcccgaggccatcatctgcgccatcagcgccgtggacgaggtggactacaagaccgccgaggagaagtacatcaagggccccagcctgagctacagagagaaggagatcttcgacaaccagctgctggaggagagaaacagaagaagaagatag

SEQ ID NO: 225919 - protein, 472 aa, Artificial Sequence
  derived and/or modified sequence
MSRRVVRQSKFRHVFGQAAKADQAYEDIRVSKVTWDSSFCAVNPKFLAIIVEAGGGGAFIVLPLAKTGRVDKNYPLVTGHTAPVLDIDWCPHNDNVIASASDDTTIMVWQIPDYTPMRNITEPIITLEGHSKRVGILSWHPTARNVLLSAGGDNVIIIWNVGTGEVLLSLDDMHPDVIHSVCWNSNGSLLATTCKDKTLRIIDPRKGQVVAERFAAHEGMRPMRAVFTRQGHIFTTGFTRMSQRELGLWDPNNFEEPVALQEMDTSNGVLLPFYDPDSSIVYLCGKGDSSIRYFEITDEPPFVHYLNTFSSKEPQRGMGFMPKRGLDVSKCEIARFYKLHERKCEPIIMTVPRKSDLFQDDLYPDTPGPEPALEADEWLSGQDAEPVLISLRDGYVPPKHRELRVTKRNILDVRPPSGPRRSQSASDAPLSQQHTLETLLEEIKALRERVQAQEQRITALENMLCELVDGTD

SEQ ID NO: 225920 - protein, 472 aa, Artificial Sequence
  derived and/or modified sequence
MSRRVVRQSKFRHVFGQAAKADQAYEDIRVSKVTWDSSFCAVNPKFLAIIVEAGGGGAFIVLPLAKTGRVDKNYPLVTGHTAPVLDIDWCPHNDNVIASASDDTTIMVWQIPDYTPMRNITEPIITLEGHSKRVGILSWHPTARNVLLSAGGDNVIIIWNVGTGEVLLSLDDMHPDVIHSVCWNSNGSLLATTCKDKTLRIIDPRKGQVVAEQARPHEGARPLRAVFTADGKLLSTGFSRMSERQLALWDPNNFEEPVALQEMDTSNGVLLPFYDPDSSIVYLCGKGDSSIRYFEITDEPPFVHYLNTFSSKEPQRGMGFMPKRGLDVSKCEIARFYKLHERKCEPIIMTVPRKSDLFQDDLYPDTPGPEPALEADEWLSGQDAEPVLISLRDGYVPPKHRELRVTKRNILDVRPPSGPRRSQSASDAPLSQQHTLETLLEEIKALRERVQAQEQRITALENMLCELVDGTD

SEQ ID NO: 225921 - DNA, 1419 bp, Artificial Sequence
  derived and/or modified sequence
atgagcagaagagtggtgagacagagcaagttcagacacgtgttcggccaggccgccaaggccgaccaggcctacgaggacatcagagtgagcaaggtgacctgggacagcagcttctgcgccgtgaaccccaagttcctggccatcatcgtggaggccggcggcggcggcgccttcatcgtgctgcccctggccaagaccggcagagtggacaagaactaccccctggtgaccggccacaccgcccccgtgctggacatcgactggtgcccccacaacgacaacgtgatcgccagcgccagcgacgacaccaccatcatggtgtggcagatccccgactacacccccatgagaaacatcaccgagcccatcatcaccctggagggccacagcaagagagtgggcatcctgagctggcaccccaccgccagaaacgtgctgctgagcgccggcggcgacaacgtgatcatcatctggaacgtgggcaccggcgaggtgctgctgagcctggacgacatgcaccccgacgtgatccacagcgtgtgctggaacagcaacggcagcctgctggccaccacctgcaaggacaagaccctgagaatcatcgaccccagaaagggccaggtggtggccgagagattcgccgcccacgagggcatgagacccatgagagccgtgttcaccagacagggccacatcttcaccaccggcttcaccagaatgagccagagagagctgggcctgtgggaccccaacaacttcgaggagcccgtggccctgcaggagatggacaccagcaacggcgtgctgctgcccttctacgaccccgacagcagcatcgtgtacctgtgcggcaagggcgacagcagcatcagatacttcgagatcaccgacgagccccccttcgtgcactacctgaacaccttcagcagcaaggagccccagagaggcatgggcttcatgcccaagagaggcctggacgtgagcaagtgcgagatcgccagattctacaagctgcacgagagaaagtgcgagcccatcatcatgaccgtgcccagaaagagcgacctgttccaggacgacctgtaccccgacacccccggccccgagcccgccctggaggccgacgagtggctgagcggccaggacgccgagcccgtgctgatcagcctgagagacggctacgtgccccccaagcacagagagctgagagtgaccaagagaaacatcctggacgtgagaccccccagcggccccagaagaagccagagcgccagcgacgcccccctgagccagcagcacaccctggagaccctgctggaggagatcaaggccctgagagagagagtgcaggcccaggagcagagaatcaccgccctggagaacatgctgtgcgagctggtggacggcaccgactag

SEQ ID NO: 225922 - DNA, 1419 bp, Artificial Sequence
  derived and/or modified sequence
atgagcagaagagtggtgagacagagcaagttcagacacgtgttcggccaggccgccaaggccgaccaggcctacgaggacatcagagtgagcaaggtgacctgggacagcagcttctgcgccgtgaaccccaagttcctggccatcatcgtggaggccggcggcggcggcgccttcatcgtgctgcccctggccaagaccggcagagtggacaagaactaccccctggtgaccggccacaccgcccccgtgctggacatcgactggtgcccccacaacgacaacgtgatcgccagcgccagcgacgacaccaccatcatggtgtggcagatccccgactacacccccatgagaaacatcaccgagcccatcatcaccctggagggccacagcaagagagtgggcatcctgagctggcaccccaccgccagaaacgtgctgctgagcgccggcggcgacaacgtgatcatcatctggaacgtgggcaccggcgaggtgctgctgagcctggacgacatgcaccccgacgtgatccacagcgtgtgctggaacagcaacggcagcctgctggccaccacctgcaaggacaagaccctgagaatcatcgaccccagaaagggccaggtggtggccgagcaggccagaccccacgagggcgccagacccctgagagccgtgttcaccgccgacggcaagctgctgagcaccggcttcagcagaatgagcgagagacagctggccctgtgggaccccaacaacttcgaggagcccgtggccctgcaggagatggacaccagcaacggcgtgctgctgcccttctacgaccccgacagcagcatcgtgtacctgtgcggcaagggcgacagcagcatcagatacttcgagatcaccgacgagccccccttcgtgcactacctgaacaccttcagcagcaaggagccccagagaggcatgggcttcatgcccaagagaggcctggacgtgagcaagtgcgagatcgccagattctacaagctgcacgagagaaagtgcgagcccatcatcatgaccgtgcccagaaagagcgacctgttccaggacgacctgtaccccgacacccccggccccgagcccgccctggaggccgacgagtggctgagcggccaggacgccgagcccgtgctgatcagcctgagagacggctacgtgccccccaagcacagagagctgagagtgaccaagagaaacatcctggacgtgagaccccccagcggccccagaagaagccagagcgccagcgacgcccccctgagccagcagcacaccctggagaccctgctggaggagatcaaggccctgagagagagagtgcaggcccaggagcagagaatcaccgccctggagaacatgctgtgcgagctggtggacggcaccgactag

SEQ ID NO: 225923 - DNA, 1419 bp, Artificial Sequence
  derived and/or modified sequence
atgtcccggcgcgtggtgagacagtccaagttcagacatgtcttcggacaagcagctaaagctgaccaggcctacgaggacattcgggtatcaaaagttacctgggatagcagcttctgcgcagtcaatccgaagttccttgccataatagttgaggccgggggtggaggcgcctttattgtcttgccactggcaaagaccggccgcgtggacaagaattatcccttggtgactgggcatactgctcccgtgcttgacattgactggtgtcctcataatgacaatgtcatcgcctctgcctcagatgacacaacaatcatggtctggcaaattcctgactacactcctatgcggaatattactgaaccgataatcaccctagaggggcacagcaaaagggtggggatcctgtcctggcaccctaccgcccggaacgtgctgctctccgccggcggagataatgtgatcatcatttggaacgtcggcaccggagaagtgttgctgtcactcgatgatatgcaccccgatgtaatccacagtgtatgctggaacagtaatggctcacttctggcgactacgtgtaaggataaaactctgagaattattgaccctcgtaaggggcaagtggttgcagaacgctttgcagcacatgagggcatgaggcctatgagagccgtgttcactcgccaggggcatatttttacgactgggtttacccgtatgagccagcgggagctgggtctgtgggaccccaacaattttgaagaacctgtggctctacaagagatggatacatcgaacggggtgctactgcccttctacgatccagattcttccatagtgtacctgtgtggcaagggtgactcttctatcaggtatttcgaaatcactgacgagcccccttttgtccattacttgaatacttttagttctaaggaaccccaaagaggcatgggctttatgcctaagaggggtctggacgtctcaaaatgcgaaatcgcccgcttctacaagctgcacgaacgcaaatgcgaaccgattatcatgacggttccaaggaaaagtgatctgttccaggacgacctgtatccagatacccccgggcctgaaccagctctggaggcagatgaatggctgagcggacaagacgccgaacccgttctcatttcgctccgcgatggctatgtccctccaaagcatagagagctccgtgtaacaaaacggaacatcctggacgtgcggccaccgagcggtccacggaggagccagtccgcatcagatgcccccctgtcccagcagcacaccctggagacactcttggaagaaatcaaagctctgagggaaagagttcaggcacaggagcagcggataacagcattagaaaatatgctgtgcgagttggtggacggaacagactag

SEQ ID NO: 225924 - DNA, 1419 bp, Artificial Sequence
  derived and/or modified sequence
atgtcccgaagggtggtgagacagagcaaatttcgtcacgtgttcggccaagctgccaaagccgaccaggcttacgaggatatccgcgtctccaaagtgacttgggattcatctttctgcgctgtgaaccccaaattcctagctattattgtggaggcaggcgggggaggggcctttatagttttaccattggctaaaacaggtagggtcgataaaaactaccctctggtcaccggtcatactgcgccagttctggacatcgattggtgccctcataatgacaacgtcatcgcgtctgcaagcgacgacacgacaatcatggtttggcagatcccagattacacacccatgaggaatattactgaaccaattataacgttggagggacattcaaaaagagtgggcatattatcatggcatcccacagcacgcaatgtgttacttagcgccgggggggacaacgtaatcatcatctggaacgtcgggactggcgaggttctgctctccttggacgacatgcacccagacgtcattcattctgtgtgttggaactcgaatggatccttactggcaacaacctgtaaagacaaaactctgaggatcatcgacccaaggaagggacaggtggtggccgagcaggcacggccccatgagggggcgaggcctctccgcgctgtgtttacagcggatggtaagttactgtccaccggattttcccggatgagcgagcgccagcttgcactatgggaccctaacaatttcgaggagccagtcgccctgcaggaaatggacaccagtaatggcgtgctcttaccattttatgaccctgacagctcaatcgtgtatttatgcggtaaaggcgacagcagtatccggtatttcgagataacggacgaaccacccttcgtccactacctgaatacgttctccagtaaggaaccccagcggggaatggggttcatgcccaagaggggcctggacgtcagcaagtgtgagattgcgaggttttacaaactgcatgaacggaagtgtgagcctattattatgaccgtgcccagaaagagcgaccttttccaggatgatttataccctgacacacccgggcccgaacccgctttagaggcagacgagtggctctcaggccaggatgcggagcccgtgcttatatccctccgggacgggtatgtgcctcctaagcacagagagttgagggttactaagcgaaacattctggatgtgcgcccaccatcaggacctcgtcgaagccaatcagcttcagacgctcccctgtcacagcagcacactttagaaacgctcctagaggagattaaggccctgcgggagagggtacaggcccaggaacagagaatcaccgcactcgagaatatgctctgtgagctcgtagacggtaccgactag

SEQ ID NO: 225925 - DNA, 1419 bp, Artificial Sequence
  derived and/or modified sequence
atgagcagaagagtggtgcggcagagcaagttcagacatgtgtttggccaggccgccaaggctgaccaggcctatgaggacatccgggtgtccaaggtgacctgggacagcagcttctgtgctgtgaaccccaagttcctggccatcatcgtggaggccggcggcggcggggccttcatcgtgctgcccctggccaagacaggccgggtggacaagaactaccccctggtgacaggccacacagcccctgtgctggacatcgactggtgcccccacaatgacaacgtgattgccagcgccagtgatgacaccaccatcatggtgtggcagatcccagactacacccccatgaggaacatcacagagcccatcatcaccctggagggccacagcaagagggtgggcatcctgtcctggcaccccacagccagaaatgtgctgctgtctgctggaggagacaacgtcatcatcatctggaatgtgggcactggagaggtgctgctgagcctggatgacatgcacccagatgtgatccacagcgtgtgctggaacagcaatggcagcctgctggccaccacctgcaaggacaagaccctgcgcatcatcgaccccaggaagggccaggtggtggccgagagatttgctgcccacgagggcatgaggcccatgagagctgtgttcacccggcagggccacatcttcaccaccggcttcaccaggatgagccagcgggagctgggcctgtgggaccccaacaactttgaggagcctgtggccctgcaggagatggacaccagcaatggagtgctgctgcccttctatgaccctgacagcagcatcgtgtacctgtgtgggaagggggacagcagcatccgctactttgagatcacagatgagcccccatttgtgcactacctgaacaccttcagcagcaaggagccccagaggggcatgggcttcatgcccaagaggggcctggatgtgtccaaatgtgaaattgcccgcttctacaagctgcacgagaggaaatgtgagcccatcatcatgacagtgcccaggaagagtgacctcttccaggatgacctgtacccagacaccccaggccctgagcccgccctggaggctgatgagtggctgagcggccaggatgctgagcctgtgctgatcagcctgagagatggctacgtgccccccaagcaccgggagctgcgggtgaccaagaggaacatcctggatgtgcggcccccatctggcccccggcgcagccagagcgccagtgatgcccccctgagccagcagcacaccctggagaccctgctggaggagatcaaggccctgcgggagcgggtgcaggcccaggagcagaggatcacagccctggagaacatgctgtgtgagctggtggatggaacagactag

SEQ ID NO: 225926 - DNA, 1419 bp, Artificial Sequence
  derived and/or modified sequence
atgagcagaagagtggtgcggcagagcaagttcagacatgtgtttggccaggccgccaaggctgaccaggcctatgaggacatccgggtgtccaaggtgacctgggacagcagcttctgtgctgtgaaccccaagttcctggccatcatcgtggaggccggcggcggcggggccttcatcgtgctgcccctggccaagacaggccgggtggacaagaactaccccctggtgacaggccacacagcccctgtgctggacatcgactggtgcccccacaatgacaacgtgattgccagcgccagtgatgacaccaccatcatggtgtggcagatcccagactacacccccatgaggaacatcacagagcccatcatcaccctggagggccacagcaagagggtgggcatcctgtcctggcaccccacagccagaaatgtgctgctgtctgctggaggagacaacgtcatcatcatctggaatgtgggcactggagaggtgctgctgagcctggatgacatgcacccagatgtgatccacagcgtgtgctggaacagcaatggcagcctgctggccaccacctgcaaggacaagaccctgcgcatcatcgaccccaggaagggccaggtggtggccgagcaggcccggccccatgaaggagcccggcccctgcgggctgtgttcaccgcagatggcaagctgctgagcacaggcttcagcaggatgtctgagcggcagctggccctgtgggaccccaacaactttgaggagcctgtggccctgcaggagatggacaccagcaatggagtgctgctgcccttctatgaccctgacagcagcatcgtgtacctgtgtgggaagggggacagcagcatccgctactttgagatcacagatgagcccccatttgtgcactacctgaacaccttcagcagcaaggagccccagaggggcatgggcttcatgcccaagaggggcctggatgtgtccaaatgtgaaattgcccgcttctacaagctgcacgagaggaaatgtgagcccatcatcatgacagtgcccaggaagagtgacctcttccaggatgacctgtacccagacaccccaggccctgagcccgccctggaggctgatgagtggctgagcggccaggatgctgagcctgtgctgatcagcctgagagatggctacgtgccccccaagcaccgggagctgcgggtgaccaagaggaacatcctggatgtgcggcccccatctggcccccggcgcagccagagcgccagtgatgcccccctgagccagcagcacaccctggagaccctgctggaggagatcaaggccctgcgggagcgggtgcaggcccaggagcagaggatcacagccctggagaacatgctgtgtgagctggtggatggaacagactag

SEQ ID NO: 225927 - DNA, 2397 bp, Artificial Sequence
  derived and/or modified sequence
ctatgagcagacgtgtggttcggcaaagcaagttccgccatgtgtttgggcaggcagcaaaggccgaccaggcctacgaggacatccgtgtgtccaaggtcacatgggacagctccttctgtgccgtcaaccccaaattcctggccattattgtggaggctggaggcgggggtgccttcatcgtcctgcctctggccaagacagggcgagtggataagaactacccactggtcactgggcacactgcccctgtgctggatattgactggtgtccacacaatgacaacgttatcgccagtgcctcagacgacaccaccatcatggtgtggcagattccagactatacccccatgcgcaacattacggaacctatcatcacacttgagggccactccaagcgtgtgggcatcctctcctggcaccctactgccaggaatgtcctgctcagtgcaggtggtgacaatgtgatcatcatctggaatgtgggcaccggggaggtgctgctgagcctggatgatatgcacccagacgtcatccacagtgtgtgctggaacagcaacggtagcctgctagccaccacctgcaaggacaagaccttgcgcatcattgaccccagaaaaggccaagtggtggcggagaggtttgcggcccacgaggggatgaggcccatgcgggccgtcttcacgcgccagggccatatcttcaccacgggcttcacccgcatgagccagcgagagctgggcctgtgggacccgaacaacttcgaggagccagtggcactgcaggagatggacacaagcaacggggtcctattgcccttttacgatcccgactccagcatcgtctacctgtgtggcaagggcgacagcagcattcggtactttgagattaccgacgagccgcctttcgtgcactacctgaacacgttcagcagcaaagagccgcagcggggcatgggtttcatgcccaaaaggggactggatgtcagcaagtgtgagatcgcccggttctacaagctacacgaaagaaagtgtgaacctatcatcatgactgtgccccgcaagtcagacctcttccaggacgatctgtacccggatacgccaggcccggagccggccctagaagcggacgaatggctatccggccaggacgccgaacccgtgctcatttcgctgagggacggctatgtgccccccaagcaccgcgagctccgggtcacgaagcgcaacatcctggacgtgcgcccgccctccggcccccgccgcagccagtcggccagcgacgcccccttgtcgcagcagcacaccctggagacgctgctggaagagatcaaggccctccgcgagcgggtgcaggcccaggagcagcgcatcacggctctggagaacatgctgtgcgagctggtggacggcacggactagccccgcgcgccaggcaggcggagcggggcggggcgcacaagctcggccccgccccggcttttagtcccgaactccggaccccgccttcttgggctgggcccgggggcgggactggggagggaactccgcccctcgcgggagaccagaactcttggagcttaggggagacccacgtcgctccagcggaggctggactgcgagcctcgtctgggactcggctggagctggcctagggaggcctggggtaacctggggggctcagcaatggtgctgcacggcgaggtggtgtccccctttgtcctccgcccagggcagggaaagtgcttagtattagcgtgatgcttggggttattggagcctgagcttgacctcaaacgggtggcgatttgatgggtacccccaggctggggaaaatgacagcgcttctcctaatcagctcactggattccatcaccctgagcggtaaaccagatgggcgtcaccccagttctgcagacacatacacaacccgtttgctgcagagccggacccagtggctacacccacagcggtctgtggtagagaactctcttccttctttccaccgacaggggcgagggctgcttcctcgcggcagcccccgcgaagaaatctcgagagaactggcatgaggagttaggttcatcacaaatacacacacactgcccccaaccctctgccgttgcctctctcagaaaaacaagacgtactgaatgaaatattttactaagcgttcagtctgtgcctcctgcatgggtgggagtgaggggaacgagacccccagcctctgcaaatgctacccccaggctcctgggagacctggcgatgcactcctgggctcagggtccatcaggcagcctcttaccctagagctctctccactctgaggttcagaaggaccccaacccacaccgtaggcgttccccccaagtaaagttaggtagcaaaagcctccggt

SEQ ID NO: 225928 - DNA, 1419 bp, Artificial Sequence
  derived and/or modified sequence
atgagccggcgggtggtgcggcagagcaagttccggcacgtgttcggccaggcagctaaggccgaccaggcatacgaggacatcagagtcagtaaagtgacctgggactctagcttctgtgccgtcaatccaaagttcctagcaattattgtcgaagcagggggcggcggggccttcatcgttcttcctttggccaaaaccggcagagttgacaaaaactaccctctggtcactggacacacagcccctgtgctcgatattgactggtgtcctcacaatgataacgttatcgcctcggcgtcagatgacaccacaatcatggtgtggcagattccagattacacccctatgcggaacattaccgagccaatcataactctcgaggggcattccaagcgcgtgggcattctgtcttggcaccccactgcgcggaacgtgctcctgagtgctggaggagacaacgtcataattatatggaacgtgggtactggcgaagtgctcttatctctggacgatatgcaccccgatgttatacacagtgtgtgctggaacagcaatggctcgcttttggccaccacttgcaaggacaaaacattgcggataatcgaccctaggaaaggccaggtagtagctgagcgtttcgcagctcacgaaggcatgagaccaatgcgcgcagtgttcacccggcaaggacatatctttaccactggatttacacggatgtcccagagggaacttggactgtgggacccaaataattttgaggaaccggtagcacttcaggaaatggatacctcaaatggcgtgctcctcccattctacgacccagatagtagcatcgtgtacttatgcggaaagggcgatagcagcattagatattttgaaattacggatgaacctcctttcgtgcattatctgaatacgtttagctccaaggagccacagcgggggatgggattcatgcccaaacgcggccttgatgtgtccaaatgcgagattgcaagattctataagctacatgagagaaagtgcgagcccattatcatgaccgttccacggaaaagcgacctgttccaagacgacctgtatccagatactcctggtcccgagcctgcacttgaagctgacgaatggctgtcaggacaggacgccgaacccgtgcttatttcgctgcgagatggatacgtccccccaaagcatcgcgagctcagagttaccaagcgcaacattctggacgtccggcccccatctggtcccaggaggtcgcagtcagcctccgacgcaccactatcccagcagcatacactggaaacgctattagaagagatcaaggctctgagagagagagtgcaggcgcaagaacagaggattacagctctggagaacatgctctgtgagttggtcgacggcacggattag

SEQ ID NO: 225929 - DNA, 1419 bp, Artificial Sequence
  derived and/or modified sequence
atgagccggcgggtggtgcggcagagcaagttccggcacgtgttcgggcaggccgctaaagcagaccaggcatacgaggacatccgcgttagcaaagttacctgggacagctccttttgcgctgtgaatcccaagttccttgcaatcatagttgaggccggcggcggcggcgcctttatcgttttgcctctcgccaaaaccggacgagtggacaaaaattaccctttggttaccggccacaccgcccccgtcttggacattgattggtgcccccataacgataacgtgatcgccagcgcttccgacgacacaaccatcatggtgtggcagatccccgactatacgcccatgcggaatatcactgagccaatcatcactctggaggggcacagcaagagagtcgggattcttagctggcaccccacagcacgtaatgtcttacttagcgccggaggggacaacgtgataattatatggaatgtgggcaccggcgaggtgctcttatcccttgatgatatgcatccagacgtcattcactcagtttgttggaatagcaacgggtctcttcttgccaccacctgtaaggacaaaactctgcgcatcattgatcccagaaagggccaagtggtcgctgaacaggctaggccacatgagggcgccaggccccttcgagctgtgtttactgccgacggtaaacttcttagtactggctttagcaggatgagcgaacggcagcttgcactctgggaccctaacaacttcgaggagccagttgctctacaagagatggacacatcaaatggcgtactcttgcccttttatgatcccgacagtagtattgtgtacctgtgcggtaaaggggatagtagcatcagatatttcgaaataaccgatgaacccccatttgtgcactatctgaacacattcagtagtaaggagccgcagagaggaatgggttttatgccaaagagaggcttggacgtgtcaaaatgtgagattgctaggttttacaaacttcacgagagaaagtgtgagcctattataatgaccgtaccacggaagagcgatctctttcaagatgatctgtaccccgataccccagggcccgagcccgctctggaagccgatgagtggctcagcgggcaggacgccgaaccagtcctaatctccctgcgggacggatatgttccccccaagcatagggagctaagggttacgaaaaggaacattctggatgtccggcccccgtctgggccccggagatctcaatcggcaagcgatgcccccctcagccagcagcatacactggagaccttactggaggagatcaaggccctcagggagagagtgcaggcccaggagcagaggataacagctctggaaaacatgctttgcgagcttgtcgacgggacagattag

SEQ ID NO: 225930 - DNA, 1419 bp, Artificial Sequence
  derived and/or modified sequence
atgtcccgccgagtggtccgccagtctaagttccgccatgtgtttggacaggccgctaaggcagatcaggcctacgaagatatcagggtctcgaaggtgacgtgggactcttctttttgcgccgttaatcccaagttcctggctattattgtggaggctggcggtggcggtgcgttcatcgtgttgcctcttgctaaaactgggagggtggataaaaattatcctttagtcaccgggcacactgcaccggtcttggacattgactggtgcccacacaatgacaacgtaatcgcctcggcttccgacgatactactattatggtttggcagataccagactataccccaatgcgcaatattaccgaaccaattatcaccctcgagggccacagtaagcgcgtgggtatactgtcctggcacccaaccgcccgtaatgtgctcttgtcagctggcggtgacaacgtgatcataatttggaatgtgggtactggagaagtgttgctaagtttagacgatatgcaccccgacgtcatccatagcgtgtgttggaattccaacggatccttgttggccaccacctgcaaggacaagacccttcggatcattgacccacggaagggtcaggtggtggccgagagattcgctgcccacgaagggatgcgcccaatgagggccgttttcactaggcagggtcacatatttacaacagggttcacacgcatgagtcagagggaactggggctgtgggaccccaataacttcgaagaacctgtggccctccaggagatggacacctctaatggggtgctcttgcccttctacgacccagacagttccatagtgtacctgtgcgggaaaggagatagttctatccggtatttcgagattactgatgaacctccattcgtccactacttaaatactttttccagtaaagagcctcagcggggtatgggcttcatgcctaagcgagggctggatgtatctaaatgcgaaattgctagattctataagcttcacgagaggaaatgtgaacccatcattatgaccgttcctcgcaagtctgacctgtttcaggacgacctttacccggacaccccaggaccagagccagcactggaagcagatgaatggttaagtggccaggatgcggagcccgtgttgatcagtttgcgcgatgggtacgttcctccgaaacatcgcgaactgagagtaacaaagcgcaacattctggacgtcaggcctccctcgggtccacgaaggtcccaatccgcatcagacgcccctctatcccagcaacatactttggaaacactgctggaagaaatcaaagccttacgggagagagttcaagcacaggagcaacgcatcacagctcttgagaacatgctctgcgaactggtggacggtaccgactag

SEQ ID NO: 225931 - DNA, 1419 bp, Artificial Sequence
  derived and/or modified sequence
atgtctcggcgagtggttaggcagtccaaatttagacatgtgttcggtcaggctgcgaaagccgatcaggcgtacgaagatattcgggtgtccaaagtgacatgggactccagcttttgtgccgtgaacccaaaattcctggccatcatcgtcgaggcgggagggggaggtgcgtttattgtccttccgctggccaagactggcagggtggacaaaaactatcccctggtcacgggccacacagctcctgtgctggatatcgattggtgcccacataatgacaacgtcatagcatccgcctctgatgatactactatcatggtgtggcaaatccccgattacacacctatgcgcaatatcacggaaccaattatcactctggaaggtcattctaaaagggtcggtattctgtcatggcacccaactgcaagaaacgtcctcttgtccgctggaggcgataatgtaatcattatctggaacgtaggcaccggagaagtgttactctctctggatgacatgcatccagatgtcatccactctgtttgttggaactccaacgggtccctgttggcaacaacatgcaaggacaaaaccctccgcattattgatcctcgcaagggccaggtggttgccgaacaggcccgacctcacgaaggagccaggcctctaagagctgtgttcacagctgacggaaagctgctttcgacaggcttctctcgaatgagtgagaggcagctggcgttgtgggaccccaacaactttgaggagcccgtagctctgcaagaaatggacacatctaatggcgttctccttcccttctatgacccagacagctccattgtctacctctgtggcaaaggagattcttcaattcgctattttgagattacagacgagccaccgtttgttcactacctgaatacattttcttcaaaagagcctcagaggggtatgggctttatgccgaagcggggtttagacgtttccaaatgcgaaattgcacgcttctacaaactccatgaacgaaagtgcgagcctattatcatgaccgtcccacgcaaatctgatctgttccaggacgacctgtaccccgacacccccggaccagagccagcacttgaggccgacgagtggttgtctggacaggacgctgagccagtcttaatttctcttagagacgggtacgtgcctcctaaacaccgcgaactgagagtaaccaagaggaatatcctggacgtgaggcctccctccggacccagacggtcccagagtgcaagcgatgcccctctgtcccagcagcataccctggagacgctactggaagagatcaaagctctgcgagaacgagtgcaggcgcaggaacagcgaataactgcgttagaaaatatgctttgtgaactcgtcgatgggactgattag

SEQ ID NO: 225932 - DNA, 2397 bp, Artificial Sequence
  derived and/or modified sequence
ctatgagcagacgtgtggttcggcaaagcaagttccgccatgtgtttgggcaggcagcaaaggccgaccaggcctacgaggacatccgtgtgtccaaggtcacatgggacagctccttctgtgccgtcaaccccaaattcctggccattattgtggaggctggaggcgggggtgccttcatcgtcctgcctctggccaagacagggcgagtggataagaactacccactggtcactgggcacactgcccctgtgctggatattgactggtgtccacacaatgacaacgttatcgccagtgcctcagacgacaccaccatcatggtgtggcagattccagactatacccccatgcgcaacattacggaacctatcatcacacttgagggccactccaagcgtgtgggcatcctctcctggcaccctactgccaggaatgtcctgctcagtgcaggtggtgacaatgtgatcatcatctggaatgtgggcaccggggaggtgctgctgagcctggatgatatgcacccagacgtcatccacagtgtgtgctggaacagcaacggtagcctgctagccaccacctgcaaggacaagaccttgcgcatcattgaccccagaaaaggccaagtggtggcggagcaagcccggcctcacgagggcgcccgcccgctgcgggctgtcttcaccgcagacgggaagctgctcagcaccggcttcagcaggatgagtgagcggcaactcgcgctctgggacccgaacaacttcgaggagccagtggcactgcaggagatggacacaagcaacggggtcctattgcccttttacgatcccgactccagcatcgtctacctgtgtggcaagggcgacagcagcattcggtactttgagattaccgacgagccgcctttcgtgcactacctgaacacgttcagcagcaaagagccgcagcggggcatgggtttcatgcccaaaaggggactggatgtcagcaagtgtgagatcgcccggttctacaagctacacgaaagaaagtgtgaacctatcatcatgactgtgccccgcaagtcagacctcttccaggacgatctgtacccggatacgccaggcccggagccggccctagaagcggacgaatggctatccggccaggacgccgaacccgtgctcatttcgctgagggacggctatgtgccccccaagcaccgcgagctccgggtcacgaagcgcaacatcctggacgtgcgcccgccctccggcccccgccgcagccagtcggccagcgacgcccccttgtcgcagcagcacaccctggagacgctgctggaagagatcaaggccctccgcgagcgggtgcaggcccaggagcagcgcatcacggctctggagaacatgctgtgcgagctggtggacggcacggactagccccgcgcgccaggcaggcggagcggggcggggcgcacaagctcggccccgccccggcttttagtcccgaactccggaccccgccttcttgggctgggcccgggggcgggactggggagggaactccgcccctcgcgggagaccagaactcttggagcttaggggagacccacgtcgctccagcggaggctggactgcgagcctcgtctgggactcggctggagctggcctagggaggcctggggtaacctggggggctcagcaatggtgctgcacggcgaggtggtgtccccctttgtcctccgcccagggcagggaaagtgcttagtattagcgtgatgcttggggttattggagcctgagcttgacctcaaacgggtggcgatttgatgggtacccccaggctggggaaaatgacagcgcttctcctaatcagctcactggattccatcaccctgagcggtaaaccagatgggcgtcaccccagttctgcagacacatacacaacccgtttgctgcagagccggacccagtggctacacccacagcggtctgtggtagagaactctcttccttctttccaccgacaggggcgagggctgcttcctcgcggcagcccccgcgaagaaatctcgagagaactggcatgaggagttaggttcatcacaaatacacacacactgcccccaaccctctgccgttgcctctctcagaaaaacaagacgtactgaatgaaatattttactaagcgttcagtctgtgcctcctgcatgggtgggagtgaggggaacgagacccccagcctctgcaaatgctacccccaggctcctgggagacctggcgatgcactcctgggctcagggtccatcaggcagcctcttaccctagagctctctccactctgaggttcagaaggaccccaacccacaccgtaggcgttccccccaagtaaagttaggtagcaaaagcctccggt

SEQ ID NO: 225933 - protein, 352 aa, Artificial Sequence
  derived and/or modified sequence
MTEAGKLPLPLPPRLDWFVHTQMGQLAQDGVPEWFHGAISREDAENLLESQPLGSFLIRVSHSHVGYTLSYKAQSSCCHFMVKLLDDGTFMIPGEKVAHTSLDALVTFHQQKPIEPRRELLTQPCRQKDPANVDYEDLFLYSNAVAEEAACPVSAPEEASPKPVLCHQSKERKPSAEMNRITTKEATSSCPPKSPLGETRQKLWRSLKMLPERGQRVRQQLKSHLATVNLSSLLDVRRSTVISGPGTGKGSQDHSGDPTSGDRGYTDPCVATSLKSPSQPQAPKDRKVPTRKAERSVSCIEVTPGDRSWHQMVVRALSSQESKPEHQGLAEPENDQLPEEYQQPPPFAPGYC

SEQ ID NO: 225934 - DNA, 1059 bp, Artificial Sequence
  derived and/or modified sequence
atgaccgaggccgggaagctgccactccccttaccccctaggttagactggtttgtacatacacagatgggacagttggcccaggacggagtccctgagtggttccatggagccatcagccgtgaagatgccgagaacctgttggagagtcagccactgggctcgtttctgattcgtgtctctcacagccacgtggggtatacactctcttataaggcccaaagttcatgctgccactttatggttaagttgttggacgacggcaccttcatgattcccggggaaaaggtggcccatacatcgctggacgccctggtgacatttcatcagcagaagcccatagagcctagacgggagttactcacccagccatgccgccagaaggatccagccaacgtggattacgaggacctgtttctctactcaaatgctgtcgccgaggaggccgcatgtcccgtgagcgctcctgaggaggcaagtcctaagcccgtgctgtgccatcaaagtaaagagaggaagcccagcgccgagatgaaccgtattacaactaaggaggcgacaagctcgtgtccgcccaaaagtcctcttggagaaacccgccagaagctctggcgatcattgaaaatgttaccagagaggggccagcgtgtacgccagcagcttaagtcccacttggctactgtgaacttgagttccctattggatgtcagacggagcacagtcatctcgggaccaggaaccggtaagggctcccaggatcatagtggcgatccaacctctggggacaggggatatacagatccctgtgtagcgacctccttgaagtccccttcacagccacaggcaccgaaagatcgcaaggtgccgacccggaaagccgagaggtccgtgtcctgtatagaggtgacccctggtgaccgtagctggcatcagatggtagtcagagccctctcgtcacaggaatctaagcctgaacaccagggacttgccgaacctgagaatgaccagctccccgaagagtaccagcaacctcccccattcgcccctggatattgctag

SEQ ID NO: 225935 - DNA, 1059 bp, Artificial Sequence
  derived and/or modified sequence
atgacagaggccggcaagctgcccctgcccctgcccccccggctggactggtttgtgcacacccagatgggccagctggcccaggatggagtgcctgagtggttccacggggccatcagccgggaggatgctgagaacctgctggagagccagcccctgggcagcttcctgatccgggtgagccacagccacgtgggctacaccctgagctacaaggcccagagcagctgctgccacttcatggtgaagctgctggatgatggcaccttcatgatccctggagagaaggtggcccacaccagcctggatgccctggtgaccttccaccagcagaagcccatcgagccccggcgggagctgctgacccagccctgccggcagaaggaccctgccaacgtggactatgaggacctcttcctgtacagcaatgctgtggccgaggaggccgcctgccctgtgtctgcccctgaggaggccagccccaagcctgtgctgtgccaccagagcaaggagaggaagcccagcgctgagatgaaccgcatcaccaccaaggaggccaccagcagctgcccccccaagagccccctgggggagacccggcagaagctgtggaggagcctgaagatgctgcctgagcggggccagagggtgcggcagcagctgaagagccacctggccaccgtgaacctgagcagcctgctggatgtgagaagaagcaccgtcatcagcggccctggcaccgggaagggcagccaggaccacagcggggaccccaccagcggggaccggggctacacagacccctgtgtggccaccagcctgaagagccccagccagccccaggcccccaaggacaggaaggtgcccaccaggaaggccgagaggtctgtgtcctgcatcgaggtgacccctggggaccgctcctggcaccagatggtggtgcgggccctgagcagccaggagagcaagccagagcaccagggcctggccgagccagaaaatgaccagctgcctgaggagtaccagcagcccccaccatttgcccctggctactgctag

SEQ ID NO: 225936 - DNA, 1059 bp, Artificial Sequence
  derived and/or modified sequence
atgaccgaggccggcaagctgcccctgcccctgcccccccggctggactggttcgtgcatacccaaatgggccaactggctcaggacggcgtgccagagtggttccacggagccatatctcgcgaagacgctgagaacctcctggaaagtcagccactagggtctttcctgatcagggtttctcatagccatgtggggtatactctgagctacaaagcccagtctagttgctgccattttatggtaaaactgctggacgatggcacctttatgattcctggcgaaaaagtagcgcacacaagtctcgacgcactcgtgaccttccatcaacagaaacccattgagccacggcgtgagctgctgactcagccttgccggcagaaagacccagcaaacgtggattacgaagacctcttcctctactccaacgccgttgcggaggaagcagcctgccccgtttctgccccagaggaggcgagtccaaaaccggttctctgtcaccagagtaaggagcggaagccgtccgctgaaatgaatagaatcactactaaggaagctacttcatcctgtcctcctaagtcccccctcggagaaacccggcagaagctgtggcgatcccttaaaatgctgcccgagcgggggcaacgggtgcggcagcagctgaaatctcacctggcaacagtgaacttaagcagcctgctggacgtccgccggtcaaccgtcatatcaggtcctgggacgggcaaaggtagccaggatcactctggcgatcccacatctggagaccgcggttataccgatccgtgcgtagccactagtttaaagtctccaagccagcctcaggcccctaaagataggaaagtccctacacgcaaagcagaaaggagcgtgtcttgcattgaagttactcccggcgaccgcagctggcatcagatggttgttcgagctctttcaagccaggagtccaaacccgagcatcagggcctcgccgagcctgagaatgaccagctcccagaggaataccagcaacctcctcccttcgcacctgggtactgctag

SEQ ID NO: 225937 - DNA, 1059 bp, Artificial Sequence
  derived and/or modified sequence
atgacggaagccggtaaattgccactccccctgcccccaagactggactggtttgtacatacccagatgggtcagcttgcacaggacggcgtccctgaatggtttcatggcgcaatctcacgagaagatgctgagaacctgctcgagagccagccactcggttctttcctgattcgagtctcccactcccatgtgggctacaccttgtcctacaaagcccagagtagctgctgccacttcatggtaaaactcctcgatgacggtacttttatgatccctggggaaaaagtggcacacacgtcgcttgacgctctggtaacatttcaccagcagaagcccattgaaccaagacgagagctgctaacacagccctgtagacaaaaagacccggcaaatgtcgactatgaggacctctttctctacagtaacgcagtggctgaggaggcagcatgtcctgttagcgcgccagaagaggcgagtcccaagcccgttctgtgccatcagtccaaagagcgcaagccttctgcagaaatgaacagaatcaccactaaagaggccacttcctcatgccctcctaagagtccactcggcgagacacggcagaaactctggaggagcttaaaaatgctaccagaaaggggccagcgtgtgaggcagcaacttaagtcccaccttgccacagtaaatctcagtagtctgctcgacgttcgcagatcaaccgtgatcagcggacctggcacagggaagggtagtcaggaccacagcggagacccaactagcggggaccgcggatatacggacccttgtgtagcaacctccctgaagtctccaagtcagccccaggcacctaaagacaggaaggtaccgaccagaaaagctgaaaggagcgtaagctgcatcgaggtgaccccaggtgatcgtagttggcatcagatggtggtccgggcactgtcctcccaagagtcgaaacccgagcaccagggcctcgcggaaccagaaaatgaccagttgcccgaggagtaccaacagccccctccattcgctccaggatactgctag

SEQ ID NO: 225938 - DNA, 2329 bp, Artificial Sequence
  derived and/or modified sequence
gtccttcccaagaccacacccaggtccagtcattccctaggacttggcagagagctgtactcacagccaagatcacagcaaaatcagcaaagggaaaaggcatgcagagtgaagtccagaggcaaccagacagaagcatccagaatcctctcacagtggggtcacacaccccatgcttaactcccccaacaatgagttgtaacaacagtcaggtgtggtggtgtgtgcctgtagtcccagctacttgggagcctgaggcaggaggatcacttgagtccagcagttcaagactgcagtgagctatgatcataccactgcactccagcctgagtgacagagtgaaactctgtctctaaaatagggctcacctgcttgaggaaacaggaactgcctcggggcagccagccccgccccattgacgtgcagaccttgaatcgaaacccaggctcctgcaggcactggcacagctacagcgagggcctcggccatccaagggtctcccaggtgaccttccctccaccccaggaagctatgacagaggccgggaagctgcccctaccgctacccccacggctggactggtttgtgcacacccagatgggccagctggcccaagacggggtccccgagtggttccatggtgcaatctcaagagaggatgctgagaacttgctggagtcacagccactgggatcctttctcatcagggtcagtcacagccatgtgggctacacactctcctacaaagcccaaagcagctgctgccatttcatggtgaagctcttggatgatgggactttcatgatccccggggagaaggtggcccacacctcgctggacgccctggtcaccttccaccagcagaagccaattgagccgcgcagggagctgctgacacagccctgcaggcagaaggatcccgcaaacgtggattacgaggatctcttcctctactccaacgcagtggccgaggaagctgcctgcccggtgtctgcccctgaggaggcctccccaaagccagtcctgtgtcaccaatcaaaggaaaggaagccgtcagcagagatgaacagaataaccaccaaggaagccacttcctcctgccccccaaaatcccctcttggagagacccgccagaaactctggaggagcctcaaaatgctccccgagagaggccagagggtccggcagcagctaaaaagccacctcgccactgtgaacttgtcgtcactcttggatgtccggagatccacggtgatctcaggccctgggaccggaaaaggcagccaagatcactcaggggatcccacctcgggggacagaggctacacggatccctgtgtggccacatctctcaaaagcccctcacagccccaggcaccaaaagacagaaaggtccccaccaggaaggccgagaggtcggtcagctgcattgaggtgaccccaggggacaggagttggcaccaaatggtagtgagagccctatcctcccaggagtccaagccagagcaccagggcttggcagagcctgagaacgaccagctcccggaggagtaccaacaaccgccaccctttgcccctgggtactgctagagaacaggtccaccctggctctgggactcgctgccaggggctgccacactcctgaatgccttaacatttcttccatggccccacaccatggcatccgggggtcttcgggaacccgggaaatggaataaagatgtttttggggtctgttcctgcactcacccatggggtgagctggttattttagcaacaatcatcagagtgacgctgatggtttggggcaccagctatacatcagccccagtgccagaccttctattcattattttacgcctcagagcaaggccctcagggagggtcatcctccatgttttgaagaagagactgaggttcagagaggataagaggcgtgaccaaggccacagagctatgggtgtcagcaccaggatttgaagccaggtgaatccgagcccttttcccatatcatctgtttgttctgttgtctaaaagcacactgcaagccgggctcagtggctcatgcctgtagtcccagcactctgtggggccgaggcaggcagatcgcttgaggtcaggagttcgagaccagcctggccaacatggtgaaaccccgtctatactaaaaaattcaaaaattacccggacgtggtggcgcatgcctgtaatcccagctacttgggagcctgaggcgggagaattgcttgaacccgggaggcagaggttgcagtgagccgagatcgcatcactgcagtccagcctggatgacagagtgagactccatctc

SEQ ID NO: 225939 - DNA, 1059 bp, Artificial Sequence
  derived and/or modified sequence
atgaccgaggccggcaagctgcccctgcccctgccccccagactggactggttcgtgcacacccagatgggccagctggcccaggacggcgtgcccgagtggttccacggcgccatcagcagagaggacgccgagaacctgctggagagccagcccctgggcagcttcctgatcagagtgagccacagccacgtgggctacaccctgagctacaaggcccagagcagctgctgccacttcatggtgaagctgctggacgacggcaccttcatgatccccggcgagaaggtggcccacaccagcctggacgccctggtgaccttccaccagcagaagcccatcgagcccagaagagagctgctgacccagccctgcagacagaaggaccccgccaacgtggactacgaggacctgttcctgtacagcaacgccgtggccgaggaggccgcctgccccgtgagcgcccccgaggaggccagccccaagcccgtgctgtgccaccagagcaaggagagaaagcccagcgccgagatgaacagaatcaccaccaaggaggccaccagcagctgcccccccaagagccccctgggcgagaccagacagaagctgtggagaagcctgaagatgctgcccgagagaggccagagagtgagacagcagctgaagagccacctggccaccgtgaacctgagcagcctgctggacgtgagaagaagcaccgtgatcagcggccccggcaccggcaagggcagccaggaccacagcggcgaccccaccagcggcgacagaggctacaccgacccctgcgtggccaccagcctgaagagccccagccagccccaggcccccaaggacagaaaggtgcccaccagaaaggccgagagaagcgtgagctgcatcgaggtgacccccggcgacagaagctggcaccagatggtggtgagagccctgagcagccaggagagcaagcccgagcaccagggcctggccgagcccgagaacgaccagctgcccgaggagtaccagcagcccccccccttcgcccccggctactgctag

SEQ ID NO: 225940 - DNA, 2370 bp, Artificial Sequence
  derived and/or modified sequence
gtccttcccaagaccacacccaggtccagtcattccctaggacttggcagagagctgtactcacagccaagatcacagcaaaatcagcaaagggaaaaggcatgcagagtgaagtccagaggcaaccagacagaagcatccagaatcctctcacagtggggtcacacaccccatgcttaactcccccaacaatgagttgtaacaacagtcaggtgtggtggtgtgtgcctgtagtcccagctacttgggagcctgaggcaggaggatcacttgagtccagcagttcaagactgcagtgagctatgatcataccactgcactccagcctgagtgacagagtgaaactctgtctctaaaatagggctcacctgcttgaggaaacaggaactgcctcggggcagccagccccgccccattgacgtgcagaccttgaatcgaaacccaggctcctgcaggcactggcacagctacagcgagggcctcggccatccaagggtctcccaggtgaccttccctccaccccaggaagctatgacagaggccgggaagctgcccctaccgctacccccacggctggactggtttgtgcacacccagatgggccagctggcccaagacggggtccccgagtggttccatggtgcaatctcaagagaggatgctgagaacttgctggagtcacagccactgggatcctttctcatcagggtcagtcacagccatgtgggctacacactctcctacaaagcccaaagcagctgctgccatttcatggtgaagctcttggatgatgggactttcatgatccccggggagaaggtggcccacacctcgctggacgccctggtcaccttccaccagcagaagccaattgagccgcgcagggagctgctgacacagccctgcaggcagaaggatcccgcaaacgtggattacgaggatctcttcctctactccaacgcagtggccgaggaagctgcctgcccggtgtctgcccctgaggaggcctccccaaagccagtcctgtgtcaccaatcaaaggaaaggaagccgtcagcagagatgaacagaataaccaccaaggaagccacttcctcctgccccccaaaatcccctcttggagagacccgccagaaactctggaggagcctcaaaatgctccccgagagaggccagagggtccggcagcagctaaaaaagccacctcgccactgtgaacttgtcgtcactcttggatgtccggagatccacggtgatctcaggccctgggaccggaaaaggcagccaagatcactcaggggatcccacctcgggggacagaggctacacggatccctgtgtggccacatctctcaaaagcccctcacagccccaggcaccaaaagacagaaaggtccccaccaggaaggccgagaggtcggtcagctgcattgaggtgaccccaggggacaggagttggcaccaaatggtagtgagagccctatcctcccaggagtccaagccagagcaccagggcttggcagagcctgagaacgaccagctcccggaggagtaccaacaaccgccaccctttgcccctgggtactgctagagaacaggtccaccctggctctgggactcgctgccaggggctgccacactcctgaatgccttaacatttcttccatggccccacaccatggcatccgggggtcttcgggaacccgggaaatggaataaagatgtttttggggtctgttcctgcactcacccatggggtgagctggttattttagcaacaatcatcagagtgacgctgatggtttggggcaccagctatacatcagccccagtgccagaccttctattcattattttacgcctcagagcaaggccctcagggagggtcatcctccatgttttgaagaagagactgaggttcagagaggataagaggcgtgaccaaggccacagagctatgggtgtcagcaccaggatttgaagccaggtgaatccgagcccttttcccatatcatctgtttgttctgttgtctaaaagcacactgcaagccgggctcagtggctcatgcctgtagtcccagcactctgtggggccgaggcaggcagatcgcttgaggtcaggagttcgagaccagcctggccaacatggtgaaaccccgtctatactaaaaaattcaaaaattacccggacgtggtggcgcatgcctgtaatcccagctacttgggagcctgaggcgggagaattgcttgaacccgggaggcagaggttgcagtgagccgagatcgcatcactgcagtccagcctggatgacagagtgagactccatctcaaaaaataaataaataaataaaaatgaaattaaaaaataa

SEQ ID NO: 225941 - protein, 547 aa, Artificial Sequence
  derived and/or modified sequence
MYRLMSAVTARAAAPGGLASSCGRRGVHQRAGLPPLGHGWVGGLGLGLGLALGVKLAGGLRGAAPAQSPAAPDPEASPLAEPPQEQSLAPWSPQTPAPPCSRCFARAIESSRDLLHRIKDEVGAPGIVVGVSVDGKEVWSEGLGYADVENRVPCKPETVMRIASISKSLTMVALAKLWEAGKLDLDIPVQHYVPEFPEKEYEGEKVSVTTRLLISHLSGIRHYEKDIKKVKEEKAYKALKMMKENVAFEQEKEGKSNEKNDFTKFKTEQENEAKCRNSKPGKKKNDFEQGELYLREKFENSIESLRLFKNDPLFFKPGSQFLYSTFGYTLLAAIVERASGCKYLDYMQKIFHDLDMLTTVQEENEPVIYNRARFYVYNKKKRLVNTPYVDNSYKWAGGGFLSTVGDLLKFGNAMLYGYQVGLFKNSNENLLPGYLKPETMVMMWTPVPNTEMSWDKEGKYAMAWGVVERKQTYGSCRKQRHYASHTGGAVGASSVLLVLPEELDTETINNKVPPRGIIVSIICNMQSVGLNSTALKIALEFDKDRSD

SEQ ID NO: 225942 - protein, 373 aa, Artificial Sequence
  derived and/or modified sequence
MYRLMSAVTARAAAPGGLASSCGRRGVHQRAGLPPLGHGWVGGLGLGLGLALGVKLAGGLRGAAPAQSPAAPDPEASPLAEPPQEQSLAPWSPQTPAPPCSRCFARAIESSRDLLHRIKDEVGAPGIVVGVSVDGKEVWSEGLGYADVENRVPCKPETVMRIASISKSLTMVALAKLWEAGKLDLDIPVQHYVPEFPEKEYEGEKVSVTTRLLISHLSGIRHYEKDIKKVKEEKAYKALKMMKENVAFEQEKEGKSNEKNDFTKFKTEQENEAKCRNSKPGKKKNDFEQGELYLREKFENSIESLRLFKNDPLFFKPGSQFLYSTFGYTLLAAIVERASGCKYLDYMQKIFHDLDMLTTVQEENEPVIYNRAR

SEQ ID NO: 225943 - DNA, 1644 bp, Artificial Sequence
  derived and/or modified sequence
atgtatcgcctcatgtcagccgtcaccgcccgcgctgctgccccaggcggtctggctagctcctgcgggaggaggggagtacaccaaagagcaggccttccacccttgggccatgggtgggtcggtggacttgggttaggactgggtttagctctgggcgttaaattggcaggcgggctacggggggccgcacctgcccagtcccccgcagctcctgaccccgaagcgagcccactcgcagagcccccacaggagcaatccctagcaccatggtcccctcagacccctgccccaccctgttccagatgctttgcgagagctattgagagctcccgcgatctcctgcaccgaatcaaggacgaggtgggagccccagggatcgtggtgggagtctccgtagatggaaaggaagtttggtccgaaggcctgggatatgccgatgtagagaatagggtgccctgcaagccagagactgttatgagaatcgcgtccattagcaagagtctgaccatggtcgcgctggcaaagttatgggaagcgggcaaactcgacctggacatcccagtacaacactacgtcccagagtttcccgaaaaggagtacgagggagagaaagtgagtgtgaccactaggctgctgatttcccacttgagcgggatcaggcactacgagaaggacataaaaaaagttaaagaagagaaagcctacaaggccctgaagatgatgaaggagaatgtggcatttgaacaggagaaggagggaaaaagcaatgagaaaaacgacttcacaaaatttaagactgaacaggagaatgaggcgaagtgcaggaattccaaacctgggaagaaaaagaatgatttcgaacagggagagttgtacctgcgagaaaagtttgagaattctatagagagcttaaggctgttcaagaacgatcccttgttttttaaaccaggctcacaattcctttactctacattcgggtacacactgctggccgccatcgtcgaaagggccagcggctgtaagtatttggattacatgcagaagatttttcacgacttggacatgctaacgactgtgcaagaggaaaatgagccagttatctacaatcgtgccaggttctacgtttataataagaagaagagactagtcaatactccatatgtggataactcctataagtgggcaggaggcggtttccttagcacagtgggagacctgctcaaattcggaaacgctatgctttacgggtatcaggtgggcctcttcaaaaacagtaatgagaaccttctacccggctatctgaaaccggaaaccatggttatgatgtggacacccgttcctaataccgaaatgtcatgggataaagaaggcaaatatgctatggcttggggcgtcgtggaacggaaacagacctatggttcctgtcgcaaacagcgccattatgcttctcacactggcggtgctgtgggagcatcaagcgtccttctagtcctgcctgaagagctcgacactgaaactatcaacaacaaggtgcctccccgtggaataatcgtgtccatcatatgcaatatgcagagtgtgggattgaatagtacagccttaaagattgcgcttgagtttgataaagaccggtctgattag

SEQ ID NO: 225944 - DNA, 1972 bp, Artificial Sequence
  derived and/or modified sequence
cttccctccgccccgcgccgcggctggcagggtgtgcgtgagtttggtggcggccggctgtgcagagacgccatgtaccggctcatgtcagcagtgactgcccgggctgccgcccccgggggcttggcctcaagctgcggacgacgcggggtccatcagcgcgccgggctgccgcctctcggccacggctgggtcgggggcctcgggctggggctggggctggcgctcggggtgaagctggcaggtgggctgaggggcgcggccccggcgcagtcccccgcggcccccgaccctgaggcgtcgcctctggccgagccgccacaggagcagtccctcgccccgtggtctccgcagaccccggcgccgccctgctccaggtgcttcgccagagccatcgagagcagccgcgacctgctgcacaggatcaaggatgaggtgggcgcaccgggcatagtggttggagtttctgtagatggaaaagaagtctggtcagaaggtttaggttatgctgatgttgagaaccgtgtaccatgtaaaccagagacagttatgcgaattgctagcatcagcaaaagtctcaccatggttgctcttgccaaattgtgggaagcagggaaactggatcttgatattccagtacaacattatgttcccgaattcccagaaaaagaatatgaaggtgaaaaggtttctgtcacaacaagattactgatttcccatttaagtggaattcgtcattatgaaaaggacataaaaaaggtgaaagaagagaaagcttataaagccttgaagatgatgaaagagaatgttgcatttgagcaagaaaaagaaggcaaaagtaatgaaaagaatgattttactaaatttaaaacagagcaggagaatgaagccaaatgccggaattcaaaacctggcaagaaaaagaatgattttgaacaaggcgaattatatttgagagaaaagtttgaaaattcaattgaatccctaagattatttaaaaatgatcctttgttcttcaaacctggtagtcagtttttgtattcaacttttggctataccctactggcagccatagtagagagagcttcaggatgtaaatatttggactatatgcagaaaatattccatgacttggatatgctgacgactgtgcaggaagaaaacgagccagtgatttacaatagagcaagattttatgtttacaataaaaagaaacgtcttgtcaacacaccttacgtggataactcctataaatgggctggtggtggatttctgtctacagtgggtgaccttctgaaatttgggaatgcaatgctttatggttaccaagttgggctgtttaagaactcaaatgaaaatcttttacctggatacctcaaaccagaaacaatggttatgatgtggaccccagtccctaacacagagatgtcttgggataaagagggtaaatatgcaatggcgtggggtgttgtggaaaggaaacaaacgtatggttcgtgtagaaagcaacggcattatgcttcacatactggaggggcagtgggtgccagtagtgtcctgctggtccttcctgaagaactggatacagagactataaataacaaggttcccccaagaggaatcattgtttctatcatatgtaacatgcaatctgttggcctcaatagcaccgctttgaagattgcccttgaatttgataaagacagatcagactgataaccttaacaccataggtgcaaaatgagttgttctgaggtttttttgaaacattaaagttccaaaacatgacatttttaagaataaatttgaaatagagtataactgaatgcagagaattatgtacctctaattgcttaattttgtaatggtcttttattgtagaattggttctttatactcagggaagtaattatattgtttttactttttgaaaaaagtgttaactcttgaaataaaatattctgataaaata

SEQ ID NO: 225945 - DNA, 1644 bp, Artificial Sequence
  derived and/or modified sequence
atgtaccgcctgatgtctgctgtgacagcccgggctgctgcccctgggggcctggccagcagctgtggccggcggggcgtgcaccagagagctggcctgccccccctgggccacggctgggtgggcggcctgggcctgggcctgggcctggccctgggcgtgaagctggccggcggcctgcggggagctgccccagcccagagccctgctgccccagaccctgaggccagccccctggccgagcccccccaggagcagagcctggccccctggagcccccagaccccagccccaccctgcagccgctgctttgcccgggccatcgagagcagccgggacctgctgcaccgcatcaaggatgaggtgggcgcccctggcatcgtggtgggcgtgtctgtggatggcaaggaggtgtggagcgagggcctgggctatgcagatgtggagaacagagtgccctgcaagccagagaccgtgatgagaattgccagcatcagcaagagcctgaccatggtggccctggccaagctgtgggaggccggcaagctggacctggacatccctgtgcagcactacgtgcctgagttccctgagaaggagtatgaaggagagaaggtgtctgtgaccacccggctgctgatcagccacctgagcggcatccgccactatgagaaggacatcaagaaggtgaaggaggagaaggcctacaaggccctgaagatgatgaaggaaaatgtggcctttgagcaggagaaggagggcaagagcaatgagaagaatgacttcaccaagttcaagacagagcaggagaatgaggccaagtgcaggaacagcaagccaggcaagaagaagaatgactttgagcagggcgagctgtacctgcgggagaagtttgaaaattccattgagagcctgcggctcttcaagaatgaccccctcttcttcaagccaggcagccagttcctgtacagcaccttcggctacaccctgctggccgccatcgtggagcgggccagcggctgcaagtacctggactacatgcagaagatcttccatgacctggacatgctgaccaccgtgcaggaggagaatgagcccgtcatctacaacagagcccgcttctacgtgtacaacaagaagaagaggctggtgaacaccccctacgtggacaacagctacaagtgggccggcggcggcttcctgagcacagtgggggacctgctgaagtttggaaatgccatgctgtatggctaccaggtgggcctcttcaagaacagcaatgaaaacctgctgcccggctacctgaagccagagaccatggtgatgatgtggacccctgtgcccaacacagagatgtcctgggacaaggagggcaagtatgccatggcctggggcgtggtggagaggaagcagacctacggcagctgcaggaagcagaggcactacgccagccacactggaggagctgtgggcgccagctctgtgctgctggtgctgcctgaggagctggacacagagaccatcaacaacaaggtgcccccccggggcatcatcgtgtccatcatctgcaacatgcagagcgtgggcctgaacagcacagccctgaagatcgccctggagtttgacaaggacagaagtgactag

SEQ ID NO: 225946 - DNA, 1644 bp, Artificial Sequence
  derived and/or modified sequence
atgtaccggctgatgagcgccgtgaccgcccgggccgccgcccccggaggcttggcctctagctgtgggcgcagaggtgtgcatcagagagccggtttgcctcctctgggacatgggtgggtgggcggacttggattggggcttgggctggcccttggggtgaaattggctggtgggctccgaggcgcggcccccgctcagtctccggctgctcctgacccagaagcctctcctctggccgaacctccacaggagcagtccctggccccctggagtccacaaacccccgcccctccatgttcgcgttgttttgcgcgtgccatcgaatcctcgagagacttgctgcacagaattaaggacgaggtcggggccccggggatagtcgtaggggtttccgtagacggaaaagaagtctggtctgagggtctcgggtatgcggatgtcgaaaatcgcgtgccttgtaaacccgagaccgtgatgaggattgcgtccatctcgaaatctttgaccatggtggccttggccaaactttgggaggcggggaagctggacctggatatacccgtgcagcactacgtgcctgagttccctgagaaagaatatgaaggagagaaggtgtccgtgacaacaagattgctgatctcccatctgtcagggatccggcattacgaaaaggacataaaaaaggtgaaggaggagaaggcgtacaaggctctcaagatgatgaaagaaaacgtcgccttcgagcaagaaaaagaggggaaaagcaatgaaaagaatgactttacaaaatttaaaactgagcaggaaaatgaggctaaatgtagaaactcgaagccaggcaagaagaagaatgacttcgaacagggcgagctgtacctgcgggaaaagtttgaaaacagtatcgaaagtctgcgactcttcaaaaatgaccccttattctttaagccagggtcccagtttctgtactctacatttgggtatactctgctggctgccatcgtcgagagggcgagcgggtgtaagtacctcgactacatgcagaagatctttcacgacctggacatgctgaccacggtgcaggaggaaaatgagcctgttatttacaatcgggcacgcttctacgtttacaataaaaaaaagcggttggtgaacactccatatgtcgacaactcttataagtgggccggtggtggtttcttatctacggtgggagatctgctgaagtttggaaacgctatgctgtacgggtatcaagtcgggctgtttaaaaattcaaatgaaaatctcctcccgggatacctgaaacctgaaaccatggtgatgatgtggactccagttcctaacaccgaaatgtcatgggataaggagggaaagtacgccatggcctggggtgttgtggaaaggaaacagacttacggctcatgtagaaagcagagacactacgcaagccatacggggggagcagtaggagcctccagcgtgcttctggtactaccagaggaactcgataccgagactatcaataataaggtgccccctcgcggaatcattgttagtattatttgtaacatgcagagcgtgggcctgaactctactgctctgaagattgccctcgagtttgacaaagatcgttcagattag

SEQ ID NO: 225947 - DNA, 1644 bp, Artificial Sequence
  derived and/or modified sequence
atgtatcgtctgatgtccgctgtgacagccagggctgctgcccctggcggtctggcttcatcttgcggcagaaggggagtccaccagagagcgggacttcctccactcgggcacggatgggtcggcggactcgggctgggtctgggactagcccttggcgttaaattggcaggtggactcagaggagcggcacccgcacagagtcccgctgcccctgacccagaggccagtcctttggccgagccccctcaggaacaaagtctcgctccatggtccccccagacaccagctccaccttgcagccgctgcttcgccagggccattgaaagctctcgggatttattgcaccggattaaggacgaggtgggcgcacccggaatcgtggtcggggtatctgtggacgggaaggaggtgtggtccgagggtttggggtacgcagatgtggagaatcgtgtcccatgcaaacctgagaccgttatgcggatcgctagcattagcaaatccctgacaatggtagccctggccaaactttgggaagcaggcaaacttgatctagacatccctgtccagcactacgtgcctgaatttccagagaaggagtatgagggagagaaagtttccgtgacgacacgcctcctcatcagccacttaagtggcattcgccattatgaaaaggatatcaaaaaggttaaggaggaaaaagcctataaggcattaaagatgatgaaagagaacgtggccttcgagcaagagaaggagggcaaaagtaacgaaaagaatgatttcactaaattcaaaacagaacaggagaacgaggccaagtgtaggaattcgaaaccagggaaaaagaaaaacgactttgaacagggagaactgtacctcagggaaaagttcgagaacagtatcgaatctttaaggctgtttaagaatgacccactgttctttaaaccgggaagccagtttctctacagcacttttgggtacacactcctggcggctattgtcgagagagccagcggctgtaagtatctcgattatatgcagaagatttttcatgacttggatatgcttactacggtgcaggaagaaaatgagcccgtgatatacaaccgggcacgcttctacgtctacaacaagaaaaagcgtctggtgaacactccttatgtcgacaactcctacaaatgggcaggcggagggttcttgtccacagtgggcgacctccttaagttcggaaacgcaatgttgtatggttatcaggtcggtttgtttaaaaactctaacgagaatctccttcctggatacttgaagcccgagacaatggtgatgatgtggacaccagtgcccaacaccgagatgagctgggataaagagggtaagtacgccatggcttggggcgtggtcgagcgaaaacagacatacggtagctgtcgtaagcaacgccactatgcctctcacactggtggggcagtcggagccagttcggtgctgctggttctccctgaagagctggacacagagaccatcaataataaagtaccccctcgcggaattatagtatctatcatttgtaatatgcagagtgttgggcttaactcaacagctttgaagattgcgttggaattcgacaaagatcgctcagattag

SEQ ID NO: 225948 - DNA, 1644 bp, Artificial Sequence
  derived and/or modified sequence
atgtacagactgatgagcgccgtgaccgccagagccgccgcccccggcggcctggccagcagctgcggcagaagaggcgtgcaccagagagccggcctgccccccctgggccacggctgggtgggcggcctgggcctgggcctgggcctggccctgggcgtgaagctggccggcggcctgagaggcgccgcccccgcccagagccccgccgcccccgaccccgaggccagccccctggccgagcccccccaggagcagagcctggccccctggagcccccagacccccgcccccccctgcagcagatgcttcgccagagccatcgagagcagcagagacctgctgcacagaatcaaggacgaggtgggcgcccccggcatcgtggtgggcgtgagcgtggacggcaaggaggtgtggagcgagggcctgggctacgccgacgtggagaacagagtgccctgcaagcccgagaccgtgatgagaatcgccagcatcagcaagagcctgaccatggtggccctggccaagctgtgggaggccggcaagctggacctggacatccccgtgcagcactacgtgcccgagttccccgagaaggagtacgagggcgagaaggtgagcgtgaccaccagactgctgatcagccacctgagcggcatcagacactacgagaaggacatcaagaaggtgaaggaggagaaggcctacaaggccctgaagatgatgaaggagaacgtggccttcgagcaggagaaggagggcaagagcaacgagaagaacgacttcaccaagttcaagaccgagcaggagaacgaggccaagtgcagaaacagcaagcccggcaagaagaagaacgacttcgagcagggcgagctgtacctgagagagaagttcgagaacagcatcgagagcctgagactgttcaagaacgaccccctgttcttcaagcccggcagccagttcctgtacagcaccttcggctacaccctgctggccgccatcgtggagagagccagcggctgcaagtacctggactacatgcagaagatcttccacgacctggacatgctgaccaccgtgcaggaggagaacgagcccgtgatctacaacagagccagattctacgtgtacaacaagaagaagagactggtgaacaccccctacgtggacaacagctacaagtgggccggcggcggcttcctgagcaccgtgggcgacctgctgaagttcggcaacgccatgctgtacggctaccaggtgggcctgttcaagaacagcaacgagaacctgctgcccggctacctgaagcccgagaccatggtgatgatgtggacccccgtgcccaacaccgagatgagctgggacaaggagggcaagtacgccatggcctggggcgtggtggagagaaagcagacctacggcagctgcagaaagcagagacactacgccagccacaccggcggcgccgtgggcgccagcagcgtgctgctggtgctgcccgaggagctggacaccgagaccatcaacaacaaggtgccccccagaggcatcatcgtgagcatcatctgcaacatgcagagcgtgggcctgaacagcaccgccctgaagatcgccctggagttcgacaaggacagaagcgactag

SEQ ID NO: 225949 - protein, 434 aa, Artificial Sequence
  derived and/or modified sequence
MPNRKASRNAYYFFVQEKIPELRRRGLPVARVADAIPYCSSDWALLREEEKEKYAEMAREWRAAQGKDPGPSEKQKPVFTPLRRPGMLVPKQNVSPPDMSALSLKGDQALLGGIFYFLNIFSHGELPPHCEQRFLPCEIGCVKYSLQEGIMADFHSFINPGEIPRGFRFHCQAASDSSHKIPISNFERGHNQATVLQNLYRFIHPNPGNWPPIYCKSDDRTRVNWCLKHMAKASEIRQDLQLLTVEDLVVGIYQQKFLKEPSKTWIRSLLDVAMWDYSSNTRCKWHEENDILFCALAVCKKIAYCISNSLATLFGIQLTEAHVPLQDYEASNSVTPKMVVLDAGRYQKLRVGSSGFSHFNSSNEEQRSNTPIGDYPSRAKISGQNSSVRGRGITRLLESISNSSSNIHKFSNCDTSLSPYMSQKDGYKSFSSLS

SEQ ID NO: 225950 - DNA, 1305 bp, Artificial Sequence
  derived and/or modified sequence
atgcctaataggaaagccagcagaaacgcttactatttttttgtgcaggaaaaaattcccgaactaaggcgcaggggcttgccggtcgcaagagtcgctgatgccatcccttactgttccagcgactgggccctgctgcgggaggaggaaaaagagaaatacgccgagatggcacgggaatggagggcggcccaggggaaggatcccggtccttctgagaagcagaaaccagtgttcaccccgctccgccgaccaggaatgctagtgcctaagcaaaacgtttcccccccggacatgagtgctctgtctcttaagggagaccaggcactgcttggaggaatattctatttcctgaacatctttagccatggagagctgccaccacattgtgagcagcgcttccttccatgcgagatcggatgtgtaaagtattctctgcaagaagggataatggcagacttccatagctttattaatcccggagaaattccgcgcggttttaggttccattgccaggctgcttctgacagcagccataaaatacctatttcaaattttgagagggggcataaccaagccaccgtgctgcagaacctctatcggttcattcatccaaatcccggaaattggcctcccatttattgtaagagcgatgacaggacacgcgtgaactggtgcctcaaacatatggcaaaagcctccgagatcaggcaggacctgcagttattgactgtggaggatctggtcgtgggcatctatcaacagaagttcttgaaggaacctagtaagacttggatacggtccctgctcgacgttgccatgtgggattatagcagtaatacacggtgtaagtggcacgaggagaacgatatactcttctgcgccctggccgtgtgtaagaagattgcttattgcatcagtaattccctagcaaccctgttcggaatccagctgacagaggcacatgtacccctgcaagactatgaggctagcaactcagtgactccaaagatggtagtcctggatgctgggcgataccagaagctaagagtcggatccagcggatttagtcatttcaattctagtaatgaggaacaacggagcaatacccccataggcgactatccttcccgcgcgaagatttcaggccagaattcctctgttaggggtcgaggtataactagactgttagagtctatcagtaactcttcttctaacatacacaaattctcaaattgtgataccagcctaagcccctatatgtctcagaaagatggctacaagagcttttctagcttaagctag

SEQ ID NO: 225951 - DNA, 1305 bp, Artificial Sequence
  derived and/or modified sequence
atgcccaacaggaaggccagcagaaatgcctactacttctttgtgcaggagaagatccctgagctgcggcggcggggcctgcctgtggcccgggtggctgatgccatcccctactgcagcagtgactgggccctgctgcgggaggaggagaaggagaagtatgcagagatggcccgggagtggagggctgcccagggcaaggaccccggccccagcgagaagcagaagcctgtgttcacccccctgcggcggcccggcatgctggtgcccaagcagaatgtgagccccccagacatgtctgccctgagcctgaagggggaccaggccctgctgggcggcatcttctacttcctgaacatcttcagccatggagagctgcccccccactgtgagcagcgcttcctgccctgtgaaattggctgtgtgaagtacagcctgcaggagggcatcatggctgacttccacagcttcatcaaccctggagagatcccccggggcttccgcttccactgccaggccgccagtgacagcagccacaagatccccatcagcaactttgagcggggccacaaccaggccaccgtgctgcagaacctgtaccgcttcatccaccccaaccctggcaactggccacccatctactgcaagagtgatgacaggaccagggtgaactggtgcctgaagcacatggccaaggccagcgagatccggcaggacctgcagctgctgactgtggaggacctggtggtgggcatctaccagcagaagttcctgaaggagcccagcaagacctggatccgcagcctgctggatgtggccatgtgggactacagcagcaacacccgctgcaagtggcatgaggagaatgacatcctcttctgtgccctggccgtgtgcaagaagatcgcctactgcatcagcaacagcctggccaccctgtttggcatccagctgacagaggcccacgtgcccctgcaggactatgaggccagcaacagcgtgacccccaagatggtggtgctggatgctggccgctaccagaagctgcgggtgggcagcagcggcttcagccacttcaacagcagcaatgaggagcagaggagcaacacccccatcggggactaccccagccgggccaagatcagcggccagaacagctctgtgcggggccggggcatcacccggctgctggagagcatcagcaacagcagcagcaacatccacaagttcagcaactgtgacaccagcctgagcccctacatgagccagaaggatggctacaagagcttcagcagcctgtcctag

SEQ ID NO: 225952 - DNA, 1908 bp, Artificial Sequence
  derived and/or modified sequence
agagcacttggcacctgcgacggcgctctccccccacctcacccgcaaggcggcacgagccggaatcttccagtctcaggctgtttgttcccccgcggggcaatgcgactgcgcgtcgcttcctgattggccgagagttgcgggctgcgtgcgcaggcgcctacctctgttacttagggcgggagcccggcgagggcgccggtgctttgttctgtctgaggccaggaagtttgaccgcgctgccatgccgaaccgtaaggccagccggaatgcttactatttcttcgtgcaggagaagatccccgaactacggcgacgaggcctgcctgtggctcgcgttgctgatgccatcccttactgctcctcagactgggcgcttctgagggaggaagaaaaggagaaatacgcagaaatggctcgagaatggagggccgctcagggaaaggaccctgggccctcagagaagcagaaacctgttttcacaccactgaggaggccaggcatgcttgtaccaaagcagaatgtttcacctccagatatgtcagctttgtctttaaaaggtgatcaagctctccttggaggcattttttattttttgaacatttttagccatggcgagctacctcctcattgtgaacagcgcttcctcccttgtgaaattggctgtgttaagtattctctccaagaaggtattatggcagatttccacagttttataaatcctggtgaaattccacgaggatttcgatttcattgtcaggctgcaagtgattctagtcacaagattcctatttcaaattttgaacgtgggcataaccaagcaactgtgttacaaaacctttatagatttattcatcccaacccagggaactggccacctatctactgcaagtctgatgatagaaccagagtcaactggtgtttgaagcatatggcaaaggcatcagaaatcaggcaagatctacaacttctcactgtagaggaccttgtagtggggatctaccaacaaaaatttctcaaggagccctctaagacttggattcgaagcctcctagatgtggccatgtgggattattctagcaacacaaggtgcaagtggcatgaagaaaatgatattctcttctgtgctttagctgtttgcaagaagattgcgtactgcatcagtaattctctggccactctctttggaatccagctcacagaggctcatgtaccactacaagattatgaggccagcaatagtgtgacacccaaaatggttgtattggatgcagggcgttaccagaagctaagggttgggagttcaggattctctcatttcaactcttctaatgaggaacaaagatcaaacacacccattggtgactacccatctagggcaaaaatttctggccaaaacagcagcgttcggggaagaggaattacccgcttactagagagcatttccaattcttccagcaatatccacaaattctccaactgtgacacttcactctcaccttacatgtcccaaaaagatggatacaaatctttctcttccttatcttaatgatggtactcttttcaatttctgaaaacagtaacaggcccaacttccttcttactacagtcatattaaacagatcacatcaatgacaaatgtcactactataaaaactacttaatttgtaaggaaattgtttcatagatttaaaaaaattgtggttggagagcatcttggcatttgtgctttttttcttgagggattgttctgcttcctggctgtatgatgggtatatcattaaagtttggagtcctatatgaacaaaactgacatttttagagttgtacttttgggaatgttatagattgatcattctttctcctgataataaaggtattgaatatctgttatgaaaggttctaaaa

SEQ ID NO: 225953 - DNA, 1305 bp, Artificial Sequence
  derived and/or modified sequence
atgcccaaccggaaggccagccggaacgcctactacttcttcgtgcaggaaaaaatccctgaactgcggaggcgcggccttcctgtggcgcgggtagccgatgctataccttactgttcttctgactgggctttgctgagagaggaggagaaggaaaagtacgcggaaatggctagggaatggcgggccgcccagggaaaagaccccgggcctagcgagaaacagaagcctgtcttcacccccctccggcgccccggaatgctcgtgcctaaacagaatgtttcaccacctgacatgtcagctctaagcctgaagggagaccaggccctgctgggcgggatcttctacttcctcaacatcttctcacacggagagttgcctcctcattgtgagcagcggtttttaccttgtgagatcggctgcgttaagtattcattgcaggagggtatcatggctgatttccacagctttattaaccccggcgagatccccagaggcttccggttccactgtcaggctgcgagcgatagctcacataaaatcccaatctccaactttgaaagaggccataatcaggctaccgttttgcaaaacctttaccggttcatacaccctaatcctggcaattggccccccatctactgtaagtccgatgacagaacaagagtcaattggtgtctgaagcatatggctaaagccagtgagattcgccaagacttgcaacttctcactgttgaggacctggtggtgggtatttatcagcaaaagtttctaaaggaacctagcaagacttggattaggagtctccttgatgttgctatgtgggactacagttcaaacacccgttgcaaatggcatgaagaaaatgatattctgttttgcgcgctcgcagtgtgtaagaagatcgcatattgcatctccaattctttagctaccctgtttggcattcaactcacagaggctcacgtccccctgcaggactacgaggcttccaattctgttactcccaagatggtcgttctagatgcaggacggtaccagaagctacgggtgggaagctccggattctctcacttcaattcctccaatgaagagcagagaagcaacacgccaatcggcgactatccctcgagggccaagatttccgggcagaactctagcgtccggggccgggggataacaagattattagagtccatctccaacagcagctctaacatacataagttctcaaactgcgacaccagcctatcaccttacatgagtcagaaggacggttacaagtctttttcctccctgagctag

SEQ ID NO: 225954 - DNA, 1305 bp, Artificial Sequence
  derived and/or modified sequence
atgccaaaccgaaaagcgagccgtaatgcctattacttcttcgtgcaggaaaaaatccccgagttgcgaaggcgtggactccctgtcgccagagtcgccgatgcaatcccttattgctcctcagattgggctcttcttcgggaggaggaaaaggagaagtatgcagaaatggcacgcgaatggcgcgctgcgcaagggaaagacccaggaccgtccgaaaaacaaaagcccgtcttcactcctctccggaggcccggaatgctggtgcctaaacagaatgtgtccccccctgacatgtcagccttgtcattgaagggggatcaggccttactgggcggaattttttattttctcaacattttctcccatggggaactgccacctcattgcgaacaacgattcctgccctgtgagatcgggtgcgtgaagtactctctccaggaggggattatggccgatttccactcatttatcaatcctggtgagattcctcgcggatttcgcttccattgtcaagcagcttccgactcaagtcacaaaattcctattagcaactttgaacggggacataaccaggcaaccgtcctccagaacctgtatcggtttattcatcctaaccctggtaactggccacccatttactgcaagtccgatgatcggaccagagtaaattggtgtcttaagcatatggcaaaagcttccgaaatccggcaggacctccagttgttgaccgttgaggacctcgtggtgggtatttatcaacagaaatttctgaaggagccctctaagacctggattagatctctgttggacgtggctatgtgggattattcatcaaacacacgttgcaaatggcacgaggagaatgacatattgttctgcgcactggccgtgtgtaagaagatcgcttactgtatcagcaatagcttggcaaccctatttggcatccagttgactgaggcccacgtcccactgcaggattatgaggcatccaattctgtcacgccaaagatggtcgtgttagatgccggtcgatatcagaagctgcgggtcggatctagcggatttagccatttcaactcctcgaacgaggagcaaaggtcgaatactcccatcggtgactacccatcacgagctaagatctcagggcaaaattcctctgtgcgcggtagaggtattacccggctcctcgagtctatttctaacagctcaagtaatattcacaaattctctaactgcgacacctccctgtcaccctatatgtcacaaaaggatgggtacaagtcattctcatccttgagttag

SEQ ID NO: 225955 - DNA, 1305 bp, Artificial Sequence
  derived and/or modified sequence
atgcccaacagaaaggccagcagaaacgcctactacttcttcgtgcaggagaagatccccgagctgagaagaagaggcctgcccgtggccagagtggccgacgccatcccctactgcagcagcgactgggccctgctgagagaggaggagaaggagaagtacgccgagatggccagagagtggagagccgcccagggcaaggaccccggccccagcgagaagcagaagcccgtgttcacccccctgagaagacccggcatgctggtgcccaagcagaacgtgagcccccccgacatgagcgccctgagcctgaagggcgaccaggccctgctgggcggcatcttctacttcctgaacatcttcagccacggcgagctgcccccccactgcgagcagagattcctgccctgcgagatcggctgcgtgaagtacagcctgcaggagggcatcatggccgacttccacagcttcatcaaccccggcgagatccccagaggcttcagattccactgccaggccgccagcgacagcagccacaagatccccatcagcaacttcgagagaggccacaaccaggccaccgtgctgcagaacctgtacagattcatccaccccaaccccggcaactggccccccatctactgcaagagcgacgacagaaccagagtgaactggtgcctgaagcacatggccaaggccagcgagatcagacaggacctgcagctgctgaccgtggaggacctggtggtgggcatctaccagcagaagttcctgaaggagcccagcaagacctggatcagaagcctgctggacgtggccatgtgggactacagcagcaacaccagatgcaagtggcacgaggagaacgacatcctgttctgcgccctggccgtgtgcaagaagatcgcctactgcatcagcaacagcctggccaccctgttcggcatccagctgaccgaggcccacgtgcccctgcaggactacgaggccagcaacagcgtgacccccaagatggtggtgctggacgccggcagataccagaagctgagagtgggcagcagcggcttcagccacttcaacagcagcaacgaggagcagagaagcaacacccccatcggcgactaccccagcagagccaagatcagcggccagaacagcagcgtgagaggcagaggcatcaccagactgctggagagcatcagcaacagcagcagcaacatccacaagttcagcaactgcgacaccagcctgagcccctacatgagccagaaggacggctacaagagcttcagcagcctgagctag

SEQ ID NO: 225956 - protein, 531 aa, Artificial Sequence
  derived and/or modified sequence
MSLAAYCVICCRRIGTSTSPPKSGTHWRDIRNIIKFTGSLILGGSLFLTYEVLALKKAVTLDTQVVEREKMKSYIYVHTVSLDKGENHGIAWQARKELHKAVRKVLATSAKILRNPFADPFSTVDIEDHECAVWLLLRKSKSDDKTTRLEAVREMSETHHWHDYQYRIIAQACDPKTLIGLARSEESDLRFFLLPPPLPSLKEDSSTEEELRQLLASLPQTELDECIQYFTSLALSESSQSLAAQKGGLWCFGGNGLPYAESFGEVPSATVEMFCLEAIVKHSEISTHCDKIEANGGLQLLQRLYRLHKDCPKVQRNIMRVIGNMALNEHLHSSIVRSGWVSIMAEAMKSPHIMESSHAARILANLDRETVQEKYQDGVYVLHPQYRTSQPIKADVLFIHGLMGAAFKTWRQQDSEQAVIEKPMEDEDRYTTCWPKTWLAKDCPALRIISVEYDTSLSDWRARCPMERRSLLSISSGIVEGLESPLHSEATNFLGSSELLVLGIGQWFGYHIAWEVFLSKRCCWKPLRSQK

SEQ ID NO: 225957 - protein, 654 aa, Artificial Sequence
  derived and/or modified sequence
MSLAAYCVICCRRIGTSTSPPKSGTHWRDIRNIIKFTGSLILGGSLFLTYEVLALKKAVTLDTQVVEREKMKSYIYVHTVSLDKGENHGIAWQARKELHKAVRKVLATSAKILRNPFADPFSTVDIEDHECAVWLLLRKSKSDDKTTRLEAVREMSETHHWHDYQYRIIAQACDPKTLIGLARSEESDLRFFLLPPPLPSLKEDSSTEEELRQLLASLPQTELDECIQYFTSLALSESSQSLAAQKGGLWCFGGNGLPYAESFGEVPSATVEMFCLEAIVKHSEISTHCDKIEANGGLQLLQRLYRLHKDCPKVQRNIMRVIGNMALNEHLHSSIVRSGWVSIMAEAMKSPHIMESSHAARILANLDRETVQEKYQDGVYVLHPQYRTSQPIKADVLFIHGLMGAAFKTWRQQDSEQAVIEKPMEDEDRYTTCWPKTWLAKDCPALRIISVEYDTSLSDWRARCPMERKSIAFRSNELLRKLRAAGVGDRPVVWISHSMGGLLVKKMLLEASTKPEMSTVINNTRGIIFYSVPHHGSRLAEYSVNIRYLLFPSLEVKELSKDSPALKTLQDDFLEFAKDKNFQVLNFVETLPTYIGSMIKLHVVPVESADLGIGDLIPVDVNHLNICKPKKKDAFLYQRTLQFIREALAKDLEN

SEQ ID NO: 225958 - DNA, 1596 bp, Artificial Sequence
  derived and/or modified sequence
atgtctcttgcagcctattgtgtaatctgctgtcgccgtatcggcacaagcacatcacctcctaaatcgggaactcactggcgggatataaggaatatcatcaagttcacaggcagcttaatcctcgggggatccctgttcctgacgtatgaggtgctggccttgaaaaaagctgtgactcttgatacgcaggtcgtggagcgtgaaaagatgaagtcttatatttatgttcacactgtaagcttggacaagggagagaaccacggcattgcctggcaagccaggaaagagctgcacaaagccgtaagaaaggtcctcgcaacatcggccaaaatccttcggaatccctttgccgaccccttctctactgtcgacatcgaggatcacgaatgcgccgtttggctgctgctccggaaatcgaagagcgacgataagacgactcgtctggaggctgtgcgtgagatgtccgaaacgcatcactggcatgattaccagtaccggatcatcgcccaggcttgtgaccccaagacactaattgggcttgcccgttccgaagagagtgatctcagattcttcctgcttcccccacccttgccttcactcaaggaggactccagtaccgaggaggagctgagacagctgttggcttccctgcctcagaccgaactggacgaatgtatccagtacttcaccagcctggccctgagcgaatccagtcagagtctcgcggctcagaaaggcggattgtggtgcttcgggggaaatggcctcccctacgccgagtcttttggggaagtcccatccgcaacggttgaaatgttctgcctggaagctatcgtgaaacacagcgagatcagcacccactgcgataagatcgaggcaaatggaggtctccagttactgcagaggctgtatcgcttgcacaaagactgccccaaagtccaacggaacataatgcgcgtgatcggtaatatggcccttaacgaacatctccattccagcattgtgcgttcaggttgggtatcaataatggccgaggctatgaaatctccacacatcatggaaagttcacatgctgccagaattctggctaatcttgaccgggagacagttcaggaaaagtaccaagacggggtgtatgtgctgcatccccagtatcgtactagccaacccattaaagctgatgttttgtttattcacgggttgatgggggcagcgttcaagacttggcgccaacaggactccgaacaagccgtgatagaaaagcccatggaagatgaggacaggtataccacatgttggcctaaaacatggctcgctaaagactgccctgcgttgcgcataatctcagtggagtacgacacaagccttagtgattggcgcgctagatgccccatggaaaggcgtagtttgttatcaatcagttccggtatcgtggaggggttggagtctccactccacagcgaggcgaccaactttttggggtcatcggagctgctcgtgcttggtattggccagtggttcggttatcatatcgcctgggaagtattcctttcaaaacgctgttgctggaaacccttgcgcagccagaaatag

SEQ ID NO: 225959 - DNA, 1596 bp, Artificial Sequence
  derived and/or modified sequence
atgagcctcgctgcatactgtgtgatttgctgccgccgaattggcacttctacctccccaccgaaaagcggcacccactggcgtgacataagaaacatcataaaattcacaggctctttgattctggggggttcactgtttcttacctacgaggtgctggcactgaaaaaagccgttaccctcgatactcaggtcgtcgagcgggagaagatgaaatcttatatatacgttcacacagtgagtctcgataaaggcgaaaaccacggaatcgcctggcaagctagaaaggagctacacaaagctgtgcggaaagtgctggctactagtgcaaagatactgcgaaatccgtttgccgatcctttctccaccgtcgatatcgaagatcacgagtgcgctgtctggctgctcctgcggaagagtaagagcgatgacaagactacgcggttagaggctgtgcgagaaatgagtgagacccatcattggcacgactaccagtatagaatcattgcccaagcgtgcgatccgaagacgctgattggcctggcacgcagcgaagagagcgatctgcgtttcttcctgttgccaccgcctctgccaagcctcaaggaggactcctcgactgaagaggaactgcggcagttgctagctagcctgcctcagacagaactggacgagtgcattcagtactttacgagtcttgccctgtcagagagtagtcagagccttgccgctcagaagggcggtctgtggtgcttcggaggtaatggcttgccttacgcagagagcttcggcgaagtgcctagcgctactgtggagatgttctgtctcgaagcaatcgtcaaacattctgagatatccactcactgcgataagattgaggccaacgggggactccagctgttacagcggctctacagactgcacaaggactgtcctaaagtgcaacggaacataatgagagttatcggaaatatggccctgaacgagcacctgcattctagcatcgtccggtccggatgggtttccattatggccgaagccatgaagtcgccacacataatggagtctagtcatgccgctagaattctcgctaatctcgatcgggagactgttcaggagaagtatcaggacggcgtgtatgttttgcaccctcagtaccgcacaagccagccaatcaaggccgatgtgctgtttattcacgggctgatgggtgcagcctttaagacctggcgccagcaggacagtgaacaggccgttattgagaagcccatggaggacgaggaccgctataccacgtgctggcccaagacctggctggcgaaggactgtcccgcactgaggatcattagcgtggagtatgatacatctctgtcagactggcgcgctcgctgcccaatggaacggcgtagcttgctgagcatatcatccggcattgtagaagggctggagagtccactgcattcagaggctaccaactttctcggatccagtgaacttctggtgcttggcattgggcagtggttcgggtaccacatcgcatgggaagtgttcctgagtaaacgctgctgttggaagcccctgaggtctcagaaatag

SEQ ID NO: 225960 - DNA, 1965 bp, Artificial Sequence
  derived and/or modified sequence
atgtctctggctgcctactgcgtgatctgttgtaggaggatcggaaccagcacgtccccacccaaaagtgggacacactggagagacatccgaaatattatcaaattcaccggctctctcatattagggggttccctgtttctcacatatgaggtgctcgcactcaagaaggcagttacactagatacacaagttgtcgagcgggagaagatgaagtcatacatttacgtacataccgtaagtctcgacaagggcgaaaaccatggtatagcctggcaagccaggaaggagctgcacaaggcagtccggaaggtcctggccacctccgctaagattctgcggaatcctttcgcagaccctttctccactgtggacattgaagaccacgaatgcgcagtgtggctgttactaaggaagtcaaaatccgacgataagactaccaggctcgaggctgtgagagaaatgagcgaaacccatcactggcatgactatcaatatcgcattatagcccaggcctgcgatcctaagacactcatcggcctggctcgtagtgaagaatccgaccttcgcttcttcctgctgcccccacctttgccaagcttgaaggaagacagctcaaccgaggaagaactgaggcagttgttggcctctcttccccaaaccgaactggacgagtgtatccagtactttacctctctcgctctgtccgagtcctcacagagtctggcggcacagaaaggaggactctggtgttttggagggaacggcctaccatatgcggagtcctttggcgaggtgccttctgccacggtcgagatgttttgtttggaagccattgttaagcattccgaaatttctactcattgcgacaaaatcgaggccaatggtggcctgcaattgctacaaaggttgtaccgactgcataaggattgccccaaagttcagaggaacattatgagagtcatcgggaatatggctcttaatgagcacctgcattctagcatcgttcggagcgggtgggtgtccattatggctgaagcaatgaaaagcccacacattatggaaagttcccatgcagcccgtattctagccaatttggaccgggaaaccgtgcaggaaaagtatcaggatggggtctatgtgcttcacccccaatatcgtacatcacagccaatcaaggccgatgtactctttatacatggactgatgggagcggctttcaaaacttggcgtcagcaggattctgagcaggctgtgatcgagaagcccatggaggacgaggaccgttataccacatgttggccgaagacctggctggcgaaagattgcccagcacttagaattatcagtgttgaatacgacacttctctcagcgactggagggcccgttgccccatggaacggaaatccatagctttccggagcaacgagctactgcgcaaattgcgtgccgcaggtgttggggaccgcccagtggtctggatttctcactcaatgggcggactgctcgtgaagaaaatgctgctggaggccagcaccaaacccgagatgagcaccgtcattaataatactcggggaatcattttttattcagtaccgcatcatggaagtcgcctggccgagtactcggtaaatattcgatacctgctattcccatccctggaagtcaaggagttgagcaaagattcaccggctctcaagaccctacaggatgacttcctggagtttgctaaggacaaaaactttcaagttcttaattttgtggagaccctgcccacatacatcggctccatgattaagctacacgtagtgcctgtcgaaagcgctgatcttggcatcggtgatcttatcccagtggatgtaaatcacttgaatatttgtaaaccgaaaaaaaaggacgcctttctgtaccagaggaccctgcaatttatacgtgaagccctggccaaggatcttgagaactag

SEQ ID NO: 225961 - DNA, 1596 bp, Artificial Sequence
  derived and/or modified sequence
atgtctctggcagcctattgcgtgatttgctgcaggcgaatcggcacctctacatcaccaccaaagtccgggactcactggcgggatattcgtaacatcatcaaatttacaggatcgctgattctgggcggaagcttattcttgacgtatgaagtgcttgctttaaagaaggccgttacactggacactcaagtcgtggaaagagaaaagatgaagtcctatatttatgtccacaccgtgagccttgataaaggcgaaaatcacggaatcgcctggcaggcaaggaaagaactccataaagccgtgagaaaagtgctcgcaacaagtgccaaaattttgcggaaccccttcgcagatccattttctacagtggacatcgaggaccatgagtgtgctgtgtggctgctcctccgcaaatccaagagcgacgacaagacaacaaggcttgaggccgttcgggagatgtcagaaacacatcactggcacgattatcaataccggatcatcgcgcaggcatgcgaccccaaaactctgattggcttggcgcgaagcgaagagtctgatttacgatttttcctattacctccgcctctgccatcattaaaagaggattcatccaccgaagaagagctccgccagctcttagcgtccctaccgcagacagaactggatgagtgtattcaatactttacctctcttgccctgtctgagtctagtcagagtttagcagcacagaaaggtggactttggtgcttcggcgggaatgggcttccatatgcagagtcttttggcgaggtaccatccgctaccgtagagatgttctgcctggaggctatagtgaagcatagcgaaatctccacccattgcgacaagatagaggctaacggcgggttgcagttgcttcaacggctctatcgattgcataaagattgccctaaggttcaacgaaatatcatgcgagtgattggaaatatggccctgaatgagcaccttcactcctctatcgtgcgatcaggatgggtttcaatcatggccgaggctatgaagagcccccacatcatggaatcctcccatgctgctcggattctcgcaaatctcgatcgagagacagtacaggagaaataccaggatggagtatacgttttgcacccccagtacaggaccagccaacctattaaggccgatgtgttgtttatccacggcctgatgggagcagcttttaagacctggcgccaacaagattctgagcaggccgtaatcgaaaagcccatggaagacgaagacagatacacaacttgttggccgaaaacgtggctcgcaaaagactgccctgctctgcgcattatctcagttgagtacgataccagcttatctgactggcgggcaaggtgtcctatggaacgaagatccttgctgagcatcagctctggaatcgtcgaaggattagagtctcctctacatagtgaggccacgaattttttaggatcttccgaacttcttgtgctcggcataggccagtggtttggctatcacattgcctgggaagtgtttctgagcaaacggtgctgctggaagcccctacgttctcagaagtag

SEQ ID NO: 225962 - DNA, 1596 bp, Artificial Sequence
  derived and/or modified sequence
atgtccctggccgcctactgtgtcatctgctgtcgcagaataggtacttccacctctccaccaaaatctggcacccactggcgtgatattcgcaacattatcaagttcaccggctcactgattcttggcggaagccttttcttaacttacgaagtcctggccttaaaaaaagctgtaacactagacactcaggtagtagaaagggagaaaatgaagagttatatctacgttcacaccgtgtcactggacaagggagagaatcacggaattgcatggcaggccagaaaggagctgcacaaagcagtgcggaaggtcctggcaactagcgctaagatccttaggaacccatttgccgacccgttttcaactgtggatatcgaagaccacgagtgtgccgtctggctgctgttgcggaaatccaaatcagacgacaaaacaacgcgactcgaggctgtaagggagatgtctgagactcaccattggcacgattatcagtatcgaattattgcacaggcttgcgaccccaagacacttattgggcttgcacgttccgaggagtccgatctgagattttttctcctcccccctccgttacctagtctcaaagaggatagctccacagaagaggaactgagacagctcctggcaagcctgccacagacagagctggacgaatgcattcaatacttcacgtcattagctctgtccgaatcttctcagtctcttgctgcgcagaagggaggactgtggtgcttcggcgggaatgggctcccttacgccgaaagctttggtgaggttccaagcgcaaccgtggagatgttctgtctcgaagcgattgtgaaacattcagagatatcaacgcattgcgacaaaatcgaggcaaacggcggtctgcaactgctccagcgcctgtaccggttacacaaggattgtcctaaagttcagaggaacattatgcgcgttattgggaatatggccctgaacgagcatctgcattcttcaatagtgcgctcaggttgggttagtattatggcagaggcaatgaagtctccccatataatggaatccagtcacgctgcccgcatactcgccaatctcgatagggaaacggtccaggagaaatatcaagatggggtctacgtccttcatccccagtaccgaactagccagccaatcaaagccgacgtcttatttattcatggcctgatgggtgccgcattcaagacctggcgccagcaggattctgagcaggctgttatcgagaagcctatggaagatgaagatcgatacacaacatgctggcctaagacatggctggctaaggactgcccagcccttagaattattagtgttgaatacgatactagcctatctgactggcgtgcaagatgtccaatggagcggcggagtttgctgagcatttcaagcgggatcgtggagggtttagaatcccccctgcattccgaggctaccaactttcttggctcctccgagcttcttgtgcttgggatcggtcagtggtttgggtaccatattgcttgggaagtatttttgtctaaacgctgttgttggaagcctttacgcagccagaaatag

SEQ ID NO: 225963 - DNA, 1965 bp, Artificial Sequence
  derived and/or modified sequence
atgtctctggccgcttactgcgttatctgctgcaggaggatcgggacctctacatctcccccaaaatccggcactcactggcgggatatacgcaatattattaaattcaccgggtctcttattctgggaggttctctgttcctcacttacgaggtgttggccctgaaaaaagctgttactcttgacacccaagttgtggagcgagaaaagatgaagtcatatatttacgtacatacagttagcctggacaagggcgagaaccatggtatagcgtggcaggcaagaaaagagttgcacaaagcagtgcgtaaggttctggccacttctgccaagatcctgcggaacccgttcgcagaccccttttccaccgtggacatcgaggaccacgaatgtgctgtctggctcttgctccggaagtctaagagcgatgataagacaacacgcctggaggcagtgcgagaaatgtcagaaacccaccattggcacgactatcaataccggattattgctcaggcctgcgatcccaaaacactcatcggtctcgccagaagtgaggagagtgatctgcggttcttccttctaccaccaccactgcctagtctgaaggaagacagctctaccgaagaggagctcagacagctgctggcaagcctgccacaaacggaactcgacgaatgcattcagtattttacgtcacttgcactcagcgaatcctctcagagtctcgcagcccaaaaagggggtctgtggtgtttcggtggtaacgggttgccgtatgcagagtcctttggggaagtgccgtccgccacggtggaaatgttctgcttagaagccatcgtgaaacacagcgagatatccacccactgcgataagattgaagccaacggcgggcttcagcttctacagcgcctgtatcgactccacaaggactgtcccaaagtccagagaaatataatgcgcgttatcggtaacatggctcttaacgagcatctccattccagcatcgtacgcagcggctgggtgtctatcatggctgaagctatgaaatctcctcacattatggaatcttcccacgccgctcgtattcttgctaatctcgaccgcgagacagttcaggaaaaatatcaagacggagtttacgttttgcatcctcagtaccgaacaagtcagcctattaaggcagacgttttattcattcacggactgatgggtgcggccttcaagacgtggcgacaacaggatagcgaacaagccgtgattgagaaaccaatggaggacgaggatagatacacaacctgttggccaaagacatggcttgctaaagattgccccgccctgcgaataatttcagttgagtacgatacttctctctccgactggcgtgctagatgtccaatggagcgaaaatccatagcatttagaagtaatgagctactgagaaagttgagagcagccggggttggagatcgtcctgtggtatggatctcccacagcatgggtggcctgctagtaaaaaaaatgctccttgaagctagcacgaagccagaaatgagtacagtaattaacaacacacgaggtattattttctatagtgttccacaccatggctcaagactggcagagtattccgttaatatcaggtatctgttattcccttccctggaagtgaaagagctgagcaaggatagccccgctctaaagactttacaggacgactttctggagtttgccaaagacaaaaacttccaggtgctcaactttgttgaaacccttcccacatatatcggttcaatgatcaagctgcacgtcgtgccagtcgaaagcgccgacctaggaatcggagacctgatacccgtggacgtgaaccatttaaatatctgcaagccgaagaagaaggacgccttcttatatcagcggactctccaattcattcgtgaggctcttgctaaagatctcgagaactag

SEQ ID NO: 225964 - DNA, 1596 bp, Artificial Sequence
  derived and/or modified sequence
atgagcctagccgcttactgcgtgatctgttgccgcaggatagggacgagtactagcccccctaaatctggcacccactggcgggacattagaaacatcattaagtttactggaagtttgatacttggaggctctctttttcttacctacgaagtcctagcattaaagaaagccgtaactctggacacccaagtcgttgagcgggaaaagatgaaaagctacatatatgtacatacagtctcccttgacaagggagaaaatcacggaattgcatggcaggcccgcaaggagttacataaggcagtcaggaaagtgctcgcaacctctgccaaaatcctaaggaacccctttgctgatcctttttctacagttgacatcgaggaccatgaatgcgctgtgtggttactgctcagaaaatcgaagagtgatgacaagaccacccgtttggaagctgtgagggagatgagcgaaacccatcactggcacgactaccagtaccgtattatcgcccaagcatgcgaccctaagaccctcattggattggcacgcagtgaggaaagcgacctcagatttttcctcctcccacctcctcttccttctctcaaggaagattcaagtacagaagaggagctacgacagcttctagcgtcactgccccaaacagagctggacgagtgtattcagtacttcacctccttagcgctttctgagtcctcccagagcctggcggcgcagaagggtggactctggtgtttcggggggaatggcttgccttatgcggagtcctttggagaggtcccatcagccactgtcgaaatgttttgtcttgaggctattgtaaaacactctgaaattagtacacattgcgacaagattgaggccaatggcggcttgcagctgctgcagaggctctaccgacttcacaaagactgtcccaaggtccaacgaaacatcatgagagtgatcggtaatatggcgctgaacgaacaccttcattcatctattgtacgctccggttgggtttccattatggctgaggcgatgaaatctccccatatcatggaaagttcacacgcagctcggattcttgccaatttggacagagagaccgttcaagaaaagtatcaagacggcgtttacgtgctacatcctcagtaccggacgagccagcctatcaaagctgacgtgttatttattcacggcctgatgggagcagcttttaagacctggcgccaacaagattctgagcaggccgtaatcgaaaagcccatggaagacgaagacagatacacaacttgttggccgaaaacgtggctcgcaaaagactgccctgctctgcgcattatctcagttgagtacgataccagcttatctgactggcgggcaaggtgtcctatggaacgaagatccttgctgagcatcagctctggaatcgtcgaaggattagagtctcctctacatagtgaggccacgaattttttaggatcttccgaacttcttgtcttgggaattggccaatggtttggataccacattgcctgggaagtgttcctctcaaaacgttgttgctggaaacctctacgctcacagaagtag

SEQ ID NO: 225965 - DNA, 1596 bp, Artificial Sequence
  derived and/or modified sequence
atgtcactagctgcctattgcgtgatttgttgccgtcgcatcggcacaagtaccagcccgcctaaaagcggaacacactggagggatattcgaaacattattaaatttactggcagtctgatcttgggggggtccctgttcctaacatatgaagtgcttgccctaaaaaaagctgtaacacttgatacccaggtcgttgagagggagaagatgaaatcatatatctacgtccacactgtttctttggacaaaggggaaaatcacggaatcgcctggcaagcgcgcaaggaactgcataaggccgttcggaaagttctggccacttccgccaaaattctacgcaatccattcgctgacccattttccacagtcgacatcgaggaccacgaatgtgcggtatggctgctcctgagaaagtccaaaagtgacgacaagacaacaaggctcgaagctgtccgcgagatgagcgaaacccaccactggcacgactaccaatacagaattatcgcccaggcttgtgaccctaaaaccctgattggactagcccgctcagaggagtctgatctgcggttctttcttctccccccgccgcttcccagcttgaaagaagactctagtaccgaggaggaattgcgacagctcctggcctcacttcctcagaccgagctcgacgaatgtatccaatattttacctcattagccctctccgagtcctcccagtccctcgctgcccaaaaagggggactgtggtgcttcggcggtaacgggctgccctacgcagaatcttttggggaagttccatcagccaccgtggagatgttttgtctggaagccattgttaagcacagcgagataagcactcattgcgataaaattgaggcgaatgggggtctgcaactgctccagcgcctgtaccggttacacaaggattgtcctaaagttcagaggaacattatgcgcgttattgggaatatggccctgaacgagcatctgcattcttcaatagtgcgctcaggttgggttagtattatggcagaggcaatgaagtctccccatataatggaatccagtcacgctgcccgcatactcgccaatctcgatagggaaacggtccaggagaaatatcaagatggggtctacgtccttcatccccagtaccgaactagccagccaatcaaagccgacgtcttatttattcatggtctgatgggcgcagcgtttaagacatggagacagcaagatagcgagcaggctgtcatagaaaaacctatggaggatgaggatcggtataccacatgttggcccaagacgtggctcgccaaggattgcccagccctgcgcattatttcagttgagtacgatactagtttgtcagattggagggccaggtgtcccatggaacgcaggagtctcctaagcatctcttctggtatcgtggaaggcctcgagtcaccattgcattcagaagctacaaattttttaggatccagcgaacttctggtgctgggaattggccagtggttcggctaccatatagcttgggaagtgttcttgtctaaacgttgttgttggaaacctcttagaagtcagaaatag

SEQ ID NO: 225966 - DNA, 1965 bp, Artificial Sequence
  derived and/or modified sequence
atgtcacttgctgcctattgtgtcatttgttgtcggcggattggcacttccacatcaccccctaagtcagggacccattggagggatataagaaatattatcaagttcactgggagtctaatactaggaggttccttgttccttacttacgaggtgctcgcactcaagaaggctgtcactctcgacacacaagtggtggaaagagaaaagatgaagtcttacatttacgtgcatacggtttctttagataagggcgaaaaccatggcattgcctggcaggccagaaaagagctgcataaggcagtgcgtaaggtcctggccacatccgccaaaattctccggaaccctttcgctgatcctttttccaccgttgacatcgaagaccacgaatgcgcagtgtggctgctcctaagaaaatctaaatccgatgacaaaaccaccagactcgaggctgtgagggagatgagcgaaacccaccactggcacgactaccaatatcggatcatcgctcaagcatgcgatcccaagacactcataggcttggctcgaagcgaagaaagcgaccttcgtttttttttgttacctccgcctttgccatccctcaaagaggattcatccaccgaggaagagttgcggcagttactagcctctctgccacagaccgaactggacgaatgcatccaatatttcacttctctcgcgctcagcgaatcttctcagtccctggctgcccaaaaaggaggtctctggtgtttcgggggaaacggactgccttacgcggagtcctttggcgaggtgcccagtgccacagtagaaatgttttgtctagaggcaattgttaagcatagtgaaatctctacccactgcgacaaaatcgaagcaaacgggggtttgcagctcttacaaagactgtatcgcttgcacaaggactgtcccaaggttcagagaaatatcatgcgtgtcataggcaatatggccttaaatgaacacctccattcctccattgttcgatcaggctgggtgtcaattatggccgaagcaatgaaatcaccgcatattatggaaagtagtcatgctgcccgcattctagctaacctagatcgggaaacagtacaggaaaagtaccaggacggagtgtatgtcctgcatcctcaatatcgcaccagccagcccatcaaggcggatgtgctgttcattcacggactgatgggtgcggccttcaagacgtggcgacaacaggatagcgaacaagccgtgattgagaaaccaatggaggacgaggatagatacacaacctgttggccaaagacatggcttgctaaagattgccccgccctgcgaataatttcagttgagtacgatacttctctctccgactggcgtgctagatgtccaatggagcgaaaatccatagcatttagaagtaatgagctactgagaaagttgagagcagccggggttggagatcgtcctgtggtatggatctcccacagcatgggtggtttattggttaagaaaatgctcctggaagccagcactaagccagagatgtctacagttatcaataacacaagaggaatcatcttttactccgtccctcaccatggatctaggctcgcagagtatagcgttaatatcaggtatctgctatttccatcactggaggtcaaagaactctccaaggacagccccgcacttaaaactctacaagacgattttctcgaatttgccaaagacaagaacttccaggtcctgaacttcgttgaaacgctcccaacatatataggctccatgattaagctgcatgtagttccagtggaatctgctgacctcggaatcggagaccttatccccgtggacgtcaaccatctgaatatttgcaaacctaaaaagaaggatgcttttttataccagagaactctccaatttatacgcgaagccctggctaaagatctggaaaactag

SEQ ID NO: 225967 - DNA, 1596 bp, Artificial Sequence
  derived and/or modified sequence
atgagcctggccgcctactgcgtgatctgctgcagaagaatcggcaccagcaccagcccccccaagagcggcacccactggagagacatcagaaacatcatcaagttcaccggcagcctgatcctgggcggcagcctgttcctgacctacgaggtgctggccctgaagaaggccgtgaccctggacacccaggtggtggagagagagaagatgaagagctacatctacgtgcacaccgtgagcctggacaagggcgagaaccacggcatcgcctggcaggccagaaaggagctgcacaaggccgtgagaaaggtgctggccaccagcgccaagatcctgagaaaccccttcgccgaccccttcagcaccgtggacatcgaggaccacgagtgcgccgtgtggctgctgctgagaaagagcaagagcgacgacaagaccaccagactggaggccgtgagagagatgagcgagacccaccactggcacgactaccagtacagaatcatcgcccaggcctgcgaccccaagaccctgatcggcctggccagaagcgaggagagcgacctgagattcttcctgctgcccccccccctgcccagcctgaaggaggacagcagcaccgaggaggagctgagacagctgctggccagcctgccccagaccgagctggacgagtgcatccagtacttcaccagcctggccctgagcgagagcagccagagcctggccgcccagaagggcggcctgtggtgcttcggcggcaacggcctgccctacgccgagagcttcggcgaggtgcccagcgccaccgtggagatgttctgcctggaggccatcgtgaagcacagcgagatcagcacccactgcgacaagatcgaggccaacggcggcctgcagctgctgcagagactgtacagactgcacaaggactgccccaaggtgcagagaaacatcatgagagtgatcggcaacatggccctgaacgagcacctgcacagcagcatcgtgagaagcggctgggtgagcatcatggccgaggccatgaagagcccccacatcatggagagcagccacgccgccagaatcctggccaacctggacagagagaccgtgcaggagaagtaccaggacggcgtgtacgtgctgcacccccagtacagaaccagccagcccatcaaggccgacgtgctgttcatccacggcctgatgggcgccgccttcaagacctggagacagcaggacagcgagcaggccgtgatcgagaagcccatggaggacgaggacagatacaccacctgctggcccaagacctggctggccaaggactgccccgccctgagaatcatcagcgtggagtacgacaccagcctgagcgactggagagccagatgccccatggagagaagaagcctgctgagcatcagcagcggcatcgtggagggcctggagagccccctgcacagcgaggccaccaacttcctgggcagcagcgagctgctggtgctgggcatcggccagtggttcggctaccacatcgcctgggaggtgttcctgagcaagagatgctgctggaagcccctgagaagccagaagtag

SEQ ID NO: 225968 - DNA, 1965 bp, Artificial Sequence
  derived and/or modified sequence
atgagcctggccgcctactgcgtgatctgctgcagaagaatcggcaccagcaccagcccccccaagagcggcacccactggagagacatcagaaacatcatcaagttcaccggcagcctgatcctgggcggcagcctgttcctgacctacgaggtgctggccctgaagaaggccgtgaccctggacacccaggtggtggagagagagaagatgaagagctacatctacgtgcacaccgtgagcctggacaagggcgagaaccacggcatcgcctggcaggccagaaaggagctgcacaaggccgtgagaaaggtgctggccaccagcgccaagatcctgagaaaccccttcgccgaccccttcagcaccgtggacatcgaggaccacgagtgcgccgtgtggctgctgctgagaaagagcaagagcgacgacaagaccaccagactggaggccgtgagagagatgagcgagacccaccactggcacgactaccagtacagaatcatcgcccaggcctgcgaccccaagaccctgatcggcctggccagaagcgaggagagcgacctgagattcttcctgctgcccccccccctgcccagcctgaaggaggacagcagcaccgaggaggagctgagacagctgctggccagcctgccccagaccgagctggacgagtgcatccagtacttcaccagcctggccctgagcgagagcagccagagcctggccgcccagaagggcggcctgtggtgcttcggcggcaacggcctgccctacgccgagagcttcggcgaggtgcccagcgccaccgtggagatgttctgcctggaggccatcgtgaagcacagcgagatcagcacccactgcgacaagatcgaggccaacggcggcctgcagctgctgcagagactgtacagactgcacaaggactgccccaaggtgcagagaaacatcatgagagtgatcggcaacatggccctgaacgagcacctgcacagcagcatcgtgagaagcggctgggtgagcatcatggccgaggccatgaagagcccccacatcatggagagcagccacgccgccagaatcctggccaacctggacagagagaccgtgcaggagaagtaccaggacggcgtgtacgtgctgcacccccagtacagaaccagccagcccatcaaggccgacgtgctgttcatccacggcctgatgggcgccgccttcaagacctggagacagcaggacagcgagcaggccgtgatcgagaagcccatggaggacgaggacagatacaccacctgctggcccaagacctggctggccaaggactgccccgccctgagaatcatcagcgtggagtacgacaccagcctgagcgactggagagccagatgccccatggagagaaagagcatcgccttcagaagcaacgagctgctgagaaagctgagagccgccggcgtgggcgacagacccgtggtgtggatcagccacagcatgggcggcctgctggtgaagaagatgctgctggaggccagcaccaagcccgagatgagcaccgtgatcaacaacaccagaggcatcatcttctacagcgtgccccaccacggcagcagactggccgagtacagcgtgaacatcagatacctgctgttccccagcctggaggtgaaggagctgagcaaggacagccccgccctgaagaccctgcaggacgacttcctggagttcgccaaggacaagaacttccaggtgctgaacttcgtggagaccctgcccacctacatcggcagcatgatcaagctgcacgtggtgcccgtggagagcgccgacctgggcatcggcgacctgatccccgtggacgtgaaccacctgaacatctgcaagcccaagaagaaggacgccttcctgtaccagagaaccctgcagttcatcagagaggccctggccaaggacctggagaactag

SEQ ID NO: 225969 - DNA, 1596 bp, Artificial Sequence
  derived and/or modified sequence
atgtctctggccgcctactgcgtcatttgttgccggcgcattggaacatccacctcgccgccaaagtctggcacacattggcgggatattagaaatattattaagttcacagggtctctgattctgggcggatctctcttcctgacctatgaggttctcgcactgaaaaaagcggtgactctcgacacccaggttgtggaaagggaaaagatgaaatcttatatctacgtgcatacagtcagcctagacaagggcgagaaccatggaattgcctggcaggcccggaaagaattgcataaagcggtacggaaggtgctcgcaacaagtgccaaaatactgcgaaacccttttgcagacccattttccaccgtggacatcgaggaccacgagtgcgcggtctggctattgttgaggaagtctaagtctgacgacaaaacgacacgccttgaagccgttagagagatgagtgagacgcaccactggcacgactatcagtaccgcattatcgcccaggcttgcgaccctaaaaccctgatcggactggcgaggagcgaagagagcgacctgcgtttttttctgcttccacctccattgcctagtctgaaggaagacagttccaccgaggaagagctgaggcagctgctggccagtctgccccagaccgagctcgacgagtgcatccagtatttcacatccctggctctgtcagagtcctcacagtctctcgcagcccagaagggggggttgtggtgcttcggcggcaacggcttgccttacgctgaaagcttcggcgaagtgccaagtgccaccgtcgagatgttttgcttggaagccattgttaagcattctgagatctcaacccactgtgataaaatcgaggcaaatggcggactgcagctgctgcagcgactctatcggctgcacaaagactgccctaaagttcagagaaatattatgcgagtgattggaaacatggcactcaacgaacaccttcactccagcattgtcaggtccggctgggtgagtatcatggccgaagcaatgaagtcgccgcatatcatggaaagctcccatgcggcaagaatcttggcgaacttagacagggagactgtgcaggagaaataccaggatggcgtgtatgtgttgcaccctcaatatcgaacatctcagcctatcaaagcagatgtgctcttcatccacggcctgatgggggcggctttcaaaacatggagacagcaggactcagaacaggcagtgatcgagaagcccatggaggatgaggacagatatacaacctgttggcccaaaacttggttggccaaagactgtccggccctgcgcatcatttccgtggaatacgacacatccctgagcgactggcgtgccaggtgtcccatggagcgccgctctttattgagcatatcctctgggattgttgaaggtctggagtccccactgcatagcgaggctaccaactttctggggtcttccgaactgttagttttgggaataggccagtggttcggatatcatatagcatgggaagtatttctgtcaaagagatgctgctggaaaccactgaggtctcaaaaatag

SEQ ID NO: 225970 - DNA, 1596 bp, Artificial Sequence
  derived and/or modified sequence
atgtccctcgcggcttactgtgtaatctgttgccgtcggattgggacgtctacatcccctccaaagagtggcacccactggagggacatcagaaatataattaaattcactggttcccttatcctgggagggtcactctttctgacctatgaggtgctggccctcaaaaaggccgtcactctggatacccaggtcgtggagagagagaaaatgaagtcatatatatacgtacataccgtgtcattggataagggtgagaaccacggcattgcctggcaggcacgaaaggagctacataaagcggtccgcaaagtgctggcaacgagcgctaagatcctacgaaaccctttcgcagatcctttttccacagtcgacatcgaggatcacgagtgcgcagtgtggctgctcctcaggaagtccaagagcgatgacaagacaacaagactggaggctgtgcgggagatgagtgaaactcaccactggcatgattatcagtatcggattatagcccaggcatgcgatccgaagacactaattgggcttgctaggtcggaagaaagcgacctacgatttttcttattgcctccccccctgccgtctctgaaagaagactcttcaactgaagaggaactccgacagctgctcgcatctcttccccagaccgagctggatgaatgcatccagtactttacatcgctcgccttaagcgagtcctcgcaaagccttgctgcccagaaaggcgggctgtggtgtttcggcgggaacggactgccatacgctgagtctttcggagaagtgcccagtgctacagtggaaatgttctgtctcgaagcaattgttaaacattctgaaatctccacacactgtgataagattgaggcgaatggtggtctgcaattgttgcagagactctatcggctacacaaagattgcccaaaagttcagaggaatattatgcgggttattggaaacatggccctgaacgaacatctgcacagcagtattgtgaggtctgggtgggtctccatcatggccgaggcaatgaagtcccctcacatcatggaatcttctcatgctgctaggattctcgcaaaccttgatagagagacggtacaggagaagtatcaggatggcgtttacgttctacatccccagtaccgaacaagccagccaattaaggcggacgtgctgttcatccatggactgatgggtgccgcttttaagacttggcgtcagcaagatagcgagcaggcggtgattgagaagccaatggaggatgaggacagatacaccacctgctggcctaagacatggcttgctaaggactgccccgccttgcgcatcattagcgtcgagtacgacactagcctgtcagattggagagccaggtgtcctatggaacgtagaagcttgctgagtatttcttccggcattgtggaaggattagaatcacctctgcatagcgaagccactaattttctcgggtcctcggaactactggtcctagggattggtcagtggtttggatatcacatcgcgtgggaagtgttcctgtccaagagatgttgttggaagcccttgcggagccagaaatag

SEQ ID NO: 225971 - DNA, 1965 bp, Artificial Sequence
  derived and/or modified sequence
atgagcctggcggcttactgcgtgatctgttgtcgacggatcgggacctctacgtcgccacccaaatccggaacacattggagggacatcaggaacattattaagtttaccggttctctgattctgggtggctccctgttcctgacttatgaggtcctcgcactcaaaaaagcagtgacacttgatacccaggtggtagagcgggagaagatgaagtcctatatctacgtgcacacagtgtctctggacaaaggcgagaatcatggtattgcttggcaagcgagaaaagaactccataaagcagtgcgcaaagtgctggccacctctgccaagattttgcggaaccccttcgcggaccccttttccactgtggacattgaggatcacgagtgtgctgtctggcttctcctgcgcaaaagcaagagtgacgataagactacgagactggaagcggtccgcgagatgtccgaaactcaccattggcatgattatcagtatcggatcatcgctcaggcttgtgaccctaagaccctgattgggctggcccgcagcgaagagagcgacctgcggttttttcttttgccaccccctctcccatccttaaaagaggattcatcaaccgaggaggaactgaggcagctcctcgctagcttgccacagacggagctcgatgagtgcatccaatacttcactagcctcgccctctcagagagctctcagtcactcgccgcccagaaaggcggactatggtgcttcggcgggaacggacttccctatgctgaaagcttcggggaggtgccttccgccactgttgaaatgttctgtttggaggcgattgtcaagcactctgagatctcgactcattgcgacaagatcgaggctaatggcgggctccaattgctccaaagactctaccggctgcataaagattgccctaaggttcagcgcaacattatgcgcgtgatcggcaatatggccctgaatgaacacctgcactcttccatagtgagatccggatgggtctccatcatggccgaagccatgaagagtccgcacataatggaatcctcccatgctgctcgcatcctggccaatttggacagagaaaccgtgcaggaaaaataccaggatggcgtatatgtgctgcatcctcagtatagaacatctcagccaataaaagcagacgtgttgtttattcatgggctgatgggggcggcttttaaaacttggcgacagcaagatagcgaacaggctgtgattgagaagcctatggaagacgaggaccgatacacaacatgctggcctaaaacgtggctggccaaggattgtcccgcgctcagaattatatcagtagaatatgatacatctctcagcgactggcgggcccgatgtcccatggagcggaagtcaatagctttccgcagcaatgaactactgcgtaagcttagggccgccggagtgggggatagaccagtagtttggatctcacactctatgggcgggttgctggtgaaaaaaatgctcctagaagccagtacaaagcccgaaatgagcaccgtaataaataacacaagaggtattatcttctattccgtcccccatcacggtagcagactggcagaatactccgttaacattcgctacttgctttttccatcactagaggtcaaagaactcagcaaggactctcctgccctaaagaccttgcaggacgatttcctggaattcgctaaagataagaattttcaagtgctgaatttcgtcgaaactctgcccacctatatcgggtccatgatcaagctccacgtggtgccagtagagtccgcagacctgggcattggagatttgatccctgtagacgtgaatcacttgaatatctgtaaacccaaaaagaaggatgcctttctgtaccaacggacattacagttcatccgcgaggccctggccaaggaccttgaaaattag

SEQ ID NO: 225972 - DNA, 1907 bp, Artificial Sequence
  derived and/or modified sequence
gtcacgagccgccagccgccgggtggagggtcccggccgggagccgcggaaagagtagggctccccagacaacggggtccgacgagcagttgggcacgggctgagtccgcctgccggcagaatgtccctggctgcttattgcgtcatctgttgcagaagaataggaacctctacttccccaccaaaaagtggcacacactggagagatatcagaaatataataaagtttactggatcacttattttaggaggttctttatttcttacatatgaagttctggccctgaagaaggctgtgacattagatactcaagtggtagaacgagaaaaaatgaagtcatatatatatgtgcacacagtttctttagacaaaggagaaaatcatggtattgcctggcaggcaagaaaagaacttcacaaagcagtaagaaaagtattggcaacatcagccaagatactgcggaatccatttgctgatccttttagtacagttgatatagaagatcatgagtgtgctgtgtggctgctcctacggaagagcaagtcagatgacaaaaccacgcgactcgaggctgtgcgggaaatgtcggagacccatcactggcatgattaccagtataggataattgctcaagcctgtgatccgaaaactcttattggtttggcacgaagcgaagagagtgatcttcgcttttttctcctaccacctcctttgccatctttaaaagaagattcttccactgaagaagagctcagacagttgctggcttccttacctcaaacagagctagatgagtgtatccagtattttacatctttggctcttagtgaaagcagtcagagtctagctgctcagaagggtggtttatggtgttttggaggaaatggacttccttatgctgaaagttttggagaagttccttcagcaacagtggaaatgttctgtttagaagctatagtaaaacattctgagatatccacacattgtgataaaatcgaagcaaatggaggcctgcagctacttcagaggctgtaccgacttcacaaggactgccctaaagtacagagaaatataatgcgtgtcattggaaatatggctttgaatgaacatcttcattcttctatagttcgctcaggctgggtttccatcatggcagaagcaatgaaatctccccacattatggagtcctcacacgctgccagaatcctggcaaatctagaccgagaaactgtgcaagaaaaatatcaggatggcgtatatgtgctgcatccccaatatcgaacaagtcagcccattaaagcagatgtcctttttattcatggccttatgggagcagcattcaaaacatggcgccagcaggacagtgagcaggctgtaattgaaaaacctatggaggatgaagacagatatacgacgtgctggcccaagacatggttagcaaaagactgtcctgctctccgaattatatctgtggagtatgacaccagcctcagcgactggagagcaaggtgccctatggaaagaaggagtttgctgtcaataagcagtggaatagtagaaggcttagaaagtccattgcattcagaagcaacgaacttcttaggaagctcagagctgctggtgttggggataggccagtggtttggatatcacatagcatgggaggtcttcttgtcaaaaagatgctgttggaagcctctacgaagccagaaatgagtactgttatcaacaataccagaggaataattttttatagtgtccctcatcatggatcacgtttggctgaatactctgttaatattcgctatcttctcttcccctcgttggaagtcaaagaactcagcaagggtaatactttttgtcataaaggaaattggggttatattaacatcagttacacagagaa

SEQ ID NO: 225973 - DNA, 4013 bp, Artificial Sequence
  derived and/or modified sequence
agagcgggccgagggggcggggtcacgagccgccagccgccgggtggagggtcccggccgggagccgcggaaagagtagggctccccagacaacggggtccgacgagcagttgggcacgggctgagtccgcctgccggcagaatgtccctggctgcttattgcgtcatctgttgcagaagaataggaacctctacttccccaccaaaaagtggcacacactggagagatatcagaaatataataaagtttactggatcacttattttaggaggttctttatttcttacatatgaagttctggccctgaagaaggctgtgacattagatactcaagtggtagaacgagaaaaaatgaagtcatatatatatgtgcacacagtttctttagacaaaggagaaaatcatggtattgcctggcaggcaagaaaagaacttcacaaagcagtaagaaaagtattggcaacatcagccaagatactgcggaatccatttgctgatccttttagtacagttgatatagaagatcatgagtgtgctgtgtggctgctcctacggaagagcaagtcagatgacaaaaccacgcgactcgaggctgtgcgggaaatgtcggagacccatcactggcatgattaccagtataggataattgctcaagcctgtgatccgaaaactcttattggtttggcacgaagcgaagagagtgatcttcgcttttttctcctaccacctcctttgccatctttaaaagaagattcttccactgaagaagagctcagacagttgctggcttccttacctcaaacagagctagatgagtgtatccagtattttacatctttggctcttagtgaaagcagtcagagtctagctgctcagaagggtggtttatggtgttttggaggaaatggacttccttatgctgaaagttttggagaagttccttcagcaacagtggaaatgttctgtttagaagctatagtaaaacattctgagatatccacacattgtgataaaatcgaagcaaatggaggcctgcagctacttcagaggctgtaccgacttcacaaggactgccctaaagtacagagaaatataatgcgtgtcattggaaatatggctttgaatgaacatcttcattcttctatagttcgctcaggctgggtttccatcatggcagaagcaatgaaatctccccacattatggagtcctcacacgctgccagaatcctggcaaatctagaccgagaaactgtgcaagaaaaatatcaggatggcgtatatgtgctgcatccccaatatcgaacaagtcagcccattaaagcagatgtcctttttattcatggccttatgggagcagcattcaaaacatggcgccagcaggacagtgagcaggctgtaattgaaaaacctatggaggatgaagacagatatacgacgtgctggcccaagacatggttagcaaaagactgtcctgctctccgaattatatctgtggagtatgacaccagcctcagcgactggagagcaaggtgccctatggaaagaaggagtttgctgtcaataagcagtggaatagtagaaggcttagaaagtccattgcattcagaagcaacgaacttcttaggaagctcagagctgctggtgttggggataggccagtggtttggatatcacatagcatgggaggtcttcttgtcaaaaagatgctgttggaagcctctacgaagccagaaatgagtactgttatcaacaataccagaggaataattttttatagtgtccctcatcatggatcacgtttggctgaatactctgttaatattcgctatcttctcttcccctcgttggaagtcaaagaactcagcaaggattctcctgcacttaaaacactacaagatgactttctggagtttgctaaagacaaaaacttccaggtgctgaattttgtggaaacactaccaacctacattggcagcatgattaagctccatgtggtacctgtggaatcagcagatttaggcattggagatctaattcctgtggatgttaaccatttgaacatttgtaagccaaagaaaaaggatgcttttttgtaccagcgtactttacaattcattcgtgaagctttagccaaagaccttgaaaactaacagttgtgctcttccagttttcatatgtgaattcagtgcaagaaacttggtgttctgtttcttcttttaagctctatgcaatcatgcaaacatagtgatcatagcgtcaacatggtctggagtgtgttgcagactacagaacattgttctcccttcaagcgctgtaaagcaccaacccggaagtggcaggcacagaaggaagggctggattgggcccctttggtgtaaagaagtccctgtgtgctgctttatggttcgcagtgttgggcttggtgactggagcaaagctgctgtgagagagtgtcctttcccatctgtgactttcctggtgcatccaggaggggcacggcaggttctgaggtaactcaacttaccataaaaatgccattaagagagtacctaaaatggagagaagaatgaactagaacattcaagactcttttacttctgggtattgatttgctgtacatttttaaagtttgagtttttagctcagttctaccttttatctgacacattattactagtgttaactttgttagacttattgtcatgtctgggtcagttccttgtatctattttcgtattcctgagaacaaatctttttcttagaaaaattctagcttataataattcttttcagactgtagctgcctatgcttggaatttgtcctagataaggataaagtagctaatccattattgatcacagtatgaagtaaaactattctaagccattatatgaattagcaattcttagtatcaagattctcagattctctttggctaaataaacctttcttcttccttgctcatttgcaagtggtattaattgacctctatagcatgtgagtagtagataatcatgtcgatgacctttttttctttagagtaacagcattattgagatataatttacataccataagattcacccttttaaattatacaattcatttttgttttgttttgtttgtttagagacagggtctgactctgttgcccaagctggagtgcagtggcatgatcatagctcattgtaacctcaaactcctgggctcaagagatccttttgcttcagcctcccaagcagctaggactacaggcacatgccaccacacttgggtaattaaaaaataaataaatacttttttgtagagacagggtctcactgtgttgcccaggtctcaaactcccgatctcaagccaccctcccaaaatgctgtgattataggccagagccattgttcccaggctcaattcattggtttttagtatagttcactgagttgtgcaacatcattgctatttaatttcaggctatttcatcatccccaaaagaaccccatacccatgagcagtcagttcccacctctgctttcccaagcctgcggtaaacactaatctgttttctgtctctatggatttgggaattttatgtaaatggaatcatacaatatgtggccctctctgccttcttccttctattagcatgttttcaaggttcattcatgatatagcatgtatcagtactacttcatttctttttatggccgaaattactccattgtatgatatgccatgtttctttatccattcatcagctgatggacatctaggttctgttcatttttgtctatgataaataatgctaccatgatcatttgtgtacaaatttatgtgtggatagatgtttttgattctcttgggtggaattgctggtcaaatggtaagtctatgtttaaattttgaagatggtgaacttttgtagaatgagatagtcgaagctaaaactggagtatggcatctgaaggtaaatggctcatcaataaactcgatatcaacaattaattgtttcattg

SEQ ID NO: 225974 - DNA, 3948 bp, Artificial Sequence
  derived and/or modified sequence
gagggggcggggtcacgagccgccagccgccgggtggagggtcccggccgggagccgcggaaagagtagggctccccagacaacggggtccgacgagcagttgggcacgggctgagtccgcctgccggcagaatgtccctggctgcttattgcgtcatctgttgcagaagaataggaacctctacttccccaccaaaaagtggcacacactggagagatatcagaaatataataaagtttactggatcacttattttaggaggttctttatttcttacatatgaagttctggccctgaagaaggctgtgacattagatactcaagtggtagaacgagaaaaaatgaagtcatatatatatgtgcacacagtttctttagacaaaggagaaaatcatggtattgcctggcaggcaagaaaagaacttcacaaagcagtaagaaaagtattggcaacatcagccaagatactgcggaatccatttgctgatccttttagtacagttgatatagaagatcatgagtgtgctgtgtggctgctcctacggaagagcaagtcagatgacaaaaccacgcgactcgaggctgtgcgggaaatgtcggagacccatcactggcatgattaccagtataggataattgctcaagcctgtgatccgaaaactcttattggtttggcacgaagcgaagagagtgatcttcgcttttttctcctaccacctcctttgccatctttaaaagaagattcttccactgaagaagagctcagacagttgctggcttccttacctcaaacagagctagatgagtgtatccagtattttacatctttggctcttagtgaaagcagtcagagtctagctgctcagaagggtggtttatggtgttttggaggaaatggacttccttatgctgaaagttttggagaagttccttcagcaacagtggaaatgttctgtttagaagctatagtaaaacattctgagatatccacacattgtgataaaatcgaagcaaatggaggcctgcagctacttcagaggctgtaccgacttcacaaggactgccctaaagtacagagaaatataatgcgtgtcattggaaatatggctttgaatgaacatcttcattcttctatagttcgctcaggctgggtttccatcatggcagaagcaatgaaatctccccacattatggagtcctcacacgctgccagaatcctggcaaatctagaccgagaaactgtgcaagaaaaatatcaggatggcgtatatgtgctgcatccccaatatcgaacaagtcagcccattaaagcagatgtcctttttattcatggccttatgggagcagcattcaaaacatggcgccagcaggacagtgagcaggctgtaattgaaaaacctatggaggatgaagacagatatacgacgtgctggcccaagacatggttagcaaaagactgtcctgctctccgaattatatctgtggagtatgacaccagcctcagcgactggagagcaaggtgccctatggaaagaaagtccattgcattcagaagcaacgaacttcttaggaagctcagagctgctggtgttggggataggccagtggtttggatatcacatagcatgggaggtcttcttgtcaaaaagatgctgttggaagcctctacgaagccagaaatgagtactgttatcaacaataccagaggaataattttttatagtgtccctcatcatggatcacgtttggctgaatactctgttaatattcgctatcttctcttcccctcgttggaagtcaaagaactcagcaaggattctcctgcacttaaaacactacaagatgactttctggagtttgctaaagacaaaaacttccaggtgctgaattttgtggaaacactaccaacctacattggcagcatgattaagctccatgtggtacctgtggaatcagcagatttaggcattggagatctaattcctgtggatgttaaccatttgaacatttgtaagccaaagaaaaaggatgcttttttgtaccagcgtactttacaattcattcgtgaagctttagccaaagaccttgaaaactaacagttgtgctcttccagttttcatatgtgaattcagtgcaagaaacttggtgttctgtttcttcttttaagctctatgcaatcatgcaaacatagtgatcatagcgtcaacatggtctggagtgtgttgcagactacagaacattgttctcccttcaagcgctgtaaagcaccaacccggaagtggcaggcacagaaggaagggctggattgggcccctttggtgtaaagaagtccctgtgtgctgctttatggttcgcagtgttgggcttggtgactggagcaaagctgctgtgagagagtgtcctttcccatctgtgactttcctggtgcatccaggaggggcacggcaggttctgaggtaactcaacttaccataaaaatgccattaagagagtacctaaaatggagagaagaatgaactagaacattcaagactcttttacttctgggtattgatttgctgtacatttttaaagtttgagtttttagctcagttctaccttttatctgacacattattactagtgttaactttgttagacttattgtcatgtctgggtcagttccttgtatctattttcgtattcctgagaacaaatctttttcttagaaaaattctagcttataataattcttttcagactgtagctgcctatgcttggaatttgtcctagataaggataaagtagctaatccattattgatcacagtatgaagtaaaactattctaagccattatatgaattagcaattcttagtatcaagattctcagattctctttggctaaataaacctttcttcttccttgctcatttgcaagtggtattaattgacctctatagcatgtgagtagtagataatcatgtcgatgacctttttttctttagagtaacagcattattgagatataatttacataccataagattcacccttttaaattatacaattcatttttgttttgttttgtttgtttagagacagggtctgactctgttgcccaagctggagtgcagtggcatgatcatagctcattgtaacctcaaactcctgggctcaagagatccttttgcttcagcctcccaagcagctaggactacaggcacatgccaccacacttgggtaattaaaaaataaataaatacttttttgtagagacagggtctcactgtgttgcccaggtctcaaactcccgatctcaagccaccctcccaaaatgctgtgattataggccagagccattgttcccaggctcaattcattggtttttagtatagttcactgagttgtgcaacatcattgctatttaatttcaggctatttcatcatccccaaaagaaccccatacccatgagcagtcagttcccacctctgctttcccaagcctgcggtaaacactaatctgttttctgtctctatggatttgggaattttatgtaaatggaatcatacaatatgtggccctctctgccttcttccttctattagcatgttttcaaggttcattcatgatatagcatgtatcagtactacttcatttctttttatggccgaaattactccattgtatgatatgccatgtttctttatccattcatcagctgatggacatctaggttctgttcatttttgtctatgataaataatgctaccatgatcatttgtgtacaaatttatgtgtggatagatgtttttgattctcttgggtggaattgctggtcaaatggtaagtctatgtttaaattttgaagatggtgaacttttgtagaatgagatagtcgaagctaaaactggagtatggcatctgaaggtaaatggctcatcaataaactcgatatcaacaattaa

SEQ ID NO: 225975 - DNA, 1596 bp, Artificial Sequence
  derived and/or modified sequence
atgagcctggccgcctactgtgtgatctgctgccgccgcatcggcaccagcaccagcccccccaagagcggcacccactggagggacatccggaacatcatcaagttcaccggcagcctcatcctgggcggcagcctcttcctgacctatgaggtgctggccctgaagaaggctgtgaccctggacacccaggtggtggagcgggagaagatgaagagctacatctacgtgcacacagtgtccctggacaagggggagaaccacggcatcgcctggcaggccaggaaggagctgcacaaggctgtgaggaaggtgctggccaccagcgccaagatcctgaggaacccctttgctgaccccttcagcacagtggacattgaagatcatgaatgtgctgtgtggctgctgctgaggaagagcaagagtgatgacaagaccacccggctggaggccgtgcgggagatgtctgagacccaccactggcatgactaccagtaccgcatcatcgcccaggcctgtgaccccaagaccctgattggcctggcccggtctgaggagagtgacctgcgcttcttcctgctgcccccacccctgcccagcctgaaggaggacagcagcacagaggaggagctgcggcagctgctggccagcctgccccagacagagctggatgagtgcatccagtacttcaccagcctggccctgtctgagagcagccagagcctggccgcccagaagggcggcctgtggtgcttcggcggcaatggcctgccctatgcagagagctttggagaggtgcccagcgccaccgtggagatgttctgcctggaggccatcgtgaagcacagcgagatcagcacccactgtgacaagattgaggccaatggaggcctgcagctgctgcagaggctgtaccgcctgcacaaggactgccccaaggtgcagaggaacatcatgagggtcatcggcaacatggccctgaatgagcacctgcacagcagcatcgtgcgcagcggctgggtgtccatcatggccgaggccatgaagagcccccacatcatggagagcagccatgctgcccgcatcctggccaacctggaccgggagaccgtgcaggagaagtaccaggatggagtgtatgtgctgcacccccagtaccgcaccagccagcccatcaaggcagatgtgctcttcatccacggcctgatgggcgccgccttcaagacctggaggcagcaggacagcgagcaggccgtcatcgagaagcccatggaggatgaagatcgctacaccacctgctggcccaagacctggctggccaaggactgcccagccctgcgcatcatctctgtggagtatgacaccagcctgagtgactggagggcccgctgccccatggagcggcgcagcctgctgagcatcagcagcggcatcgtggagggcctggagagccccctgcacagcgaggccaccaacttcctgggcagcagcgagctgctggtgctgggcatcggccagtggtttggctaccacatcgcctgggaggtgttcctgagcaagcgctgctgctggaagcccctgcggagccagaagtag

SEQ ID NO: 225976 - DNA, 1965 bp, Artificial Sequence
  derived and/or modified sequence
atgagcctggccgcctactgtgtgatctgctgccgccgcatcggcaccagcaccagcccccccaagagcggcacccactggagggacatccggaacatcatcaagttcaccggcagcctcatcctgggcggcagcctcttcctgacctatgaggtgctggccctgaagaaggctgtgaccctggacacccaggtggtggagcgggagaagatgaagagctacatctacgtgcacacagtgtccctggacaagggggagaaccacggcatcgcctggcaggccaggaaggagctgcacaaggctgtgaggaaggtgctggccaccagcgccaagatcctgaggaacccctttgctgaccccttcagcacagtggacattgaagatcatgaatgtgctgtgtggctgctgctgaggaagagcaagagtgatgacaagaccacccggctggaggccgtgcgggagatgtctgagacccaccactggcatgactaccagtaccgcatcatcgcccaggcctgtgaccccaagaccctgattggcctggcccggtctgaggagagtgacctgcgcttcttcctgctgcccccacccctgcccagcctgaaggaggacagcagcacagaggaggagctgcggcagctgctggccagcctgccccagacagagctggatgagtgcatccagtacttcaccagcctggccctgtctgagagcagccagagcctggccgcccagaagggcggcctgtggtgcttcggcggcaatggcctgccctatgcagagagctttggagaggtgcccagcgccaccgtggagatgttctgcctggaggccatcgtgaagcacagcgagatcagcacccactgtgacaagattgaggccaatggaggcctgcagctgctgcagaggctgtaccgcctgcacaaggactgccccaaggtgcagaggaacatcatgagggtcatcggcaacatggccctgaatgagcacctgcacagcagcatcgtgcgcagcggctgggtgtccatcatggccgaggccatgaagagcccccacatcatggagagcagccatgctgcccgcatcctggccaacctggaccgggagaccgtgcaggagaagtaccaggatggagtgtatgtgctgcacccccagtaccgcaccagccagcccatcaaggcagatgtgctcttcatccacggcctgatgggcgccgccttcaagacctggaggcagcaggacagcgagcaggccgtcatcgagaagcccatggaggatgaagatcgctacaccacctgctggcccaagacctggctggccaaggactgcccagccctgcgcatcatctctgtggagtatgacaccagcctgagtgactggagggcccgctgccccatggagaggaagagcatcgccttccgcagcaatgagctgctgaggaagctgcgggctgctggggtgggggacaggcctgtggtgtggatcagccacagcatgggcggcctgctggtgaagaagatgctgctggaggccagcaccaagccagagatgagcaccgtcatcaacaacacccggggcatcatcttctacagcgtgccccaccacggcagccggctggccgagtacagcgtgaacatccgctacctgctcttccccagcctggaggtgaaggagctgagcaaggacagccctgccctgaagaccctgcaggatgacttcctggagtttgccaaggacaagaacttccaggtgctgaactttgtggagaccctgcccacctacatcggctccatgatcaagctgcacgtggtgcctgtggagagcgctgacctgggcattggagacctgatccctgtggatgtgaaccacctgaacatctgcaagcccaagaagaaggatgccttcctgtaccagaggaccctgcagttcatccgggaggccctggccaaggacctggagaactag

SEQ ID NO: 225977 - DNA, 1596 bp, Artificial Sequence
  derived and/or modified sequence
atgagcctggccgcctactgcgtgatctgctgccggcggatcggcactagcaccagccctcccaagtccggcacccactggcgggacatccgcaacatcataaagttcactggatccctgatacttggggggagcctgtttctgacctatgaggtgcttgctctcaaaaaggctgtgacactggacacccaggttgtggaacgcgagaagatgaagtcctatatctatgtgcatactgtgagcctcgataaaggggagaaccatggaattgcctggcaagcccgcaaagagctgcacaaggcagtgcggaaagtcctcgccacatccgccaagatcctgaggaacccctttgccgaccctttcagtaccgtggacatcgaggatcacgagtgtgccgtttggttgctgctgaggaagagcaagagcgatgacaagactactcgcctagaggctgtacgggagatgtctgagacccaccactggcacgattatcaatacaggatcatcgcacaggcctgtgaccccaagaccctgattgggctggcccgaagcgaggagtctgacctgagattttttctcctgccgcctccacttcctagcctgaaggaagattcaagcacggaagaagagcttcgccagctgctggcttccctgccacaaactgaacttgacgagtgtatccagtatttcacttccctcgcattatccgagagttcacaatctctggccgcacaaaaggggggactgtggtgcttcggaggaaacggcctcccatatgccgaatcatttggagaggtaccttccgcaactgtcgagatgttttgccttgaagcgatcgtgaaacactccgaaatctcgactcactgcgataaaatcgaggccaacggcggcttgcaactgcttcagaggctgtaccgtctccacaaagactgccctaaggtgcaaagaaatattatgcgagtgataggcaatatggccttgaatgagcatctgcatagctccatcgtgagaagcggctgggtaagcataatggccgaggcaatgaaatctccccacattatggagagtagtcatgctgctagaatcttggcaaatctcgatagagagaccgtgcaggagaaataccaggacggggtgtatgtgcttcatccacaatatcgaaccagccagcccattaaagctgacgtgctcttcatccacggccttatgggcgccgctttcaagacatggcggcaacaggacagcgaacaggctgtgattgaaaaacctatggaggatgaggacaggtataccacctgttggcccaagacttggctggcaaaggattgccccgccctccgtatcattagcgtagaatatgacacatcgctgagcgattggcgtgcacgctgccctatggagagacgcagtttactctcaatcagcagcggaatagtggaaggcctcgaatcgccactgcactccgaggccaccaatttccttggttcaagcgagctgttggtactgggaatcggtcagtggtttggataccatatcgcttgggaggtttttctttccaagcgttgctgctggaaaccattgagatcccagaagtag

SEQ ID NO: 225978 - DNA, 1596 bp, Artificial Sequence
  derived and/or modified sequence
atgagcctggccgcctactgcgtgatctgctgccggcggatcggcactagcacttcacctcccaagagtggcacccactggagggacatcagaaacatcattaagttcacaggcagcctgatcttgggggggtccctctttctcacatacgaagtcctggccctaaagaaggccgtgaccctggatacgcaggtggttgagagagagaagatgaagagttacatctacgttcacactgtctctctcgacaaaggcgaaaatcacgggatcgcttggcaggcaagaaaggagctccacaaggctgtccgaaaagtgctggccacgtcggctaaaatcctaagaaaccctttcgccgaccctttctccaccgtggacattgaagaccatgagtgcgctgtgtggcttttattaaggaagtccaaaagcgacgacaagactacacgcctcgaagctgtgcgtgaaatgtccgaaacccaccactggcatgactatcagtatcgtataatagcccaggcttgcgatccaaagactctgatcggcctagcccgaagcgaggagtcagatttacgttttttcctgctgccaccccctctcccctccctgaaggaagattcatcaacagaggaagagctccgccagttactggcctcgctgcctcagactgaactggacgaatgtattcagtactttacttccttggcactgtctgagtcatctcaatctctcgcagcccagaaaggcggtctctggtgttttggcggaaacggtttgccatacgcggagtccttcggagaggtcccctctgccaccgtggagatgttctgtctggaagccatcgtgaagcatagtgagatatcaactcattgcgataaaatcgaggccaatggtggcctccagctgctccagaggttgtaccggctgcacaaagactgccctaaagtacagcggaatattatgagagtcatcggaaatatggcccttaatgaacacttgcactcaagcatcgtgcggagcggctgggtgtccatcatggccgaggccatgaaatcacctcatattatggagtcctcacacgctgccaggattctcgccaacctggaccgcgaaacggtgcaggagaagtatcaggacggcgtctacgtgcttcaccctcagtaccggacgagtcagccgatcaaggccgatgtgctcttcatccatggcctgatgggagcagcttttaaaacctggaggcaacaggactctgagcaggctgtcattgaaaaaccgatggaggacgaggacagatacactacgtgctggccaaaaacctggctcgctaaggactgccctgccctccgcattattagcgtggaatacgatacgagcctttctgattggagggcaaggtgtcctatggagaggaggtcactcctgtccatcagtagtggaatagtggaaggattggaatctcctctgcacagcgaggcaactaattttctgggatcttcagaactgcttgtgctgggaatcggacagtggttcggctaccacattgcttgggaagtctttctgtcaaaacgatgctgctggaaaccactccggagtcaaaaatag

SEQ ID NO: 225979 - DNA, 1965 bp, Artificial Sequence
  derived and/or modified sequence
atgagcctggccgcctactgcgtgatctgctgccggcggatcggcacatcaacctcaccgccaaagagcggtacccactggcgggacatcaggaacataattaaatttacagggtccctgattctgggaggctccctgttcctgacatacgaagttctagccttgaagaaggctgtgaccttggatactcaggttgtggagagagaaaagatgaaaagttacatctacgtgcatacagtgtcgctggataagggcgaaaaccacggtatcgcatggcaggctcgcaaagagctgcataaggcggtgaggaaagtgttggctacgtcagccaaaatactcagaaacccattcgcagatccatttagtactgtggacatcgaagaccatgagtgcgcagtgtggttgttgctgaggaaatcaaagtctgacgataagacgacccgcctggaggctgttagggaaatgtcagagactcaccattggcacgactatcagtacagaatcatcgcccaggcatgtgaccccaagacattgattggcctggcccggtcagaagaatctgacttgcggttcttcctcctaccccctccacttcccagcttgaaggaggactcatcaactgaggaagagcttcggcaactgctagcttccctcccacagactgagctggacgagtgcatccagtactttactagcctcgccttgtccgagtcatcccagtcccttgccgcccagaagggagggctgtggtgtttcggggggaacggcttaccatatgccgagtcctttggggaggtacctagcgcaacagtagaaatgttctgcttggaagcaatcgtgaaacactccgagatctctacacactgtgataagattgaggctaatggagggctacagctcctccagagactgtaccgactccataaggactgtcccaaggttcagagaaacatcatgcgagtaattggaaatatggcactgaatgaacacctgcattcttccattgttcggagcggatgggtgagcatcatggcagaagccatgaagtctccacatatcatggaatcttctcacgctgccagaatcctggccaatttagatcgagagactgtgcaagagaagtatcaagacggagtgtatgtccttcatccgcagtatcgcacgtcacagcccattaaagctgacgttctgttcattcatggcttgatgggcgccgcttttaagacttggagacagcaggatagtgagcaagcggtgatcgagaagccaatggaggacgaagaccgctacacaacttgctggccaaaaacctggctggcaaaggattgccccgcactccggataatttctgtggaatacgataccagtctatccgactggcgggccaggtgtcccatggagcgcaagagcatagcgttccggtcgaatgagctgttaagaaaactacgcgctgccggggtgggcgatagaccggtcgtgtggatcagccattcaatgggtgggttgttggtcaaaaaaatgctcctcgaagcatcaacgaagcctgagatgagcaccgtgattaataacaccagaggcatcattttctactcagtcccccatcacggaagtcgcctagccgagtactcagttaacatccggtacctgttattcccatctctggaggtcaaggagttgagtaaggactccccggctctgaagacactgcaggacgacttcctggagttcgctaaagataagaactttcaggttctgaatttcgtggaaaccctccctacctatattggctcaatgataaagcttcacgtcgtccccgtggaatcagctgacctgggcatcggcgacctcattccggtggatgtgaaccacctcaacatatgcaaaccaaagaaaaaagatgcttttctgtatcaaaggacccttcagtttatcagagaggctctagccaaagacctggaaaattag

SEQ ID NO: 225980 - RNA, 1596 nt, Artificial Sequence
  derived and/or modified sequence
augucucuggcagccuauugcgugauuugcugcaggcgaaucggcaccucuacaucaccaccaaaguccgggacucacuggcgggauauucguaacaucaucaaauuuacaggaucgcugauucugggcggaagcuuauucuugacguaugaagugcuugcuuuaaagaaggccguuacacuggacacucaagucguggaaagagaaaagaugaaguccuauauuuauguccacaccgugagccuugauaaaggcgaaaaucacggaaucgccuggcaggcaaggaaagaacuccauaaagccgugagaaaagugcucgcaacaagugccaaaauuuugcggaaccccuucgcagauccauuuucuacaguggacaucgaggaccaugagugugcuguguggcugcuccuccgcaaauccaagagcgacgacaagacaacaaggcuugaggccguucgggagaugucagaaacacaucacuggcacgauuaucaauaccggaucaucgcgcaggcaugcgaccccaaaacucugauuggcuuggcgcgaagcgaagagucugauuuacgauuuuuccuauuaccuccgccucugccaucauuaaaagaggauucauccaccgaagaagagcuccgccagcucuuagcgucccuaccgcagacagaacuggaugaguguauucaauacuuuaccucucuugcccugucugagucuagucagaguuuagcagcacagaaagguggacuuuggugcuucggcgggaaugggcuuccauaugcagagucuuuuggcgagguaccauccgcuaccguagagauguucugccuggaggcuauagugaagcauagcgaaaucuccacccauugcgacaagauagaggcuaacggcggguugcaguugcuucaacggcucuaucgauugcauaaagauugcccuaagguucaacgaaauaucaugcgagugauuggaaauauggcccugaaugagcaccuucacuccucuaucgugcgaucaggauggguuucaaucauggccgaggcuaugaagagcccccacaucauggaauccucccaugcugcucggauucucgcaaaucucgaucgagagacaguacaggagaaauaccaggauggaguauacguuuugcacccccaguacaggaccagccaaccuauuaaggccgauguguuguuuauccacggccugaugggagcagcuuuuaagaccuggcgccaacaagauucugagcaggccguaaucgaaaagcccauggaagacgaagacagauacacaacuuguuggccgaaaacguggcucgcaaaagacugcccugcucugcgcauuaucucaguugaguacgauaccagcuuaucugacuggcgggcaagguguccuauggaacgaagauccuugcugagcaucagcucuggaaucgucgaaggauuagagucuccucuacauagugaggccacgaauuuuuuaggaucuuccgaacuucuugugcucggcauaggccagugguuuggcuaucacauugccugggaaguguuucugagcaaacggugcugcuggaagccccuacguucucagaaguag

SEQ ID NO: 225981 - RNA, 1596 nt, Artificial Sequence
  derived and/or modified sequence
augucccuggccgccuacugugucaucugcugucgcagaauagguacuuccaccucuccaccaaaaucuggcacccacuggcgugauauucgcaacauuaucaaguucaccggcucacugauucuuggcggaagccuuuucuuaacuuacgaaguccuggccuuaaaaaaagcuguaacacuagacacucagguaguagaaagggagaaaaugaagaguuauaucuacguucacaccgugucacuggacaagggagagaaucacggaauugcauggcaggccagaaaggagcugcacaaagcagugcggaagguccuggcaacuagcgcuaagauccuuaggaacccauuugccgacccguuuucaacuguggauaucgaagaccacgagugugccgucuggcugcuguugcggaaauccaaaucagacgacaaaacaacgcgacucgaggcuguaagggagaugucugagacucaccauuggcacgauuaucaguaucgaauuauugcacaggcuugcgaccccaagacacuuauugggcuugcacguuccgaggaguccgaucugagauuuuuucuccuccccccuccguuaccuagucucaaagaggauagcuccacagaagaggaacugagacagcuccuggcaagccugccacagacagagcuggacgaaugcauucaauacuucacgucauuagcucuguccgaaucuucucagucucuugcugcgcagaagggaggacuguggugcuucggcgggaaugggcucccuuacgccgaaagcuuuggugagguuccaagcgcaaccguggagauguucugucucgaagcgauugugaaacauucagagauaucaacgcauugcgacaaaaucgaggcaaacggcggucugcaacugcuccagcgccuguaccgguuacacaaggauuguccuaaaguucagaggaacauuaugcgcguuauugggaauauggcccugaacgagcaucugcauucuucaauagugcgcucagguuggguuaguauuauggcagaggcaaugaagucuccccauauaauggaauccagucacgcugcccgcauacucgccaaucucgauagggaaacgguccaggagaaauaucaagauggggucuacguccuucauccccaguaccgaacuagccagccaaucaaagccgacgucuuauuuauucauggccugaugggugccgcauucaagaccuggcgccagcaggauucugagcaggcuguuaucgagaagccuauggaagaugaagaucgauacacaacaugcuggccuaagacauggcuggcuaaggacugcccagcccuuagaauuauuaguguugaauacgauacuagccuaucugacuggcgugcaagauguccaauggagcggcggaguuugcugagcauuucaagcgggaucguggaggguuuagaauccccccugcauuccgaggcuaccaacuuucuuggcuccuccgagcuucuugugcuugggaucggucagugguuuggguaccauauugcuugggaaguauuuuugucuaaacgcuguuguuggaagccuuuacgcagccagaaauag

SEQ ID NO: 225982 - RNA, 1965 nt, Artificial Sequence
  derived and/or modified sequence
augucucuggccgcuuacugcguuaucugcugcaggaggaucgggaccucuacaucucccccaaaauccggcacucacuggcgggauauacgcaauauuauuaaauucaccgggucucuuauucugggagguucucuguuccucacuuacgagguguuggcccugaaaaaagcuguuacucuugacacccaaguuguggagcgagaaaagaugaagucauauauuuacguacauacaguuagccuggacaagggcgagaaccaugguauagcguggcaggcaagaaaagaguugcacaaagcagugcguaagguucuggccacuucugccaagauccugcggaacccguucgcagaccccuuuuccaccguggacaucgaggaccacgaaugugcugucuggcucuugcuccggaagucuaagagcgaugauaagacaacacgccuggaggcagugcgagaaaugucagaaacccaccauuggcacgacuaucaauaccggauuauugcucaggccugcgaucccaaaacacucaucggucucgccagaagugaggagagugaucugcgguucuuccuucuaccaccaccacugccuagucugaaggaagacagcucuaccgaagaggagcucagacagcugcuggcaagccugccacaaacggaacucgacgaaugcauucaguauuuuacgucacuugcacucagcgaauccucucagagucucgcagcccaaaaagggggucugugguguuucggugguaacggguugccguaugcagaguccuuuggggaagugccguccgccacgguggaaauguucugcuuagaagccaucgugaaacacagcgagauauccacccacugcgauaagauugaagccaacggcgggcuucagcuucuacagcgccuguaucgacuccacaaggacugucccaaaguccagagaaauauaaugcgcguuaucgguaacauggcucuuaacgagcaucuccauuccagcaucguacgcagcggcugggugucuaucauggcugaagcuaugaaaucuccucacauuauggaaucuucccacgccgcucguauucuugcuaaucucgaccgcgagacaguucaggaaaaauaucaagacggaguuuacguuuugcauccucaguaccgaacaagucagccuauuaaggcagacguuuuauucauucacggacugaugggugcggccuucaagacguggcgacaacaggauagcgaacaagccgugauugagaaaccaauggaggacgaggauagauacacaaccuguuggccaaagacauggcuugcuaaagauugccccgcccugcgaauaauuucaguugaguacgauacuucucucuccgacuggcgugcuagauguccaauggagcgaaaauccauagcauuuagaaguaaugagcuacugagaaaguugagagcagccgggguuggagaucguccugugguauggaucucccacagcauggguggccugcuaguaaaaaaaaugcuccuugaagcuagcacgaagccagaaaugaguacaguaauuaacaacacacgagguauuauuuucuauaguguuccacaccauggcucaagacuggcagaguauuccguuaauaucagguaucuguuauucccuucccuggaagugaaagagcugagcaaggauagccccgcucuaaagacuuuacaggacgacuuucuggaguuugccaaagacaaaaacuuccaggugcucaacuuuguugaaacccuucccacauauaucgguucaaugaucaagcugcacgucgugccagucgaaagcgccgaccuaggaaucggagaccugauacccguggacgugaaccauuuaaauaucugcaagccgaagaagaaggacgccuucuuauaucagcggacucuccaauucauucgugaggcucuugcuaaagaucucgagaacuag

SEQ ID NO: 225983 - RNA, 1596 nt, Artificial Sequence
  derived and/or modified sequence
augagccuagccgcuuacugcgugaucuguugccgcaggauagggacgaguacuagccccccuaaaucuggcacccacuggcgggacauuagaaacaucauuaaguuuacuggaaguuugauacuuggaggcucucuuuuucuuaccuacgaaguccuagcauuaaagaaagccguaacucuggacacccaagucguugagcgggaaaagaugaaaagcuacauauauguacauacagucucccuugacaagggagaaaaucacggaauugcauggcaggcccgcaaggaguuacauaaggcagucaggaaagugcucgcaaccucugccaaaauccuaaggaaccccuuugcugauccuuuuucuacaguugacaucgaggaccaugaaugcgcugugugguuacugcucagaaaaucgaagagugaugacaagaccacccguuuggaagcugugagggagaugagcgaaacccaucacuggcacgacuaccaguaccguauuaucgcccaagcaugcgacccuaagacccucauuggauuggcacgcagugaggaaagcgaccucagauuuuuccuccucccaccuccucuuccuucucucaaggaagauucaaguacagaagaggagcuacgacagcuucuagcgucacugccccaaacagagcuggacgaguguauucaguacuucaccuccuuagcgcuuucugaguccucccagagccuggcggcgcagaaggguggacucugguguuucggggggaauggcuugccuuaugcggaguccuuuggagaggucccaucagccacugucgaaauguuuugucuugaggcuauuguaaaacacucugaaauuaguacacauugcgacaagauugaggccaauggcggcuugcagcugcugcagaggcucuaccgacuucacaaagacugucccaagguccaacgaaacaucaugagagugaucgguaauauggcgcugaacgaacaccuucauucaucuauuguacgcuccgguuggguuuccauuauggcugaggcgaugaaaucuccccauaucauggaaaguucacacgcagcucggauucuugccaauuuggacagagagaccguucaagaaaaguaucaagacggcguuuacgugcuacauccucaguaccggacgagccagccuaucaaagcugacguguuauuuauucacggccugaugggagcagcuuuuaagaccuggcgccaacaagauucugagcaggccguaaucgaaaagcccauggaagacgaagacagauacacaacuuguuggccgaaaacguggcucgcaaaagacugcccugcucugcgcauuaucucaguugaguacgauaccagcuuaucugacuggcgggcaagguguccuauggaacgaagauccuugcugagcaucagcucuggaaucgucgaaggauuagagucuccucuacauagugaggccacgaauuuuuuaggaucuuccgaacuucuugucuugggaauuggccaaugguuuggauaccacauugccugggaaguguuccucucaaaacguuguugcuggaaaccucuacgcucacagaaguag

SEQ ID NO: 225984 - RNA, 1596 nt, Artificial Sequence
  derived and/or modified sequence
augucacuagcugccuauugcgugauuuguugccgucgcaucggcacaaguaccagcccgccuaaaagcggaacacacuggagggauauucgaaacauuauuaaauuuacuggcagucugaucuugggggggucccuguuccuaacauaugaagugcuugcccuaaaaaaagcuguaacacuugauacccaggucguugagagggagaagaugaaaucauauaucuacguccacacuguuucuuuggacaaaggggaaaaucacggaaucgccuggcaagcgcgcaaggaacugcauaaggccguucggaaaguucuggccacuuccgccaaaauucuacgcaauccauucgcugacccauuuuccacagucgacaucgaggaccacgaaugugcgguauggcugcuccugagaaaguccaaaagugacgacaagacaacaaggcucgaagcuguccgcgagaugagcgaaacccaccacuggcacgacuaccaauacagaauuaucgcccaggcuugugacccuaaaacccugauuggacuagcccgcucagaggagucugaucugcgguucuuucuucuccccccgccgcuucccagcuugaaagaagacucuaguaccgaggaggaauugcgacagcuccuggccucacuuccucagaccgagcucgacgaauguauccaauauuuuaccucauuagcccucuccgaguccucccagucccucgcugcccaaaaagggggacuguggugcuucggcgguaacgggcugcccuacgcagaaucuuuuggggaaguuccaucagccaccguggagauguuuugucuggaagccauuguuaagcacagcgagauaagcacucauugcgauaaaauugaggcgaaugggggucugcaacugcuccagcgccuguaccgguuacacaaggauuguccuaaaguucagaggaacauuaugcgcguuauugggaauauggcccugaacgagcaucugcauucuucaauagugcgcucagguuggguuaguauuauggcagaggcaaugaagucuccccauauaauggaauccagucacgcugcccgcauacucgccaaucucgauagggaaacgguccaggagaaauaucaagauggggucuacguccuucauccccaguaccgaacuagccagccaaucaaagccgacgucuuauuuauucauggucugaugggcgcagcguuuaagacauggagacagcaagauagcgagcaggcugucauagaaaaaccuauggaggaugaggaucgguauaccacauguuggcccaagacguggcucgccaaggauugcccagcccugcgcauuauuucaguugaguacgauacuaguuugucagauuggagggccaggugucccauggaacgcaggagucuccuaagcaucucuucugguaucguggaaggccucgagucaccauugcauucagaagcuacaaauuuuuuaggauccagcgaacuucuggugcugggaauuggccagugguucggcuaccauauagcuugggaaguguucuugucuaaacguuguuguuggaaaccucuuagaagucagaaauag

SEQ ID NO: 225985 - RNA, 1965 nt, Artificial Sequence
  derived and/or modified sequence
augucacuugcugccuauugugucauuuguugucggcggauuggcacuuccacaucacccccuaagucagggacccauuggagggauauaagaaauauuaucaaguucacugggagucuaauacuaggagguuccuuguuccuuacuuacgaggugcucgcacucaagaaggcugucacucucgacacacaagugguggaaagagaaaagaugaagucuuacauuuacgugcauacgguuucuuuagauaagggcgaaaaccauggcauugccuggcaggccagaaaagagcugcauaaggcagugcguaagguccuggccacauccgccaaaauucuccggaacccuuucgcugauccuuuuuccaccguugacaucgaagaccacgaaugcgcaguguggcugcuccuaagaaaaucuaaauccgaugacaaaaccaccagacucgaggcugugagggagaugagcgaaacccaccacuggcacgacuaccaauaucggaucaucgcucaagcaugcgaucccaagacacucauaggcuuggcucgaagcgaagaaagcgaccuucguuuuuuuuuguuaccuccgccuuugccaucccucaaagaggauucauccaccgaggaagaguugcggcaguuacuagccucucugccacagaccgaacuggacgaaugcauccaauauuucacuucucucgcgcucagcgaaucuucucagucccuggcugcccaaaaaggaggucucugguguuucgggggaaacggacugccuuacgcggaguccuuuggcgaggugcccagugccacaguagaaauguuuugucuagaggcaauuguuaagcauagugaaaucucuacccacugcgacaaaaucgaagcaaacggggguuugcagcucuuacaaagacuguaucgcuugcacaaggacugucccaagguucagagaaauaucaugcgugucauaggcaauauggccuuaaaugaacaccuccauuccuccauuguucgaucaggcugggugucaauuauggccgaagcaaugaaaucaccgcauauuauggaaaguagucaugcugcccgcauucuagcuaaccuagaucgggaaacaguacaggaaaaguaccaggacggaguguauguccugcauccucaauaucgcaccagccagcccaucaaggcggaugugcuguucauucacggacugaugggugcggccuucaagacguggcgacaacaggauagcgaacaagccgugauugagaaaccaauggaggacgaggauagauacacaaccuguuggccaaagacauggcuugcuaaagauugccccgcccugcgaauaauuucaguugaguacgauacuucucucuccgacuggcgugcuagauguccaauggagcgaaaauccauagcauuuagaaguaaugagcuacugagaaaguugagagcagccgggguuggagaucguccugugguauggaucucccacagcaugggugguuuauugguuaagaaaaugcuccuggaagccagcacuaagccagagaugucuacaguuaucaauaacacaagaggaaucaucuuuuacuccgucccucaccauggaucuaggcucgcagaguauagcguuaauaucagguaucugcuauuuccaucacuggaggucaaagaacucuccaaggacagccccgcacuuaaaacucuacaagacgauuuucucgaauuugccaaagacaagaacuuccagguccugaacuucguugaaacgcucccaacauauauaggcuccaugauuaagcugcauguaguuccaguggaaucugcugaccucggaaucggagaccuuauccccguggacgucaaccaucugaauauuugcaaaccuaaaaagaaggaugcuuuuuuauaccagagaacucuccaauuuauacgcgaagcccuggcuaaagaucuggaaaacuag

SEQ ID NO: 225986 - protein, 715 aa, Artificial Sequence
  derived and/or modified sequence
MSQVMSSPLLAGGHAVSLAPCDEPRRTLHPAPSPSLPPQCSYYTTEGWGAQALMAPVPCMGPPGRLQQAPQVEAKATCFLPSPGEKALGTPEDLDSYIDFSLESLNQMILELDPTFQLLPPGTGGSQAELAQSTMSMRKKEESEALDIKYIEVTSARSRCHDGPQHCSSPSVTPPFGSLRSGGLLLSRDVPRETRSSSESLIFSGNQGRGHQRPLPPSEGLSPRPPNSPSISIPCMGSKASSPHGLGSPLVASPRLEKRLGGLAPQRGSRISVLSASPVSDVSYMFGSSQSLLHSSNSSHQSSSRSLESPANSSSSLHSLGSVSLCTRPSDFQAPRNPTLTMGQPRTPHSPPLAKEHASSCPPSITNSMVDIPIVLINGCPEPGSSPPQRTPGHQNSVQPGAASPSNPCPATRSNSQTLSDAPFTTCPEGPARDMQPTMKFVMDTSKYWFKPNITREQAIELLRKEEPGAFVIRDSSSYRGSFGLALKVQEVPASAQSRPGEDSNDLIRHFLIESSAKGVHLKGADEEPYFGSLSAFVCQHSIMALALPCKLTIPQRELGGADGASDSTDSPASCQKKSAGCHTLYLSSVSVETLTGALAVQKAISTTFERDILPTPTVVHFKVTEQGITLTDVQRKVFFRRHYPLTTLRFCGMDPEQRKWQKYCKPSWIFGFVAKSQTEPQENVCHLFAEYDMVQPASQVIGLVTALLQDAERM

SEQ ID NO: 225987 - protein, 128 aa, Artificial Sequence
  derived and/or modified sequence
MRPVPVRGVHSLHPRPFGGPVSLPWLRTGRCRWGLGLYRQPSLLPEEICGVFFRRHYPLTTLRFCGMDPEQRKWQKYCKPSWIFGFVAKSQTEPQENVCHLFAEYDMVQPASQVIGLVTALLQDAERM

SEQ ID NO: 225988 - DNA, 2148 bp, Artificial Sequence
  derived and/or modified sequence
atgagccaggtgatgagcagccccctgctggccggcggccacgccgtgagcctggccccctgcgacgagcccagaagaaccctgcaccccgcccccagccccagcctgcccccccagtgcagctactacaccaccgagggctggggcgcccaggccctgatggcccccgtgccctgcatgggcccccccggcagactgcagcaggccccccaggtggaggccaaggccacctgcttcctgcccagccccggcgagaaggccctgggcacccccgaggacctggacagctacatcgacttcagcctggagagcctgaaccagatgatcctggagctggaccccaccttccagctgctgccccccggcaccggcggcagccaggccgagctggcccagagcaccatgagcatgagaaagaaggaggagagcgaggccctggacatcaagtacatcgaggtgaccagcgccagaagcagatgccacgacggcccccagcactgcagcagccccagcgtgaccccccccttcggcagcctgagaagcggcggcctgctgctgagcagagacgtgcccagagagaccagaagcagcagcgagagcctgatcttcagcggcaaccagggcagaggccaccagagacccctgccccccagcgagggcctgagccccagaccccccaacagccccagcatcagcatcccctgcatgggcagcaaggccagcagcccccacggcctgggcagccccctggtggccagccccagactggagaagagactgggcggcctggccccccagagaggcagcagaatcagcgtgctgagcgccagccccgtgagcgacgtgagctacatgttcggcagcagccagagcctgctgcacagcagcaacagcagccaccagagcagcagcagaagcctggagagccccgccaacagcagcagcagcctgcacagcctgggcagcgtgagcctgtgcaccagacccagcgacttccaggcccccagaaaccccaccctgaccatgggccagcccagaaccccccacagcccccccctggccaaggagcacgccagcagctgcccccccagcatcaccaacagcatggtggacatccccatcgtgctgatcaacggctgccccgagcccggcagcagccccccccagagaacccccggccaccagaacagcgtgcagcccggcgccgccagccccagcaacccctgccccgccaccagaagcaacagccagaccctgagcgacgcccccttcaccacctgccccgagggccccgccagagacatgcagcccaccatgaagttcgtgatggacaccagcaagtactggttcaagcccaacatcaccagagagcaggccatcgagctgctgagaaaggaggagcccggcgccttcgtgatcagagacagcagcagctacagaggcagcttcggcctggccctgaaggtgcaggaggtgcccgccagcgcccagagcagacccggcgaggacagcaacgacctgatcagacacttcctgatcgagagcagcgccaagggcgtgcacctgaagggcgccgacgaggagccctacttcggcagcctgagcgccttcgtgtgccagcacagcatcatggccctggccctgccctgcaagctgaccatcccccagagagagctgggcggcgccgacggcgccagcgacagcaccgacagccccgccagctgccagaagaagagcgccggctgccacaccctgtacctgagcagcgtgagcgtggagaccctgaccggcgccctggccgtgcagaaggccatcagcaccaccttcgagagagacatcctgcccacccccaccgtggtgcacttcaaggtgaccgagcagggcatcaccctgaccgacgtgcagagaaaggtgttcttcagaagacactaccccctgaccaccctgagattctgcggcatggaccccgagcagagaaagtggcagaagtactgcaagcccagctggatcttcggcttcgtggccaagagccagaccgagccccaggagaacgtgtgccacctgttcgccgagtacgacatggtgcagcccgccagccaggtgatcggcctggtgaccgccctgctgcaggacgccgagagaatgtag

SEQ ID NO: 225989 - DNA, 2148 bp, Artificial Sequence
  derived and/or modified sequence
atgtctcaggttatgagctcccccctcctggctggagggcatgctgtgtccctggcaccctgcgacgaacctagaaggaccctgcatccagcacctagtccgagcctcccgcctcagtgcagctactatacaacagagggttggggcgcccaggctctgatggctcctgttccctgcatggggccacccggtcgtctgcagcaggcgcctcaagtggaagctaaggcgacgtgcttcttgccctccccaggtgagaaagcactcgggacgcctgaggatctcgacagttatattgacttcagtttagagtcattaaaccagatgatccttgaactggatcccacattccaattgttgcctcccggaactggaggaagtcaggcagagttagcacaatctacaatgagtatgcgtaagaaggaggagtctgaggcactggatatcaaatacatcgaagtgacatccgcgcggtcacgttgtcacgacggccctcagcactgctctagtccctctgtgactccgccctttggaagtctgaggagcggtggactgctcttgagcagggatgtgcctcgcgagacgcgatcttcaagcgagtccttgattttttcgggaaaccagggtcgtggacatcagcgcccactccccccctccgaagggttatcgccccggccccctaactcaccaagcatatcaattccttgcatgggctctaaggcatcctctccacatggtctcggaagtcctctggttgcatccccccgcctggagaaaagactcggaggtctcgctcctcagcgaggtagtcgtattagtgtgctgagcgctagtcccgtgtccgacgtatcgtacatgtttggttcaagccagtcactgttgcattcgtcgaattcatcccatcaatccagctctaggagtctcgagtcgcctgctaacagtagttcatcactgcactccttaggctcagtctctctctgcactaggccaagtgattttcaagccccccgaaatcctacccttaccatgggtcaacctcgtaccccccatagtcctccgctggctaaggaacacgcctcttcatgcccgccttcaatcaccaatagcatggttgatattcccattgtacttattaacgggtgccctgagcctggttcatccccccctcagaggaccccaggccatcaaaactctgtgcagcctggagctgcatctccatccaacccttgccccgccacacggagcaacagccagaccctttccgacgctcccttcacaacttgcccagaaggaccagctagggatatgcaacctacgatgaaattcgttatggataccagcaaatactggttcaaaccaaatatcacccgtgaacaagccatcgaacttttgagaaaggaggaaccaggggcattcgttatacgcgactccagcagctacaggggcagttttggacttgccctgaaggtgcaagaggtgcccgcttcggcccagagtaggccaggagaagactcaaatgatttaattaggcactttctgattgagagtagtgcaaagggtgtccatctgaaaggtgctgacgaggaaccctacttcggttcactgtctgcttttgtttgccagcatagcataatggccctggcacttccgtgcaagctgactataccacaaagagaacttggtggggccgatggagcaagcgactccacagattcgccggcatcttgccagaagaagtcagctgggtgccacactctgtatcttagctcagtgtccgtggagactttaacgggcgcgctggcagtgcagaaagccatttctaccacattcgagcgagacatactgccgacgcccacagtcgtacacttcaaagtcacagaacagggcataacgctaactgatgtccaaaggaaagtcttctttcgacggcattacccactgacgacattgcggttttgcgggatggacccggagcagagaaaatggcagaaatactgcaaaccatcgtggattttcggtttcgttgcaaaaagtcagactgagccccaggagaatgtgtgccacctgtttgccgagtacgatatggttcagcctgcctctcaggttatagggctcgtaacggccctgttacaagacgcggagagaatgtag

SEQ ID NO: 225990 - DNA, 2148 bp, Artificial Sequence
  derived and/or modified sequence
atgagccaggtaatgtccagcccccttctggccgggggacacgccgtgtcattagctccatgcgatgaaccacgacgtaccttgcacccagccccgtccccttctctgccgccacaatgttcttactacacgaccgaagggtggggggcccaggcgttaatggctccagtcccttgtatgggaccaccaggccggctgcagcaggctccccaggtggaggcaaaagcaacatgcttcctcccaagcccgggcgagaaagcactggggacaccggaggatctcgactcctacatcgatttttccctggagagtcttaatcagatgatactggaactcgacccaacatttcagctgttgccgcccggtacaggggggtcccaagcagagctggcccagagtaccatgagcatgcgaaagaaggaagaaagcgaggccctcgacattaaatatatcgaggtgacctcagcacgcagtaggtgccatgatgggccacagcactgtagcagcccttctgtgactccgccattcggcagtcttcgatccggcgggctcctgctctctcgagatgtgccccgcgagactaggtcctcgagtgagtctttgattttctccggcaatcagggcagggggcaccagcgccccttacccccctctgaggggctgagtccgaggccccctaattccccgagcatcagtatcccatgcatggggtcaaaagcaagcagtccccatggactcggctcgcccctagtggcaagccctcggttagaaaaacggctggggggcctcgcccctcagcgaggctcccgaatctccgtgctgagcgccagcccagtgtctgatgttagctatatgttcgggtcatcccagagcctcctccactcttccaactcaagtcaccaatcaagctccaggtctctagagtctcccgctaacagcagtagcagcctccattcattagggagcgtttctctgtgcactagaccctctgacttccaagcccctagaaatcccactctgacgatgggccagccccggaccccccacagccctcccctggccaaagaacatgccagcagctgccccccaagcatcacaaactcaatggttgacataccgatcgtcctcataaatggctgccccgaacccggctctagccccccacaaagaacgccgggacatcagaattcggttcaaccaggggcggcatcacctagtaacccatgtcctgctactcggtctaacagccaaaccctttctgacgccccatttacgacatgccctgagggcccagctcgtgatatgcagcctaccatgaagttcgtgatggacacatcaaaatattggtttaagccaaacattacgcgcgaacaagccatagagcttctccgcaaggaagaacctggggcattcgttattagggactcttccagctaccgtggttcatttggactcgccctcaaagttcaagaggtgcctgcgtcagcccaatcccgcccaggagaggatagtaatgatcttatacgccatttcctgatagagagctccgcaaaaggggtgcatctaaaaggggcagatgaagagccatatttcggatcactttctgctttcgtctgtcaacattccatcatggcactggccttgccgtgcaagctgaccattccacagcgcgagcttggcggagcggatggcgctagcgatagtactgattctccggcttcatgccaaaaaaagagcgccggttgccatacactgtatcttagctctgttagcgtagagaccttaaccggagccttggctgttcagaaagctatttcaacaacattcgaacgcgacatcctgcctacacccaccgtggttcactttaaagtgactgagcagggaattactctgaccgatgttcagcgtaaggtctttttcagaaggcattaccctcttaccacactccggttctgtggtatggatccagaacagagaaagtggcaaaagtactgtaaacccagttggatattcggctttgtagccaaatcccaaaccgagccccaggaaaacgtgtgccacctatttgccgagtatgatatggttcaacccgcttcacaagtgatcgggctggtcacagcactcttgcaggatgcagagcgcatgtag

SEQ ID NO: 225991 - DNA, 2148 bp, Artificial Sequence
  derived and/or modified sequence
atgagccaggtgatgagcagccccctgctggccggcggccatgctgtgtccctggccccctgtgatgagcccaggaggaccctgcacccagcccccagccccagcctgcccccccagtgcagctactacaccacagagggctggggcgcccaggccctgatggcccctgtgccctgcatgggccccccaggccgcctgcagcaggccccccaggtggaggccaaggccacctgcttcctgcccagccctggagagaaggccctgggcaccccagaggacctggacagctacatcgacttcagcctggagagcctgaaccagatgatcctggagctggaccccaccttccagctgctgcccccaggcactggaggcagccaggccgagctggcccagagcaccatgtccatgaggaagaaggaggagagcgaggccctggacatcaagtacatcgaggtgaccagcgcccggagccgctgccatgatggcccccagcactgcagcagccccagcgtgaccccacccttcggcagcctgcggagcggcggcctgctgctgagcagagatgtgccccgggagaccaggagcagcagcgagagcctcatcttcagcggcaaccagggccggggccaccagaggcccctgccccccagcgagggcctgagccccaggcctcccaacagccccagcatcagcatcccctgcatgggcagcaaggccagcagcccccacggcctgggcagccccctggtggccagcccccggctggagaagaggctgggcggcctggccccccagaggggcagccgcatctctgtgctgagcgccagccctgtgtctgatgtgtcctacatgtttggcagcagccagagcctgctgcacagcagcaacagcagccaccagagcagcagccgcagcctggagagccctgccaacagcagcagcagcctgcacagcctgggctctgtgtccctgtgcacccggcccagcgacttccaggcccccaggaaccccaccctgaccatgggccagcccaggaccccccacagcccccccctggccaaggagcacgccagcagctgcccccccagcatcaccaacagcatggtggacatccccatcgtgctgatcaatggctgcccagagcccggcagcagccccccccagaggaccccaggccaccagaacagcgtgcagcccggggccgccagccccagcaacccctgcccagccaccaggagcaacagccagaccctgagtgatgcccccttcaccacctgcccagagggccctgcccgggacatgcagcccaccatgaagtttgtgatggacaccagcaagtactggttcaagcccaacatcacccgggagcaggccatcgagctgctgaggaaggaggagcccggggcctttgtgatccgggacagcagcagctaccggggcagctttggcctggccctgaaggtgcaggaggtgcctgccagcgcccagagcaggcctggagaggacagcaatgacctgatccgccacttcctgattgagagcagcgccaagggcgtgcacctgaagggagcagatgaggagccctacttcggcagcctgagcgcctttgtgtgccagcacagcatcatggccctggccctgccctgcaagctgaccatcccccagcgggagctgggcggcgcagatggagccagtgacagcacagacagccctgccagctgccagaagaagtctgctggctgccacaccctgtacctgagctctgtgtctgtggagaccctgaccggggccctggccgtgcagaaggccatcagcaccacctttgagcgggacatcctgcccacccccaccgtggtgcacttcaaggtgacagagcagggcatcaccctgacagatgtgcagaggaaggtgttcttcagaagacactaccccctgaccaccctgcgcttctgtggcatggaccctgagcagaggaagtggcagaagtactgcaagcccagctggatctttggatttgtggccaagagccagacagagccccaggagaatgtgtgccacctgtttgctgaatatgacatggtgcagcctgccagccaggtgattggcctggtgacagccctgctgcaggatgctgagaggatgtag

SEQ ID NO: 225992 - DNA, 2148 bp, Artificial Sequence
  derived and/or modified sequence
atgagccaggtgatgagcagccccctgctggccggcggccacgccgtaagtctcgcgccctgcgacgagccccggcggacactccacccggcaccaagccctagcctccctccccaatgctcttattatacgaccgagggatggggcgcacaggcccttatggcgccagtgccgtgtatggggccgccaggaagactgcaacaggcccctcaagtcgaggccaaggccacttgttttctaccatcacccggcgagaaagccctcggcacccccgaagacctggactcatatattgattttagcctggaatctttgaaccagatgatcctggagcttgacccgacgtttcagcttctccctcctggcactgggggtagtcaggccgaactcgcccagtccacgatgtctatgcgaaaaaaagaggaatcagaagcacttgacatcaagtatattgaggtgacgtcagcccgatctcgctgccatgatggaccacagcactgctcatccccttccgttactccgcctttcgggagcctgaggtctgggggacttctgctgtctagggacgtcccacgcgaaacccgcagtagtagcgaatccctgattttctctgggaatcagggccgtgggcaccagcggcccctgccgccctccgagggcctttcacctcgcccgccaaacagcccatctatttccattccttgtatgggctcgaaagctagttctccacacggcttggggtctcctctggtggccagcccccggttagagaagagacttgggggtcttgcgccacaaagaggctccagaattagtgtcctctctgcctctcccgttagtgacgtgtcgtatatgtttggcagttcacagtctctcctgcactcttccaacagctctcaccagagtagtagtcgctcattggaatctcccgctaacagttcgtcctcactgcattctctgggatcagtgtctctgtgcacccggcccagtgactttcaggcaccgaggaatcccacgcttaccatgggacagccacgcacgccgcatagtcctccattggctaaggagcatgcctcctcatgtccccccagcatcacgaatagcatggtggatatccccattgtcctaatcaacggatgcccggagccaggttcctcccccccccaacgtacccctggtcaccaaaacagtgtccagcctggagctgcgtcacccagtaacccgtgcccagccacacggtctaactctcagactctgagcgacgcaccgtttacaacgtgcccagaaggtcccgctagggacatgcaacccacgatgaagttcgtgatggatacctcaaaatattggttcaagcccaacatcacaagggagcaggccattgagctgctgagaaaggaggagcctggcgcattcgtaattagggacagctccagctacagaggaagcttcggtctggcgctgaaggtgcaggaggtgccagcctcagcccagagcagacccggtgaagacagcaacgatttaatacgccatttccttattgagtcaagtgctaaaggcgtgcacttgaagggagctgacgaggagccgtactttggcagtctgtccgcttttgtgtgccaacacagtattatggcgctagcacttccttgcaaactgacgatcccacaacgggaactcggaggcgcggacggggctagcgattcaacagattcgccggcatcatgccaaaagaaaagcgccggatgtcacactttgtacctgtctagcgtctctgtcgaaacactgacaggagccttggccgtgcagaaggctattagtaccacatttgagcgagatatcttgccaacacctaccgtggtacacttcaaagtgaccgagcaagggatcacattgactgacgtgcagaggaaggtgttctttagacgacactacccattgacgaccctgcgcttttgtggtatggatccagagcagcgcaaatggcagaaatattgcaagccctcatggatttttgggtttgtcgccaaatctcagacagaaccccaagaaaatgtgtgtcacctattcgcagagtatgacatggttcagcccgcctcacaggtgataggcctggtgactgccctgcttcaggatgcagagcgcatgtag

SEQ ID NO: 225993 - DNA, 2148 bp, Artificial Sequence
  derived and/or modified sequence
atgagccaggtgatgagcagccccctgctggccggcggccacgccgtatctctggccccttgtgatgaaccccgtagaacactccaccccgctccgtccccgagcctcccaccgcagtgttcctattataccacagaaggttggggtgcccaggccctcatggctccggtaccttgcatgggaccaccaggacgcctgcagcaggcaccgcaggtggaggccaaggccacttgttttctcccatctccgggggagaaggccctcggaacccctgaggacctcgatagctatattgatttctcattggagagcttgaaccaaatgattctcgagctggatcccacgttccagcttctccccccggggaccggtggatctcaagctgaactcgcacagtcaacaatgagtatgcgcaagaaggaggagagtgaggccctggacattaaatacatcgaagtgacaagcgctcgcagtcgttgtcacgatgggccccaacattgctcttccccgtctgtaaccccccctttcggaagcttgaggtccgggggcctgctactgtctcgcgatgttcctagagaaactagatctagcagtgagtccctgattttttccgggaaccagggtagagggcatcaaaggccattgcctccatctgagggcctgagtcccagacctccgaactccccgtccatcagcattccctgcatgggatccaaagcaagctcaccacatggtcttggcagtccgctagtggcctctccacgcctggagaagcgactgggcggtctggcccctcagcgcggatctcggatatctgtgctgagtgcctctcccgtgtccgacgtgtcatacatgttcggcagtagccaatccctgctgcattccagtaattcttctcatcaatcaagcagtcgcagcctggaatctccagcaaattccagttcctcccttcactcccttgggagtgtctccttgtgtacgcgaccgtctgattttcaggctcccaggaaccctacccttaccatgggacagccccggaccccacatagccccccgctcgcgaaagaacatgcttcaagctgtcccccctcaattaccaattcgatggtggacatccccatcgttctgatcaacggatgtcctgaacccggatctagtccaccccaacgcactcccggccaccaaaactccgttcagcccggggccgcctcaccttccaacccgtgccctgctacccggtctaacagccaaacgctatccgacgccccctttaccacgtgccccgaggggcccgctcgagacatgcagcccaccatgaagttcgtgatggacacatccaaatattggttcaagccgaatatcaccagggagcaggccattgaactcctgaggaaggaagagcctggcgcattcgttatcagggattcatcaagctatcgcggctcattcgggttagcgctcaaggtgcaagaggtgcccgcctctgcccaaagccgcccaggagaagacagtaatgacctgattaggcatttcctcattgaatccagtgccaagggcgtccacctcaagggggctgacgaggaaccatatttcggttcactctcagccttcgtgtgtcaacatagtattatggccctagcccttccctgcaaactcacaatcccacaacgagagctcggcggagccgacggcgccagcgattccacagattccccagcgtcttgccaaaaaaagtccgccgggtgtcacaccctctatctctcttcggtctccgtcgagacactgaccggggccctggccgtgcagaaggctataagcactacatttgaacgcgacatcttgccgaccccaaccgtcgtgcatttcaaggtcacggagcaaggcataaccctgacagacgtgcaacgtaaggtattctttagacgacactatcccctaacaaccttgcgcttctgcggcatggaccctgaacaaaggaaatggcagaaatattgcaagccaagttggatttttggatttgtggctaaatctcagacggaaccccaagagaacgtgtgccacctgttcgcagagtacgacatggtgcagccggcatcacaggtgattgggctggttacagctctcctccaggacgctgaacggatgtag

SEQ ID NO: 225994 - DNA, 2148 bp, Artificial Sequence
  derived and/or modified sequence
atgagccaagttatgtcttctccgctcctagccggaggacacgccgtgagtctcgcaccctgcgacgaaccgagacggacactacacccagctcccagccccagcctgccgccacagtgttcatattataccaccgaggggtggggggcacaggctctgatggccccagtgccatgtatggggcctccaggaagactccaacaggcccctcaggtcgaggctaaggccacatgcttcctgccgagtcccggagagaaggctctgggcactcctgaagatctcgacagttacatcgattttagtctggaatcactcaaccagatgattctggaattggacccgactttccagctcctcccccctggcacaggaggctctcaggcggagttggctcagtcgacaatgtctatgcggaaaaaggaggagagtgaggcactggacatcaaatatatcgaggtaactagtgccagaagtaggtgccacgatggcccacagcactgctcctctccctcagtgaccccaccattcggcagtctcaggtccggcggactgctgcttagtagggatgtgccacgtgagacccgatcctccagtgagagtctgatcttctcaggaaaccagggcaggggacaccagcgaccccttcccccttccgagggcctgtcacccaggcctccaaacagtccctctatttctataccctgcatgggttctaaagcctctagtccccacggcttagggtctccgctcgtggcgagccctagactcgagaagagattaggcggtctggctccacagagggggtcaaggatttcagtcctgagtgccagtcctgtctctgatgtaagctatatgtttggatcttcccagtcgctgctccatagctcaaattcctcccatcagtctagcagccggtccctggaatccccggctaactcatccagctccctgcattcgttgggcagtgtttctttatgtacacggccatccgatttccaggccccaagaaacccaacactgacgatgggccagcccagaactccccactctcctccccttgccaaagagcacgcctctagctgccccccttcaataacaaattccatggttgacatacccatagtgttgattaacggttgccctgagcccggatctagcccaccgcagcggaccccgggtcaccagaacagcgtccaacccggagcggcttcccccagcaatccttgtcccgcaacccgaagtaactcgcagacattgtccgacgctccttttaccacttgcccggaaggcccagctcgcgatatgcagccaaccatgaagtttgtgatggacacatcaaaatactggttcaaacctaatattacccgggaacaagcgatcgagttgttaaggaaggaggagccaggtgcatttgttatacgagactcttcttcctaccgcggatctttcggcctggctctcaaagttcaggaggtccccgcatccgctcagtctagaccaggagaggacagtaacgacctgattaggcattttttgattgagagtagtgccaagggtgtccacctgaagggcgctgacgaagagccttattttggttccctctcagcttttgtgtgccagcatagcatcatggctctggccctgccctgtaagttgactattcctcagcgcgagctgggaggcgcagacggagcctctgattctacagacagtccagcttcgtgccaaaagaagtccgccggttgccataccctatacctttcaagtgtgtcagtggagacattgactggcgcacttgccgtccagaaggccatctccacaactttcgaaagagacatcctcccaacccctactgttgttcacttcaaggtgacagaacaggggatcaccctcaccgacgtgcagcggaaggttttctttcgacggcattatcccctcaccactttgagattttgtggaatggacccggagcagcggaagtggcagaaatactgcaagccctcttggatctttggattcgtggcaaagtcccagaccgaaccccaagagaacgtgtgtcacctttttgcagaatacgatatggtgcaaccagcatctcaagtgattgggctagtgaccgctctccttcaggatgcagaaaggatgtag

SEQ ID NO: 225995 - DNA, 2148 bp, Artificial Sequence
  derived and/or modified sequence
atgagccaagtcatgtcttctccactgctggctggcggtcatgccgtctctctggccccttgtgatgagccgagacggaccctccacccagccccatctccatctctacctccccagtgctcttactatactacggagggttggggcgcacaggcactgatggcccctgtcccttgtatgggcccacctgggcgtctccaacaggccccacaggtggaagctaaagctacctgctttctgccatcgcccggtgagaaagctctgggaactcctgaggatctggacagctatatcgatttttcactagagtcgttgaatcagatgatcctcgaactggaccctacttttcagctgctgcctccaggtactggcggaagtcaggccgaactggcacaaagcactatgtccatgcggaaaaaggaagagagtgaagccctagacatcaagtacattgaggtcacctccgctcggagtagatgccatgacgggcctcagcattgttcttccccctcggtgactccgccttttggttcactgcgatccggtgggctgctgttgagtagggacgtgccccgtgagactcggagtagttcagaaagtcttatttttagcgggaatcaggggaggggccatcagcgcccactcccacccagcgaggggctgagccctcggcctcctaactccccatcaatcagtatcccttgcatgggatccaaagcatcctccccacacggactgggctctccactggtggcctctcccaggctggagaaacgactgggaggactggcgcctcagcggggaagtagaataagcgtgctgagtgctagtccagtatctgatgtatcttacatgtttggctcaagtcagagcctgttgcatagcagtaactcttcccaccaatctagtagccgctccttagagtctcctgccaatagctctagctccctccatagcttaggctcggtgagtctgtgcactcgcccttccgattttcaagcgcctaggaatcccaccctgaccatggggcagccacggacgccgcactctccgcctcttgccaaggaacatgctagctcatgtccaccgtctatcacaaattcaatggtagacatccccatcgtgctgatcaacggctgtccagaacctggaagcagtccgcctcagcgcacacctgggcatcagaatagcgtccagccaggtgccgcatcaccttcaaacccttgccctgccacacggtctaatagccagaccctgagcgacgcgccttttacaacttgtcctgagggacccgctcgcgatatgcagccgaccatgaagtttgtgatggataccagcaagtattggttcaaacctaacatcacacgagaacaggcaatcgaattgcttcgcaaggaagaacccggagcgtttgtgattagagatagcagcagttaccgagggagcttcggtctagcactgaaagttcaggaggttcctgcttccgcccaatccaggcctggcgaagattcgaatgatctgatacgccattttctcattgagtcatccgccaaaggggttcatctgaaaggagccgacgaggagccttattttgggtcactatcggcatttgtgtgtcagcactcgatcatggcccttgcattgccatgtaaactgaccattccccaacgagagctcggaggagctgatggcgctagtgactccactgatagtccagcctcctgtcagaaaaagtccgcaggttgccacacattgtacctcagttcagtgtctgttgagactctgaccggggctcttgccgtgcagaaagccatttctaccacattcgaacgcgatatccttcctactcccacagttgtgcattttaaggtcactgagcaagggatcaccctcaccgatgtgcagcgcaaggtcttttttcgtaggcactacccactcaccaccctgcgtttttgtgggatggatccagaacagaggaagtggcaaaagtattgcaaaccaagttggatctttgggttcgtggcaaaatcacagacggaacctcaggaaaacgtgtgtcacctgttcgctgaatatgacatggttcaacctgccagccaagtgatcggcttggttaccgcactgcttcaagacgccgaacgcatgtag

SEQ ID NO: 225996 - DNA, 4070 bp, Artificial Sequence
  derived and/or modified sequence
ggactctgagtcgtcttggtcccaggagccagtagtgaaggcaacagtctgcccacctgtggacaccagatcctgggagctcctggttagcaagtgagatctctgggatgtcagtgaggctggttgaagaccagaggtaaactgcagaggtcaccacccccaccatgtcccaggtgatgtccagcccactgctggcaggaggccatgctgtcagcttggcgccttgtgatgagcccaggaggaccctgcacccagcacccagccccagcctgccaccccagtgttcttactacaccacggaaggctggggagcccaggccctgatggcccccgtgccctgcatggggccccctggccgactccagcaagccccacaggtggaggccaaagccacctgcttcctgccgtcccctggtgagaaggccttggggaccccagaggaccttgactcctacattgacttctcactggagagcctcaatcagatgatcctggaactggaccccaccttccagctgcttcccccagggactgggggctcccaggctgagctggcccagagcaccatgtcaatgagaaagaaggaggaatctgaagccttggacataaagtacatcgaggtgacctccgccagatcaaggtgccacgatggcccccagcactgctccagcccctctgtcaccccgcccttcggctcccttcgcagtggtggcctcctcctttccagagacgtcccccgagagacacgaagcagcagtgagagcctcatcttctctgggaaccagggcagggggcaccagcgccctctgcccccctcagagggtctctcccctcgacccccaaattcccccagcatctcaatcccttgcatggggagcaaggcctcgagcccccatggtttgggctccccgctggtggcttctccaagactggagaagcggctgggaggcctggccccacagcggggcagcaggatctctgtgctgtcagccagcccagtgtctgatgtcagctatatgtttggaagcagccagtccctcctgcactccagcaactccagccatcagtcatcttccagatccttggaaagtccagccaactcttcctccagcctccacagccttggctcagtgtccctgtgtacaagacccagtgacttccaggctcccagaaaccccaccctaaccatgggccaacccagaacaccccactctccaccactggccaaagaacatgccagcagctgccccccatccatcaccaactccatggtggacatacccattgtgctgatcaacggctgcccagaaccagggtcttctccaccccagcggaccccaggacaccagaactccgttcaacctggagctgcttctcccagcaacccctgtccagccaccaggagcaacagccagaccctgtcagatgccccctttaccacatgcccagagggtcccgccagggacatgcagcccaccatgaagttcgtgatggacacatctaaatactggtttaagccaaacatcacccgagagcaagcaatcgagctgctgaggaaggaggagccaggggcttttgtcataagggacagctcttcataccgaggctccttcggcctggccctgaaggtgcaggaggttcccgcgtctgctcagagtcgaccaggtgaggacagcaatgacctcatccgacacttcctcatcgagtcgtctgccaaaggagtgcatctcaaaggagcagatgaggagccctactttgggagcctctctgccttcgtgtgccagcattccatcatggccctggccctgccctgcaaactcaccatcccacagagagaactgggaggtgcagatggggcctcggactctacagacagcccagcctcctgccagaagaaatctgcgggctgccacaccctgtacctgagctcagtgagcgtggagaccctgactggagccctggccgtgcagaaagccatctccaccacctttgagagggacatcctccccacgcccaccgtggtccacttcaaagtcacagagcagggcatcactctgactgatgtccagaggaaggtgtttttccggcgccattacccactcaccaccctccgcttctgtggtatggaccctgagcaacggaagtggcagaagtactgcaaaccctcctggatctttgggtttgtggccaagagccagacagagcctcaggagaacgtatgccacctctttgcggagtatgacatggtccagccagcctcgcaggtcatcggcctggtgactgctctgctgcaggacgcagaaaggatgtaggggagagactgcctgtgcacctaaccaacacctccaggggctcgctaaggagcccccctccaccccctgaatgggtgtggcttgtggccatattgacagaccaatctatgggactagggggattggcatcaagttgacacccttgaacctgctatggccttcagcagtcaccatcatccagaccccccgggcctcagtttcctcaatcatagaagaagaccaatagacaagatcagctgttcttagatgctggtgggcatttgaacatgctcctccatgattctgaagcatgcacacctctgaagacccctgcatgaaaataacctccaaggaccctctgaccccatcgacctgggccctgcccacacaacagtctgagcaagagacctgcagcccctgtttcgtggcagacagcaggtgcctggcggtgacccacggggctcctggcttgcagctggtgatggtcaagaactgactacaaaacaggaatggatagactctatttccttccatatctgttcctctgttccttttcccactttctgggtggctttttgggtccacccagccaggatgctgcaggccaagctgggtgtggtatttagggcagctcagcagggggaacttgtccccatggtcagaggagacccagctgtcctgcacccccttgcagatgagtatcaccccatcttttctttccacttggtttttatttttatttttttttgagacagagtctcactgtcacccaggctgaactgcagtggtgtgatctaggctcactgcaacctccacctcccaggttcaagcaattatcctgcctcaggctcccaagtagctgggattacaggcatgtgcaactcacccagctaattttgtatttttagtagagacagggtttcaccatgttggccaggctggtcttgaactcctgaccgcaggtaatccacctgcttcggcctcccaaagtgctgggattacaggcgcaagccacccagcccagcttctttccattccttgataggcgagtattccaaagctggtatcgtagctgccctaatgttgcatattaggcggcgggggcagagataagggccatctctctgtgattctgcctcagctcctgtcttgctgagccctcccccaacccacgctccaacacacacacacacacacacacacacacacacacacacacacacacacacacacacacacgcccctctactgctatgtggcttcaaccagcctcacagccacacgggggaagcagagagtcaagaatgcaaagaggccgcttccctaagaggcttggaggagctgggctctatcccacacccacccccaccccacccccacccagcctccagaagctggaaccatttctcccgcaggcctgagttcctaaggaaaccaccctaccggggtggaagggagggtcagggaagaaacccactcttgctctacgaggagcaagtgcctgccccctcccagcagccagccctgccaaagttgcattatctttggccaaggctgggcctgacggttatgatttcagccctgggcctgcaggagaggctgagaccagcccacccagccagtggtcgagcactgccccgccgccaaagtctgcagaatgtgagatgaggttctcaaggtcacaggccccagtcccagcctgggggctggcagaggcccccatatactctgctacagctcctatcatgaaaaataaaatgtttgtctttgcaaaacagt

SEQ ID NO: 225997 - DNA, 3972 bp, Artificial Sequence
  derived and/or modified sequence
ctgagtcgtcttggtcccaggagccagtagtgaaggcaacagtctgcccacctgtggacaccagatgtcccaggtgatgtccagcccactgctggcaggaggccatgctgtcagcttggcgccttgtgatgagcccaggaggaccctgcacccagcacccagccccagcctgccaccccagtgttcttactacaccacggaaggctggggagcccaggccctgatggcccccgtgccctgcatggggccccctggccgactccagcaagccccacaggtggaggccaaagccacctgcttcctgccgtcccctggtgagaaggccttggggaccccagaggaccttgactcctacattgacttctcactggagagcctcaatcagatgatcctggaactggaccccaccttccagctgcttcccccagggactgggggctcccaggctgagctggcccagagcaccatgtcaatgagaaagaaggaggaatctgaagccttggacataaagtacatcgaggtgacctccgccagatcaaggtgccacgatggcccccagcactgctccagcccctctgtcaccccgcccttcggctcccttcgcagtggtggcctcctcctttccagagacgtcccccgagagacacgaagcagcagtgagagcctcatcttctctgggaaccagggcagggggcaccagcgccctctgcccccctcagagggtctctcccctcgacccccaaattcccccagcatctcaatcccttgcatggggagcaaggcctcgagcccccatggtttgggctccccgctggtggcttctccaagactggagaagcggctgggaggcctggccccacagcggggcagcaggatctctgtgctgtcagccagcccagtgtctgatgtcagctatatgtttggaagcagccagtccctcctgcactccagcaactccagccatcagtcatcttccagatccttggaaagtccagccaactcttcctccagcctccacagccttggctcagtgtccctgtgtacaagacccagtgacttccaggctcccagaaaccccaccctaaccatgggccaacccagaacaccccactctccaccactggccaaagaacatgccagcagctgccccccatccatcaccaactccatggtggacatacccattgtgctgatcaacggctgcccagaaccagggtcttctccaccccagcggaccccaggacaccagaactccgttcaacctggagctgcttctcccagcaacccctgtccagccaccaggagcaacagccagaccctgtcagatgccccctttaccacatgcccagagggtcccgccagggacatgcagcccaccatgaagttcgtgatggacacatctaaatactggtttaagccaaacatcacccgagagcaagcaatcgagctgctgaggaaggaggagccaggggcttttgtcataagggacagctcttcataccgaggctccttcggcctggccctgaaggtgcaggaggttcccgcgtctgctcagagtcgaccaggtgaggacagcaatgacctcatccgacacttcctcatcgagtcgtctgccaaaggagtgcatctcaaaggagcagatgaggagccctactttgggagcctctctgccttcgtgtgccagcattccatcatggccctggccctgccctgcaaactcaccatcccacagagagaactgggaggtgcagatggggcctcggactctacagacagcccagcctcctgccagaagaaatctgcgggctgccacaccctgtacctgagctcagtgagcgtggagaccctgactggagccctggccgtgcagaaagccatctccaccacctttgagagggacatcctccccacgcccaccgtggtccacttcaaagtcacagagcagggcatcactctgactgatgtccagaggaaggtgtttttccggcgccattacccactcaccaccctccgcttctgtggtatggaccctgagcaacggaagtggcagaagtactgcaaaccctcctggatctttgggtttgtggccaagagccagacagagcctcaggagaacgtatgccacctctttgcggagtatgacatggtccagccagcctcgcaggtcatcggcctggtgactgctctgctgcaggacgcagaaaggatgtaggggagagactgcctgtgcacctaaccaacacctccaggggctcgctaaggagcccccctccaccccctgaatgggtgtggcttgtggccatattgacagaccaatctatgggactagggggattggcatcaagttgacacccttgaacctgctatggccttcagcagtcaccatcatccagaccccccgggcctcagtttcctcaatcatagaagaagaccaatagacaagatcagctgttcttagatgctggtgggcatttgaacatgctcctccatgattctgaagcatgcacacctctgaagacccctgcatgaaaataacctccaaggaccctctgaccccatcgacctgggccctgcccacacaacagtctgagcaagagacctgcagcccctgtttcgtggcagacagcaggtgcctggcggtgacccacggggctcctggcttgcagctggtgatggtcaagaactgactacaaaacaggaatggatagactctatttccttccatatctgttcctctgttccttttcccactttctgggtggctttttgggtccacccagccaggatgctgcaggccaagctgggtgtggtatttagggcagctcagcagggggaacttgtccccatggtcagaggagacccagctgtcctgcacccccttgcagatgagtatcaccccatcttttctttccacttggtttttatttttatttttttttgagacagagtctcactgtcacccaggctgaactgcagtggtgtgatctaggctcactgcaacctccacctcccaggttcaagcaattatcctgcctcaggctcccaagtagctgggattacaggcatgtgcaactcacccagctaattttgtatttttagtagagacagggtttcaccatgttggccaggctggtcttgaactcctgaccgcaggtaatccacctgcttcggcctcccaaagtgctgggattacaggcgcaagccacccagcccagcttctttccattccttgataggcgagtattccaaagctggtatcgtagctgccctaatgttgcatattaggcggcgggggcagagataagggccatctctctgtgattctgcctcagctcctgtcttgctgagccctcccccaacccacgctccaacacacacacacacacacacacacacacacacacacacacacacacacacacacacacacgcccctctactgctatgtggcttcaaccagcctcacagccacacgggggaagcagagagtcaagaatgcaaagaggccgcttccctaagaggcttggaggagctgggctctatcccacacccacccccaccccacccccacccagcctccagaagctggaaccatttctcccgcaggcctgagttcctaaggaaaccaccctaccggggtggaagggagggtcagggaagaaacccactcttgctctacgaggagcaagtgcctgccccctcccagcagccagccctgccaaagttgcattatctttggccaaggctgggcctgacggttatgatttcagccctgggcctgcaggagaggctgagaccagcccacccagccagtggtcgagcactgccccgccgccaaagtctgcagaatgtgagatgaggttctcaaggtcacaggccccagtcccagcctgggggctggcagaggcccccatatactctgctacagctcctatcatgaaaaataaaatgtttgtctttgcaaaacagtaa

SEQ ID NO: 225998 - protein, 1302 aa, Artificial Sequence
  derived and/or modified sequence
MELYFGEYQHVQQEYGVHLRLASDDTQKSRSSQNSKAGSYGVSIRVQGIDGHPYIVLNNTERCLAGTSFSENGPPFPPPVINNLPLHSSNGSVPKENSEELQLPENPYAQPSPIRNLKQPLLHEGKNGVLDRKDGSVKPSHLLNFQRHPELLQPYDPEKNELNLQNHQPSESNWLKTLTEEGINNKKPWTCFPKPSNSQPTSPSLEDPAKSGVTAIRLCSSVVIEDPKKQTSVCVNVQSCTKERVGEEALFTSGRPLTAHSPHAHPETKKTRPDVLPFRRQDSAGPVLDGARSRRSSSSSTTPTSANSLYRFLLDDQECAIHADNVNRHENRRYIPFLPGTGRDIDTGSIPGVDQLIEKFDQKPGLQRRGRSGKRNRINTDDRKRSRSVDSAFPFGLQGNSEYLIEFSRNLGKSSEHLLRPSQVCPQRPLSQERRGKQSVGRTFAKLQGAAHGASCAHSRPPQPNIDGKVLETEGSQESTVIRAPSLGAQSKKEEEVKTATATLMLQNRATATSPDSGAKKISVKTFPSASNTQATPDLLKGQQELTQQTNEETAKQILYNYLKEGSTDNDDATKRKVNLVFEKIQTLKSRAAGSAQGNNQACNSTSEVKDLLEQKSKLTIEVAELQRQLQLEVKNQQNIKEERERMRANLEELRSQHNEKVEENSTLQQRLEESEGELRKNLEELFQVKMEREQHQTEIRDLQDQLSEMHDELDSAKRSEDREKGALIEELLQAKQDLQDLLIAKEEQEDLLRKRERELTALKGALKEEVSSHDQEMDKLKEQYDAELQALRESVEEATKNVEVLASRSNTSEQDQAGTEMRVKLLQEENEKLQGRSEELERRVAQLQRQIEDLKGDEAKAKETLKKYEGEIRQLEEALVHARKEEKEAVSARRALENELEAAQGNLSQTTQEQKQLSEKLKEESEQKEQLRRLKNEMENERWHLGKTIEKLQKEMADIVEASRTSTLELQNQLDEYKEKNRRELAEMQRQLKEKTLEAEKSRLTAMKMQDEMRLMEEELRDYQRAQDEALTKRQLLEQTLKDLEYELEAKSHLKDDRSRLVKQMEDKVSQLEMELEEERNNSDLLSERISRSREQMEQLRNELLQERAARQDLECDKISLERQNKDLKSRIIHLEGSYRSSKEGLVVQMEARIAELEDRLESEERDRANLQLSNRRLERKVKELVMQVDDEHLSLTDQKDQLSLRLKAMKRQVEEAEEEIDRLESSKKKLQRELEEQMDMNEHLQGQLNSMKKDLRLKKLPSKVLDDMDDDDDLSTDGGSLYEAPVSYTFSKDSTVASQI

SEQ ID NO: 225999 - DNA, 3909 bp, Artificial Sequence
  derived and/or modified sequence
atggagctctatttcggagaatatcaacacgtgcaacaggagtacggagtgcacctccgcctagccagcgacgacacgcagaaatctagaagtagccaaaatagtaaagcgggtagctatggggtctccattagagtgcagggcattgacgggcatccctacatcgtcctgaacaatactgagcggtgtctcgcaggtacttccttttccgaaaacgggcccccattcccgcctcctgttatcaacaacttgccccttcactccagcaacggttcggttcccaaagaaaatagcgaggagctccagcttcctgagaatccctatgcccagccttcgccaataaggaatcttaagcaacccctgctgcacgagggcaaaaacggtgtcctcgatcgtaaggacggtagcgtcaaaccctctcatttgttgaatttccagcgccaccctgaactgcttcagccctatgacccagaaaagaacgaactgaatctgcagaatcatcagccaagcgaatctaactggctgaaaacactgactgaggaaggcatcaacaataagaaaccatggacctgctttcctaagccttccaactcccagcctacatccccgagcctggaggatcctgcaaagagcggggtgacggcaatcagactgtgttcaagcgttgtcattgaggatcccaaaaaacaaacctctgtctgtgtcaacgtacagtcttgcactaaggaaagagtcggcgaggaagccctgttcacatccgggcggccgcttaccgcccactcacctcatgcccatcctgagacaaagaagacccgcccagacgtgttaccattccgaagacaggacagcgctggcccagtgttggatggtgccagatcacgaaggtctagctcgtcaagcacgacccccacttctgccaactcactgtataggttcctattggacgaccaagagtgcgccatccacgctgacaatgtcaacagacacgagaacaggaggtatatcccctttctgccgggaactgggagggatatcgataccggtagtatcccaggcgtcgaccaacttatagagaagttcgaccagaagccaggactgcagaggcgtggccgatcaggcaagagaaacagaattaatactgatgataggaaacggagccgcagcgttgattctgcttttccctttggcttgcagggaaatagcgaatacctcatcgaattcagcagaaacttgggcaagagtagcgagcacctgctcagaccttcccaagtctgtccacagagaccactgagtcaagaacggcgtgggaagcagtctgtgggccgaacatttgccaagttgcagggcgccgcacacggggcaagctgtgctcattcccgccccccgcagcctaacatcgatggaaaagtgttagagaccgagggatcgcaagagagcacagtgatccgcgcgccgtccctcggtgcgcagagtaaaaaggaagaggaggttaagacagctaccgcaactctgatgctgcagaaccgggctaccgccacaagcccagattcaggggctaagaaaatttccgttaaaactttcccttccgcgtctaatactcaggccacaccagacctcctgaaaggccagcaggagctcacccagcagactaacgaggaaacagccaagcaaattctttataactacctcaaggagggatccacagacaacgacgatgctaccaaacggaaggtcaaccttgtttttgaaaaaattcagactctcaaatctagagctgcagggagtgcccaaggcaataatcaagcctgcaattccaccagcgaagtgaaagatctgcttgagcaaaagagcaagctcaccatcgaggtagccgaactccaaaggcagctacagctagaggtgaagaatcagcagaatatcaaggaggaacgggaaagaatgagagctaacctcgaagagctgaggtcccagcacaacgaaaaggtcgaggaaaattcaaccctgcagcagagactggaggaatctgagggcgagttaagaaaaaacctcgaggagctcttccaggtgaagatggaacgtgaacagcaccagacagagataagggacctccaggaccagctgtcagaaatgcatgacgagttagattctgccaaacgcagcgaggaccgcgagaaaggcgccttaattgaggagttgctccaggccaagcaggaccttcaggatcttctgatcgccaaagaagagcaggaagatcttctaaggaaacgcgagagagaactcaccgcccttaagggcgcactcaaagaggaggtttcttcacatgaccaggagatggataagctcaaagagcagtatgacgccgagctacaggcactgcgggaatccgtggaagaggctacgaaaaacgtcgaggtgctcgcgtctcggtccaacacttctgagcaggaccaggcaggtacggaaatgcgggttaagctgctacaagaagagaacgaaaaactacaggggcgctcagaagagctcgagaggcgggttgcgcagttgcagcggcagatagaagatctaaagggcgatgaggcgaaagccaaggagacattgaagaagtacgaaggggagattcgccaactggaggaggccctagttcatgctcggaaggaggagaaggaagctgtgtcagcccgacgggcgttagaaaatgagctcgaggccgcacagggcaatctgagccaaacaacccaagagcagaagcaactgtcagagaagctgaaggaggagagtgaacagaaggagcagctgcgcaggctgaagaatgaaatggagaacgaaaggtggcatctcggcaaaactatagagaagctgcagaaggaaatggccgacatcgtcgaagcttcaaggacttccaccctggaactccaaaatcaattggatgaatacaaagagaagaacaggagagaactggcagagatgcaacggcagttgaaagaaaaaaccttggaagcagaaaaatctcgcttaacggctatgaagatgcaggacgaaatgaggctgatggaggaggagctccgcgactatcaacgtgcccaggatgaggccctgaccaaaaggcagttgcttgaacaaacactgaaggacttggagtacgagttggaggctaagagccacttaaaggatgaccgaagccggctcgttaagcaaatggaagacaaggtgagccagctggagatggaacttgaggaagagagaaacaattccgacctgctctctgagcgtatttctcgctcccgtgagcagatggagcagctgagaaatgaacttttacaggaaagggccgcgcggcaggatctagagtgtgacaagattagcctcgagcggcagaacaaggaccttaaatccaggattatccacctggaaggctcgtatagatcctccaaagagggactggtcgtgcagatggaggcccgcatcgccgagttggaggatcgcctggagtccgaggagagagatcgagccaatttacaattgagtaataggagactcgagagaaaagtcaaggaactggtgatgcaggtggatgatgaacacctctcgctcactgatcaaaaagatcagctgagcttacgactcaaggcaatgaaacgtcaggtggaagaggctgaagaagagattgacagattggaatccagcaagaaaaagctgcagcgagagctggaagagcaaatggacatgaacgaacatctacagggtcagctcaacagcatgaagaaagatctcagattgaagaagctgccatcaaaggtactggatgacatggacgatgacgacgacctttccactgacgggggatctctgtacgaggcccctgtgagttatacttttagcaaggactcgacagtggcctcccagatttag

SEQ ID NO: 226000 - DNA, 3909 bp, Artificial Sequence
  derived and/or modified sequence
atggagctgtactttggagagtaccagcacgtgcagcaggagtatggagtgcacctgcggctggccagtgatgacacccagaagagccgcagcagccagaacagcaaggccggcagctatggagtgtccatccgggtgcagggcattgatggccacccctacatcgtgctgaacaacacagagcgctgcctggccggcaccagcttctctgaaaatggcccccccttccccccacctgtgatcaacaacctgcccctgcacagcagcaatggatctgtgcccaaggagaacagcgaggagctgcagctgcctgagaacccctatgcccagcccagccccatccggaacctgaagcagcccctgctgcacgagggcaagaatggagtgctggacaggaaggatggctctgtgaagcccagccacctgctgaacttccagaggcaccctgagctgctgcagccctatgaccctgagaagaatgagctgaacctgcagaaccaccagcccagcgagagcaactggctgaagaccctgacagaggagggcatcaacaacaagaagccctggacctgcttccccaagcccagcaacagccagcccaccagccccagcctggaggaccctgccaagtctggagtgacagccatccggctgtgcagctctgtggtgattgaggaccccaagaagcagacctctgtgtgtgtgaatgtgcagagctgcaccaaggagcgggtgggggaggaggccctcttcaccagcggccggcccctgacagcccacagcccccacgcccaccctgagaccaagaagaccaggccagatgtgctgcccttccggcggcaggacagcgctggccctgtgctggatggagcccggagccgccgcagcagcagcagcagcaccacccccaccagcgccaacagcctgtaccgcttcctgctggatgaccaggagtgtgccatccatgctgacaacgtgaacagacatgagaacagacgctacatccccttcctgcccggcaccggccgggacatcgacaccggcagcatccctggggtggaccagctgattgagaagtttgaccagaagccaggcctgcagaggcggggccgcagcggcaagaggaaccgcatcaacacagatgacaggaagaggagccgctctgtggacagcgccttccccttcggcctgcagggcaacagcgagtacctgattgagttcagcaggaacctgggcaagagcagcgagcacctgctgcggcccagccaggtgtgcccccagaggcccctgagccaggagcggcggggcaagcagagcgtgggccgcacctttgccaagctgcagggcgccgcccacggggccagctgtgcccacagcaggcctccccagcccaacattgatggcaaggtgctggagacagagggcagccaggagagcaccgtcatccgggcccccagcctgggcgcccagagcaagaaggaggaggaggtgaagacagccacagccaccctgatgctgcagaacagagccacagccaccagcccagattctggggccaagaagatctctgtgaagaccttccccagcgccagcaacacccaggccaccccagacctgctgaagggccagcaggagctgacccagcagaccaatgaggagacagccaagcagatcctgtacaactacctgaaggagggcagcacagacaatgatgatgccaccaagaggaaggtgaacctggtgtttgagaagatccagaccctgaagagcagagctgctggcagcgcccagggcaacaaccaggcctgcaacagcaccagcgaggtgaaggacctgctggagcagaagagcaagctgaccatcgaggtggccgagctgcagaggcagctgcagctggaggtgaagaaccagcagaacatcaaggaggagcgggagaggatgagggccaacctggaggagctgcggagccagcacaatgagaaggtggaggagaacagcaccctgcagcagaggctggaggagagcgagggggagctgaggaagaacctggaggagctgttccaggtgaagatggagcgggagcagcaccagacagagatccgggacctgcaggaccagctgtctgagatgcatgatgagctggacagcgccaagagaagtgaagatcgggagaagggggccctgattgaggagctgctgcaggccaagcaggacctgcaggacctgctgattgccaaggaggagcaggaggacctgctgaggaagcgggagcgggagctgacagccctgaagggggccctgaaggaggaggtgagcagccatgaccaggagatggacaagctgaaggagcagtatgatgctgagctgcaggccctgcgggagagcgtggaggaggccaccaagaatgtggaggtgctggccagccgcagcaacaccagcgagcaggaccaggccggcacagagatgagggtgaagctgctgcaggaggagaatgagaagctgcagggccgctctgaggagctggagaggagagtggcccagctgcagaggcagatcgaggacctgaagggagatgaggccaaggccaaggagaccctgaagaagtatgaaggagagatccggcagctggaggaggccctggtgcacgccaggaaggaggagaaggaggccgtgtctgcccggcgggccctggagaatgagctggaggccgcccagggcaacctgagccagaccacccaggagcagaagcagctgtctgagaagctgaaggaggagagcgagcagaaggagcagctgcggcggctgaagaatgagatggagaatgaacgctggcacctgggcaagaccatcgagaagctgcagaaggagatggctgacatcgtggaggccagcaggaccagcaccctggagctgcagaaccagctggatgagtacaaggagaagaacagaagagagctggccgagatgcagaggcagctgaaggagaagaccctggaggccgagaagagccggctgacagccatgaagatgcaggatgagatgaggctgatggaggaggagctgcgggactaccagagggcccaggatgaggccctgaccaagaggcagctgctggagcagaccctgaaggacctggagtatgagctggaggccaagagccacctgaaggatgacaggagccggctggtgaagcagatggaggacaaggtgtcccagctggagatggagctggaggaggagaggaacaacagcgacctgctgtctgagcgcatcagccgcagccgggagcagatggagcagctgagaaatgagctgctgcaggagcgggccgcccggcaggacctggagtgtgacaagatcagcctggagcggcagaacaaggacctgaagagccgcatcatccacctggagggcagctaccgcagcagcaaggagggcctggtggtgcagatggaggccagaattgctgagctggaggaccggctggagagcgaggagcgggaccgggccaacctgcagctgagcaacagaaggctggagaggaaggtgaaggagctggtgatgcaggtggatgatgagcacctgagcctgacagaccagaaggaccagctgagcctgcggctgaaggccatgaagaggcaggtggaggaggccgaggaggagattgaccggctggagagcagcaagaagaagctgcagcgggagctggaggagcagatggacatgaatgagcacctgcagggccagctgaacagcatgaagaaggacctgcggctgaagaagctgcccagcaaggtgctggatgacatggatgatgatgatgacctgagcacagatggcggcagcctgtatgaggcccctgtgtcctacaccttcagcaaggacagcacagtggccagccagatctag

SEQ ID NO: 226001 - DNA, 3909 bp, Artificial Sequence
  derived and/or modified sequence
atggagctgtacttcggcgagtaccagcacgtgcagcaggagtacggtgtgcatcttcgtctggcctccgacgatactcagaagtctcgatcttctcaaaattcaaaggctggatcatatggggtcagcatccgggtccaggggatcgacggacacccttatatagtcttgaataataccgaaagatgtctggctggcaccagttttagcgagaacgggccacctttcccgccgcctgttataaataacttgccccttcatagctcgaacggatctgtccctaaagaaaactcagaagagttacaactgcccgaaaatccctatgctcagccttccccgattcggaaccttaaacaaccacttctccacgagggaaagaatggcgtgctggatcggaaggatgggagtgttaagccgagtcatttgcttaactttcagcggcaccccgagctgctgcagccctacgacccagagaaaaacgagctgaacctccagaatcaccagccctctgaaagcaattggctgaagacccttactgaagaggggattaacaacaagaaaccctggacttgcttccctaagccgagcaatagtcagcctaccagcccgtccctggaagacccggctaaatctggcgtcaccgcgatcaggctgtgcagctccgttgtgatcgaagacccaaaaaagcaaacatccgtgtgcgtgaatgtgcagtcttgcactaaagaacgagtcggcgaggaagccctcttcacgtctggaaggcctctgacagctcactcacctcacgcccacccggagactaagaaaacgcgccctgatgtgcttccctttagaagacaggactcagcaggccccgtgctggacggagctcggagtaggaggagttcatcgtcctcaaccacccccacaagcgcaaactcactgtatcgctttctgcttgatgaccaggagtgtgcaattcacgccgacaacgtgaatagacatgaaaaccgacgctatattccttttctgccaggcacagggcgagacatcgatacaggctctattcccggcgtcgaccagcttatcgaaaagttcgaccaaaagccaggtttgcagaggagaggaagatccggaaagaggaaccgaatcaataccgacgacagaaagcggtctaggtcagttgattcagccttccctttcgggcttcagggaaactcagaatacctcattgagtttagccggaacctcggaaaaagcagtgagcacctgctccggccgtctcaagtgtgtcctcagcgaccactatcgcaagaaaggaggggaaaacagtcagtgggccggacatttgccaagctccagggtgccgcccacggcgcgtcatgtgcacactcgagacctccccagccgaacatcgacggcaaagtcctggaaacggaaggctctcaggagagcacagtcattcgcgcgcctagcttaggggcgcagtccaagaaggaggaagaagtgaagaccgccaccgcaactcttatgcttcagaatagggctacagccacttcaccggacagcggagctaagaaaattagcgtgaagaccttcccctctgccagcaatacccaagctacgccagacttactgaagggacagcaggaactcacgcaacagaccaacgaggaaaccgccaagcagatcctctataattatctgaaagaagggtccacagacaacgacgacgccacaaagcgcaaggtgaatcttgttttcgagaagattcagaccttgaagtctagagctgcaggctctgcacaaggcaacaatcaagcctgtaactcaacgtctgaagtgaaggacttactggagcaaaagagtaaacttactatcgaagtcgctgagttacagcgtcagctgcagttggaagtcaagaaccaacagaatattaaagaagagagggaacgcatgagggctaatttggaggaattgagatctcaacataacgaaaaggtggaggagaacagtacgcttcagcagcgcctagaagagtcagagggggagctccgcaagaacctcgaagaactctttcaggtgaagatggaacgagagcagcaccaaacggaaatcagggaccttcaggatcaactaagtgagatgcacgatgaactagacagcgccaagcgtagtgaggatagagagaagggtgctctgatcgaggaactgctgcaggcgaagcaagacctgcaagatctgctaatcgccaaggaggagcaggaagacctcttgcgtaaaagggaacgcgagctcacagctctgaaaggcgcgcttaaggaagaggtttcgtcccacgatcaggagatggataagcttaaggagcaatatgacgcggagttacaggccctgcgcgaaagtgtggaggaggccacaaagaacgtggaggtgctggcctctcgatctaatacatccgagcaggaccaggccggaacagagatgagggtcaagctcctgcaggaggagaacgaaaagttgcagggccgatccgaagagcttgagcgccgcgtggcccagcttcagagacagatcgaagacctcaagggagacgaggccaaagctaaagaaacactgaaaaaatacgagggggagatcaggcagttggaagaagctctggtgcatgctaggaaggaagaaaaggaggctgtgagcgcacgccgggccctcgagaatgaactggaagctgcgcagggcaatttgtcgcagacaacccaggaacagaagcagctaagtgagaagctgaaggaggagagcgagcagaaggaacagctgcggagattaaaaaatgagatggaaaatgagaggtggcacctgggtaagacaatcgaaaaattacagaaggagatggctgacatcgtcgaggctagccgcaccagcacattagagttacagaaccagttggatgagtacaaagaaaagaataggagggaactcgcagagatgcagcgacaattgaaggaaaagaccctcgaagcagagaaatctagactaacagccatgaaaatgcaagacgaaatgcggcttatggaggaggagctgcgtgattaccagcgggctcaggatgaggccttaaccaaacggcaactgctagagcagacactgaaagatctggagtacgagcttgaggcaaaatcacacctgaaggacgatcgtagccggctggtaaaacagatggaagacaaggtgagccaactggaaatggagctcgaggaggaacggaacaacagtgatctcctgtcagaaagaatatcccggagcagagagcaaatggagcaactgcggaacgagctgctgcaagaacgagccgcccggcaggaccttgagtgcgataagatcagcctggagcgacagaataaagacttgaagtctaggatcatccacctcgaaggttcctatcgatcttccaaagagggcctggtggtacaaatggaggcaagaatcgccgagctagaagataggttagagagcgaggagagggatcgcgccaatttgcagttgagtaacagaagactggaacgaaaagtaaaggaactggttatgcaggtggacgatgagcacctttcccttacggaccagaaggatcagcttagcctccgccttaaggctatgaagcgccaggtggaggaggccgaggaggaaattgatcgcctggaaagttccaagaagaaactgcagagggagctggaggagcaaatggacatgaacgaacacctacagggacagctgaactcaatgaagaaggacctgaggttaaagaagctcccctccaaagtcctggatgacatggatgatgacgacgatcttagtacagacggcggaagcttgtacgaggcacctgtgagctatacattctctaaggatagtactgttgcttctcagatctag

SEQ ID NO: 226002 - DNA, 3909 bp, Artificial Sequence
  derived and/or modified sequence
atggagttgtacttcggggaatatcagcatgtgcagcaggaatatggagtgcatctcagactggcttctgacgacacgcagaagagccggagcagccagaactctaaagcaggctcctatggggtatcgatcagagtccaggggattgatggtcatccctacatcgtgctgaacaacaccgagaggtgccttgctggtaccagcttttcggagaatgggcctccctttccccctccagtaattaataacctaccactccattcctccaacggtagcgtccctaaggaaaactcagaggagctccagctgccggaaaacccttatgcccagccatccccaatccgtaacctgaaacagccactgcttcacgagggcaaaaatggagtcctcgaccggaaggacggcagcgttaaacccagccatctcctgaatttccagaggcatccagaactgctgcagccctatgaccctgagaagaatgagctcaacctccaaaaccaccagccgagcgaaagtaattggcttaaaactctgaccgaggagggcattaataataagaagccatggacgtgtttccccaaacccagcaacagccagcccacatcaccctcacttgaagatcccgctaagtctggggtgactgcgatccggctatgtagttcggtggtgatcgaggatcctaagaagcagacctccgtttgcgtaaatgtgcagtcttgcactaaggagcgagtgggcgaagaagccctgttcacctccggcaggcctctgaccgctcatagccctcacgcccatcccgaaacaaaaaaaacccggcctgacgtgctaccttttcggaggcaggactcagctggcccagttctggatggggctcggagccgcagatcctcgagcagcagtacaactccaacatccgccaattcactgtaccgcttcctgcttgacgatcaggagtgtgcgatccacgccgacaacgtgaacagacatgaaaacaggagatacattcccttcctcccaggaaccggaagagacatagataccggctccattcccggtgtggaccagcttatcgaaaagtttgaccaaaaaccaggattgcaaaggagagggagatccggcaaaagaaaccgaattaacactgatgatagaaagcgcagcagatcggtggactcggcgtttcccttcggactgcagggcaacagcgagtatctcatcgagtttagccggaatctaggaaaatcctcagaacacctgttgcgaccttctcaggtgtgtccgcaacggccacttagccaggagagacgtggcaagcagtccgtgggaagaacatttgccaagctgcagggcgctgcccacggcgctagctgcgcacattccaggccaccgcagcccaacatcgatggcaaggtcctggagaccgaaggatcacaggaaagtacagtcattagagctccttcgctgggtgcacagtctaaaaaggaggaagaagttaaaactgcgacagctaccctgatgcttcagaacagggcaaccgccacctcaccagactccggcgctaagaagattagcgttaaaacctttcctagtgcgtctaacacacaggccacacccgacctcttgaagggccagcaagagctgacacagcagacaaatgaggaaacagctaagcaaattttatacaattaccttaaggaagggtccacagataatgacgacgctaccaaaagaaaggtaaatctggtgtttgagaaaatacagacacttaagtctcgtgccgctggctctgcccaaggcaataaccaggcatgtaactctacctccgaggtgaaagatctgctcgaacagaagagtaagttgacgatagaggttgcggaattacagcgccaattacagctggaggtcaagaatcagcagaatatcaaggaggagagagagcgcatgcgggctaatctagaagagctgcgaagtcagcataatgaaaaagtggaagagaatagcactctccaacagcgccttgaggagtctgagggggagctgagaaaaaacctcgaggagctatttcaagtgaagatggaacgtgagcaacatcaaaccgaaatcagggacctgcaagaccagctatcagagatgcatgacgagttagacagcgcgaaaagatccgaggacagggagaaaggtgccctcatcgaggagctgctgcaggccaagcaggacctgcaagacctgctaatcgcaaaagaggagcaggaagacctgcttcgcaaaagagagagggaacttactgctctgaagggcgcattgaaggaagaagtctcaagtcatgaccaggagatggacaagctgaaagagcaatacgatgctgagctgcaggccctccgtgaaagcgttgaagaagctaccaagaatgttgaggtgttggcgtcccgcagcaatacctcagagcaggatcaggccggtactgagatgagagtgaaattgctgcaggaagaaaatgagaaattacagggacgatctgaggagctggagcgacgagtagcgcaactgcagcggcagatagaggatttaaagggcgatgaagctaaagcaaaagagactctaaaaaagtacgagggtgagattcgtcagctcgaagaggccctcgtccatgcaaggaaagaggagaaagaggctgtaagtgctcgcagggctctcgagaatgaattggaggcagcccagggaaacttgtctcaaaccacacaggagcaaaagcaactcagcgaaaaactgaaagaggaaagcgagcaaaaagagcagctcaggaggctaaagaacgagatggagaacgagagatggcacctaggtaagacgattgagaagctgcaaaaggagatggccgacatcgtggaggctagcagaacgagtacactagaactgcagaatcagctggacgagtacaaggagaagaaccggagagagttggccgagatgcagcgccagctaaaggagaagactctagaggctgagaaaagccgccttaccgccatgaagatgcaggacgagatgagactaatggaagaggagctgcgcgattaccagcgggcacaggacgaagcactgacaaagcggcagcttcttgagcaaaccctcaaagatttggagtacgaactcgaggccaaatcccacttgaaggacgatcgaagccggctcgtcaaacaaatggaagataaagtcagtcagctcgagatggaactggaggaggaacgtaataactccgatcttctgagcgagcggatctcacgcagtagagaacaaatggaacagctgcgcaatgagctgctccaggagcgagccgcacgccaggatctcgaatgtgataaaataagcctcgaacggcaaaacaaagatctgaagagtcgcattatccacctcgaggggtcttacagatcgagtaaggaagggctcgtagtgcaaatggaagctaggatcgcagaactcgaggataggttagagtccgaggagagagacagagccaacctgcagctttccaatcgcaggctggagagaaaagtaaaggaattggtcatgcaagttgacgacgagcatttatctcttactgaccaaaaagatcagttgagccttaggctgaaagctatgaagaggcaggtggaggaggccgaggaagaaatcgatagactcgagagttcaaagaaaaaactacaacgagagctcgaagagcagatggatatgaacgagcacctacagggccaacttaacagcatgaagaaggacctccgcctcaaaaaactgccttcgaaggtcctggacgatatggatgatgatgacgatctgtcaacagacgggggttctctgtatgaggcgcctgtctcttacacgttcagcaaggacagtaccgtcgctagccagatttag

SEQ ID NO: 226003 - DNA, 7224 bp, Artificial Sequence
  derived and/or modified sequence
gcactccggccgggctctgctggctgcggcgggagctggacgcgggaggaggcggcggcggcgctggaacagtgaaccatggagctgtatttcggtgaatatcaacatgtgcagcaggaatatggggtccatctgagactcgcaagtgatgatacccaaaaatcaaggagttcccagaactccaaggcaggctcctacggtgtcagtattcgggtccagggaattgatggtcacccctatattgtcctgaataacacagaacggtgcctagcaggcacatcgttttctgaaaatgggccaccctttccacctccagtgataaataacctgcctctacattccagcaatggttctgtgccaaaggagaacagtgaagaacttcagcttccagaaaacccatacgcccagcctagcccaataagaaacctgaaacagcccctgctccatgagggcaagaatggagttctagatcgcaaagacgggtctgtgaagccatctcacctgctgaactttcagaggcatccagagcttttgcaaccctatgaccctgaaaagaatgagttgaatttacaaaatcaccagccttctgagagtaattggctaaaaacgttgacagaagaaggcatcaacaataagaagccttggacttgctttcccaaacctagcaattcccagcctaccagtccctccttggaagacccggccaaatctggtgtgacagctattcgtttatgcagctccgtggtcatagaggaccccaaaaagcagacctcagtgtgtgtaaacgttcagagctgcaccaaggagagggtgggagaggaggcccttttcactagcgggaggcccctgactgcccacagcccacatgcccaccctgaaaccaagaaaaccaggccagatgttcttcccttccggcgacaggattcagcgggacccgtcctggatggagctcggtcccggaggtcctcctcgtcatccacaactcccacgtcagccaactctttgtacaggtttttactggatgatcaggaatgtgccatccatgccgacaacgtcaatcgtcatgaaaacagaaggtatattcccttcctgccaggaactggacgggatattgatacaggatcaattcctggtgtggatcagttaattgaaaaatttgatcaaaaacctgggcttcagagaagaggaaggtctgggaagcgaaacagaattaatacagatgacaggaaaagatccagaagcgtggatagcgcctttccttttggcctccaagggaactcggagtacctgattgaattcagtaggaacttgggcaagtcaagcgaacacctcctccggccttcccaggtgtgcccgcagcggccactgtctcaggagcgccgtgggaaacagagcgtgggccgcacctttgcaaagctgcagggagcagcgcacggggcttcatgtgcccactccaggcctccccagccgaacatagatgggaaagttctggaaaccgaaggtagtcaggaaagtacagtgatccgtgcgccctcccttggtgcacagagtaaaaaggaggaggaggtgaaaacagccaccgctacgctgatgttacagaaccgggcaacagcaacttcgcctgattctggtgccaagaaaatttccgtgaagacatttccttcggcctcaaatactcaggccacaccggatctcttaaagggccagcaagagctcactcagcaaaccaatgaggagacagctaagcagattctctacaattacctcaaagaaggaagcactgataatgacgatgctactaaaaggaaagtcaacttggtctttgagaaaatccagaccttaaagtctcgagcagctgggagcgcccaaggaaataaccaagcttgtaattccacatctgaagtcaaagatctattggaacagaaaagcaagttgaccatagaagtggctgaacttcagagacagcttcaactggaagtcaagaatcaacagaacattaaagaagagagagagaggatgagagcaaacctagaagagctccgaagccaacacaacgaaaaggtggaggagaactccacattgcagcaacgactggaagaaagtgaaggggagctccggaagaatctggaggagctattccaggtgaagatggaacgggagcagcatcagactgagatcagggatctccaggaccagctctcagaaatgcacgatgaactggacagtgcaaagcgatcggaggacagggagaagggagctctgattgaggagctcttacaggcaaaacaggatcttcaagatctgctgattgccaaagaggagcaagaagacctcttgagaaagcgagagcgtgaactcaccgccctgaagggagccctgaaagaagaggtttccagccatgatcaggagatggacaagctgaaggagcaatatgatgctgagttgcaggccctgagggagagtgtggaagaagcaaccaagaatgtcgaggtcttggcgagcaggagcaacacttcagagcaagaccaggcggggactgaaatgcgcgtgaagcttctgcaggaggagaatgagaagctgcagggaagaagcgaagagctggagcggagagttgctcagcttcaaaggcagatcgaggacctgaaaggcgatgaagccaaggcgaaggaaacgctgaagaagtacgagggagaaatacgacagttagaggaggcccttgtgcacgccagaaaggaagaaaaagaagctgtgtcagccagaagggccctggagaatgaactggaggctgctcagggaaatctgagtcagactacccaggagcagaagcagttgtctgagaagctcaaagaggagagtgagcagaaggagcagctaagaaggttgaagaacgagatggagaatgagcggtggcacctgggcaaaaccattgagaaactgcagaaggagatggcagacattgttgaggcctcccgtacctcaaccctggagctccagaaccagctggatgagtataaggagaaaaaccgcagggagctcgcagaaatgcaaagacagttgaaggagaaaacgctggaggcagaaaagtcccgactgacagccatgaaaatgcaggatgagatgcgtctgatggaggaagagttacgggactaccagagagctcaggatgaagcactcacaaaaaggcagcttctggagcagacgctgaaggacctggagtatgagctggaagccaagagtcacctcaaagatgaccgcagcaggctggtcaagcagatggaggacaaggtgtctcaactggagatggaactggaagaagagagaaacaactcagatttgctgtctgagaggatcagtaggagcagggaacagatggagcagttgaggaatgagctacttcaggagagagctgcgagacaagacttggagtgcgacaagatttccctggagaggcagaacaaggacttaaagagccggattatccacctggaaggttcctacaggtccagcaaagaggggctggttgtgcagatggaggccaggatcgcggagctggaggaccgcctggagagtgaggagagggatcgggccaatcttcagctcagcaaccggcggctggagcggaaagtgaaggagctggtgatgcaggtggatgatgagcacctgtcattgactgatcagaaggaccagctgagcttgcgtttgaaagccatgaagcggcaggtggaggaggctgaggaggaaatcgacagactggaaagttctaaaaagaagctgcagagggagctggaggagcagatggacatgaatgagcatctgcaggggcagctcaactccatgaagaaggacttaagactgaagaagctgccgagtaaagtgctggatgacatggatgacgacgatgacctcagcacggatgggggaagcctctatgaggcgcctgtgagctacacattctccaaggacagcaccgtcgccagccagatctgagtgctctcccgggctgtggaagtacctgtcattcctgcaggagctgcagccacccaaagtgggaggcagggaggggagcatctgtctgccactgagaccaatcacagcctctttgcacagcatgccagctcctcagtgttacattcctcgccagggtctctcagtgggtcttcgacagagagcttttgcagtttaaaatgttgggatgcctgaggaccaggagccaccacccactggggtgttgtgagagatacactttggtaggctgaggcccctgttccacagccactatttgcattgctgtccctgccccctcatcactccccctgccaagacaaagggtccagaaggctaggacttacttaatagcactgtgcagggaggaaaccatgtatagcttgtacatattttaaaccagaccttctcacgaactgctgctgttgggtttggaatgtgatggaggcttggtagggtggctggtttgtaaagttcatgcatctatattgagtattctttttttttttttttgagatggagtttcattcttgttgccgaggctggagtgcaatggcgcaaccttggctcactgcaacctctgcctccctggttcaagtgattctcctgcctcatcctcccaagaagctgagattacagatgaccaccaccactcctggctaattttttgtatttagtagagacggggtttcaccatgttggtcaggctggtcttgaactcctgacctcaggtgatccacctgcctcagcctcccaaagtgctgagattacaggcatgagccaccacgcccagccattgagtattcttttttaaaatatgaagctattagattttaagtgttgaggagcagaggtgagaagagagagagagagagaaagtcaaataaagtcaaagaccagtttggaaaccaaagttggaaaagaagaattgtagtggtcatggacagctaagactgagcatagcagttcacatggtctgggtaaacaagtcactggcacaggggaaagccagaaggttgcttgtgtctgtgactgcagctatggccttgtttgcttagtttatctggaattctgttataatttctgaactgttctgagacctgttcccagtcactgattgcaatttcttttacacaggttgggtagggagagttgtaggtaaggccttaaacaaatgaggccgtttctggaaggatagggctgtgtggtcatgtcccacagcaagcttttgggatcgggggaataagagggtatgggggaaaggttcatagacttaggtgtgagaatgaggtgggaggtgtctggtaaggtcatgggggaagggagatgagagaggagataggcagatgtgggtatggggcccagtgtgagaaggaagacagagaagttcttgaaagctgggggatgtgtgggcaagaggtggattgagcaggatctcagggttatgtcgaggaagggaagaaagaaacagaagtcaggcagaggcgtgtctgtgcaaactggaggactccttccaacttcctggaacaaagcgacatcgccagcagcaggctggcagggagtggttgaggtctgggggccaggccacatggctggagaggaatttcagggagcatagcatcgggaggatgctacatatccagggactccctcctggccttcctgtgtcacttcacaatgtgacagtccccaggcatgcccacaggccaggcccagtcacagctgggcttccacaggtcagaatatgggacaggacatggtcagggagaggaccctgtgagttggtgacatatatgtggcagagatggtagtgttcagctgcttcagcagtgtccccaaccatcccaatagggtgggggcctgtgggccagaggactccatgacagtagccatggagtcccacctgtgccaggtcagagcccacccggcaggtttcagagtggtcagcccagtttaagggtgggagtctggagccagacagccaagccccttccacatctacagggtcactgtcatcctcaccacagccaggggtgattctcacctctgcctgcttatgtggggtgtggccgattcctccctttagtcattcattcatttagcacatatttattgggcatcggtgatgtgtcaggcacagtccttggcacacagaatacagcagtgaattaaacaggcaaaaattcctcccctcctggagctcagtgtcaggaaagggggtgataaatgacaatcaaatcgacatggaggttgagcacctctgtactcagccctctgtctgtccttctgaggacgcaacaagcctggttccctagagctcactttgaccctcaatatgttcataatttccctgctgcttctcccatcgttagacatctgccagtaagcctgctgagagaagcctcagcccactcatacctagagacgctgctggggaaggtcagcacacccaagaactttgggagtgtgtgtctgttttggtttgtgagaaagtagctgcccctcattctggccagttctttccagtagccatggggctggctacaagaagcaaaactgcccatgcaaagagaacacaggtcacttttcaaaacacttgcatcattaccctaaaaataggctgttatgcgttttgacaattgcgctatcctacactctgagggagttggcaacgcatgcggtatagtggagtgggaagagttgagactgaaagttaagagaagggttttcaagtcccggctcatctcaccccagtgactttgacagtgtgctcactctcagagccatggattacctggaacaaagtgcagattagtgcccacggtcctttccaggtataacatgctatcgttctttaattttattatatatacatacttttcttctgttttttgctttaagaactaaccccgatcaagagtattttctttagctagcttaaaaagaaaacatatattttatgtaaaaacacatacatggccaaatgcaatactgaagagacaatcatcctgtatcttttatggtttttcctgcttctgagtgtcgttctacaatgcccgttgacttattccattgcgtctctgctttagggtatggtttggtcgctttggttgtcatgagaaagagacattctccttgcagctacctccatgtgagtgaattcctggataaagcaagatttcctttcaataaacgctgtcacccaatgggaattttgactct

SEQ ID NO: 226004 - DNA, 3909 bp, Artificial Sequence
  derived and/or modified sequence
atggagctgtacttcggcgagtaccagcacgtgcagcaggagtacggcgtgcacctgagactggccagcgacgacacccagaagagcagaagcagccagaacagcaaggccggcagctacggcgtgagcatcagagtgcagggcatcgacggccacccctacatcgtgctgaacaacaccgagagatgcctggccggcaccagcttcagcgagaacggcccccccttccccccccccgtgatcaacaacctgcccctgcacagcagcaacggcagcgtgcccaaggagaacagcgaggagctgcagctgcccgagaacccctacgcccagcccagccccatcagaaacctgaagcagcccctgctgcacgagggcaagaacggcgtgctggacagaaaggacggcagcgtgaagcccagccacctgctgaacttccagagacaccccgagctgctgcagccctacgaccccgagaagaacgagctgaacctgcagaaccaccagcccagcgagagcaactggctgaagaccctgaccgaggagggcatcaacaacaagaagccctggacctgcttccccaagcccagcaacagccagcccaccagccccagcctggaggaccccgccaagagcggcgtgaccgccatcagactgtgcagcagcgtggtgatcgaggaccccaagaagcagaccagcgtgtgcgtgaacgtgcagagctgcaccaaggagagagtgggcgaggaggccctgttcaccagcggcagacccctgaccgcccacagcccccacgcccaccccgagaccaagaagaccagacccgacgtgctgcccttcagaagacaggacagcgccggccccgtgctggacggcgccagaagcagaagaagcagcagcagcagcaccacccccaccagcgccaacagcctgtacagattcctgctggacgaccaggagtgcgccatccacgccgacaacgtgaacagacacgagaacagaagatacatccccttcctgcccggcaccggcagagacatcgacaccggcagcatccccggcgtggaccagctgatcgagaagttcgaccagaagcccggcctgcagagaagaggcagaagcggcaagagaaacagaatcaacaccgacgacagaaagagaagcagaagcgtggacagcgccttccccttcggcctgcagggcaacagcgagtacctgatcgagttcagcagaaacctgggcaagagcagcgagcacctgctgagacccagccaggtgtgcccccagagacccctgagccaggagagaagaggcaagcagagcgtgggcagaaccttcgccaagctgcagggcgccgcccacggcgccagctgcgcccacagcagacccccccagcccaacatcgacggcaaggtgctggagaccgagggcagccaggagagcaccgtgatcagagcccccagcctgggcgcccagagcaagaaggaggaggaggtgaagaccgccaccgccaccctgatgctgcagaacagagccaccgccaccagccccgacagcggcgccaagaagatcagcgtgaagaccttccccagcgccagcaacacccaggccacccccgacctgctgaagggccagcaggagctgacccagcagaccaacgaggagaccgccaagcagatcctgtacaactacctgaaggagggcagcaccgacaacgacgacgccaccaagagaaaggtgaacctggtgttcgagaagatccagaccctgaagagcagagccgccggcagcgcccagggcaacaaccaggcctgcaacagcaccagcgaggtgaaggacctgctggagcagaagagcaagctgaccatcgaggtggccgagctgcagagacagctgcagctggaggtgaagaaccagcagaacatcaaggaggagagagagagaatgagagccaacctggaggagctgagaagccagcacaacgagaaggtggaggagaacagcaccctgcagcagagactggaggagagcgagggcgagctgagaaagaacctggaggagctgttccaggtgaagatggagagagagcagcaccagaccgagatcagagacctgcaggaccagctgagcgagatgcacgacgagctggacagcgccaagagaagcgaggacagagagaagggcgccctgatcgaggagctgctgcaggccaagcaggacctgcaggacctgctgatcgccaaggaggagcaggaggacctgctgagaaagagagagagagagctgaccgccctgaagggcgccctgaaggaggaggtgagcagccacgaccaggagatggacaagctgaaggagcagtacgacgccgagctgcaggccctgagagagagcgtggaggaggccaccaagaacgtggaggtgctggccagcagaagcaacaccagcgagcaggaccaggccggcaccgagatgagagtgaagctgctgcaggaggagaacgagaagctgcagggcagaagcgaggagctggagagaagagtggcccagctgcagagacagatcgaggacctgaagggcgacgaggccaaggccaaggagaccctgaagaagtacgagggcgagatcagacagctggaggaggccctggtgcacgccagaaaggaggagaaggaggccgtgagcgccagaagagccctggagaacgagctggaggccgcccagggcaacctgagccagaccacccaggagcagaagcagctgagcgagaagctgaaggaggagagcgagcagaaggagcagctgagaagactgaagaacgagatggagaacgagagatggcacctgggcaagaccatcgagaagctgcagaaggagatggccgacatcgtggaggccagcagaaccagcaccctggagctgcagaaccagctggacgagtacaaggagaagaacagaagagagctggccgagatgcagagacagctgaaggagaagaccctggaggccgagaagagcagactgaccgccatgaagatgcaggacgagatgagactgatggaggaggagctgagagactaccagagagcccaggacgaggccctgaccaagagacagctgctggagcagaccctgaaggacctggagtacgagctggaggccaagagccacctgaaggacgacagaagcagactggtgaagcagatggaggacaaggtgagccagctggagatggagctggaggaggagagaaacaacagcgacctgctgagcgagagaatcagcagaagcagagagcagatggagcagctgagaaacgagctgctgcaggagagagccgccagacaggacctggagtgcgacaagatcagcctggagagacagaacaaggacctgaagagcagaatcatccacctggagggcagctacagaagcagcaaggagggcctggtggtgcagatggaggccagaatcgccgagctggaggacagactggagagcgaggagagagacagagccaacctgcagctgagcaacagaagactggagagaaaggtgaaggagctggtgatgcaggtggacgacgagcacctgagcctgaccgaccagaaggaccagctgagcctgagactgaaggccatgaagagacaggtggaggaggccgaggaggagatcgacagactggagagcagcaagaagaagctgcagagagagctggaggagcagatggacatgaacgagcacctgcagggccagctgaacagcatgaagaaggacctgagactgaagaagctgcccagcaaggtgctggacgacatggacgacgacgacgacctgagcaccgacggcggcagcctgtacgaggcccccgtgagctacaccttcagcaaggacagcaccgtggccagccagatctag

SEQ ID NO: 226005 - protein, 695 aa, Artificial Sequence
  derived and/or modified sequence
MSPPKDPSPSLPLPSSSSHSSSPPSSSSTSVSGNAPDGSSPPQMTASEPLSQVSRGHPSPPTPNFRRRAVAQGAPREIPLYLPHHPKPEWAEYCLVSPGEDGLSDPAEMTSDECQPAEAPLGDIGSNHRDPHPIWGKDRSWTGQELSPLAGEDREKGSTGARKEEEGGPVLVKEKLGLKKLVLTQEQKTMLLDWNDSIPESVHLKAGERISQKSAENGRGGRVLKPVRPLLLPRAAGEPLPTQRGAQEKMGTPAEQAQGERNVPPPKSPLRLIANAIRRSLEPLLSNSEGGKKAWAKQESKTLPAQACTRSFSLRKTNSNKDGDQHSPGRNQSSAFSPPDPALRTHSLPNRPSKVFPALRSPPCSKIEDVPTLLEKVSLQENFPDASKPPKKRISLFSSLRLKDKSFESFLQESRQRKDIRDLFGSPKRKVLPEDSAQALEKLLQPFKSTSLRQAAPPPPPPPPPPPPPPTAGGADSKNFPLRAQVTEASSSASSTSSSSADEEFDPQLSLQLKEKKTLRRRKKLEKAMKQLVKQEELKRLYKAQAIQRQLEEVEERQRASEIQGVRLEKALRGEADSGTQDEAQLLQEWFKLVLEKNKLMRYESELLIMAQELELEDHQSRLEQKLREKMLKEESQKDEKDLNEEQEVFTELMQVIEQRDKLVDSLEEQRIREKAEDQHFESFVFSRGCQLSRT

SEQ ID NO: 226006 - protein, 29 aa, Artificial Sequence
  derived and/or modified sequence
MSPPKDPSPSLPLPSSSSHSSSPPSSSST

SEQ ID NO: 226007 - DNA, 2088 bp, Artificial Sequence
  derived and/or modified sequence
atgagcccaccgaaggaccccagcccctcacttcctctcccaagctctagctctcattccagcagtccccccagcagctcgagcactagcgtaagcggcaacgcgcctgatggttcatctccaccacaaatgaccgcttccgaaccgctgagccaggtgtcaagaggccacccctctcctcccacacccaacttccgccgtagagctgttgcccagggcgcaccccgagagattccactctacttaccacatcatcctaaacccgaatgggccgagtactgcctagtgtccccaggggaggacggattgtcagacccagccgagatgactagtgatgagtgccagcccgcagaggcacccctcggggacatcggctctaaccatagggatccgcatcccatctggggcaaggataggtcgtggaccggtcaggagctgtcccccctcgcaggcgaggaccgcgaaaaaggtagcaccggcgccaggaaagaggaggaaggcggtcccgtactggtcaaggagaaactgggtctgaaaaaactggtgctaacacaggagcaaaaaacgatgcttctcgactggaacgactctattcctgagagtgtgcacctaaaagccggtgagaggattagtcagaagtccgcagagaacgggcgagggggccgcgtcctgaagcctgtcaggccactcctgctgccgcgcgccgctggggaaccactcccaactcagaggggtgcccaagaaaagatgggcacccctgcagaacaagctcagggggaaagaaatgttcccccccctaagagccccctgcgtctcatcgccaatgccattcgccgctcactcgagccactactttctaatagtgagggtgggaaaaaggcgtgggccaagcaggagtccaagactctccctgctcaggcttgcacccgttcttttagcttgaggaaaacaaatagcaacaaggacggggaccaacactccccaggtcgcaaccagtcttctgcttttagtccccccgatccagctctcaggacccactctctgccaaatcggccttctaaagtgtttcctgccttacggtcccctccttgttctaagattgaagacgtgccaaccctcctagagaaagtcagcctgcaagagaatttccctgatgcatccaagccccccaagaagagaatttctctattctcgtcgctgagactgaaagacaagtcttttgagtcctttctacaggaatcccgccagcggaaggacatcagggaccttttcggttcccccaaaaggaaagtgctgccagaagattccgcacaggctctcgaaaagctgcttcagccattcaaaagtacttccttgaggcaggccgcgcctcccccgcccccaccgccccctccccctccccccccccccacagccggcggagcagatagcaagaattttccactccgggcgcaagtcacagaggcaagctctagcgctagctccactagtagctcctcggcagacgaggaatttgaccctcaactttccctacagttgaaagagaaaaagacgctccgtcgacgcaagaagctggagaaagccatgaaacagctcgtgaaacaagaggagcttaagaggttgtacaaggcccaggctattcagagacaactcgaagaagtagaggagagacagcgcgcctcagaaattcagggcgtacgcctggagaaagccttaagaggcgaagcagactctggaacccaggatgaggcgcaacttctgcaagagtggtttaagctggtgctggagaaaaacaagcttatgaggtatgagagtgaactgctgatcatggcccaagaactcgagctggaagaccatcagtccagattagagcagaaactacgagagaagatgctgaaggaagaatcacagaaggatgaaaaggatcttaacgaggaacaggaagtctttaccgagcttatgcaagtcatcgagcagcgggacaaattggtcgactctcttgaagaacagcgcataagggagaaagctgaggaccagcatttcgaatcattcgttttttcacgcggctgtcaactctcgcgcacttag

SEQ ID NO: 226008 - DNA, 2088 bp, Artificial Sequence
  derived and/or modified sequence
atgagcccccccaaggaccccagccccagcctgcccctgcccagcagcagcagccacagcagcagcccccccagcagcagcagcacctctgtgtctggaaatgccccagatggcagcagccccccccagatgacagccagcgagcccctgagccaggtgtcccggggccaccccagcccccccacccccaacttcagaagaagagctgtggcccagggcgccccccgggagatccccctgtacctgccccaccaccccaagccagagtgggccgagtactgcctggtgtccccaggagaagatggcctgagtgaccctgctgagatgaccagtgatgagtgccagcctgctgaggcccccctgggggacatcggcagcaaccaccgggacccccaccccatctggggcaaggaccgctcctggacaggccaggagctgagccccctggccggggaggaccgggagaagggcagcactggagccaggaaggaggaggagggcggccctgtgctggtgaaggagaagctgggcctgaagaagctggtgctgacccaggagcagaagaccatgctgctggactggaatgacagcatccctgagagcgtgcacctgaaggccggggagcgcatcagccagaagtctgcagaaaatggccggggcggccgggtgctgaagcctgtgcggcccctgctgctgcccagggctgctggggagcccctgcccacccagagaggagcccaggagaagatgggcaccccagctgagcaggcccagggcgagagaaatgtgcccccacccaagagccccctgcggctgattgccaatgccatccgccgcagcctggagcccctgctgagcaacagcgagggcggcaagaaggcctgggccaagcaggagagcaagaccctgcctgcccaggcctgcaccaggagcttcagcctgaggaagaccaacagcaacaaggatggagaccagcacagccctggcaggaaccagagcagcgccttcagccccccagaccctgccctgcggacccacagcctgcccaaccggcccagcaaggtgtttcctgccctgcggagccccccctgcagcaagattgaagatgtgcccaccctgctggagaaggtgtccctgcaggagaacttcccagatgccagcaagccacccaagaagaggatcagcctcttcagcagcctgcggctgaaggacaagagctttgagagcttcctgcaggagagccggcagaggaaggacatccgggacctgtttggcagccccaagaggaaggtgctgcctgaggacagcgcccaggccctggagaagctgctgcagcccttcaagagcaccagcctgcggcaggccgcccctcctcctcctcctcctcctcctcctcctcctcctccacccacagctgggggcgctgacagcaagaacttccccctgcgggcccaggtgacagaggccagcagcagcgccagcagcaccagcagcagcagcgcagatgaggagtttgacccccagctgagcctgcagctgaaggagaagaagaccctgcggcggaggaagaagctggagaaggccatgaagcagctggtgaagcaggaggagctgaagaggctgtacaaggcccaggccatccagaggcagctggaggaggtggaggagcggcagagggccagcgagatccagggcgtgcggctggagaaggccctgcggggggaggccgacagcggcacccaggatgaggcccagctgctgcaggagtggttcaagctggtgctggagaagaacaagctgatgagatatgaaagtgagctgctgatcatggcccaggagctggagctggaggaccaccagagccggctggagcagaagctgcgggagaagatgctgaaggaggagagccagaaggatgagaaggacctgaatgaggagcaggaggtgttcacagagctgatgcaggtgattgagcagagggacaagctggtggacagcctggaggagcagaggatccgggagaaggccgaggaccagcactttgagagctttgtgttcagccggggctgccagctgagcaggacatag

SEQ ID NO: 226009 - DNA, 3044 bp, Artificial Sequence
  derived and/or modified sequence
aagtttggtagagtgtgttgtggggacagcagtatggtgtgagggaaggagagagttcagtctattataatcattagtctattgacttgtggtaattgagctataggagataaattcctacttactctacacatttaatggactcttcctcccaccccatcttccctgtccctttctttttccacagcagctctgcaacgggccaatagcttccagtctccaaccccaagcaaataccagaactggaggagagaattctggtggagtttgacgccagtgaacaaaagaactatgtcacctcctaaggacccttctccttctcttcctcttccttcatcgtcttcccattcatcttccccaccatcttcttcttcaaccagtgtttctgggaatgctccagatggttcctccccgcctcagatgacagcttctgagcccctctcgcaagtctcgagaggtcatccaagtcctcccaccccaaactttcggaggcgagccgtagcccaaggagcacccagggaaattcccctgtatctgcctcatcacccaaagccagagtgggcagagtactgcctggtgagccctggtgaagatggcctctcagaccctgcagagatgacttctgatgagtgccagccagcagaggcccctcttggggacatcggaagcaaccacagagacccacaccccatctgggggaaggacaggagctggacagggcaagagctatctcccttggctggagaagaccgggaaaaagggagtactggagccaggaaggaagaagagggagggccagtgctggtaaaggagaagttgggcctgaagaagttagtcctcactcaggagcagaagaccatgttgttggattggaatgactccatccctgagagtgtgcacctcaaagctggggagcgaatttcccagaaaagtgctgagaatggtagaggaggccgtgtgctaaaaccagtccgccccctgctgctccctagggcagcaggagagcccctgccaacccagagaggggcccaggagaagatggggacccctgcggaacaagctcaaggggagcgaaacgtgcctccacccaagtccccactgcggctcatagccaatgccatccgaaggtctctagagcccctcctttccaactctgaaggcgggaagaaggcctgggccaagcaagaatccaaaactttgcccgcacaggcctgcactcgctcattcagccttcggaaaaccaattccaataaagacggggaccagcattcccctgggagaaaccagtcctcagcctttagccctcctgaccctgccctccgcacccacagtttgcccaatcggccatccaaggtctttcctgcacttaggtccccaccctgcagcaagattgaagatgtccccacactcctcgagaaagtgagtttgcaagagaacttcccagatgcttctaagcctccaaagaaaagaatctcacttttttcctccctcagactcaaagacaaatcttttgagagtttcctccaagaatccagacaaagaaaggacatcagggacctctttggcagccccaagaggaaggtgctgcctgaagatagtgcgcaggccctggagaagctgctgcagcctttcaaaagcacctccctgcgccaggcagctcctcctcctcctcctcctcctcctcctcctcctcctcctcctacagcgggaggtgcagactccaagaactttcccctcagagcacaggtaacagaggcttcctcttctgcctcttcaacctcctcctcctctgcagatgaagaatttgatccccagctttccttgcagttaaaggagaagaagacacttagaagaagaaagaagctagaaaaagcaatgaagcagttggttaagcaagaagaattgaaaagactctataaggctcaggccatccagaggcagctggaggaggtggaggagcggcagagggcttctgagatccagggtgtgaggctggagaaggcgttgcgaggagaagcagattcaggcacacaggatgaagcacagcttttgcaggaatggtttaagctggttctggagaagaataaattaatgcgatatgagtcggagctcctaatcatggcccaggaactggaattagaagatcatcaaagcagactggagcagaaactgagagagaaaatgctcaaggaggagagccagaaagatgagaaggatctaaacgaagagcaagaagtattcaccgagctgatgcaagtgattgagcaaagggacaaactcgtcgattccttagaggaacaacgcatcagagaaaaagccgaggaccagcactttgaaagcttcgtattctccagaggctgtcagctgagcaggacttgaggaggcccgtagtccctctccctggctgcacgttgggaccggatcaggccaagtgcaccacacaccctcatgggtctttctgcaggatttatcatccctggaacttgttataccttactgcattttttaaaattaaaattctcttgcacgcatggcagcttcccaaggttcttccagagattcaaatgaagaaaacccaaagactctttggcaattggcagtcaacttcagccaggctctcagactggaggtgttgttggcagatgaccagcattgttttccctagaaagtgacacaaagacttgactttcctgctacttttatcattttccttcccaattcattgagttacatactttaagatttttgagaagctgccttttcattaatatatccatatttgccttttttgtatggatgaccagtttccaaatgtcagaaagaagcagccgcagtttaaagattaggttaatatttaaattgtgtttccagagaaagaggagaaaccttgagattactgattacataaagcaaataactcatatagcaggtgttaattcaatccagggtgaatttaatttaccaggtgcatttataagccttaatataatatacataagcaatgagagcttaatagaacatttgagccttaattttattttaag

SEQ ID NO: 226010 - DNA, 2088 bp, Artificial Sequence
  derived and/or modified sequence
atgagcccccccaaggaccccagccccagcctgcccctgcccagcagttcgtcacacagtagcagccctccttctagcagctccacctcagtgagtggcaacgcgccggatggcagctctccaccccagatgacagcatccgaaccattgtctcaggtctcaaggggtcatccaagtcccccgacacctaatttcaggcgtcgcgccgttgcacagggggccccacgggaaatacccctatacctcccccaccacccgaagccagaatgggccgagtattgtctggtcagcccaggggaggatggcctttccgatccagctgagatgacaagcgacgaatgtcagcctgccgaagcccccctgggggacattgggagtaatcaccgcgatccccatccgatttggggcaaggaccgctcgtggaccggccaggaactgtcgccactagctggtgaggatcgggagaagggaagtaccggtgctcggaaagaagaagaaggcggaccagtgctggtgaaagagaagctcggtctgaaaaagctggttctgactcaagagcagaagaccatgttattagactggaatgacagcattccagaatcagtgcatctgaaagccggagagcggatctcacaaaaatccgctgaaaatgggcggggtgggcgcgtacttaagccagtgaggccgctattgcttccacgcgctgcaggggagcctctgcccactcagcgtggcgcacaggaaaagatgggcacaccggcagaacaggcacagggtgagcggaacgtaccccccccaaagtcaccacttcgtcttatcgccaacgcaatcaggaggagcctggagccgttgctgtctaacagtgagggaggcaaaaaggcttgggctaaacaggaaagtaaaacacttcccgcccaggcatgcactcggtccttttccctgcgcaaaaccaactccaataaggacggcgaccagcacagtccaggccgcaaccagagctcggccttctcccctccagacccggcgctgaggacacactccttacccaatcgcccgagcaaggtgtttcccgcgcttaggagtcctccatgctccaagattgaggatgtgccaacattgctggaaaaagtttctttacaagaaaatttccccgacgcctccaagccaccaaaaaaaaggatatctctgttttcaagtctgagactgaaggacaaaagctttgagtcatttctgcaggaatccaggcagcggaaagatattagggacctgttcggcagccccaagagaaaggttttgccagaggactctgcacaggcgctagagaagctgctgcagccattcaagagcacatcactgagacaggccgccccgccgccgccacccccgcctccacctcctccgcctccccccacggcggggggtgcagattccaaaaattttcctctgagagcccaggtaaccgaagccagctcatctgcctcttctactagctctagctctgccgatgaggagttcgatccccagctttctctccagctcaaagaaaagaagacattgcgccgtagaaagaaactcgaaaaagcgatgaagcagctcgtgaaacaggaggagctgaagaggttatacaaggcgcaagcgatccaaagacaactcgaagaagtggaggagcgacagcgagcctctgagattcagggggttcggctggaaaaggccctgcgaggtgaggctgacagtggcacccaggacgaagcccagttgctgcaggaatggttcaagctggtcctggagaagaataaactaatgaggtatgagagcgaattgctgattatggcacaggagctggaactggaggatcaccaatctaggctggaacagaagttgcgcgaaaagatgctcaaagaagaaagtcagaaggatgagaaggatcttaacgaggagcaggaggtgttcaccgagctaatgcaggtgatagagcagcgcgacaagttggtcgactccctggaggagcagagaatcagagagaaagccgaggaccaacactttgaatctttcgttttttctaggggttgccagctctcgaggacttag

SEQ ID NO: 226011 - DNA, 2088 bp, Artificial Sequence
  derived and/or modified sequence
atgtcaccacccaaagatccaagtccctctcttcccctcccgtcttcaagttctcatagcagcagccctcccagttcttcctctaccagtgtgtcaggtaacgcgcctgatggctccagtcccccacagatgactgccagtgaacccctcagccaggtcagcagaggtcatccaagtcctcctacccccaatttcaggagacgggcagtggctcaaggagccccaagagaaatacctctttacctcccgcatcatcctaaacccgagtgggccgagtactgcctggtgtcaccaggggaggacggcctgtccgatcctgctgaaatgacttccgacgaatgccagccagctgaagcacctctgggggatatcggcagcaatcatagagaccctcacccaatttggggtaaggaccgctcatggaccggtcaggaactgagcccccttgccggtgaggatagggagaagggtagcacgggagccagaaaggaagaggagggaggcccagtgctggtgaaggaaaaactgggccttaaaaagctggtgcttacacaagagcaaaagactatgttgctggactggaatgacagtattccggagagcgtccacctcaaagcaggagagcgcatttctcagaagagcgccgaaaatggccgaggcggacgagtgctaaaacccgtgcgtcccctgctactgccacgagcagcaggagaaccattaccaacacagcgcggagcccaggaaaagatgggtacaccggctgaacaagcccagggggaacgtaatgtcccaccaccgaagtcgccactgcggctcatcgccaatgctattcgcaggtcacttgagcccctcctgagcaatagcgagggcggaaaaaaagcgtgggccaagcaggaatccaaaacccttcccgcacaagcatgcacccggtcattctcactgagaaaaactaactcaaacaaggacggagaccagcacagccctggcagaaaccagtccagcgctttctctccgcctgatccagctctgagaactcatagtctccctaatcgaccatcaaaggttttcccagctctccgctccccgccatgttcaaagatcgaagatgttcccacgctactcgagaaagtctccctccaagagaattttccagacgcctcaaagccccctaagaaacgcatcagtttgttctcatctctgcgcctgaaggacaaatcttttgaatccttcctccaggagtcgcgacagaggaaagacattagagacttgttcggaagccctaaacggaaggtcctgcccgaggacagcgcacaggcccttgagaagctgttgcagcctttcaaaagtacgtcacttcgccaggcagcccctcccccacctccacctccgccaccacccccaccccctcccactgcaggaggggctgatagtaagaacttccccctgagggcccaggtgactgaggcgagttcttcagctagcagcacctcctccagttccgcagacgaggagttcgacccacaactgagcctccagcttaaagaaaagaagacactgcggaggaggaagaaattggagaaggcaatgaaacaacttgtgaagcaagaagaactgaaaaggctgtacaaggcgcaggctatccaacgccagttggaggaagtggaggaacggcaacgggctagcgaaattcagggcgtgaggctggagaaagctcttcggggtgaagctgattccgggacccaggacgaagctcagctgttgcaggaatggtttaagttggtcttggagaaaaacaagttaatgagatacgagtctgagcttctcatcatggctcaggaactggagctggaggatcaccagagccgactggaacagaagctgagagaaaaaatgcttaaggaggagtcccagaaggacgagaaagaccttaatgaagaacaagaggtgttcaccgaactgatgcaagttatcgagcagcgagacaaactagtcgacagcctcgaggagcagcgcattagagagaaagccgaggatcagcactttgaatcattcgtgttttcccgcggatgccagctgagtaggacctag

SEQ ID NO: 226012 - DNA, 2088 bp, Artificial Sequence
  derived and/or modified sequence
atgagcccccccaaggaccccagccccagcctgcccctgcccagcagcagcagccacagcagcagcccccccagcagcagcagcaccagcgtgagcggcaacgcccccgacggcagcagccccccccagatgaccgccagcgagcccctgagccaggtgagcagaggccaccccagcccccccacccccaacttcagaagaagagccgtggcccagggcgcccccagagagatccccctgtacctgccccaccaccccaagcccgagtgggccgagtactgcctggtgagccccggcgaggacggcctgagcgaccccgccgagatgaccagcgacgagtgccagcccgccgaggcccccctgggcgacatcggcagcaaccacagagacccccaccccatctggggcaaggacagaagctggaccggccaggagctgagccccctggccggcgaggacagagagaagggcagcaccggcgccagaaaggaggaggagggcggccccgtgctggtgaaggagaagctgggcctgaagaagctggtgctgacccaggagcagaagaccatgctgctggactggaacgacagcatccccgagagcgtgcacctgaaggccggcgagagaatcagccagaagagcgccgagaacggcagaggcggcagagtgctgaagcccgtgagacccctgctgctgcccagagccgccggcgagcccctgcccacccagagaggcgcccaggagaagatgggcacccccgccgagcaggcccagggcgagagaaacgtgcccccccccaagagccccctgagactgatcgccaacgccatcagaagaagcctggagcccctgctgagcaacagcgagggcggcaagaaggcctgggccaagcaggagagcaagaccctgcccgcccaggcctgcaccagaagcttcagcctgagaaagaccaacagcaacaaggacggcgaccagcacagccccggcagaaaccagagcagcgccttcagcccccccgaccccgccctgagaacccacagcctgcccaacagacccagcaaggtgttccccgccctgagaagccccccctgcagcaagatcgaggacgtgcccaccctgctggagaaggtgagcctgcaggagaacttccccgacgccagcaagccccccaagaagagaatcagcctgttcagcagcctgagactgaaggacaagagcttcgagagcttcctgcaggagagcagacagagaaaggacatcagagacctgttcggcagccccaagagaaaggtgctgcccgaggacagcgcccaggccctggagaagctgctgcagcccttcaagagcaccagcctgagacaggccgccccccccccccccccccccccccccccccccccccccccccccaccgccggcggcgccgacagcaagaacttccccctgagagcccaggtgaccgaggccagcagcagcgccagcagcaccagcagcagcagcgccgacgaggagttcgacccccagctgagcctgcagctgaaggagaagaagaccctgagaagaagaaagaagctggagaaggccatgaagcagctggtgaagcaggaggagctgaagagactgtacaaggcccaggccatccagagacagctggaggaggtggaggagagacagagagccagcgagatccagggcgtgagactggagaaggccctgagaggcgaggccgacagcggcacccaggacgaggcccagctgctgcaggagtggttcaagctggtgctggagaagaacaagctgatgagatacgagagcgagctgctgatcatggcccaggagctggagctggaggaccaccagagcagactggagcagaagctgagagagaagatgctgaaggaggagagccagaaggacgagaaggacctgaacgaggagcaggaggtgttcaccgagctgatgcaggtgatcgagcagagagacaagctggtggacagcctggaggagcagagaatcagagagaaggccgaggaccagcacttcgagagcttcgtgttcagcagaggctgccagctgagcagaacctag

SEQ ID NO: 226013 - protein, 583 aa, Artificial Sequence
  derived and/or modified sequence
MEVAANCSLRVKRPLLDPRFEGYKLSLEPLPCYQLELDAAVAEVKLRDDQYTLEHMHAFGMYNYLHCDSWYQDSVYYIDTLGRIMNLTVMLDTALGKPREVFRLPTDLTACDNRLCASIHFSSSTWVTLSDGTGRLYVIGTGERGNSASEKWEIMFNEELGDPFIIIHSISLLNAEEHSIATLLLRIEKEELDMKGSGFYVSLEWVTISKKNQDNKKYEIIKRDILRGKSVPHYAAIEPDGNGLMIVSYKSLTFVQAGQDLEENMDEDISEKIKEPLYYWQQTEDDLTVTIRLPEDSTKEDIQIQFLPDHINIVLKDHQFLEGKLYSSIDHESSTWIIKESNSLEISLIKKNEGLTWPELVIGDKQGELIRDSAQCAAIAERLMHLTSEELNPNPDKEKPPCNAQELEECDIFFEESSSLCRFDGNTLKTTHVVNLGSNQYLFSVIVDPKEMPCFCLRHDVDALLWQPHSSKQDDMWEHIATFNALGYVQASKRDKKFFACAPNYSYAALCECLRRVFIYRQPAPMSTVLYNRKEGRQVGQVAKQQVASLETNDPILGFQATNERLFVLTTKNLFLIKVNTEN

SEQ ID NO: 226014 - DNA, 1752 bp, Artificial Sequence
  derived and/or modified sequence
atggaggtggccgccaactgcagcctgagagtgaagagacccctgctggaccccagattcgagggctacaagctgagcctggagcccctgccctgctaccagctggagctggacgccgccgtggccgaggtgaagctgagagacgaccagtacaccctggagcacatgcacgccttcggcatgtacaactacctgcactgcgacagctggtaccaggacagcgtgtactacatcgacaccctgggcagaatcatgaacctgaccgtgatgctggacaccgccctgggcaagcccagagaggtgttcagactgcccaccgacctgaccgcctgcgacaacagactgtgcgccagcatccacttcagcagcagcacctgggtgaccctgagcgacggcaccggcagactgtacgtgatcggcaccggcgagagaggcaacagcgccagcgagaagtgggagatcatgttcaacgaggagctgggcgaccccttcatcatcatccacagcatcagcctgctgaacgccgaggagcacagcatcgccaccctgctgctgagaatcgagaaggaggagctggacatgaagggcagcggcttctacgtgagcctggagtgggtgaccatcagcaagaagaaccaggacaacaagaagtacgagatcatcaagagagacatcctgagaggcaagagcgtgccccactacgccgccatcgagcccgacggcaacggcctgatgatcgtgagctacaagagcctgaccttcgtgcaggccggccaggacctggaggagaacatggacgaggacatcagcgagaagatcaaggagcccctgtactactggcagcagaccgaggacgacctgaccgtgaccatcagactgcccgaggacagcaccaaggaggacatccagatccagttcctgcccgaccacatcaacatcgtgctgaaggaccaccagttcctggagggcaagctgtacagcagcatcgaccacgagagcagcacctggatcatcaaggagagcaacagcctggagatcagcctgatcaagaagaacgagggcctgacctggcccgagctggtgatcggcgacaagcagggcgagctgatcagagacagcgcccagtgcgccgccatcgccgagagactgatgcacctgaccagcgaggagctgaaccccaaccccgacaaggagaagcccccctgcaacgcccaggagctggaggagtgcgacatcttcttcgaggagagcagcagcctgtgcagattcgacggcaacaccctgaagaccacccacgtggtgaacctgggcagcaaccagtacctgttcagcgtgatcgtggaccccaaggagatgccctgcttctgcctgagacacgacgtggacgccctgctgtggcagccccacagcagcaagcaggacgacatgtgggagcacatcgccaccttcaacgccctgggctacgtgcaggccagcaagagagacaagaagttcttcgcctgcgcccccaactacagctacgccgccctgtgcgagtgcctgagaagagtgttcatctacagacagcccgcccccatgagcaccgtgctgtacaacagaaaggagggcagacaggtgggccaggtggccaagcagcaggtggccagcctggagaccaacgaccccatcctgggcttccaggccaccaacgagagactgttcgtgctgaccaccaagaacctgttcctgatcaaggtgaacaccgagaactag

SEQ ID NO: 226015 - DNA, 1752 bp, Artificial Sequence
  derived and/or modified sequence
atggaggtggcagccaactgctctctgcgggtcaaacgccccttgctggaccccaggtttgagggttataaactgtccctggagcccctgccctgctatcagctggagctggatgctgcagtcgccgaggtaaaactgagggatgaccagtacactctagagcatatgcacgctttcggaatgtacaactacctgcactgcgattcctggtatcaggatagcgtgtattacattgacacactaggtagaatcatgaatctgactgtgatgttggacaccgcactgggaaaaccacgcgaggtcttcagattacctactgatttaacagcctgcgacaatagactgtgtgcaagcattcacttttcttcctctacgtgggtgaccctgtccgatggtaccggccgactctatgtcatcgggaccggggagcgcggaaactctgccagcgagaagtgggaaatcatgttcaatgaagagctaggagacccttttattatcattcattcaattagccttctcaatgctgaggagcactccatcgctaccctgctcctgcgtattgaaaaggaggaactcgacatgaagggaagcggcttttatgtttctcttgagtgggtgacaatttcaaagaaaaatcaagataacaagaagtacgagattattaaaagggacatactgcgtggcaaatccgtgcctcactacgccgcaatagagcccgatggaaacggtttgatgatcgtatcctacaagtcactcaccttcgttcaggcaggccaggatctggaagaaaacatggacgaagacatctctgagaagatcaaggaacctctctattactggcagcagaccgaggacgatctcacagtcaccattaggctgccggaggacagcacgaaagaagacatccagattcagtttcttccagatcatattaacattgttctgaaagaccatcaatttctagaggggaagctctactccagtattgatcacgagtcaagcacgtggattatcaaggagtccaattcgctggagatctctctgattaagaaaaacgagggacttacgtggcccgagcttgtgattggagataagcagggcgaattgattcgggacagtgctcagtgcgcagctatagctgaacgcctcatgcatctaacctcagaagagctgaatcccaaccctgataaggagaagccaccatgtaatgcgcaggagctcgaggagtgcgacatcttcttcgaggagtcctcatccctgtgcaggtttgatggtaataccttgaagactactcacgtggtgaacctggggtcaaaccaatatctgttcagcgtgattgttgaccccaaggaaatgccatgtttttgtcttcggcatgatgtggacgctctcctgtggcaaccacactcgtctaagcaggatgacatgtgggaacacatagctacgtttaatgcactggggtacgtccaggctagcaaacgcgacaagaagttttttgcatgcgcccctaactactcctacgccgctctctgtgagtgcctcaggcgggtgtttatctatcggcaacctgccccaatgtcaacggtcctttacaatcggaaggaaggcagacaggtcggacaggtcgcaaaacagcaagtggcttctcttgaaaccaatgaccctatactcgggtttcaagccacgaacgagcgactgttcgtgctaacaactaagaatctctttctgatcaaggtcaacacagaaaattag

SEQ ID NO: 226016 - DNA, 1752 bp, Artificial Sequence
  derived and/or modified sequence
atggaggtggccgccaactgcagcctgcgggtgaagaggcccctgctggaccccaggtttgagggctacaagctgagcctggagcccctgccctgctaccagctggagctggatgctgctgtggccgaggtgaagctgagagatgaccagtacaccctggagcacatgcacgccttcggcatgtacaactacctgcactgtgacagctggtaccaggacagcgtgtactacatcgacaccctgggccgcatcatgaacctgactgtgatgctggacacagccctgggcaagccccgggaggtgttccggctgcccacagacctgacagcctgtgacaaccggctgtgtgccagcatccacttcagcagcagcacctgggtgaccctgagtgatggcaccggccgcctgtatgtgattggaactggagagcggggcaacagcgccagcgagaagtgggagatcatgtttaatgaggagctgggggaccccttcatcatcatccacagcatcagcctgctgaatgctgaggagcacagcatcgccaccctgctgctgagaattgagaaggaggagctggacatgaagggcagcggcttctacgtgtccctggagtgggtgaccatcagcaagaagaaccaggacaacaagaagtatgagatcatcaagagggacatcctgcggggcaagtctgtgccccactatgctgccattgaaccagatggaaatggcctgatgattgtgtcctacaagagcctgacctttgtgcaggccggccaggacctggaggagaacatggatgaggacatcagcgagaagatcaaggagcccctgtactactggcagcagacagaagatgacctgactgtgaccatccggctgcctgaggacagcaccaaggaggacatccagatccagttcctgcctgaccacatcaacatcgtgctgaaggaccaccagttcctggagggcaagctgtacagcagcattgaccacgagagcagcacctggatcatcaaggagagcaacagcctggagatcagcctcatcaagaagaatgaaggcctgacctggccagagctggtgattggagacaagcagggcgagctgatccgggacagcgcccagtgtgccgccatcgccgagcggctgatgcacctgaccagcgaggagctgaaccccaacccagacaaggagaagccaccctgcaatgcccaggagctggaggagtgtgacatcttctttgaggagagcagcagcctgtgccgctttgatggcaacaccctgaagaccacccacgtggtgaacctgggcagcaaccagtacctgttcagcgtcatcgtggaccccaaggagatgccctgcttctgcctgcggcatgatgtggatgccctgctgtggcagccccacagcagcaagcaggatgacatgtgggagcacatcgccaccttcaatgccctgggctacgtgcaggccagcaagagggacaagaagttctttgcctgtgcccccaactacagctatgctgccctgtgtgagtgcctgcggcgggtcttcatctaccggcagcctgcccccatgagcacagtgctgtacaacaggaaggagggccggcaggtgggccaggtggccaagcagcaggtggccagcctggagaccaatgaccccatcctgggcttccaggccaccaatgaaaggctgtttgtgctgaccaccaagaacctcttcctgatcaaggtgaacacagagaactag

SEQ ID NO: 226017 - DNA, 1752 bp, Artificial Sequence
  derived and/or modified sequence
atggaggtggccgccaactgcagcctgcgggtgaagcggcccctgttagaccccaggtttgagggctacaagttatcactagagccccttccctgctaccaactggagttggatgcagcggtggctgaggtgaagctccgggacgaccagtacacattggagcacatgcacgctttcggtatgtacaactatctccactgcgatagttggtaccaagactctgtctactatattgacacactgggaagaattatgaatttgacggtgatgctggatacagcgctaggtaaaccccgagaagtcttcaggctgccaactgacttgaccgcatgtgacaacagactgtgcgcctctatccacttcagctcctcgacctgggtgaccctgtccgatgggacaggtcggctgtacgtaatcggaacgggggagagaggcaatagcgcgtccgaaaagtgggagatcatgttcaatgaggaacttggtgacccctttatcatcatccacagcatctccctgctgaatgcggaagagcattcgatagccacacttctccttcgaattgagaaagaggagctagacatgaaaggaagtggcttttatgtttccctcgagtgggtgaccataagcaaaaaaaatcaggataataagaagtacgagatcatcaagcgcgatatacttaggggtaagtctgttcctcactatgctgctatcgagccagatggcaatgggcttatgatcgtctcctacaagtcgcttactttcgtgcaggccgggcaggatctagaggagaacatggacgaggatattagcgaaaaaattaaagaacccttgtattactggcagcagacagaggatgatctgaccgttacaatcaggctgcccgaagacagcactaaagaagatatccagattcagttcttgcccgaccacattaacatcgtcctgaaggaccatcagttcctcgagggtaagctgtactcgtccatcgaccatgaatcctcaacgtggatcataaaggaaagtaacagtctggagatcagtctgatcaagaagaatgaaggtctcacctggcctgagctggttattggcgacaaacaaggagagctgatccgggacagcgcccagtgcgctgctatcgccgagcggctgatgcacttgacttcagaggagctcaacccgaatccagacaaagaaaagcctccttgcaatgctcaggaactggaggagtgcgatatctttttcgaggagtccagctcactgtgcagatttgacggcaacaccttgaaaactactcacgttgtgaatctgggttctaatcagtacctgtttagtgtcatcgtggacccgaaagaaatgccatgtttctgtctccggcacgacgtcgacgccctgctgtggcaaccccacagcagcaagcaggacgatatgtgggaacatatcgctacattcaatgctctcggatatgtgcaggccagcaaaagggacaagaaatttttcgcgtgcgctccgaactacagttacgccgccctctgcgagtgtcttagacgtgtgttcatttataggcagcctgcgcccatgagtactgtcctgtataatagaaaggagggccgccaggtcggccaggtcgcaaagcagcaggtagcgtctcttgaaacaaacgaccctatacttggcttccaggctaccaatgaaagactctttgttctcacaacaaaaaacttgtttctcatcaaggtcaatacggaaaattag

SEQ ID NO: 226018 - DNA, 4217 bp, Artificial Sequence
  derived and/or modified sequence
cggacttagaccctcagtagctcgggcacctaagcacacagaaagctagaacacgcatttccggggcggggtctcgccaccctgcctataatgtgagaatttaaccagcgcgggccgcctcctggttgctagggcctctgggtaacagagttcagaccttgccgtcgcgcgcgcgttaagtaccaggagaactacatagcccagcatgcaacagtctcaactttttcacggacactacatttcccagaaggcagttcgcaccgcagtgttttctgggatgggaaccacgccgcttcccagtctctgtgcgaggcgtgaagcgcggacctttcaacaagggctttattaattctcacgctgcggccctggaaagcgatggaggtggcggctaattgctccctacgggtgaagagacctctgttggatccccgcttcgagggttacaagctctctcttgagccgctgccttgttaccagctggagcttgacgcagctgtggcagaggtaaaacttcgagatgatcaatatacactggaacacatgcatgcttttggaatgtataattacctgcactgtgattcatggtatcaagacagtgtctactatattgatacccttggaagaattatgaatttaacagtaatgctggacactgccttaggaaaaccacgagaggtgtttcgacttcctacagatttgacagcatgtgacaaccgtctttgtgcatctatccatttctcatcttctacctgggttaccttgtcagatggaactggaagattgtatgtcattggaacaggtgaacgtggaaatagcgcttctgaaaaatgggagattatgtttaatgaagaacttggggatccttttattataattcacagtatctcactgctaaatgctgaagaacattctatagctaccctacttcttcgaatagagaaagaggaattggatatgaaaggaagtggtttctatgtttctctggagtgggtcactatcagtaagaaaaatcaagataataaaaaatatgaaattattaagcgtgatattctccgtggaaagtcagtgccacattatgctgctattgagcctgatggaaatggtctaatgattgtatcctacaagtctttaacatttgttcaggctggtcaagatcttgaagaaaatatggatgaagacatatcagagaaaatcaaagaacctctgtattactggcaacagactgaagatgatttgacagtaaccatacggcttccagaagacagtactaaggaggacattcaaatacagtttttgcctgatcacatcaacattgtactgaaggatcaccagtttttagaaggaaaactctattcatctattgatcatgaaagcagtacatggataattaaagagagtaatagcttggagatttccttgattaagaagaatgaaggactgacctggccagagctagtaattggagataaacaaggggaacttataagagattcagcccagtgtgctgcaatagctgaacgtttgatgcatttgacctctgaagaactgaatccaaatccagataaagaaaaaccaccttgcaatgctcaagagttagaagaatgtgatattttctttgaagagagctccagtttatgcagatttgatggcaatacattaaaaactactcatgtggtgaatcttggaagcaaccagtaccttttctctgtcatagtggatcctaaagaaatgccctgcttctgtttgcgccatgatgttgatgccctactctggcaaccacactccagcaaacaagatgatatgtgggagcacatcgcaactttcaatgctttaggctatgtccaagcatcaaagagagacaaaaaattttttgcctgtgctccaaattactcgtatgcagccctttgtgagtgccttcgtcgagtattcatctatcgtcagcctgctcccatgtccactgtactttacaacagaaaggaaggcaggcaagtaggacaggttgctaagcagcaagtagcaagcctagaaaccaatgatcctattttaggatttcaggcaacaaatgagagattatttgttcttactaccaaaaacctctttttaataaaagtaaatacagagaattaattattctaacatattggcctctttgtactggaaaagtattcagtggtacctggaggtctggacagttatactgtaacctcttaagttttaatgtgctaaatatatcttgtatgattttttattttttaataacattggaaatatattcaagagattatgattctgtaaagctgtggaatgaagctgcagatttagagaacattggcttctgaaaaaaaaaaagagtgaagatagtactagcaagtatacttattttttaaaacaggctagaatctcatgttttatatgaaagatgtacaattcagtgtttaaaaataaaaatatttattgtgtactctgttcgttgattagttgctacaggctgtacctataagatgtacaggataatagttaaatgttgagtattgtacatatgtatttaagtggattgaataactgagtctacatggaggaggaaatgctagagaacagcaggtctaatattttttaagtttactgagagacctttattattattttcaaattaagtatagctttatgtaacttttagccagttgctctgccacagacatagacaaagagagataagatttcacattatccatcactgcataacaaaccacaccaaaactcagtggtttaaaacaaggacttttattatttttcacgattcagtgagttggctgtctctgctgtacagggcctctcagcctccagtagactagacgaatcttctttccatagtagagaaaacatcttaagagagcaagctccaatatgcaagagcttatcgatcctgtacatctatcatatttactaatgttccattggacaaagcaaatcacatggccaagtctagagtcagaatgaggggactacacaagctgacagcggatggtatgactcattgggggccattgatggaacaatcttaccacacaaggacaaattataatttatccttgtggctctctttatttttctaacaacttcaacaaaataatcctgtttatatgttatagtttcttgccacaaattttgttttttcaaacttacctttccaggtttgttttagtatgtatgtacctggaaatttttattactttttataccatttcaagatatgtatcttatataaacctcaagttggattttatattttaataaggaagttaagaccttcatttaagaggcagaagattaagataagaaatataagatagaaaagctttgttcctaacatatcttttgcctgtctgggcaagtatttgactcaactaaattttaatgaacgaatgaatgacagagaggaggaaaaaagatgaggattgcatacatgttctaaaccctttgtcagattgcagtttcctagagagtattgaggtgctaggtagaaagttaggaaaggtcctgaggactggtattgacaattggagtcctaatagtactctattcgtattaggaaagagagactagataccaaacatcacgagatcatagagatggaaaactgtatagtaaccaaaaaccaaaacagtgatatttccagaactttttagtattgttgtaaaacttcatgaaacaaaagaccatttaaatagtgaattattaaaaatctttatgatgggaaagtagatctaaattttctctaaaattttccccaaagataatatcctcttagggaacataagaaaaatgtataataaaaatgtggtgcttaattaaccatgactatgtatatattgccaattttagtaatcaatattctttgtgcatgtgatttttttgcatgattaatgttgaattgaaagctctcaggataattaatcctaaatattgtcgcatgttgacctacgttaaaagatgaataggtctagagccgtgatttcaagctattttcctgaaatgcttcagggattccataaacatttaaacaatgttctaaggtacatatacttagaacattgagatatatactacaagtgctaagaatatagtaccttgtatttttgttgatttttatcatgttttaaataggaatttataaaatatttatgatagtaataaagtagtattttatgtgttttgca

SEQ ID NO: 226019 - DNA, 1752 bp, Artificial Sequence
  derived and/or modified sequence
atggaggtggcagcgaactgtagcctgcgagttaagcggccattgctggatccacggtttgaggggtacaagctctcgcttgaacccctgccatgctatcagctagaacttgatgctgcggtagcagaagtaaaattgcgggacgatcagtacaccttagagcacatgcacgctttcggcatgtataactatcttcactgtgattcgtggtaccaggacagcgtgtattacatcgacactttgggcagaattatgaacctgactgttatgctggataccgccttgggaaagcctcgcgaggtttttcgactccctaccgaccttacagcctgcgacaaccggctgtgtgcctccatccatttctctagttccacttgggtgacattgagcgatggtaccggcaggttgtatgtcatcggaaccggcgagagagggaacagtgcatctgaaaaatgggagatcatgttcaacgaggagctaggggatccattcatcatcatccattcgattagcttgttaaacgccgaagagcactctattgctaccttgctgctccgcatcgaaaaagaagagctcgatatgaagggaagtggcttctatgtttcactggaatgggtgaccattagcaagaaaaatcaggacaacaagaagtacgaaatcatcaagagagatatcttgcgcggaaagtcagtgccacattatgccgctattgagccggatggcaacgggctgatgatagtgagttacaaatcactgacattcgtgcaggccggacaggatctagaagaaaacatggacgaggatatttccgaaaaaatcaaggagccgctgtattactggcagcaaactgaggatgaccttacagttactatacggctgcctgaggattccaccaaagaggatattcagatacagttcctccccgatcacattaatatcgtgctcaaggaccaccagtttctagaagggaagctgtattcaagcattgaccatgagagttctacttggatcatcaaggaatctaactcgctggaaattagtcttattaagaagaacgagggtctgacctggcccgagctcgtcattggagataaacagggcgaactgattagagattctgcgcagtgcgccgcaattgcggaaaggctaatgcatctgacttctgaagaacttaatcccaatcctgataaggaaaaacctccttgcaatgcccaggagctggaggagtgtgatatctttttcgaggaaagcagctctctgtgtcgcttcgatggcaacacgctgaagacgacccatgtcgtgaacctgggtagtaaccagtacctgttctctgtcatcgtcgatccaaaagaaatgccttgtttctgccttcggcacgacgtggatgctctgctgtggcaaccgcattcaagtaagcaagatgacatgtgggaacatattgcaactttcaacgctctgggctatgtgcaggcttccaaaagagacaagaagttttttgcctgcgcacccaactatagctacgcagctttgtgcgagtgcctgagacgcgtgttcatttaccgacaaccagcacccatgtcaaccgtgctctacaacagaaaagaaggcagacaagtgggtcaggtggcaaagcagcaggtagcatctctggaaaccaacgacccaatcctgggtttccaggccacaaacgaaaggctatttgttctcaccaccaaaaatctgttcctcattaaggttaacaccgaaaactag

SEQ ID NO: 226020 - protein, 649 aa, Artificial Sequence
  derived and/or modified sequence
MAQYGHPSPLGMAAREELYSKVTPRRNRQQRPGTIKHGSALDVLLSMGFPRARAQKALASTGGRSVQAACDWLFSHVGDPFLDDPLPREYVLYLRPTGPLAQKLSDFWQQSKQICGKNKAHNIFPHITLCQFFMCEDSKVDALGEALQTTVSRWKCKFSAPLPLELYTSSNFIGLFVKEDSAEVLKKFAADFAAEAASKTEVHVEPHKKQLHVTLAYHFQASHLPTLEKLAQNIDVKLGCDWVATIFSRDIRFANHETLQVIYPYTPQNDDELELVPGDFIFMSPMEQTSTSEGWIYGTSLTTGCSGLLPENYITKADECSTWIFHGSYSILNTSSSNSLTFGDGVLERRPYEDQGLGETTPLTIICQPMQPLRVNSQPGPQKRCLFVCRHGERMDVVFGKYWLSQCFDAKGRYIRTNLNMPHSLPQRSGGFRDYEKDAPITVFGCMQARLVGEALLESNTIIDHVYCSPSLRCVQTAHNILKGLQQENHLKIRVEPGLFEWTKWVAGSTLPAWIPPSELAAANLSVDTTYRPHIPISKLVVSESYDTYISRSFQVTKEIISECKSKGNNILIVAHASSLEACTCQLQGLSPQNSKDFVQMVRKIPYLGFCSCEELGETGIWQLTDPPILPLTHGPTGGFNWRETLLQE

SEQ ID NO: 226021 - DNA, 1950 bp, Artificial Sequence
  derived and/or modified sequence
atggcccagtacggccaccccagccccctgggcatggccgccagagaggagctgtacagcaaggtgacccccagaagaaacagacagcagagacccggcaccatcaagcacggcagcgccctggacgtgctgctgagcatgggcttccccagagccagagcccagaaggccctggccagcaccggcggcagaagcgtgcaggccgcctgcgactggctgttcagccacgtgggcgaccccttcctggacgaccccctgcccagagagtacgtgctgtacctgagacccaccggccccctggcccagaagctgagcgacttctggcagcagagcaagcagatctgcggcaagaacaaggcccacaacatcttcccccacatcaccctgtgccagttcttcatgtgcgaggacagcaaggtggacgccctgggcgaggccctgcagaccaccgtgagcagatggaagtgcaagttcagcgcccccctgcccctggagctgtacaccagcagcaacttcatcggcctgttcgtgaaggaggacagcgccgaggtgctgaagaagttcgccgccgacttcgccgccgaggccgccagcaagaccgaggtgcacgtggagccccacaagaagcagctgcacgtgaccctggcctaccacttccaggccagccacctgcccaccctggagaagctggcccagaacatcgacgtgaagctgggctgcgactgggtggccaccatcttcagcagagacatcagattcgccaaccacgagaccctgcaggtgatctacccctacaccccccagaacgacgacgagctggagctggtgcccggcgacttcatcttcatgagccccatggagcagaccagcaccagcgagggctggatctacggcaccagcctgaccaccggctgcagcggcctgctgcccgagaactacatcaccaaggccgacgagtgcagcacctggatcttccacggcagctacagcatcctgaacaccagcagcagcaacagcctgaccttcggcgacggcgtgctggagagaagaccctacgaggaccagggcctgggcgagaccacccccctgaccatcatctgccagcccatgcagcccctgagagtgaacagccagcccggcccccagaagagatgcctgttcgtgtgcagacacggcgagagaatggacgtggtgttcggcaagtactggctgagccagtgcttcgacgccaagggcagatacatcagaaccaacctgaacatgccccacagcctgccccagagaagcggcggcttcagagactacgagaaggacgcccccatcaccgtgttcggctgcatgcaggccagactggtgggcgaggccctgctggagagcaacaccatcatcgaccacgtgtactgcagccccagcctgagatgcgtgcagaccgcccacaacatcctgaagggcctgcagcaggagaaccacctgaagatcagagtggagcccggcctgttcgagtggaccaagtgggtggccggcagcaccctgcccgcctggatcccccccagcgagctggccgccgccaacctgagcgtggacaccacctacagaccccacatccccatcagcaagctggtggtgagcgagagctacgacacctacatcagcagaagcttccaggtgaccaaggagatcatcagcgagtgcaagagcaagggcaacaacatcctgatcgtggcccacgccagcagcctggaggcctgcacctgccagctgcagggcctgagcccccagaacagcaaggacttcgtgcagatggtgagaaagatcccctacctgggcttctgcagctgcgaggagctgggcgagaccggcatctggcagctgaccgacccccccatcctgcccctgacccacggccccaccggcggcttcaactggagagagaccctgctgcaggagtag

SEQ ID NO: 226022 - DNA, 1950 bp, Artificial Sequence
  derived and/or modified sequence
atggcccagtatgggcaccctagtccccttggcatggcggcacgcgaagagctgtactctaaagtcactccccgcagaaataggcaacagcggccagggacaattaagcacggtagcgcactcgatgtgctgctttctatgggcttccccagggccagagcccagaaagctttggcctccacgggaggccgaagtgttcaggccgcatgtgattggttgtttagccatgtcggcgatcctttcctcgacgaccctctgccccgtgaatatgttttatacctcagacccacggggcccctggcccagaagctgagtgatttctggcagcaatccaagcagatttgtggcaagaacaaagcgcacaacatcttcccacacatcactctctgccagttcttcatgtgcgaagatagcaaagtcgacgctctcggcgaagctctgcagactacagtgagtagatggaagtgcaagttctctgcgcccttgccattggaactgtacacatcaagcaactttatcgggcttttcgtcaaggaggactccgccgaagtcttgaagaagtttgcagccgatttcgcagctgaggctgccagtaagacagaagtacacgtagagcctcacaagaagcagttgcatgttaccttagcttaccatttccaggcctctcatcttcctaccctggagaaactggcgcagaacatcgatgtgaaacttgggtgcgattgggtggcaaccattttttctcgtgatattagatttgccaaccacgaaactctgcaagtaatatacccttatactccgcaaaatgacgatgagctggaactcgttccgggagacttcatttttatgtcacccatggaacagacctccacctcggaaggctggatctatggtacatctttgacaaccgggtgttccggtcttctgccagagaactacattaccaaagccgacgagtgttccacatggattttccacggcagctattcaatccttaatacttcctccagtaactctcttactttcggagatggagtactggaacgccgaccttacgaggaccagggcctcggagaaaccaccccactcacaatcatttgtcagcctatgcaacccctgcgcgtcaatagccagcctgggcctcagaagcgttgcctatttgtatgccggcacggggagaggatggatgtggtgttcggtaagtattggttgagtcagtgcttcgacgccaaggggagatatatcagaacaaatttgaacatgcctcattcactgccacaacggtctgggggctttagggactatgaaaaggatgcgcccattacagtctttggctgcatgcaagctcgtctggtgggcgaagcccttcttgagtccaacactatcatagatcacgtgtactgtagccctagcctgcgctgcgtgcagaccgcccacaatattctgaaaggcctgcagcaggagaatcacctgaaaattagagtggaaccaggcttgttcgagtggactaagtgggttgcggggagtactctccccgcctggattcctcctagcgagctagccgccgctaacctctccgtggatacgacctaccggccgcatattcccatttcaaaattagtcgtcagcgagtcctacgacacttacatctctcgctcatttcaggtgacaaaagaaatcatttcagagtgcaaatccaaaggcaacaacatcctcatagtagcccacgcctcaagcttggaagcctgtacttgtcagctgcaggggctgtctccccagaactcaaaggattttgtacagatggtcaggaaaatcccttatctgggattctgttcttgcgaggaactaggcgaaaccggtatttggcagcttaccgaccccccgatcctgcctctaacccatggtccaaccggggggttcaactggagggagaccttgcttcaggaatag

SEQ ID NO: 226023 - DNA, 1950 bp, Artificial Sequence
  derived and/or modified sequence
atggcccagtatggccaccccagccccctgggcatggccgcccgggaggagctgtacagcaaggtgaccccaagaagaaaccggcagcagaggcctggcaccatcaagcacggcagcgccctggatgtgctgctgtccatgggcttcccccgggcccgggcccagaaggccctggccagcactggaggccgctctgtgcaggccgcctgtgactggctgttcagccacgtgggggaccccttcctggatgaccccctgccccgggagtatgtgctgtacctgcggcccaccggccccctggcccagaagctgagtgacttctggcagcagagcaagcagatctgtgggaagaacaaggcccacaacatcttcccccacatcaccctgtgccagttcttcatgtgtgaggacagcaaggtggatgccctgggggaggccctgcagaccaccgtgagccgctggaagtgcaagttcagcgcccccctgcccctggagctgtacaccagcagcaacttcatcggcctgtttgtgaaggaggacagcgctgaggtgctgaagaagtttgctgctgactttgctgctgaggccgccagcaagacagaggtgcacgtggagccccacaagaagcagctgcacgtgaccctggcctaccacttccaggccagccacctgcccaccctggagaagctggcccagaacattgatgtgaagctgggctgtgactgggtggccaccatcttcagccgggacatccgctttgccaaccacgagaccctgcaggtgatctacccctacaccccccagaatgatgatgagctggagctggtgcctggggacttcatcttcatgagccccatggagcagaccagcaccagcgagggctggatctacggcaccagcctgaccaccggctgcagcggcctgctgcctgagaactacatcaccaaggcagatgaatgttccacctggatcttccacggcagctacagcatcctgaacaccagcagcagcaacagcctgacctttggagatggagtgctggagcggcggccctatgaggaccagggcctgggggagaccacccccctgaccatcatctgccagcccatgcagcccctgcgggtgaacagccagcccggcccccagaagcgctgcctgtttgtgtgcagacatggagagaggatggatgtggtgtttgggaagtactggctgagccagtgctttgatgccaagggccgctacatccgcaccaacctgaacatgccccacagcctgccccagaggtctgggggcttccgggactatgagaaggatgcccccatcaccgtgtttggctgcatgcaggcccggctggtgggggaggccctgctggagagcaacaccatcatcgaccacgtgtactgcagccccagcctgcgctgtgtgcagacagcccacaacatcctgaagggcctgcagcaggagaaccacctgaagatccgggtggagcccggcctgtttgagtggaccaagtgggtggccggcagcaccctgcctgcctggatcccccccagcgagctggccgccgccaacctgtctgtggacaccacctaccggccccacatccccatcagcaagctggtggtgtctgagagctatgacacctacatcagccgctccttccaggtgaccaaggagatcatcagcgagtgcaagagcaaaggaaacaacatcctgattgtggcccacgccagcagcctggaggcctgcacctgccagctgcagggcctgagcccccagaacagcaaggactttgtgcagatggtgaggaagatcccctacctgggcttctgcagctgtgaggagctgggggagaccggcatctggcagctgacagatcctcccatcctgcccctgacccacggccccactggaggcttcaactggagggagaccctgctgcaggagtag

SEQ ID NO: 226024 - DNA, 1950 bp, Artificial Sequence
  derived and/or modified sequence
atggcccagtacggccaccccagccccctgggcatggccgcccgggaagagctctattccaaagtcaccccaagaaggaatagacagcagcgccccggaactattaaacacgggtctgcactggacgtgctgctgagtatgggtttcccccgggccagagcccagaaagccctagcttcaacagggggacgcagtgtgcaagccgcatgtgattggctgttctcacacgttggagatcctttcctcgatgacccactgccaagggagtatgtcctgtacctcaggccaactggacctctcgctcagaagcttagcgatttttggcaacagagcaaacaaatctgcgggaagaataaagctcacaacatatttccccatattacactgtgccaattttttatgtgtgaagacagcaaggtggacgctctaggggaagctctgcagacgaccgtcagtcgctggaaatgcaagtttagtgccccgcttcccctggaactttatacctcttcaaactttatcgggttgttcgtcaaggaggattccgcggaagttttgaagaaatttgccgctgacttcgccgcagaagccgccagcaagaccgaagtccacgtagaacctcataagaagcagttgcacgttactttagcatatcattttcaagcctcacatctgcctactcttgaaaaactcgcgcaaaatattgacgtcaaactcgggtgtgactgggtggcaacaatcttttctagagatataaggttcgctaaccatgaaacactgcaggtaatctacccatacacgccacagaatgatgacgagcttgaactggtgcctggcgatttcatttttatgagtcccatggagcaaacaagcacaagtgaaggctggatttatggcacttctttgacgaccgggtgtagtggcctcctgccagagaattatataaccaaagcagacgagtgctccacctggatattccacgggtcttacagtatactcaatacctcgtcttcaaattcactgacattcggcgatggagtattggaacgtcgaccttacgaggaccagggccttggggaaaccacgcccctgacaatcatatgtcagcctatgcagccactcagggtcaatagtcagcccggcccccaaaagcgttgcctctttgtgtgtcggcatggagaaaggatggacgttgtttttgggaaatactggctcagccagtgtttcgatgcaaaaggacgttacatccgcacaaatctaaatatgccgcattctctaccacagcggagcggagggtttagagactacgaaaaagatgcccctatcactgtctttgggtgcatgcaggctagactggtgggtgaagctttgctggaatcaaataccatcatagaccatgtgtattgctccccatcactccgttgcgtgcagacagcgcataacattttgaagggccttcagcaggagaatcatctcaagatacgcgtggagcccggcctgttcgagtggacgaaatgggtcgccggctccactctacccgcctggattcccccaagcgaattggccgccgccaacctgagtgtggatacgacttacagaccgcacatacctatctcgaagttggtggtcagcgaatcctatgatacatatatttcccgttcatttcaggtcaccaaggaaataatctcagaatgtaaaagcaaagggaacaatattctgatcgtagcccatgcttcttcactggaggcctgcacttgccagctgcagggcctctcgcctcaaaattccaaagactttgtccagatggtgcgaaagattccctatctgggcttctgttcttgcgaagagttgggggaaactggcatatggcaattgacggaccctcctatactaccactcacacacggcccaacaggaggatttaattggcgcgagaccctgctgcaggagtag

SEQ ID NO: 226025 - DNA, 1950 bp, Artificial Sequence
  derived and/or modified sequence
atggctcagtacggtcacccatcaccactcgggatggctgccagggaggaactgtattccaaagtgacccctaggagaaaccggcagcagagaccagggacaatcaaacacggttccgccttggacgtgctactgtcaatggggtttccgagagctcgtgctcagaaggccctcgccagtacaggcggtcgatccgtccaggccgcttgtgactggctgttttcacacgtgggagatccttttttggatgatcctctgccaagggaatacgtgctgtacctaagacctacgggcccactcgcccaaaaattatccgatttctggcagcagtctaagcagatatgtggaaagaataaggctcataatatttttccacacattacgttgtgccagttcttcatgtgcgaagactccaaggtcgacgctctgggcgaagcattgcagacgacggtttccagatggaaatgcaagttctcagctccccttcctctggaattgtacacttctagtaacttcattggccttttcgtcaaagaggattcagccgaggtcctgaaaaaattcgcagccgattttgctgctgaagccgctagcaagaccgaggtgcacgtggagcctcacaagaaacagctgcacgtgacccttgcgtatcattttcaggcttcccatctccctactcttgagaaactagcccagaacatagatgtgaaattgggttgcgattgggtggccaccatatttagccgcgatatccggtttgccaaccatgaaacccttcaagtgatctacccttatacaccccaaaacgatgacgaactcgagctcgttccgggtgacttcatctttatgtctcctatggaacagacatccacatcagagggctggatctatggcacctctttaactactggatgctcaggacttttaccagagaattatattaccaaggccgatgagtgcagcacctggatcttccatggaagctactctattttgaatacgtcttcctctaacagcttgacgtttggagacggggtgctcgagagacgcccatatgaagaccagggcttgggagaaacaacaccactgaccatcatctgtcagcctatgcagccactcagagttaattcacaacctgggccacagaagcgctgcctctttgtttgtagacacggggaaaggatggatgttgtgttcggcaagtactggttaagccaatgcttcgacgctaaaggcagatacatcaggaccaatctaaacatgcctcacagcctgccccagagatccggagggttcagggattatgagaaagacgcaccaataaccgtgttcggttgcatgcaggctcgcctggtgggagaggccctgctcgagagcaacacaatcatcgatcacgtgtactgtagtcccagcctgcgttgcgtacagacagcgcacaacatcctcaaaggcctgcagcaggagaaccacctcaaaataagggttgagccaggcttattcgagtggacgaaatgggtggccggttccacattgcccgcatggatccccccttctgaactggcagcggctaacttaagtgttgacacaacatacagaccgcacatccctatctctaaactggtagtgtccgagtcatacgatacttatatctctaggtcctttcaggtaacaaaagagatcatttccgaatgtaagtccaaaggcaacaatattctgatcgtcgcccatgcctcctcccttgaggcttgcacttgtcagctccaaggcctatcacctcagaattccaaggactttgtgcagatggtgaggaaaatcccgtacctgggcttctgctcttgcgaagagctgggcgagaccggtatttggcagctgaccgatccacctatcctccctctgacccatggccctaccggtggttttaattggagggagacccttctgcaagagtag

SEQ ID NO: 226026 - DNA, 6912 bp, Artificial Sequence
  derived and/or modified sequence
cagcccacaaggctccttttcctttttgatccattcaaaaattactcattgcaaattcccggactgctaggcgaggagagggaagggggcggaggagacagggctactgcaggcgcagagctgggggcagccgggggcccgagtggctgaggctggtcccgcagcggccgcttgccggcgttctggctcctgtggcctcaccaggaagcgtcagagtcccgacactggggaagctcggagcgccgcctccgctgccgccgcctcctgcctggctctgggtccccgagccccctcccctggcccagcccgactccctcctccttcccgaaccatccggctcgggctccttccctggcgatggctggccgctgagccatggctcagtacggccaccccagtccgctcggcatggctgcgagagaggagctgtacagcaaagtcaccccccggaggaaccgccaacagcgccccggcaccatcaagcatggatcggcgctggacgtgctcctctccatggggttccccagagcccgcgcacaaaaagccttggcatccacgggaggaagaagtgttcaggcagcatgtgactggttattctcccatgtcggtgaccccttcctggatgaccccctgccccgggagtacgtcctctacctccgtcccaccggccccttagcacagaagctttccgacttttggcagcagtcgaagcagatctgcgggaagaacaaggcacacaacatcttcccccacatcacactctgccagttctttatgtgcgaggacagcaaggtggatgccctgggggaagccctgcagaccacggtcagtcgctggaaatgtaagttctcggccccgctgcccctggagctctatacgtcgtccaacttcatcggcctctttgtaaaggaagacagtgcggaggtcctcaagaagtttgctgctgactttgctgcagaggctgcatccaaaaccgaagtgcatgtggaacctcataagaagcagctacatgtgaccctggcttaccacttccaagccagccacctacccaccctagagaaactggcccagaacattgacgtcaagctagggtgtgactgggtggctaccatattttctcgggatatccgatttgctaaccatgagacattacaggtcatctacccctataccccacaaaatgacgatgagctggagctggtccccggggacttcatcttcatgtctccaatggagcagaccagcaccagcgagggttggatctatggcacgtccttaaccaccggctgctctggactcctgcctgagaattacattaccaaggctgatgaatgcagcacctggatatttcatggttcttattcaatcttaaatacatcgtcatccaactctctcacgtttggggatggagtattggagaggcggccttatgaggaccaggggctcggggagacgactcctcttactatcatctgccagcccatgcagccgctgagggtcaacagccagcccggcccccagaagcgatgcctttttgtgtgtcggcatggtgagaggatggatgttgtgtttgggaagtactggctgtcccagtgcttcgatgccaaaggccgctacatacgcaccaacctgaacatgcctcatagtttacctcagcggagtggtggtttccgagattacgagaaagatgctcccatcactgtgtttggatgcatgcaagcaagactagtgggtgaagccttattagagagcaataccattatcgatcatgtctattgctccccgtcccttcgctgcgttcagactgcacacaatatcttgaaaggtttacaacaagaaaatcacttgaagatccgtgtagagcccggcttatttgagtggacaaaatgggttgctgggagcacattacctgcatggatacctccatcagagttagctgcagccaacctgagtgttgatacaacctacagacctcacattccaatcagcaaattagttgtttcagaatcctatgatacttatatcagtagaagtttccaagtaacaaaagaaataataagtgaatgtaaaagtaaaggaaataacatcctgattgtggcccacgcatcttcccttgaagcgtgtacctgccaacttcagggcctgtcacctcagaactccaaggacttcgtacaaatggtccgaaagatcccatatctgggattttgttcctgtgaagaattaggagaaactggaatatggcagctgacagatccaccaatccttcctcttacccatggaccaactgggggcttcaactggagagagaccttgcttcaagaataaaccacaccagtgaacaagaaggaaaggccttttggagtgtgtctttctgtgtgtttaaaaacagtgggaaaatccacaccacactctaagtggacagctcagaataatttagcatatttcctttcacacttaaagttcttaagatgagactgtgtaaatgagagaaagacttgattcagaggaaaaaaatgtgttctctctggactcttgcctagctcacaaggctttggagaattgtcttcctaaatcggggcacctgctacagaagagaatgtttcgttccctctgggtatgcacagctaaggggcctcatttctcccagagggagctgctggcccgctctaaggggtgcaagaggaaggagtgtgcccagaccagctgggggagcattgaaaggacagcttggggatggaatttttttttttttatctccattttccagttaggtagagccaagctgaggaatccttttaagattattagaaaacatgccctgaagagagttgttcttaggttacacatgaaatcctaccgtcactagcccccatacaccagtgttgctggctgaagatacccgcttaaggatgctaacatttaccctggtactgccacattttctctagagcagctggcccttcttgctacagccctatcccccctccttgcttctgtgaaatggggagacaaagcacttttgctctccaaagcacttttggatactcaggaggaaagataagatacatgtttgaagtattcaatcataggagcaaagaacttgcaaaatatgaagtgacttggaattaaccatgttgtagcctaacgtgctactgcatttctaaatcatcaatatttgcttgtctttgcccctagactctagactatgttaactagttaaggatgttacattttgaaaggatgtatgttagatatattatttgcagcaagaagttcattctgtgcaatatggacatgtttgcaaaccataccaagggtcaggttgttgtacacttacagtacgtgtcaaccataatggaacatccacaaatgcatcaattataccagggatgtatagtaagtcagggaactaatataaatgatgacagtcatggctgcactgctacttgtgctgtcgttttgtttgtttttctatgataatttaaaatacataggtagggctactgaggaaatttggagagccacattctgtggtttctcattatacttacttcctgcatttagagggagtttatttaaaagaaataaatgacaatcaaaccaaatcatcagttatcaatgtctgtttaattgtgtgactatctgactgttgatggccacagatgatggtctcctatggtatagttcactctgtagaagatgtatgcaaagtgaaatgccagccctttaaagagacattagttagtgtaaaatggatctttacatgttgcagtaacattgactatgtttcaaaactcagatgcataaaacgtaaggtatataaaaatacatctatgcttgcgtttgaaactacaacttgataacccctagaaagaagaggacatgaaaggatgctggctatatatgttaatgagcaaaaggattatagttgttttgttttgtttttagagacagggtctcactataatgcttagactggtcttgaactcctgggctcaagcgatcctcctgcccctgtctcccaaagtgctaggattacaggtgtgagccaccacacctggcccatagttgtattttttttaggtcacttagaaaaatatgtcatgtattttacattttgagaaacaaatcaatcatggtttcttctagcgttgcgcaaacactgacccagcttctgggtatggaaataaccctgtgatgatgtgttaatataaaatgttgggagggaatattcccaataaaggtcttaagagaaaagtcacattacaagtaatgtaatggctctaccattcattcttctggtatttgtaatgaagtgaatccactgtttaatcagatccataatctttaacagattcaccacaaattttcatgggcgttgagtgctcagaataatgcttgaacacctcaccttgaaactgtagcagtgtgttctgggcagtatctgtaatgtatgaaatagagtctggaataggttatccactccatcttctaggttatcttagttgtatgacgaactgataaatctgtctgactgggctacaatccattgttcttagtccaatatggacactgccttaggcaatggtctatataagcaaaaggagatagagatctgaaataattttccgaataattcaggtggaaaacaagaaagattgtatttctctgctttcatttcaatttcattatttcaaattgcttgtcaaaatggcccaaaagatctgaattcacattaagttccccttgcacacttacctatttaaaaaactaaacttgcactgcaactgagaaattatttgtaaatcatgtggcatctatgtataataaaagaaagagacaactatattactcaatttcatatacatccaaaaagtataggctaatatatataacctgaagttgcagctggttctttttgatctgaagctgatgcttattaaaacaaatgatgtatggggagaggagaaggaagggcaaggaaggaattgacagataagaagcaaatggtttcttgtacagaggaattttgttttaatgtagaaagttatttgaaataaactaggtgaaatgaaattaactaaaggttttaatctgggattgaaagcctgaaagcatttcctgcttctacaagtgtgccacatcaatccggtaatgccccagtgttattcacagacagaactttgtttcctgtgattttaaaataccgcgtctgttcctccatggaccagagtaattggcacattttaatgcataagctgggggtttcattttcccaggctctcttcaccatcactgcattggtagctaggagcttattgcttcaccccagtatggagttcagattacagtgttttccattacatttagattcatagaatctgaatggctgattaaatggccatctgatggctgaaagaggggcgtatttttcactctgtagtgaaaggcttggaggagtttctactttttattttaattatactttaaccaaagaattattttaaagtaaccttatatttaaaagatgattttgcaaaaaataaaaaataaaaaatatgccttctggagtgatgtctgtttggtaaatcattgttgataatttccttgttagtggtatttggaatgcatatagattgtcttgtcattgtgcttaacattaccataagtgtgtcttttccactcaactagctgtattcgtattaaaatgaagtctcttatttcaattacctagtgttgttgggaactaattgaacagctacagtaaaagaagttcctatctcattgcctttgtggaaaggcttccctatgtggtaaaagaaaggcattcctccgtaacctaggcactctgcaagtccagtgtttaatttcaaagcagtgatgaattgctcttttgaaattactctaagtaatccatgtgttagaatacagatgaacctccgtttgatttcacagccttcagcacaggcaactgttactgagtctgcacgaacttagataatgaggtgcagggttatttgcatttaaattgcaatccagcacacgtgtgagaaagaagaggcactagtctaaaaggctgcattgcggggagagatgagacaggcagaggagggtggggtaaagagcgatttaacatctatttaggttaatgttcactttacaaaggtgatgggggatattttgttaggtgatagcagaagcttttcatttttaaacatagaattaaaattggatttgcttctctttaatacttcaacatattgaatttccctaggaaagtgactagctataatgaaaattcaagcgaaaagggaaaaagattgtaaatgcagatgaaataacttcatttttaagtacaaataatagtaggattggtgtatgtaggtttaaaattatagtgatgactagtcgaacttaatatacaatcagttcttgcaaatactttacacttagctgccattacacaacaaattggaattttccagctgttcaactatcatggactctgtacaggatagatgtgtataatggaaaatatgtactgcttctttctttgattgccactcaagatggaaacaccatgccaaggcattttggttatacacagatcattctaaacctgttattttggagaggtgtattggtttctttctcatttataaggctattgtatttttttttgtatgtgattcaggtgtatttatttgaagactatttgtagttataggaaaaccacacctacctgtattgccaaattctttgtaaactctccgtggcacttgtgctttcctggctgagagctctcccctgttgatacagctatggcaccattgtaattacagatgcacctttcaggagcatctccattaaatggttcatagatgatttaataaaaagaaacttctcagttga

SEQ ID NO: 226027 - protein, 436 aa, Artificial Sequence
  derived and/or modified sequence
MRRDVNGVTKSRFEMFSNSDEAVINKKLPKELLLRIFSFLDVVTLCRCAQVSRAWNVLALDGSNWQRIDLFDFQRDIEGRVVENISKRCGGFLRKLSLRGCLGVGDNALRTFAQNCRNIEVLNLNGCTKTTDATCTSLSKFCSKLRHLDLASCTSITNMSLKALSEGCPLLEQLNISWCDQVTKDGIQALVRGCGGLKALFLKGCTQLEDEALKYIGAHCPELVTLNLQTCLQITDEGLITICRGCHKLQSLCASGCSNITDAILNALGQNCPRLRILEVARCSQLTDVGFTTLARNCHELEKMDLEECVQITDSTLIQLSIHCPRLQVLSLSHCELITDDGIRHLGNGACAHDQLEVIELDNCPLITDASLEHLKSCHSLERIELYDCQQITRAGIKRLRTHLPNIKVHAYFAPVTPPPSVGGSRQRFCRCCIIL

SEQ ID NO: 226028 - DNA, 1311 bp, Artificial Sequence
  derived and/or modified sequence
atgcgacgcgacgtgaacggtgttaccaagagccggtttgaaatgtttagcaattccgacgaagccgtgataaataagaagctgcccaaggaactgctgctgcggatcttttctttcctagatgtggtaacgctgtgtagatgtgcccaggtaagcagagcctggaacgtgcttgcactcgatggctcaaattggcaaaggatcgatctctttgactttcaacgggacattgaagggagagtcgttgagaacatctccaagcggtgcggggggttcctgcgcaaactgagtctgagagggtgcttaggcgtgggcgataatgcactgcgcaccttcgctcagaactgtcgcaacatcgaagtcctcaatttgaatggctgtacgaaaactacagacgctacctgtacctccttatcgaagttctgcagtaaactgaggcacttagatctcgccagttgcactagcattacgaatatgagtctaaaagcccttagtgaagggtgtcctctgctggagcaattgaacatctcctggtgcgaccaggtgactaaggatgggatccaagccctggtgcgaggatgcggtggattaaaagctctctttctgaaagggtgcacacagcttgaagatgaagcccttaagtatatcggcgcccattgtccagaattagtcactcttaatctgcagacgtgtctccagatcactgacgaaggactgattactatttgtcgaggctgtcacaagcttcaaagcctctgcgcttccgggtgcagcaacataacggatgcaatcctcaatgcactaggccagaactgtccgcggttgagaattctcgaagtggctagatgctctcagctaaccgatgtgggcttcaccacactggcgcggaattgtcacgaactggaaaaaatggatttagaagaatgtgtgcagatcaccgactccaccctcattcagctgtctatccattgccctcggttacaggttctgtctttgagccattgcgagctgataacagatgatgggattcggcatcttgggaatggggcatgtgcacacgaccaacttgaggtcatcgagctggataactgtcccctgataacagacgcctctcttgaacatttaaaaagttgtcattcactggaacggattgaactatacgactgtcagcaaatcacccgcgccggcattaagcgactccgcacccacctgcctaatatcaaagtacacgcctatttcgcgccagtaacgccacctccatcagtcggcggtagccggcagcgcttctgtagatgctgtattattctgtag

SEQ ID NO: 226029 - DNA, 1311 bp, Artificial Sequence
  derived and/or modified sequence
atgagaagagatgtgaatggagtgaccaagagcagatttgagatgttcagcaacagtgatgaggccgtcatcaacaagaagctgcccaaggagctgctgctgcgcatcttctccttcctggatgtggtgaccctgtgccgctgtgcccaggtgtcccgggcctggaatgtgctggccctggatggcagcaactggcagagaattgacctgtttgacttccagagggacatcgagggccgggtggtggagaacatcagcaagagatgtggcggcttcctgaggaagctgagcctgcggggctgcctgggcgtgggggacaatgccctgcggacctttgcccagaactgcagaaatattgaggtgctgaacctgaatggctgcaccaagaccacagatgccacctgcaccagcctgagcaagttctgcagcaagctgcggcacctggacctggccagctgcaccagcatcaccaacatgagcctgaaggccctgtctgagggctgccccctgctggagcagctgaacatctcctggtgtgaccaggtgaccaaggatggcatccaggccctggtgcggggctgcggcggcctgaaggccctcttcctgaagggctgcacccagctggaggatgaggccctgaagtacatcggggcccactgcccagagctggtgaccctgaacctgcagacctgcctgcagatcacagatgagggcctcatcaccatctgccggggctgccacaagctgcagagcctgtgtgccagcggctgcagcaacatcacagatgccatcctgaatgccctgggccagaactgcccccggctgcgcatcctggaggtggcccgctgcagccagctgacagatgtgggcttcaccaccctggccaggaactgccacgagctggagaagatggacctggaggagtgtgtgcagatcacagacagcaccctcatccagctgagcatccactgcccccggctgcaggtgctgagcctgagccactgtgagctgatcacagatgatggcatccgccacctgggcaatggagcctgtgcccatgaccagctggaggtgattgagctggacaactgccccctcatcacagatgccagcctggagcacctgaagagctgccacagcctggagcgcatcgagctgtatgactgccagcagatcaccagggctggcatcaagaggctgcggacccacctgcccaacatcaaggtgcacgcctactttgcccctgtgaccccacctccttctgtgggcggcagccggcagcgcttctgccgctgctgcatcatcctgtag

SEQ ID NO: 226030 - DNA, 1311 bp, Artificial Sequence
  derived and/or modified sequence
atgcggcgggacgtgaacggcgtgaccaagagccggttcgagatgtttagtaactctgatgaggctgtcataaacaaaaaactgcccaaggagcttctgctgagaattttcagttttttggacgtcgtgaccttatgcagatgcgcacaggtctcccgcgcttggaatgtcctcgctctagacggatcaaattggcagcgcattgacctttttgatttccagcgtgacatcgagggcagagtggtagaaaacatctcaaaacggtgtggggggttccttcggaagctctcgcttaggggatgtctaggcgtgggcgataacgctctcagaactttcgctcaaaattgcagaaacatagaggtactcaacctgaatgggtgcactaagacgacggacgcaacatgcacaagcctgtcaaaattttgcagtaagttgcggcatctggacctcgcatcttgcacatctattacaaacatgtcccttaaggctctgtctgagggctgccctctactggaacagttaaacatatcatggtgcgaccaggtgacaaaagatggaatacaggccttggtcaggggctgtggcggactgaaagcccttttcctgaagggctgtactcaattggaggacgaagctctgaaatacattggtgctcactgccccgagcttgtcacactcaacctccagacatgtctgcagattacagatgaagggctgattacgatctgccgcgggtgccacaagctgcagtcactgtgcgcttccgggtgttctaacatcacggacgctattcttaacgccttaggtcagaactgtccaaggctcaggattctggaggtcgccagatgttcccagctgacagacgtcggatttactacactggcacggaactgccacgaactggaaaaaatggatctcgaagagtgtgttcagattaccgatagcactctgattcagctgagtattcactgccctcggctgcaggttctgtccttgtcacactgcgagctaattacggatgacggaatcaggcatctcggaaacggggcctgtgcacacgaccagctggaggtcatcgagttggacaattgccccctgatcaccgatgccagcctagagcatctcaaatcctgccactccctggagaggatcgaattatatgactgtcagcaaatcactcgggctggcatcaagcggcttcgcactcacctgcccaatattaaggttcacgcttattttgctcccgtgactccacctccaagcgtcggtggtagccgccagagattttgtcggtgctgcataatactgtag

SEQ ID NO: 226031 - DNA, 1311 bp, Artificial Sequence
  derived and/or modified sequence
atgagaagagatgtgaatggagtgactaagagccgttttgagatgttcagtaactcagacgaggcggtgatcaacaagaagcttccgaaagagcttctgctgagaatcttctcttttctcgacgtggtcacgctgtgtcggtgtgctcaggtctcccgcgcatggaatgtcttggctctggacggaagtaactggcagagaatcgacttgtttgacttccaaagagacatagaaggacgagtggttgagaatataagcaagaggtgtggaggatttcttcgcaagctgtcacttcgcggatgtctgggggtgggggacaatgcactcagaactttcgcacaaaattgtaggaatatcgaggtattgaacctcaatggctgcactaaaacgaccgacgccacatgtacgtctctgtccaagttttgctctaagttgcggcacttggacctggcaagctgtacctcaatcactaacatgagcctgaaagccttatccgagggctgcccccttttagaacagctgaatatttcttggtgcgaccaggtgaccaaggacggcatccaggccttagtgaggggctgcgggggactcaaagccttatttctgaaaggctgcactcaactggaggacgaggctttaaagtatatcggtgcacactgccccgagctcgtaactctcaatttgcagacctgccttcaaatcaccgacgaggggttgataaccatctgcagagggtgtcacaagcttcagagcctctgtgccagcggctgttccaatataacagatgccatcctgaacgctctggggcagaattgccccaggctccgtatcctggaagttgcccgatgctcccagctgaccgatgtagggtttacaacgctggcccgaaattgccatgagttggagaagatggacctggaggagtgcgtccaaatcactgacagcacattgatccaactcagtatccactgcccacgactccaggtgctgagtctgtcccattgtgaactgatcacggacgacggcatccggcacctgggcaacggtgcttgtgcccacgatcagctggaggtgatcgaattggacaactgtccactgataaccgacgcgtccctggagcatctgaagagctgccatagccttgaaaggatcgaactgtacgattgccaacaaatcacaagggccggtattaagcggcttaggacccatctaccgaatatcaaagttcacgcatacttcgctcccgtgacacctccgccaagcgtcgggggatctcgccaacggttttgccgctgttgcatcattctttag

SEQ ID NO: 226032 - DNA, 10370 bp, Artificial Sequence
  derived and/or modified sequence
gggttgaagttgaggctgaggagagagccgagctagcgacgagcagtcgttgcggccgccggcgccgcgggaggtggtggaggcctagccggagccgagaggtctcttgttcccgtcccacggtcccggcgtcacccctccggcgcccagtccccgtcccggaactcccgggcctgtcctgggcccccggtctgtgcactccgctcgccgcagcgcccggcccgggccgcacccgccggccccatgaggagggacgtgaacggagtgaccaagagcaggtttgagatgttctcaaatagtgatgaagctgtaatcaataaaaaacttcccaaagaactcctgttacggatattttcttttctagatgttgttaccctgtgccgctgtgctcaggtctccagggcctggaatgttctggctctggatggcagtaactggcagcgaattgacctatttgatttccagagggatattgagggccgagtagtggagaatatttcaaaacgatgtgggggctttttacgaaagttaagtcttcgtggatgtcttggagtgggagacaatgcattaagaacctttgcacaaaactgcaggaacattgaagtactgaatctaaatgggtgtacaaagacaacagacgctacatgtactagccttagcaagttctgttccaaactcaggcaccttgacttggcttcctgtacatcaataacaaacatgtctctaaaagctctgagtgagggatgtccactgttggagcagttgaacatttcctggtgtgaccaagtaaccaaggatggcattcaagcactagtgaggggctgtgggggtctcaaggccttattcttaaaaggctgcacgcagctagaagatgaagctctcaagtacataggtgcacactgccctgaactggtgactttgaacttgcagacttgcttgcaaatcacagatgaaggtctcattactatatgcagagggtgccataagttacaatccctttgtgcctctggctgctccaacatcacagatgccatcctgaatgctctaggtcagaactgcccacggcttagaatattggaagtggcaagatgttctcaattaacagatgtgggctttaccactctagccaggaattgccatgaacttgaaaagatggacctggaagagtgtgttcagataacagatagcacattaatccaactttctatacactgtcctcgacttcaagtattgagtctgtctcactgtgagctgatcacagatgatggaattcgtcacctggggaatggggcctgcgcccatgaccagctggaggtgattgagctggacaactgcccactaatcacagatgcatccctggagcacttgaagagctgtcatagccttgagcggatagaactctatgactgccagcaaatcacacgggctggaatcaagagactcaggacccatttacccaatattaaagtccacgcctacttcgcacctgtcactccacccccatcagtagggggcagcagacagcgcttctgcagatgctgcatcatcctatgacaatggaggtggtcaaccttggcgaactgagtatttaatgacacttctagagctaccgtggagtctctccagtggaagcaaccccagtgttctgagcaagggttacaaagtgagggagggcagtgtccagatccccagagccacacatacatacacatacacacccttacccccatccactctagctttgtgaccatgggactgaagtttgtgatggcttttttatcaagtagattggtaaaatttaaccattcctgttgaggtgcccataagaaaatcataggccaagatagggaggggcattccagcaaaccccgtgttaatgctactgtggtttttaaatttttgtctaggggtttctttggggattttagaacagcatctgctgtcctccggggtcaagaaaagcatggaaagacaatatatgatgtacccagggaccagaaagaaaatttctttgcatcttagaaatggtagacattcattgtgactaaagagcttctatgcttccttgtttccatgccaacatgctgagcatgctcacaaagaaggctcgtccattcctcctgtgttttagtatttggcccagaggtttcctaaatggttgccttgaaatcactgtggtccaaatgtaattcttacacactcaaattatcactgtctgtagcacacttgtgcacctgtcttacattctctgttgctcccccccacactcttgctcagtctgtcacctgttcagtctgcttactcactcaattgttacccttttgctgttgtcgtgtttacagtttgcattttgaatgattagttgggattaccaaacattttttaaaaagatattatcaataaatatttttttaattctaaattttaccattaggggaccctgcctgaatctttgccaacctgcaaggaaactctaatgaaagcaagaaaagttatgagaagaaactgttttgatgaaaacagatgctaccttttggtttctattttatcttctgatatgtgataattcgcatggtatccccaatattccccctacatattcttccttctgtcagactccaccaactgtatcataaggaaagagagagatgtattattaggaaagagtgaaaatgataaatcacaaaacagagcctgaaagtccccaacacccaagttcagacattaatgattaatgttattatatatttactgaaatctaggagtgatcagtggcatctctgacctatgaggttgttttaacaggaatgccactagaggagctgtgtattctagccagtctgtttctctcttttcccccatttcagcctttcagggatacaagaatggctctataacagctggtcaattgtatgtcagtgttaatggattcatatctagtgttggcaccccaaagggccagaaccttcccataacctgtcagtcatctctcttttctgccccagtctttttttttttttttttttttttttaagacgggttctcactcttgcccagactggagtgcagtggtgcgatctcggctcaccgcaacctccacttcccaggctcaagcgattctcttgcctcagcctaccgagtagctgggattacaggcatgcaccactactgcctggctaatttttgtatttttagtagagatggggtttcacatgttggccagcctggtcttgaactcctgacctcaaatgatccacctgcctcagcctcccaaagtgctgggactacaggcatgagccaccatgcccggccctgttcagacttctgaatgaagtatgaatgtagccaggtgaagcattgaggcagctgaaagagaacactgagaggaagtaaggggtttagtgtctctgcttagcctgggcactagaactgagggaggaatttagtgtccaggactcaagagtccaagaagaagcaccctctgtcttcccaaaaaatcagaggataaaggaagtaaaatgagtttttaaagcataagaagaaaatttctaaaccccaagattagaaacccagtgtgatttttagtagggtgattttggcggggggtgtcctttgagacattaatgtgcaatccatcataatattaatcttctatatgatccagactattaaaaggcttgttttatttatttattttattttattttatttttttagagatggggtctcgctatcttgcccagcctggactcaaactcctgggctcaagccttcctcccacctcagcctcccaagtagctgggactacaggtgtgtgccactgtacccagcttaagaggtttgttttaatgctgcagttgctgattataccagcatatataagaataaagtctgatttatttatccattgatttagaaggcaattggatgaaagggtcttagaagtctatactatccattaatatttatcatattaaatttattttaaatcctgttttattgtgccgctttaaaaacgcagattacttgtttattcattcccctttccccttattctctttcagattaccttataaggaatatagtttttaacatgaaactcagtttcttgtctgtacccctacacataaaaatacatacgtgcatacacacatacttccagatgtggttaataatattcagatccctaggttactcaaacaaaactaaaggagagaactatttaggggccatctgctttaaagtttaaggtgttttgttgttgttttagtgcctgtacaaattgaccataaaacccagattgattagtgagtgtggatttgagttgcctaagttgaggctattaaggtacttctttacttaaaagataagtttaaaagactctattcatcagttcatgatgatcttggaaatgctgtttctctgctcaaaggatatacccacaggcaggtccatggggacttgctctggtgatctctgctattaaggcaaattccagcctgtttgtgccaagaacagagtcaagtgagagagaatgaagactcagagatgtgcagcactggcttgtatgttgtcaggcagaagccttgttcctttctcaagaaaacttcaggcctatcaagcttggaaggaaatacatttttttatgctgatttgcagcctacaccagctgatgaatatgctaggactttgagagaacacaaagcatggtaagttttggtcaggtggaaaggagcctgacatctgaacataatgcttcctctctcaacatctgggatacttttgaaaattcagtaaggcttaatgtaggaaaaattctttacaggaaaagctaattgatctgtttgtctaacctcatagccactccaaaatatgccttttataatggaaaaaaacagtgaacagagagaagagatttggggataagttagaaggtaccctcaaaactactgccgtaaacctacaggtgggcaaggaggaattactgtagtgtctctggagaaagttcttgaacatccaaatcatctcttttctaagcagtttttcccctaatctcataccttacatcttccagcatcatttgctacatcaatgtcttttcatcctcttcatcagccccattgagctgactccagcttatttttgcactgatttccaccatttccttcccacacccatcctttccctctatttaaagcctccatctcaccctcagtaatgctgctgatttactctcagatgtctcaagtctagcttcctttttgaatccttctcctactccaggggctgtcaaaggcagccttaaagttcagtgactgttaggtggctcaggccatttttcattgggtggtctttggtgtttgcatactgaatttgaattcagtttaaaagcaaactgttggatatgaggaagaaagggatatggccttagccctttttccaatatttggaatatgaaagcatattgtgctttgtgtaaaaaatgttttcttctcctattctgctcttgtctttactgaaggtaaaagtattccttaagtagcttttgcaaatttctagtctgatttccacattcattaagttgatttagcagacatgtaagtcagaagtttcacatatcccttgtatcaaacattttatagggaaacctagtaaatttatgatgcttcattttgggctttccagactatttgagttattcaagatagccataatgttttagtagcgacattcttttattacttctaattgccttgtaaaatgcattgttatggcccggcacggtgggtggatcacaaggtcaggagttcaagaacagcctggccaagatggtgaaatgctgtctctactgaaaatacaaaaattagccaggtgtggtggcaggtgcctgtaatcccagctactcgggaggctgaggcagagaattgcttgaacccgggaggtggaggttgcagtgagctgagatcgcaccactgcactccaccctgggcgacagagtgagactatctcaaaaaaaaagaaagaaagaaagaaaaaaatgcatcgttactagtttgatagcccactaatgccatgggggactaaacaaaatatgtgatgaaacctgtcttggtttgaagttgttagaaagtgtgagagtgtcactggaaagaagagagtggcttcctgcctgcttgtttagtcagcatgtccttaggtgactgtgttgttgggagaagagcactcatgggtcatgggtgacccttggccattttatgtttattgtgctgaaagtcacaggcggctcatgccagttgctaccagtgagaggaggggtttaaaggaaattgctctattttgccttattcctccttatgtgtatgatttaagggtaggcttttatcctggttgtatctcctggctgacagactttctcaatcatatgtttgagctctgaagcattttacaaaaagattgcctctctatctgcctgccaatcctagaatctttagccacctcaaacccaggcactgtgaattagccaagtcctgtttgagaagaaatgtaggatgtttggttggaattcttgagacagaacctctctccccattaatgatgttgtaccaaagaattctaaagcagtaaaaggataatggggaaaaatggagtcacagcctttcctcgcctatatttcttttttttttttttttttttgacatggagtctcgctctgtcacccaggttggagtgccatggcacaatctcagttcactgcaacctctgcctcctgggttcaagtgattcttctgtttcagcctcccaagaggccaggattacaggtgcccaccaccacgcccagctaatgtttgtatttttcatagagatggggttttgccatgttggccaggctagtctcgaacttctgacctcaagtggtccacctgccttggcctcccaaagtgctgggattacaggtgtaagccaccgcacctggccagtttctatcataaattttaaatgtaagattggaagatacagagagctgtataaaatcataccagtagggtataattagcccaggtagtttaggaataaaattgggttgtatccgagtgccctaacttgacattttgattctccagcaaagaacataggttactaggttactaaccttgccttctcacttgggataaactttttttttttttcttgttgcccaggctggagtgcaatagtgagatctcggctcaccgcaacctccgcctcttgggttcaagcgattctcctcccttagcctcccgagtagctggaattacagcctgtgccaccacgcccggcaaaatttgtatttttagtagagacggggtttcaccatgttggtcaggctggtttcaaactcccaacctcaggtgatctgcccacctcagcctcccaacatgctaggattacaggcgtgagccactgcgcccagcccaggataaacattctacctgcctgaaagtaccataagaggcaagtgagtttcttgcatgatgggcttctgcagcttccccctcaagtcacatctacctgttgtatttatttatttatttatttttgagacagagtctcgctctgtttcccaggctggagtgcagtggcgtgatctcggctcactgcaagctccacctcccaggttcacgccattctcctgcctcagcctcccaagtagctgggactacaggctcccgccaccacgcccggctaattttttgtatttttagtagagacggggtttcaccctgttagccaggatggtctcgatctcctgacctcatgatccacccgcctcggcctcccaaagtgctgggattacaggcgtgagccaccgcgcccggcccgttgtatctattttttttagacgcatcaattcagtgtctctgaagcctttgatcgttaggaaggtcagtacataacctcttaggtgaagctgagttgatctttggagcccaagagagttaattttcaggagaaaaagaattagggcaagctcccctgtgggatgttaagagaaagtccatatgcgcttcttccatctctgcctcttgtttttaaataagtgcttgtgaagttcagtttatagaggttgagtctcagtgcttcctcagccagggtggtttattgctgttttacaaagaaccatgaacaagcaaaatcctatcaatagtcctttctgttttatgttttatagtcttattttgaagaatcggcatggtaaaatgatagacaagtttcaaataaagcagataattagctctagaattggggtactttgcctcaggtacagcatctgtcttgaatacatagtgatggctgtgtcacacatgggtacatttactttcctctctgatcaactgcacccctttttactggcaaagagggctcctactttctacacacttaaccagtcaaacagataggttttggcaccaccgaaagaaccacaagtgcaccccagctgcatctgggcatggttttggtactaggactagagaagtgagcagtaaatgacagtccttaccctaggaagagatgggagaagagaggtgtccagacatatttaccttttctcttctgtcatgccccaagaaccaaggatcatctttgaagtgacgtcttttttgttaaattggaagaagaaaactttgcagccaggcgtggtggctcacgcctgtaatcccagcactttgggaggccgaggcgggcggatcacaaagtgtcaggagtttgagaacagcctggccaacatggtgaaaccccatctctactgaaaatacaaaatcccagctacttgggaggctgaggcaagagaatcacttgaacctgggaggcggatgttgcagtgagccgagatcacgccactgcactccagcctgggcaacggagtgagactccatctcacaaaaaagagaaaagaaaagaaaactttgcttcactaagtttctcttgccattatctcattaattcagatctgtacctcattgctgctcacacatatatgtttcttaccttagcctgaaccttctcaggccttgaagtcattattctactctttttttttcttttccttttttatggcactagagaatgaaaacctaaggtcttagaaaatcttaacttgaaaaagtctctaactggcatgatttgattacttttttcccctgtggacaaataattttctttcctatataatagatttttagtaagtgaaacctttgctgctgctttcctgggtttacattagttttttcctgcccttaagaataatttatctgtgcttctctgatgactgttaatttctaatagtgcaggaagggatgagcttttgatttcttctcactcccctcctcaccctacttccaaattacacactaacttctaacccttacagcctgttggcacatacacaagatccacgagaccatgctcctcagaagctacccatgtcctttctcaccatggtgtggctcttggagccctgagtatctgtgactacccactccaaaggttgactgtaagaggagagcggccttcttaattttgcatttcttaattttgtttttctccattcctgttttatgacttggccttcagatgcttcctactctggcctcctccttttttctcctaggaattgtttccaggtaacctaccatgtgcacttctcagctgctctgctcacctttgcccaccttcccgtgaccctgagagtacagatccgaataatgtggcctgtgcagagctcagagaactgtgaggactacccatgcctgtcagactctgctcagggacagagatggatgggtaaatggtgctgttggagacatttttatcttcataccaggctctgtttcatccctgcaccccgcacccccactcactcccctgagggggtaaaatgcagaggtggttgacctgaagggtctgattccctccttcccaagccttagggcctaccctggagtgctgcagtgtgtgagagctgctgcttgcttgtttctccactaggcctgctccaaatgcttagccaatctctggagccgacacagttgcctacggggtgacttagcaccaggttccattagctctccaagtgactgtttccacccagtacttttggcgcttgaggatggggggagggggattatttaaaataaataaaatccgaggtggcagtagaggattccttttgctttaaaaatctttggactaaaaaaaaaaaaaaaaagttttttatatataaatatataaagtaaattgttatgtaactattattgtttcttgtatgttctaattttgttttatgatgtaattaaagaaagtaagctgtgaagacttttcattttcctgtg

SEQ ID NO: 226033 - DNA, 1311 bp, Artificial Sequence
  derived and/or modified sequence
atgagaagagacgtgaacggcgtgaccaagagcagattcgagatgttcagcaacagcgacgaggccgtgatcaacaagaagctgcccaaggagctgctgctgagaatcttcagcttcctggacgtggtgaccctgtgcagatgcgcccaggtgagcagagcctggaacgtgctggccctggacggcagcaactggcagagaatcgacctgttcgacttccagagagacatcgagggcagagtggtggagaacatcagcaagagatgcggcggcttcctgagaaagctgagcctgagaggctgcctgggcgtgggcgacaacgccctgagaaccttcgcccagaactgcagaaacatcgaggtgctgaacctgaacggctgcaccaagaccaccgacgccacctgcaccagcctgagcaagttctgcagcaagctgagacacctggacctggccagctgcaccagcatcaccaacatgagcctgaaggccctgagcgagggctgccccctgctggagcagctgaacatcagctggtgcgaccaggtgaccaaggacggcatccaggccctggtgagaggctgcggcggcctgaaggccctgttcctgaagggctgcacccagctggaggacgaggccctgaagtacatcggcgcccactgccccgagctggtgaccctgaacctgcagacctgcctgcagatcaccgacgagggcctgatcaccatctgcagaggctgccacaagctgcagagcctgtgcgccagcggctgcagcaacatcaccgacgccatcctgaacgccctgggccagaactgccccagactgagaatcctggaggtggccagatgcagccagctgaccgacgtgggcttcaccaccctggccagaaactgccacgagctggagaagatggacctggaggagtgcgtgcagatcaccgacagcaccctgatccagctgagcatccactgccccagactgcaggtgctgagcctgagccactgcgagctgatcaccgacgacggcatcagacacctgggcaacggcgcctgcgcccacgaccagctggaggtgatcgagctggacaactgccccctgatcaccgacgccagcctggagcacctgaagagctgccacagcctggagagaatcgagctgtacgactgccagcagatcaccagagccggcatcaagagactgagaacccacctgcccaacatcaaggtgcacgcctacttcgcccccgtgacccccccccccagcgtgggcggcagcagacagagattctgcagatgctgcatcatcctgtag

SEQ ID NO: 226034 - protein, 538 aa, Artificial Sequence
  derived and/or modified sequence
MERLGEKASRLLEKFGRRKGESSRSGSDGTPGPGKGRLSGLGGPRKSGPRGATGGPGDEPLEPAREQGSLDAERNQRGSFEAPRYEGSFPAGPPPTRALPLPQSLPPDFRLEPTAPALSPRSSFASSSASDASKPSSPRGSLLLDGAGAGGAGGSRPCSNRTSGISMGYDQRHGSPLPAGPCLFGPPLAGAPAGYSPGGVPSAYPELHAALDRLYAQRPAGFGCQESRHSYPPALGSPGALAGAGVGAAGPLERRGAQPGRHSVTGYGDCAVGARYQDELTALLRLTVGTGGREAGARGEPSGIEPSGLEEPPGPFVPEAARARMREPEAREDYFGTCIKCNKGIYGQSNACQALDSLYHTQCFVCCSCGRTLRCKAFYSVNGSVYCEEDYLFSGFQEAAEKCCVCGHLILEKILQAMGKSYHPGCFRCIVCNKCLDGIPFTVDFSNQVYCVTDYHKNYAPKCAACGQPILPSEGCEDIVRVISMDRDYHFECYHCEDCRMQLSDEEGCCCFPLDGHLLCHGCHMQRLNARQPPANYI

SEQ ID NO: 226035 - protein, 121 aa, Artificial Sequence
  derived and/or modified sequence
MGKSYHPGCFRCIVCNKCLDGIPFTVDFSNQVYCVTDYHKNYAPKCAACGQPILPSEGCEDIVRVISMDRDYHFECYHCEDCRMQLSDEEGCCCFPLDGHLLCHGCHMQRLNARQPPANYI

SEQ ID NO: 226036 - protein, 80 aa, Artificial Sequence
  derived and/or modified sequence
MGKSYHPGCFRCIVCNKCLDGIPFTVDFSNQVYCVTDYHKNYAPKCAACGQPILPSEGCEDIVRVISMDRDYHFECYHCE

SEQ ID NO: 226037 - protein, 65 aa, Artificial Sequence
  derived and/or modified sequence
MGKSYHPGCFRCIVCNKCLDGIPFTVDFSNQVYCVTDYHKNYAPKCAACGQPILPSEGCEDIVRV

SEQ ID NO: 226038 - DNA, 1617 bp, Artificial Sequence
  derived and/or modified sequence
atggagagactgggcgagaaggccagcagactgctggagaagttcggcagaagaaagggcgagagcagcagaagcggcagcgacggcacccccggccccggcaagggcagactgagcggcctgggcggccccagaaagagcggccccagaggcgccaccggcggccccggcgacgagcccctggagcccgccagagagcagggcagcctggacgccgagagaaaccagagaggcagcttcgaggcccccagatacgagggcagcttccccgccggccccccccccaccagagccctgcccctgccccagagcctgccccccgacttcagactggagcccaccgcccccgccctgagccccagaagcagcttcgccagcagcagcgccagcgacgccagcaagcccagcagccccagaggcagcctgctgctggacggcgccggcgccggcggcgccggcggcagcagaccctgcagcaacagaaccagcggcatcagcatgggctacgaccagagacacggcagccccctgcccgccggcccctgcctgttcggcccccccctggccggcgcccccgccggctacagccccggcggcgtgcccagcgcctaccccgagctgcacgccgccctggacagactgtacgcccagagacccgccggcttcggctgccaggagagcagacacagctacccccccgccctgggcagccccggcgccctggccggcgccggcgtgggcgccgccggccccctggagagaagaggcgcccagcccggcagacacagcgtgaccggctacggcgactgcgccgtgggcgccagataccaggacgagctgaccgccctgctgagactgaccgtgggcaccggcggcagagaggccggcgccagaggcgagcccagcggcatcgagcccagcggcctggaggagccccccggccccttcgtgcccgaggccgccagagccagaatgagagagcccgaggccagagaggactacttcggcacctgcatcaagtgcaacaagggcatctacggccagagcaacgcctgccaggccctggacagcctgtaccacacccagtgcttcgtgtgctgcagctgcggcagaaccctgagatgcaaggccttctacagcgtgaacggcagcgtgtactgcgaggaggactacctgttcagcggcttccaggaggccgccgagaagtgctgcgtgtgcggccacctgatcctggagaagatcctgcaggccatgggcaagagctaccaccccggctgcttcagatgcatcgtgtgcaacaagtgcctggacggcatccccttcaccgtggacttcagcaaccaggtgtactgcgtgaccgactaccacaagaactacgcccccaagtgcgccgcctgcggccagcccatcctgcccagcgagggctgcgaggacatcgtgagagtgatcagcatggacagagactaccacttcgagtgctaccactgcgaggactgcagaatgcagctgagcgacgaggagggctgctgctgcttccccctggacggccacctgctgtgccacggctgccacatgcagagactgaacgccagacagccccccgccaactacatctag

SEQ ID NO: 226039 - DNA, 1617 bp, Artificial Sequence
  derived and/or modified sequence
atggaacggctcggtgagaaagctagtcgattacttgaaaagttcggccgaagaaagggggaaagttcgcgatccgggtctgatggcacccccggaccaggaaagggtcgactcagtgggctgggggggcctcgcaagagcggacccaggggtgccacaggcggcccaggcgacgaaccacttgaacctgcacgggagcagggctcgctggatgctgaacggaaccaaagaggatctttcgaagcacctcgctatgagggttcattccctgccggcccaccccccacccgtgccctaccactgccacagtcactccctccagatttccggctagagccgacagccccggccctatcaccacgctctagcttcgcttcgagcagcgcgagtgacgcctctaagccctcttcacctagagggagtctcttgctcgacggcgccggcgccgggggtgcgggaggctcaagaccttgttccaaccgcacgagcggtatcagcatggggtacgatcaacggcatggcagcccacttcctgctggcccatgcctctttgggccacctctggccggcgctcccgctgggtactctccagggggggttccgtcagcttaccccgagctgcacgccgcattggatcgactatacgcacagcgccctgccggatttggctgccaggagagcaggcactcctacccaccagctcttgggtcgccaggtgcgttagccggagcaggcgtgggggctgctggcccactggaacgtcggggggctcagcccggcaggcattccgtgacaggctatggcgactgtgccgtgggagctcgctaccaggacgagttgacggccctgctccggctgaccgttggaacaggaggaagggaggctggggcccgcggcgaacccagtggtatcgagccctccggactagaggaacctccagggccgttcgtccccgaagccgcccgcgcccgtatgagagaacccgaggcaagagaggactattttgggacatgcatcaaatgcaacaaggggatatatgggcagagtaacgcctgccaagcattggattcactgtaccacacacaatgtttcgtttgctgtagctgcggtagaaccttacggtgtaaggccttctattctgtcaatggatccgtctactgcgaggaggactaccttttcagtggctttcaagaggcagcagaaaagtgctgcgtgtgtggtcatctgatcctggagaaaattctgcaagccatgggcaaatcataccatcctggctgtttccggtgcatcgtttgcaacaaatgcctggatggaatccccttcacagtggatttctccaatcaggtctattgtgtcaccgactatcacaagaactacgcccccaaatgcgctgcatgcggccagcctattttgccaagcgaaggctgtgaagatatcgtgagagttatcagcatggacagggactaccattttgaatgttatcactgtgaggactgccgcatgcagttgtccgacgaggaagggtgttgctgttttcctctggacggacacctattgtgtcatggttgtcacatgcaaaggctcaatgcccgacaacctcctgcaaattatatttag

SEQ ID NO: 226040 - DNA, 1617 bp, Artificial Sequence
  derived and/or modified sequence
atggaaagattaggggagaaagcatcccgtctgctcgagaaattcggacggaggaagggcgagtcgtctagatctggctccgacggaaccccaggtcccgggaaagggcggctgtccggactagggggcccccgaaaatccgggccacgcggagccactggggggccaggtgacgagccactggagcccgccagggaacaagggtccttggatgctgaacgaaaccagcgcgggagtttcgaagcccctcgctacgagggcagtttccctgctggaccccccccaacacgggccttaccacttccccaatccctgccacccgatttcagactcgagcccaccgctccagccctatcacctcgatcaagttttgcatcaagctccgcatcggatgcctccaagccctcatccccgcgcggtagccttctgcttgatggcgcaggagcagggggcgctggcggcagccgcccatgttcaaataggacctcaggtatcagtatgggctatgatcagaggcacgggtcgcctctgcctgctggaccttgcctattcggtccgccgctggccggggctccggcggggtattctccggggggtgtcccctctgcttaccccgaattacatgccgctttagaccggctgtacgcccagaggccagctggcttcgggtgccaggagtccagacattcctacccccccgcattaggttctcctggcgccctggctggcgccggtgtcggcgcggcaggacccctcgagcgcagaggcgcccagcctggccgccactctgtgaccggatacggcgattgcgctgtgggagctcgctatcaggacgaactcacagccctgcttcggctgacagttggcaccggaggcagggaagctggggcccgtggcgagccctctggtatagagcctagcggcctagaggaaccaccaggaccctttgtgccggaagctgcaagagctaggatgcgcgagccagaggcacgggaggactattttggcacctgcattaagtgcaacaaaggtatttacggacaaagtaacgcctgtcaggctcttgactccttgtatcatactcagtgttttgtctgttgctcttgcggtagaacactgcggtgcaaagcattctattctgtaaacgggtctgtatactgtgaggaggattacttgttctccggcttccaagaggctgccgaaaaatgctgcgtctgtgggcatctgatcctggaaaaaattctacaagccatgggtaaatcctaccaccccggatgtttcaggtgtattgtttgcaacaaatgccttgacgggataccttttacggttgattttagcaaccaggtctactgtgtaacggattaccacaaaaactatgcacctaaatgtgccgcatgcggtcagccaattttaccaagcgaggggtgtgaagacatagtccgggtcattagcatggatagggattatcactttgaatgctatcattgtgaggactgtagaatgcagctgtccgatgaagaaggctgctgttgctttcccttggacgggcatctgctgtgtcatggctgccatatgcagcgactgaatgctagacagcccccagccaattacatctag

SEQ ID NO: 226041 - DNA, 1617 bp, Artificial Sequence
  derived and/or modified sequence
atggagcggctgggggagaaggccagccggctgctggagaagtttggaagaagaaaaggagagagcagccgcagcggcagtgatggcaccccaggccctgggaagggccgcctgagcggcctgggcggccccaggaagagcggccccaggggggccactggaggccctggagatgagcccctggagcccgcccgggagcagggcagcctggatgctgagaggaaccagaggggcagctttgaggcccccaggtatgagggcagcttccctgctggccccccacccacccgggccctgcccctgccccagagcctgcccccagacttccggctggagcccacagccccagccctgagccccaggagcagctttgccagcagcagcgccagtgatgccagcaagcccagcagcccccggggcagcctgctgctggatggagctggagctggaggagctgggggcagccggccctgcagcaacagaacatctggcatctccatgggctatgaccagagacatggcagccccctgcctgctggcccctgcctgtttggcccccccctggccggggccccagctggctacagccctggaggagtgcccagcgcctacccagagctgcatgctgccctggaccggctgtatgcccagaggcctgctggcttcggctgccaggagagccgccacagctaccccccagccctgggcagccctggggccctggccggggccggcgtgggcgctgctggccccctggagcggcggggggcccagcccggccgccacagcgtgacaggctatggagactgtgctgtgggcgcccgctaccaggatgagctgacagccctgctgcggctgactgtgggcaccggcggccgggaggccggggcccggggggagcccagcggcatcgagcccagcggcctggaggagcccccaggcccctttgtgcctgaggccgcccgggccaggatgagggagcctgaggcccgggaggactacttcggcacctgcatcaagtgcaacaagggcatctacggccagagcaatgcctgccaggccctggacagcctgtaccacacccagtgctttgtgtgctgcagctgtggccgcaccctgcgctgcaaggccttctacagcgtgaatggatctgtgtactgtgaggaggactacctgttcagcggcttccaggaggccgctgagaagtgctgcgtgtgtggccacctgatcctggagaagatcctgcaggccatgggcaagagctaccaccctggctgcttccgctgcatcgtgtgcaacaagtgcctggatggcatccccttcaccgtggacttcagcaaccaggtgtactgtgtgacagactaccacaagaactatgcccccaagtgtgccgcctgtggccagcccatcctgcccagcgagggctgtgaagatattgtgcgggtcatctccatggaccgggactaccactttgagtgctaccactgtgaggactgcaggatgcagctgagtgatgaggagggctgctgctgcttccccctggatggccacctgctgtgccacggctgccacatgcagaggctgaatgcccggcagcccccagccaactacatctag

SEQ ID NO: 226042 - DNA, 4262 bp, Artificial Sequence
  derived and/or modified sequence
agatccggccaggcagacaaaagtttgggagagaagttcggtctgtggctagcgtgagagctaggggggcgggggccggggagagtggggcagtcgggcgagtcgacgcgtgaacagatagacctgcggactggacagccgcggccagagaccctgctagccccgctcagccccagatgcgcggggggacgcagcccctcccgctgggggatgctgtgggattcctggcgcagggcatccaggccgcccgctaagcccctgtgcctcccctgtgcccctggggaaccagagtccggctgcagggaaagagaaccggccgccgagacgccgcagggtgccaggcggggagggggcgagaggccccaggcccgagggcatggagcggttaggagagaaagccagtcgcctgctggagaagttcggccgcagaaagggtgaatctagccggtctgggtctgacgggacccccgggccgggcaaggggcgcctaagtgggttggggggacctaggaagtcagggccccgaggagctactgggggacctggggatgagccgttggagccggcccgggagcaaggttccctggacgctgagcgaaatcagcgcggctcctttgaggcgccgcgctacgaaggctcttttcccgcggggccgccgcccacccgggccttgcctctacctcagtcgttgccccccgattttcggctggagcccacggccccggccctcagcccccgctctagcttcgccagtagctcggccagcgacgcgagcaagccgtccagcccccggggcagcctgctgctggacggggcgggggctggcggagctggaggtagccggccctgcagcaatcgcaccagcggcatcagcatgggctacgaccagcgccacgggagccccttgccagcggggccgtgcctgtttggcccacccctggccggagcaccggcaggctattctcccggaggggtcccgtccgcctacccggagctccacgccgccctggaccgattgtacgctcagcggcccgcggggttcggctgccaggaaagccgccactcgtatcccccggccctgggcagccctggagctctagccggggccggagtgggagcggcggggcccttggagagacggggggcgcaacccggacgacactctgtgaccggctacggggactgcgccgtgggcgcccggtaccaggacgagctaacagctttgcttcgcctgacggtgggcaccggtgggcgagaagccggagcccgcggagaaccctcggggattgagccgtcgggtctggaggagccaccaggtcctttcgttccggaggccgcccgggcccggatgcgggagccagaggccagggaggactacttcggcacctgtatcaagtgcaacaaaggcatctatgggcagagcaatgcctgccaggccctggacagcctctaccacacccagtgctttgtttgctgctcttgtgggcgaactttgcgttgcaaggctttctacagtgtcaatggctctgtgtactgtgaggaagattatctgttttcagggtttcaggaggcagctgagaaatgctgtgtctgtggtcacttgattttggagaagatcctacaagcaatggggaagtcctatcatccaggctgtttccgatgcattgtttgcaacaagtgcctggatggcatccccttcacagtggacttctccaaccaagtatactgtgtcaccgactaccacaaaaattatgctcctaagtgtgcagcctgtggccaacccatcctcccctctgagggctgtgaggacatcgtgagggtgatatccatggaccgggattatcactttgagtgctaccactgtgaggactgccggatgcagctgagtgatgaggaaggctgctgctgtttccctctggatgggcacttgctctgccatggttgccacatgcagcggctcaatgcccgacaaccccctgccaactatatctgagctgcaatcactgctgctgctgtcaccctgcagacaaactgctgtggccagtgggcccctctgaggccagccaaggcaaagaatgcactctgcaggcctggcagaagagtcctctggggaggaccccaagggccggagacccaaagatcatgatattccaaatggattgtggaagagaaaccttatatttaccagggtgggggcgactggcctttttcccatgtgtgcagtctgagcttaggcacacacaggagggttccaggactttctgaacatctgattctgtatcttcagtatatatattttgtttgttttagagatgggatctcaccatgttgcccaggctagtcttgaactcctgggctcgaatgatcctcccaccttggcctcccaaagtgctgggattataggcgtaagccactgtgtctggcctagtgtatgattatgcatgagtcacgcaatgttctggtcctggattccaggagtagaggacctagctttaaatcaattagtttcagctaaactgactagaaccaaatcaaagtgtaattctccctccagctcccccaaaccccagagttttggggttgtggttgatgcagtgtgggatgtccctgagaggtagcaagtctagggtggtgagttcctgctaggcaaccaaatttaagctcctcactttttgtgacacatggtgtcagatatggggtcccgcacctatatctggatgaagaggtagaaactctggacctcattaatgagttatttcttggccttcttctaaggactaggagagctccttatctgtctgagaatggggaccagctctgagtggggttgctgcctgtattccctgtttctcaggaacttacatgggtctggggaggctaggtaggtgattgtacgtggttgctcttctccttggctgggggaggtaatgagcagatctctgtgggtgtggagcttgttggggggatgtctaggaagcttcagcttagccacattcccaagtttaggtgcactgagccatatagcccagtgtatgcatgtgtgggtgtgttcatgcacacacacactctctctcttgtctctctgtctctctctcactctttcttactctcttctcaggtcacttgtacacttggtttcctagtagaagctcacttgccacctctcagaggggtcccggattgcatccatcacaatcccaaaactagagttggggggaactggagggagcaaaacactgatttgatactagtcagtttgcttgaaactagttcacctaaagctagatctcttaaaaccaatttactgaaaacttgtttgcttaaagttaatgacttaatgactaatttgccaaaagctcaattcctattttggtgtgtttatatccatttaggtgtcctattcttttttgtcatgctttggatatttcaaggatttatatctattcatccaagagtacttctgagctattatcagcaacataaatttatcaaatttgcagcactttgtaaatgatgagattgcttcctacctttatggatgtctttttctatgttatctaccattcaaaaacttttttaaaaagtttaaagtttctagcaataaatacaattggtacagacattttgtgtatcatttttttgtttcttaatccaatattcctttacaaattaaatgccttgaaaaatataatggagttcaatgtgattttgatgctttggtctaacttctacattcctactgttaaaaaggccagtatatcttaaacaaatgaataggcatgaggcatattcagttgacttacaatgaaaagttatacagacaacagtaataactaaaagggtgaatctgctaaatccttttgaaatgctgcagatttgataaatatttattttagactaattggttttaggtgaattggttttaggcaaattaatttagtaatctttgatctttagtcttcattttctgtcactcagtgagtttcttactggaaatgatgactcctgacaacagaatttccacatttgggggctattctaaggtgactatgccagccaacctgggaaatacataaaagagatctctgagtgagagggaaagaggtcagatttatacaactgagcgccagaggggaaaatgcaccttgttggagtgagaaatgttctgaaactgaattacttcttgtacagctgagatagcttcttctgaactattattaaataagtgaatacaaaggccctatgatgggaaatccagacaa

SEQ ID NO: 226043 - DNA, 2569 bp, Artificial Sequence
  derived and/or modified sequence
aaagagaaccggccgccgagacgccgcagggtgccaggcggggagggggcgagaggccccaggcccgagggcatggagcggttaggagagaaagccagtcgcctgctggagaagttcggccgcagaaagggtgaatctagccggtctgggtctgacgggacccccgggccgggcaaggggcgcctaagtgggttggggggacctaggaagtcagggccccgaggagctactgggggacctggggatgagccgttggagccggcccgggagcaaggttccctggacgctgagcgaaatcagcgcggctcctttgaggcgccgcgctacgaaggctcttttcccgcggggccgccgcccacccgggccttgcctctacctcagtcgttgccccccgattttcggctggagcccacggccccggccctcagcccccgctctagcttcgccagtagctcggccagcgacgcgagcaagccgtccagcccccggggcagcctgctgctggacggggcgggggctggcggagctggaggtagccggccctgcagcaatcgcaccagcggcatcagcatgggctacgaccagcgccacgggagccccttgccagcggggccgtgcctgtttggcccacccctggccggagcaccggcaggctattctcccggaggggtcccgtccgcctacccggagctccacgccgccctggaccgattgtacgctcagcggcccgcggggttcggctgccaggaaagccgccactcgtatcccccggccctgggcagccctggagctctagccggggccggagtgggagcggcggggcccttggagagacggggggcgcaacccggacgacactctgtgaccggctacggggactgcgccgtgggcgcccggtaccaggacgagctaacagctttgcttcgcctgacggtgggcaccggtgggcgagaagccggagcccgcggagaaccctcggggattgagccgtcgggtctggaggagccaccaggtcctttcgttccggaggccgcccgggcccggatgcgggagccagaggccagggaggactacttcggcacctgtatcaagtgcaacaaaggcatctatgggcagagcaatgcctgccaggccctggacagcctctaccacacccagtgctttgtttgctgctcttgtgggcgaactttgcgttgcaaggctttctacagtgtcaatggctctgtgtactgtgaggaagattatctgttttcagggtttcaggaggcagctgagaaatgctgtgtctgtggtcacttgattttggagaagatcctacaagcaatggggaagtcctatcatccaggctgtttccgatgcattgtttgcaacaagtgcctggatggcatccccttcacagtggacttctccaaccaagtatactgtgtcaccgactaccacaaaaattatgctcctaagtgtgcagcctgtggccaacccatcctcccctctgagggctgtgaggacatcgtgagggtgatatccatggaccgggattatcactttgagtgctaccactgtgaggactgccggatgcagctgagtgatgaggaaggctgctgctgtttccctctggatgggcacttgctctgccatggttgccacatgcagcggctcaatgcccgacaaccccctgccaactatatctgagctgcaatcactgctgctgctgtcaccctgcagacaaactgctgtggccagtgggcccctctgaggccagccaaggcaaagaatgcactctgcaggcctggcagaagagtcctctggggaggaccccaagggccggagacccaaagatcatgatattccaaatggattgtggaagagaaaccttatatttaccagggtgggggcgactggcctttttcccatgtgtgcagtctgagcttaggcacacacaggagggttccaggactttctgaacatctgattctgtatcttcagtatatatattttgtttgttttagagatgggatctcaccatgttgcccaggctagtcttgaactcctgggctcgaatgatcctcccaccttggcctcccaaagtgctgggattataggcgtaagccactgtgtctggcctagtgtatgattatgcatgagtcacgcaatgttctggtcctggattccaggagtagaggacctagctttaaatcaattagtttcagtttgcttgaaactagttcacctaaagctagatctcttaaaaccaatttactgaaaacttgtttgcttaaagttaatgacttaatgactaatttgccaaaagctcaattcctattttggtgtgtttatatccatttaggtgtcctattcttttttgtcatgctttggatatttcaaggatttatatctattcatccaagagtacttctgagctattatcagcaacataaatttatcaaatttgcagcactttgtaaatgatgagattgcttcctacctttatggatgtctttttctatgttatctaccattcaaaaacttttttaaaaagtttaaagtttctagcaataaatacaattggtac

SEQ ID NO: 226044 - DNA, 2648 bp, Artificial Sequence
  derived and/or modified sequence
taactccagtcctgacctccatggagtctgtccctggaaggagacaggcatttgagagcaggatagatatgctcaggcaaagaggcttctaggttgaagggtcccagagggaaaggcctgttaacaatgtggttctctctatgcaaatcatatagcaccttattaagagctcacgtattccagcacgtagttggctttactctcccaggtggcttcctatgcactggagaggaaggcagtttgtttaggggaggggccctagaaaactgttaaggaggcaggagctggaggagcagcaagcagaggagaggggaagttggctggaatgaagccaaagcaaattggaattgcatcagatggaatttttgtgcggggaaggacagacagcagttaggaggaaaagcacaaagtccaggtttaaatatattatgcagcagcggggagcagtgaccccagaagtcttgcacctgggctgtgggataggttccagccccttctctattgtttctagggcgaactttgcgttgcaaggctttctacagtgtcaatggctctgtgtactgtgaggaagattatctgttttcagggtttcaggaggcagctgagaaatgctgtgtctgtggtcacttgattttggagaagatcctacaagcaatggggaagtcctatcatccaggctgtttccgatgcattgtttgcaacaagtgcctggatggcatccccttcacagtggacttctccaaccaagtatactgtgtcaccgactaccacaaaaattatgctcctaagtgtgcagcctgtggccaacccatcctcccctctgagggctgtgaggacatcgtgagggtgatatccatggaccgggattatcactttgagtgctaccactgtgaggactgccggatgcagctgagtgatgaggaaggctgctgctgtttccctctggatgggcacttgctctgccatggttgccacatgcagcggctcaatgcccgacaaccccctgccaactatatctgagctgcaatcactgctgctgctgtcaccctgcagacaaactgctgtggccagtgggcccctctgaggccagccaaggcaaagaatgcactctgcaggcctggcagaagagtcctctggggaggaccccaagggccggagacccaaagatcatgatattccaaatggattgtggaagagaaaccttatatttaccagggtgggggcgactggcctttttcccatgtgtgcagtctgagcttaggcacacacaggagggttccaggactttctgaacatctgattctgtatcttcagtatatatattttgtttgttttagagatgggatctcaccatgttgcccaggctagtcttgaactcctgggctcgaatgatcctcccaccttggcctcccaaagtgctgggattataggcgtaagccactgtgtctggcctagtgtatgattatgcatgagtcacgcaatgttctggtcctggattccaggagtagaggacctagctttaaatcaattagtttcagctaaactgactagaaccaaatcaaagtgtaattctccctccagctcccccaaaccccagagttttggggttgtggttgatgcagtgtgggatgtccctgagaggtagcaagtctagggtggtgagttcctgctaggcaaccaaatttaagctcctcactttttgtgacacatggtgtcagatatggggtcccgcacctatatctggatgaagaggtagaaactctggacctcattaatgagttatttcttggccttcttctaaggactaggagagctccttatctgtctgagaatggggaccagctctgagtggggttgctgcctgtattccctgtttctcaggaacttacatgggtctggggaggctaggtaggtgattgtacgtggttgctcttctccttggctgggggaggtaatgagcagatctctgtgggtgtggagcttgttggggggatgtctaggaagcttcagcttagccacattcccaagtttaggtgcactgagccatatagcccagtgtatgcatgtgtgggtgtgttcatgcacacacacactctctctcttgtctctctgtctctctctcactctttcttactctcttctcaggtcacttgtacacttggtttcctagtagaagctcacttgccacctctcagaggggtcccggattgcatccatcacaatcccaaaactagagttggggggaactggagggagcaaaacactgatttgatactagtcagtttgcttgaaactagttcacctaaagctagatctcttaaaaccaatttactgaaaacttgtttgcttaaagttaatgacttaatgactaatttgccaaaagctcaattcctattttggtgtgtttatatccatttaggtgtcctattcttttttgtcatgctttggatatttcaaggatttatatctattcatccaagagtacttctgagctattatcagcaacataaatttatcaaatttgcagcactttgtaaatgatgagattgcttcctacctttatggatgtctttttctatgttatctaccattcaaaaacttttttaaaaagtttaaagtttctagcaataaatacaattggtacagac

SEQ ID NO: 226045 - DNA, 418 bp, Artificial Sequence
  derived and/or modified sequence
cagacagcagttaggaggaaaagcacaaagtccagggcgaactttgcgttgcaaggctttctacagtgtcaatggctctgtgtactgtgaggaagattatctgttttcagggtttcaggaggcagctgagaaatgctgtgtctgtggtcacttgattttggagaagatcctacaagcaatggggaagtcctatcatccaggctgtttccgatgcattgtttgcaacaagtgcctggatggcatccccttcacagtggacttctccaaccaagtatactgtgtcaccgactaccacaaaaattatgctcctaagtgtgcagcctgtggccaacccatcctcccctctgagggctgtgaggacatcgtgagggtgatatccatggaccgggattatcactttgagtgctaccactgtgag

SEQ ID NO: 226046 - DNA, 567 bp, Artificial Sequence
  derived and/or modified sequence
aaatatattatgcagcagcggggagcagtgaccccagaagtcttgcacctgggctgtgggataggttccagccccttctctattgtttctagggcgaactttgcgttgcaaggctttctacagtgtcaatggctctgtgtactgtgaggaagattatctgttttcagggtttcaggaggcagctgagaaatgctgtgtctgtggtcacttgattttggagaagatggagtctcactctgttgcccaggctggagtccagtggtgcgatctcggcttactgcaagctccgcctcctggttcacgccattctcctgcctagctgggactacaggcgcccgccacatgcccggctaattttttgatcctacaagcaatggggaagtcctatcatccaggctgtttccgatgcattgtttgcaacaagtgcctggatggcatccccttcacagtggacttctccaaccaagtatactgtgtcaccgactaccacaaaaattatgctcctaagtgtgcagcctgtggccaacccatcctcccctctgagggctgtgaggacatcgtgagggt

SEQ ID NO: 226047 - DNA, 651 bp, Artificial Sequence
  derived and/or modified sequence
actgcttacccattctgattcctttgctaaacctttaatctcctatctctgcctgtctgacttcagcactcagcttttctcactcccccagtttctgcctggttctctttaggctcatctgtctgtctatccttctgtttacagggcctcttctggctatatctctttccctatctttcctcccctgtgtctcatgagcttctaagtcagctttcctaacccactggacagagttggaagtagggattttgaggggaagaaggcaaagggcgaactttgcgttgcaaggctttctacagtgtcaatggctctgtgtactgtgaggaagattatctgttttcagggtttcaggaggcagctgagaaatgctgtgtctgtggtcacttgattttggagaagatcctacaagcaatggggaagtcctatcatccaggctgtttccgatgcattgtttgcaacaagtgcctggatggcatccccttcacagtggacttctccaaccaagtatactgtgtcaccgactaccacaaaaattatgctcctaagtgtgcagcctgtggccaacccatcctcccctctgagggctgtgaggacatcgtgagggtgatatccatggaccgggattatcactttgagtgctaccactgtgag

SEQ ID NO: 226048 - DNA, 1617 bp, Artificial Sequence
  derived and/or modified sequence
atggagcggctgggcgagaaggccagccggctgctggagaagttcggacgaagaaaaggcgaaagcagccggtccgggtcagacggtacacccgggcccggcaaaggcaggctgagcggcttggggggcccccgaaaaagcgggccgagaggtgctaccgggggcccaggtgacgagccgctggagcctgctcgcgaacaggggtctctcgacgcagagcgaaatcagagaggctcattcgaagcacccaggtatgaggggagcttccccgctggcccacctcccacaagggctctgcctttgccgcagagcctgcctccagactttcgactcgaaccgactgcgccggcgctgtccccaaggagtagttttgcatcaagctctgcctccgacgcatctaagccatcatctccccgtggctccttactcctcgatggagcgggcgccggcggtgctggggggagtagaccttgttctaaccgaacatcgggcatttcaatgggctatgatcagcgtcacggctctcccctgcctgctgggccctgtctgtttgggccgccccttgcgggggcacccgccggatactcccccggtggcgtccctagtgcgtatccagagctacacgccgcacttgacaggctctatgctcagagacccgctgggttcgggtgccaggaatcccgacactcgtaccctcctgcgctgggctctcctggggcattggccggagcaggcgtcggcgcagccggcccactggaacggcgcggtgcacagccgggaagacattccgtgaccggttacggagactgtgccgtaggagctaggtaccaggacgaactaactgctctcctgcgtctgaccgtcggtacaggcgggcgcgaggccggggctcgcggcgagcctagtgggatagagccttcaggcttggaagagccccccggtcctttcgtcccagaagccgccagagctaggatgagagagcccgaagcaagagaagattatttcggtacttgtataaaatgcaacaaaggcatttacgggcagtcgaacgcgtgccaggcactggatagtctgtatcacactcaatgtttcgtgtgttgcagttgcggccggacactgaggtgtaaagccttctatagcgtgaacggatccgtgtactgcgaggaggattatctcttctctgggttccaggaagctgccgaaaagtgctgcgtttgtggacatctgatcctcgagaaaatcctccaggcgatggggaaatcctaccacccaggttgtttccggtgcatcgtctgcaataagtgccttgatggaattcccttcacagtggatttttcaaaccaggtatactgcgttacggattatcacaaaaattacgctcctaaatgcgctgcatgtggccagccgattctcccgagtgaaggctgcgaggacatcgtgagggtaatttctatggatagagactaccactttgaatgctaccattgtgaggactgtcgaatgcagctatcagatgaagaggggtgctgttgtttccccctcgacggccatctgctgtgccacgggtgccatatgcagagactgaatgctagacaacctcctgcaaactacatttag

SEQ ID NO: 226049 - DNA, 1617 bp, Artificial Sequence
  derived and/or modified sequence
atggagcggctgggcgagaaggccagccggctgctggagaagttcggccggcgcaaaggtgagagcagccggagcggatccgacgggacgccgggacctgggaagggccgcctgtccggcctgggcggacctcgcaagtctggaccacggggcgccactggcgggccgggggacgaacccctggagcccgccagagagcaaggtagcttggacgctgaacgcaaccagcgcggttccttcgaggctcctcggtatgaaggcagtttccccgctggcccccccccaacaagagcactgcccctccctcagtcattgcctcctgacttccggctggagcctacagccccagccctcagtccacggtcttctttcgcttccagctcagctagcgatgccagtaaaccttcctcacctagaggttcactcctcctggacggagccggagctgggggagcgggagggagtagaccctgcagtaatcgcaccagtgggatatcgatgggatacgaccagcgacatggctcccctctacctgccggtccatgcctcttcggaccgcccctggccggcgcaccagctggctactcacctggcggagtaccgagtgcttacccagaactacacgctgcgctggaccgcctgtatgcccagagacccgcgggcttcgggtgtcaggagagccgacactcatacccacccgcactcggtagtcccggagccttggccggggcgggagtaggggctgctggtccacttgaacggaggggggcccagccagggcgtcatagcgtaaccggctacggcgactgcgccgtgggggcgcgctatcaagatgagctcactgccttgctccgcctgacggtagggactggagggcgggaggccggggctcggggggagcctagtgggatcgaacctagtgggttggaggaaccccctggcccattcgtccccgaagctgcaagggcacgaatgagggagccggaagcccgggaggattacttcggaacatgtattaagtgcaataagggtatatacggccagtccaacgcctgccaggccctcgacagcctctatcacacccagtgtttcgtgtgttgttcttgtggacggacgttgaggtgcaaggctttctattcagttaatggcagtgtttattgtgaggaggattatctcttttccgggtttcaggaagcagcagagaaatgctgtgtgtgtggacatctgatcctcgagaaaattcttcaggcaatgggaaaatcttaccatcctgggtgctttagatgtattgtttgcaataagtgtctcgacgggatcccatttacagtcgatttcagcaaccaggtttattgcgttactgactaccacaaaaattatgcacctaaatgcgctgcttgtgggcagcctatcctccctagcgagggctgcgaagatatagtcagggtaattagtatggatagggattatcactttgagtgctaccattgcgaggactgcagaatgcaactatccgatgaggagggctgctgctgcttccctttggatggccatctgttatgtcacggctgccatatgcagcgactgaacgcgaggcagccacccgccaattacatatag

SEQ ID NO: 226050 - DNA, 1617 bp, Artificial Sequence
  derived and/or modified sequence
atggagcggttgggtgagaaggctagcagattgcttgaaaaatttggaaggaggaaaggagagtcctcgcgttctggctccgacggtacacctggtccaggcaagggcagattgagtgggctgggagggccacgcaaatcgggaccacgcggtgccacaggcggacctggggacgagccactagagcccgcaagagagcagggatcattagatgcagagcggaaccagagagggtcttttgaggctccccgatatgaaggatcctttccagctggccctcctcccaccagagcactgcccctgccgcaaagtctgccccctgactttagattagaacccacagcccctgctctcagccctaggtcaagttttgcctcctcatctgccagcgacgcctcgaagcctagtagtcccagggggtcactgttgctggatggtgctggtgccggaggtgcgggaggttccagaccctgctctaataggacatctggtatcagcatgggttacgatcagagacacgggagccctttgcccgctggtccgtgtttgttcggacccccattggctggtgcccctgcaggctactcccccggtggcgttccttccgcctatcccgagctgcatgctgctctcgacagactgtatgctcagcgacctgctgggttcggctgtcaggagtcccgtcactcctaccctccagcattggggtcccccggagccctggctggtgccggagtcggcgcagccggtccccttgagcggagaggcgctcagcccggaagacatagtgtcaccggttatggtgattgcgccgtgggtgccaggtaccaggatgagctgactgccctactgagattgaccgtgggaacaggtgggagagaggcgggagcaagaggagagccctctgggatcgagccttctggactggaggagccaccaggaccttttgtgcctgaagctgcaagggccaggatgcgggaaccagaggcgagggaagactacttcggaacgtgtatcaagtgtaacaagggtatttacgggcagagcaacgcgtgccaggcgctcgacagtctgtatcacacccaatgcttcgtgtgttgtagttgcggcagaaccctccggtgcaaggccttttactcagtcaatggtagtgtgtactgcgaagaggactacctcttctccggtttccaggaggctgctgagaagtgctgcgtctgcggacacctgattcttgagaagattcttcaggccatgggaaaatcttatcacccgggatgctttcgctgcatcgtgtgtaataagtgtttggatggaatcccctttactgtcgattttagcaaccaagtctattgtgtgactgattatcataagaattacgctccaaagtgcgctgcttgtggacaacctatcttacccagcgaagggtgtgaggatatcgtaagggttataagcatggaccgagactaccattttgaatgctaccactgtgaggattgtcgcatgcaactctctgacgaggaaggctgttgttgttttccattggatgggcatctgttgtgccacggctgccacatgcagcgcctgaacgccagacaaccacctgccaactacatttag

SEQ ID NO: 226051 - DNA, 1617 bp, Artificial Sequence
  derived and/or modified sequence
atggagcgcctgggggaaaaagctagcagactcctcgagaaatttggtcggaggaagggagagagttcacgctcaggtagtgacggaacaccaggtcccggaaagggaaggctctccgggttaggcggtccaagaaagagtggcccacgaggagccactggtgggccaggggacgagccccttgagcctgccagagaacaggggagcctcgacgccgagcggaaccagcggggatctttcgaggccccaagatacgaaggaagctttccagccggacctcctcccacccgcgcactgcccttgcctcagtctctccctccggatttccgcctcgagcccacggctcccgcactctcaccccgtagcagcttcgctagctcttcggcctccgatgcctccaaacctagctctccacggggaagtctcttgctggatggagccggagctggaggagcgggaggcagtcgaccgtgctccaaccgcaccagtggcatcagtatgggctatgaccagcgacatgggtccccactgcccgcaggtccctgtctctttggccctccactagcaggagcccctgccggttacagtccaggaggtgtgccctctgcttaccctgagcttcacgctgcactcgacagactttatgcacagagaccggcaggattcgggtgtcaggaaagcagacactcatatcctcccgctctcgggtctcccggtgcgttagcgggagccggtgtgggagctgctggacctcttgaacgcagaggagctcagccagggaggcactcggtaactggatacggcgattgtgccgtgggcgctagataccaggacgaactgactgccctattgcggctgaccgtgggtaccggaggccgagaggccggtgcgcgtggcgagccctcgggcatcgagcctagcggactcgaggaacccccagggccttttgtgccggaggcagcacgggctcgcatgcgcgaaccagaggctagagaggactattttggcacctgcatcaaatgtaacaagggcatctatgggcagtcaaatgcctgtcaggcactcgactctctgtaccacacacagtgcttcgtgtgctgcagttgcggtagaaccctgcgttgcaaggccttctattctgttaacgggtccgtatactgtgaagaggattacctcttttccggctttcaagaagcggcagagaagtgttgcgtgtgtggccacctcatattggagaagatccttcaagccatggggaagagctaccatccgggttgcttccgctgtatcgtttgtaataaatgcctggatggaattccctttacggtggactttagcaaccaagtgtactgcgtcacagattaccacaaaaattacgctcccaaatgtgcggcttgcggtcaacctatcctgccgtctgaagggtgtgaagatattgtgagggtgatttctatggaccgtgactatcacttcgagtgctaccactgtgaggactgtcgcatgcaactgtcggacgaggaaggctgctgctgtttcccattggatggacaccttttatgccatgggtgccatatgcaaagattgaacgccagacaacctcccgctaactacatctag

SEQ ID NO: 226052 - protein, 1860 aa, Artificial Sequence
  derived and/or modified sequence
MGAGSARGARGTAAAAAARGGGFLFSWILVSFACHLASTQGAPEDVDILQRLGLSWTKAGSPAPPGVIPFQSGFIFTQRARLQAPTGTVIPAALGTELALVLSLCSHRVNHAFLFAVRSQKRKLQLGLQFLPGKTVVHLGSRRSVAFDLDMHDGRWHHLALELRGRTVTLVTACGQRRVPVLLPFHRDPALDPGGSFLFGKMNPHAVQFEGALCQFSIYPVTQVAHNYCTHLRKQCGQADTYQSPLGPLFSQDSGRPFTFQSDLALLGLENLTTATPALGSLPAGRGPRGTVAPATPTKPQRTSPTNPHQHMAVGGPAQTPLLPAKLSASNALDPMLPASVGGSTRTPRPAAAQPSQKITATKIPKSLPTKPSAPSTSIVPIKSPHPTQKTAPSSFTKSALPTQKQVPPTSRPVPARVSRPAEKPIQRNPGMPRPPPPSTRPLPPTTSSSKKPIPTLARTEAKITSHASKPASARTSTHKPPPFTALSSSPAPTPGSTRSTRPPATMVPPTSGTSTPRTAPAVPTPGSAPTGSKKPIGSEASKKAGPKSSPRKPVPLRPGKAARDVPLSDLTTRPSPRQPQPSQQTTPALVLAPAQFLSSSPRPTSSGYSIFHLAGSTPFPLLMGPPGPKGDCGLPGPPGLPGLPGIPGARGPRGPPGPYGNPGLPGPPGAKGQKGDPGLSPGKAHDGAKGDMGLPGLSGNPGPPGRKGHKGYPGPAGHPGEQGQPGPEGSPGAKGYPGRQGLPGPVGDPGPKGSRGYIGLPGLFGLPGSDGERGLPGVPGKRGKMGMPGFPGVFGERGPPGLDGNPGELGLPGPPGVPGLIGDLGVLGPIGYPGPKGMKGLMGSVGEPGLKGDKGEQGVPGVSGDPGFQGDKGSQGLPGFPGARGKPGPLGKVGDKGSIGFPGPPGPEGFPGDIGPPGDNGPEGMKGKPGARGLPGPRGQLGPEGDEGPMGPPGAPGLEGQPGRKGFPGRPGLDGVKGEPGDPGRPGPVGEQGFMGFIGLVGEPGIVGEKGDRGMMGPPGVPGPKGSMGHPGMPGGMGTPGEPGPQGPPGSRGPPGMRGAKGRRGPRGPDGPAGEQGSRGLKGPPGPQGRPGRPGQQGVAGERGHLGSRGFPGIPGPSGPPGTKGLPGEPGPQGPQGPIGPPGEMGPKGPPGAVGEPGLPGEAGMKGDLGPLGTPGEQGLIGQRGEPGLEGDSGPMGPDGLKGDRGDPGPDGEHGEKGQEGLMGEDGPPGPPGVTGVRGPEGKSGKQGEKGRTGAKGAKGYQGQLGEMGVPGDPGPPGTPGPKGSRGSLGPTGAPGRMGAQGEPGLAGYDGHKGIVGPLGPPGPKGEKGEQGEDGKAEGPPGPPGDRGPVGDRGDRGEPGDPGYPGQEGVQGLRGKPGQQGQPGHPGPRGWPGPKGSKGAEGPKGKQGKAGAPGRRGVQGLQGLPGPRGVVGRQGLEGIAGPDGLPGRDGQAGQQGEQGDDGDPGPMGPAGKRGNPGVAGLPGAQGPPGFKGESGLPGQLGPPGKRGTEGRTGLPGNQGEPGSKGQPGDSGEMGFPGMAGLFGPKGPPGDIGFKGIQGPRGPPGLMGKEGIVGPLGILGPSGLPGPKGDKGSRGDWGLQGPRGPPGPRGRPGPPGPPGGPIQLQQDDLGAAFQTWMDTSGALRPESYSYPDRLVLDQGGEIFKTLHYLSNLIQSIKTPLGTKENPARVCRDLMDCEQKMVDGTYWVDPNLGCSSDTIEVSCNFTHGGQTCLKPITASKVEFAISRVQMNFLHLLSSEVTQHITIHCLNMTVWQEGTGQTPAKQAVRFRAWNGQIFEAGGQFRPEVSMDGCKVQDGRWHQTLFTFRTQDPQQLPIISVDNLPPASSGKQYRLEVGPACFL

SEQ ID NO: 226053 - protein, 1867 aa, Artificial Sequence
  derived and/or modified sequence
MGAGSARGARGTAAAAAARGGGFLFSWILVSFACHLASTQGAPEDVDILQRLGLSWTKAGSPAPPGVIPFQSGFIFTQRARLQAPTGTVIPAALGTELALVLSLCSHRVNHAFLFAVRSQKRKLQLGLQFLPGKTVVHLGSRRSVAFDLDMHDGRWHHLALELRGRTVTLVTACGQRRVPVLLPFHRDPALDPGGSFLFGKMNPHAVQFEGALCQFSIYPVTQVAHNYCTHLRKQCGQADTYQSPLGPLFSQDSGRPFTFQSDLALLGLENLTTATPALGSLPAGRGPRGTVAPATPTKPQRTSPTNPHQHMAVGGPAQTPLLPAKLSASNALDPMLPASVGGSTRTPRPAAAQPSQKITATKIPKSLPTKPSAPSTSIVPIKSPHPTQKTAPSSFTKSALPTQKQVPPTSRPVPARVSRPAEKPIQRNPGMPRPPPPSTRPLPPTTSSSKKPIPTLARTEAKITSHASKPASARTSTHKPPPFTALSSSPAPTPGSTRSTRPPATMVPPTSGTSTPRTAPAVPTPGSAPTGSKKPIGSEASKKAGPKSSPRKPVPLRPGKAARDVPLSDLTTRPSPRQPQPSQQTTPALVLAPAQFLSSSPRPTSSGYSIFHLAGSTPFPLLMGPPGPKGDCGLPGPPGLPGLPGIPGARGPRGPPGPYGNPGLPGPPGAKGQKGDPGLSPGKAHDGAKGDMGLPGLSGNPGPPGRKGHKGYPGPAGHPGEQGQPGPEGSPGAKGYPGRQGLPGPVGDPGPKGSRGYIGLPGLFGLPGSDGERGLPGVPGKRGKMGMPGFPGVFGERGPPGLDGNPGELGLPGPPGVPGLIGDLGVLGPIGYPGPKGMKGLMGSVGEPGLKGDKGEQGVPGVSGDPGFQGDKGSQGLPGFPGARGKPGPLGKVGDKGSIGFPGPPGPEGFPGDIGPPGDNGPEGMKGKPGARGLPGPRGQLGPEGDEGPMGPPGAPGLEGQPGRKGFPGRPGLDGVKGEPGDPGRPGPVGEQGFMGFIGLVGEPGIVGEKGDRGMMGPPGVPGPKGSMGHPGMPGGMGTPGEPGPQGPPGSRGPPGMRGAKGRRGPRGPDGPAGEQGSRGLKGPPGPQGRPGRPGQQGVAGERGHLGSRGFPGIPGPSGPPGTKGLPGEPGPQGPQGPIGPPGEMGPKGPPGAVGEPGLPGEAGMKGDLGPLGTPGEQGLIGQRGEPGLEGDSGPMGPDGLKGDRGDPGPDGEHGEKGQEGLMGEDGPPGPPGVTGVRGPEGKSGKQGEKGRTGAKGAKGYQGQLGEMGVPGDPGPPGTPGPKGSRGSLGPTGAPGRMGAQGEPGLAGYDGHKGIVGPLGPPGPKGEKGEQGEDGKAEGPPGPPGDRGPVGDRGDRGEPGDPGYPGQEGVQGLRGKPGQQGQPGHPGPRGWPGPKGSKGAEGPKGKQGKAGAPGRRGVQGLQGLPGPRGVVGRQGLEGIAGPDGLPGRDGQAGQQGEQGDDGDPGPMGPAGKRGNPGVAGLPGAQGPPGFKGESGLPGQLGPPGKRGTEGRTGLPGNQGEPGSKGQPGDSGEMGFPGMAGLFGPKGPPGDIGFKGIQGPRGPPGLMGKEGIVGPLGILGPSGLPGPKGDKGSRGDWGLQGPRGPPGPRGRPGPPVDPGGPRYIPCLFLAQQQDDLGAAFQTWMDTSGALRPESYSYPDRLVLDQGGEIFKTLHYLSNLIQSIKTPLGTKENPARVCRDLMDCEQKMVDGTYWVDPNLGCSSDTIEVSCNFTHGGQTCLKPITASKVEFAISRVQMNFLHLLSSEVTQHITIHCLNMTVWQEGTGQTPAKQAVRFRAWNGQIFEAGGQFRPEVSMDGCKVQDGRWHQTLFTFRTQDPQQLPIISVDNLPPASSGKQYRLEVGPACFL

SEQ ID NO: 226054 - DNA, 5583 bp, Artificial Sequence
  derived and/or modified sequence
atgggcgccggcagcgccagaggcgccagaggcaccgccgccgccgccgccgccagaggcggcggcttcctgttcagctggatcctggtgagcttcgcctgccacctggccagcacccagggcgcccccgaggacgtggacatcctgcagagactgggcctgagctggaccaaggccggcagccccgccccccccggcgtgatccccttccagagcggcttcatcttcacccagagagccagactgcaggcccccaccggcaccgtgatccccgccgccctgggcaccgagctggccctggtgctgagcctgtgcagccacagagtgaaccacgccttcctgttcgccgtgagaagccagaagagaaagctgcagctgggcctgcagttcctgcccggcaagaccgtggtgcacctgggcagcagaagaagcgtggccttcgacctggacatgcacgacggcagatggcaccacctggccctggagctgagaggcagaaccgtgaccctggtgaccgcctgcggccagagaagagtgcccgtgctgctgcccttccacagagaccccgccctggaccccggcggcagcttcctgttcggcaagatgaacccccacgccgtgcagttcgagggcgccctgtgccagttcagcatctaccccgtgacccaggtggcccacaactactgcacccacctgagaaagcagtgcggccaggccgacacctaccagagccccctgggccccctgttcagccaggacagcggcagacccttcaccttccagagcgacctggccctgctgggcctggagaacctgaccaccgccacccccgccctgggcagcctgcccgccggcagaggccccagaggcaccgtggcccccgccacccccaccaagccccagagaaccagccccaccaacccccaccagcacatggccgtgggcggccccgcccagacccccctgctgcccgccaagctgagcgccagcaacgccctggaccccatgctgcccgccagcgtgggcggcagcaccagaacccccagacccgccgccgcccagcccagccagaagatcaccgccaccaagatccccaagagcctgcccaccaagcccagcgcccccagcaccagcatcgtgcccatcaagagcccccaccccacccagaagaccgcccccagcagcttcaccaagagcgccctgcccacccagaagcaggtgccccccaccagcagacccgtgcccgccagagtgagcagacccgccgagaagcccatccagagaaaccccggcatgcccagaccccccccccccagcaccagacccctgccccccaccaccagcagcagcaagaagcccatccccaccctggccagaaccgaggccaagatcaccagccacgccagcaagcccgccagcgccagaaccagcacccacaagcccccccccttcaccgccctgagcagcagccccgcccccacccccggcagcaccagaagcaccagaccccccgccaccatggtgccccccaccagcggcaccagcacccccagaaccgcccccgccgtgcccacccccggcagcgcccccaccggcagcaagaagcccatcggcagcgaggccagcaagaaggccggccccaagagcagccccagaaagcccgtgcccctgagacccggcaaggccgccagagacgtgcccctgagcgacctgaccaccagacccagccccagacagccccagcccagccagcagaccacccccgccctggtgctggcccccgcccagttcctgagcagcagccccagacccaccagcagcggctacagcatcttccacctggccggcagcacccccttccccctgctgatgggcccccccggccccaagggcgactgcggcctgcccggcccccccggcctgcccggcctgcccggcatccccggcgccagaggccccagaggcccccccggcccctacggcaaccccggcctgcccggcccccccggcgccaagggccagaagggcgaccccggcctgagccccggcaaggcccacgacggcgccaagggcgacatgggcctgcccggcctgagcggcaaccccggcccccccggcagaaagggccacaagggctaccccggccccgccggccaccccggcgagcagggccagcccggccccgagggcagccccggcgccaagggctaccccggcagacagggcctgcccggccccgtgggcgaccccggccccaagggcagcagaggctacatcggcctgcccggcctgttcggcctgcccggcagcgacggcgagagaggcctgcccggcgtgcccggcaagagaggcaagatgggcatgcccggcttccccggcgtgttcggcgagagaggcccccccggcctggacggcaaccccggcgagctgggcctgcccggcccccccggcgtgcccggcctgatcggcgacctgggcgtgctgggccccatcggctaccccggccccaagggcatgaagggcctgatgggcagcgtgggcgagcccggcctgaagggcgacaagggcgagcagggcgtgcccggcgtgagcggcgaccccggcttccagggcgacaagggcagccagggcctgcccggcttccccggcgccagaggcaagcccggccccctgggcaaggtgggcgacaagggcagcatcggcttccccggcccccccggccccgagggcttccccggcgacatcggcccccccggcgacaacggccccgagggcatgaagggcaagcccggcgccagaggcctgcccggccccagaggccagctgggccccgagggcgacgagggccccatgggcccccccggcgcccccggcctggagggccagcccggcagaaagggcttccccggcagacccggcctggacggcgtgaagggcgagcccggcgaccccggcagacccggccccgtgggcgagcagggcttcatgggcttcatcggcctggtgggcgagcccggcatcgtgggcgagaagggcgacagaggcatgatgggcccccccggcgtgcccggccccaagggcagcatgggccaccccggcatgcccggcggcatgggcacccccggcgagcccggcccccagggcccccccggcagcagaggcccccccggcatgagaggcgccaagggcagaagaggccccagaggccccgacggccccgccggcgagcagggcagcagaggcctgaagggcccccccggcccccagggcagacccggcagacccggccagcagggcgtggccggcgagagaggccacctgggcagcagaggcttccccggcatccccggccccagcggcccccccggcaccaagggcctgcccggcgagcccggcccccagggcccccagggccccatcggcccccccggcgagatgggccccaagggcccccccggcgccgtgggcgagcccggcctgcccggcgaggccggcatgaagggcgacctgggccccctgggcacccccggcgagcagggcctgatcggccagagaggcgagcccggcctggagggcgacagcggccccatgggccccgacggcctgaagggcgacagaggcgaccccggccccgacggcgagcacggcgagaagggccaggagggcctgatgggcgaggacggcccccccggcccccccggcgtgaccggcgtgagaggccccgagggcaagagcggcaagcagggcgagaagggcagaaccggcgccaagggcgccaagggctaccagggccagctgggcgagatgggcgtgcccggcgaccccggcccccccggcacccccggccccaagggcagcagaggcagcctgggccccaccggcgcccccggcagaatgggcgcccagggcgagcccggcctggccggctacgacggccacaagggcatcgtgggccccctgggcccccccggccccaagggcgagaagggcgagcagggcgaggacggcaaggccgagggcccccccggcccccccggcgacagaggccccgtgggcgacagaggcgacagaggcgagcccggcgaccccggctaccccggccaggagggcgtgcagggcctgagaggcaagcccggccagcagggccagcccggccaccccggccccagaggctggcccggccccaagggcagcaagggcgccgagggccccaagggcaagcagggcaaggccggcgcccccggcagaagaggcgtgcagggcctgcagggcctgcccggccccagaggcgtggtgggcagacagggcctggagggcatcgccggccccgacggcctgcccggcagagacggccaggccggccagcagggcgagcagggcgacgacggcgaccccggccccatgggccccgccggcaagagaggcaaccccggcgtggccggcctgcccggcgcccagggcccccccggcttcaagggcgagagcggcctgcccggccagctgggcccccccggcaagagaggcaccgagggcagaaccggcctgcccggcaaccagggcgagcccggcagcaagggccagcccggcgacagcggcgagatgggcttccccggcatggccggcctgttcggccccaagggcccccccggcgacatcggcttcaagggcatccagggccccagaggcccccccggcctgatgggcaaggagggcatcgtgggccccctgggcatcctgggccccagcggcctgcccggccccaagggcgacaagggcagcagaggcgactggggcctgcagggccccagaggcccccccggccccagaggcagacccggcccccccggcccccccggcggccccatccagctgcagcaggacgacctgggcgccgccttccagacctggatggacaccagcggcgccctgagacccgagagctacagctaccccgacagactggtgctggaccagggcggcgagatcttcaagaccctgcactacctgagcaacctgatccagagcatcaagacccccctgggcaccaaggagaaccccgccagagtgtgcagagacctgatggactgcgagcagaagatggtggacggcacctactgggtggaccccaacctgggctgcagcagcgacaccatcgaggtgagctgcaacttcacccacggcggccagacctgcctgaagcccatcaccgccagcaaggtggagttcgccatcagcagagtgcagatgaacttcctgcacctgctgagcagcgaggtgacccagcacatcaccatccactgcctgaacatgaccgtgtggcaggagggcaccggccagacccccgccaagcaggccgtgagattcagagcctggaacggccagatcttcgaggccggcggccagttcagacccgaggtgagcatggacggctgcaaggtgcaggacggcagatggcaccagaccctgttcaccttcagaacccaggacccccagcagctgcccatcatcagcgtggacaacctgccccccgccagcagcggcaagcagtacagactggaggtgggccccgcctgcttcctgtag

SEQ ID NO: 226055 - DNA, 5604 bp, Artificial Sequence
  derived and/or modified sequence
atgggcgccggcagcgccagaggcgccagaggcaccgccgccgccgccgccgccagaggcggcggcttcctgttcagctggatcctggtgagcttcgcctgccacctggccagcacccagggcgcccccgaggacgtggacatcctgcagagactgggcctgagctggaccaaggccggcagccccgccccccccggcgtgatccccttccagagcggcttcatcttcacccagagagccagactgcaggcccccaccggcaccgtgatccccgccgccctgggcaccgagctggccctggtgctgagcctgtgcagccacagagtgaaccacgccttcctgttcgccgtgagaagccagaagagaaagctgcagctgggcctgcagttcctgcccggcaagaccgtggtgcacctgggcagcagaagaagcgtggccttcgacctggacatgcacgacggcagatggcaccacctggccctggagctgagaggcagaaccgtgaccctggtgaccgcctgcggccagagaagagtgcccgtgctgctgcccttccacagagaccccgccctggaccccggcggcagcttcctgttcggcaagatgaacccccacgccgtgcagttcgagggcgccctgtgccagttcagcatctaccccgtgacccaggtggcccacaactactgcacccacctgagaaagcagtgcggccaggccgacacctaccagagccccctgggccccctgttcagccaggacagcggcagacccttcaccttccagagcgacctggccctgctgggcctggagaacctgaccaccgccacccccgccctgggcagcctgcccgccggcagaggccccagaggcaccgtggcccccgccacccccaccaagccccagagaaccagccccaccaacccccaccagcacatggccgtgggcggccccgcccagacccccctgctgcccgccaagctgagcgccagcaacgccctggaccccatgctgcccgccagcgtgggcggcagcaccagaacccccagacccgccgccgcccagcccagccagaagatcaccgccaccaagatccccaagagcctgcccaccaagcccagcgcccccagcaccagcatcgtgcccatcaagagcccccaccccacccagaagaccgcccccagcagcttcaccaagagcgccctgcccacccagaagcaggtgccccccaccagcagacccgtgcccgccagagtgagcagacccgccgagaagcccatccagagaaaccccggcatgcccagaccccccccccccagcaccagacccctgccccccaccaccagcagcagcaagaagcccatccccaccctggccagaaccgaggccaagatcaccagccacgccagcaagcccgccagcgccagaaccagcacccacaagcccccccccttcaccgccctgagcagcagccccgcccccacccccggcagcaccagaagcaccagaccccccgccaccatggtgccccccaccagcggcaccagcacccccagaaccgcccccgccgtgcccacccccggcagcgcccccaccggcagcaagaagcccatcggcagcgaggccagcaagaaggccggccccaagagcagccccagaaagcccgtgcccctgagacccggcaaggccgccagagacgtgcccctgagcgacctgaccaccagacccagccccagacagccccagcccagccagcagaccacccccgccctggtgctggcccccgcccagttcctgagcagcagccccagacccaccagcagcggctacagcatcttccacctggccggcagcacccccttccccctgctgatgggcccccccggccccaagggcgactgcggcctgcccggcccccccggcctgcccggcctgcccggcatccccggcgccagaggccccagaggcccccccggcccctacggcaaccccggcctgcccggcccccccggcgccaagggccagaagggcgaccccggcctgagccccggcaaggcccacgacggcgccaagggcgacatgggcctgcccggcctgagcggcaaccccggcccccccggcagaaagggccacaagggctaccccggccccgccggccaccccggcgagcagggccagcccggccccgagggcagccccggcgccaagggctaccccggcagacagggcctgcccggccccgtgggcgaccccggccccaagggcagcagaggctacatcggcctgcccggcctgttcggcctgcccggcagcgacggcgagagaggcctgcccggcgtgcccggcaagagaggcaagatgggcatgcccggcttccccggcgtgttcggcgagagaggcccccccggcctggacggcaaccccggcgagctgggcctgcccggcccccccggcgtgcccggcctgatcggcgacctgggcgtgctgggccccatcggctaccccggccccaagggcatgaagggcctgatgggcagcgtgggcgagcccggcctgaagggcgacaagggcgagcagggcgtgcccggcgtgagcggcgaccccggcttccagggcgacaagggcagccagggcctgcccggcttccccggcgccagaggcaagcccggccccctgggcaaggtgggcgacaagggcagcatcggcttccccggcccccccggccccgagggcttccccggcgacatcggcccccccggcgacaacggccccgagggcatgaagggcaagcccggcgccagaggcctgcccggccccagaggccagctgggccccgagggcgacgagggccccatgggcccccccggcgcccccggcctggagggccagcccggcagaaagggcttccccggcagacccggcctggacggcgtgaagggcgagcccggcgaccccggcagacccggccccgtgggcgagcagggcttcatgggcttcatcggcctggtgggcgagcccggcatcgtgggcgagaagggcgacagaggcatgatgggcccccccggcgtgcccggccccaagggcagcatgggccaccccggcatgcccggcggcatgggcacccccggcgagcccggcccccagggcccccccggcagcagaggcccccccggcatgagaggcgccaagggcagaagaggccccagaggccccgacggccccgccggcgagcagggcagcagaggcctgaagggcccccccggcccccagggcagacccggcagacccggccagcagggcgtggccggcgagagaggccacctgggcagcagaggcttccccggcatccccggccccagcggcccccccggcaccaagggcctgcccggcgagcccggcccccagggcccccagggccccatcggcccccccggcgagatgggccccaagggcccccccggcgccgtgggcgagcccggcctgcccggcgaggccggcatgaagggcgacctgggccccctgggcacccccggcgagcagggcctgatcggccagagaggcgagcccggcctggagggcgacagcggccccatgggccccgacggcctgaagggcgacagaggcgaccccggccccgacggcgagcacggcgagaagggccaggagggcctgatgggcgaggacggcccccccggcccccccggcgtgaccggcgtgagaggccccgagggcaagagcggcaagcagggcgagaagggcagaaccggcgccaagggcgccaagggctaccagggccagctgggcgagatgggcgtgcccggcgaccccggcccccccggcacccccggccccaagggcagcagaggcagcctgggccccaccggcgcccccggcagaatgggcgcccagggcgagcccggcctggccggctacgacggccacaagggcatcgtgggccccctgggcccccccggccccaagggcgagaagggcgagcagggcgaggacggcaaggccgagggcccccccggcccccccggcgacagaggccccgtgggcgacagaggcgacagaggcgagcccggcgaccccggctaccccggccaggagggcgtgcagggcctgagaggcaagcccggccagcagggccagcccggccaccccggccccagaggctggcccggccccaagggcagcaagggcgccgagggccccaagggcaagcagggcaaggccggcgcccccggcagaagaggcgtgcagggcctgcagggcctgcccggccccagaggcgtggtgggcagacagggcctggagggcatcgccggccccgacggcctgcccggcagagacggccaggccggccagcagggcgagcagggcgacgacggcgaccccggccccatgggccccgccggcaagagaggcaaccccggcgtggccggcctgcccggcgcccagggcccccccggcttcaagggcgagagcggcctgcccggccagctgggcccccccggcaagagaggcaccgagggcagaaccggcctgcccggcaaccagggcgagcccggcagcaagggccagcccggcgacagcggcgagatgggcttccccggcatggccggcctgttcggccccaagggcccccccggcgacatcggcttcaagggcatccagggccccagaggcccccccggcctgatgggcaaggagggcatcgtgggccccctgggcatcctgggccccagcggcctgcccggccccaagggcgacaagggcagcagaggcgactggggcctgcagggccccagaggcccccccggccccagaggcagacccggcccccccgtggaccccggcggccccagatacatcccctgcctgttcctggcccagcagcaggacgacctgggcgccgccttccagacctggatggacaccagcggcgccctgagacccgagagctacagctaccccgacagactggtgctggaccagggcggcgagatcttcaagaccctgcactacctgagcaacctgatccagagcatcaagacccccctgggcaccaaggagaaccccgccagagtgtgcagagacctgatggactgcgagcagaagatggtggacggcacctactgggtggaccccaacctgggctgcagcagcgacaccatcgaggtgagctgcaacttcacccacggcggccagacctgcctgaagcccatcaccgccagcaaggtggagttcgccatcagcagagtgcagatgaacttcctgcacctgctgagcagcgaggtgacccagcacatcaccatccactgcctgaacatgaccgtgtggcaggagggcaccggccagacccccgccaagcaggccgtgagattcagagcctggaacggccagatcttcgaggccggcggccagttcagacccgaggtgagcatggacggctgcaaggtgcaggacggcagatggcaccagaccctgttcaccttcagaacccaggacccccagcagctgcccatcatcagcgtggacaacctgccccccgccagcagcggcaagcagtacagactggaggtgggccccgcctgcttcctgtag

SEQ ID NO: 226056 - DNA, 5583 bp, Artificial Sequence
  derived and/or modified sequence
atgggggctggttcggcacgaggggcaaggggcaccgcagcggctgccgctgcaaggggaggagggttcttgttcagctggatcctggttagttttgcatgccacttggcttccacccagggggcaccagaggatgtagatatcctgcagagattaggtctctcttggacaaaagcaggcagccccgccccaccaggcgtgattcccttccagagcggatttatcttcacgcaaagagcgcgcttacaggcaccaaccggcaccgtgatccctgcagctctggggaccgagctagccctcgttctcagtctgtgctcccaccgcgtgaatcatgcgtttctgttcgctgttagatctcagaaacgaaagctgcaactcggtctgcagttcttgcccgggaagacagtggtgcacctgggctcacgaagatccgtggcttttgaccttgatatgcatgacgggaggtggcatcatctggcactggagctccgaggccgaacggtcaccttggtgactgcttgtggccaacgaagagtacctgttcttttgcccttccatcgcgaccccgccttggacccgggaggctcattcctctttggcaaaatgaacccgcacgcagtgcagttcgaaggcgctttatgccaattctcgatttaccctgtgacacaggtggctcataactactgtacccacctgagaaaacagtgcggccaggcagatacctaccagagcccgctgggccctctgttctctcaggacagcggccgcccgttcacgtttcagtcggatctcgctctgctcggactggagaacctgaccacagcaaccccagcccttggctcactgcctgctggtcgaggacctcgtggaaccgtggcaccagctacacccacaaagccccaaagaacatcaccaaccaatccgcaccagcacatggccgtcggcggacccgcccagaccccgcttctgccagctaaactgtccgcctcgaatgctctggacccaatgctcccagctagcgtcggcgggtccacgcgtactccccgacccgctgcagctcagcccagccaaaaaatcacagcgacaaaaatccctaagagcctcccaacgaagcctagcgcccctagtacctctatcgtccctattaagagccctcatcccacacagaagaccgctccttcctcattcactaaatccgcactacctactcagaaacaggtgccgcctacatctcgccctgtccccgctcgcgtgtcacggcccgccgagaagcccattcagcgtaatcccgggatgccacgcccgcctccacctagtaccaggcctctaccccctacaacctcttcaagcaagaagcccatccctaccctggccaggactgaagccaagatcacatctcatgcaagtaaacccgcctcagccaggaccagcacccacaaaccaccaccctttaccgccctgtccagctctccagcccccacaccgggcagtacacgcagtacaaggccacccgccaccatggtgccaccaacatccgggacgtcaactcctaggacagccccggctgtgccaacaccaggtagtgcgccgaccggtagtaagaagcccatcggcagcgaagccagcaagaaggctggacccaaatcttcacctcggaagccagtgccactgcgccctggtaaggccgcccgcgacgtgcccctgtccgaccttactacgcgcccatcccccagacagcctcagccctcccagcagaccacaccagcccttgtgctggctccagcacagttcctcagttcgtcacctcggccgacttccagcggttacagcatatttcatctagcaggtagtaccccattccccctgctgatggggcctcccgggccgaaaggcgactgtggtttgccaggaccaccgggcttacccggcctgccaggaattcctggtgccaggggtcctcgcggaccccccggcccatatgggaatcccggcctgcccgggcccccaggagccaagggacagaaaggtgacccaggactttccccgggtaaagcccatgatggcgcgaagggagatatggggctccccggcttgagcggtaacccaggacctccaggcaggaaggggcacaaagggtatcctggacccgccgggcatcccggcgagcagggccagcctgggccggaaggctctcctggcgccaaggggtacccagggagacagggactgccaggccctgtaggggacccagggccaaaggggtcacgcggttacatcgggcttccaggccttttcggccttcccggcagcgacggcgaacggggtctccctggggtgcctggcaagcgaggaaagatgggcatgccaggattcccaggcgtgttcggcgagaggggaccacccggcctggatgggaaccctggtgagttggggctgccaggtccccctggtgtcccgggtctcatcggggacctaggcgtgttgggtcccatcggttatcctgggcccaaaggaatgaaaggactgatggggtctgtgggcgaaccagggcttaagggcgataaaggcgagcaaggcgtgcccggtgtatccggggatcccggctttcagggcgacaaagggtcccagggactgccaggtttccccggcgcccggggcaaaccaggcccacttggcaaagtgggcgataaaggcagcatcggattccccggacctccagggcccgaaggcttccccggggacatcggtcctcctggcgacaatggtcctgagggcatgaaaggaaaaccaggagcacgcggccttcctggtccccgcggccaactgggacctgaaggagacgaggggccgatgggacccccaggagctcctggtctagaaggccagcctgggagaaaggggtttccagggagacccggactcgacggagttaagggggaaccaggcgatccaggaagacccggccctgtgggggagcaaggatttatggggtttattggtctcgtgggagaacctggaatagtgggggagaagggggacagggggatgatgggcccgcccggcgtgcccgggccgaaagggtccatggggcaccctgggatgcctggcggcatgggaaccccaggcgagccggggccccagggaccaccaggctcccgaggaccacctggcatgaggggcgcaaaaggaagacgggggcccaggggaccggatgggccagctggcgaacagggttccaggggcctcaagggcccgcccggcccgcaggggcgcccaggccggcctggacaacaaggagtcgctggtgaaagaggacacctggggagtagaggatttcccgggatccccggtccatctggtccgccagggactaagggtttaccgggcgagcccgggcctcaaggtccccaaggccccatcggccccccaggcgaaatgggtcctaaaggcccgccaggtgccgtgggagagcccggactgcctggcgaagccggaatgaagggagatctggggcctctcggcacccccggcgaacagggcctgatcggacagagaggggagccaggcctggagggagattccggacccatgggccctgacggactaaaaggagatagaggggaccccgggcctgacggtgagcacggagagaagggacaggaaggacttatgggcgaggatggcccccccggaccacctggagttacaggcgttcgaggacccgagggtaaatccgggaaacagggtgagaaaggtaggacaggagcgaagggagcaaagggctatcaaggccagctcggagaaatgggggtgcccggtgaccctggaccaccagggaccccaggtcctaaagggagccggggatcgctgggacccacaggcgctccaggccgaatgggagcacagggggagcccggtctggctggatacgatggacataagggtattgttggacctctgggccctccggggccaaagggagaaaagggcgagcagggcgaggacggcaaagctgagggaccacccggccctccgggggacagagggcctgtgggggaccggggcgacagaggggagcccggcgaccccggatatccaggacaagagggagtgcagggcctgcggggaaaacctggtcagcagggtcaacccgggcacccaggaccaagaggctggccggggccgaaaggtagcaagggagccgaagggcccaagggtaaacaaggaaaggccggagcccctggacggcggggagtgcagggactccagggactgcccggccctcgaggcgtggtcgggcgccagggtctggagggcatagccgggcccgacggcttgccaggtagagacggacaagccggacaacagggagagcagggggacgacggagaccctggtcccatgggccctgcgggtaaaaggggtaatcccggcgtggccggtttaccgggcgcgcagggtccaccaggctttaagggggagtctgggctgccagggcagcttgggcctcctgggaagcgaggaaccgaagggcgcacagggctccctggaaatcagggcgagcctggttcaaaaggccagcctggtgatagtggagagatggggttccccggaatggccggtctgttcggtcctaagggaccgcccggggacattgggttcaaaggcatacaggggcctcgaggccccccgggccttatgggtaaagagggcatcgttgggcccctgggaatcttgggaccctctggtttgcccggcccaaagggggataagggctccagaggagattgggggctgcagggcccaagggggcccccaggtcctaggggaaggccaggccccccaggccccccaggcggccctatccagctgcagcaggacgatttgggggcagcattccagacctggatggatacctctggagcactccgaccagaatcctattcttatccagataggctggtcctggaccaaggcggagagattttcaagactcttcactacctgtcaaacctgatccagtccatcaagaccccgctcgggaccaaggaaaatcccgcccgagtgtgccgcgatttaatggattgtgaacaaaagatggtcgacggcacatactgggttgatcccaatctgggatgcagtagcgacaccattgaggtgagctgtaattttacccatggcggacagacttgtctgaaacccatcacggcttccaaggtggagtttgctatatctcgagtgcaaatgaatttcctgcacctgctgagttctgaagtgacacaacatatcacaattcactgcctgaacatgactgtgtggcaggagggtactggacagacacctgctaagcaagcagtgcggtttcgagcttggaatggccagattttcgaagctggcggtcagttccggccagaggtcagcatggacggatgcaaggtccaggacgggaggtggcatcagactctctttacgttccgcacacaagatccacagcagctccccatcataagcgttgataacctgcctcccgcctctagtggcaagcagtaccggctcgaggtcgggcctgcctgttttttatag

SEQ ID NO: 226057 - DNA, 5604 bp, Artificial Sequence
  derived and/or modified sequence
atgggggccggctccgcgcggggggctcgcggaactgctgccgctgcagctgcaaggggagggggattcttgttttcttggatcttggtttccttcgcatgccacctggcttctacacaaggagcccccgaggatgtggatatcctccagcggctgggcctctcttggaccaaagccggaagtcccgctcccccaggtgtgatcccttttcagtctggctttatttttacacaaagagccagactgcaggccccgacaggtacagtcatcccagcagcactgggcacagagttggcccttgtcctgtcactttgctcgcaccgggtgaatcatgccttcctgttcgcggtgcggagtcaaaaacggaaactgcaattaggactgcagttcctgccggggaagacggttgtgcacctgggcagcagacgaagtgttgcctttgaccttgacatgcatgacggaagatggcaccatctcgccttagaattacgaggcagaaccgtcaccctggtcacggcatgtggccaacggagagtcccagtgctcctgccatttcaccgcgatcccgccctggatcccggtggttcttttttgtttggcaaaatgaatccccacgctgttcagttcgagggtgcgctctgtcaatttagtatctacccagtgacccaagtagcccacaactactgcacacacttaagaaaacagtgtggtcaggctgacacgtatcagagccctctaggaccgctgtttagccaggacagcggacggccctttacttttcagtctgatctggcgttgttggggctcgagaatctcacaaccgccactcccgccctgggcagtctccctgcaggacgcggcccaaggggaaccgtcgcccctgccacaccaaccaagccccagcggacgagtccgactaacccacaccagcatatggctgttggtggacccgctcaaactcctttgttacccgccaagctttcagcttctaatgctctggacccaatgttgcctgcgagtgtcggcggctctacaaggacaccgcggcccgcggctgcacagccctctcagaaaatcaccgccactaagattcccaagtcactgcctacaaaaccttcggcgccatccacctccattgtgccgataaagagtccacacccgacacaaaaaacggctccaagcagcttcacaaagtccgcactacccacccagaaacaagtcccccctacctccagacctgtccctgcaagggtgtctagaccagcagagaagccaatccaaagaaacccaggcatgcctcgccccccacctccctctacacgccctctcccccccactacaagctccagtaagaagcccatccctacattagctcgcacagaagcaaagattacctcacacgctagcaagcctgcctctgcccggactagtactcacaagccgcctcctttcaccgccctttccagcagtcctgccccaacccctggttctacacgcagcacccgcccacctgcaaccatggttcctcccacttcaggtacatcgacacctcggactgcaccggccgtgcccacccccggatccgcacccacgggttccaagaagcccattggatcagaggcatcaaaaaaagcgggacctaagtcaagcccccggaaacccgtccctttgcggccgggaaaagcagcacgggatgttcccctctcggacctcaccacaagacctagccccagacagccacagcctagccagcaaaccactcccgctctggtgctggccccagcccaattcctgtcctcaagccctagacccacctcctctggctacagcatttttcacttagctggttctacccccttccctctgctcatggggccccccggcccaaagggggattgcggactgccaggcccacctgggttgcctggcctgccgggcattccgggcgcccgcggcccacggggtccacccggaccttacgggaatccaggcctgccaggaccgccgggcgccaagggacagaaaggtgatccggggctaagtcccgggaaagcccacgacggcgcaaaaggggacatggggcttccaggcctgtccggcaaccctggcccgcctggacgcaagggccataaaggatatcctggacccgcgggccatccaggggagcagggccagcctgggccagagggatcacctggggcaaaaggataccctgggaggcagggccttccaggaccggtgggagaccctggacccaaaggcagtagggggtatatcggccttccaggactttttggccttcctggttctgacggtgagagaggtttgcccggggtaccaggcaaaagaggaaagatgggaatgccgggtttccccggcgtgtttggcgaaagagggccccccggcctggatgggaatcctggtgaacttggcctgcctggccctcctggggtccctggcttgataggcgatcttggcgtgttgggacctattggatatcctgggccaaaggggatgaagggactaatgggctccgtcggggaacccgggctcaagggggacaagggggaacaaggcgtgcccggggttagtggggatccaggattccagggcgacaaaggatcacaaggcctcccgggtttccctggggcgagaggaaagcctggcccgctggggaaagtgggagacaagggatctattggcttcccgggcccccctggtccagaggggttccccggggatattggtccaccgggggataacggtccggagggcatgaaggggaaaccgggtgctcgcggcctgcctggacctcgaggacagcttggaccggaaggcgacgagggaccgatgggccccccaggggccccaggcctcgaagggcaacctgggcgtaagggatttcccgggcgccccggcctggacggagtgaaaggcgaacccggcgacccaggtcgcccaggaccggtaggagagcaggggtttatgggattcattggcctggtgggagaaccagggatcgtgggcgagaagggtgatcgtggtatgatgggccctcctggggtcccaggcccaaaaggatcgatgggtcacccaggaatgccgggtgggatgggtacccctggagaacccggtcctcagggccctccaggaagtcgcggacctcccggcatgcggggggcaaaaggacgaaggggccctagaggtcccgatgggcccgccggagaacaggggtcacggggcctgaaggggccgccaggtccacagggtagacccgggcgacctgggcagcagggcgttgccggggagagggggcatcttggcagcagagggttccctggcatcccgggcccaagtggacctccaggaacaaaaggccttcccggtgagcctggtccacaggggcctcaggggccaatcggtccacctggtgagatgggaccaaaagggccaccaggagccgtcggtgagcctggcctgccaggcgaggcaggaatgaagggcgatctgggaccccttgggacccctggagaacaaggtcttatcggacagagaggagaaccaggattggagggggatagcggacccatgggtcctgacggcctgaagggggataggggtgatccaggaccagacggggagcacggcgagaagggccaggaggggctaatgggcgaagatggtcccccaggccccccaggcgtcactggtgtgcgtgggccggagggcaagtcaggcaaacaaggcgaaaaaggtcggaccggagcaaagggcgccaaaggataccaaggccagcttggggagatgggagtgccaggagaccctggacccccaggaacccctggcccaaaaggatcacgggggagtcttggtcctaccggagcaccaggtaggatgggcgcacagggcgaacccggcctagccggctatgatggccataaaggaatcgtgggcccacttgggccccccggcccaaagggagagaagggcgaacaaggggaggatggaaaggccgaaggcccaccaggcccccctggagaccgaggaccggttggcgacagaggcgacagaggagagcccggggatcctggataccccggccaagagggggtgcaagggcttcggggcaaaccaggccaacaagggcagccgggccacccaggacccagaggatggcccggccctaagggctcaaaaggagcggaaggaccaaaggggaagcagggcaaggcaggggcacctggacgccgtggagtacaaggcctacagggcctcccgggaccccgtggtgtggtcggacgacagggactagagggaatagccggccctgatggtctgcctggaagggatggacaggcaggccagcagggcgaacagggcgacgacggcgatcccggacccatggggcctgctgggaagagggggaatcctggagtggctggtctccctggggcccaagggcccccaggtttcaagggcgagtcgggattacctggccagcttggccctcctggaaaaagggggacagagggaaggacaggattgcccggtaatcagggcgaaccaggatccaaggggcagccaggtgattcaggggagatgggcttccctggaatggctggtctgtttgggccgaaaggaccgccaggcgatatcggcttcaagggtatccaaggaccaagaggcccccctggcctgatgggcaaggaaggaatcgtaggccccctgggcatactcggccccagtgggctccctgggcccaaaggcgataagggtagcaggggcgactgggggcttcagggaccgaggggcccccctggcccgagggggagaccaggcccccctgtcgatccaggaggaccgcgatacataccttgtttatttctggctcagcaacaagacgacttaggcgccgcatttcagacctggatggacacatcgggagctcttagaccagaatcttactcctatccggataggcttgtgttagaccaggggggagaaatctttaaaacgctccattacctgagcaatctgattcagtcaatcaagacaccgctggggactaaagagaatcctgccagagtctgtagggatctgatggactgcgagcagaaaatggtggacggaacttattgggttgatccaaatctgggctgtagcagtgacactatagaggtctcctgcaatttcacccatggaggccaaacatgcttaaaacccattacagcctccaaagtggaattcgcaatctctagggtccagatgaattttctgcacctcctctcttccgaggtcacccagcacatcactattcactgcttaaatatgacagtgtggcaggaggggacggggcaaacccccgccaaacaggcagtacgcttcagagcttggaacggccagattttcgaagctggcggccagtttagacccgaggtctccatggatggttgtaaggttcaggatggtaggtggcatcagaccctatttaccttccgcactcaggaccctcagcagctgcccatcatctctgtagacaatctgcctcctgcttccagcggaaaacaatacaggcttgaggtcggccccgcttgttttctgtag

SEQ ID NO: 226058 - DNA, 5583 bp, Artificial Sequence
  derived and/or modified sequence
atgggcgccggcagcgcccggggggcccggggcacagctgctgctgctgctgcccggggcggcggcttcctgttctcctggatcctggtgtcctttgcctgccacctggccagcacccagggcgccccagaagatgtggacatcctgcagaggctgggcctgtcctggaccaaggccggcagccctgcccctcctggggtcatccccttccagagcggcttcatcttcacccagagggcccggctgcaggcccccaccggcaccgtcatcccagctgccctgggcacagagctggccctggtgctgagcctgtgcagccaccgggtgaaccacgccttcctgtttgctgtgcgcagccagaagaggaagctgcagctgggcctgcagttcctgcccgggaagacagtggtgcacctgggcagccgccgctctgtggcctttgacctggacatgcatgatggccgctggcaccacctggccctggagctgcggggccgcacagtgaccctggtgacagcctgtggccagaggagagtgcctgtgctgctgcccttccaccgggaccctgccctggaccccggcggcagcttcctgtttgggaagatgaacccccatgctgtgcagtttgaaggagccctgtgccagttcagcatctaccctgtgacccaggtggcccacaactactgcacccacctgaggaagcagtgtggccaggccgacacctaccagagccccctgggccccctcttcagccaggacagcggccggcccttcaccttccagagcgacctggccctgctgggcctggagaacctgaccacagccaccccagccctgggcagcctgcctgctggccggggcccccggggcaccgtggccccagccacccccaccaagccccagaggaccagccccaccaacccccaccagcacatggctgtgggcggccctgcccagacccccctgctgcctgccaagctgagcgccagcaatgccctggaccccatgctgcctgcctctgtgggcggcagcaccaggacccccaggcctgctgctgcccagcccagccagaagatcacagccaccaagatccccaagagcctgcccaccaagcccagcgcccccagcaccagcatcgtgcccatcaagagcccccaccccacccagaagacagcccccagcagcttcaccaagagcgccctgcccacccagaagcaggtgccccccaccagcaggcctgtgcctgcccgggtgtccaggcctgctgagaagcccatccagaggaaccctggcatgcccaggcctcctccacccagcacccggcccctgccccccaccaccagcagcagcaagaagcccatccccaccctggccaggacagaggccaagatcaccagccacgccagcaagccagccagcgcccggaccagcacccacaagcccccacccttcaccgccctgagcagcagccctgcccccaccccaggcagcaccaggagcacccggcccccagccaccatggtgccccccaccagcggcaccagcacccccaggacagccccagctgtgcccaccccaggcagcgcccccaccggcagcaagaagcccatcggcagcgaggccagcaagaaggccggccccaagagcagccccaggaagcctgtgcccctgcggcctgggaaggccgccagagatgtgcccctgagtgacctgaccacccggcccagcccccggcagccccagcccagccagcagaccaccccagccctggtgctggccccagcccagttcctgagcagcagcccccggcccaccagcagcggctacagcatcttccacctggccggcagcacccccttccccctgctgatgggccccccaggccccaagggggactgtggcctgcccggccccccaggcctgcccggcctgcccggcatccctggggcccggggcccccggggccccccaggcccctacggcaaccctggcctgcccggccccccaggggccaagggccagaagggggaccccggcctgagccctgggaaggcccatgatggagccaagggggacatgggcctgcccggcctgagcggcaaccctggccccccaggcaggaagggccacaagggctacccaggccctgctggccaccctggagagcagggccagcccggccctgagggcagccctggggccaagggctacccaggccggcagggcctgcccggccctgtgggggaccccggccccaagggcagccggggctacatcggcctgcccggcctgtttggcctgcccggcagtgatggagagcggggcctgcccggggtgcctgggaagaggggcaagatgggcatgcctggcttccctggggtgtttggagagcggggccccccaggcctggatggcaaccctggagagctgggcctgcccggccccccaggagtgcccggcctcatcggggacctgggcgtgctgggccccatcggctacccaggccccaagggcatgaagggcctgatgggctctgtgggggagcccggcctgaagggggacaagggggagcagggcgtgcctggggtgtctggggaccccggcttccagggcgacaagggcagccagggcctgcccggcttccctggggcccggggcaagccaggccccctgggcaaggtgggggacaagggcagcatcggcttccctggccccccaggccctgagggcttccctggggacatcggccccccaggggacaatggacctgagggcatgaagggcaagccaggggcccggggcctgcccggcccccggggccagctgggcccagaaggagatgagggccccatgggccccccaggggcccctggcctggagggccagcccggcaggaagggcttccctggccggcccggcctggatggagtgaagggggagcccggggaccccggccggcccggccctgtgggggagcagggcttcatgggcttcatcggcctggtgggggagcccggcatcgtgggggagaagggggaccggggcatgatgggccccccaggagtgcccggccccaagggctccatgggccaccctggcatgcctgggggcatgggcaccccaggagagcccggcccccagggccccccaggcagccggggccccccaggcatgagaggagccaagggccggcggggcccccggggcccagatggccctgctggggagcagggcagccggggcctgaagggccccccaggcccccagggccggcccggccggcccggccagcagggcgtggccggggagcggggccacctgggcagccggggcttccctggcatccctggccccagcggccccccaggcaccaagggcctgcccggggagcccggcccccagggcccccagggccccatcggccccccaggagagatgggccccaagggccccccaggagctgtgggggagcccggcctgcctggagaggccggcatgaagggggacctgggccccctgggcaccccaggagagcagggcctcatcggccagagaggagagcccggcctggagggggacagcggccccatgggcccagatggcctgaagggggacagaggagaccccggcccagatggagaacatggagagaagggccaggagggcctgatgggagaagatggccccccaggccccccaggagtgactggagtgcggggccctgagggcaagagcggcaagcagggcgagaagggccgcactggagccaagggggccaagggctaccagggccagctgggggagatgggcgtgcctggggaccccggccccccaggcaccccaggccccaagggcagccggggcagcctgggccccactggagcccctggccgcatgggcgcccagggcgagcccggcctggccggctatgatggccacaagggcatcgtgggccccctgggccccccaggccccaagggggagaagggggagcagggagaagatggcaaggccgagggccccccaggccccccaggggaccggggccctgtgggggacagaggagacagaggagagcccggggaccccggctacccaggccaggagggcgtgcagggcctgcggggcaagccaggccagcagggccagcccggccaccctggcccccggggctggccaggccccaagggcagcaaaggagctgagggccccaagggcaagcagggcaaggccggggcccctggccggcggggcgtgcagggcctgcagggcctgcccggcccccggggcgtggtgggccggcagggcctggagggcattgctggcccagatggcctgcccggcagagatggccaggccggccagcagggcgagcagggagatgatggagaccccggccccatgggccctgctgggaagaggggcaaccctggggtggccggcctgcccggggcccagggccccccaggcttcaagggggagagcggcctgcccggccagctgggccccccaggcaagaggggcacagagggccgcacaggcctgcccggcaaccagggcgagcccggcagcaagggccagcccggggacagcggggagatgggcttccctggcatggccggcctgtttggccccaagggccccccaggggacatcggcttcaagggcatccagggcccccggggccccccaggcctgatgggcaaggagggcatcgtgggccccctgggcatcctgggccccagcggcctgcccggccccaagggggacaagggcagcagaggagactggggcctgcagggcccccggggccccccaggcccccggggccggcccggccccccaggccccccaggcggccccatccagctgcagcaggatgacctgggcgccgccttccagacctggatggacaccagcggggccctgcggcctgagagctacagctacccagaccggctggtgctggaccagggcggggagatcttcaagaccctgcactacctgagcaacctgatccagagcatcaagacccccctgggcaccaaggagaacccagcccgggtgtgccgggacctgatggactgtgagcagaagatggtggatggcacctactgggtggaccccaacctgggctgcagcagtgacaccatcgaggtgtcctgcaacttcacccacggcggccagacctgcctgaagcccatcacagccagcaaggtggagtttgccatcagccgggtgcagatgaacttcctgcacctgctgagcagcgaggtgacccagcacatcaccatccactgcctgaacatgacagtgtggcaggagggcaccggccagaccccagccaagcaggccgtgcgcttccgggcctggaatggccagatctttgaggccggcggccagttccggcctgaggtgtccatggatggctgcaaggtgcaggacggccgctggcaccagaccctcttcaccttccgcacccaggacccccagcagctgcccatcatctctgtggacaacctgcccccagccagcagcggcaagcagtaccgcctggaggtgggccctgcctgcttcctgtag

SEQ ID NO: 226059 - DNA, 5604 bp, Artificial Sequence
  derived and/or modified sequence
atgggcgccggcagcgcccggggggcccggggcacagctgctgctgctgctgcccggggcggcggcttcctgttctcctggatcctggtgtcctttgcctgccacctggccagcacccagggcgccccagaagatgtggacatcctgcagaggctgggcctgtcctggaccaaggccggcagccctgcccctcctggggtcatccccttccagagcggcttcatcttcacccagagggcccggctgcaggcccccaccggcaccgtcatcccagctgccctgggcacagagctggccctggtgctgagcctgtgcagccaccgggtgaaccacgccttcctgtttgctgtgcgcagccagaagaggaagctgcagctgggcctgcagttcctgcccgggaagacagtggtgcacctgggcagccgccgctctgtggcctttgacctggacatgcatgatggccgctggcaccacctggccctggagctgcggggccgcacagtgaccctggtgacagcctgtggccagaggagagtgcctgtgctgctgcccttccaccgggaccctgccctggaccccggcggcagcttcctgtttgggaagatgaacccccatgctgtgcagtttgaaggagccctgtgccagttcagcatctaccctgtgacccaggtggcccacaactactgcacccacctgaggaagcagtgtggccaggccgacacctaccagagccccctgggccccctcttcagccaggacagcggccggcccttcaccttccagagcgacctggccctgctgggcctggagaacctgaccacagccaccccagccctgggcagcctgcctgctggccggggcccccggggcaccgtggccccagccacccccaccaagccccagaggaccagccccaccaacccccaccagcacatggctgtgggcggccctgcccagacccccctgctgcctgccaagctgagcgccagcaatgccctggaccccatgctgcctgcctctgtgggcggcagcaccaggacccccaggcctgctgctgcccagcccagccagaagatcacagccaccaagatccccaagagcctgcccaccaagcccagcgcccccagcaccagcatcgtgcccatcaagagcccccaccccacccagaagacagcccccagcagcttcaccaagagcgccctgcccacccagaagcaggtgccccccaccagcaggcctgtgcctgcccgggtgtccaggcctgctgagaagcccatccagaggaaccctggcatgcccaggcctcctccacccagcacccggcccctgccccccaccaccagcagcagcaagaagcccatccccaccctggccaggacagaggccaagatcaccagccacgccagcaagccagccagcgcccggaccagcacccacaagcccccacccttcaccgccctgagcagcagccctgcccccaccccaggcagcaccaggagcacccggcccccagccaccatggtgccccccaccagcggcaccagcacccccaggacagccccagctgtgcccaccccaggcagcgcccccaccggcagcaagaagcccatcggcagcgaggccagcaagaaggccggccccaagagcagccccaggaagcctgtgcccctgcggcctgggaaggccgccagagatgtgcccctgagtgacctgaccacccggcccagcccccggcagccccagcccagccagcagaccaccccagccctggtgctggccccagcccagttcctgagcagcagcccccggcccaccagcagcggctacagcatcttccacctggccggcagcacccccttccccctgctgatgggccccccaggccccaagggggactgtggcctgcccggccccccaggcctgcccggcctgcccggcatccctggggcccggggcccccggggccccccaggcccctacggcaaccctggcctgcccggccccccaggggccaagggccagaagggggaccccggcctgagccctgggaaggcccatgatggagccaagggggacatgggcctgcccggcctgagcggcaaccctggccccccaggcaggaagggccacaagggctacccaggccctgctggccaccctggagagcagggccagcccggccctgagggcagccctggggccaagggctacccaggccggcagggcctgcccggccctgtgggggaccccggccccaagggcagccggggctacatcggcctgcccggcctgtttggcctgcccggcagtgatggagagcggggcctgcccggggtgcctgggaagaggggcaagatgggcatgcctggcttccctggggtgtttggagagcggggccccccaggcctggatggcaaccctggagagctgggcctgcccggccccccaggagtgcccggcctcatcggggacctgggcgtgctgggccccatcggctacccaggccccaagggcatgaagggcctgatgggctctgtgggggagcccggcctgaagggggacaagggggagcagggcgtgcctggggtgtctggggaccccggcttccagggcgacaagggcagccagggcctgcccggcttccctggggcccggggcaagccaggccccctgggcaaggtgggggacaagggcagcatcggcttccctggccccccaggccctgagggcttccctggggacatcggccccccaggggacaatggacctgagggcatgaagggcaagccaggggcccggggcctgcccggcccccggggccagctgggcccagaaggagatgagggccccatgggccccccaggggcccctggcctggagggccagcccggcaggaagggcttccctggccggcccggcctggatggagtgaagggggagcccggggaccccggccggcccggccctgtgggggagcagggcttcatgggcttcatcggcctggtgggggagcccggcatcgtgggggagaagggggaccggggcatgatgggccccccaggagtgcccggccccaagggctccatgggccaccctggcatgcctgggggcatgggcaccccaggagagcccggcccccagggccccccaggcagccggggccccccaggcatgagaggagccaagggccggcggggcccccggggcccagatggccctgctggggagcagggcagccggggcctgaagggccccccaggcccccagggccggcccggccggcccggccagcagggcgtggccggggagcggggccacctgggcagccggggcttccctggcatccctggccccagcggccccccaggcaccaagggcctgcccggggagcccggcccccagggcccccagggccccatcggccccccaggagagatgggccccaagggccccccaggagctgtgggggagcccggcctgcctggagaggccggcatgaagggggacctgggccccctgggcaccccaggagagcagggcctcatcggccagagaggagagcccggcctggagggggacagcggccccatgggcccagatggcctgaagggggacagaggagaccccggcccagatggagaacatggagagaagggccaggagggcctgatgggagaagatggccccccaggccccccaggagtgactggagtgcggggccctgagggcaagagcggcaagcagggcgagaagggccgcactggagccaagggggccaagggctaccagggccagctgggggagatgggcgtgcctggggaccccggccccccaggcaccccaggccccaagggcagccggggcagcctgggccccactggagcccctggccgcatgggcgcccagggcgagcccggcctggccggctatgatggccacaagggcatcgtgggccccctgggccccccaggccccaagggggagaagggggagcagggagaagatggcaaggccgagggccccccaggccccccaggggaccggggccctgtgggggacagaggagacagaggagagcccggggaccccggctacccaggccaggagggcgtgcagggcctgcggggcaagccaggccagcagggccagcccggccaccctggcccccggggctggccaggccccaagggcagcaaaggagctgagggccccaagggcaagcagggcaaggccggggcccctggccggcggggcgtgcagggcctgcagggcctgcccggcccccggggcgtggtgggccggcagggcctggagggcattgctggcccagatggcctgcccggcagagatggccaggccggccagcagggcgagcagggagatgatggagaccccggccccatgggccctgctgggaagaggggcaaccctggggtggccggcctgcccggggcccagggccccccaggcttcaagggggagagcggcctgcccggccagctgggccccccaggcaagaggggcacagagggccgcacaggcctgcccggcaaccagggcgagcccggcagcaagggccagcccggggacagcggggagatgggcttccctggcatggccggcctgtttggccccaagggccccccaggggacatcggcttcaagggcatccagggcccccggggccccccaggcctgatgggcaaggagggcatcgtgggccccctgggcatcctgggccccagcggcctgcccggccccaagggggacaagggcagcagaggagactggggcctgcagggcccccggggccccccaggcccccggggccggcccggcccccctgtggaccccggcggcccccgctacatcccctgcctcttcctggcccagcagcaggatgacctgggcgccgccttccagacctggatggacaccagcggggccctgcggcctgagagctacagctacccagaccggctggtgctggaccagggcggggagatcttcaagaccctgcactacctgagcaacctgatccagagcatcaagacccccctgggcaccaaggaaaatcctgcccgggtgtgccgggacctgatggactgtgagcagaagatggtggatggcacctactgggtggaccccaacctgggctgcagcagtgacaccatcgaggtgtcctgcaacttcacccatggaggccagacctgcctgaagcccatcacagccagcaaggtggagtttgccatcagccgggtgcagatgaacttcctgcacctgctgagcagcgaggtgacccagcacatcaccatccactgcctgaacatgacagtgtggcaggagggcaccggccagaccccagccaagcaggccgtgcgcttccgggcctggaatggccagatctttgaagctgggggccagttccggcctgaggtgtccatggatggctgcaaggtgcaggacggccgctggcaccagaccctcttcaccttccgcacccaggacccccagcagctgcccatcatctctgtggacaacctgcccccagccagcagcggcaagcagtaccgcctggaggtgggccctgcctgcttcctgtag

SEQ ID NO: 226060 - DNA, 5583 bp, Artificial Sequence
  derived and/or modified sequence
atgggcgccggcagcgcccggggcgcccggggcaccgccgccgccgctgctgcacgggggggggggtttctgttttcatggattctagtaagttttgcctgccacttggccagcacgcagggggcccctgaggacgtcgacatactgcagcgattggggttatcctggaccaaggctggttcacctgctccgcccggcgtgatccctttccagtcaggttttatcttcacacagagggcacgactccaggcacctaccgggactgtgattcccgctgccctcggtaccgagttggccctagtactgtcattgtgtagccatcgagtgaaccatgcattcctgttcgcagtgcgaagccaaaagcgtaagttgcagctcggcctgcagtttctccccggtaagacagtagtccatttggggtccaggcgctcagtggcttttgacctggatatgcacgacggtaggtggcaccacttggccttggagttgagaggcaggaccgtcaccttagtcacagcttgtggtcaaaggagagttcctgtgttgctcccattccatagagatcccgcattagacccaggaggttcctttctgttcgggaagatgaacccccacgcggtacagtttgaaggcgcactgtgccaattctccatctaccctgtaacgcaggtggcccacaattactgcacccacctcaggaagcagtgcgggcaggcagatacttaccaaagcccactgggcccacttttttcccaagattctggtcgtcctttcacttttcagtcagatctggccctcctgggcttggaaaacctcacaaccgccactccggcccttggttccctccccgctggtagggggccaaggggcacagtcgctccagcaacacccaccaaaccccagaggaccagcccaactaaccctcaccaacacatggctgtgggtgggccggctcagactccgcttctaccagccaaactatccgcttctaacgcactggatccaatgctcccagcctccgtaggcggttcgacgaggacaccccggcccgcggccgcccagccttcacagaagattacagcaaccaagattcctaaatccctgcccacaaaaccatccgccccttcaaccagcatcgttcccatcaagagccctcatcctacccagaagacagccccttcttcatttaccaagagtgccctccccacccagaagcaggtaccacccacatctagacccgtacccgctcgggtatctcggcccgctgagaaacccatacagcgaaaccccgggatgcctagaccccctcccccctccacacggcccctgcctcccaccacatcaagttctaagaagcccatccctactctcgcccggactgaggccaaaattacatcccacgcctctaagcccgcgagcgcccggacctcaacccataaacctcctccatttaccgcccttagcagttctcccgcacccacccctggcagcacgcgatctactcgacccccggcgactatggtcccaccgacctcagggaccagcacccctcgtactgccccagccgtccctaccccagggtctgcacccactgggagcaaaaagccgattggcagcgaggccagtaaaaaagccgggccgaagtcctctccgcggaagccagtccctctgagaccgggcaaagccgcacgcgatgtgccgctgtccgacctgaccacaagaccatcccctcgccaaccacagccgtcccagcagacaactcccgcgctcgtgcttgcccccgcccagttcctgtcttcatcaccgcgcccaacttcatccggatactcaatttttcatctcgctggcagcacgccattccccctactgatggggccccctggtcccaagggcgactgcggactaccaggacctccgggattgccaggacttcccgggattccaggtgcgagaggacccagaggaccacccggcccatatggtaacccgggtctcccagggcctcctggcgccaagggtcagaaaggtgatcccggattgagccctgggaaggcccacgacggagctaaaggggatatgggattgcccggactctccggaaacccagggccacccggacgcaaggggcacaagggatacccaggacccgcaggacatcctggtgaacagggtcagcccggccccgaagggtcccctggagctaaaggatatcctggtcgccagggcctccccggtccagtcggtgaccctggacccaaaggcagccgcgggtacattggactccctggcctttttggtcttcccggctctgatggggagcgaggccttccgggcgtgccaggcaagcgcggcaagatgggcatgccaggtttccccggagtgtttggcgagagggggcctccaggcctggacggcaaccctggcgagcttggactgcccgggccaccaggcgtccctggccttatcggtgacctgggtgtgcttggacccatcggctatcctggacctaagggcatgaaaggcctgatgggaagcgtcggagaaccagggcttaagggtgataaaggcgagcaaggagttcctggcgtgagcggagacccaggattccagggcgataaggggtcccaggggttgcctgggtttcctggagcccggggtaaaccaggacctcttggaaaggtcggagacaagggatccatcgggtttcctgggccgcccggccccgaaggattcccaggggacatcggaccgccaggtgataacggccccgagggcatgaaaggcaaaccgggggcccgcggactcccaggaccccgcggacagctgggccccgagggcgatgaagggcctatgggtccacctggcgcaccaggcctggagggacagcccggccgtaaaggatttccggggcgcccaggattagatggggtgaagggagaaccaggcgaccccggtcgaccaggtcctgttggcgagcaaggattcatggggtttataggtctcgtgggcgaacctggcattgtgggagaaaaaggagaccggggcatgatgggcccgcctggtgttcctggtcccaagggaagcatggggcatcccggtatgcccggcggtatgggcacccccggggagcctggccctcagggacctcccggtagcagaggccctcctgggatgagaggagcaaagggacgccggggcccccgcggcccagacggtcctgctggggagcagggatctcgggggctgaaaggcccgcccggaccccagggacgtccagggcgaccgggccaacagggcgtggctggtgagcggggacatctcggaagtaggggatttcctggcatacctggcccttccgggccacctggcacaaaagggctgccgggggaacccggcccccaaggcccacaggggcctatcggccctcctggagagatgggcccaaagggtccaccaggcgcagtgggagaaccaggcctgcccggcgaagccgggatgaaaggtgacctcgggccactgggaacgcctggggagcagggtctcattggtcagcgcggagagcccggtctcgagggggatagtggaccgatgggaccggacggcctcaaaggcgaccgaggggatcccgggcctgacggcgagcacggcgaaaaaggccaggaggggctaatgggcgaggatgggccacctggacctccaggtgtgacaggcgtgagaggtccagaagggaaaagcggaaagcaaggagaaaaaggtagaacgggcgccaaaggggctaaaggctatcagggacaactaggtgagatgggcgtgcccggtgatcctggaccacctgggacccccggtcccaagggctctagggggtcactgggtccgaccggcgcaccaggccgaatgggagcacagggagaaccaggactggccggctacgacggacacaaaggaatcgtgggaccgctcggcccgccgggtcctaagggtgagaaaggagaacagggcgaggacggaaaggcagagggccctccagggccaccaggagatcgtgggcccgtgggagaccgtggggaccggggcgaaccaggcgatccaggatacccgggccaggaaggcgtgcaggggttgcgcgggaaaccgggccagcagggacaacccgggcatcctggcccacgcggctggcctggacctaagggaagcaagggagctgagggaccaaagggtaaacaaggcaaggctggcgcccccggccgacgtggggtccagggattgcaagggctcccaggccccaggggcgtagtgggccgccaaggtctggagggaattgcaggacctgacgggctccccggacgcgatggccaggcgggccagcagggtgagcagggggatgatggagacccagggccaatgggtccggctggtaaacggggtaaccccggcgtagccggcttgcccggggcacaggggcctcccggctttaagggagaatccggattgcccggccaactggggcctcctggtaaaagaggcacagaaggccgaaccggcctaccaggtaatcagggggaaccaggctccaagggacagccaggcgacagcggcgagatgggattccctggaatggccggtctgtttggacctaaaggaccccctggagacatcggatttaagggcattcaagggcctaggggccccccaggcttgatggggaaagagggaattgtgggaccgcttgggatactgggacccagtggtctcccaggacctaagggcgacaagggcagtaggggagactggggcctccagggccctagaggaccaccaggtcccaggggccgccctggcccacctggccctccgggcggtccaattcagcttcaacaagatgatctcggcgctgcattccagacttggatggatacgtccggggctcttcggcccgagtcatactcctaccctgataggctggtgctggaccagggcggagaaatcttcaagaccctgcattatctgtccaatcttatccagagcattaagacccccctggggaccaaggagaaccctgctagagtgtgtcgggatctgatggattgcgaacagaagatggtggacgggacctactgggtggacccgaatctgggctgttcaagtgatacaatagaagtgtcctgtaacttcacacatgggggacagacatgcctgaagccaattacagcttccaaggttgagttcgctataagtcgggtgcagatgaatttcctccatctgttgtcttctgaagtcacgcagcacattacgatacattgtctgaatatgaccgtctggcaagagggcactggacagacccccgccaagcaggctgtgcgttttagggcctggaacggtcagatctttgaagcagggggacaatttaggccggaagtctccatggacgggtgtaaggtccaggatggaagatggcatcaaacattgttcaccttccggacccaggaccctcagcagctgcccatcataagtgtcgacaatctcccaccggcatcatctggcaagcagtatagacttgaggttgggccagcttgcttcctgtag

SEQ ID NO: 226061 - DNA, 5604 bp, Artificial Sequence
  derived and/or modified sequence
atgggcgccggcagcgcccggggcgcccggggcaccgccgccgccgctgctgctaggggtggggggttcctcttttcttggatcttagtgtcattcgcgtgtcatctggcctcgacacagggagctcctgaggatgtggacattctacaaaggctcggtctgtcctggactaaggcagggtccccagcgcctccgggagtgattcccttccaaagtggatttatttttacacaacgtgcacggctgcaggccccaactggtacggttatccctgctgctcttggcaccgagctcgctctcgtcctctcgttgtgctcccacagggtgaatcacgctttcttgttcgcggtaaggtcacagaagagaaaattgcagctgggccttcagttccttcccggcaagaccgtcgtgcacctgggcagccgacggtcagttgctttcgacctggatatgcatgacggccgttggcaccacctcgcactggagctgaggggcagaaccgtgacgcttgtgacggcatgcggtcagagacgcgtgcccgtgcttcttccgttccatcgcgaccctgcgctcgatccgggaggatcttttttatttgggaagatgaacccacatgccgtccaattcgagggtgcactgtgccagttttccatctatcccgtcacccaggtcgcccataattactgtactcatctgaggaagcaatgtggtcaggctgatacgtatcagtccccactgggtcctctgttttcccaggactctgggcggccatttacatttcagtcagatctggcactcttgggtttggaaaacctaaccacagccactccagcattgggcagtctcccagccggacggggtcctagaggaaccgtggccccagccacccccacaaaaccacagagaacctcaccgacgaacccgcaccagcatatggctgttggagggccggctcagacccctctactccccgcgaagctaagcgcatcaaacgcgctggatcccatgcttccagcctccgtaggtggaagcactcggaccccacggcctgccgcggcccagccttcgcagaagatcacagctaccaagatccccaaatctctccctactaaaccctcagccccatccacttcaattgtaccgatcaaatcccctcaccctactcaaaagactgctccctcatcttttactaaaagcgcactccccactcagaaacaggttcctcccacctcccgtcccgtgcctgccagagtgagcaggcccgccgagaaaccaatccagcggaaccctgggatgccgcgcccacctcctcctagtactcggcctttaccccccaccacgtcttcctccaaaaaacctattccaactctagcaagaaccgaggcaaaaatcactagccatgcctccaaacctgccagtgccaggacttcaactcataagccacccccatttacagctttatctagctcccccgctccgacccccggctccacgcgctcaaccaggcctcctgcgaccatggtcccacctacctccggcacttctacaccaagaaccgcacccgccgtacctacaccggggagtgcccccaccggaagcaagaagcccatcgggtcagaggccagcaaaaaagccggaccaaaatcctccccacgcaaaccagtcccattgaggccgggcaaagccgcccgggatgtgccactgtccgaccttacgacgaggccttctcccagacagccacaaccaagccagcagactacacccgctctcgtcctggccccggctcaatttctctcaagttctcctagacccacatcttccggttacagcatatttcatttagcaggtagcacccccttccctcttttgatggggcctccggggcccaaaggggactgtgggctgccgggcccaccagggcttccgggacttccaggcatccccggggcaagggggccaagagggccacccggtccctacggaaatccaggtcttccaggaccaccgggcgccaaagggcaaaaaggagatcctggcctcagccccggaaaagctcacgatggcgcgaagggcgacatggggctcccagggctcagcgggaaccccggtcctcctggaagaaagggccataaagggtacccaggacccgcgggtcaccccggcgaacagggccaaccaggcccagagggatctccgggagcaaagggctaccctggccgccagggattacctggtccagttggcgacccaggcccaaaaggctctcgtggctatattgggctccccgggctctttgggctgccaggttctgatggagagcggggcctacctggtgtgcctggtaaacgcgggaaaatgggaatgccaggatttccaggcgtgttcggcgagcgcggccctcctgggctggacggtaaccctggcgagctcggtctgcctgggccgccaggggtgccaggtctgataggcgacctaggagtcctgggacccatcgggtatcccggtcctaagggcatgaaaggactaatgggatcagttggtgagcctggattaaaaggggacaagggagagcaaggggtccccggcgtcagtggggatccaggtttccagggcgacaagggatctcagggtctgcccggctttccgggtgcccgtggcaaaccaggtccattgggtaaggtgggagacaaaggaagcattggattccctggcccacctgggccagaaggatttcctggtgacatcgggccgccaggggataacgggcctgagggaatgaaaggtaaaccgggtgcgcgagggctccccgggcctcgcggccagctcgggcctgaaggcgacgagggaccgatggggccccccggggctcccggtctcgaagggcagccagggaggaaaggcttccccgggaggccgggtctcgacggagtcaagggagaaccgggggatccaggcagaccgggtcccgtaggcgagcaagggttcatgggtttcataggcctcgtcggggaacctggaattgtgggcgagaaaggagaccggggcatgatgggcccccccggagtgcccgggcctaaggggtccatgggccaccccggaatgcctggaggaatgggaactcctggcgagcctggaccccagggacccccaggatcgagaggacctcctggtatgcgcggcgctaagggcaggcgcggacctaggggtccagatggaccagccggtgagcagggctcccgcggactcaaagggccgcctgggccacagggccgcccaggtaggcccggccagcaaggcgtcgccggcgaacgagggcacctgggaagcagaggattccccgggatccccgggcccagtggcccccctggcacaaagggattgccaggtgaaccagggcctcagggccctcagggcccaatagggccccctggcgaaatgggcccaaagggcccccctggtgctgtgggcgagccaggccttcccggcgaggcaggaatgaagggcgacttaggtcctttaggcaccccgggagagcagggtctgataggccagagaggggaaccaggcctcgagggtgacagtggtccaatgggcccggatggactgaagggcgaccggggcgaccctggacctgacggcgagcacggagagaagggacaggaaggcctgatgggagaagatggccctccaggtccccccggggtaactggtgtgagagggcccgaaggcaaatctgggaaacaaggcgaaaaaggacgcacgggcgcaaagggtgccaaaggctatcagggccagttgggggagatgggcgtaccaggcgatcctggaccccccggtacaccaggaccaaaaggatctcggggctccctcgggcctaccggtgcgccagggagaatgggtgctcaaggggagcccgggttagctggctatgacgggcacaaaggcattgttggcccactcggcccacccggtccaaagggtgagaagggggaacagggggaagacggtaaggctgaaggcccaccgggccccccaggggatcgcggcccagttggcgaccgtggggaccgtggcgagcctggcgaccctggctaccctggccaggagggcgtgcagggtttacgcggaaaaccagggcagcaaggccaacccgggcaccctgggcccagaggttggcccggaccaaaaggctcaaagggggcggagggccctaaggggaaacaagggaaggcgggcgcacccgggcgccgaggggtgcagggcctgcaggggctgccagggccgcggggcgtagtggggcggcagggtctggaggggattgccggccctgatggccttcctggccgtgatggccaggccggacaacagggagagcagggagacgacggtgacccagggcccatgggtcccgctggcaaaaggggcaatccaggggtcgccggcctgccaggggcacaagggccccccggctttaaaggggaaagcggacttcctggacagttgggcccacctggcaagaggggaactgaaggtcgaacaggactgcctggaaatcaaggcgaacccgggtcgaaggggcaacctggtgattcaggagaaatgggtttcccaggcatggctggtctattcgggccaaaaggaccgcccggggacatcggattcaagggcattcaaggcccaagagggccgcccgggcttatgggcaaggagggtatagtaggcccattggggatcttgggcccctccggcctgcccggtccaaaaggggacaaaggatcacgcggagactggggcctgcagggcccaagaggtccacctgggccccggggcaggcccgggccacctgtggaccccggaggtcctcgatatataccctgcctttttcttgctcagcagcaagatgatctgggggctgcattccagacttggatggacaccagcggcgcgctaagaccagagtcctattcatatccagatagactggtcttagaccagggcggagagatcttcaaaaccctccactacctgagcaacctaattcaaagcattaaaaccccactgggaaccaaagaaaaccccgcccgcgtctgtcgcgacttaatggactgtgagcagaaaatggttgacggaacctactgggtggatccaaaccttgggtgctcttccgacaccatcgaagtgtcatgtaattttacacatggaggccaaacatgtcttaaaccaattaccgcaagtaaagttgaatttgccatcagccgggtgcagatgaacttcctccatctattaagctccgaagttacacagcacattactatccactgcctgaacatgacagtgtggcaagaggggactggacagactcctgcgaaacaggcggtgaggttccgtgcctggaatgggcagatttttgaggcaggaggacaattccgcccagaagtgagcatggatggctgcaaagtgcaggatggccgctggcaccaaacgttattcaccttccgcacccaggacccacagcaactacctatcattagtgtcgacaatttacccccagctagctctggtaagcagtaccgcctggaggtcgggcccgcctgcttcctctag

SEQ ID NO: 226062 - DNA, 5582 bp, Artificial Sequence
  derived and/or modified sequence
atgggtgccggtagcgctcggggagctcgaggcactgctgccgctgcagccgctaggggcggaggattcttgttcagctggatactagtctcttttgcttgccaccttgcctctacgcagggcgctcccgaagatgtcgatatcctgcagcggctcggattgagttggacaaaggctggatcaccagccccaccaggggtcattcctttccagagcgggttcatctttacccagagggcccgtttacaggcacctacaggcacagtgattcccgcagccctcggaacagaactggcgctggtcctcagcctatgcagccatagagtcaaccacgcgtttctctttgccgtgagatctcagaaacggaaattacaactgggattacaattcttgcccggaaagactgtggtgcacctaggatcccgccgttctgttgcttttgatttggacatgcacgatggccgttggcaccacctggctttggagcttagaggccgaacggtgactctggtgaccgcatgtgggcagcgaagagttcccgtgctgctccccttccatagagaccccgcactggacccaggcggatccttcttattcggtaagatgaatccccacgcagtgcagttcgaaggagccctctgtcagtttagtatctacccggtgacccaggtcgcccataactattgtactcatctaaggaagcagtgcgggcaagccgacacctatcagagccctctgggaccgctcttctctcaggactcagggaggccctttacttttcagtcggatctggccctattgggcctggaaaacctcaccaccgcaacccccgctttgggcagccttcccgctggcagggggcctcgaggcactgttgcacccgctacccctacaaagcctcagcggacttcaccaactaacccccatcagcacatggccgtggggggacctgcacagacacccctgcttcccgctaaattaagcgcttctaacgccctggacccgatgctgcccgcttcagtgggcggaagcactaggaccccccgacctgctgctgcccagcccagccagaagatcaccgccactaagattccaaaatctctgccgacgaagcctagcgcaccatccacgagcattgtgccaatcaagtcaccccacccgacacagaagactgcaccgtcgagcttcacgaagtctgccctccccacacagaaacaggttcctccaacttccagaccagttccagctagagtgtcccgccctgccgaaaaaccgatccaaagaaacccaggaatgcctagacccccaccaccatctacacggccactcccccctactacttctagcagcaagaagccaatcccgacactggcaagaaccgaggccaagattacatcacatgcttctaagcctgcttccgccagaacttctacacataaacccccaccctttaccgcacttagctcttcacctgcacctaccccaggttcaacccgatctacacgtcccccagccactatggttcccccaacaagtggtacaagcacacccaggaccgccccagccgtgcccacccctggtagcgcccctactggttcaaagaagccgattggatccgaggcatccaagaaagccggaccaaaatccagccccaggaagcccgttcctcttagaccaggaaaggctgcacgggatgttccattatcagatctgaccacaagaccttcacccagacagcctcagccatcacaacaaacaactcccgctctggtgcttgcccctgctcagttcttgagcagttctcccagacccacttcctctgggtacagtatctttcatttagctggctccacgccttttcctcttctgatggggcctccagggcctaagggcgattgtgggctccccggaccaccaggtctgcccggactcccaggcatccccggtgcgaggggccctaggggacctccaggcccttatgggaaccccggactgcctggccctccaggcgctaagggccagaagggtgacccaggactgtctccaggaaaagctcacgacggcgcaaaaggcgatatggggctgcccggactgtcaggcaatcctggcccaccgggtcgcaaggggcataaggggtatcccggaccagctggacaccccggtgaacaagggcagcccggtcccgaaggctccccgggtgccaagggataccccggtaggcagggcctgccgggaccagtgggagatccagggccaaaagggagccggggttatatcggactgccaggcctgttcgggctgcctggatccgatggtgaacgcggtttgcctggagtgcctggcaaacggggtaagatggggatgccaggatttcccggagtttttggagagagagggccacccggactggacggcaaccccggagagctgggactccccggacccccaggagtgccaggtctcattggcgacctgggcgtgctcggacccatcggctatccaggcccaaaaggtatgaagggactcatgggatccgttggggagcccggtctaaaaggagacaaaggggaacagggcgtgcctggagtgagcggtgacccgggttttcaaggcgacaagggctcccagggcctgcccggatttccaggtgctcgcggtaaacctgggccattggggaaagtcggcgacaaaggatctataggctttccgggaccacctggcccagaagggtttccaggggacattggcccaccaggtgacaacggaccagaggggatgaaggggaaacctggagcgcgagggctgcccggtccaaggggacagcttgggcctgagggcgatgagggccctatgggccctcccggtgcacctggattggaaggccagcccggacggaaaggatttccaggccgaccaggactggacggggtgaagggtgaacccggtgaccctggaaggccaggtcctgtcggcgagcaggggttcatgggctttattgggctagtaggggaaccgggaattgtcggtgagaagggggaccggggaatgatgggtcctccaggggtgcctggtccgaaaggcagcatgggtcaccccggaatgcccggaggcatgggtacaccaggcgagcccggaccccagggaccccctggttctaggggacccccagggatgaggggcgctaagggccgaaggggtccccgagggccagacgggcctgcaggtgagcagggatctcgcggactcaagggaccacctgggcctcagggacgacctggacggccaggccagcagggggtggccggagagcggggacacttgggcagtcgcggattccccggaatcccagggcctagcggcccacccggtaccaagggattgcctggggagcccggtcctcagggaccccaggggccaatcgggcctcctggagagatgggacccaaggggcctcctggcgctgtgggtgaacctggactgcctggcgaagccggaatgaagggggatctggggccattgggcacacccggagaacagggcctgattggacagcggggtgagcccggtctagagggcgacagtggccctatgggtcccgacggcctgaagggtgatagaggggacccaggtccagacggagaacacggcgaaaagggtcaggagggcctgatgggcgaggatggtcctcctggccctcccggagtcactggcgtgcgcggtcctgaaggaaagtcagggaaacagggtgaaaagggcaggactggtgctaaaggggctaagggatatcagggacagctgggcgaaatgggcgttccaggcgatcccggtccccctgggaccccagggcctaagggctcacggggaagtctcggtcctaccggcgcaccaggcagaatgggagcacagggcgaaccaggactggcaggatacgatggtcacaagggcatagtcggtccacttggcccacccggaccaaagggtgagaagggcgaacagggcgaggacgggaaagcagaggggccaccagggccaccaggagaccggggaccggtcggggatagaggggacagaggggaacccggagatccaggataccccggtcaggaaggagtgcagggtctacgaggcaagccaggccagcaaggacagcctggacatcccggtccccgaggatggccaggacctaaagggagtaagggggctgagggtcctaaaggcaagcagggaaaggccggagcgcctgggaggcgtggtgtacaggggctgcaaggcctccccggacctcgtggcgtagtggggcgacagggcctggagggaatagccggacccgacggcctgcccggacgggacggccaagccggtcagcagggcgagcagggcgatgatggggatcctggtccgatgggccctgctggcaaacgaggaaacccaggtgtggcagggcttcctggggctcagggacctcctggatttaagggcgaaagcggactcccaggacagctcggtcctcccggaaagcgtggcaccgaaggtagaactggcctcccagggaaccagggagagccgggatctaagggccagcctggcgatagcggagagatgggattcccagggatggccggactctttgggccaaagggcccacccggtgacattggctttaagggcatccaaggacccagggggccaccaggactcatggggaaggagggaatcgtgggaccactgggcatactcgggccaagcggactccctggacctaaaggagataaggggtcaaggggagattgggggttgcagggtcccagaggcccaccaggccctcgcggacggccaggtccccctggcccacctggcggacctattcagctgcagcaggacgacctcggagctgccttccagacctggatggatacttcaggtgctctgcgccctgagagttattcttatcctgaccgcctggtccttgatcagggcggtgagatatttaagacactacactatttgtccaatttgattcagtctattaagactcctctcgggacaaaggaaaaccctgctcgggtgtgcagagacctaatggactgtgaacagaagatggtggacgggacttattgggtcgaccccaacttagggtgctcttccgatactatcgaggtgtcttgcaatttcacgcacggcggtcagacctgccttaaacccataactgcatcgaaggtggaatttgctattagccgagtacagatgaactttcttcatcttctgagcagcgaggtgacccagcacatcacgatccactgcctcaacatgacagtatggcaagagggaaccggccaaacaccagccaaacaggccgtcagattcagggcttggaacggacagatcttcgaggctggaggccagttccggcctgaggtgtctatggacggttgtaaggtccaggacggcagatggcaccaaaccttattcacatttcgcacgcaggatcctcagcagctacccatcatatctgttgacaatctccccccagcgtcatctggtaaacagtacaggctggaggtgggccctgcttgttttctcta

SEQ ID NO: 226063 - DNA, 5603 bp, Artificial Sequence
  derived and/or modified sequence
atgggggctggctctgccaggggtgccaggggcactgcagcagcagctgccgcacgaggcggtggctttttgttcagctggatcttggtgtcatttgcgtgtcacctagcctccacccagggcgctccagaagacgtagacatcctgcaacgattgggcctgtcttggactaaggccggatctccagccccacctggtgtgattcccttccaatcaggcttcatcttcacacagcgggcacgactgcaggcacccactgggacagtgataccggctgccctgggaacagagctggctttagtccttagtttatgcagtcaccgcgtgaatcacgcttttttatttgcggtccggagccagaagcggaagctgcaacttggcctgcagttcttgccaggcaagaccgtagtgcacttgggttcacgtcggagtgtggcttttgatctggacatgcatgacggcaggtggcatcatctggctttagaattacggggacgaacagtgactctcgttaccgcatgcggacaaaggcgagtgcccgttctgctgccgttccacagagaccccgctttggaccccggaggctctttcctgttcgggaaaatgaaccctcacgccgtacagttcgagggggcactgtgccaatttagcatttacccggtaacccaggtcgcacataattattgcacgcatctgagaaaacagtgtggccaggctgatacgtatcagtccccactcgggccattattctctcaggactcagggcgtcctttcacctttcagtccgacctggctctcttggggctcgagaatctgactactgccacaccagctctgggcagtttgccagccggtcgcggaccaaggggaaccgtcgctcctgctactcctaccaagccacagagaactagccctacaaatccacaccagcatatggccgtcggcggtcctgctcagacaccattgctcccagccaagctgtctgccagtaacgctctggacccaatgcttcccgcatcagtcgggggttctacgaggactcccagacccgctgcggctcaaccatcacagaagataaccgcaacaaaaattccaaagtctttgcctaccaagccatctgccccatctacctctattgttcccataaagtctcctcatccaactcagaagacagcaccatcatcgtttacgaagagtgctctgccaactcagaagcaggtacccccaacaagtcgccctgtgcccgctagggtcagcaggccagccgagaagcctatacagaggaatcccggaatgccccgtccaccgcctccaagtactcgacctctgccgccaactacctcatccagcaaaaagccaattccaacattggcacgcaccgaggcaaagattacatcccacgctagtaaacctgctagtgccagaacgagcacacataagccccctccattcactgctctgagtagtagtccagcccctacaccgggaagcacccgatccactcgcccacccgctacaatggtgccgccaacgtccgggacttctacaccacggacggctcctgccgtgcccactccagggtctgcgcctaccggaagcaagaagcctatcggctccgaggcaagcaagaaggcaggaccaaagtcctcccccaggaaaccagtccctctgaggccagggaaggccgcaagagacgtgccactgagcgacctgaccactcggccttcaccgagacagccccaaccatcccagcaaactacacccgctctcgtgctggcaccagcacaatttctgtcctccagccctcggcctacctcttccgggtacagcatatttcatctcgccggttcaactccatttcctttgctgatgggccctccagggcctaagggcgactgcgggctcccgggtcctccaggactccccggtttacccggaataccgggtgcgagggggccacggggaccaccgggtccctatggcaaccccggacttcccggacctcctggggcaaaggggcagaaaggggatccagggttgtctccgggaaaagcacacgacggtgccaagggcgacatgggcctgccagggctgtccgggaaccctggccctcccggtcggaagggccataagggttacccagggccagccggtcacccaggcgaacaggggcagcctgggcctgaaggaagccccggagctaagggctacccaggacgacagggcctgcctggacccgttggggatccagggccaaagggctcccgcggttacattggtctgcccggattgttcggactgcccggatccgacggtgagaggggcctccccggagtccccggaaaacggggaaaaatgggcatgcccggtttcccaggtgtctttggcgaacggggaccccctggcctggacggcaacccaggtgaactgggactccctggcccacctggcgttcctgggcttatcggagacttaggcgtgctagggccaatcggttatccgggaccaaagggcatgaaagggctgatgggcagcgttggagaacctggcctgaaaggcgacaagggagagcaaggcgttcctggagtatcgggagatcctggctttcagggggataaaggcagccagggcttgccaggcttccctggagctaggggaaagccaggtcccctgggcaaggttggggataagggatcaattggattcccaggacctcctggccctgaaggcttccccggagacattggccctccaggagacaacggacctgagggcatgaaaggcaagcctggcgcacggggtctgcctggacctagaggacagttgggtccagagggggacgaaggcccaatgggaccccctggcgctcctggactagaaggacagccaggaaggaagggctttccaggacgtcccggacttgatggcgttaaaggcgagcccggagatcctggcagacccggacccgtcggagagcagggcttcatgggatttatcggattagtgggagagccaggaattgtcggagagaagggtgaccgcggaatgatggggccaccaggagtccctgggccaaaaggaagcatgggacaccccggaatgcctgggggaatgggcacaccaggtgaacctggtccccagggtcctccaggctcccggggacctccgggaatgcgaggcgcaaaaggacgacgcggaccacgaggccctgacggaccggcaggcgagcagggctcccgcggattgaaagggccaccaggacctcagggtagacccggaagaccaggccagcagggcgtggctggtgagaggggccatctaggatcgcgaggctttccaggtatccccggaccctctgggcctcccggaactaaagggctgcccggtgagccgggtccccagggacctcaaggcccaataggaccacccggtgaaatgggcccaaagggacccccaggggcagtgggagagccgggtctgcccggtgaagctggcatgaaaggcgaccttgggccactgggaaccccaggagaacagggcctgatcgggcagaggggtgaacccggtttagagggcgactcagggcctatgggcccagacggactgaaaggcgatagaggcgatcctggcccagatggtgaacacggagagaagggtcaggagggactcatgggcgaggatggcccacccggtcctcctggggttaccggtgtgaggggtcctgaaggcaaatccggaaagcagggagaaaagggaagaactggggcaaagggggcaaaaggttatcaaggacagctcggcgaaatgggggtgcccggagatccgggacctcccggaactcccggtcccaagggtagtaggggatctttaggacccacgggggcaccaggaagaatgggagcgcagggcgagcccggtctcgccggatacgatggacacaagggaattgtgggcccattaggtccccctgggccaaaaggggagaagggagagcaaggcgaagacggtaaggcagagggtccccctgggcctcctggggatagaggccctgtgggcgatcggggagatcggggtgaacctggcgaccccggatatccagggcaagaaggggtgcaggggctgcgcggtaaacctggacaacaaggtcagccgggacaccctggccctcgaggttggccgggtcccaaaggttctaagggcgctgaaggacccaaaggtaagcagggcaaggcaggcgctccaggcagacgcggagtgcaaggactacagggactgccagggccacggggtgtggtgggccgtcagggactggagggtatagcaggtcccgatggactacctggtcgcgatggccaggctgggcagcaaggggagcagggcgatgacggagatcctggccctatgggaccggctggcaagcggggaaaccccggagtcgccggactgccaggggcacagggccctcccggatttaagggtgaatccgggcttcctgggcagctgggccctccagggaagcgaggcaccgaaggacgcaccggactgccaggcaaccagggtgagccagggagtaaggggcagccaggcgattccggagagatgggatttccaggtatggcaggcttgttcggacccaaaggaccgcctggggacattggttttaaaggtatacagggccctcgaggccctcccggtctcatgggaaaagaaggcatcgtcgggccactgggaatcctgggccctagcgggctgccaggcccaaaaggtgacaaggggtcaaggggtgactggggcctacagggccctcgcggtccacctggaccacggggtagacccggacccccagtggaccctggcggtccaaggtacatcccatgcctttttttggcacagcaacaggatgatctcggcgcagcgttccagacatggatggacacaagcggcgctttacggccagagtcatactcatatcctgaccggctggtgctcgaccaaggaggcgagatattcaaaacactgcactatctatcaaatctgatacagtctataaagaccccactgggcactaaagaaaacccagctcgtgtgtgtcgggacttaatggattgcgaacagaaaatggtcgacggaacctactgggtggacccgaatctcggttgctcgtctgacacaatcgaggtgagttgtaatttcacccacgggggtcaaacctgcctgaaaccaatcaccgcatcgaaagtggaattcgccatctcccgagttcagatgaacttcttgcacttgctgagcagtgaagttacccaacatatcaccattcattgtctgaatatgacagtgtggcaggagggtaccgggcaaacgcctgcaaagcaagctgttcgcttcagagcctggaacggtcaaatcttcgaagccggagggcagttcaggccggaggtatcaatggatgggtgtaaagtgcaggacggtagatggcaccaaaccttatttaccttccggactcaagatccccagcagctgcccataatttctgtcgacaacctgccgccagcctcgtctggcaaacaatataggctggaggtcgggccagcgtgttttcttta

SEQ ID NO: 226064 - DNA, 7790 bp, Artificial Sequence
  derived and/or modified sequence
cggcggggaggcagcttccaccgccctccgcgcgccctcacccggccttgctctgcctccggggaccgccagcagcccgcctccaaaagtttgatcatctctctctctctttttcttgcttcttcttcctttttggtggaagcagaaaaggaccgaggcaggggcgagcgcggcgcccggactcctgggaccatgggcctggcgcgggcgcccgcggggccccagccgcgctgcctgcctgctcgggcgcccctgggcgcggggctgcgctgggggcgcgggggccgcgcgctctaagccggcctggcgcggcggggcggggggctggcggccccatggggcgcgcccacacttgccccccgggctcgggagcatgaagtaggggcctgccatgggagcgggatcggcgcggggggcccgaggcacagcggcggcggcggcggcgcgcgggggggggtttctcttctcctggatcttagtctcgtttgcctgtcacctggcctccacccaaggagctcctgaagatgtggacatcctccagcggctgggcctcagctggacgaaggccgggagccctgcacccccgggagtcattcctttccagtcgggcttcatctttacgcagcgggcccggctccaggctcccacgggcaccgtcattcctgccgccttgggcacagagctggcactggtgctgagcctctgctcccaccgggtgaaccatgccttcctcttcgctgtccgcagccagaaacgcaagctgcagctgggcctgcagttcctccccggcaagacggtcgtccacctcgggtcccggcgctcagtggccttcgacctcgacatgcacgacgggcgctggcaccacctggccctcgagctccgaggccgcacagtcactctggtgactgcctgcgggcagcgccgggtgcctgtcctgctgcctttccacagggaccctgcactcgaccctgggggctccttcctctttgggaagatgaacccgcatgcagtccagtttgaaggtgctctctgccagttcagtatctaccctgtgacgcaggtcgctcacaattactgtacccacctgaggaagcagtgtggacaggctgacacgtaccagtccccactgggacctctcttctcccaagactctggcagaccttttaccttccagtccgacctcgccctgctaggcctggagaacttgaccactgccacaccagccctggggtcactgccagcaggcaggggacccagggggactgtggcacccgccacgcccaccaagccccaaaggactagccccacaaaccctcaccagcatatggcggtgggaggcccagcccaaaccccgctgctacctgccaagctgtcagccagtaacgcacttgatcccatgctcccagcctctgttggcggctctaccagaacgcctcgccctgcggccgctcaaccatcacagaagatcacagccaccaaaatccccaaaagcctccctaccaagccttcggccccttctacttcaattgtgcccatcaaaagcccccatcctacccagaaaacagctccatcttcatttacaaagtcagccctacccactcagaagcaagtgccacctacttcccgtccagttcctgccagagtctcccgtcccgcagagaagcccatccagaggaacccgggaatgcccaggcccccaccgcccagcacccggcccctacctcctaccaccagctcctctaaaaaacccattcccacactagctcggactgaggccaagataaccagccatgccagtaagccggcctctgcccgcaccagcacccacaaacctcccccatttactgctttatcctcatctcctgcccctactcctggttctaccaggagtactcggccaccagccacgatggtacctccaacttcgggcaccagcactcccagaacagcacctgccgtccccactcctggctcagctcccactggaagcaagaagcccattggatcggaagcctcaaagaaagccggacccaagagcagcccccggaagcctgtccccctcagacctgggaaggcagccagggatgtccccttgagcgatctgacaaccaggcctagccccagacagccccagcccagtcagcagaccaccccggccctggtattggccccggcgcaattcctgtcctccagcccccggcccacgagcagtggctattcgatcttccacctggcaggatctacgcctttccctctgctgatggggcctccgggacccaagggagactgtggcttgccgggtccccctgggctacctgggctacctggaatccctggtgcacgtgggcctcggggtcctcctgggccttatggaaatccaggtctccccggccctcctggagccaaaggacagaaaggggacccagggctctcaccaggaaaggcccacgatggggcaaagggtgacatgggcttgcctgggctctccgggaatccaggacctccgggacgaaagggacacaagggctatcctggaccggcagggcaccccggagaacaggggcagccaggacctgagggcagcccaggggccaaaggttaccctggcaggcaggggttacctggaccggtaggagatcccggccccaaaggcagcaggggctacattgggctcccagggctcttcggcctgccagggtctgatggagaacgaggcctgcctggcgttcctggcaagaggggcaagatgggtatgccggggtttcctggagtctttggggaaagaggccctcctggactggatggaaatcctggagaactgggcctgccaggcccccctggagtccccggcctcattggtgacttaggagtgttgggtccgattggctacccgggacccaagggcatgaagggactgatgggcagcgtgggggagcccggactgaaaggtgataagggtgaacaaggggttccaggtgtgtcaggagatcccggattccaaggagacaaggggagccaggggttgccagggttccccggtgcacgggggaagccagggcctctgggcaaagtcggagacaaaggatccattgggtttcccgggccccctggacccgagggattcccaggagacatcggcccccctggcgacaatggcccagaaggcatgaagggtaagcctggagcccgaggcctgccgggaccccgtgggcagctggggcccgagggagatgagggacccatggggccgccaggggcccctggcttggagggtcagcctggcaggaaggggtttcctgggaggcccggcctggatggcgtgaagggggaaccaggggatcctggtcggccggggcctgtgggagagcagggatttatgggattcattggtctggtcggggagccaggaatcgtgggagaaaagggtgatcgtggcatgatgggacccccaggcgtgcctggacccaaggggtcgatgggtcatcctggaatgccaggtggtatggggacccctggagagcctggaccccagggtcctccaggatctcgaggcccaccaggcatgaggggagcaaagggacgtcggggcccccgaggaccggacggaccagctggggagcaagggtccaggggcctgaagggccctccaggaccccagggcagaccgggccggcctggacagcagggtgtggctggtgagcgaggccacttgggctcgagaggctttcctggcatcccgggtccctcaggccccccaggcaccaagggcctcccaggagaaccgggccctcagggaccccaggggccaattgggcctccaggagagatgggacccaaggggccgcctggtgcagtgggagaaccgggccttcctggggaagccgggatgaagggtgaccttggacccctgggcactcctggggagcagggcctcattgggcaacggggagagccaggccttgagggtgacagtggccccatgggacctgatgggctgaagggggacaggggagacccagggcctgatggagaacatggcgagaaaggccaggaagggctgatgggtgaggacgggccccccggcccccctggcgtcactggtgtccggggtcctgaaggaaaatcagggaagcaaggcgagaagggccgcactggagccaagggtgccaagggctatcaaggacagctgggtgagatgggcgtccctggagaccctggaccccctggcactccaggccctaaagggtcccggggcagcctgggaccaacgggtgctccgggacgcatgggggcccaaggagaaccgggactggctggttatgatggacacaaaggcattgtgggaccccttggacctcctggaccaaaaggcgaaaagggggagcagggcgaggacggcaaggctgaggggccccctgggccacctggagatcggggccctgtgggtgatcgaggagaccgcggggaaccgggagaccctgggtaccctggacaggagggtgtgcaaggcctccgtggaaagccaggccagcagggccaacccgggcatccgggaccccgggggtggccgggacccaaaggatcgaaaggcgcagagggaccaaagggaaagcaaggcaaggcaggggccccaggccggaggggggtccagggcctgcaggggctgccagggccccggggcgtggtggggagacagggcctcgagggcatcgctggaccagatgggcttcctggcagggacgggcaagcaggacagcagggggagcagggagacgatggggaccctggccccatgggccctgctgggaagagaggaaatccaggtgtggccggcttacctggagcacagggacccccaggattcaagggtgagagtgggttacccggacagctgggtccccctggcaagcgaggaacagagggcagaacggggctccctggaaaccagggggagcctgggtccaaaggccagccgggcgactctggcgagatgggcttcccaggaatggcaggtctcttcggacccaagggcccgcctggagacattggcttcaaaggcatccagggccctcgggggccacctggcttgatgggaaaggaaggcatcgtcgggcccctcggaatcctgggaccttcgggactcccgggtccgaagggtgacaaaggcagccgtggggactggggattgcaaggtccgaggggtcctcccggccccagagggcggcccggccccccgggtcctccagggggtcctatccaattgcaacaagatgatcttggggcagctttccagacgtggatggacaccagtggagcactcaggccagagagttacagctatccagaccggctggtgctggaccagggaggagagatctttaaaaccttacactacctcagcaacctcatccagagcattaagacgcccctgggcaccaaagagaaccccgcccgggtctgcagggacctcatggactgtgagcagaagatggtggatggtacctactgggtggatccaaaccttggctgctcctctgacaccatcgaggtctcctgcaacttcactcatggtggacagacgtgtctcaagcccatcacggcctccaaggtcgagtttgccatcagccgggtccagatgaatttcctgcacctgctaagctccgaggtgacccagcacatcaccatccactgccttaacatgaccgtgtggcaggagggcactgggcagaccccagccaagcaggccgtacgcttccgggcctggaatggacagatttttgaagctgggggtcagttccggcccgaggtgtccatggatggctgcaaggtccaagatggccgctggcatcagacactcttcaccttccggacccaagacccccaacagctgcccatcatcagtgtggacaacctccctcctgcctcatcagggaagcagtaccgcctggaagttggacctgcgtgcttcctctgacctctgacctcgtggccactctaggcctcacggaggagggaagaggaagaggcaaggggagggtactgaggggcagatggctccaggagaggcagctcccctgcccaagggtccttgggcagaccccagctgttgtctgcccagtagaagtgggtgggggtaggaggggatagggtgtccttgggaacaatggatcccagcttagccccaaagaccaaccaaagagccagccagagtaagctggacctgcaacctgcctgagccccgtggcctctcagctctgcggccaccccgttccctccccagcttcctgcccaaagagccccacattcaagccaacttgagggaagggggcgtctcgtcagctggtccctgctagggagctattgatgtgcaatattagaaaggagacatgaaaaaaggagaaaaggaaagacagaagtgtatatatatattatttaaacaaacaaaaagaaggtgcgttactatttttttttcacccgggaaagaggtgagaggatgggaaggagcagccaggcgtgggaagcggcgagatcctcgggctgggggtgcccacgtttgctacctcccactgtgaaatcgctggtgctcacaattgtctctcacagtgtatgtgatttttttaaggaaaaaaaaaaatccctatttaagattctgaaggtgctaccattattttgccacagactttgaagaaacttttggatgtggggcatcatccgcatctttctctctcctccaaatgacaaagtttggggaatttttgaattttcctagcatcgcccttgtgctcatcaggtaatctgctaaggaggaaaaaagaaaagaaaaaaggaaaaaaaaaaaaaaaaagcaaaacaaaaacaaaaacaaaaaccctaccagaaaccagaagtagagagatttaccatataacttatggactttgaaatgtctgtccttttaaggcagcagggaggcctgggtgcgaagcatgttggcttggcccttcacggtcctggagggaggtgaggctggccttggaaggcgtgccctggagaggtcttgggtgaaaacttgaccttgaagaaaccaatcacaaaagcggcgttgggtcagggctaggcttagaggtgaagcatcaacatggaaccatctcaggaagccgcatcgcctcttccgaggtcctcacttccaggagcctgtccttgcaagatgcaatcatcgttcctgctttttcattgtcattaaattctgtagaaacccattgtcattagctccaagtgtaaatttgggtcaaggagacagaataataatgggaatctcggagttcgacaccatagtgacgttcagcgtcctctgaattgtgctacatcagcgaacaagtcggcgcttgaattggattttgaggttattttaaccatggaattatttttatagaaggggaaaatgtatgtgaaagtctctatttgtgtatttctctcctaaagttgtgtctctttgggaattggatttgatttttattatttaatacctcactttggcccgtcccccctcccaacacttctgtatcctcgccctgccgccccagcctggacgctctgcgtggaagtgcgtgtttgtagcagctcgggcctcatctcagcgctcggatccctcctgctgccagaatccactggcctctgtctcattcttgggttttcctgctgtcttcgtttacgtctctgtccacatgtcagtgtattaaaaccccaatgggttccgtttctccttttcccctctggattttaaataaatatttaaaactgaggcaatggaa

SEQ ID NO: 226065 - DNA, 5604 bp, Artificial Sequence
  derived and/or modified sequence
atgggagcgggatcggcgcggggggcccgaggcacagcggcggcggcggcggcgcgcgggggggggtttctcttctcctggatcttagtctcgtttgcctgtcacctggcctccacccaaggagctcctgaagatgtggacatcctccagcggctgggcctcagctggacgaaggccgggagccctgcacccccgggagtcattcctttccagtcgggcttcatctttacgcagcgggcccggctccaggctcccacgggcaccgtcattcctgccgccttgggcacagagctggcactggtgctgagcctctgctcccaccgggtgaaccatgccttcctcttcgctgtccgcagccagaaacgcaagctgcagctgggcctgcagttcctccccggcaagacggtcgtccacctcgggtcccggcgctcagtggccttcgacctcgacatgcacgacgggcgctggcaccacctggccctcgagctccgaggccgcacagtcactctggtgactgcctgcgggcagcgccgggtgcctgtcctgctgcctttccacagggaccctgcactcgaccctgggggctccttcctctttgggaagatgaacccgcatgcagtccagtttgaaggtgctctctgccagttcagtatctaccctgtgacgcaggtcgctcacaattactgtacccacctgaggaagcagtgtggacaggctgacacgtaccagtccccactgggacctctcttctcccaagactctggcagaccttttaccttccagtccgacctcgccctgctaggcctggagaacttgaccactgccacaccagccctggggtcactgccagcaggcaggggacccagggggactgtggcacccgccacgcccaccaagccccaaaggactagccccacaaaccctcaccagcatatggcggtgggaggcccagcccaaaccccgctgctacctgccaagctgtcagccagtaacgcacttgatcccatgctcccagcctctgttggcggctctaccagaacgcctcgccctgcggccgctcaaccatcacagaagatcacagccaccaaaatccccaaaagcctccctaccaagccttcggccccttctacttcaattgtgcccatcaaaagcccccatcctacccagaaaacagctccatcttcatttacaaagtcagccctacccactcagaagcaagtgccacctacttcccgtccagttcctgccagagtctcccgtcccgcagagaagcccatccagaggaacccgggaatgcccaggcccccaccgcccagcacccggcccctacctcctaccaccagctcctctaaaaaacccattcccacactagctcggactgaggccaagataaccagccatgccagtaagccggcctctgcccgcaccagcacccacaaacctcccccatttactgctttatcctcatctcctgcccctactcctggttctaccaggagtactcggccaccagccacgatggtacctccaacttcgggcaccagcactcccagaacagcacctgccgtccccactcctggctcagctcccactggaagcaagaagcccattggatcggaagcctcaaagaaagccggacccaagagcagcccccggaagcctgtccccctcagacctgggaaggcagccagggatgtccccttgagcgatctgacaaccaggcctagccccagacagccccagcccagtcagcagaccaccccggccctggtattggccccggcgcaattcctgtcctccagcccccggcccacgagcagtggctattcgatcttccacctggcaggatctacgcctttccctctgctgatggggcctccgggacccaagggagactgtggcttgccgggtccccctgggctacctgggctacctggaatccctggtgcacgtgggcctcggggtcctcctgggccttatggaaatccaggtctccccggccctcctggagccaaaggacagaaaggggacccagggctctcaccaggaaaggcccacgatggggcaaagggtgacatgggcttgcctgggctctccgggaatccaggacctccgggacgaaagggacacaagggctatcctggaccggcagggcaccccggagaacaggggcagccaggacctgagggcagcccaggggccaaaggttaccctggcaggcaggggttacctggaccggtaggagatcccggccccaaaggcagcaggggctacattgggctcccagggctcttcggcctgccagggtctgatggagaacgaggcctgcctggcgttcctggcaagaggggcaagatgggtatgccggggtttcctggagtctttggggaaagaggccctcctggactggatggaaatcctggagaactgggcctgccaggcccccctggagtccccggcctcattggtgacttaggagtgttgggtccgattggctacccgggacccaagggcatgaagggactgatgggcagcgtgggggagcccggactgaaaggtgataagggtgaacaaggggttccaggtgtgtcaggagatcccggattccaaggagacaaggggagccaggggttgccagggttccccggtgcacgggggaagccagggcctctgggcaaagtcggagacaaaggatccattgggtttcccgggccccctggacccgagggattcccaggagacatcggcccccctggcgacaatggcccagaaggcatgaagggtaagcctggagcccgaggcctgccgggaccccgtgggcagctggggcccgagggagatgagggacccatggggccgccaggggcccctggcttggagggtcagcctggcaggaaggggtttcctgggaggcccggcctggatggcgtgaagggggaaccaggggatcctggtcggccggggcctgtgggagagcagggatttatgggattcattggtctggtcggggagccaggaatcgtgggagaaaagggtgatcgtggcatgatgggacccccaggcgtgcctggacccaaggggtcgatgggtcatcctggaatgccaggtggtatggggacccctggagagcctggaccccagggtcctccaggatctcgaggcccaccaggcatgaggggagcaaagggacgtcggggcccccgaggaccggacggaccagctggggagcaagggtccaggggcctgaagggccctccaggaccccagggcagaccgggccggcctggacagcagggtgtggctggtgagcgaggccacttgggctcgagaggctttcctggcatcccgggtccctcaggccccccaggcaccaagggcctcccaggagaaccgggccctcagggaccccaggggccaattgggcctccaggagagatgggacccaaggggccgcctggtgcagtgggagaaccgggccttcctggggaagccgggatgaagggtgaccttggacccctgggcactcctggggagcagggcctcattgggcaacggggagagccaggccttgagggtgacagtggccccatgggacctgatgggctgaagggggacaggggagacccagggcctgatggagaacatggcgagaaaggccaggaagggctgatgggtgaggacgggccccccggcccccctggcgtcactggtgtccggggtcctgaaggaaaatcagggaagcaaggcgagaagggccgcactggagccaagggtgccaagggctatcaaggacagctgggtgagatgggcgtccctggagaccctggaccccctggcactccaggccctaaagggtcccggggcagcctgggaccaacgggtgctccgggacgcatgggggcccaaggagaaccgggactggctggttatgatggacacaaaggcattgtgggaccccttggacctcctggaccaaaaggcgaaaagggggagcagggcgaggacggcaaggctgaggggccccctgggccacctggagatcggggccctgtgggtgatcgaggagaccgcggggaaccgggagaccctgggtaccctggacaggagggtgtgcaaggcctccgtggaaagccaggccagcagggccaacccgggcatccgggaccccgggggtggccgggacccaaaggatcgaaaggcgcagagggaccaaagggaaagcaaggcaaggcaggggccccaggccggaggggggtccagggcctgcaggggctgccagggccccggggcgtggtggggagacagggcctcgagggcatcgctggaccagatgggcttcctggcagggacgggcaagcaggacagcagggggagcagggagacgatggggaccctggccccatgggccctgctgggaagagaggaaatccaggtgtggccggcttacctggagcacagggacccccaggattcaagggtgagagtgggttacccggacagctgggtccccctggcaagcgaggaacagagggcagaacggggctccctggaaaccagggggagcctgggtccaaaggccagccgggcgactctggcgagatgggcttcccaggaatggcaggtctcttcggacccaagggcccgcctggagacattggcttcaaaggcatccagggccctcgggggccacctggcttgatgggaaaggaaggcatcgtcgggcccctcggaatcctgggaccttcgggactcccgggtccgaagggtgacaaaggcagccgtggggactggggattgcaaggtccgaggggtcctcccggccccagagggcggcccggccccccggtagaccctggggggccacgatacataccctgtcttttccttgcccagcaacaagatgatcttggggcagctttccagacgtggatggacaccagtggagcactcaggccagagagttacagctatccagaccggctggtgctggaccagggaggagagatctttaaaaccttacactacctcagcaacctcatccagagcattaagacgcccctgggcaccaaagagaaccccgcccgggtctgcagggacctcatggactgtgagcagaagatggtggatggtacctactgggtggatccaaaccttggctgctcctctgacaccatcgaggtctcctgcaacttcactcatggtggacagacgtgtctcaagcccatcacggcctccaaggtcgagtttgccatcagccgggtccagatgaatttcctgcacctgctaagctccgaggtgacccagcacatcaccatccactgccttaacatgaccgtgtggcaggagggcactgggcagaccccagccaagcaggccgtacgcttccgggcctggaatggacagatttttgaagctgggggtcagttccggcccgaggtgtccatggatggctgcaaggtccaagatggccgctggcatcagacactcttcaccttccggacccaagacccccaacagctgcccatcatcagtgtggacaacctccctcctgcctcatcagggaagcagtaccgcctggaagttggacctgcgtgcttcctctga

SEQ ID NO: 226066 - protein, 1524 aa, Artificial Sequence
  derived and/or modified sequence
MAMSNGNNDFVVLSNSSIATSAANPSPLTPCDGDHAAQQLTPKEATRTKVSPNGCLQLNGTVKSSFLPLDNQRMPQMLPQCCHPCPYHHPLTSHSSHQECHPEAGPAAPSALASCCMQPHSEYSASLCPNHSPVYQTTCCLQPSPSFCLHHPWPDHFQHQPVQQHIANIRPSRPFKLPKSYAALIADWPVVVLGMCTMFIVVCALVGVLVPELPDFSDPLLGFEPRGTAIGQRLVTWNNMVKNTGYKATLANYPFKYADEQAKSHRDDRWSDDHYEREKREVDWNFHKDSFFCDVPSDRYSRVVFTSSGGETLWNLPAIKSMCNVDNSRIRSHPQFGDLCQRTTAASCCPSWTLGNYIAILNNRSSCQKIVERDVSHTLKLLRTCAKHYQNGTLGPDCWDMAARRKDQLKCTNVPRKCTKYNAVYQILHYLVDKDFMTPKTADYATPALKYSMLFSPTEKGESMMNIYLDNFENWNSSDGVTTITGIEFGIKHSLFQDYLLMDTVYPAIAIVIVLLVMCVYTKSMFITLMTMFAIISSLIVSYFLYRVVFHFEFFPFMNLTALIILVGIGADDAFVLCDVWNYTKFDKPHAETSETVSITLQHAALSMFVTSFTTAAAFYANYVSNITAIRCFGVYAGTAILVNYVLMVTWLPAVVVLHERYLLNIFTCFKKPQQQIYDNKSCWTVACQKCHKVLFAISEASRIFFEKVLPCIVIKFRYLWLFWFLALTVGGAYIVCINPKMKLPSLELSEFQVFRSSHPFERYDAEYKKLFMFERVHHGEELHMPITVIWGVSPEDNGNPLNPKSKGKLTLDSSFNIASPASQAWILHFCQKLRNQTFFYQTDEQDFTSCFIETFKQWMENQDCDEPALYPCCSHWSFPYKQEIFELCIKRAIMELERSTGYHLDSKTPGPRFDINDTIRAVVLEFQSTYLFTLAYEKMHQFYKEVDSWISSELSSAPEGLSNGWFVSNLEFYDLQDSLSDGTLIAMGLSVAVAFSVMLLTTWNIIISLYAIISIAGTIFVTVGSLVLLGWELNVLESVTISVAVGLSVDFAVHYGVAYRLAPDPDREGKVIFSLSRVGSAMAMAALTTFVAGAMMMPSTVLAYTQLGTFMMLIMCISWAFATFFFQCMCRCLGPQGTCGQIPLPKKLQCSAFSHALSTSPSDKGQSKTHTINAYHLDPRGPKSELEHEFYELEPLASHSCTAPEKTTYEETHICSEFFNSQAKNLGMPVHAAYNSELSKSTESDAGSALLQPPLEQHTVCHFFSLNQRCSCPDAYKHLNYGPHSCQQMGDCLCHQCSPTTSSFVQIQNGVAPLKATHQAVEGFVHPITHIHHCPCLQGRVKPAGMQNSLPRNFFLHPVQHIQAQEKIGKTNVHSLQRSIEEHLPKMAEPSSFVCRSTGSLLKTCCDPENKQRELCKNRDVSNLESSGGTENKAGGKVELSLSQTDASVNSEHFNQNEPKVLFNHLMGEAGCRSCPNNSQSCGRIVRVKCNSVDCQMPNMEANVPAVLTHSELSGESLLIKTL

SEQ ID NO: 226067 - protein, 184 aa, Artificial Sequence
  derived and/or modified sequence
MAMSNGNNDFVVLSNSSIATSAANPSPLTPCDGDHAAQQLTPKEATRTKVSPNGCLQLNGTVKSSFLPLDNQRMPQMLPQCCHPCPYHHPLTSHSSHQECHPEAGPAAPSALASCCMQPHSEYSASLCPNHSPVYQTTCCLQPSPSFCLHHPWPDHFQHQPVQQHIANIRFTRKTKCASWLLQM

SEQ ID NO: 226068 - DNA, 4575 bp, Artificial Sequence
  derived and/or modified sequence
atggccatgagcaacggcaacaacgacttcgtggtgctgagcaacagcagcatcgccaccagcgccgccaaccccagccccctgaccccctgcgacggcgaccacgccgcccagcagctgacccccaaggaggccaccagaaccaaggtgagccccaacggctgcctgcagctgaacggcaccgtgaagagcagcttcctgcccctggacaaccagagaatgccccagatgctgccccagtgctgccacccctgcccctaccaccaccccctgaccagccacagcagccaccaggagtgccaccccgaggccggccccgccgcccccagcgccctggccagctgctgcatgcagccccacagcgagtacagcgccagcctgtgccccaaccacagccccgtgtaccagaccacctgctgcctgcagcccagccccagcttctgcctgcaccacccctggcccgaccacttccagcaccagcccgtgcagcagcacatcgccaacatcagacccagcagacccttcaagctgcccaagagctacgccgccctgatcgccgactggcccgtggtggtgctgggcatgtgcaccatgttcatcgtggtgtgcgccctggtgggcgtgctggtgcccgagctgcccgacttcagcgaccccctgctgggcttcgagcccagaggcaccgccatcggccagagactggtgacctggaacaacatggtgaagaacaccggctacaaggccaccctggccaactaccccttcaagtacgccgacgagcaggccaagagccacagagacgacagatggagcgacgaccactacgagagagagaagagagaggtggactggaacttccacaaggacagcttcttctgcgacgtgcccagcgacagatacagcagagtggtgttcaccagcagcggcggcgagaccctgtggaacctgcccgccatcaagagcatgtgcaacgtggacaacagcagaatcagaagccacccccagttcggcgacctgtgccagagaaccaccgccgccagctgctgccccagctggaccctgggcaactacatcgccatcctgaacaacagaagcagctgccagaagatcgtggagagagacgtgagccacaccctgaagctgctgagaacctgcgccaagcactaccagaacggcaccctgggccccgactgctgggacatggccgccagaagaaaggaccagctgaagtgcaccaacgtgcccagaaagtgcaccaagtacaacgccgtgtaccagatcctgcactacctggtggacaaggacttcatgacccccaagaccgccgactacgccacccccgccctgaagtacagcatgctgttcagccccaccgagaagggcgagagcatgatgaacatctacctggacaacttcgagaactggaacagcagcgacggcgtgaccaccatcaccggcatcgagttcggcatcaagcacagcctgttccaggactacctgctgatggacaccgtgtaccccgccatcgccatcgtgatcgtgctgctggtgatgtgcgtgtacaccaagagcatgttcatcaccctgatgaccatgttcgccatcatcagcagcctgatcgtgagctacttcctgtacagagtggtgttccacttcgagttcttccccttcatgaacctgaccgccctgatcatcctggtgggcatcggcgccgacgacgccttcgtgctgtgcgacgtgtggaactacaccaagttcgacaagccccacgccgagaccagcgagaccgtgagcatcaccctgcagcacgccgccctgagcatgttcgtgaccagcttcaccaccgccgccgccttctacgccaactacgtgagcaacatcaccgccatcagatgcttcggcgtgtacgccggcaccgccatcctggtgaactacgtgctgatggtgacctggctgcccgccgtggtggtgctgcacgagagatacctgctgaacatcttcacctgcttcaagaagccccagcagcagatctacgacaacaagagctgctggaccgtggcctgccagaagtgccacaaggtgctgttcgccatcagcgaggccagcagaatcttcttcgagaaggtgctgccctgcatcgtgatcaagttcagatacctgtggctgttctggttcctggccctgaccgtgggcggcgcctacatcgtgtgcatcaaccccaagatgaagctgcccagcctggagctgagcgagttccaggtgttcagaagcagccaccccttcgagagatacgacgccgagtacaagaagctgttcatgttcgagagagtgcaccacggcgaggagctgcacatgcccatcaccgtgatctggggcgtgagccccgaggacaacggcaaccccctgaaccccaagagcaagggcaagctgaccctggacagcagcttcaacatcgccagccccgccagccaggcctggatcctgcacttctgccagaagctgagaaaccagaccttcttctaccagaccgacgagcaggacttcaccagctgcttcatcgagaccttcaagcagtggatggagaaccaggactgcgacgagcccgccctgtacccctgctgcagccactggagcttcccctacaagcaggagatcttcgagctgtgcatcaagagagccatcatggagctggagagaagcaccggctaccacctggacagcaagacccccggccccagattcgacatcaacgacaccatcagagccgtggtgctggagttccagagcacctacctgttcaccctggcctacgagaagatgcaccagttctacaaggaggtggacagctggatcagcagcgagctgagcagcgcccccgagggcctgagcaacggctggttcgtgagcaacctggagttctacgacctgcaggacagcctgagcgacggcaccctgatcgccatgggcctgagcgtggccgtggccttcagcgtgatgctgctgaccacctggaacatcatcatcagcctgtacgccatcatcagcatcgccggcaccatcttcgtgaccgtgggcagcctggtgctgctgggctgggagctgaacgtgctggagagcgtgaccatcagcgtggccgtgggcctgagcgtggacttcgccgtgcactacggcgtggcctacagactggcccccgaccccgacagagagggcaaggtgatcttcagcctgagcagagtgggcagcgccatggccatggccgccctgaccaccttcgtggccggcgccatgatgatgcccagcaccgtgctggcctacacccagctgggcaccttcatgatgctgatcatgtgcatcagctgggccttcgccaccttcttcttccagtgcatgtgcagatgcctgggcccccagggcacctgcggccagatccccctgcccaagaagctgcagtgcagcgccttcagccacgccctgagcaccagccccagcgacaagggccagagcaagacccacaccatcaacgcctaccacctggaccccagaggccccaagagcgagctggagcacgagttctacgagctggagcccctggccagccacagctgcaccgcccccgagaagaccacctacgaggagacccacatctgcagcgagttcttcaacagccaggccaagaacctgggcatgcccgtgcacgccgcctacaacagcgagctgagcaagagcaccgagagcgacgccggcagcgccctgctgcagccccccctggagcagcacaccgtgtgccacttcttcagcctgaaccagagatgcagctgccccgacgcctacaagcacctgaactacggcccccacagctgccagcagatgggcgactgcctgtgccaccagtgcagccccaccaccagcagcttcgtgcagatccagaacggcgtggcccccctgaaggccacccaccaggccgtggagggcttcgtgcaccccatcacccacatccaccactgcccctgcctgcagggcagagtgaagcccgccggcatgcagaacagcctgcccagaaacttcttcctgcaccccgtgcagcacatccaggcccaggagaagatcggcaagaccaacgtgcacagcctgcagagaagcatcgaggagcacctgcccaagatggccgagcccagcagcttcgtgtgcagaagcaccggcagcctgctgaagacctgctgcgaccccgagaacaagcagagagagctgtgcaagaacagagacgtgagcaacctggagagcagcggcggcaccgagaacaaggccggcggcaaggtggagctgagcctgagccagaccgacgccagcgtgaacagcgagcacttcaaccagaacgagcccaaggtgctgttcaaccacctgatgggcgaggccggctgcagaagctgccccaacaacagccagagctgcggcagaatcgtgagagtgaagtgcaacagcgtggactgccagatgcccaacatggaggccaacgtgcccgccgtgctgacccacagcgagctgagcggcgagagcctgctgatcaagaccctgtag

SEQ ID NO: 226069 - DNA, 555 bp, Artificial Sequence
  derived and/or modified sequence
atggccatgagcaacggcaacaacgacttcgtggtgctgagcaacagcagcatcgccaccagcgccgccaaccccagccccctgaccccctgcgacggcgaccacgccgcccagcagctgacccccaaggaggccaccagaaccaaggtgagccccaacggctgcctgcagctgaacggcaccgtgaagagcagcttcctgcccctggacaaccagagaatgccccagatgctgccccagtgctgccacccctgcccctaccaccaccccctgaccagccacagcagccaccaggagtgccaccccgaggccggccccgccgcccccagcgccctggccagctgctgcatgcagccccacagcgagtacagcgccagcctgtgccccaaccacagccccgtgtaccagaccacctgctgcctgcagcccagccccagcttctgcctgcaccacccctggcccgaccacttccagcaccagcccgtgcagcagcacatcgccaacatcagattcaccagaaagaccaagtgcgccagctggctgctgcagatgtag

SEQ ID NO: 226070 - DNA, 4762 bp, Artificial Sequence
  derived and/or modified sequence
attcagtctgtcctgccgctctgtggagctgcgcctgccaactcattgctttctgctgtgctgtgatcctgcagtcagttgccgctgttgctactgcaatcatttgcaccaaactgagccagagaagttccctcttttaacataaagagtcaagaaattggagcatggctatgagcaatggaaacaatgattttgtggttctgagcaacagcagcatcgcaaccagtgctgctaacccgagtcccctcaccccctgtgatggagaccatgcagcccagcagctcacacccaaagaagcaacaagaacaaaagtgagtccaaatggatgcctgcaacttaatggcacggtcaaatcatcctttctgcctttagacaaccaaagaatgcctcagatgttaccccaatgctgccatccttgcccataccatcaccctttgactagccatagcagtcaccaagagtgccatcccgaggctggccctgcagcaccctctgctttggcctcgtgttgcatgcagccacactccgagtattctgcatctctttgtccaaatcattcacctgtgtatcagactacgtgctgtcttcagccctctccatccttctgcctgcatcatccgtggcctgaccattttcagcatcagcctgtgcaacagcacatagccaacataagaccatccagacctttcaagttgccaaaaagttatgcagccctgatagccgactggccggtggtggtcttgggcatgtgcaccatgttcatcgtagtctgtgccttggttggagtattagtgccagagctccctgacttctctgatccattgctgggttttgaaccaagaggaacagcaataggccagagattggtcacatggaataatatggtgaaaaatacaggatacaaagcaacattagcaaattatccctttaaatatgcagatgaacaagccaaaagccatcgggatgatagatggtcagatgatcattatgaaagagagaaaagagaagttgactggaacttccacaaggacagctttttctgcgacgttccaagtgaccgatattccagagtggtatttacttcatctggaggggagacattatggaatttacctgcaattaaatcaatgtgcaatgtagataattccaggatcagatctcatccccagtttggtgatctctgccagaggaccactgctgcctcctgctgccccagctggacactgggaaactacatcgccattctgaacaatagatcgtcctgtcagaaaatagttgagcgagacgtttctcataccttgaagctgcttcggacttgtgccaaacactaccaaaatggcactctggggccagactgctgggacatggcagccagaagaaaggaccagctcaagtgcaccaatgtgccacgcaaatgtaccaagtacaatgctgtgtaccagatcctccattacttggtggacaaagactttatgaccccaaagacggctgactatgccacgccagctttaaaatacagcatgctcttctctcccacagagaaaggggagagcatgatgaacatttacttggacaactttgaaaactggaactcttctgacggcgtgactaccatcaccgggattgagtttggtatcaaacacagtttgtttcaggattatcttctaatggatactgtgtatcctgccatagccattgtgattgtccttttagttatgtgtgtctacaccaagtccatgtttatcactctgatgacaatgtttgcaataatcagttctttgattgtttcctattttctctatcgtgtagtatttcacttcgaattttttccttttatgaacctcactgccctcattattttggttggaattggagcagatgatgcttttgtcctgtgtgatgtttggaactacacaaaatttgataagcctcatgccgaaacctcagaaacagtaagcatcaccttgcagcacgctgccctctccatgttcgtcaccagttttaccactgctgctgccttttatgctaactatgttagcaacattacagcaatccgatgctttggggtttatgcggggacagctatattggtgaattacgttttgatggtcacatggcttccagcagttgttgtgctgcatgagcggtatcttcttaatatattcacttgcttcaaaaagccccagcagcaaatatatgataacaaaagctgctggacagtggcttgccagaagtgccacaaagtactctttgccatttcagaagcatctcgaatttttttcgaaaaagtattgccatgcattgtcattaagtttcgctacctttggctgttttggttccttgccttaactgtaggtggggcctacattgtatgtataaatccaaagatgaaactgccctcactggagttatccgagttccaggtgttccggtcgtcccatccttttgagcgttatgatgctgaatacaaaaagcttttcatgtttgaacgtgttcaccatggcgaggagctccacatgcccatcacagtaatctggggcgtgtccccagaagacaatggcaacccactaaatcccaagagtaaagggaagttgacattagatagcagttttaacatcgccagcccagcttcccaggcctggattttgcacttctgtcaaaaactgagaaaccaaacattcttttaccagactgatgaacaggacttcaccagctgcttcattgagacattcaaacagtggatggaaaaccaggactgtgatgagcctgccctgtacccatgctgcagccactggagcttcccctacaagcaagagatttttgaactgtgcatcaagagagctatcatggagctggaaaggagtacagggtaccatttggatagcaaaaccccagggccgaggtttgatatcaatgatactatcagggcagtggtgttagagttccagagtacctacctcttcacactggcttatgaaaagatgcatcagttttataaagaggtggactcgtggatatccagtgagctgagttcggcccctgaaggcctcagcaatggttggtttgtcagcaatctggagttctatgacctccaggatagcctctccgatggcaccctcattgccatggggctgtcagttgctgttgcatttagcgtgatgctgctgacaacttggaacatcatcataagcctttatgccatcatttcaattgctggaacgatatttgtcactgttggttctcttgtcctgctgggctgggagctcaatgtgttggaatctgtcaccatttcggttgccgtcggcttgtctgtagactttgccgtccattatggggttgcctaccgcttggctccagatcccgaccgagaaggcaaagtgatcttctctctgagtcgcgtgggctctgcgatggccatggctgccctgaccaccttcgtggcaggggccatgatgatgccctccacagttctagcttacacccagctgggcaccttcatgatgctcatcatgtgtatcagttgggctttcgccaccttctttttccagtgcatgtgccggtgccttggaccacagggtacctgtggtcagattcctttacctaaaaaactacagtgcagtgccttttcccatgccttgtctacaagtcccagtgacaagggacaaagcaaaacacataccataaatgcttatcatttagatcccaggggcccaaaatctgaactggagcatgagttttatgaattagaacctctggcttcccacagctgcactgcccctgagaagaccacttatgaagagacccacatctgctctgaatttttcaacagccaagcaaagaatttagggatgcctgtgcatgcagcttacaacagtgaactcagcaaaagcactgaaagtgacgctggctctgccttgttacagccccctcttgaacagcataccgtgtgtcacttcttctctctgaatcagagatgtagctgcccagatgcctacaaacacttgaactatggcccacactcttgccagcagatgggggactgcttgtgccaccagtgctctcctaccactagcagctttgtccagatccaaaacggcgtggcacctctgaaggccacacaccaagctgtcgagggctttgtgcaccccatcacgcacatccaccactgtccctgcctgcagggcagagtaaagccagccggaatgcagaattctctgcctaggaattttttcctccacccagtgcagcacattcaggcccaagaaaaaattggcaagaccaatgtacacagtcttcagaggagcatagaagagcatcttccaaagatggcagagccatcgtcatttgtctgcagaagcactggatcgttactcaaaacgtgttgcgaccccgagaataaacaaagggaactctgtaaaaatagagacgtgagcaatctggagagcagtggagggactgaaaacaaggcaggagggaaagtggagctgagcttgtcacagacggatgcaagtgtgaactcagaacatttcaatcagaatgaaccaaaagtcctatttaatcatttaatgggggaggctggttgtaggtcttgcccaaataattcacaaagttgtggcagaattgtgagagtgaagtgcaattctgtggactgtcaaatgccaaacatggaagccaatgtgcctgctgtattaacacactcggaactttctggtgaaagtttgttaataaaaacactataataaatgcagcattcaattcagaa

SEQ ID NO: 226071 - DNA, 1070 bp, Artificial Sequence
  derived and/or modified sequence
gctttggtatcaggatgatgctggcctcataaaatgagttaaggaggattccctctttttctattgattggaatagtttcagaaggaatggtaccagctcctccttgtgcctctggtagaattcggctgtgaatccatctggtcctggactttttttggttgtctgtcctgccgctctgtggagctgcgcctgccaactcattgctttctgctgtgctgtgatcctgcagtcagttgccgctgttgctactgcaatcatttgcaccaaactgagccagagaagttccctcttttaacataaagagtcaagaaattggagcatggctatgagcaatggaaacaatgattttgtggttctgagcaacagcagcatcgcaaccagtgctgctaacccgagtcccctcaccccctgtgatggagaccatgcagcccagcagctcacacccaaagaagcaacaagaacaaaagtgagtccaaatggatgcctgcaacttaatggcacggtcaaatcatcctttctgcctttagacaaccaaagaatgcctcagatgttaccccaatgctgccatccttgcccataccatcaccctttgactagccatagcagtcaccaagagtgccatcccgaggctggccctgcagcaccctctgctttggcctcgtgttgcatgcagccacactccgagtattctgcatctctttgtccaaatcattcacctgtgtatcagactacgtgctgtcttcagccctctccatccttctgcctgcatcatccgtggcctgaccattttcagcatcagcctgtgcaacagcacatagccaacataagattcaccagaaaaactaagtgtgcttcatggcttcttcagatgtgaacgtgttcactgaaagcccagtctgtgtaaagctgctaagccctcaccagctcactggagtggccctgcactccgtccctctatgcatacttggatagccctggccagctgagcgctgcaggtcaggaggctgctgtctcctacagccacacacttctgctcccagcatttgacaagtgtgcttaccaaacccac

SEQ ID NO: 226072 - DNA, 4575 bp, Artificial Sequence
  derived and/or modified sequence
atggcaatgtccaacggcaataacgatttcgtggtgctttctaacagctccatcgctacatccgctgctaatccatcccctctgaccccatgtgatggcgatcacgccgctcagcagctcaccccaaaggaggcgacccggaccaaagtctcaccgaatggctgcttgcagcttaacggaactgtgaagagtagctttcttcccctggataatcagcgaatgccccagatgctgcctcaatgctgccacccctgtccttatcatcatcccctgacctcccactcctcccaccaggaatgtcatcctgaggctggaccagcagcaccctctgctctggcgtcatgttgtatgcagcctcactctgagtattctgcatctctctgccccaaccactcccccgtctaccagacaacctgttgtttacagccttctccctctttctgcctgcaccatccatggcccgaccatttccagcaccagcccgtgcagcaacacatcgcaaacatccgcccaagccgccctttcaagctgccaaagagctacgctgccctgatcgctgattggccagtggtggtgttaggcatgtgcacgatgtttattgtggtttgcgcccttgtgggagttctcgtgccagagctccccgacttctctgaccctttgctcggatttgagcctcgcggcaccgcgattggccagaggctcgtcacttggaacaacatggtaaagaacacgggctacaaagcgaccctcgccaactaccccttcaaatacgccgatgaacaggctaaatcccacagagatgataggtggagtgacgaccactacgagagagaaaaacgcgaagttgactggaacttccacaaggactctttcttttgtgacgttccctcagatagatattcccgcgtggtgttcacaagcagcggcggggaaacactttggaatctgccggcgattaaaagcatgtgtaacgtggataactctcgtattaggagccatccccagttcggagacctgtgccaacggacgactgctgcttcctgctgtcctagttggactctgggaaactatatagccattctgaataacagaagttcgtgtcagaagatcgtagaaagagatgtgtcccataccctgaagctgctacgaacttgtgccaagcattaccagaatggaactctgggaccagactgctgggacatggccgctcgcagaaaggaccagttgaaatgcaccaacgtccccagaaagtgtacaaagtacaacgcagtataccagattcttcattatcttgtagacaaggacttcatgacaccaaagacagccgactatgccacacccgctctgaaatatagcatgctcttcagccctaccgaaaagggcgagtccatgatgaacatctaccttgacaactttgaaaattggaactcctcggacggggttactaccatcacagggattgagttcggtatcaaacatagcctctttcaggattacctcctgatggacaccgtgtatccagccatcgctatagtaattgtcttattggttatgtgtgtgtatactaagagcatgtttataacactgatgacaatgtttgctataatctccagcctgatcgtgagctattttctgtaccgggtggtgtttcacttcgaatttttcccatttatgaatctaacggctctgattatccttgttggaatcggggcggatgacgcatttgtcttgtgcgacgtgtggaattacactaaatttgataagccccatgccgagacatccgaaactgtcagcataacactgcaacacgcagccctttcaatgttcgtcacttccttcacaaccgctgcagcattttatgctaactatgtgtccaacattacagccattcggtgctttggagtgtatgccggtactgcaatcctcgtaaattatgtgctcatggtgacgtggctcccagcagttgtcgtcttgcacgagcggtaccttctgaacatcttcacatgttttaagaagcctcaacagcagatctatgacaataaaagttgctggacagtggcctgccagaaatgtcacaaggtcctctttgcaatatcagaagcaagtagaatcttttttgagaaagtgttaccttgcatcgtgatcaaatttagatatttgtggctcttctggtttctggccctcacggttggaggcgcatatatagtctgcatcaatccaaagatgaagctaccgagccttgaactctccgagttccaggtctttcggtcttctcatcccttcgaacgctatgatgccgagtataagaagttgtttatgttcgagcgggttcaccacggcgaggagctccacatgcctattaccgttatttggggggtctctcccgaggacaatggaaatccactcaaccctaagtcaaaaggaaagttgactctcgattcatccttcaacatagcaagccctgcaagccaggcctggatcctccatttctgccaaaaacttcggaaccagacattcttttaccagaccgatgaacaggattttacctcttgttttattgaaacctttaaacagtggatggagaatcaggactgtgacgaacctgcactctatccctgttgttctcactggagcttcccctataaacaggaaattttcgagttatgcattaagagagcgatcatggagttagaacggtctaccgggtatcatctggattccaagacacctggtcctcgttttgatattaatgacactatccgtgctgtcgtgcttgaatttcagtccacttatctttttactcttgcctacgagaagatgcaccagttttacaaagaggtggattcgtggatttcaagcgaactgtcctcagcccccgaagggctatccaacggctggtttgtgtcgaacctggagttttatgatctgcaagactctttgtctgatggaacgctgatagccatgggtttaagtgtcgctgtggcattctcagtcatgctgctcaccacgtggaatatcatcattagtctgtatgctatcataagtatcgctggtaccatatttgtgacagtaggcagcctggtgctgctgggctgggaactgaacgttctagagtcagtcacaataagcgtcgcagtgggattgagcgtggacttcgctgtgcattacggtgtggcgtatcgtttagcacccgatccagatagagaagggaaagtgattttcagcttgtcacgtgttgggtctgccatggccatggcagcactgacaacattcgtggcaggagccatgatgatgccatccacggtgctggcttatacccaactcgggacctttatgatgctgattatgtgcatctcctgggcttttgctacctttttcttccagtgcatgtgccgttgcttgggccctcaggggacttgtggccagatccccctgccaaagaaactgcagtgctctgctttttcccacgctttaagcacaagcccctcagacaaaggacagtcaaaaacacataccatcaacgcttatcatctggacccacgtggccccaagagcgagctggaacacgaattttatgagctggaacctctcgcaagccactcgtgcaccgcccctgaaaaaactacgtacgaggagacacacatctgctcagagttcttcaatagtcaagccaagaatctcggcatgcccgtgcatgccgcatacaattccgagttatcgaagagcaccgaaagcgatgctggatccgccctgctgcagcccccactggagcagcacaccgtctgtcactttttctctctgaaccaacgatgcagttgccccgatgcttataagcatctgaactacggaccgcactcctgtcaacagatgggcgactgtctatgccatcaatgctcacctactactagctcctttgttcagatccagaacggagtcgcaccactcaaagctacgcaccaggctgtggagggatttgttcacccaatcacccacatacatcactgcccctgtttgcagggaagagtcaaacccgccgggatgcagaatagcctgcctcgcaactttttcctgcacccagtgcagcacatccaggctcaggagaagattggcaagaccaacgtacatagcttgcagcgctctatagaagagcatttgccaaaaatggccgagcctagttcgtttgtttgtcgcagtacaggctcattactcaagacatgttgtgacccagagaacaagcagcgcgaactgtgtaaaaacagagatgtatctaatctcgaatcgtctgggggcactgagaacaaggctggcggtaaggtcgagctttcgcttagccagacggatgcgtctgtcaactccgagcactttaaccagaatgaacctaaggtgttgttcaatcacctcatgggagaagcaggatgcagatcctgtccgaacaactcccaaagctgtggtcgcattgtgcgcgtgaagtgcaacagcgtggattgtcagatgcctaatatggaagcaaacgttcccgcagtgttaacccacagcgaactgtcaggtgaaagcctgttgatcaaaacattgtag

SEQ ID NO: 226073 - DNA, 555 bp, Artificial Sequence
  derived and/or modified sequence
atggcaatgagcaatggtaacaacgatttcgtcgtgctctcaaactcatcaattgctacctccgcagctaatccttccccacttactccatgtgatggggaccacgccgctcaacagctcacacccaaggaggccactcgaactaaggtgagcccgaacggatgtcttcagctgaacggaaccgtcaagtcctctttcctgccattggataatcagcggatgccacagatgcttccacaatgctgtcatccttgtccctatcaccatccactgacttcccacagtagccaccaggagtgccatcctgaggcggggcctgccgccccgtctgcattagcatcatgttgcatgcagcctcacagtgaatactcggcatcgttgtgcccaaaccacagcccagtctaccagacaacatgttgcctacagccatccccatccttctgtctgcaccatccttggcccgatcacttccagcatcagcctgtgcaacagcatatcgctaacatcaggttcacacgaaaaacaaaatgcgctagctggctcctccaaatgtag

SEQ ID NO: 226074 - DNA, 4575 bp, Artificial Sequence
  derived and/or modified sequence
atggccatgagcaatggaaataatgactttgtggtgctgagcaacagcagcatcgccaccagcgctgccaaccccagccccctgaccccctgtgatggagaccacgccgcccagcagctgacccccaaggaggccaccaggaccaaggtgagccccaacggctgcctgcagctgaatggaacagtgaagagcagcttcctgcccctggacaaccagaggatgccccagatgctgccccagtgctgccacccctgcccctaccaccaccccctgaccagccacagcagccaccaggagtgccaccctgaggccggccctgctgcccccagcgccctggccagctgctgcatgcagccccacagcgagtacagcgccagcctgtgccccaaccacagccctgtgtaccagaccacctgctgcctgcagcccagccccagcttctgcctgcaccacccctggccagaccacttccagcaccagcctgtgcagcagcacatcgccaacatccggcccagccggcccttcaagctgcccaagagctatgctgccctgattgctgactggcctgtggtggtgctgggcatgtgcaccatgttcatcgtggtgtgtgccctggtgggcgtgctggtgcctgagctgcctgacttcagtgaccccctgctgggctttgagccccggggcacagccatcggccagaggctggtgacctggaacaacatggtgaagaacacaggctacaaggccaccctggccaactaccccttcaagtatgcagatgagcaggccaagagccacagagatgaccgctggagcgatgaccactatgagcgggagaagcgggaggtggactggaacttccacaaggacagcttcttctgtgatgtgcccagcgaccgctacagccgggtggtgttcaccagcagcggcggggagaccctgtggaacctgcctgccatcaagtccatgtgcaatgtggacaacagccgcatccgcagccacccccagtttggagacctgtgccagaggaccacagctgccagctgctgccccagctggaccctgggcaactacatcgccatcctgaacaacagaagcagctgccagaagatcgtggagagagatgtgagccacaccctgaagctgctgcggacctgtgccaagcactaccagaatggcaccctgggccctgactgctgggacatggccgcccggaggaaggaccagctgaagtgcaccaacgtgcccaggaagtgcaccaagtacaatgctgtgtaccagatcctgcactacctggtggacaaggacttcatgacccccaagacagctgactatgccaccccagccctgaagtacagcatgctgttcagccccacagagaagggggagagcatgatgaacatctacctggacaactttgagaactggaacagcagtgatggagtgaccaccatcactggaattgaatttggcatcaagcacagcctcttccaggactacctgctgatggacacagtgtacccagccatcgccatcgtgattgtgctgctggtgatgtgtgtgtacaccaagtccatgttcatcaccctgatgaccatgtttgccatcatcagcagcctcatcgtgtcctacttcctgtacagagtggtgttccactttgagttcttccccttcatgaacctgacagccctgatcatcctggtgggcattggagcagatgatgcctttgtgctgtgtgatgtgtggaactacaccaagtttgacaagccccatgctgagaccagcgagaccgtgtccatcaccctgcagcacgccgccctgtccatgtttgtgaccagcttcaccacagctgctgccttctacgccaactacgtgagcaacatcacagccatccgctgctttggagtgtatgccggcacagccatcctggtgaactacgtgctgatggtgacctggctgcctgctgtggtggtgctgcacgagcgctacctgctgaacatcttcacctgcttcaagaagccccagcagcagatctatgacaacaagagctgctggacagtggcctgccagaagtgccacaaggtgctgtttgccatcagcgaggccagccgcatcttctttgagaaggtgctgccctgcatcgtcatcaagttccgctacctgtggctgttctggttcctggccctgactgtgggcggggcctacatcgtgtgcatcaaccccaagatgaagctgcccagcctggagctgtctgagttccaggtgttccgcagcagccacccctttgaaagatatgatgctgagtacaagaagctgttcatgtttgagcgggtgcaccacggggaggagctgcacatgcccatcaccgtcatctggggcgtgtccccagaggacaatggaaaccccctgaaccccaagagcaagggcaagctgaccctggacagcagcttcaacatcgccagccctgccagccaggcctggatcctgcacttctgccagaagctgaggaaccagaccttcttctaccagacagatgagcaggacttcaccagctgcttcatcgagaccttcaagcagtggatggagaaccaggactgtgatgagcccgccctgtacccctgctgcagccactggagcttcccctacaagcaggagatctttgagctgtgcatcaagagggccatcatggagctggagaggagcacaggctaccacctggacagcaagaccccaggccccaggtttgacatcaatgacaccatccgggctgtggtgctggagttccagagcacctacctgttcaccctggcctatgagaagatgcaccagttctacaaggaggtggacagctggatcagcagcgagctgagcagcgcccctgagggcctgagcaatggctggtttgtgagcaacctggagttctatgacctgcaggacagcctgagtgatggcaccctcatcgccatgggcctgtctgtggccgtggccttctctgtgatgctgctgaccacctggaacatcatcatcagcctgtatgccatcatcagcattgctggcaccatctttgtgacagtgggcagcctggtgctgctgggctgggagctgaatgtgctggagagcgtgaccatctctgtggccgtgggcctgtctgtggactttgctgtgcactacggcgtggcctaccgcctggccccagaccctgaccgggagggcaaggtgatcttcagcctgagccgggtgggcagcgccatggccatggccgccctgaccacctttgtggccggggccatgatgatgcccagcacagtgctggcctacacccagctgggcaccttcatgatgctgatcatgtgcatctcctgggcctttgccaccttcttcttccagtgcatgtgccgctgcctgggcccccagggcacctgtggccagatccccctgcccaagaagctgcagtgcagcgccttcagccacgccctgagcaccagccccagcgacaagggccagagcaagacccacaccatcaatgcctaccacctggacccccggggccccaagtctgagctggagcacgagttctatgagctggagcccctggccagccacagctgcacagcccctgagaagaccacctatgaggagacccacatctgcagcgagttcttcaacagccaggccaagaacctgggcatgcctgtgcatgctgcctacaacagcgagctgagcaagagcacagaaagtgatgctggcagcgccctgctgcagccccccctggagcagcacacagtgtgccacttcttcagcctgaaccagcgctgcagctgcccagatgcctacaagcacctgaactacggcccccacagctgccagcagatgggagactgcctgtgccaccagtgcagccccaccaccagcagctttgtgcagatccagaatggagtggcccccctgaaggccacccaccaggccgtggagggctttgtgcaccccatcacccacatccaccactgcccctgcctgcagggccgggtgaagccagctggcatgcagaacagcctgcccaggaacttcttcctgcaccctgtgcagcacatccaggcccaggagaagattggcaagaccaacgtgcacagcctgcagaggagcattgaggagcacctgcccaagatggccgagcccagcagctttgtgtgccgcagcacaggcagcctgctgaagacctgctgtgaccctgagaacaagcagcgggagctgtgcaagaacagagatgtgagcaacctggagagcagcggcggcacagagaacaaggccggcggcaaggtggagctgagcctgagccagacagatgcctctgtgaacagcgagcacttcaaccagaatgagcccaaggtgctcttcaaccacctgatgggagaggccggctgccgcagctgccccaacaacagccagagctgtggccgcatcgtgcgggtgaagtgcaacagcgtggactgccagatgcccaacatggaggccaacgtgcctgctgtgctgacccacagcgagctgtctggagagagcctgctgatcaagaccctgtag

SEQ ID NO: 226075 - DNA, 555 bp, Artificial Sequence
  derived and/or modified sequence
atggccatgagcaatggaaataatgactttgtggtgctgagcaacagcagcatcgccaccagcgctgccaaccccagccccctgaccccctgtgatggagaccacgccgcccagcagctgacccccaaggaggccaccaggaccaaggtgagccccaacggctgcctgcagctgaatggaacagtgaagagcagcttcctgcccctggacaaccagaggatgccccagatgctgccccagtgctgccacccctgcccctaccaccaccccctgaccagccacagcagccaccaggagtgccaccctgaggccggccctgctgcccccagcgccctggccagctgctgcatgcagccccacagcgagtacagcgccagcctgtgccccaaccacagccctgtgtaccagaccacctgctgcctgcagcccagccccagcttctgcctgcaccacccctggccagaccacttccagcaccagcctgtgcagcagcacatcgccaacatccgcttcaccaggaagaccaagtgtgcctcctggctgctgcagatgtag

SEQ ID NO: 226076 - DNA, 4575 bp, Artificial Sequence
  derived and/or modified sequence
atggccatgagcaacggcaacaacgacttcgtggtgctgagcaactcttctattgcaacctccgcagctaatccctcaccactcactccttgcgatggagatcatgcagcacagcagctgaccccgaaagaagccactcggacaaaggtttcccccaacggctgcctacaactgaatggcacggtgaagtcaagctttttaccgctggataaccagagaatgccccagatgttgccacagtgctgtcacccatgtccctaccaccacccgctcaccagccattcttcccatcaagaatgtcaccccgaagcaggcccagctgcgccaagtgccttagcaagctgctgcatgcagcctcactcagaatactctgcttctctctgccctaaccatagtcctgtctatcaaaccacttgctgtctgcagccaagcccctccttttgcctgcatcacccttggccggatcactttcagcatcagcctgttcagcagcacatagcaaatatcagaccgagtaggccattcaaattgccaaagagttatgccgcattgatcgccgactggccagtagtagtactgggaatgtgtactatgtttatcgtcgtgtgtgcactggtgggagttctggtcccagaattgcctgattttagtgatccccttctcggatttgagcctcgcggtaccgccatcggccaaagactcgtcacctggaacaatatggttaaaaatacaggatataaagccacccttgctaactaccccttcaaatatgcagatgaacaagctaaaagccatcgcgacgataggtggtcggatgaccactatgagcgtgagaaacgggaagtcgattggaacttccataaagactcctttttctgcgatgttcccagtgaccgatattccagggtggtcttcacatcttcagggggcgaaactctgtggaacctgcccgccatcaaaagcatgtgcaacgtggacaattctaggattcgatcccatccgcagtttggcgacctgtgtcagcgcacgaccgccgcctcgtgttgcccctcctggacgctagggaattacatcgcaattctcaataaccgcagcagttgccaaaaaatcgtcgaacgagacgtgtcccatacattgaagctcctccggacttgtgctaagcactatcagaacggaacactgggtcctgattgctgggacatggctgctcggcgaaaggaccagctcaagtgtacaaatgtccctcggaagtgcaccaaatataatgctgtctatcagatactccattacctggttgataaggacttcatgacccccaaaaccgctgattatgcaactcccgccctgaagtacagcatgctcttctcaccgacagagaaaggggaaagcatgatgaacatctacctcgacaactttgaaaactggaacagctcagatggcgttactacaatcacgggcattgagttcggcataaaacacagtctttttcaggattacttgctgatggataccgtgtacccagctattgccattgtcatcgtgctactggtcatgtgtgtgtacacaaaaagcatgttcattaccttgatgacaatgtttgccattatcagctctctgatcgtgtcctattttctttaccgcgttgtgtttcattttgagttttttccgttcatgaatctgaccgccctcattatcctggttggcattggagcagacgatgcctttgttctatgcgatgtgtggaattatactaaattcgataagccccacgctgaaaccagcgaaacagtaagcattactcttcagcatgccgctctgtctatgtttgtcacctctttcacgaccgccgcagctttctatgccaactacgtgtcaaatataaccgccatacggtgctttggtgtgtatgctgggactgcaatcctcgtgaactatgtgctgatggtaacgtggctcccagcagtggttgtccttcacgagaggtatctgctgaatatcttcacttgcttcaaaaagcctcagcagcaaatctacgacaataagtcttgctggacagtcgcctgtcagaaatgccacaaagtcttgttcgcgatctcagaggcctcccgcatctttttcgagaaagtcttgccgtgcatagtgatcaagttcagatatctctggttattttggtttctggcactgaccgtgggaggggcttatatagtatgtattaatcctaagatgaaactcccctcattggaattatccgagtttcaggtgtttagatctagccatcccttcgagcgatatgatgccgaatataagaaactgtttatgtttgaacgagttcatcatggggaagagctgcacatgccaatcacagtgatctggggagtgtctcctgaggataatgggaaccctctgaaccctaagtccaagggcaagctgacactggactcatcctttaacattgcttcccccgcatcacaggcatggatcctccacttctgtcagaagctgagaaaccagacatttttctatcagacagacgagcaggacttcacctcctgttttattgagacttttaagcagtggatggaaaaccaggactgtgacgaacccgctttgtatccatgctgttcccattggtcttttccatacaagcaggagattttcgagctgtgcattaaacgagcgataatggaactggagagatccacaggctatcatctggatagtaaaacccccggccccagatttgatatcaatgacacaatcagggcagtcgtgcttgagttccagagtacgtatctgttcaccctggcctacgagaagatgcaccagttctacaaggaagtggactcctggatctcatcagaactgagttcagcgcccgaaggactcagcaacggatggtttgtgagtaatctcgagttctacgatttgcaggatagccttagcgacggaactctaattgcaatgggactgagcgtcgccgtggccttctccgtaatgctgctgaccacatggaatattatcattagcctgtatgcaattatttccattgcagggaccatctttgtaacagttggatcgttggttttactgggatgggaactaaatgtcttggagtccgtcaccatctctgtcgcggttggactatctgtggatttcgctgtgcactatggtgtcgcctacagactcgcacctgatcctgatcgcgagggtaaagtcatcttcagtttgtctcgcgtcggaagcgcgatggccatggctgcattaaccactttcgtagccggcgcaatgatgatgcccagcacagtattggcttacacccagctcggtacattcatgatgcttatcatgtgtatatcttgggcatttgctacattcttcttccagtgtatgtgtcgctgcctgggaccccagggtacttgtggccagatccccctgcccaaaaaactgcagtgcagcgcgttcagccacgctctaagcacctccccgagtgacaagggtcagtcaaagacccatacaattaacgcttatcaccttgacccacgcgggccgaagtcagagctggaacacgagttctatgagctggagcccctggccagccatagttgtactgcccctgaaaagacaacatatgaggagactcatatctgtagcgagtttttcaactcacaagctaaaaatctcggcatgcccgtccacgcggcttataattcggaactcagcaagtcaaccgagtcagatgctgggagcgctctgttacagccccccttagaacagcacaccgtgtgtcacttcttcagtctgaaccagcgctgttcctgtcccgatgcctacaaacatctaaactatggacctcacagctgtcagcagatgggagactgcctgtgccaccagtgctcaccgacgacgagttccttcgtgcagatccaaaatggtgtcgcgccactgaaagccacccatcaggcggttgaaggtttcgtgcaccccatcacgcacatccatcattgcccttgcttacaagggcgcgtcaaaccagccggaatgcagaactctcttccacgtaatttctttctgcatcccgtccagcacatccaagcccaggaaaagatcggtaagaccaatgtgcatagccttcaaaggagcatcgaggaacatttacccaagatggccgaaccatcatcctttgtgtgcaggagcaccgggtctctgctgaaaacgtgctgtgacccagaaaacaaacaacgtgaactgtgcaagaaccgtgacgtgagcaatctcgaaagttctggaggtacggagaataaggctgggggtaaggtcgaactgagcttgtcgcaaactgacgctagcgtgaattctgaacacttcaaccaaaatgagcctaaggtgttgtttaaccatctaatgggcgaagctggatgtcggagctgcccaaacaatagccaatcttgtggtaggatcgtgcgtgttaaatgtaattccgtcgattgccagatgccaaacatggaggcaaacgtgcctgctgtgttgactcattcagagctctccggagaatctctgctgattaagactctgtag

SEQ ID NO: 226077 - DNA, 555 bp, Artificial Sequence
  derived and/or modified sequence
atggccatgagcaacggcaacaacgacttcgtggtgctgagcaactccagcatagcaacttcagcagccaacccaagccccttgaccccttgtgacggcgatcacgcagcccagcagcttaccccgaaagaggccacgaggaccaaggtttctcctaatggctgtctgcagctgaacggaacagtgaagtcatctttccttccactcgataatcagcggatgccccagatgcttccccagtgttgtcacccatgcccatatcatcaccccctcacgtcacactcctctcatcaggaatgccatcccgaggcaggccctgcagctccctctgctctggcgtcatgttgcatgcagccccactctgagtacagtgcatctctttgccctaatcatagtccggtgtatcagacaacctgctgtctgcagccttccccatctttttgccttcaccatccatggccagaccactttcagcatcagccagtgcaacagcacatcgccaacatacgcttcacaaggaaaaccaaatgcgcaagctggcttctacagatgtag

SEQ ID NO: 226078 - DNA, 4575 bp, Artificial Sequence
  derived and/or modified sequence
atggccatgagtaacggtaacaacgatttcgtggtgctgtcaaactccagtattgccacaagtgctgctaacccatcaccactgaccccatgcgacggcgaccatgcagctcaacagctgactcccaaagaagcgacacgaaccaaggtaagccctaatggttgtctccaactcaacggcacagtgaaatctagttttctgccactggacaatcagcgcatgccacaaatgctcccacagtgttgtcacccttgtccatatcatcacccactaacatcgcattcctcgcaccaagagtgccacccagaggccggtcctgcagcccctagcgctctggcaagttgttgcatgcagccccattccgagtattcagcgagtttgtgccccaaccattctcctgtatatcagaccacatgctgcctgcagcccagcccatcgttttgccttcaccacccatggcctgaccattttcagcaccaaccggtccaacagcatatagctaacatacgacccagccggcctttcaagctccccaaaagttacgccgctctgattgctgactggcccgtcgtggtgctcggtatgtgtaccatgttcatagtggtgtgcgcacttgtaggcgtcttggtacccgaacttcctgatttcagcgatccactactaggattcgagccaagaggaaccgcgatcggccagcgccttgttacttggaacaacatggttaagaataccgggtataaggctactctggccaattatcccttcaagtacgctgacgaacaggcaaaatctcatagagacgatcggtggtccgatgatcattacgagagagaaaaaagggaggtggattggaattttcataaggattctttcttctgcgacgtgccctcagaccgttactcaagggtggtgttcacctccagcggaggagaaaccctgtggaacctgcccgctatcaaatccatgtgcaatgtcgacaactctagaatccgaagccacccacagttcggtgatctctgtcagcggactacagcggcatcctgttgtccttcctggacactcggaaactacatcgcaatactgaacaaccgtagttcttgccaaaaaatcgtggagagggacgtctcacatacccttaagctgttaaggacatgtgcgaagcactatcagaatgggacattaggaccagactgctgggacatggccgctcgccgtaaagaccaacttaagtgtacaaacgtgcccaggaagtgtacaaaatacaacgctgtttatcagattttacattatctcgtggacaaggactttatgacacccaaaacggcagactatgccactcccgcattgaagtactctatgctgttctcccccaccgagaagggggaaagtatgatgaacatttacttggataacttcgagaattggaattccagtgacggcgttacgactataacgggaatagagtttggaataaagcacagtctgtttcaggattatttgctgatggataccgtgtatccagcgatcgccattgtcattgtgctgctcgtaatgtgcgtgtataccaaaagcatgtttattacactgatgaccatgtttgccatcatctcttccctgatcgtgtcctactttctgtatcgcgttgtattccacttcgaattctttcccttcatgaatctaaccgcgctcatcatcttggttggtattggcgctgacgatgctttcgtactttgtgatgtctggaactacacaaagtttgacaaacctcatgccgagaccagcgagacagtgagcattacacttcagcacgccgctctgtccatgttcgttacctcattcaccacagccgctgccttttacgctaactacgtttcaaatatcacagccatcaggtgtttcggagtatacgccggaacagctattctcgttaattacgttctcatggtgacatggctcccggcagtcgtcgtgctccatgagcggtatctcctaaacattttcacctgttttaaaaagccccagcagcagatatatgataacaagagttgttggaccgtcgcctgtcagaaatgccacaaggttctgttcgccataagtgaagcttcacgcatcttcttcgagaaggttctgccatgtattgttatcaagttccggtacctgtggctcttttggtttctcgccttgactgtgggcggagcctatatcgtgtgcataaaccccaaaatgaagctcccatcattagaactgtctgaattccaggtgtttcgctcttcccatcctttcgaacgatacgatgcagagtacaaaaagctgtttatgtttgaaagagtgcatcacggagaggaactgcacatgcccatcaccgtcatctggggagtatctccagaagataatgggaaccccctgaaccctaagtcaaagggaaaactgacgctcgatagctccttcaacatcgcctcacccgcaagtcaggcctggattctccacttttgtcagaagctgagaaaccagaccttcttctatcagacagacgagcaggactttaccagctgcttcattgagactttcaagcaatggatggagaaccaggattgtgatgaaccggcactgtacccctgttgttcacattggtcattcccctataaacaagagatcttcgagttgtgcattaagcgcgctatcatggaactcgagagatccactgggtaccacctggattccaaaacccccggtccccgttttgatattaacgacaccattagggctgtcgtgctcgaattccagtccacctacttatttactcttgcctacgaaaagatgcaccaattttacaaagaggtggactcatggatcagcagcgagctcagctccgcccctgaaggactctcaaacggctggttcgtttctaatctcgaattttacgatctgcaggattctctgtcagatgggactttaattgcgatggggctgagcgtggccgttgcattcagcgtgatgctcctcactacttggaatatcattattagtttgtacgccatcatttctattgccggaacgattttcgtgactgttgggagtttggtcctgctgggatgggaactgaacgtcctggaatctgtcaccatctctgtcgctgtgggactgagcgtagattttgcggtccactacggggtcgcttacagactggcccctgacccagatcgcgagggaaaagtcatcttctcactaagtcgagtggggtcggctatggcgatggctgcactcactacgttcgtcgccggagcgatgatgatgccgtccactgtgttagcttatacacagctaggcactttcatgatgttgattatgtgcatctcttgggcatttgccaccttcttcttccagtgcatgtgtcgatgtctgggacctcaggggacctgtgggcagattccactgcccaaaaaattacagtgctcagctttctcacacgctctgtctacgtctcccagcgataaaggccaatccaaaacccacacgattaacgcctatcacctcgacccaaggggcccaaagtcggagctggaacatgaattctacgagctcgaaccgctggccagccacagctgtaccgcacctgagaagacgacctacgaggagacacacatatgctctgagttcttcaatagccaggccaagaacctaggtatgcccgtgcacgccgcttataattccgaattatcaaagagcacagagagtgatgcagggtctgcccttctacagccaccgcttgaacagcatactgtatgtcacttcttttcccttaatcagaggtgctcatgtcctgacgcctacaagcatttgaactatggccctcacagctgccaacagatgggagattgtctgtgccatcagtgttctccaacgacaagcagctttgttcagatacaaaacggggtcgcgcctttgaaggctactcaccaagcggtggagggatttgtgcaccctattacacatatccatcactgtccctgcctacaagggagggttaagccggcaggaatgcagaactcgttgcccaggaattttttcttacatcctgtccagcacatccaggcgcaggaaaaaatcggcaagactaatgtccactctttgcagaggagcatcgaagagcatcttcccaagatggctgagccatcatcattcgtgtgcaggtccacagggtcacttctgaagacctgttgtgatccagagaacaagcagcgcgagctgtgtaaaaaccgagacgtaagcaatctagaatcttccggcggtaccgaaaataaggcgggaggaaaagttgagttatcactctcccaaacagatgcaagcgtcaacagcgagcacttcaatcagaatgaacctaaggtgctgtttaaccatcttatgggcgaagcagggtgccggagttgtccaaataacagccagtcctgcggcagaattgtacgtgtgaagtgcaactcagtcgattgccaaatgccgaacatggaggccaacgtgcccgcagtgctaactcactcagagttgtccggcgaatctctgctgataaaaactctgtag

SEQ ID NO: 226079 - DNA, 555 bp, Artificial Sequence
  derived and/or modified sequence
atggcaatgagtaatggcaacaacgattttgtggtgctgtccaattcctctatagcaacttccgccgcaaatccatcccctctgacaccttgcgacggcgatcacgccgctcaacagctgacacccaaggaggccacccggaccaaagtgagcccaaatggatgtctgcagttaaatggcactgtcaagagttcatttcttcctttagataaccagcgtatgcctcagatgctgccgcagtgttgccatccatgtccctaccaccatcctcttaccagccactcgtcacatcaggagtgtcaccctgaggcaggtcctgccgcacccagcgccttagcttcctgctgtatgcagccacacagtgaatacagcgcctctttatgtccaaaccactccccagtgtaccagaccacatgctgtctgcagcctagcccgagcttctgcctccaccacccctggcccgaccactttcagcaccaacctgtccagcagcacatcgctaacatccggttcactcggaaaactaagtgcgcatcatggctgttacagatgtag

SEQ ID NO: 226080 - protein, 570 aa, Artificial Sequence
  derived and/or modified sequence
MLSRLMSGSSRSLEREYSCTVRLLDDSEYTCTIQRDAKGQYLFDLLCHHLNLLEKDYFGIRFVDPDKQRHWLEFTKSVVKQLRSQPPFTMCFRVKFYPADPAALKEEITRYLVFLQIKRDLYHGRLLCKTSDAALLAAYILQAEIGDYDSGKHPEGYSSKFQFFPKHSEKLERKIAEIHKTELSGQTPATSELNFLRKAQTLETYGVDPHPCKDVSGNAAFLAFTPFGFVVLQGNKRVHFIKWNEVTKLKFEGKTFYLYVSQKEEKKIILTYFAPTPEACKHLWKCGIENQAFYKLEKSSQVRTVSSSNLFFKGSRFRYSGRVAKEVMESSAKIKREPPEIHRAGMVPSRSCPSITHGPRLSSVPRTRRRAVHISIMEGLESLRDSAHSTPVRSTSHGDTFLPHVRSSRTDSNERVAVIADEAYSPADSVLPTPVAEHSLELMLLSRQINGATCSIEEEKESEASTPTATEVEALGGELRALCQGHSGPEEEQVNKFVLSVLRLLLVTMGLLFVLLLLLIILTESDLDIAFFRDIRQTPEFEQFHYQYFCPLRRWFACKIRSVVSLLIDT

SEQ ID NO: 226081 - DNA, 1713 bp, Artificial Sequence
  derived and/or modified sequence
atgctgagcagactgatgagcggcagcagcagaagcctggagagagagtacagctgcaccgtgagactgctggacgacagcgagtacacctgcaccatccagagagacgccaagggccagtacctgttcgacctgctgtgccaccacctgaacctgctggagaaggactacttcggcatcagattcgtggaccccgacaagcagagacactggctggagttcaccaagagcgtggtgaagcagctgagaagccagccccccttcaccatgtgcttcagagtgaagttctaccccgccgaccccgccgccctgaaggaggagatcaccagatacctggtgttcctgcagatcaagagagacctgtaccacggcagactgctgtgcaagaccagcgacgccgccctgctggccgcctacatcctgcaggccgagatcggcgactacgacagcggcaagcaccccgagggctacagcagcaagttccagttcttccccaagcacagcgagaagctggagagaaagatcgccgagatccacaagaccgagctgagcggccagacccccgccaccagcgagctgaacttcctgagaaaggcccagaccctggagacctacggcgtggacccccacccctgcaaggacgtgagcggcaacgccgccttcctggccttcacccccttcggcttcgtggtgctgcagggcaacaagagagtgcacttcatcaagtggaacgaggtgaccaagctgaagttcgagggcaagaccttctacctgtacgtgagccagaaggaggagaagaagatcatcctgacctacttcgcccccacccccgaggcctgcaagcacctgtggaagtgcggcatcgagaaccaggccttctacaagctggagaagagcagccaggtgagaaccgtgagcagcagcaacctgttcttcaagggcagcagattcagatacagcggcagagtggccaaggaggtgatggagagcagcgccaagatcaagagagagccccccgagatccacagagccggcatggtgcccagcagaagctgccccagcatcacccacggccccagactgagcagcgtgcccagaaccagaagaagagccgtgcacatcagcatcatggagggcctggagagcctgagagacagcgcccacagcacccccgtgagaagcaccagccacggcgacaccttcctgccccacgtgagaagcagcagaaccgacagcaacgagagagtggccgtgatcgccgacgaggcctacagccccgccgacagcgtgctgcccacccccgtggccgagcacagcctggagctgatgctgctgagcagacagatcaacggcgccacctgcagcatcgaggaggagaaggagagcgaggccagcacccccaccgccaccgaggtggaggccctgggcggcgagctgagagccctgtgccagggccacagcggccccgaggaggagcaggtgaacaagttcgtgctgagcgtgctgagactgctgctggtgaccatgggcctgctgttcgtgctgctgctgctgctgatcatcctgaccgagagcgacctggacatcgccttcttcagagacatcagacagacccccgagttcgagcagttccactaccagtacttctgccccctgagaagatggttcgcctgcaagatcagaagcgtggtgagcctgctgatcgacacctag

SEQ ID NO: 226082 - DNA, 5011 bp, Artificial Sequence
  derived and/or modified sequence
ggctgagggaaggaggaggataaggaggaggaacgaggccagcaggaggcaacggcagcgacggggccggggtgatggtgcaggtgcctggggtcggtgcggagctgccgggctgagggacgcctggtccagggtccgcagcgccgccgcgtcgctcccgggcgggcgggcgggaagatgctgagcaggttgatgagcggcagcagcaggagcctggagcgcgagtacagctgcaccgtgcggctgctggacgacagcgagtacacctgcaccatccagagagatgccaaaggccagtacctgtttgaccttctttgccaccatctgaacctacttgagaaagactattttggtatccgctttgtagacccagataagcagcggcattggctggaatttacaaagtctgtggtgaaacaattgagatcccagcctccattcaccatgtgcttccgtgtgaagttttatcctgcagaccctgctgctctgaaagaagaaataaccaggtatttagtcttcctgcagatcaaaagggatctctaccatggccgactcctctgtaaaacatcggatgctgccttgttagcagcttacatccttcaagcggagattggggattatgactcagggaaacaccctgaaggctacagctccaagttccagtttttccctaaacattcagagaagctggaaaggaaaattgctgagattcacaagacggaactgagtggtcaaacaccagcaacatcagagctgaacttcttaagaaaagcacagacattggaaacatatggagtggatcctcacccatgtaaggacgtgtcaggaaatgctgcatttctggccttcactccttttgggtttgttgttcttcaaggaaacaagagggtccacttcattaaatggaatgaggtgaccaagctgaaatttgaaggaaagactttctatttatacgtaagtcagaaagaggaaaagaaaattattcttacatattttgctccaactcctgaagcgtgtaagcacctctggaaatgtggaatcgagaaccaagccttctacaagctggagaagtcaagccaagtccgcacagtgtccagcagcaatttattctttaaagggagccggttccgatacagtggccgagttgcaaaggaagtcatggaatcaagtgctaagatcaaacgggagccaccggaaatacacagagcagggatggttcccagccggagctgtccctccataacccatggcccaaggctgagcagcgtccccaggacccgcagaagagctgttcacatctccatcatggaaggcctagagtccttacgggacagtgcccattccacaccagtgcgttccacttcccatggggacaccttcctgcctcacgtgagaagcagccggacagatagcaatgagcgagtagctgtgattgcagacgaggcctacagccctgcagacagcgtgctgcccacccctgtggctgagcacagcctggagctgatgttgctttcccggcagatcaatggagccacctgcagcattgaggaggagaaggaatctgaagccagcaccccaactgctacagaggtggaggcccttgggggagagctgagggccctgtgtcaggggcacagcgggcccgaggaggaacaggtgaataagtttgttctaagtgtcctccgtttgctccttgtgaccatgggactcctctttgttttgctcctcctcctgatcatccttaccgagtctgaccttgacattgcctttttccgtgatatccgccagacccccgagtttgaacaattccactatcaatacttttgtcccctcaggcgatggtttgcctgcaaaatccgctcagtggtgagcctgctcattgacacctgagaaggcatgactcctcccaaaaactagccaggtggaccaaggaacccggctacccattcccagcaatgggacccatcgcggaaccatcggcacatataccaagtcctcctctcatgactcaaagtccactgcagcctaggagggtgtttcccagaagaagaaagggataggctcatgccctgtctaaacaaactgggaaaactcattttcttcagaagttatttcaagaaaggctcagcgactctgtttctcatctttccaatttgcaggataatttttggttttgaattttgatttttcatagatgtatattattttgaagtatcaaataaaaataatttattttactattactgattattgcagtagtatcacctagcagaggggacactagttgaaaactagagagctgctgtcctctgtattctgcaggagcttttcctgctggtgccactgggttccagtagactcatcactgcagcctcagcagggcaggccagggatctggacaatggggactgtttagttttttgtttgttttttttgccagccagaacttttaaaaaagtaaacatccatgtagaatgattaaatggaaagttgcttcttatgatggtctgagttggattttcttttccttttgttttttcaaatctgagcagagtgggcatctgaagggaccaccgctacagcaacagcagcatcaggggtggggtaagtctgtccccttagtctagagcctagtgggcatcaccatagttttgtataatgaaactagacttaacgtgattttttttttccgaagaacctcaagacttttatagtgctccaggggcgttaaacgaattcagtggtaccagagatagatagttctgtcagaaatgttggacaaagtgtagttaagagaaagcagagttaagttacctgagagactgttgagatttggatagcagtgcttattttatatacacccccttgacccaaagactatttcaatttatattttaacaacgaaatgttattttcttaacaattcatattttgtttttactttatggattaagaaaatagagcctgatgaactaaacgatgcaagaaagaaactgatcctgagaatgaaaagcttcagaaaatagaattccaagatcaacagccttagaagggaccaggaaaagaatcttttaaaatagatttctaagagatgcctacaaaacacagaatgtgaccgtggcagagaccaacacttagatgtagaaatgctgccccctagggtcatcctctgcataagttctaggaaagcatcaccatccttgcagagggaagtcctcgaagcacgcagcacaggcatatgaagggcgagtgtgggatcctaggcccaagctcttcaactctaaaaccaatcacacacaagatcctgttttcatctcagggagagatttctaagtcatctggggcttgagggcttatttaagggtggtcaatggacatattcctggacccacacaaaagtagagcagctgctgataccctaattggacagccccaaacgcagaacagaacaagtcacttgtagacttgacctcccctattttgtcccccgagatggtagaaccatgtccatgtttacaatatgacaactgtggaataattggggttcttagggagagatttgcataattttaaagacatcctttcatctggaccagaggtcaatcaacttatgtcaagtgctacacagtaaatattttggtttagcacgccatactgtgtcacaactgctcaattctgccatcacagcacaaaaacagccacagataatttgtaaatgaaggaacatggctgtgttccaataaaactttatgaaaacagtgagctgaatttagcctacaggccataatacgccaatcctgctctagacaataaaactgatccttaccagtatgttagcagaagagggtcagtcagctctgtttccatgcctgacatgtatcaaagatctgggacctcttcccagtggaggcactagggttgcttgtttaaagggtgcttgaacaactaaccagcaaagagatgtctgatgccaaatgggcaagatcaaatactggaatgctaaaacacagctggaatctaagaagggaagagggcttctctgaccattttcataccagcaacaatttaggcagaattataaacatctatttatcgagtgacaatacaaaccgaaggagatcctagtagagattaggggtcagttaaaatcaactagccactgccacttgtcatctacatagcaaaggctttatttagcacaggactaacgtgaaaagtagacccagagatgaaaaggctgtcaggagacagggggctggtgtccacctggtatctactgtcttatgcaacatagaagattaccttttagtgtagtgctcctacctcagtttgtagaatctggtgtttctatgcagtgagtgatagcctcaactctgacctttcatattcacattagagacagatgcagtattccatatcctagtatgttccttgtgtctagagttctaacagtacagtagtctatgccatttctaacagctaaattttgctctgtaaacagaaactttagggttgtttttttccagggctcatcccagaaaatatggatagaaaagtttccttcagtttgcttttcaaatagtgcttgaataataaacctcctttgattggtgactagtcttttttggtatatctccacctttaaaaattgttcaagtttttaacctggttatactgtgttctaacatgtctctcattttctctcaaaattagtttatctcattgtagaaaaagcaatggttttcatagcttcatctatcaggaaataaaactcttactaaagaatagcatactgcatctttaagcagtagagggtaaactacctgcaaatgtgaatttcttagatacatttaaaaatatatagttgttaaccttctgtgtgccaaaaactcttaagttacattttccttcaaagcaatgtacttttttctacatatgcagtatgtagttagcataaaatcattggtgccatgaagattatttttaaacttaaataaatatttaaatatca

SEQ ID NO: 226083 - DNA, 1713 bp, Artificial Sequence
  derived and/or modified sequence
atgctctcccggctcatgtctggaagcagcaggagcctcgaaagagagtactcttgtactgttcgcttgttagacgattccgaatatacgtgtacgatccagcgggatgcaaaaggccagtatctcttcgatctgctttgccatcatctcaacttgctggaaaaggattattttggaataaggtttgtggatccagacaaacaaaggcattggctggaattcactaagagcgtcgtgaagcagttaaggtcacagccccccttcactatgtgcttccgggtgaagttttacccagcagaccccgcggctctcaaggaagagatcacccgatatctcgtgttcctgcagattaagcgagacctgtatcatgggcgactcttgtgcaaaacaagcgatgctgccttactggctgcttacatcctgcaggccgaaataggcgattatgattccgggaaacatccagaagggtattccagtaaatttcagttttttccaaaacattccgagaaactcgaacgaaaaatcgcagagatccacaaaacagaactgtccgggcaaactccagccacatcagaattaaacttcctgcggaaagcccaaacactcgagacctatggcgtcgacccccatccgtgtaaagacgtgtctggtaatgctgccttcctggcttttactccttttggcttcgttgtgctgcaggggaacaaacgcgtccacttcatcaagtggaatgaggtgaccaaattaaaatttgagggcaaaacgttctatctgtacgtgtcacagaaggaagagaagaagatcatactgacttactttgccccaacccccgaagcttgtaagcacctctggaaatgtggaatcgagaatcaggcattttataaacttgagaagagctcccaggttcggacagttagctctagcaatctgttttttaagggctctcgctttagatatagcggaagggtggccaaagaagtgatggaatcatctgcaaaaattaagagagaaccacccgagatacaccgggctggcatggtgccgtcgagatcctgtccctcaatcacccacggccccaggctgtcttcagtgccacgaacccggaggcgcgccgtccacatctcaataatggagggcttggagagcctgcgcgattctgcgcactctactccagtcagatccacatcacacggagatactttccttccccacgtaagatccagcaggactgactcaaacgagagagtcgcagttatagcagacgaagcctactctccggcggattctgtgctgccaacccccgtggcagagcattccctagagctcatgctgctctcccgccagataaacggggctacttgcagcattgaggaagagaaagaatccgaggcatctacaccaacagccactgaggtggaggccctgggaggagaattgcgggcactatgccagggtcattctggcccagaggaggaacaagtaaataagttcgtactatctgtgctgcggctcctgctcgttaccatggggctgttgttcgtactgttactgttacttataatactcacggagtctgatctagacatcgccttctttcgagacatcagacagacacctgaattcgaacagttccactatcaatacttctgcccattgcggcgctggttcgcttgcaaaatccgttcggttgtgtcactgctgattgacacgtag

SEQ ID NO: 226084 - DNA, 1713 bp, Artificial Sequence
  derived and/or modified sequence
atgctgagccggctgatgagcggcagcagccgcagcctggagcgggagtacagctgcaccgtgcggctgctggatgattctgagtacacctgcaccatccagagagatgccaagggccagtacctgtttgacctgctgtgccaccacctgaacctgctggagaaggactacttcggcatccgctttgtggaccctgacaagcagaggcactggctggagttcaccaagtctgtggtgaagcagctgcggagccagccccccttcaccatgtgcttccgggtgaagttctacccagctgaccctgctgccctgaaggaggagatcacccgctacctggtgttcctgcagatcaagagggacctgtaccacggccgcctgctgtgcaagaccagtgatgctgccctgctggccgcctacatcctgcaggccgagattggagactatgacagcggcaagcaccctgagggctacagcagcaagttccagttcttccccaagcacagcgagaagctggagaggaagattgctgagatccacaagacagagctgagcggccagaccccagccaccagcgagctgaacttcctgaggaaggcccagaccctggagacctatggagtggacccccacccctgcaaggatgtgtctggaaatgctgccttcctggccttcaccccatttggatttgtggtgctgcagggcaacaagagggtgcacttcatcaagtggaatgaggtgaccaagctgaagtttgagggcaagaccttctacctgtatgtgtcccagaaggaggagaagaagatcatcctgacctactttgcccccaccccagaggcctgcaagcacctgtggaagtgtggcatcgagaaccaggccttctacaagctggagaagagcagccaggtgaggacagtgagcagcagcaacctcttcttcaagggcagccgcttccgctacagcggccgggtggccaaggaggtgatggagagcagcgccaagatcaagcgggagcccccagagatccaccgggccggcatggtgcccagccgcagctgccccagcatcacccacggcccccggctgagctctgtgcccaggaccaggagaagagctgtgcacatcagcatcatggagggcctggagagcctgcgggacagcgcccacagcacccctgtgcgcagcaccagccatggagacaccttcctgccccacgtgcgcagcagcaggacagacagcaatgaaagagtggccgtgattgctgatgaggcctacagccctgctgacagcgtgctgcccacccctgtggccgagcacagcctggagctgatgctgctgagccggcagatcaacggggccacctgcagcattgaggaggagaaggagagcgaggccagcacccccacagccacagaggtggaggccctgggcggggagctgcgggccctgtgccagggccacagcggccctgaggaggagcaggtgaacaagtttgtgctgtctgtgctgcggctgctgctggtgaccatgggcctgctgtttgtgctgctgctgctgctgatcatcctgacagaaagtgacctggacatcgccttcttccgggacatccggcagaccccagagtttgagcagttccactaccagtacttctgccccctgcggcgctggtttgcctgcaagatccgctctgtggtgtccctgctgattgacacctag

SEQ ID NO: 226085 - DNA, 1713 bp, Artificial Sequence
  derived and/or modified sequence
atgctgagccggctgatgagcggcagcagccggagcctggagcgggagtacagctgcaccgtgaggcttctggacgatagcgaatatacgtgtacaatccagcgcgacgcaaagggtcagtacctgttcgacctgttgtgccaccatctgaacttactggaaaaggactatttcgggattcgcttcgtggatcccgacaagcagcggcattggctggagtttacaaaaagtgtggtaaaacagctccggtcccaaccgccattcacaatgtgctttcgggtgaaattttaccccgccgaccctgccgccctaaaggaggagattacgcgctatttggtcttcctgcagattaaacgggatttgtaccacggccgactcctatgtaagactagcgatgcagccctgctggccgcctacattctgcaggcggagattggcgattatgacagcgggaagcatcccgagggttattcctctaagtttcagttttttcccaagcactcggaaaagctggaaaggaagattgcagaaattcacaaaacggagctgtctggccaaacacctgccacgtctgagctgaacttcttaagaaaggctcaaaccctcgagacctacggggtcgacccgcacccttgcaaggacgtgtctggcaatgctgccttccttgcttttacccccttcgggtttgtggttcttcaaggtaataagagggttcattttataaaatggaacgaggtgacaaaactgaagttcgagggaaagactttttacctttacgtgagtcagaaggaggaaaaaaagataattctgacctatttcgctcctacgcccgaggcgtgcaaacacctttggaaatgcggcatcgagaaccaagccttctacaaactagagaaaagctctcaagtcagaacagtatccagcagcaacctgtttttcaaaggaagtagattccgctactcagggagggtggcaaaagaggtgatggagtcctccgctaaaatcaaacgggagcccccagaaatccatcgcgcaggtatggtgcccagccggtcctgccccagtattacccatgggcctagactgtcgtcagtccccagaacacggcgacgcgccgtccatatatccattatggaaggcctggagtcactgagggactcagcccacagcacaccagtgagaagtacttcacatggcgacacatttctgccacacgtccgcagcagtcgtaccgattccaatgaacgggtggccgtgatcgccgacgaagcctattctcctgcagacagcgtgctccccacacctgtcgccgagcatagcttagagctgatgttgttgtcccgtcagattaacggtgctacctgttcaatcgaggaggagaaagagtccgaggcttccacacccacagcaactgaagttgaagcgctgggtggcgaactgcgagcgttatgccaagggcacagcggcccggaagaggagcaggtgaacaaattcgtcctttctgttctgcgtttgctcctcgtcaccatggggctccttttcgtcctgctcctgttactgatcattctcactgagagtgacctggacatcgcattttttcgggacatcaggcagacccctgaatttgaacagttccactaccaatacttttgccctctcaggaggtggttcgcatgtaaaatacgatctgtggtttccctcctcatcgacacttag

SEQ ID NO: 226086 - DNA, 1713 bp, Artificial Sequence
  derived and/or modified sequence
atgttgtctcgactgatgagtggatcgtcccgctccctagagcgggagtatagctgcacagtgcgtctgctggacgatagtgagtacacctgtaccatccaacgggacgcaaagggccagtatctctttgatctactgtgtcatcatctaaatctcctggaaaaagactatttcgggatccgctttgtggaccctgataagcagcggcactggctggaatttacaaaaagcgtggtgaagcagctaagatcacagcctccctttactatgtgcttcagggtgaagttctacccagccgacccagccgcactcaaggaggagatcactcgttacctggtatttctacagatcaaacgcgacctgtatcacgggagactgctctgcaaaaccagcgatgctgccctgttagcagcctatatcctgcaggccgagatcggtgactacgattcagggaagcatccagagggttactcttccaaatttcaattttttccgaaacattcagaaaagcttgaaagaaaaattgccgaaattcataagactgagctgagcggtcagactccagccaccagcgagctaaacttccttcggaaagcgcagaccctggaaacatatggggtcgatccacacccttgcaaggatgtgtccggaaacgcagcctttctggcgttcacacctttcgggttcgtggtattgcagggaaataagcgagtgcacttcatcaaatggaatgaagtgactaagctcaagtttgagggaaagacattctacctgtacgtgtcgcaaaaggaagagaagaaaattattttgacatacttcgctcccacccctgaggcgtgcaagcatctgtggaagtgcggaattgaaaaccaagccttctacaagctggagaaaagcagccaggtccgtaccgtatcatcatctaaccttttctttaagggcagtagatttcggtacagcgggcgagtcgcaaaggaagtgatggagtcgtccgctaaaatcaagcgcgagccaccagagatccacagggctggcatggtgccatcgaggtcttgtccctcaataacccatggccctcggctgtctagcgtgcctcgcaccaggcgccgagctgtgcatatctcgatcatggaaggcctcgagagcttaagagactcagctcacagcaccccagtgcgctctacttcacacggagacacatttctgccccacgtacgttcaagccgcacggactctaatgagagagttgctgtgatcgctgacgaggcttatagtcccgcagattcagttctccctactccggtggccgagcattccctggagctgatgcttctgagcagacagatcaatggggcaacttgttctattgaggaggagaaggaatcagaggcttctacccccacggccacagaggttgaagccctgggtggagaactgcgggcactgtgtcaggggcactcaggtcctgaagaggagcaggttaacaagtttgttctgtccgtgttgagactgttactggtgacaatggggttactgtttgtgctgcttctgctcctgataattctgaccgaatccgatctggatattgccttcttccgcgatatccggcagacccctgagttcgaacagttccactaccagtatttttgcccactgagaaggtggttcgcttgtaagatccggagtgtagtgtctctgctgatcgatacctag

SEQ ID NO: 226087 - protein, 167 aa, Artificial Sequence
  derived and/or modified sequence
MYMGMMCTAKKCGIRFQPPAIILIYESEIKGKIRQRIMPVRNFSKFSDCTRAAEQLKNNPRHKSYLEQVSLRQLEKLFSFLRGYLSGQSLAETMEQIQRETTIDPEEDLNKLDDKELAKRKSIMDELFEKNQKKKDDPNFVYDIEVEFPQDDQLQSCGWDTESADEF

SEQ ID NO: 226088 - DNA, 504 bp, Artificial Sequence
  derived and/or modified sequence
atgtacatgggcatgatgtgcaccgccaagaagtgcggcatcagattccagccccccgccatcatcctgatctacgagagcgagatcaagggcaagatcagacagagaatcatgcccgtgagaaacttcagcaagttcagcgactgcaccagagccgccgagcagctgaagaacaaccccagacacaagagctacctggagcaggtgagcctgagacagctggagaagctgttcagcttcctgagaggctacctgagcggccagagcctggccgagaccatggagcagatccagagagagaccaccatcgaccccgaggaggacctgaacaagctggacgacaaggagctggccaagagaaagagcatcatggacgagctgttcgagaagaaccagaagaagaaggacgaccccaacttcgtgtacgacatcgaggtggagttcccccaggacgaccagctgcagagctgcggctgggacaccgagagcgccgacgagttctag

SEQ ID NO: 226089 - DNA, 504 bp, Artificial Sequence
  derived and/or modified sequence
atgtatatgggcatgatgtgtacggccaaaaaatgcggaatacgctttcagccacccgccattattctgatatacgagagcgagatcaaaggaaagatcagacagcgcatcatgccagttcgaaacttttctaaattctccgattgtacccgcgcggcagagcaacttaaaaacaacccaaggcacaagagctatctggaacaggtctctcttcgccagcttgaaaaactgttttccttcctgcggggctatttgagcgggcaaagcctagctgaaaccatggaacagattcagcgagaaacgaccattgatcctgaggaagacctcaacaaactcgatgacaaagagttggcaaagcgaaagtcaatcatggacgagctgtttgagaagaaccagaaaaagaaagacgatccgaatttcgtttacgacattgaggtcgagttcccgcaggacgatcagctgcagagctgcggctgggatacggagtccgcagatgaattctag

SEQ ID NO: 226090 - DNA, 504 bp, Artificial Sequence
  derived and/or modified sequence
atgtacatgggcatgatgtgcacagccaagaagtgtggcatccgcttccagcccccagccatcatcctgatctatgaaagtgagatcaagggcaagatccggcagaggatcatgcctgtgaggaacttcagcaagttcagtgactgcaccagggctgctgagcagctgaagaacaaccccaggcacaagagctacctggagcaggtgtccctgcggcagctggagaagctgttctccttcctgcggggctacctgagcggccagagcctggccgagaccatggagcagatccagcgggagaccaccattgatcctgaggaggacctgaacaagctggatgacaaggagctggccaagaggaagagcatcatggatgagctgtttgagaagaaccagaagaagaaggatgaccccaactttgtgtatgacatcgaggtggagttcccccaggatgaccagctgcagagctgtggctgggacacagaatctgcagatgagttctag

SEQ ID NO: 226091 - DNA, 504 bp, Artificial Sequence
  derived and/or modified sequence
atgtacatgggcatgatgtgcaccgccaagaagtgcggcatccggtttcagccgcccgcaataatacttatttacgaatcagaaattaaagggaagatccgccagcgcatcatgcccgtgaggaacttcagtaaattttccgattgtacccgggccgccgagcagttgaaaaataatcctcggcacaagtcgtatctggaacaggtgagcctgagacagttggagaagttattttcatttctccggggatacctgtccggccaatctctggcagagacaatggagcagattcagagggaaacaactatcgatccagaggaggacctgaataaactggacgacaaagaacttgcaaagcgtaagtccattatggacgagctcttcgagaagaatcaaaagaagaaggatgacccaaacttcgtgtacgatatagaagtggaatttcctcaagatgaccaactccagagttgtggctgggatacagaaagcgcagatgaattttag

SEQ ID NO: 226092 - DNA, 2201 bp, Artificial Sequence
  derived and/or modified sequence
gggcgggcgaggagctgcgcacgcgcggggacgcgcgcccggcctgtcgctgtggaaaccgctaggccagcgctcgccgggacctggaatccctgtacgccgaggtgggagccggtggaccggtcccccagccggcccccacctccgcttcccggtgtttgagggttcgggcctcccgccggggagttcacccctcgggctcgtcagtagggctgtggctgtcgcctcttcctgcagcgccaggctccgcccggtctcacagtcggcttaggggctttgcgtgcactgcggttgggtggaaaaacccactcctggttgtttagacgttggcctgcagacgatgtcatttctgtattcctctaaggcaggaagtcattatgcaacttacacatattcatcagatttcctctgacttacccggacatgtacatgggaatgatgtgcactgccaagaaatgtgggattaggtttcagcctccagctattatcttaatctatgagagtgaaatcaaggggaaaattcgccagcgcattatgccagttcgaaacttttcaaagttttcagattgcaccagagctgctgaacaattaaagaataatccgcgacacaagagttacctagaacaagtatccctgaggcagctagagaagctattcagttttttacgaggttacttgtcggggcagagtctggcagaaacaatggaacaaattcaacgggaaacaaccattgatcctgaggaagacctgaacaaactagatgacaaggagcttgccaaaagaaagagcatcatggatgaactttttgagaaaaatcagaagaagaaggatgatccaaattttgtttatgacattgaggttgaatttccacaggacgatcaactgcagtcctgtggctgggacacagagtcagctgatgagttctgataccaaacactcaaaacatgcattgggctagcagaatatccatgtttattaccagactggttctggaagaagctgtaaagaatactaaatatgttgggttataggggattgaccatgttacttttcaaaaccaggacatttaaagcatctactatgtaggtgcatgaggagtatgggaaaaacagaataaaggaatctgcctttaaggagcttacaatcatgccgggtgcggtggctcacgcctgtaatcccagcactttgggaggctgaggcgggtggatcacctaaggtcaggagttcgagaccagcctagccaacatggtgaaacctcgcctctactaaaaatacaaaaattagccaggcgtggtggcgggtgcctgtaatcccggctactcaggaggctgaggcaggagattcgcttgaacctgggaggctgaggttgcagtgagccgagatcgcgccattgtactccagcctgggcgatgagcaaaactccatctcaaaaaaaaaaaaaaaaaaaagcttacaatctgactggaagatgtcaaaacctgtgaaaagctaattagcagtattaagcaacacaaacattagtgccaaatgcatgataaaggctaaagaaggccagagcatatattactgtagagtagaatagtaagggaagactttgtcctttagtaaagagataggaggtggcctggcccttgaaatagtagtgtttaggtagatgcttgtgtaggattcctgataagagcaactgaaaagaaggagaggggaagtagtaaagggacaagaaacaattttttttttgaggaaccataagcaaattatagtttgacaagacaagattgggggacatatatggttaccagggaattacctcttatgtgttatatctttatattatttatctctggaaaagagtaccctgcaaaattccctacagctgcaagcagatgtcacttgatggacagagggggaattctgcccctccggtatcgggaaatacatactaaagacattgcgaaacgctgaacctcttcccataaataaaaggtttgtttgtaaaatgggaaatccacccataataaatgaacaataggcactgccagtttaggcctgttcatgaatggatctgcaagacagcatcttcgtttaacaacattatctgtgatttgatacatttatccttattacaatattgtttagttggtagaaattctatgttttctacaaggaaattgatgtttattaaataaaactgaaaataatta

SEQ ID NO: 226093 - DNA, 504 bp, Artificial Sequence
  derived and/or modified sequence
atgtacatgggaatgatgtgcaccgcaaagaagtgcgggatccggtttcaaccccctgcaatcatcctgatctatgagagtgagatcaagggcaagattaggcagcggataatgcctgtccgcaacttttccaaattctcagactgtaccagggcggcagaacaactgaagaataacccgaggcacaaaagctatttagaacaggtaagcctaaggcagctggaaaagctgttctcatttctgagagggtacctttcaggacagtccttggctgaaacgatggaacagatccaaagggagactacgatcgaccctgaggaggacttgaacaagctcgacgataaggaacttgccaaacgcaaatccatcatggacgagctgttcgaaaagaatcagaagaagaaggatgaccccaactttgtatacgacatcgaagtggagtttccacaagatgatcagctgcagagctgtgggtgggacacagagagtgccgatgaattctag

SEQ ID NO: 226094 - protein, 434 aa, Artificial Sequence
  derived and/or modified sequence
MSRSRHLGKIRKRLEDVKSQWVRPARADFSDNESARLATDALLDGGSEAYWRVLSQEGEVDFLSSVEAQYIQAQAREPPCPPDTLGGAEAGPKGLDSSSLQSGTYFPVASEGSEPALLHSWASAEKPYLKEKSSATVYFQTVKHNNIRDLVRRCITRTSQVLVILMDVFTDVEIFCDILEAANKRGVFVCVLLDQGGVKLFQEMCDKVQISDSHLKNISIRSVEGEIYCAKSGRKFAGQIREKFIISDWRFVLSGSYSFTWLCGHVHRNILSKFTGQAVELFDEEFRHLYASSKPVMGLKSPRLVAPVPPGAAPANGRLSSSSGSASDRTSSNPFSGRSAGSHPGTRSVSASSGPCSPAAPHPPPPPRFQPHQGPWGAPSPQAHLSPRPHDGPPAAVYSNLGAYRPTRLQLEQLGLVPRLTPTWRPFLQASPHF

SEQ ID NO: 226095 - DNA, 1305 bp, Artificial Sequence
  derived and/or modified sequence
atgagcagaagcagacacctgggcaagatcagaaagagactggaggacgtgaagagccagtgggtgagacccgccagagccgacttcagcgacaacgagagcgccagactggccaccgacgccctgctggacggcggcagcgaggcctactggagagtgctgagccaggagggcgaggtggacttcctgagcagcgtggaggcccagtacatccaggcccaggccagagagcccccctgcccccccgacaccctgggcggcgccgaggccggccccaagggcctggacagcagcagcctgcagagcggcacctacttccccgtggccagcgagggcagcgagcccgccctgctgcacagctgggccagcgccgagaagccctacctgaaggagaagagcagcgccaccgtgtacttccagaccgtgaagcacaacaacatcagagacctggtgagaagatgcatcaccagaaccagccaggtgctggtgatcctgatggacgtgttcaccgacgtggagatcttctgcgacatcctggaggccgccaacaagagaggcgtgttcgtgtgcgtgctgctggaccagggcggcgtgaagctgttccaggagatgtgcgacaaggtgcagatcagcgacagccacctgaagaacatcagcatcagaagcgtggagggcgagatctactgcgccaagagcggcagaaagttcgccggccagatcagagagaagttcatcatcagcgactggagattcgtgctgagcggcagctacagcttcacctggctgtgcggccacgtgcacagaaacatcctgagcaagttcaccggccaggccgtggagctgttcgacgaggagttcagacacctgtacgccagcagcaagcccgtgatgggcctgaagagccccagactggtggcccccgtgccccccggcgccgcccccgccaacggcagactgagcagcagcagcggcagcgccagcgacagaaccagcagcaaccccttcagcggcagaagcgccggcagccaccccggcaccagaagcgtgagcgccagcagcggcccctgcagccccgccgccccccaccccccccccccccccagattccagccccaccagggcccctggggcgcccccagcccccaggcccacctgagccccagaccccacgacggcccccccgccgccgtgtacagcaacctgggcgcctacagacccaccagactgcagctggagcagctgggcctggtgcccagactgacccccacctggagacccttcctgcaggccagcccccacttctag

SEQ ID NO: 226096 - DNA, 1305 bp, Artificial Sequence
  derived and/or modified sequence
atgagccgttcccgccacttggggaagattcgtaaacgacttgaggatgttaaatctcagtgggtgagacctgctagagccgacttttccgacaatgagagcgctcgactcgcgactgatgctctcttggatgggggctccgaggcgtactggcgcgtgctttcccaagagggcgaagtcgattttctgagttctgtagaagcacagtatatccaagcccaagctcgtgaacctccatgcccaccggataccctcgggggagcagaggccgggccaaaaggacttgactcatcatcactgcagtctgggacttacttcccagtggcaagtgaagggtcagagccggccctgctgcacagttgggcatctgcagaaaagccatatctaaaagaaaagagcagcgcgacagtgtacttccagaccgtgaagcacaataacataagagatctcgtccggcgatgtataacgaggacctcccaggttctggtcatcctgatggacgtctttactgatgtagaaatcttctgtgatatcctggaggccgctaataagagaggggtgttcgtatgcgtcctactggatcaaggcggggtcaagctattccaggaaatgtgtgacaaggtgcaaatttcggatagccacctcaagaacatctctattcgatccgttgagggcgagatttactgcgctaaaagcggccgcaagtttgctggccaaattagggagaagttcattatttccgactggcgcttcgtactgtctggcagttactctttcacttggctctgcggtcacgtacatcgcaacatcctgagcaagtttaccggacaggcagtggagctgtttgacgaggaattccgccacctgtatgcaagcagcaaacctgtaatgggcctcaaaagcccccgactggtagcgcctgtgcctcccggagccgctcccgcaaacggtcgactgtcaagctcatccggcagcgctagcgacaggacttcatctaacccttttagcggtaggagcgctggtagtcaccccggaactcggagtgtctcagcctcctcaggcccttgttctcctgcagctccccatccaccgccccccccacgcttccagccccaccagggaccctggggggcgccttctccccaggcccacctctctccaagacctcatgatggtccaccagcggctgtgtattcgaacctcggagcgtacaggcccacccgactgcaattagagcagttaggtttagtccctcggttaacccccacttggagacctttcctccaggcttctccgcacttctag

SEQ ID NO: 226097 - DNA, 1305 bp, Artificial Sequence
  derived and/or modified sequence
atgtccaggagccgccacttgggcaaaatccgcaagaggctagaggacgtgaaatcgcaatgggtccggcctgcccgtgcagatttttctgataacgaaagtgctcggttggccacagatgctctgttggacggcgggtctgaagcctactggagggttcttagccaggagggcgaagtcgatttcctgagcagtgtagaggcccagtacatacaagcgcaggcccgggagccgccctgcccccccgacaccctgggtggcgccgaggcgggcccaaagggcctggactcatcgagccttcagagtggaacatattttcctgtcgcaagcgaaggttcggagccggccctgttacatagctgggcatccgccgagaagccctacttgaaagagaagagcagtgcaacagtctacttccagacagtgaaacacaataatattagggatctggttaggagatgtatcactcgcacatcccaggtgctggtaatcttgatggacgtgttcaccgatgttgaaatcttctgtgacattctggaggcagccaacaagcgcggggtgtttgtgtgcgtactgcttgaccagggaggggtaaagctgttccaggagatgtgtgacaaggtgcaaatatcagacagtcacctaaaaaacatatccatcagaagcgtcgagggtgagatatattgcgctaagtcgggaaggaagtttgccgggcaaatccgagagaaattcataatctctgattggcgcttcgtgctatccggatcgtactctttcacttggctgtgtggacatgtacatcgtaacattctgagcaaatttactggccaggccgtggaactgtttgacgaagaatttcgacacctgtacgccagctccaaacccgtaatgggacttaaaagcccacgtctcgtggcacctgtgccaccaggggcagccccggctaatggtagactgagttcctccagcggttccgcttccgatcggacaagttccaatcctttctccgggaggagcgccggatcccacccgggaacccggtctgtgagcgcctcctctggaccctgctccccagccgcaccccacccacccccgccacctaggtttcagcctcatcagggtccatggggcgccccatccccacaggcacacctcagtccccgtccccatgatggccccccagccgccgtatacagcaacctcggcgcctaccggcctacgaggctccagcttgaacagctcggcctggtacctcgcttgacaccaacgtggagaccttttctacaagcaagccctcacttttag

SEQ ID NO: 226098 - DNA, 2925 bp, Artificial Sequence
  derived and/or modified sequence
ggaaagccggctcaccttcgcctccccctgcggctgggaggagaggaaatatcccatggctgactgtgccaaggaggtgtctgagccagccctcccggcccgagggcagggcaggtggccctgagagataagccaatcccgcagctgcagatgaggagttctgagaagcattgctcaggacagcggtaaatcacttcttggaggtgccctgcacgccggtcctgggagcaggcggcctcccgggggtgcgggagccccactcctccgtggtgtgttccatttgcttcccacatctggaggagctgacgtgccagcctcccccagcaccacccagggacgggaggcatgagccggtcaaggcacctgggcaaaatccggaagcgtctggaagatgtcaagagccagtgggtccggccagccagggctgactttagtgacaacgagagtgcccggctggccacggacgccctcttggatgggggttctgaagcctactggcgggtgctcagccaggaaggcgaggtggacttcttgtcctcggtggaggcccagtacatccaggcccaggccagggagcccccgtgtcccccagacaccctgggaggggcggaagcaggccctaagggactggactccagctccctacagtccggcacctacttccctgtggcctcagagggcagcgagccggccctactgcacagctgggcctcagctgagaagccctacctgaaggaaaaatccagcgccactgtgtacttccagaccgtcaagcacaacaacatcagagacctcgtccgccgctgcatcacccggactagccaggtcctggtcatcctgatggatgtgttcacggatgtggagatcttctgtgacattctagaggcagccaacaagcgtggggtgttcgtttgtgtgctcctggaccagggaggtgtgaagctcttccaggagatgtgtgacaaagtccagatctctgacagtcacctcaagaacatttccatccggagtgtggaaggagagatatactgtgccaagtcaggcaggaaattcgctggccaaatccgggagaagttcatcatctcggactggagatttgtcctgtctggatcttacagcttcacctggctctgcggacacgtgcaccggaacatcctctccaagttcacaggccaggcggtggagctgtttgacgaggagttccgccacctctacgcctcctccaagcctgtgatgggcctgaagtccccgcggctggtcgcccccgtcccgcccggagcagccccggccaatggccgccttagcagcagcagtggctccgccagtgaccgcacgtcctccaaccccttcagcggccgctcggcaggcagccaccccggtacccgaagtgtgtccgcgtcttcagggccctgtagccccgcggccccacacccgcctccaccgccccggttccagccccaccaaggcccttggggagccccgagtccccaggcccacctctccccgcggccccacgacggcccgcccgccgctgtctacagcaacctgggggcctacaggcccacgcggctgcagctggagcagctgggcctggtgccgaggctgactccaacctggaggcccttcctgcaggcctcccctcacttctgaaggtcccatcccctgctgccctccgcaggcccagggctgggcactccctgagacccaaagacccacctcaacgacgagtggcgttgagccacttccctttgaaaagacactcaaaatcactgccatggttcaatgttcccaggccccaggccatccacttgccggcccccaccagttcttgggttccccgctctagtttgacctgtgcagcacattccagaaggttccagggaggttgtggggcagctagaggacaaaatcatgaaaacagagtccctgtcttccagagatcatccggggctttaatattaatggcccccaaaactccgtaagaagcaggaaatgcagcccaagttttacaaatgggtaaacagaggcactgagagatagatggtagtttggtacttctggttcccagtgcccaggaatggtccactcccaagaaattcaggaaagaaagactgaggagaaggtgtgggaacattctggatgtttcgggagagttggggaaactcctcctcttaggaaaggctaatactagggtatccttgggcccaatgaattaggggtgaggccccagaacccgttatctatgagttgtatgggggagccatctgaagctgtagccaccagggatgcagctagctgaggagtttggggtgttgggttggacaaggcaggttagtagactcagattcttgcttcaaagagccttgggctggcctggaggtccctggagtctagactggacctaggagcttgagttgtcaggggccaggactggccccactgcagtgcccaggccagtcttgagcagcagggagggctcagctgtccccagatccaggtgcctctgaccagcctggtcacctcctgaggaataaatgctgaacctcacaagccccatcattcatttcttctcaattcacagtgcccctctttgtttctggggtggaactaggtcctgagggcacagcctagctgagtgcaaagaaatataggatgcttagaaagcatacaggaggggccaggcgtggtggctcatgcctgtaatcccagaactttgggatgccaaggtggttggattacctgagatcaggtggattacctggtctcgagaccagcctgaccaatatggtgaaaccccgtctctactaaaaatacaaaaattaggctgagacaggagaattgcttgaacccaggaagcagaggttgcaatgagctgagattgcatcactgcactccagcatgggcaacaaagcaagactccgtcac

SEQ ID NO: 226099 - DNA, 5393 bp, Artificial Sequence
  derived and/or modified sequence
gatgacttggagaacagtcacttcctctttctgggctacagttttctcatcagtaactgaagagcttgcagtaccttcaacattccttcaggtgaggacttctctttgatcactgctatggtttgaatgtgtctcctaaagttcatgtgttggaagcttgatccccagtgcaaaagtgttgggaggtggggcctaatgagaagtaattaggccatgagtattctgccctcatgtattcatgagattaatgtcattatcatgggagcgggtttgttaaaatgagttcggccccttccttctctctctttcttctgccatacagtatgggatgcacagtgcagaaggtcttaccagatactggcaccatgcttttggacttctcagcccccagaaccatgagccaaataaatttctgttcattataaatcacccagtctgtggcatcctgttagagcagcataaatggactaagataatccctataaagagtggcaacagaacagttcccagctcactggcagaatcctatgatcaactagtaatgtctgccagggaaggaggatgagtggcactaacatgtacggtgtgtttgctcactgttctacaggattcaactagaatctctgggtctgtgtgaagaccaagagctgggaacagaagcagggctctagagggaaaagtttctttcggattccttttttttgttttgttttaaagagctgctctgtgagaagacaaggagaaaatggtccctacaggatactcacctctgtctcagggagacactcaagcatttattcaaccaagaaagagaattagttccaggtgaaaggagaaccccagaatacccacctacttttaaaattctcccctatgcatattcaggaaccaatcagaggatctgtaatgcgctgtgagtagaaagggaaggggaatgggaaagaaaaaagtgaagcttggaatggtggaaagtacatgggctctgccatttaccagctaagtgatcttgggcaagtaacttgacctttctgagcctcggtttcctctttggtgaaatgaggactaataatccatttctccctcagtacagacagccagcatgcagtgagcactcagcgatggccaagtatgggagaagccatgctggaatgaacatgtgggaccattttgtgcagtttctcagcgccaacactgactggtcccctgggctcgtgggccgccggcagcctcggctcgttctccagacagtgttccaagaagccacttccagcgaggaagcgttggcctgagaactggaacctctgcggtctctgcaaacacgacaatgacaaacacttgagagggcatgggagaaaggagctccttcatagggcagggaggggtgggcacttgggtgtgaccaaggagaggaggcgcgcctggtcaacagctctccctggcccgtgtccagctccctcctcacacagagaggggggcgcatctcagggatggcatctttcccccccacagggaaattcttatctttgaaacagcatgggaatcgaggcacccaggaggggagcagaggcaggcaggcctccttcaggcccatcctccagctgggctggtggtgccagggaggctccctgcttggtaacaaaggcctgagggagagttgcgaaacccagcaggaaagccggctcaccttcgcctccccctgcggctgggaggagaggaaatatcccatggctgactgtgccaaggaggtgtctgagccagccctcccggcccgagggcagggcaggtggccctgagagataagccaatcccgcagctgcagatgaggagttctgagaagcattgctcaggacagcggtaaatcacttcttggaggtgccctgcacgccggtcctgggagcaggcggcctcccgggggtgcgggagccccactcctccgtggtgtgttccatttgcttcccacatctggaggagctgacgtgccagcctcccccagcaccacccagggacgggaggcatgagccggtcaaggcacctgggcaaaatccggaagcgtctggaagatgtcaagagccagtgggtccggccagccagggctgactttagtgacaacgagagtgcccggctggccacggacgccctcttggatgggggttctgaagcctactggcgggtgctcagccaggaaggcgaggtggacttcttgtcctcggtggaggcccagtacatccaggcccaggccagggagcccccgtgtcccccagacaccctgggaggggcggaagcaggccctaagggactggactccagctccctacagtccggcacctacttccctgtggcctcagagggcagcgagccggccctactgcacagctgggcctcagctgagaagccctacctgaaggaaaaatccagcgccactgtgtacttccagaccgtcaagcacaacaacatcagagacctcgtccgccgctgcatcacccggactagccaggtcctggtcatcctgatggatgtgttcacggatgtggagatcttctgtgacattctagaggcagccaacaagcgtggggtgttcgtttgtgtgctcctggaccagggaggtgtgaagctcttccaggagatgtgtgacaaagtccagatctctgacagtcacctcaagaacatttccatccggagtgtggaaggagagatatactgtgccaagtcaggcaggaaattcgctggccaaatccgggagaagttcatcatctcggactggagatttgtcctgtctggatcttacagcttcacctggctctgcggacacgtgcaccggaacatcctctccaagttcacaggccaggcggtggagctgtttgacgaggagttccgccacctctacgcctcctccaagcctgtgatgggcctgaagtccccgcggctggtcgcccccgtcccgcccggagcagccccggccaatggccgccttagcagcagcagtggctccgccagtgaccgcacgtcctccaaccccttcagcggccgctcggcaggcagccaccccggtacccgaagtgtgtccgcgtcttcagggccctgtagccccgcggccccacacccgcctccaccgccccggttccagccccaccaaggcccttggggagccccgagtccccaggcccacctctccccgcggccccacgacggcccgcccgccgctgtctacagcaacctgggggcctacaggcccacgcggctgcagctggagcagctgggcctggtgccgaggctgactccaacctggaggcccttcctgcaggcctcccctcacttctgaaggtcccatcccctgctgccctccgcaggcccagggctgggcactccctgagacccaaagacccacctcaacgacgagtggcgttgagccacttccctttgaaaagacactcaaaatcactgccatggttcaatgttcccaggccccaggccatccacttgccggcccccaccagttcttgggttccccgctctagtttgacctgtgcagcacattccagaaggttccagggaggttgtggggcagctagaggacaaaatcatgaaaacagagtccctgtcttccagagatcatccggggctttaatattaatggcccccaaaactccgtaagaagcaggaaatgcagcccaagttttacaaatgggtaaacagaggcactgagagatagatggtagtttggtacttctggttcccagtgcccaggaatggtccactcccaagaaattcaggaaagaaagactgaggagaaggtgtgggaacattctggatgtttcgggagagttggggaaactcctcctcttaggaaaggctaatactagggtatccttgggcccaatgaattaggggtgaggccccagaacccgttatctatgagttgtatgggggagccatctgaagctgtagccaccagggatgcagctagctgaggagtttggggtgttgggttggacaaggcaggttagtagactcagattcttgcttcaaagagccttgggctggcctggaggtccctggagtctagactggacctaggagcttgagttgtcaggggccaggactggccccactgcagtgcccaggccagtcttgagcagcagggagggctcagctgtccccagatccaggtgcctctgaccagcctggtcacctcctgaggaataaatgctgaacctcacaagccccatcattcatttcttctcaattcacagtgcccctctttgtttctggggtggaactaggtcctgagggcacagcctagctgagtgcaaagaaatataggatgcttagaaagcatacaggaggggccaggcgtggtggctcatgcctgtaatcccagaactttgggatgccaaggtggttggattacctgagatcaggtggattacctggtctcgagaccagcctgaccaatatggtgaaaccccgtctctactaaaaatacaaaaattaggctgagacaggagaattgcttgaacccaggaagcagaggttgcaatgagctgagattgcatcactgcactccagcatgggcaacaaagcaagactccgtcacagaaaaaaaaaaaaaaaagagagagagcatagaggagggttggccagccctgtggtgggtgggatgtcagagacacttcccagataaagtaagagttaaccctgcacctcaggtgtgatagtggggtcagtggtatgtgatccaggctggggagccagaggggagcaggtgccaactccacatccttctcctgtttctaggccctctcctcccttgtcggtttttggcggggaagctcagccttcgctgtggagggacgagagcacagagctcttcctcctggtggcctctgacccctgacggcctgtggcatcctccctagtcccctctgcccatccatccctctgttccaattctccactgctcccagcatgatctggggcatcttggcttctggtttcttttattattattattattattaattattgtattcctgtccttcacttttttcctccttagttcctgaaagtaaacaaaacaaaacaaaaacaaaaaaacaaacaacactttggttcctgatggctttctgaacccagccctgaccttgttgtttcacagctgacggctgagatgaggttagaatgactgggcccggctgaacattccaaattggatttcaccatctgctgagaaagtttaaggaaggcaaagcttgccaggtcacagaagctcccaagcccagctttccaaaggcctcagcctgtgcctgtgtcgagctcagtcctgggagataggggagaacctgcaggcaggaacaagcccccctactcctgaccaccctccatcagcagtctcc

SEQ ID NO: 226100 - DNA, 1305 bp, Artificial Sequence
  derived and/or modified sequence
atgagccgcagccgccacctgggcaagatcaggaagaggctggaggatgtgaagagccagtgggtgcggcctgcccgggctgacttcagtgacaatgaaagtgcccggctggccacagatgccctgctggatggcggcagcgaggcctactggagggtgctgagccaggagggggaggtggacttcctgagctctgtggaggcccagtacatccaggcccaggcccgggagcccccctgccccccagacaccctgggcggcgctgaggccggccccaagggcctggacagcagcagcctgcagagcggcacctacttccctgtggccagcgagggcagcgagcccgccctgctgcacagctgggccagcgctgagaagccctacctgaaggagaagagcagcgccaccgtgtacttccagacagtgaagcacaacaacatccgggacctggtgcggcgctgcatcaccaggaccagccaggtgctggtgatcctgatggatgtgttcacagatgtggagatcttctgtgacatcctggaggccgccaacaagaggggcgtgtttgtgtgtgtgctgctggaccagggcggcgtgaagctgttccaggagatgtgtgacaaggtgcagatcagtgacagccacctgaagaacatcagcatccgctctgtggagggggagatctactgtgccaagagcggcaggaagtttgctggccagatccgggagaagttcatcatcagtgactggaggtttgtgctgagcggcagctacagcttcacctggctgtgtggccacgtgcacaggaacatcctgagcaagttcaccggccaggccgtggagctgtttgatgaggagttccgccacctgtatgccagcagcaagcctgtgatgggcctgaagagcccccggctggtggcccctgtgcccccaggggccgccccagccaacggccgcctgagcagcagcagcggcagcgccagtgacaggaccagcagcaaccccttcagcggccgctctgctggcagccaccctggcaccaggtctgtgtctgccagcagcggcccctgcagccctgctgccccccaccccccacctccaccccgcttccagccccaccagggcccctggggcgcccccagcccccaggcccacctgagcccccggccccatgatggccccccagctgctgtgtacagcaacctgggcgcctaccggcccacccggctgcagctggagcagctgggcctggtgccccggctgacccccacctggaggcccttcctgcaggccagcccccacttctag

SEQ ID NO: 226101 - DNA, 1305 bp, Artificial Sequence
  derived and/or modified sequence
atgagccggagccggcacctgggcaagatccggaagcggctggaggatgtcaaaagtcaatgggtgcggccagcacgggctgacttcagcgacaacgagagtgcaaggctggccacggacgctttgctggacggcggaagcgaggcgtactggagggtgctgagtcaagagggggaggtggattttctgtcttcggttgaagcgcagtacatacaggctcaggcccgggagccgccttgtccgccagacacccttggaggcgccgaggccggtccaaaaggcctggactcatccagccttcagagcggaacctattttccagtggcatccgaaggctccgaacctgctctgctccatagttgggcgagcgcggaaaaaccctatctgaaagaaaaatcttctgcaaccgtgtacttccagacagtgaaacataacaacatcagagacttagtccggaggtgcattacacgcacctcgcaggtgctggtgatcctcatggacgtctttacagacgtcgagatattttgcgatattctcgaggctgccaataagagaggagtctttgtgtgtgtactccttgaccagggcggcgtaaagctgttccaggagatgtgcgacaaagtgcagatttccgactcccatctaaaaaatatcagtatccgtagtgtcgagggtgagatttactgtgccaaaagcggacggaaattcgccggccagattagggagaagttcatcataagcgattggcgtttcgtgctgtctggttcgtattccttcacatggctgtgcggccacgttcatcgcaacatactgtctaaattcactggccaggcggtggaactttttgacgaggagtttcgacatctgtatgccagtagcaaacctgtcatgggtcttaaatcaccccgactcgtggccccagttcctccaggtgcagcccctgctaatgggagactatctagttctagcgggtccgcatccgaccgaacaagtagtaaccctttctcagggcgaagcgccggatcccaccctggaaccaggtccgtgtctgctagcagcggcccatgttcccctgctgcaccccacccccccccacccccgagattccaacctcaccagggaccatggggcgcgccatccccacaggctcacttgtctccacgaccacacgacgggcccccagcagcagtgtacagtaacttaggggcgtatcgccccaccaggctgcagcttgaacagttaggccttgtaccccgtttgaccccaacttggcgacctttccttcaggcttctccccacttctag

SEQ ID NO: 226102 - DNA, 1305 bp, Artificial Sequence
  derived and/or modified sequence
atgagccggagccggcacctgggcaagatccggaagcggctggaggatgtaaagtcccaatgggtgcggcccgcccgtgcagacttctctgataatgaaagcgcaaggctggcaacagacgcgttactggacggtggctcagaggcttactggcgtgttttgtcacaagagggggaggtcgacttcttgtcttcagtggaagcgcagtatatccaagcacaggcccgtgaacccccctgccctcctgacacactcgggggtgcagaagcgggaccaaaaggactcgactcatctagcctacagagtggcacttatttccccgtggcatccgaaggttccgagccagccttattacattcatgggccagcgccgagaaaccttatctgaaggagaagagctctgcaaccgtgtatttccagaccgttaaacataataatatccgggatctcgtgcgaagatgcattacccgcacctctcaggtcctggttattctgatggatgtctttaccgacgtagagattttctgtgacattctggaggccgctaacaaacggggcgtgtttgtgtgtgtgcttctggatcaaggaggggttaaattgttccaggagatgtgcgataaagttcagatctcagatagccacctaaaaaatatttcaattagaagtgtggagggcgagatctactgcgctaagtccgggcgaaagttcgcaggccagattcgggagaaattcatcatttcggattggcggtttgtgctgagcggatcctatagttttacttggctctgcggccacgtgcatcggaacatcctctccaagtttaccggtcaggctgtggaactctttgacgaagaattcagacatctttatgctagtagcaagccagtcatggggctgaaatcacccaggctggtcgccccagtgccccctggcgcagcacctgcgaatgggcggctttcgtcgagctccggaagcgccagcgaccgtacctcttctaacccattctctggacggtctgctggcagtcatcctggtactcggtccgtgtccgcgtcaagcggcccatgttcacctgcagcaccccatcccccgccaccaccccggtttcaaccacaccagggcccctggggggcacctagccctcaggcccatttaagcccacggccccacgacggaccaccggccgctgtgtactccaatttgggagcctatagacccacacggttacagctggaacagctgggtctggtcccccgcctgaccccgacctggagaccgttcctgcaagcatcccctcacttctag

SEQ ID NO: 226103 - DNA, 1305 bp, Artificial Sequence
  derived and/or modified sequence
atgagccgatctaggcatctgggcaaaattaggaaaagattggaggatgtcaaatcccagtgggtcagacctgctcgagcagacttctcagataacgagtcagcccgtctggccaccgatgcactgttggacggcggatccgaagcatactggcgggtgctttcgcaggagggggaggtagatttcctcagctccgttgaggcccagtatatccaggcccaggctcgggaaccaccctgtcctcctgacacattaggtggtgccgaagctgggcctaaaggcctcgatagctcatcactccagtctgggacatacttccccgtcgccagtgaaggatctgagccggctttgttacattcttgggcttcagcagaaaagccctatctcaaggagaagtcttccgcaaccgtctatttccaaacagtcaagcataataacatccgcgacctggttcgaagatgcatcacacggaccagtcaggtgcttgtgatcctgatggacgtctttaccgacgttgaaatcttttgtgacattttggaagccgctaacaaacgaggagtgttcgtctgcgtgctgctggaccagggaggagtgaagctgtttcaggaaatgtgcgataaggttcagatttcggacagccacctcaagaacatctcaatcagatccgtcgaaggcgaaatctattgcgccaagtcaggcagaaagttcgccggacaaattagagagaaattcattatatcagactggcgcttcgtcctgtctggttcgtactccttcacttggctatgtgggcatgttcaccggaacatcctgagtaaattcactggccaggctgtcgaactattcgatgaagagttccggcacttatatgcgagcagtaagccagtcatgggattaaagagtccacgcttagtggctcccgtcccccctggtgcggctccggctaatgggcgtttgtccagcagcagtggctcagccagcgatagaacttcatcaaaccctttctcaggacggagcgccggttcccatcccggtacccgaagcgtgtccgcaagttctggcccttgctctcccgctgccccacatccaccccctccgccacgatttcaaccccaccaggggccttggggggctccaagccctcaggcccatttatccccccgtccgcacgatggtccccctgcagctgtgtacagtaacctgggagcttaccggcctaccaggctccaactcgagcaactggggctggtgcccaggctcacgcctacatggcgtcctttcctgcaggccagcccccacttctag

SEQ ID NO: 226104 - DNA, 1305 bp, Artificial Sequence
  derived and/or modified sequence
atgagtcgctcgcggcatctcggaaaaatcaggaaacgcctagaagacgtgaagagccaatgggtgcggccagcaagggctgatttctccgacaacgagagtgcccgtcttgctaccgacgcacttcttgatggaggctccgaggcttattggagagtcctgtcccaagagggtgaggtggacttcctttcttctgtcgaggcccagtacattcaagcccaggctagggagccaccgtgccccccagacacactcggcggtgccgaggccggacccaagggacttgattcaagcagcctgcagtctggtacctactttccggtggcctcagaggggtcagaacccgctctgctgcattcctgggcctccgcagagaagccatacttgaaggagaagtcatccgcaactgtgtactttcagacggtgaaacacaacaacataagagatctggtgcggcgatgtataacaagaacttcacaagtgctggtgatccttatggatgtgttcacagacgtggagatcttctgcgacatcctcgaggccgctaataaacgcggtgtgtttgtctgtgtacttctggatcagggtggagtaaagctctttcaggaaatgtgcgataaagtgcagatttccgactctcacctgaaaaatatctctattaggtccgttgagggtgaaatatattgcgctaagtctgggagaaaatttgccggacagattcgagaaaagttcatcatttctgactggagatttgtcctatccggtagctacagttttacctggctctgcggccacgtgcatcggaacatactgtctaagtttaccggtcaggcagtggagctctttgatgaagaattcagacacttatacgcctcctccaaacccgttatgggattgaaatccccacgattggttgccccagtgcctccaggcgctgccccagccaatggtcggcttagttccagttccggttcggcctccgaccgtactagctccaatccattctcagggcgatctgcgggttctcaccctggaacccgctccgtgagtgcatcttccggcccttgtagccccgctgcaccacacccacccccacctcccagattccagcctcatcaaggaccttggggtgcaccttccccccaggcccacttgtccccaaggccacatgacggtccacccgcagcggtctactcaaatctcggagcgtatcgaccaacaagacttcaactggaacagctcggcctggtgcctaggttaacccccacatggagaccctttctccaggcctccccgcatttctag

SEQ ID NO: 226105 - protein, 199 aa, Artificial Sequence
  derived and/or modified sequence
MAKSAEVKLAIFGRAGVGKSALVVRFLTKRFIWEYDPTLESTYRHQATIDDEVVSMEILDTAGQEDTIQREGHMRWGEGFVLVYDITDRGSFEEVLPLKNILDEIKKPKNVTLILVGNKADLDHSRQVSTEEGEKLATELACAFYECSACTGEGNITEIFYELCREVRRRRMVQGKTRRRSSTTHVKQAINKMLTKISS

SEQ ID NO: 226106 - protein, 39 aa, Artificial Sequence
  derived and/or modified sequence
MAKSAEVKLAIFGRAGVGKSALVVRFLTKRFIWEYDPTL
